United States Patent Application Publication US 2014/0004565 A1 - sequence listing, part 112

SEQ ID NO: 2800655 - RNA, 19 nt, Artificial Sequence
  Description of Artificial Sequence: Synthetic oligonucleotide
gccacaagucugcacauuc

SEQ ID NO: 2800656 - RNA, 19 nt, Artificial Sequence
  Description of Artificial Sequence: Synthetic oligonucleotide
gagccuuucaucucgccuu

SEQ ID NO: 2800657 - RNA, 19 nt, Artificial Sequence
  Description of Artificial Sequence: Synthetic oligonucleotide
cuggaccugugauagcaga

SEQ ID NO: 2800658 - RNA, 19 nt, Artificial Sequence
  Description of Artificial Sequence: Synthetic oligonucleotide
gaugcaauccugggccaca

SEQ ID NO: 2800659 - RNA, 19 nt, Artificial Sequence
  Description of Artificial Sequence: Synthetic oligonucleotide
augaccccugcauugucuu

SEQ ID NO: 2800660 - RNA, 19 nt, Artificial Sequence
  Description of Artificial Sequence: Synthetic oligonucleotide
gacaucuuggacgcccgga

SEQ ID NO: 2800661 - RNA, 19 nt, Artificial Sequence
  Description of Artificial Sequence: Synthetic oligonucleotide
guuugccuuucuuaacugu

SEQ ID NO: 2800662 - RNA, 19 nt, Artificial Sequence
  Description of Artificial Sequence: Synthetic oligonucleotide
ggcaccuguauugucagca

SEQ ID NO: 2800663 - RNA, 19 nt, Artificial Sequence
  Description of Artificial Sequence: Synthetic oligonucleotide
gacccagggaaauccggaa

SEQ ID NO: 2800664 - RNA, 19 nt, Artificial Sequence
  Description of Artificial Sequence: Synthetic oligonucleotide
acguccucgcuucgacauc

SEQ ID NO: 2800665 - RNA, 19 nt, Artificial Sequence
  Description of Artificial Sequence: Synthetic oligonucleotide
uagcagagccuuucaucuc

SEQ ID NO: 2800666 - RNA, 19 nt, Artificial Sequence
  Description of Artificial Sequence: Synthetic oligonucleotide
caagucugcacauucuuuu

SEQ ID NO: 2800667 - RNA, 19 nt, Artificial Sequence
  Description of Artificial Sequence: Synthetic oligonucleotide
uggccucagagauccgccu

SEQ ID NO: 2800668 - RNA, 19 nt, Artificial Sequence
  Description of Artificial Sequence: Synthetic oligonucleotide
augucgcccacgccagcag

SEQ ID NO: 2800669 - RNA, 19 nt, Artificial Sequence
  Description of Artificial Sequence: Synthetic oligonucleotide
gacgcccggaaagaaguca

SEQ ID NO: 2800670 - RNA, 19 nt, Artificial Sequence
  Description of Artificial Sequence: Synthetic oligonucleotide
cagagccuuucaucucgcc

SEQ ID NO: 2800671 - RNA, 19 nt, Artificial Sequence
  Description of Artificial Sequence: Synthetic oligonucleotide
cuaugaccccugcauuguc

SEQ ID NO: 2800672 - RNA, 19 nt, Artificial Sequence
  Description of Artificial Sequence: Synthetic oligonucleotide
ggacccaccacguccucgc

SEQ ID NO: 2800673 - RNA, 19 nt, Artificial Sequence
  Description of Artificial Sequence: Synthetic oligonucleotide
agacccagggaaauccgga

SEQ ID NO: 2800674 - RNA, 19 nt, Artificial Sequence
  Description of Artificial Sequence: Synthetic oligonucleotide
aggacccaccacguccucg

SEQ ID NO: 2800675 - RNA, 19 nt, Artificial Sequence
  Description of Artificial Sequence: Synthetic oligonucleotide
cacuggagaaucaugcaau

SEQ ID NO: 2800676 - RNA, 19 nt, Artificial Sequence
  Description of Artificial Sequence: Synthetic oligonucleotide
accaugucgcccacgccag

SEQ ID NO: 2800677 - RNA, 19 nt, Artificial Sequence
  Description of Artificial Sequence: Synthetic oligonucleotide
gccagcagcaggaagucug

SEQ ID NO: 2800678 - RNA, 19 nt, Artificial Sequence
  Description of Artificial Sequence: Synthetic oligonucleotide
acaagucugcacauucuuu

SEQ ID NO: 2800679 - RNA, 19 nt, Artificial Sequence
  Description of Artificial Sequence: Synthetic oligonucleotide
uaacuguggccaucaccau

SEQ ID NO: 2800680 - RNA, 19 nt, Artificial Sequence
  Description of Artificial Sequence: Synthetic oligonucleotide
caacuggaccugugauagc

SEQ ID NO: 2800681 - RNA, 19 nt, Artificial Sequence
  Description of Artificial Sequence: Synthetic oligonucleotide
cagcacaguugaucacagc

SEQ ID NO: 2800682 - RNA, 19 nt, Artificial Sequence
  Description of Artificial Sequence: Synthetic oligonucleotide
ggaaauccggaauuucgcu

SEQ ID NO: 2800683 - RNA, 19 nt, Artificial Sequence
  Description of Artificial Sequence: Synthetic oligonucleotide
acuggaccugugauagcag

SEQ ID NO: 2800684 - RNA, 19 nt, Artificial Sequence
  Description of Artificial Sequence: Synthetic oligonucleotide
caccuguauugucagcaca

SEQ ID NO: 2800685 - RNA, 19 nt, Artificial Sequence
  Description of Artificial Sequence: Synthetic oligonucleotide
accccaucuuuucuucgau

SEQ ID NO: 2800686 - RNA, 19 nt, Artificial Sequence
  Description of Artificial Sequence: Synthetic oligonucleotide
gaugcccuucacagagaug

SEQ ID NO: 2800687 - RNA, 19 nt, Artificial Sequence
  Description of Artificial Sequence: Synthetic oligonucleotide
uuccuuaguucggguuugc

SEQ ID NO: 2800688 - RNA, 19 nt, Artificial Sequence
  Description of Artificial Sequence: Synthetic oligonucleotide
cagggaaauccggaauuuc

SEQ ID NO: 2800689 - RNA, 19 nt, Artificial Sequence
  Description of Artificial Sequence: Synthetic oligonucleotide
ggagacccagggaaauccg

SEQ ID NO: 2800690 - RNA, 19 nt, Artificial Sequence
  Description of Artificial Sequence: Synthetic oligonucleotide
ccucccauuuaauugaaua

SEQ ID NO: 2800691 - RNA, 19 nt, Artificial Sequence
  Description of Artificial Sequence: Synthetic oligonucleotide
ggguuugccuuucuuaacu

SEQ ID NO: 2800692 - RNA, 19 nt, Artificial Sequence
  Description of Artificial Sequence: Synthetic oligonucleotide
aguucggguuugccuuucu

SEQ ID NO: 2800693 - RNA, 19 nt, Artificial Sequence
  Description of Artificial Sequence: Synthetic oligonucleotide
auccugggccacaagucug

SEQ ID NO: 2800694 - RNA, 19 nt, Artificial Sequence
  Description of Artificial Sequence: Synthetic oligonucleotide
uggcaccuguauugucagc

SEQ ID NO: 2800695 - RNA, 19 nt, Artificial Sequence
  Description of Artificial Sequence: Synthetic oligonucleotide
caccccaucuuuucuucga

SEQ ID NO: 2800696 - RNA, 19 nt, Artificial Sequence
  Description of Artificial Sequence: Synthetic oligonucleotide
gaauuucgcuccggaggac

SEQ ID NO: 2800697 - RNA, 19 nt, Artificial Sequence
  Description of Artificial Sequence: Synthetic oligonucleotide
accugugauagcagagccu

SEQ ID NO: 2800698 - RNA, 19 nt, Artificial Sequence
  Description of Artificial Sequence: Synthetic oligonucleotide
cugggccacaagucugcac

SEQ ID NO: 2800699 - RNA, 19 nt, Artificial Sequence
  Description of Artificial Sequence: Synthetic oligonucleotide
cguugucgaauuaccacug

SEQ ID NO: 2800700 - RNA, 19 nt, Artificial Sequence
  Description of Artificial Sequence: Synthetic oligonucleotide
uucgcuccggaggacccac

SEQ ID NO: 2800701 - RNA, 19 nt, Artificial Sequence
  Description of Artificial Sequence: Synthetic oligonucleotide
cuucgauacgacuuucguu

SEQ ID NO: 2800702 - RNA, 19 nt, Artificial Sequence
  Description of Artificial Sequence: Synthetic oligonucleotide
cugcauuggaugcaauccu

SEQ ID NO: 2800703 - RNA, 19 nt, Artificial Sequence
  Description of Artificial Sequence: Synthetic oligonucleotide
cacagcuccaacggggaga

SEQ ID NO: 2800704 - RNA, 19 nt, Artificial Sequence
  Description of Artificial Sequence: Synthetic oligonucleotide
gcaauccugggccacaagu

SEQ ID NO: 2800705 - RNA, 19 nt, Artificial Sequence
  Description of Artificial Sequence: Synthetic oligonucleotide
ugaccccugcauugucuuc

SEQ ID NO: 2800706 - RNA, 19 nt, Artificial Sequence
  Description of Artificial Sequence: Synthetic oligonucleotide
uuucgcuccggaggaccca

SEQ ID NO: 2800707 - RNA, 19 nt, Artificial Sequence
  Description of Artificial Sequence: Synthetic oligonucleotide
cccugcauugucuucaaaa

SEQ ID NO: 2800708 - RNA, 19 nt, Artificial Sequence
  Description of Artificial Sequence: Synthetic oligonucleotide
auccggaauuucgcuccgg

SEQ ID NO: 2800709 - RNA, 19 nt, Artificial Sequence
  Description of Artificial Sequence: Synthetic oligonucleotide
gcacauucuuuugcaacug

SEQ ID NO: 2800710 - RNA, 19 nt, Artificial Sequence
  Description of Artificial Sequence: Synthetic oligonucleotide
acaguugaucacagcucca

SEQ ID NO: 2800711 - RNA, 19 nt, Artificial Sequence
  Description of Artificial Sequence: Synthetic oligonucleotide
ucaucucgccuuuguuguu

SEQ ID NO: 2800712 - RNA, 19 nt, Artificial Sequence
  Description of Artificial Sequence: Synthetic oligonucleotide
agccuuucaucucgccuuu

SEQ ID NO: 2800713 - RNA, 19 nt, Artificial Sequence
  Description of Artificial Sequence: Synthetic oligonucleotide
caguugaucacagcuccaa

SEQ ID NO: 2800714 - RNA, 19 nt, Artificial Sequence
  Description of Artificial Sequence: Synthetic oligonucleotide
gccugcauuggaugcaauc

SEQ ID NO: 2800715 - RNA, 19 nt, Artificial Sequence
  Description of Artificial Sequence: Synthetic oligonucleotide
gacuuucguugucgaauua

SEQ ID NO: 2800716 - RNA, 19 nt, Artificial Sequence
  Description of Artificial Sequence: Synthetic oligonucleotide
aucucgccuuuguuguuua

SEQ ID NO: 2800717 - RNA, 19 nt, Artificial Sequence
  Description of Artificial Sequence: Synthetic oligonucleotide
cggaggacccaccacgucc

SEQ ID NO: 2800718 - RNA, 19 nt, Artificial Sequence
  Description of Artificial Sequence: Synthetic oligonucleotide
ugcccuucacagagaugau

SEQ ID NO: 2800719 - RNA, 19 nt, Artificial Sequence
  Description of Artificial Sequence: Synthetic oligonucleotide
cccauuuaauugaauauau

SEQ ID NO: 2800720 - RNA, 19 nt, Artificial Sequence
  Description of Artificial Sequence: Synthetic oligonucleotide
gcacaguugaucacagcuc

SEQ ID NO: 2800721 - RNA, 19 nt, Artificial Sequence
  Description of Artificial Sequence: Synthetic oligonucleotide
ccggaauuucgcuccggag

SEQ ID NO: 2800722 - RNA, 19 nt, Artificial Sequence
  Description of Artificial Sequence: Synthetic oligonucleotide
gcaaugcugccugcauugg

SEQ ID NO: 2800723 - RNA, 19 nt, Artificial Sequence
  Description of Artificial Sequence: Synthetic oligonucleotide
gucccuugaugcccuucac

SEQ ID NO: 2800724 - RNA, 19 nt, Artificial Sequence
  Description of Artificial Sequence: Synthetic oligonucleotide
caucaccaugucgcccacg

SEQ ID NO: 2800725 - RNA, 19 nt, Artificial Sequence
  Description of Artificial Sequence: Synthetic oligonucleotide
ucgcccacgccagcagcag

SEQ ID NO: 2800726 - RNA, 19 nt, Artificial Sequence
  Description of Artificial Sequence: Synthetic oligonucleotide
gcuggccucagagauccgc

SEQ ID NO: 2800727 - RNA, 19 nt, Artificial Sequence
  Description of Artificial Sequence: Synthetic oligonucleotide
caugucgcccacgccagca

SEQ ID NO: 2800728 - RNA, 19 nt, Artificial Sequence
  Description of Artificial Sequence: Synthetic oligonucleotide
cccaccacguccucgcuuc

SEQ ID NO: 2800729 - RNA, 19 nt, Artificial Sequence
  Description of Artificial Sequence: Synthetic oligonucleotide
gcaccuguauugucagcac

SEQ ID NO: 2800730 - RNA, 19 nt, Artificial Sequence
  Description of Artificial Sequence: Synthetic oligonucleotide
cagagaugauauacaaauu

SEQ ID NO: 2800731 - RNA, 19 nt, Artificial Sequence
  Description of Artificial Sequence: Synthetic oligonucleotide
agucgucccuugaugcccu

SEQ ID NO: 2800732 - RNA, 19 nt, Artificial Sequence
  Description of Artificial Sequence: Synthetic oligonucleotide
caucuuggacgcccggaaa

SEQ ID NO: 2800733 - RNA, 19 nt, Artificial Sequence
  Description of Artificial Sequence: Synthetic oligonucleotide
cuguauugucagcacaguu

SEQ ID NO: 2800734 - RNA, 19 nt, Artificial Sequence
  Description of Artificial Sequence: Synthetic oligonucleotide
cuccaacggggagacccag

SEQ ID NO: 2800735 - RNA, 19 nt, Artificial Sequence
  Description of Artificial Sequence: Synthetic oligonucleotide
acgcccggaaagaagucaa

SEQ ID NO: 2800736 - RNA, 19 nt, Artificial Sequence
  Description of Artificial Sequence: Synthetic oligonucleotide
cacguccucgcuucgacau

SEQ ID NO: 2800737 - RNA, 19 nt, Artificial Sequence
  Description of Artificial Sequence: Synthetic oligonucleotide
cacaagucugcacauucuu

SEQ ID NO: 2800738 - RNA, 19 nt, Artificial Sequence
  Description of Artificial Sequence: Synthetic oligonucleotide
cuguucagucgucccuuga

SEQ ID NO: 2800739 - RNA, 19 nt, Artificial Sequence
  Description of Artificial Sequence: Synthetic oligonucleotide
ucgcuccggaggacccacc

SEQ ID NO: 2800740 - RNA, 19 nt, Artificial Sequence
  Description of Artificial Sequence: Synthetic oligonucleotide
ugccugcauuggaugcaau

SEQ ID NO: 2800741 - RNA, 19 nt, Artificial Sequence
  Description of Artificial Sequence: Synthetic oligonucleotide
cccuucacagagaugauau

SEQ ID NO: 2800742 - RNA, 19 nt, Artificial Sequence
  Description of Artificial Sequence: Synthetic oligonucleotide
caugcaaugcugccugcau

SEQ ID NO: 2800743 - RNA, 19 nt, Artificial Sequence
  Description of Artificial Sequence: Synthetic oligonucleotide
gcauugucuucaaaauaaa

SEQ ID NO: 2800744 - RNA, 19 nt, Artificial Sequence
  Description of Artificial Sequence: Synthetic oligonucleotide
cuuggacgcccggaaagaa

SEQ ID NO: 2800745 - RNA, 19 nt, Artificial Sequence
  Description of Artificial Sequence: Synthetic oligonucleotide
cuuucaucucgccuuuguu

SEQ ID NO: 2800746 - RNA, 19 nt, Artificial Sequence
  Description of Artificial Sequence: Synthetic oligonucleotide
augcaauccugggccacaa

SEQ ID NO: 2800747 - RNA, 19 nt, Artificial Sequence
  Description of Artificial Sequence: Synthetic oligonucleotide
accccugcauugucuucaa

SEQ ID NO: 2800748 - RNA, 19 nt, Artificial Sequence
  Description of Artificial Sequence: Synthetic oligonucleotide
ccgccucccauuuaauuga

SEQ ID NO: 2800749 - RNA, 19 nt, Artificial Sequence
  Description of Artificial Sequence: Synthetic oligonucleotide
ccuuaguucggguuugccu

SEQ ID NO: 2800750 - RNA, 19 nt, Artificial Sequence
  Description of Artificial Sequence: Synthetic oligonucleotide
acccaccacguccucgcuu

SEQ ID NO: 2800751 - RNA, 19 nt, Artificial Sequence
  Description of Artificial Sequence: Synthetic oligonucleotide
cucgccuuuguuguuuacu

SEQ ID NO: 2800752 - RNA, 19 nt, Artificial Sequence
  Description of Artificial Sequence: Synthetic oligonucleotide
cuucgacaucuuggacgcc

SEQ ID NO: 2800753 - RNA, 19 nt, Artificial Sequence
  Description of Artificial Sequence: Synthetic oligonucleotide
ggaugcaauccugggccac

SEQ ID NO: 2800754 - RNA, 19 nt, Artificial Sequence
  Description of Artificial Sequence: Synthetic oligonucleotide
gucgcccacgccagcagca

SEQ ID NO: 2800755 - RNA, 19 nt, Artificial Sequence
  Description of Artificial Sequence: Synthetic oligonucleotide
caacggggagacccaggga

SEQ ID NO: 2800756 - RNA, 19 nt, Artificial Sequence
  Description of Artificial Sequence: Synthetic oligonucleotide
ucgucccuugaugcccuuc

SEQ ID NO: 2800757 - RNA, 19 nt, Artificial Sequence
  Description of Artificial Sequence: Synthetic oligonucleotide
ggaagucuguucagucguc

SEQ ID NO: 2800758 - RNA, 19 nt, Artificial Sequence
  Description of Artificial Sequence: Synthetic oligonucleotide
gaggacccaccacguccuc

SEQ ID NO: 2800759 - RNA, 19 nt, Artificial Sequence
  Description of Artificial Sequence: Synthetic oligonucleotide
ccuugaugcccuucacaga

SEQ ID NO: 2800760 - RNA, 19 nt, Artificial Sequence
  Description of Artificial Sequence: Synthetic oligonucleotide
gccuccgccucccauuuaa

SEQ ID NO: 2800761 - RNA, 19 nt, Artificial Sequence
  Description of Artificial Sequence: Synthetic oligonucleotide
acugcuggauggaccuuuu

SEQ ID NO: 2800762 - RNA, 19 nt, Artificial Sequence
  Description of Artificial Sequence: Synthetic oligonucleotide
gcagagccuuucaucucgc

SEQ ID NO: 2800763 - RNA, 19 nt, Artificial Sequence
  Description of Artificial Sequence: Synthetic oligonucleotide
acggggagacccagggaaa

SEQ ID NO: 2800764 - RNA, 19 nt, Artificial Sequence
  Description of Artificial Sequence: Synthetic oligonucleotide
gcccggaaagaagucaaaa

SEQ ID NO: 2800765 - RNA, 19 nt, Artificial Sequence
  Description of Artificial Sequence: Synthetic oligonucleotide
ccauuuaauugaauauauu

SEQ ID NO: 2800766 - RNA, 19 nt, Artificial Sequence
  Description of Artificial Sequence: Synthetic oligonucleotide
cggguuugccuuucuuaac

SEQ ID NO: 2800767 - RNA, 19 nt, Artificial Sequence
  Description of Artificial Sequence: Synthetic oligonucleotide
cugccugcauuggaugcaa

SEQ ID NO: 2800768 - RNA, 19 nt, Artificial Sequence
  Description of Artificial Sequence: Synthetic oligonucleotide
gucuguucagucgucccuu

SEQ ID NO: 2800769 - RNA, 19 nt, Artificial Sequence
  Description of Artificial Sequence: Synthetic oligonucleotide
gcuccggaggacccaccac

SEQ ID NO: 2800770 - RNA, 19 nt, Artificial Sequence
  Description of Artificial Sequence: Synthetic oligonucleotide
ccacgccagcagcaggaag

SEQ ID NO: 2800771 - RNA, 19 nt, Artificial Sequence
  Description of Artificial Sequence: Synthetic oligonucleotide
cuuuugcaacuggaccugu

SEQ ID NO: 2800772 - RNA, 19 nt, Artificial Sequence
  Description of Artificial Sequence: Synthetic oligonucleotide
ugccuccgccucccauuua

SEQ ID NO: 2800773 - RNA, 19 nt, Artificial Sequence
  Description of Artificial Sequence: Synthetic oligonucleotide
ccugugauagcagagccuu

SEQ ID NO: 2800774 - RNA, 19 nt, Artificial Sequence
  Description of Artificial Sequence: Synthetic oligonucleotide
cuccgccucccauuuaauu

SEQ ID NO: 2800775 - RNA, 19 nt, Artificial Sequence
  Description of Artificial Sequence: Synthetic oligonucleotide
ggaggacccaccacguccu

SEQ ID NO: 2800776 - RNA, 19 nt, Artificial Sequence
  Description of Artificial Sequence: Synthetic oligonucleotide
cgaauuaccacugcuggau

SEQ ID NO: 2800777 - RNA, 19 nt, Artificial Sequence
  Description of Artificial Sequence: Synthetic oligonucleotide
cgauacgacuuucguuguc

SEQ ID NO: 2800778 - RNA, 19 nt, Artificial Sequence
  Description of Artificial Sequence: Synthetic oligonucleotide
gcccacgccagcagcagga

SEQ ID NO: 2800779 - RNA, 19 nt, Artificial Sequence
  Description of Artificial Sequence: Synthetic oligonucleotide
cgacaucuuggacgcccgg

SEQ ID NO: 2800780 - RNA, 19 nt, Artificial Sequence
  Description of Artificial Sequence: Synthetic oligonucleotide
ccuuucaucucgccuuugu

SEQ ID NO: 2800781 - RNA, 19 nt, Artificial Sequence
  Description of Artificial Sequence: Synthetic oligonucleotide
ccuucacagagaugauaua

SEQ ID NO: 2800782 - RNA, 19 nt, Artificial Sequence
  Description of Artificial Sequence: Synthetic oligonucleotide
cgucccuugaugcccuuca

SEQ ID NO: 2800783 - RNA, 19 nt, Artificial Sequence
  Description of Artificial Sequence: Synthetic oligonucleotide
ccaccacguccucgcuucg

SEQ ID NO: 2800784 - RNA, 19 nt, Artificial Sequence
  Description of Artificial Sequence: Synthetic oligonucleotide
caccacguccucgcuucga

SEQ ID NO: 2800785 - RNA, 19 nt, Artificial Sequence
  Description of Artificial Sequence: Synthetic oligonucleotide
gcccuucacagagaugaua

SEQ ID NO: 2800786 - RNA, 19 nt, Artificial Sequence
  Description of Artificial Sequence: Synthetic oligonucleotide
gcuccaacggggagaccca

SEQ ID NO: 2800787 - RNA, 19 nt, Artificial Sequence
  Description of Artificial Sequence: Synthetic oligonucleotide
gacccaccacguccucgcu

SEQ ID NO: 2800788 - RNA, 19 nt, Artificial Sequence
  Description of Artificial Sequence: Synthetic oligonucleotide
ggacgcccggaaagaaguc

SEQ ID NO: 2800789 - RNA, 19 nt, Artificial Sequence
  Description of Artificial Sequence: Synthetic oligonucleotide
ccaugucgcccacgccagc

SEQ ID NO: 2800790 - RNA, 19 nt, Artificial Sequence
  Description of Artificial Sequence: Synthetic oligonucleotide
cacugcuggauggaccuuu

SEQ ID NO: 2800791 - RNA, 19 nt, Artificial Sequence
  Description of Artificial Sequence: Synthetic oligonucleotide
cccagggaaauccggaauu

SEQ ID NO: 2800792 - RNA, 19 nt, Artificial Sequence
  Description of Artificial Sequence: Synthetic oligonucleotide
cugugauagcagagccuuu

SEQ ID NO: 2800793 - RNA, 19 nt, Artificial Sequence
  Description of Artificial Sequence: Synthetic oligonucleotide
gccuuucaucucgccuuug

SEQ ID NO: 2800794 - RNA, 19 nt, Artificial Sequence
  Description of Artificial Sequence: Synthetic oligonucleotide
ccacguccucgcuucgaca

SEQ ID NO: 2800795 - RNA, 19 nt, Artificial Sequence
  Description of Artificial Sequence: Synthetic oligonucleotide
ccccaucuuuucuucgaua

SEQ ID NO: 2800796 - RNA, 19 nt, Artificial Sequence
  Description of Artificial Sequence: Synthetic oligonucleotide
cagcuccaacggggagacc

SEQ ID NO: 2800797 - RNA, 19 nt, Artificial Sequence
  Description of Artificial Sequence: Synthetic oligonucleotide
ccggaggacccaccacguc

SEQ ID NO: 2800798 - RNA, 19 nt, Artificial Sequence
  Description of Artificial Sequence: Synthetic oligonucleotide
ccuguauugucagcacagu

SEQ ID NO: 2800799 - RNA, 19 nt, Artificial Sequence
  Description of Artificial Sequence: Synthetic oligonucleotide
cgcccacgccagcagcagg

SEQ ID NO: 2800800 - RNA, 19 nt, Artificial Sequence
  Description of Artificial Sequence: Synthetic oligonucleotide
gggccacaagucugcacau

SEQ ID NO: 2800801 - RNA, 19 nt, Artificial Sequence
  Description of Artificial Sequence: Synthetic oligonucleotide
cugccuccgccucccauuu

SEQ ID NO: 2800802 - RNA, 19 nt, Artificial Sequence
  Description of Artificial Sequence: Synthetic oligonucleotide
cgacuuucguugucgaauu

SEQ ID NO: 2800803 - RNA, 19 nt, Artificial Sequence
  Description of Artificial Sequence: Synthetic oligonucleotide
ggcuggccucagagauccg

SEQ ID NO: 2800804 - RNA, 19 nt, Artificial Sequence
  Description of Artificial Sequence: Synthetic oligonucleotide
ccagggaaauccggaauuu

SEQ ID NO: 2800805 - RNA, 19 nt, Artificial Sequence
  Description of Artificial Sequence: Synthetic oligonucleotide
ccugccuccgccucccauu

SEQ ID NO: 2800806 - RNA, 19 nt, Artificial Sequence
  Description of Artificial Sequence: Synthetic oligonucleotide
cguccucgcuucgacaucu

SEQ ID NO: 2800807 - RNA, 19 nt, Artificial Sequence
  Description of Artificial Sequence: Synthetic oligonucleotide
cgccucccauuuaauugaa

SEQ ID NO: 2800808 - RNA, 19 nt, Artificial Sequence
  Description of Artificial Sequence: Synthetic oligonucleotide
cgccuuuguuguuuacuau

SEQ ID NO: 2800809 - RNA, 19 nt, Artificial Sequence
  Description of Artificial Sequence: Synthetic oligonucleotide
cgcccggaaagaagucaaa

SEQ ID NO: 2800810 - RNA, 19 nt, Artificial Sequence
  Description of Artificial Sequence: Synthetic oligonucleotide
ggccacaagucugcacauu

SEQ ID NO: 2800811 - RNA, 19 nt, Artificial Sequence
  Description of Artificial Sequence: Synthetic oligonucleotide
gucgucccuugaugcccuu

SEQ ID NO: 2800812 - RNA, 19 nt, Artificial Sequence
  Description of Artificial Sequence: Synthetic oligonucleotide
gccucccauuuaauugaau

SEQ ID NO: 2800813 - RNA, 19 nt, Artificial Sequence
  Description of Artificial Sequence: Synthetic oligonucleotide
ccccugcauugucuucaaa

SEQ ID NO: 2800814 - RNA, 19 nt, Artificial Sequence
  Description of Artificial Sequence: Synthetic oligonucleotide
guccucgcuucgacaucuu

SEQ ID NO: 2800815 - RNA, 19 nt, Artificial Sequence
  Description of Artificial Sequence: Synthetic oligonucleotide
cccacgccagcagcaggaa

SEQ ID NO: 2800816 - RNA, 19 nt, Artificial Sequence
  Description of Artificial Sequence: Synthetic oligonucleotide
ccuccgccucccauuuaau

SEQ ID NO: 2800817 - RNA, 19 nt, Artificial Sequence
  Description of Artificial Sequence: Synthetic oligonucleotide
cggggagacccagggaaau

SEQ ID NO: 2800818 - RNA, 19 nt, Artificial Sequence
  Description of Artificial Sequence: Synthetic oligonucleotide
uuuguugucagcaagaaug

SEQ ID NO: 2800819 - RNA, 19 nt, Artificial Sequence
  Description of Artificial Sequence: Synthetic oligonucleotide
aagccagaaagccagagcc

SEQ ID NO: 2800820 - RNA, 19 nt, Artificial Sequence
  Description of Artificial Sequence: Synthetic oligonucleotide
aauucggauauuucucucc

SEQ ID NO: 2800821 - RNA, 19 nt, Artificial Sequence
  Description of Artificial Sequence: Synthetic oligonucleotide
acagaggucagacaaaugg

SEQ ID NO: 2800822 - RNA, 19 nt, Artificial Sequence
  Description of Artificial Sequence: Synthetic oligonucleotide
acaaauuucguucucagug

SEQ ID NO: 2800823 - RNA, 19 nt, Artificial Sequence
  Description of Artificial Sequence: Synthetic oligonucleotide
uuguguaacacuuauuucu

SEQ ID NO: 2800824 - RNA, 19 nt, Artificial Sequence
  Description of Artificial Sequence: Synthetic oligonucleotide
ucaccaguuacaaggaugg

SEQ ID NO: 2800825 - RNA, 19 nt, Artificial Sequence
  Description of Artificial Sequence: Synthetic oligonucleotide
uuugaaacacugaagccag

SEQ ID NO: 2800826 - RNA, 19 nt, Artificial Sequence
  Description of Artificial Sequence: Synthetic oligonucleotide
aagaauggucuuuucauug

SEQ ID NO: 2800827 - RNA, 19 nt, Artificial Sequence
  Description of Artificial Sequence: Synthetic oligonucleotide
gaucgcauuucuuacagag

SEQ ID NO: 2800828 - RNA, 19 nt, Artificial Sequence
  Description of Artificial Sequence: Synthetic oligonucleotide
acuuauuucugucauaagu

SEQ ID NO: 2800829 - RNA, 19 nt, Artificial Sequence
  Description of Artificial Sequence: Synthetic oligonucleotide
uuuggucucaccacgauac

SEQ ID NO: 2800830 - RNA, 19 nt, Artificial Sequence
  Description of Artificial Sequence: Synthetic oligonucleotide
ucuuacagaggucagacaa

SEQ ID NO: 2800831 - RNA, 19 nt, Artificial Sequence
  Description of Artificial Sequence: Synthetic oligonucleotide
ucaaaggaacgacaauucg

SEQ ID NO: 2800832 - RNA, 19 nt, Artificial Sequence
  Description of Artificial Sequence: Synthetic oligonucleotide
aacacugaagccagaaagc

SEQ ID NO: 2800833 - RNA, 19 nt, Artificial Sequence
  Description of Artificial Sequence: Synthetic oligonucleotide
gaucugguuauccaguucc

SEQ ID NO: 2800834 - RNA, 19 nt, Artificial Sequence
  Description of Artificial Sequence: Synthetic oligonucleotide
ugauccuggaaguaacucg

SEQ ID NO: 2800835 - RNA, 19 nt, Artificial Sequence
  Description of Artificial Sequence: Synthetic oligonucleotide
caaaggaacgacaauucgg

SEQ ID NO: 2800836 - RNA, 19 nt, Artificial Sequence
  Description of Artificial Sequence: Synthetic oligonucleotide
gacgggaugauccuggaag

SEQ ID NO: 2800837 - RNA, 19 nt, Artificial Sequence
  Description of Artificial Sequence: Synthetic oligonucleotide
ucugucauaaguguagcag

SEQ ID NO: 2800838 - RNA, 19 nt, Artificial Sequence
  Description of Artificial Sequence: Synthetic oligonucleotide
ucauaaguguagcaggucu

SEQ ID NO: 2800839 - RNA, 19 nt, Artificial Sequence
  Description of Artificial Sequence: Synthetic oligonucleotide
acaaaugguacacaaauuu

SEQ ID NO: 2800840 - RNA, 19 nt, Artificial Sequence
  Description of Artificial Sequence: Synthetic oligonucleotide
ucaguggacgggaugaucc

SEQ ID NO: 2800841 - RNA, 19 nt, Artificial Sequence
  Description of Artificial Sequence: Synthetic oligonucleotide
uccacaauguccucauugg

SEQ ID NO: 2800842 - RNA, 19 nt, Artificial Sequence
  Description of Artificial Sequence: Synthetic oligonucleotide
uuccacuuccacaggaucg

SEQ ID NO: 2800843 - RNA, 19 nt, Artificial Sequence
  Description of Artificial Sequence: Synthetic oligonucleotide
uuguugucagcaagaaugg

SEQ ID NO: 2800844 - RNA, 19 nt, Artificial Sequence
  Description of Artificial Sequence: Synthetic oligonucleotide
ucgcauuucuuacagaggu

SEQ ID NO: 2800845 - RNA, 19 nt, Artificial Sequence
  Description of Artificial Sequence: Synthetic oligonucleotide
agacaaaugguacacaaau

SEQ ID NO: 2800846 - RNA, 19 nt, Artificial Sequence
  Description of Artificial Sequence: Synthetic oligonucleotide
ucacuuuugaaacacugaa

SEQ ID NO: 2800847 - RNA, 19 nt, Artificial Sequence
  Description of Artificial Sequence: Synthetic oligonucleotide
uuucucuccacaauguccu

SEQ ID NO: 2800848 - RNA, 19 nt, Artificial Sequence
  Description of Artificial Sequence: Synthetic oligonucleotide
aagcaagugggucuucuuc

SEQ ID NO: 2800849 - RNA, 19 nt, Artificial Sequence
  Description of Artificial Sequence: Synthetic oligonucleotide
caaauuucguucucagugg

SEQ ID NO: 2800850 - RNA, 19 nt, Artificial Sequence
  Description of Artificial Sequence: Synthetic oligonucleotide
uucauugucaccaguuaca

SEQ ID NO: 2800851 - RNA, 19 nt, Artificial Sequence
  Description of Artificial Sequence: Synthetic oligonucleotide
aagugggucuucuucaucu

SEQ ID NO: 2800852 - RNA, 19 nt, Artificial Sequence
  Description of Artificial Sequence: Synthetic oligonucleotide
uuauuucugucauaagugu

SEQ ID NO: 2800853 - RNA, 19 nt, Artificial Sequence
  Description of Artificial Sequence: Synthetic oligonucleotide
aacuagucaggguaacaag

SEQ ID NO: 2800854 - RNA, 19 nt, Artificial Sequence
  Description of Artificial Sequence: Synthetic oligonucleotide
aggguaacaagaaucaggg

SEQ ID NO: 2800855 - RNA, 19 nt, Artificial Sequence
  Description of Artificial Sequence: Synthetic oligonucleotide
caggguaacaagaaucagg

SEQ ID NO: 2800856 - RNA, 19 nt, Artificial Sequence
  Description of Artificial Sequence: Synthetic oligonucleotide
ugagauauucucccuguug

SEQ ID NO: 2800857 - RNA, 19 nt, Artificial Sequence
  Description of Artificial Sequence: Synthetic oligonucleotide
accaguuacaaggauggcc

SEQ ID NO: 2800858 - RNA, 19 nt, Artificial Sequence
  Description of Artificial Sequence: Synthetic oligonucleotide
agaaucaggggucagggcu

SEQ ID NO: 2800859 - RNA, 19 nt, Artificial Sequence
  Description of Artificial Sequence: Synthetic oligonucleotide
cuuuugaaacacugaagcc

SEQ ID NO: 2800860 - RNA, 19 nt, Artificial Sequence
  Description of Artificial Sequence: Synthetic oligonucleotide
aagaaucaggggucagggc

SEQ ID NO: 2800861 - RNA, 19 nt, Artificial Sequence
  Description of Artificial Sequence: Synthetic oligonucleotide
aaaggaacgacaauucgga

SEQ ID NO: 2800862 - RNA, 19 nt, Artificial Sequence
  Description of Artificial Sequence: Synthetic oligonucleotide
uacauaagugggaccauag

SEQ ID NO: 2800863 - RNA, 19 nt, Artificial Sequence
  Description of Artificial Sequence: Synthetic oligonucleotide
uuucauugucaccaguuac

SEQ ID NO: 2800864 - RNA, 19 nt, Artificial Sequence
  Description of Artificial Sequence: Synthetic oligonucleotide
ugguacacaaauuucguuc

SEQ ID NO: 2800865 - RNA, 19 nt, Artificial Sequence
  Description of Artificial Sequence: Synthetic oligonucleotide
cucauugggauucucagug

SEQ ID NO: 2800866 - RNA, 19 nt, Artificial Sequence
  Description of Artificial Sequence: Synthetic oligonucleotide
acaggaucgcauuucuuac

SEQ ID NO: 2800867 - RNA, 19 nt, Artificial Sequence
  Description of Artificial Sequence: Synthetic oligonucleotide
cugucauaaguguagcagg

SEQ ID NO: 2800868 - RNA, 19 nt, Artificial Sequence
  Description of Artificial Sequence: Synthetic oligonucleotide
acauaagugggaccauagc

SEQ ID NO: 2800869 - RNA, 19 nt, Artificial Sequence
  Description of Artificial Sequence: Synthetic oligonucleotide
accauuuuggucucaccac

SEQ ID NO: 2800870 - RNA, 19 nt, Artificial Sequence
  Description of Artificial Sequence: Synthetic oligonucleotide
auggucuuuucauugucac

SEQ ID NO: 2800871 - RNA, 19 nt, Artificial Sequence
  Description of Artificial Sequence: Synthetic oligonucleotide
uguagcaggucucuggaac

SEQ ID NO: 2800872 - RNA, 19 nt, Artificial Sequence
  Description of Artificial Sequence: Synthetic oligonucleotide
aguaacgaucugguuaucc

SEQ ID NO: 2800873 - RNA, 19 nt, Artificial Sequence
  Description of Artificial Sequence: Synthetic oligonucleotide
gauccuggaaguaacucgg

SEQ ID NO: 2800874 - RNA, 19 nt, Artificial Sequence
  Description of Artificial Sequence: Synthetic oligonucleotide
guaacucggguacacaugc

SEQ ID NO: 2800875 - RNA, 19 nt, Artificial Sequence
  Description of Artificial Sequence: Synthetic oligonucleotide
aaauuucguucucagugga

SEQ ID NO: 2800876 - RNA, 19 nt, Artificial Sequence
  Description of Artificial Sequence: Synthetic oligonucleotide
uucacuuuugaaacacuga

SEQ ID NO: 2800877 - RNA, 19 nt, Artificial Sequence
  Description of Artificial Sequence: Synthetic oligonucleotide
agucaggguaacaagaauc

SEQ ID NO: 2800878 - RNA, 19 nt, Artificial Sequence
  Description of Artificial Sequence: Synthetic oligonucleotide
ucggauauuucucuccaca

SEQ ID NO: 2800879 - RNA, 19 nt, Artificial Sequence
  Description of Artificial Sequence: Synthetic oligonucleotide
uugggauucucaguggacg

SEQ ID NO: 2800880 - RNA, 19 nt, Artificial Sequence
  Description of Artificial Sequence: Synthetic oligonucleotide
uguaacacuuauuucuguc

SEQ ID NO: 2800881 - RNA, 19 nt, Artificial Sequence
  Description of Artificial Sequence: Synthetic oligonucleotide
accacgauacauaaguggg

SEQ ID NO: 2800882 - RNA, 19 nt, Artificial Sequence
  Description of Artificial Sequence: Synthetic oligonucleotide
uaagugggaccauagcuug

SEQ ID NO: 2800883 - RNA, 19 nt, Artificial Sequence
  Description of Artificial Sequence: Synthetic oligonucleotide
aaagccagagccaacgugu

SEQ ID NO: 2800884 - RNA, 19 nt, Artificial Sequence
  Description of Artificial Sequence: Synthetic oligonucleotide
caccacgauacauaagugg

SEQ ID NO: 2800885 - RNA, 19 nt, Artificial Sequence
  Description of Artificial Sequence: Synthetic oligonucleotide
cuucacuuuugaaacacug

SEQ ID NO: 2800886 - RNA, 19 nt, Artificial Sequence
  Description of Artificial Sequence: Synthetic oligonucleotide
ugucauaaguguagcaggu

SEQ ID NO: 2800887 - RNA, 19 nt, Artificial Sequence
  Description of Artificial Sequence: Synthetic oligonucleotide
auuucugucauaaguguag

SEQ ID NO: 2800888 - RNA, 19 nt, Artificial Sequence
  Description of Artificial Sequence: Synthetic oligonucleotide
aaguaacucggguacacau

SEQ ID NO: 2800889 - RNA, 19 nt, Artificial Sequence
  Description of Artificial Sequence: Synthetic oligonucleotide
uuguucaaaggaacgacaa

SEQ ID NO: 2800890 - RNA, 19 nt, Artificial Sequence
  Description of Artificial Sequence: Synthetic oligonucleotide
acaauucggauauuucucu

SEQ ID NO: 2800891 - RNA, 19 nt, Artificial Sequence
  Description of Artificial Sequence: Synthetic oligonucleotide
uuucuuacagaggucagac

SEQ ID NO: 2800892 - RNA, 19 nt, Artificial Sequence
  Description of Artificial Sequence: Synthetic oligonucleotide
caaaugguacacaaauuuc

SEQ ID NO: 2800893 - RNA, 19 nt, Artificial Sequence
  Description of Artificial Sequence: Synthetic oligonucleotide
acaugcauuuguugucagc

SEQ ID NO: 2800894 - RNA, 19 nt, Artificial Sequence
  Description of Artificial Sequence: Synthetic oligonucleotide
aaugguacacaaauuucgu

SEQ ID NO: 2800895 - RNA, 19 nt, Artificial Sequence
  Description of Artificial Sequence: Synthetic oligonucleotide
aggaucgcauuucuuacag

SEQ ID NO: 2800896 - RNA, 19 nt, Artificial Sequence
  Description of Artificial Sequence: Synthetic oligonucleotide
acacaaauuucguucucag

SEQ ID NO: 2800897 - RNA, 19 nt, Artificial Sequence
  Description of Artificial Sequence: Synthetic oligonucleotide
acgauacauaagugggacc

SEQ ID NO: 2800898 - RNA, 19 nt, Artificial Sequence
  Description of Artificial Sequence: Synthetic oligonucleotide
cuggaaguaacucggguac

SEQ ID NO: 2800899 - RNA, 19 nt, Artificial Sequence
  Description of Artificial Sequence: Synthetic oligonucleotide
ucugagauauucucccugu

SEQ ID NO: 2800900 - RNA, 19 nt, Artificial Sequence
  Description of Artificial Sequence: Synthetic oligonucleotide
gacucaacuagucagggua

SEQ ID NO: 2800901 - RNA, 19 nt, Artificial Sequence
  Description of Artificial Sequence: Synthetic oligonucleotide
cacuuuugaaacacugaag

SEQ ID NO: 2800902 - RNA, 19 nt, Artificial Sequence
  Description of Artificial Sequence: Synthetic oligonucleotide
ugggauucucaguggacgg

SEQ ID NO: 2800903 - RNA, 19 nt, Artificial Sequence
  Description of Artificial Sequence: Synthetic oligonucleotide
auauucucccuguuguuca

SEQ ID NO: 2800904 - RNA, 19 nt, Artificial Sequence
  Description of Artificial Sequence: Synthetic oligonucleotide
uauuucugucauaagugua

SEQ ID NO: 2800905 - RNA, 19 nt, Artificial Sequence
  Description of Artificial Sequence: Synthetic oligonucleotide
caagaaucaggggucaggg

SEQ ID NO: 2800906 - RNA, 19 nt, Artificial Sequence
  Description of Artificial Sequence: Synthetic oligonucleotide
uguuguucaaaggaacgac

SEQ ID NO: 2800907 - RNA, 19 nt, Artificial Sequence
  Description of Artificial Sequence: Synthetic oligonucleotide
uacaaggauggccuugaca

SEQ ID NO: 2800908 - RNA, 19 nt, Artificial Sequence
  Description of Artificial Sequence: Synthetic oligonucleotide
gaaagccagagccaacgug

SEQ ID NO: 2800909 - RNA, 19 nt, Artificial Sequence
  Description of Artificial Sequence: Synthetic oligonucleotide
ggaucugagauauucuccc

SEQ ID NO: 2800910 - RNA, 19 nt, Artificial Sequence
  Description of Artificial Sequence: Synthetic oligonucleotide
gguaacaagaaucaggggu

SEQ ID NO: 2800911 - RNA, 19 nt, Artificial Sequence
  Description of Artificial Sequence: Synthetic oligonucleotide
ucuucacugcagauagugc

SEQ ID NO: 2800912 - RNA, 19 nt, Artificial Sequence
  Description of Artificial Sequence: Synthetic oligonucleotide
guaacacuuauuucuguca

SEQ ID NO: 2800913 - RNA, 19 nt, Artificial Sequence
  Description of Artificial Sequence: Synthetic oligonucleotide
gaagccagaaagccagagc

SEQ ID NO: 2800914 - RNA, 19 nt, Artificial Sequence
  Description of Artificial Sequence: Synthetic oligonucleotide
gacaauucggauauuucuc

SEQ ID NO: 2800915 - RNA, 19 nt, Artificial Sequence
  Description of Artificial Sequence: Synthetic oligonucleotide
agaauggucuuuucauugu

SEQ ID NO: 2800916 - RNA, 19 nt, Artificial Sequence
  Description of Artificial Sequence: Synthetic oligonucleotide
aucugagauauucucccug

SEQ ID NO: 2800917 - RNA, 19 nt, Artificial Sequence
  Description of Artificial Sequence: Synthetic oligonucleotide
guaacaagaaucagggguc

SEQ ID NO: 2800918 - RNA, 19 nt, Artificial Sequence
  Description of Artificial Sequence: Synthetic oligonucleotide
auucggauauuucucucca

SEQ ID NO: 2800919 - RNA, 19 nt, Artificial Sequence
  Description of Artificial Sequence: Synthetic oligonucleotide
ucucccuguuguucaaagg

SEQ ID NO: 2800920 - RNA, 19 nt, Artificial Sequence
  Description of Artificial Sequence: Synthetic oligonucleotide
acaagaaucaggggucagg

SEQ ID NO: 2800921 - RNA, 19 nt, Artificial Sequence
  Description of Artificial Sequence: Synthetic oligonucleotide
gagauauucucccuguugu

SEQ ID NO: 2800922 - RNA, 19 nt, Artificial Sequence
  Description of Artificial Sequence: Synthetic oligonucleotide
aauggucuuuucauuguca

SEQ ID NO: 2800923 - RNA, 19 nt, Artificial Sequence
  Description of Artificial Sequence: Synthetic oligonucleotide
ugggaucugagauauucuc

SEQ ID NO: 2800924 - RNA, 19 nt, Artificial Sequence
  Description of Artificial Sequence: Synthetic oligonucleotide
uacacaugcauuuguuguc

SEQ ID NO: 2800925 - RNA, 19 nt, Artificial Sequence
  Description of Artificial Sequence: Synthetic oligonucleotide
agcaagugggucuucuuca

SEQ ID NO: 2800926 - RNA, 19 nt, Artificial Sequence
  Description of Artificial Sequence: Synthetic oligonucleotide
uucucaguggacgggauga

SEQ ID NO: 2800927 - RNA, 19 nt, Artificial Sequence
  Description of Artificial Sequence: Synthetic oligonucleotide
uucucccuguuguucaaag

SEQ ID NO: 2800928 - RNA, 19 nt, Artificial Sequence
  Description of Artificial Sequence: Synthetic oligonucleotide
acacuuauuucugucauaa

SEQ ID NO: 2800929 - RNA, 19 nt, Artificial Sequence
  Description of Artificial Sequence: Synthetic oligonucleotide
aguguagcaggucucugga

SEQ ID NO: 2800930 - RNA, 19 nt, Artificial Sequence
  Description of Artificial Sequence: Synthetic oligonucleotide
ucaccacgauacauaagug

SEQ ID NO: 2800931 - RNA, 19 nt, Artificial Sequence
  Description of Artificial Sequence: Synthetic oligonucleotide
auuucguucucaguggaga

SEQ ID NO: 2800932 - RNA, 19 nt, Artificial Sequence
  Description of Artificial Sequence: Synthetic oligonucleotide
ugguuauccaguuccacuu

SEQ ID NO: 2800933 - RNA, 19 nt, Artificial Sequence
  Description of Artificial Sequence: Synthetic oligonucleotide
guaacgaucugguuaucca

SEQ ID NO: 2800934 - RNA, 19 nt, Artificial Sequence
  Description of Artificial Sequence: Synthetic oligonucleotide
uuucugucauaaguguagc

SEQ ID NO: 2800935 - RNA, 19 nt, Artificial Sequence
  Description of Artificial Sequence: Synthetic oligonucleotide
uguucaaaggaacgacaau

SEQ ID NO: 2800936 - RNA, 19 nt, Artificial Sequence
  Description of Artificial Sequence: Synthetic oligonucleotide
ugaaacacugaagccagaa

SEQ ID NO: 2800937 - RNA, 19 nt, Artificial Sequence
  Description of Artificial Sequence: Synthetic oligonucleotide
ucuuuucauugucaccagu

SEQ ID NO: 2800938 - RNA, 19 nt, Artificial Sequence
  Description of Artificial Sequence: Synthetic oligonucleotide
acuagucaggguaacaaga

SEQ ID NO: 2800939 - RNA, 19 nt, Artificial Sequence
  Description of Artificial Sequence: Synthetic oligonucleotide
uucacugcagauagugcuc

SEQ ID NO: 2800940 - RNA, 19 nt, Artificial Sequence
  Description of Artificial Sequence: Synthetic oligonucleotide
aacgacaauucggauauuu

SEQ ID NO: 2800941 - RNA, 19 nt, Artificial Sequence
  Description of Artificial Sequence: Synthetic oligonucleotide
augauccuggaaguaacuc

SEQ ID NO: 2800942 - RNA, 19 nt, Artificial Sequence
  Description of Artificial Sequence: Synthetic oligonucleotide
aauuucguucucaguggag

SEQ ID NO: 2800943 - RNA, 19 nt, Artificial Sequence
  Description of Artificial Sequence: Synthetic oligonucleotide
caugcauuuguugucagca

SEQ ID NO: 2800944 - RNA, 19 nt, Artificial Sequence
  Description of Artificial Sequence: Synthetic oligonucleotide
aggucagacaaaugguaca

SEQ ID NO: 2800945 - RNA, 19 nt, Artificial Sequence
  Description of Artificial Sequence: Synthetic oligonucleotide
guugucagcaagaaugguc

SEQ ID NO: 2800946 - RNA, 19 nt, Artificial Sequence
  Description of Artificial Sequence: Synthetic oligonucleotide
gcagauagugcucuggcug

SEQ ID NO: 2800947 - RNA, 19 nt, Artificial Sequence
  Description of Artificial Sequence: Synthetic oligonucleotide
ugucuucacuuuugaaaca

SEQ ID NO: 2800948 - RNA, 19 nt, Artificial Sequence
  Description of Artificial Sequence: Synthetic oligonucleotide
uucguucucaguggagagg

SEQ ID NO: 2800949 - RNA, 19 nt, Artificial Sequence
  Description of Artificial Sequence: Synthetic oligonucleotide
cacgauacauaagugggac

SEQ ID NO: 2800950 - RNA, 19 nt, Artificial Sequence
  Description of Artificial Sequence: Synthetic oligonucleotide
uagcuuguguaacacuuau

SEQ ID NO: 2800951 - RNA, 19 nt, Artificial Sequence
  Description of Artificial Sequence: Synthetic oligonucleotide
cacaauguccucauuggga

SEQ ID NO: 2800952 - RNA, 19 nt, Artificial Sequence
  Description of Artificial Sequence: Synthetic oligonucleotide
ggucuuuucauugucacca

SEQ ID NO: 2800953 - RNA, 19 nt, Artificial Sequence
  Description of Artificial Sequence: Synthetic oligonucleotide
aggaacgacaauucggaua

SEQ ID NO: 2800954 - RNA, 19 nt, Artificial Sequence
  Description of Artificial Sequence: Synthetic oligonucleotide
cucaccacgauacauaagu

SEQ ID NO: 2800955 - RNA, 19 nt, Artificial Sequence
  Description of Artificial Sequence: Synthetic oligonucleotide
uuuuggucucaccacgaua

SEQ ID NO: 2800956 - RNA, 19 nt, Artificial Sequence
  Description of Artificial Sequence: Synthetic oligonucleotide
uuacagaggucagacaaau

SEQ ID NO: 2800957 - RNA, 19 nt, Artificial Sequence
  Description of Artificial Sequence: Synthetic oligonucleotide
uggucuuuucauugucacc

SEQ ID NO: 2800958 - RNA, 19 nt, Artificial Sequence
  Description of Artificial Sequence: Synthetic oligonucleotide
caggacuccccagagaagc

SEQ ID NO: 2800959 - RNA, 19 nt, Artificial Sequence
  Description of Artificial Sequence: Synthetic oligonucleotide
uucugucauaaguguagca

SEQ ID NO: 2800960 - RNA, 19 nt, Artificial Sequence
  Description of Artificial Sequence: Synthetic oligonucleotide
ccuguuguucaaaggaacg

SEQ ID NO: 2800961 - RNA, 19 nt, Artificial Sequence
  Description of Artificial Sequence: Synthetic oligonucleotide
ucguucucaguggagaggu

SEQ ID NO: 2800962 - RNA, 19 nt, Artificial Sequence
  Description of Artificial Sequence: Synthetic oligonucleotide
gaggucagacaaaugguac

SEQ ID NO: 2800963 - RNA, 19 nt, Artificial Sequence
  Description of Artificial Sequence: Synthetic oligonucleotide
aacacuuauuucugucaua

SEQ ID NO: 2800964 - RNA, 19 nt, Artificial Sequence
  Description of Artificial Sequence: Synthetic oligonucleotide
ucaggguaacaagaaucag

SEQ ID NO: 2800965 - RNA, 19 nt, Artificial Sequence
  Description of Artificial Sequence: Synthetic oligonucleotide
gucaccaguuacaaggaug

SEQ ID NO: 2800966 - RNA, 19 nt, Artificial Sequence
  Description of Artificial Sequence: Synthetic oligonucleotide
gguacacaugcauuuguug

SEQ ID NO: 2800967 - RNA, 19 nt, Artificial Sequence
  Description of Artificial Sequence: Synthetic oligonucleotide
guacacaugcauuuguugu

SEQ ID NO: 2800968 - RNA, 19 nt, Artificial Sequence
  Description of Artificial Sequence: Synthetic oligonucleotide
ucccuguuguucaaaggaa

SEQ ID NO: 2800969 - RNA, 19 nt, Artificial Sequence
  Description of Artificial Sequence: Synthetic oligonucleotide
uccuggaaguaacucgggu

SEQ ID NO: 2800970 - RNA, 19 nt, Artificial Sequence
  Description of Artificial Sequence: Synthetic oligonucleotide
auugggauucucaguggac

SEQ ID NO: 2800971 - RNA, 19 nt, Artificial Sequence
  Description of Artificial Sequence: Synthetic oligonucleotide
uucaucuugucuucacuuu

SEQ ID NO: 2800972 - RNA, 19 nt, Artificial Sequence
  Description of Artificial Sequence: Synthetic oligonucleotide
cucccuguuguucaaagga

SEQ ID NO: 2800973 - RNA, 19 nt, Artificial Sequence
  Description of Artificial Sequence: Synthetic oligonucleotide
auaaguguagcaggucucu

SEQ ID NO: 2800974 - RNA, 19 nt, Artificial Sequence
  Description of Artificial Sequence: Synthetic oligonucleotide
aacaagaaucaggggucag

SEQ ID NO: 2800975 - RNA, 19 nt, Artificial Sequence
  Description of Artificial Sequence: Synthetic oligonucleotide
uccacuuccacaggaucgc

SEQ ID NO: 2800976 - RNA, 19 nt, Artificial Sequence
  Description of Artificial Sequence: Synthetic oligonucleotide
acgacaauucggauauuuc

SEQ ID NO: 2800977 - RNA, 19 nt, Artificial Sequence
  Description of Artificial Sequence: Synthetic oligonucleotide
ucucaccacgauacauaag

SEQ ID NO: 2800978 - RNA, 19 nt, Artificial Sequence
  Description of Artificial Sequence: Synthetic oligonucleotide
cugcagauagugcucuggc

SEQ ID NO: 2800979 - RNA, 19 nt, Artificial Sequence
  Description of Artificial Sequence: Synthetic oligonucleotide
uaacaagaaucagggguca

SEQ ID NO: 2800980 - RNA, 19 nt, Artificial Sequence
  Description of Artificial Sequence: Synthetic oligonucleotide
ugcagauagugcucuggcu

SEQ ID NO: 2800981 - RNA, 19 nt, Artificial Sequence
  Description of Artificial Sequence: Synthetic oligonucleotide
gucaggguaacaagaauca

SEQ ID NO: 2800982 - RNA, 19 nt, Artificial Sequence
  Description of Artificial Sequence: Synthetic oligonucleotide
ucaacuagucaggguaaca

SEQ ID NO: 2800983 - RNA, 19 nt, Artificial Sequence
  Description of Artificial Sequence: Synthetic oligonucleotide
auuucuuacagaggucaga

SEQ ID NO: 2800984 - RNA, 19 nt, Artificial Sequence
  Description of Artificial Sequence: Synthetic oligonucleotide
aaggaacgacaauucggau

SEQ ID NO: 2800985 - RNA, 19 nt, Artificial Sequence
  Description of Artificial Sequence: Synthetic oligonucleotide
aucgcauuucuuacagagg

SEQ ID NO: 2800986 - RNA, 19 nt, Artificial Sequence
  Description of Artificial Sequence: Synthetic oligonucleotide
gaaacacugaagccagaaa

SEQ ID NO: 2800987 - RNA, 19 nt, Artificial Sequence
  Description of Artificial Sequence: Synthetic oligonucleotide
auucucaguggacgggaug

SEQ ID NO: 2800988 - RNA, 19 nt, Artificial Sequence
  Description of Artificial Sequence: Synthetic oligonucleotide
ugcucuggcuggcaguaac

SEQ ID NO: 2800989 - RNA, 19 nt, Artificial Sequence
  Description of Artificial Sequence: Synthetic oligonucleotide
aguuacaaggauggccuug

SEQ ID NO: 2800990 - RNA, 19 nt, Artificial Sequence
  Description of Artificial Sequence: Synthetic oligonucleotide
guuguucaaaggaacgaca

SEQ ID NO: 2800991 - RNA, 19 nt, Artificial Sequence
  Description of Artificial Sequence: Synthetic oligonucleotide
ccauuuuggucucaccacg

SEQ ID NO: 2800992 - RNA, 19 nt, Artificial Sequence
  Description of Artificial Sequence: Synthetic oligonucleotide
gaaucaggggucagggcug

SEQ ID NO: 2800993 - RNA, 19 nt, Artificial Sequence
  Description of Artificial Sequence: Synthetic oligonucleotide
ggcaguaacgaucugguua

SEQ ID NO: 2800994 - RNA, 19 nt, Artificial Sequence
  Description of Artificial Sequence: Synthetic oligonucleotide
cuagucaggguaacaagaa

SEQ ID NO: 2800995 - RNA, 19 nt, Artificial Sequence
  Description of Artificial Sequence: Synthetic oligonucleotide
agauagugcucuggcuggc

SEQ ID NO: 2800996 - RNA, 19 nt, Artificial Sequence
  Description of Artificial Sequence: Synthetic oligonucleotide
acgggaugauccuggaagu

SEQ ID NO: 2800997 - RNA, 19 nt, Artificial Sequence
  Description of Artificial Sequence: Synthetic oligonucleotide
cacaggaucgcauuucuua

SEQ ID NO: 2800998 - RNA, 19 nt, Artificial Sequence
  Description of Artificial Sequence: Synthetic oligonucleotide
acacaugcauuuguuguca

SEQ ID NO: 2800999 - RNA, 19 nt, Artificial Sequence
  Description of Artificial Sequence: Synthetic oligonucleotide
augguacacaaauuucguu

SEQ ID NO: 2801000 - RNA, 19 nt, Artificial Sequence
  Description of Artificial Sequence: Synthetic oligonucleotide
aguaacucggguacacaug

SEQ ID NO: 2801001 - RNA, 19 nt, Artificial Sequence
  Description of Artificial Sequence: Synthetic oligonucleotide
cacuuauuucugucauaag

SEQ ID NO: 2801002 - RNA, 19 nt, Artificial Sequence
  Description of Artificial Sequence: Synthetic oligonucleotide
ugacucaacuagucagggu

SEQ ID NO: 2801003 - RNA, 19 nt, Artificial Sequence
  Description of Artificial Sequence: Synthetic oligonucleotide
gagaggugggaucugagau

SEQ ID NO: 2801004 - RNA, 19 nt, Artificial Sequence
  Description of Artificial Sequence: Synthetic oligonucleotide
gcuggcaguaacgaucugg

SEQ ID NO: 2801005 - RNA, 19 nt, Artificial Sequence
  Description of Artificial Sequence: Synthetic oligonucleotide
agaaagccagagccaacgu

SEQ ID NO: 2801006 - RNA, 19 nt, Artificial Sequence
  Description of Artificial Sequence: Synthetic oligonucleotide
ggaacgacaauucggauau

SEQ ID NO: 2801007 - RNA, 19 nt, Artificial Sequence
  Description of Artificial Sequence: Synthetic oligonucleotide
guagcaggucucuggaaca

SEQ ID NO: 2801008 - RNA, 19 nt, Artificial Sequence
  Description of Artificial Sequence: Synthetic oligonucleotide
agugggaccauagcuugug

SEQ ID NO: 2801009 - RNA, 19 nt, Artificial Sequence
  Description of Artificial Sequence: Synthetic oligonucleotide
agcacugucuucacugcag

SEQ ID NO: 2801010 - RNA, 19 nt, Artificial Sequence
  Description of Artificial Sequence: Synthetic oligonucleotide
auuuuggucucaccacgau

SEQ ID NO: 2801011 - RNA, 19 nt, Artificial Sequence
  Description of Artificial Sequence: Synthetic oligonucleotide
ggugggaucugagauauuc

SEQ ID NO: 2801012 - RNA, 19 nt, Artificial Sequence
  Description of Artificial Sequence: Synthetic oligonucleotide
ucacugcagauagugcucu

SEQ ID NO: 2801013 - RNA, 19 nt, Artificial Sequence
  Description of Artificial Sequence: Synthetic oligonucleotide
guuacaaggauggccuuga

SEQ ID NO: 2801014 - RNA, 19 nt, Artificial Sequence
  Description of Artificial Sequence: Synthetic oligonucleotide
cauagcuuguguaacacuu

SEQ ID NO: 2801015 - RNA, 19 nt, Artificial Sequence
  Description of Artificial Sequence: Synthetic oligonucleotide
cauugggauucucagugga

SEQ ID NO: 2801016 - RNA, 19 nt, Artificial Sequence
  Description of Artificial Sequence: Synthetic oligonucleotide
auggccaggacuccccaga

SEQ ID NO: 2801017 - RNA, 19 nt, Artificial Sequence
  Description of Artificial Sequence: Synthetic oligonucleotide
guuccacuuccacaggauc

SEQ ID NO: 2801018 - RNA, 19 nt, Artificial Sequence
  Description of Artificial Sequence: Synthetic oligonucleotide
uaaguguagcaggucucug

SEQ ID NO: 2801019 - RNA, 19 nt, Artificial Sequence
  Description of Artificial Sequence: Synthetic oligonucleotide
ugucaccaguuacaaggau

SEQ ID NO: 2801020 - RNA, 19 nt, Artificial Sequence
  Description of Artificial Sequence: Synthetic oligonucleotide
gcauuucuuacagagguca

SEQ ID NO: 2801021 - RNA, 19 nt, Artificial Sequence
  Description of Artificial Sequence: Synthetic oligonucleotide
guucaaaggaacgacaauu

SEQ ID NO: 2801022 - RNA, 19 nt, Artificial Sequence
  Description of Artificial Sequence: Synthetic oligonucleotide
agcaggucucuggaacagc

SEQ ID NO: 2801023 - RNA, 19 nt, Artificial Sequence
  Description of Artificial Sequence: Synthetic oligonucleotide
agaggugggaucugagaua

SEQ ID NO: 2801024 - RNA, 19 nt, Artificial Sequence
  Description of Artificial Sequence: Synthetic oligonucleotide
uagcaggucucuggaacag

SEQ ID NO: 2801025 - RNA, 19 nt, Artificial Sequence
  Description of Artificial Sequence: Synthetic oligonucleotide
cauuuuggucucaccacga

SEQ ID NO: 2801026 - RNA, 19 nt, Artificial Sequence
  Description of Artificial Sequence: Synthetic oligonucleotide
uuggucucaccacgauaca

SEQ ID NO: 2801027 - RNA, 19 nt, Artificial Sequence
  Description of Artificial Sequence: Synthetic oligonucleotide
uaacucggguacacaugca

SEQ ID NO: 2801028 - RNA, 19 nt, Artificial Sequence
  Description of Artificial Sequence: Synthetic oligonucleotide
agauauucucccuguuguu

SEQ ID NO: 2801029 - RNA, 19 nt, Artificial Sequence
  Description of Artificial Sequence: Synthetic oligonucleotide
gacuccccagagaagcaag

SEQ ID NO: 2801030 - RNA, 19 nt, Artificial Sequence
  Description of Artificial Sequence: Synthetic oligonucleotide
cacaugcauuuguugucag

SEQ ID NO: 2801031 - RNA, 19 nt, Artificial Sequence
  Description of Artificial Sequence: Synthetic oligonucleotide
gcuuguguaacacuuauuu

SEQ ID NO: 2801032 - RNA, 19 nt, Artificial Sequence
  Description of Artificial Sequence: Synthetic oligonucleotide
agaagcaagugggucuucu

SEQ ID NO: 2801033 - RNA, 19 nt, Artificial Sequence
  Description of Artificial Sequence: Synthetic oligonucleotide
uguugucagcaagaauggu

SEQ ID NO: 2801034 - RNA, 19 nt, Artificial Sequence
  Description of Artificial Sequence: Synthetic oligonucleotide
agaggucagacaaauggua

SEQ ID NO: 2801035 - RNA, 19 nt, Artificial Sequence
  Description of Artificial Sequence: Synthetic oligonucleotide
ucggguacacaugcauuug

SEQ ID NO: 2801036 - RNA, 19 nt, Artificial Sequence
  Description of Artificial Sequence: Synthetic oligonucleotide
gggaucugagauauucucc

SEQ ID NO: 2801037 - RNA, 19 nt, Artificial Sequence
  Description of Artificial Sequence: Synthetic oligonucleotide
gguacacaaauuucguucu

SEQ ID NO: 2801038 - RNA, 19 nt, Artificial Sequence
  Description of Artificial Sequence: Synthetic oligonucleotide
ggguaacaagaaucagggg

SEQ ID NO: 2801039 - RNA, 19 nt, Artificial Sequence
  Description of Artificial Sequence: Synthetic oligonucleotide
ggucagacaaaugguacac

SEQ ID NO: 2801040 - RNA, 19 nt, Artificial Sequence
  Description of Artificial Sequence: Synthetic oligonucleotide
uuacaaggauggccuugac

SEQ ID NO: 2801041 - RNA, 19 nt, Artificial Sequence
  Description of Artificial Sequence: Synthetic oligonucleotide
cuuuucauugucaccaguu

SEQ ID NO: 2801042 - RNA, 19 nt, Artificial Sequence
  Description of Artificial Sequence: Synthetic oligonucleotide
uggaaguaacucggguaca

SEQ ID NO: 2801043 - RNA, 19 nt, Artificial Sequence
  Description of Artificial Sequence: Synthetic oligonucleotide
gaaguaacucggguacaca

SEQ ID NO: 2801044 - RNA, 19 nt, Artificial Sequence
  Description of Artificial Sequence: Synthetic oligonucleotide
cacugaagccagaaagcca

SEQ ID NO: 2801045 - RNA, 19 nt, Artificial Sequence
  Description of Artificial Sequence: Synthetic oligonucleotide
cuguuguucaaaggaacga

SEQ ID NO: 2801046 - RNA, 19 nt, Artificial Sequence
  Description of Artificial Sequence: Synthetic oligonucleotide
caacuagucaggguaacaa

SEQ ID NO: 2801047 - RNA, 19 nt, Artificial Sequence
  Description of Artificial Sequence: Synthetic oligonucleotide
guacacaaauuucguucuc

SEQ ID NO: 2801048 - RNA, 19 nt, Artificial Sequence
  Description of Artificial Sequence: Synthetic oligonucleotide
ggcuguuggcaccauuuug

SEQ ID NO: 2801049 - RNA, 19 nt, Artificial Sequence
  Description of Artificial Sequence: Synthetic oligonucleotide
aagccagagccaacgugug

SEQ ID NO: 2801050 - RNA, 19 nt, Artificial Sequence
  Description of Artificial Sequence: Synthetic oligonucleotide
acgaucugguuauccaguu

SEQ ID NO: 2801051 - RNA, 19 nt, Artificial Sequence
  Description of Artificial Sequence: Synthetic oligonucleotide
cagagaagcaagugggucu

SEQ ID NO: 2801052 - RNA, 19 nt, Artificial Sequence
  Description of Artificial Sequence: Synthetic oligonucleotide
uggucucaccacgauacau

SEQ ID NO: 2801053 - RNA, 19 nt, Artificial Sequence
  Description of Artificial Sequence: Synthetic oligonucleotide
aaucaggggucagggcugu

SEQ ID NO: 2801054 - RNA, 19 nt, Artificial Sequence
  Description of Artificial Sequence: Synthetic oligonucleotide
ugucuucacugcagauagu

SEQ ID NO: 2801055 - RNA, 19 nt, Artificial Sequence
  Description of Artificial Sequence: Synthetic oligonucleotide
auacauaagugggaccaua

SEQ ID NO: 2801056 - RNA, 19 nt, Artificial Sequence
  Description of Artificial Sequence: Synthetic oligonucleotide
gggaccauagcuuguguaa

SEQ ID NO: 2801057 - RNA, 19 nt, Artificial Sequence
  Description of Artificial Sequence: Synthetic oligonucleotide
cucaacuagucaggguaac

SEQ ID NO: 2801058 - RNA, 19 nt, Artificial Sequence
  Description of Artificial Sequence: Synthetic oligonucleotide
agagaagcaagugggucuu

SEQ ID NO: 2801059 - RNA, 19 nt, Artificial Sequence
  Description of Artificial Sequence: Synthetic oligonucleotide
gaucugagauauucucccu

SEQ ID NO: 2801060 - RNA, 19 nt, Artificial Sequence
  Description of Artificial Sequence: Synthetic oligonucleotide
cugguuauccaguuccacu

SEQ ID NO: 2801061 - RNA, 19 nt, Artificial Sequence
  Description of Artificial Sequence: Synthetic oligonucleotide
ggaaguaacucggguacac

SEQ ID NO: 2801062 - RNA, 19 nt, Artificial Sequence
  Description of Artificial Sequence: Synthetic oligonucleotide
ggaugauccuggaaguaac

SEQ ID NO: 2801063 - RNA, 19 nt, Artificial Sequence
  Description of Artificial Sequence: Synthetic oligonucleotide
cccuguuguucaaaggaac

SEQ ID NO: 2801064 - RNA, 19 nt, Artificial Sequence
  Description of Artificial Sequence: Synthetic oligonucleotide
caagugggucuucuucauc

SEQ ID NO: 2801065 - RNA, 19 nt, Artificial Sequence
  Description of Artificial Sequence: Synthetic oligonucleotide
caggaucgcauuucuuaca

SEQ ID NO: 2801066 - RNA, 19 nt, Artificial Sequence
  Description of Artificial Sequence: Synthetic oligonucleotide
uuggcaccauuuuggucuc

SEQ ID NO: 2801067 - RNA, 19 nt, Artificial Sequence
  Description of Artificial Sequence: Synthetic oligonucleotide
gucauaaguguagcagguc

SEQ ID NO: 2801068 - RNA, 19 nt, Artificial Sequence
  Description of Artificial Sequence: Synthetic oligonucleotide
auccuggaaguaacucggg

SEQ ID NO: 2801069 - RNA, 19 nt, Artificial Sequence
  Description of Artificial Sequence: Synthetic oligonucleotide
gaggugggaucugagauau

SEQ ID NO: 2801070 - RNA, 19 nt, Artificial Sequence
  Description of Artificial Sequence: Synthetic oligonucleotide
cagaggucagacaaauggu

SEQ ID NO: 2801071 - RNA, 19 nt, Artificial Sequence
  Description of Artificial Sequence: Synthetic oligonucleotide
acucaacuagucaggguaa

SEQ ID NO: 2801072 - RNA, 19 nt, Artificial Sequence
  Description of Artificial Sequence: Synthetic oligonucleotide
gggauucucaguggacggg

SEQ ID NO: 2801073 - RNA, 19 nt, Artificial Sequence
  Description of Artificial Sequence: Synthetic oligonucleotide
gguuauccaguuccacuuc

SEQ ID NO: 2801074 - RNA, 19 nt, Artificial Sequence
  Description of Artificial Sequence: Synthetic oligonucleotide
gaugauccuggaaguaacu

SEQ ID NO: 2801075 - RNA, 19 nt, Artificial Sequence
  Description of Artificial Sequence: Synthetic oligonucleotide
aagugggaccauagcuugu

SEQ ID NO: 2801076 - RNA, 19 nt, Artificial Sequence
  Description of Artificial Sequence: Synthetic oligonucleotide
gcaguaacgaucugguuau

SEQ ID NO: 2801077 - RNA, 19 nt, Artificial Sequence
  Description of Artificial Sequence: Synthetic oligonucleotide
gauagugcucuggcuggca

SEQ ID NO: 2801078 - RNA, 19 nt, Artificial Sequence
  Description of Artificial Sequence: Synthetic oligonucleotide
auagcuuguguaacacuua

SEQ ID NO: 2801079 - RNA, 19 nt, Artificial Sequence
  Description of Artificial Sequence: Synthetic oligonucleotide
gacaaaugguacacaaauu

SEQ ID NO: 2801080 - RNA, 19 nt, Artificial Sequence
  Description of Artificial Sequence: Synthetic oligonucleotide
ggaccauagcuuguguaac

SEQ ID NO: 2801081 - RNA, 19 nt, Artificial Sequence
  Description of Artificial Sequence: Synthetic oligonucleotide
ggaacagcacugucuucac

SEQ ID NO: 2801082 - RNA, 19 nt, Artificial Sequence
  Description of Artificial Sequence: Synthetic oligonucleotide
cacaaauuucguucucagu

SEQ ID NO: 2801083 - RNA, 19 nt, Artificial Sequence
  Description of Artificial Sequence: Synthetic oligonucleotide
caagaauggucuuuucauu

SEQ ID NO: 2801084 - RNA, 19 nt, Artificial Sequence
  Description of Artificial Sequence: Synthetic oligonucleotide
gucagacaaaugguacaca

SEQ ID NO: 2801085 - RNA, 19 nt, Artificial Sequence
  Description of Artificial Sequence: Synthetic oligonucleotide
agggcuguuggcaccauuu

SEQ ID NO: 2801086 - RNA, 19 nt, Artificial Sequence
  Description of Artificial Sequence: Synthetic oligonucleotide
cgauacauaagugggacca

SEQ ID NO: 2801087 - RNA, 19 nt, Artificial Sequence
  Description of Artificial Sequence: Synthetic oligonucleotide
agccagaaagccagagcca

SEQ ID NO: 2801088 - RNA, 19 nt, Artificial Sequence
  Description of Artificial Sequence: Synthetic oligonucleotide
aucugguuauccaguucca

SEQ ID NO: 2801089 - RNA, 19 nt, Artificial Sequence
  Description of Artificial Sequence: Synthetic oligonucleotide
cucaguggacgggaugauc

SEQ ID NO: 2801090 - RNA, 19 nt, Artificial Sequence
  Description of Artificial Sequence: Synthetic oligonucleotide
cagcaagaauggucuuuuc

SEQ ID NO: 2801091 - RNA, 19 nt, Artificial Sequence
  Description of Artificial Sequence: Synthetic oligonucleotide
cucggguacacaugcauuu

SEQ ID NO: 2801092 - RNA, 19 nt, Artificial Sequence
  Description of Artificial Sequence: Synthetic oligonucleotide
ccagagaagcaaguggguc

SEQ ID NO: 2801093 - RNA, 19 nt, Artificial Sequence
  Description of Artificial Sequence: Synthetic oligonucleotide
ggauucucaguggacggga

SEQ ID NO: 2801094 - RNA, 19 nt, Artificial Sequence
  Description of Artificial Sequence: Synthetic oligonucleotide
ggauauuucucuccacaau

SEQ ID NO: 2801095 - RNA, 19 nt, Artificial Sequence
  Description of Artificial Sequence: Synthetic oligonucleotide
gcucuggcuggcaguaacg

SEQ ID NO: 2801096 - RNA, 19 nt, Artificial Sequence
  Description of Artificial Sequence: Synthetic oligonucleotide
acuccccagagaagcaagu

SEQ ID NO: 2801097 - RNA, 19 nt, Artificial Sequence
  Description of Artificial Sequence: Synthetic oligonucleotide
caccaguuacaaggauggc

SEQ ID NO: 2801098 - RNA, 19 nt, Artificial Sequence
  Description of Artificial Sequence: Synthetic oligonucleotide
acucggguacacaugcauu

SEQ ID NO: 2801099 - RNA, 19 nt, Artificial Sequence
  Description of Artificial Sequence: Synthetic oligonucleotide
gggaugauccuggaaguaa

SEQ ID NO: 2801100 - RNA, 19 nt, Artificial Sequence
  Description of Artificial Sequence: Synthetic oligonucleotide
ucucaguggacgggaugau

SEQ ID NO: 2801101 - RNA, 19 nt, Artificial Sequence
  Description of Artificial Sequence: Synthetic oligonucleotide
gcaccauuuuggucucacc

SEQ ID NO: 2801102 - RNA, 19 nt, Artificial Sequence
  Description of Artificial Sequence: Synthetic oligonucleotide
ccuggaaguaacucgggua

SEQ ID NO: 2801103 - RNA, 19 nt, Artificial Sequence
  Description of Artificial Sequence: Synthetic oligonucleotide
gauacauaagugggaccau

SEQ ID NO: 2801104 - RNA, 19 nt, Artificial Sequence
  Description of Artificial Sequence: Synthetic oligonucleotide
gaagcaagugggucuucuu

SEQ ID NO: 2801105 - RNA, 19 nt, Artificial Sequence
  Description of Artificial Sequence: Synthetic oligonucleotide
guguagcaggucucuggaa

SEQ ID NO: 2801106 - RNA, 19 nt, Artificial Sequence
  Description of Artificial Sequence: Synthetic oligonucleotide
cuguuggcaccauuuuggu

SEQ ID NO: 2801107 - RNA, 19 nt, Artificial Sequence
  Description of Artificial Sequence: Synthetic oligonucleotide
gucagggcuguuggcacca

SEQ ID NO: 2801108 - RNA, 19 nt, Artificial Sequence
  Description of Artificial Sequence: Synthetic oligonucleotide
ggucucaccacgauacaua

SEQ ID NO: 2801109 - RNA, 19 nt, Artificial Sequence
  Description of Artificial Sequence: Synthetic oligonucleotide
ggaucgcauuucuuacaga

SEQ ID NO: 2801110 - RNA, 19 nt, Artificial Sequence
  Description of Artificial Sequence: Synthetic oligonucleotide
ccacgauacauaaguggga

SEQ ID NO: 2801111 - RNA, 19 nt, Artificial Sequence
  Description of Artificial Sequence: Synthetic oligonucleotide
auucucccuguuguucaaa

SEQ ID NO: 2801112 - RNA, 19 nt, Artificial Sequence
  Description of Artificial Sequence: Synthetic oligonucleotide
ggcaccauuuuggucucac

SEQ ID NO: 2801113 - RNA, 19 nt, Artificial Sequence
  Description of Artificial Sequence: Synthetic oligonucleotide
agcuuguguaacacuuauu

SEQ ID NO: 2801114 - RNA, 19 nt, Artificial Sequence
  Description of Artificial Sequence: Synthetic oligonucleotide
cgacaauucggauauuucu

SEQ ID NO: 2801115 - RNA, 19 nt, Artificial Sequence
  Description of Artificial Sequence: Synthetic oligonucleotide
ccaggacuccccagagaag

SEQ ID NO: 2801116 - RNA, 19 nt, Artificial Sequence
  Description of Artificial Sequence: Synthetic oligonucleotide
gagaagcaagugggucuuc

SEQ ID NO: 2801117 - RNA, 19 nt, Artificial Sequence
  Description of Artificial Sequence: Synthetic oligonucleotide
gucagcaagaauggucuuu

SEQ ID NO: 2801118 - RNA, 19 nt, Artificial Sequence
  Description of Artificial Sequence: Synthetic oligonucleotide
gauucucaguggacgggau

SEQ ID NO: 2801119 - RNA, 19 nt, Artificial Sequence
  Description of Artificial Sequence: Synthetic oligonucleotide
cgcauuucuuacagagguc

SEQ ID NO: 2801120 - RNA, 19 nt, Artificial Sequence
  Description of Artificial Sequence: Synthetic oligonucleotide
cggauauuucucuccacaa

SEQ ID NO: 2801121 - RNA, 19 nt, Artificial Sequence
  Description of Artificial Sequence: Synthetic oligonucleotide
cuuccacaggaucgcauuu

SEQ ID NO: 2801122 - RNA, 19 nt, Artificial Sequence
  Description of Artificial Sequence: Synthetic oligonucleotide
caguggacgggaugauccu

SEQ ID NO: 2801123 - RNA, 19 nt, Artificial Sequence
  Description of Artificial Sequence: Synthetic oligonucleotide
caguaacgaucugguuauc

SEQ ID NO: 2801124 - RNA, 19 nt, Artificial Sequence
  Description of Artificial Sequence: Synthetic oligonucleotide
cacuuccacaggaucgcau

SEQ ID NO: 2801125 - RNA, 19 nt, Artificial Sequence
  Description of Artificial Sequence: Synthetic oligonucleotide
uggcaccauuuuggucuca

SEQ ID NO: 2801126 - RNA, 19 nt, Artificial Sequence
  Description of Artificial Sequence: Synthetic oligonucleotide
cugagauauucucccuguu

SEQ ID NO: 2801127 - RNA, 19 nt, Artificial Sequence
  Description of Artificial Sequence: Synthetic oligonucleotide
gcaagugggucuucuucau

SEQ ID NO: 2801128 - RNA, 19 nt, Artificial Sequence
  Description of Artificial Sequence: Synthetic oligonucleotide
ccucauugggauucucagu

SEQ ID NO: 2801129 - RNA, 19 nt, Artificial Sequence
  Description of Artificial Sequence: Synthetic oligonucleotide
ucagggcuguuggcaccau

SEQ ID NO: 2801130 - RNA, 19 nt, Artificial Sequence
  Description of Artificial Sequence: Synthetic oligonucleotide
caguuacaaggauggccuu

SEQ ID NO: 2801131 - RNA, 19 nt, Artificial Sequence
  Description of Artificial Sequence: Synthetic oligonucleotide
ggcuggcaguaacgaucug

SEQ ID NO: 2801132 - RNA, 19 nt, Artificial Sequence
  Description of Artificial Sequence: Synthetic oligonucleotide
ggguacacaugcauuuguu

SEQ ID NO: 2801133 - RNA, 19 nt, Artificial Sequence
  Description of Artificial Sequence: Synthetic oligonucleotide
cccagagaagcaagugggu

SEQ ID NO: 2801134 - RNA, 19 nt, Artificial Sequence
  Description of Artificial Sequence: Synthetic oligonucleotide
gggcuguuggcaccauuuu

SEQ ID NO: 2801135 - RNA, 19 nt, Artificial Sequence
  Description of Artificial Sequence: Synthetic oligonucleotide
gugcucuggcuggcaguaa

SEQ ID NO: 2801136 - RNA, 19 nt, Artificial Sequence
  Description of Artificial Sequence: Synthetic oligonucleotide
gaacgacaauucggauauu

SEQ ID NO: 2801137 - RNA, 19 nt, Artificial Sequence
  Description of Artificial Sequence: Synthetic oligonucleotide
aucaggggucagggcuguu

SEQ ID NO: 2801138 - RNA, 19 nt, Artificial Sequence
  Description of Artificial Sequence: Synthetic oligonucleotide
cggguacacaugcauuugu

SEQ ID NO: 2801139 - RNA, 19 nt, Artificial Sequence
  Description of Artificial Sequence: Synthetic oligonucleotide
aggugggaucugagauauu

SEQ ID NO: 2801140 - RNA, 19 nt, Artificial Sequence
  Description of Artificial Sequence: Synthetic oligonucleotide
ccacuuccacaggaucgca

SEQ ID NO: 2801141 - RNA, 19 nt, Artificial Sequence
  Description of Artificial Sequence: Synthetic oligonucleotide
cagggcuguuggcaccauu

SEQ ID NO: 2801142 - RNA, 19 nt, Artificial Sequence
  Description of Artificial Sequence: Synthetic oligonucleotide
cgggaugauccuggaagua

SEQ ID NO: 2801143 - RNA, 19 nt, Artificial Sequence
  Description of Artificial Sequence: Synthetic oligonucleotide
aacagaacaaaguauagag

SEQ ID NO: 2801144 - RNA, 19 nt, Artificial Sequence
  Description of Artificial Sequence: Synthetic oligonucleotide
aacaaauauauaauuagcc

SEQ ID NO: 2801145 - RNA, 19 nt, Artificial Sequence
  Description of Artificial Sequence: Synthetic oligonucleotide
acaaauauauaauuagccc

SEQ ID NO: 2801146 - RNA, 19 nt, Artificial Sequence
  Description of Artificial Sequence: Synthetic oligonucleotide
aacuuuauuguacucuucc

SEQ ID NO: 2801147 - RNA, 19 nt, Artificial Sequence
  Description of Artificial Sequence: Synthetic oligonucleotide
ucagauagggauuaaauag

SEQ ID NO: 2801148 - RNA, 19 nt, Artificial Sequence
  Description of Artificial Sequence: Synthetic oligonucleotide
gacagaaagaauuacggcg

SEQ ID NO: 2801149 - RNA, 19 nt, Artificial Sequence
  Description of Artificial Sequence: Synthetic oligonucleotide
auagggauuaaauaggaac

SEQ ID NO: 2801150 - RNA, 19 nt, Artificial Sequence
  Description of Artificial Sequence: Synthetic oligonucleotide
uuggucauuacaaagaagc

SEQ ID NO: 2801151 - RNA, 19 nt, Artificial Sequence
  Description of Artificial Sequence: Synthetic oligonucleotide
aagaccauugcacaaagag

SEQ ID NO: 2801152 - RNA, 19 nt, Artificial Sequence
  Description of Artificial Sequence: Synthetic oligonucleotide
acaacaaauauauaauuag

SEQ ID NO: 2801153 - RNA, 19 nt, Artificial Sequence
  Description of Artificial Sequence: Synthetic oligonucleotide
aaauaggaacuccuucucc

SEQ ID NO: 2801154 - RNA, 19 nt, Artificial Sequence
  Description of Artificial Sequence: Synthetic oligonucleotide
aaauauauaauuagcccuc

SEQ ID NO: 2801155 - RNA, 19 nt, Artificial Sequence
  Description of Artificial Sequence: Synthetic oligonucleotide
auuaaauaggaacuccuuc

SEQ ID NO: 2801156 - RNA, 19 nt, Artificial Sequence
  Description of Artificial Sequence: Synthetic oligonucleotide
aaagaagcacguucaaagg

SEQ ID NO: 2801157 - RNA, 19 nt, Artificial Sequence
  Description of Artificial Sequence: Synthetic oligonucleotide
gagaacuuagcagaaaucg

SEQ ID NO: 2801158 - RNA, 19 nt, Artificial Sequence
  Description of Artificial Sequence: Synthetic oligonucleotide
ugaauaggcaguuucaugu

SEQ ID NO: 2801159 - RNA, 19 nt, Artificial Sequence
  Description of Artificial Sequence: Synthetic oligonucleotide
auaauuagcccucccagac

SEQ ID NO: 2801160 - RNA, 19 nt, Artificial Sequence
  Description of Artificial Sequence: Synthetic oligonucleotide
aauuacggcgugaauaggc

SEQ ID NO: 2801161 - RNA, 19 nt, Artificial Sequence
  Description of Artificial Sequence: Synthetic oligonucleotide
caaagaagcacguucaaag

SEQ ID NO: 2801162 - RNA, 19 nt, Artificial Sequence
  Description of Artificial Sequence: Synthetic oligonucleotide
aggaacaacaaauauauaa

SEQ ID NO: 2801163 - RNA, 19 nt, Artificial Sequence
  Description of Artificial Sequence: Synthetic oligonucleotide
aauuagcccucccagacag

SEQ ID NO: 2801164 - RNA, 19 nt, Artificial Sequence
  Description of Artificial Sequence: Synthetic oligonucleotide
uuaaauaggaacuccuucu

SEQ ID NO: 2801165 - RNA, 19 nt, Artificial Sequence
  Description of Artificial Sequence: Synthetic oligonucleotide
aauauauaauuagcccucc

SEQ ID NO: 2801166 - RNA, 19 nt, Artificial Sequence
  Description of Artificial Sequence: Synthetic oligonucleotide
uauauaauuagcccuccca

SEQ ID NO: 2801167 - RNA, 19 nt, Artificial Sequence
  Description of Artificial Sequence: Synthetic oligonucleotide
gucauuacaaagaagcacg

SEQ ID NO: 2801168 - RNA, 19 nt, Artificial Sequence
  Description of Artificial Sequence: Synthetic oligonucleotide
cagacagaaagaauuacgg

SEQ ID NO: 2801169 - RNA, 19 nt, Artificial Sequence
  Description of Artificial Sequence: Synthetic oligonucleotide
aaaguauagaggaacaaca

SEQ ID NO: 2801170 - RNA, 19 nt, Artificial Sequence
  Description of Artificial Sequence: Synthetic oligonucleotide
agaauuacggcgugaauag

SEQ ID NO: 2801171 - RNA, 19 nt, Artificial Sequence
  Description of Artificial Sequence: Synthetic oligonucleotide
agacagaaagaauuacggc

SEQ ID NO: 2801172 - RNA, 19 nt, Artificial Sequence
  Description of Artificial Sequence: Synthetic oligonucleotide
uuuaaaauccuuuucuuuu

SEQ ID NO: 2801173 - RNA, 19 nt, Artificial Sequence
  Description of Artificial Sequence: Synthetic oligonucleotide
aauaggaacuccuucucca

SEQ ID NO: 2801174 - RNA, 19 nt, Artificial Sequence
  Description of Artificial Sequence: Synthetic oligonucleotide
auauaauuagcccucccag

SEQ ID NO: 2801175 - RNA, 19 nt, Artificial Sequence
  Description of Artificial Sequence: Synthetic oligonucleotide
caacaaauauauaauuagc

SEQ ID NO: 2801176 - RNA, 19 nt, Artificial Sequence
  Description of Artificial Sequence: Synthetic oligonucleotide
uagggauuaaauaggaacu

SEQ ID NO: 2801177 - RNA, 19 nt, Artificial Sequence
  Description of Artificial Sequence: Synthetic oligonucleotide
gaccauugcacaaagaggc

SEQ ID NO: 2801178 - RNA, 19 nt, Artificial Sequence
  Description of Artificial Sequence: Synthetic oligonucleotide
aguuucauguuguugggag

SEQ ID NO: 2801179 - RNA, 19 nt, Artificial Sequence
  Description of Artificial Sequence: Synthetic oligonucleotide
ucagacaacagaacaaagu

SEQ ID NO: 2801180 - RNA, 19 nt, Artificial Sequence
  Description of Artificial Sequence: Synthetic oligonucleotide
uuguuaaacuuuauuguac

SEQ ID NO: 2801181 - RNA, 19 nt, Artificial Sequence
  Description of Artificial Sequence: Synthetic oligonucleotide
uuaaacuuuauuguacucu

SEQ ID NO: 2801182 - RNA, 19 nt, Artificial Sequence
  Description of Artificial Sequence: Synthetic oligonucleotide
uguuaaacuuuauuguacu

SEQ ID NO: 2801183 - RNA, 19 nt, Artificial Sequence
  Description of Artificial Sequence: Synthetic oligonucleotide
gaaaucgguaccuugguca

SEQ ID NO: 2801184 - RNA, 19 nt, Artificial Sequence
  Description of Artificial Sequence: Synthetic oligonucleotide
aagaagcacguucaaagga

SEQ ID NO: 2801185 - RNA, 19 nt, Artificial Sequence
  Description of Artificial Sequence: Synthetic oligonucleotide
cagaacaaaguauagagga

SEQ ID NO: 2801186 - RNA, 19 nt, Artificial Sequence
  Description of Artificial Sequence: Synthetic oligonucleotide
auauauaauuagcccuccc

SEQ ID NO: 2801187 - RNA, 19 nt, Artificial Sequence
  Description of Artificial Sequence: Synthetic oligonucleotide
ucuuccgucccuuucaggc

SEQ ID NO: 2801188 - RNA, 19 nt, Artificial Sequence
  Description of Artificial Sequence: Synthetic oligonucleotide
uguuguugggagaacuuag

SEQ ID NO: 2801189 - RNA, 19 nt, Artificial Sequence
  Description of Artificial Sequence: Synthetic oligonucleotide
uguugggagaacuuagcag

SEQ ID NO: 2801190 - RNA, 19 nt, Artificial Sequence
  Description of Artificial Sequence: Synthetic oligonucleotide
aauaggcaguuucauguug

SEQ ID NO: 2801191 - RNA, 19 nt, Artificial Sequence
  Description of Artificial Sequence: Synthetic oligonucleotide
uuuauuguacucuuccguc

SEQ ID NO: 2801192 - RNA, 19 nt, Artificial Sequence
  Description of Artificial Sequence: Synthetic oligonucleotide
acuuagcagaaaucgguac

SEQ ID NO: 2801193 - RNA, 19 nt, Artificial Sequence
  Description of Artificial Sequence: Synthetic oligonucleotide
acuuuauuguacucuuccg

SEQ ID NO: 2801194 - RNA, 19 nt, Artificial Sequence
  Description of Artificial Sequence: Synthetic oligonucleotide
gaguccuuguuuaaaaucc

SEQ ID NO: 2801195 - RNA, 19 nt, Artificial Sequence
  Description of Artificial Sequence: Synthetic oligonucleotide
agaggaacaacaaauauau

SEQ ID NO: 2801196 - RNA, 19 nt, Artificial Sequence
  Description of Artificial Sequence: Synthetic oligonucleotide
uauagaggaacaacaaaua

SEQ ID NO: 2801197 - RNA, 19 nt, Artificial Sequence
  Description of Artificial Sequence: Synthetic oligonucleotide
aagaauuacggcgugaaua

SEQ ID NO: 2801198 - RNA, 19 nt, Artificial Sequence
  Description of Artificial Sequence: Synthetic oligonucleotide
uuauuguacucuuccgucc

SEQ ID NO: 2801199 - RNA, 19 nt, Artificial Sequence
  Description of Artificial Sequence: Synthetic oligonucleotide
cuuagcagaaaucgguacc

SEQ ID NO: 2801200 - RNA, 19 nt, Artificial Sequence
  Description of Artificial Sequence: Synthetic oligonucleotide
uauuguacucuuccguccc

SEQ ID NO: 2801201 - RNA, 19 nt, Artificial Sequence
  Description of Artificial Sequence: Synthetic oligonucleotide
uagaggaacaacaaauaua

SEQ ID NO: 2801202 - RNA, 19 nt, Artificial Sequence
  Description of Artificial Sequence: Synthetic oligonucleotide
uauaauuagcccucccaga

SEQ ID NO: 2801203 - RNA, 19 nt, Artificial Sequence
  Description of Artificial Sequence: Synthetic oligonucleotide
guugggagaacuuagcaga

SEQ ID NO: 2801204 - RNA, 19 nt, Artificial Sequence
  Description of Artificial Sequence: Synthetic oligonucleotide
ucaggcucagacaacagaa

SEQ ID NO: 2801205 - RNA, 19 nt, Artificial Sequence
  Description of Artificial Sequence: Synthetic oligonucleotide
agaagggagcuccagcuuc

SEQ ID NO: 2801206 - RNA, 19 nt, Artificial Sequence
  Description of Artificial Sequence: Synthetic oligonucleotide
cuuguuuaaaauccuuuuc

SEQ ID NO: 2801207 - RNA, 19 nt, Artificial Sequence
  Description of Artificial Sequence: Synthetic oligonucleotide
caaauauauaauuagcccu

SEQ ID NO: 2801208 - RNA, 19 nt, Artificial Sequence
  Description of Artificial Sequence: Synthetic oligonucleotide
auagaggaacaacaaauau

SEQ ID NO: 2801209 - RNA, 19 nt, Artificial Sequence
  Description of Artificial Sequence: Synthetic oligonucleotide
uaccuuggucauuacaaag

SEQ ID NO: 2801210 - RNA, 19 nt, Artificial Sequence
  Description of Artificial Sequence: Synthetic oligonucleotide
uaaauaggaacuccuucuc

SEQ ID NO: 2801211 - RNA, 19 nt, Artificial Sequence
  Description of Artificial Sequence: Synthetic oligonucleotide
ugcgauaccucgauccucc

SEQ ID NO: 2801212 - RNA, 19 nt, Artificial Sequence
  Description of Artificial Sequence: Synthetic oligonucleotide
aguauagaggaacaacaaa

SEQ ID NO: 2801213 - RNA, 19 nt, Artificial Sequence
  Description of Artificial Sequence: Synthetic oligonucleotide
aacuugucuuuguuguucu

SEQ ID NO: 2801214 - RNA, 19 nt, Artificial Sequence
  Description of Artificial Sequence: Synthetic oligonucleotide
aacaaaguauagaggaaca

SEQ ID NO: 2801215 - RNA, 19 nt, Artificial Sequence
  Description of Artificial Sequence: Synthetic oligonucleotide
agcccucccagacagaaag

SEQ ID NO: 2801216 - RNA, 19 nt, Artificial Sequence
  Description of Artificial Sequence: Synthetic oligonucleotide
caaaguauagaggaacaac

SEQ ID NO: 2801217 - RNA, 19 nt, Artificial Sequence
  Description of Artificial Sequence: Synthetic oligonucleotide
agaaaucgguaccuugguc

SEQ ID NO: 2801218 - RNA, 19 nt, Artificial Sequence
  Description of Artificial Sequence: Synthetic oligonucleotide
uugcgagucagauagggau

SEQ ID NO: 2801219 - RNA, 19 nt, Artificial Sequence
  Description of Artificial Sequence: Synthetic oligonucleotide
acagaacaaaguauagagg

SEQ ID NO: 2801220 - RNA, 19 nt, Artificial Sequence
  Description of Artificial Sequence: Synthetic oligonucleotide
agaacuuagcagaaaucgg

SEQ ID NO: 2801221 - RNA, 19 nt, Artificial Sequence
  Description of Artificial Sequence: Synthetic oligonucleotide
uggucauuacaaagaagca

SEQ ID NO: 2801222 - RNA, 19 nt, Artificial Sequence
  Description of Artificial Sequence: Synthetic oligonucleotide
ucauuacaaagaagcacgu

SEQ ID NO: 2801223 - RNA, 19 nt, Artificial Sequence
  Description of Artificial Sequence: Synthetic oligonucleotide
agggauuaaauaggaacuc

SEQ ID NO: 2801224 - RNA, 19 nt, Artificial Sequence
  Description of Artificial Sequence: Synthetic oligonucleotide
uuagcagaaaucgguaccu

SEQ ID NO: 2801225 - RNA, 19 nt, Artificial Sequence
  Description of Artificial Sequence: Synthetic oligonucleotide
agaccauugcacaaagagg

SEQ ID NO: 2801226 - RNA, 19 nt, Artificial Sequence
  Description of Artificial Sequence: Synthetic oligonucleotide
aaacuuuauuguacucuuc

SEQ ID NO: 2801227 - RNA, 19 nt, Artificial Sequence
  Description of Artificial Sequence: Synthetic oligonucleotide
aaaucgguaccuuggucau

SEQ ID NO: 2801228 - RNA, 19 nt, Artificial Sequence
  Description of Artificial Sequence: Synthetic oligonucleotide
cuuguuaaacuuuauugua

SEQ ID NO: 2801229 - RNA, 19 nt, Artificial Sequence
  Description of Artificial Sequence: Synthetic oligonucleotide
cuuggucauuacaaagaag

SEQ ID NO: 2801230 - RNA, 19 nt, Artificial Sequence
  Description of Artificial Sequence: Synthetic oligonucleotide
acagaaagaauuacggcgu

SEQ ID NO: 2801231 - RNA, 19 nt, Artificial Sequence
  Description of Artificial Sequence: Synthetic oligonucleotide
uugucuuuguuguucuccu

SEQ ID NO: 2801232 - RNA, 19 nt, Artificial Sequence
  Description of Artificial Sequence: Synthetic oligonucleotide
ucgcauuuacugcugggga

SEQ ID NO: 2801233 - RNA, 19 nt, Artificial Sequence
  Description of Artificial Sequence: Synthetic oligonucleotide
acugcuggggaacuugucu

SEQ ID NO: 2801234 - RNA, 19 nt, Artificial Sequence
  Description of Artificial Sequence: Synthetic oligonucleotide
uccuuguuuaaaauccuuu

SEQ ID NO: 2801235 - RNA, 19 nt, Artificial Sequence
  Description of Artificial Sequence: Synthetic oligonucleotide
gucccuuucaggcucagac

SEQ ID NO: 2801236 - RNA, 19 nt, Artificial Sequence
  Description of Artificial Sequence: Synthetic oligonucleotide
uaauuagcccucccagaca

SEQ ID NO: 2801237 - RNA, 19 nt, Artificial Sequence
  Description of Artificial Sequence: Synthetic oligonucleotide
aaagaauuacggcgugaau

SEQ ID NO: 2801238 - RNA, 19 nt, Artificial Sequence
  Description of Artificial Sequence: Synthetic oligonucleotide
agcagaaaucgguaccuug

SEQ ID NO: 2801239 - RNA, 19 nt, Artificial Sequence
  Description of Artificial Sequence: Synthetic oligonucleotide
aaguauagaggaacaacaa

SEQ ID NO: 2801240 - RNA, 19 nt, Artificial Sequence
  Description of Artificial Sequence: Synthetic oligonucleotide
ccagacagaaagaauuacg

SEQ ID NO: 2801241 - RNA, 19 nt, Artificial Sequence
  Description of Artificial Sequence: Synthetic oligonucleotide
cucagacaacagaacaaag

SEQ ID NO: 2801242 - RNA, 19 nt, Artificial Sequence
  Description of Artificial Sequence: Synthetic oligonucleotide
aggcucagacaacagaaca

SEQ ID NO: 2801243 - RNA, 19 nt, Artificial Sequence
  Description of Artificial Sequence: Synthetic oligonucleotide
guuaaacuuuauuguacuc

SEQ ID NO: 2801244 - RNA, 19 nt, Artificial Sequence
  Description of Artificial Sequence: Synthetic oligonucleotide
gugaauaggcaguuucaug

SEQ ID NO: 2801245 - RNA, 19 nt, Artificial Sequence
  Description of Artificial Sequence: Synthetic oligonucleotide
accucgauccuccgcuugc

SEQ ID NO: 2801246 - RNA, 19 nt, Artificial Sequence
  Description of Artificial Sequence: Synthetic oligonucleotide
ucauguuguugggagaacu

SEQ ID NO: 2801247 - RNA, 19 nt, Artificial Sequence
  Description of Artificial Sequence: Synthetic oligonucleotide
gauaccucgauccuccgcu

SEQ ID NO: 2801248 - RNA, 19 nt, Artificial Sequence
  Description of Artificial Sequence: Synthetic oligonucleotide
cagacaacagaacaaagua

SEQ ID NO: 2801249 - RNA, 19 nt, Artificial Sequence
  Description of Artificial Sequence: Synthetic oligonucleotide
cucgcauuuacugcugggg

SEQ ID NO: 2801250 - RNA, 19 nt, Artificial Sequence
  Description of Artificial Sequence: Synthetic oligonucleotide
uuucaggcucagacaacag

SEQ ID NO: 2801251 - RNA, 19 nt, Artificial Sequence
  Description of Artificial Sequence: Synthetic oligonucleotide
uuacggcgugaauaggcag

SEQ ID NO: 2801252 - RNA, 19 nt, Artificial Sequence
  Description of Artificial Sequence: Synthetic oligonucleotide
gaacaacaaauauauaauu

SEQ ID NO: 2801253 - RNA, 19 nt, Artificial Sequence
  Description of Artificial Sequence: Synthetic oligonucleotide
uacggcgugaauaggcagu

SEQ ID NO: 2801254 - RNA, 19 nt, Artificial Sequence
  Description of Artificial Sequence: Synthetic oligonucleotide
gaaagaauuacggcgugaa

SEQ ID NO: 2801255 - RNA, 19 nt, Artificial Sequence
  Description of Artificial Sequence: Synthetic oligonucleotide
ucucgcuuguuaaacuuua

SEQ ID NO: 2801256 - RNA, 19 nt, Artificial Sequence
  Description of Artificial Sequence: Synthetic oligonucleotide
ugcucgcauuuacugcugg

SEQ ID NO: 2801257 - RNA, 19 nt, Artificial Sequence
  Description of Artificial Sequence: Synthetic oligonucleotide
gucagauagggauuaaaua

SEQ ID NO: 2801258 - RNA, 19 nt, Artificial Sequence
  Description of Artificial Sequence: Synthetic oligonucleotide
uacaaagaagcacguucaa

SEQ ID NO: 2801259 - RNA, 19 nt, Artificial Sequence
  Description of Artificial Sequence: Synthetic oligonucleotide
ucgauccuccgcuugcgag

SEQ ID NO: 2801260 - RNA, 19 nt, Artificial Sequence
  Description of Artificial Sequence: Synthetic oligonucleotide
uccugcucgcauuuacugc

SEQ ID NO: 2801261 - RNA, 19 nt, Artificial Sequence
  Description of Artificial Sequence: Synthetic oligonucleotide
agauagggauuaaauagga

SEQ ID NO: 2801262 - RNA, 19 nt, Artificial Sequence
  Description of Artificial Sequence: Synthetic oligonucleotide
cucugucagucccagcgcg

SEQ ID NO: 2801263 - RNA, 19 nt, Artificial Sequence
  Description of Artificial Sequence: Synthetic oligonucleotide
guauagaggaacaacaaau

SEQ ID NO: 2801264 - RNA, 19 nt, Artificial Sequence
  Description of Artificial Sequence: Synthetic oligonucleotide
ucucugucagucccagcgc

SEQ ID NO: 2801265 - RNA, 19 nt, Artificial Sequence
  Description of Artificial Sequence: Synthetic oligonucleotide
gcagaaaucgguaccuugg

SEQ ID NO: 2801266 - RNA, 19 nt, Artificial Sequence
  Description of Artificial Sequence: Synthetic oligonucleotide
cgcuuguuaaacuuuauug

SEQ ID NO: 2801267 - RNA, 19 nt, Artificial Sequence
  Description of Artificial Sequence: Synthetic oligonucleotide
gaauuacggcgugaauagg

SEQ ID NO: 2801268 - RNA, 19 nt, Artificial Sequence
  Description of Artificial Sequence: Synthetic oligonucleotide
ggucauuacaaagaagcac

SEQ ID NO: 2801269 - RNA, 19 nt, Artificial Sequence
  Description of Artificial Sequence: Synthetic oligonucleotide
gaacuuagcagaaaucggu

SEQ ID NO: 2801270 - RNA, 19 nt, Artificial Sequence
  Description of Artificial Sequence: Synthetic oligonucleotide
agucgcucacccucgcagg

SEQ ID NO: 2801271 - RNA, 19 nt, Artificial Sequence
  Description of Artificial Sequence: Synthetic oligonucleotide
agucagauagggauuaaau

SEQ ID NO: 2801272 - RNA, 19 nt, Artificial Sequence
  Description of Artificial Sequence: Synthetic oligonucleotide
ccgcuugcgagucagauag

SEQ ID NO: 2801273 - RNA, 19 nt, Artificial Sequence
  Description of Artificial Sequence: Synthetic oligonucleotide
uuacugcuggggaacuugu

SEQ ID NO: 2801274 - RNA, 19 nt, Artificial Sequence
  Description of Artificial Sequence: Synthetic oligonucleotide
ucgcuuguuaaacuuuauu

SEQ ID NO: 2801275 - RNA, 19 nt, Artificial Sequence
  Description of Artificial Sequence: Synthetic oligonucleotide
ucccagacagaaagaauua

SEQ ID NO: 2801276 - RNA, 19 nt, Artificial Sequence
  Description of Artificial Sequence: Synthetic oligonucleotide
guuguugggagaacuuagc

SEQ ID NO: 2801277 - RNA, 19 nt, Artificial Sequence
  Description of Artificial Sequence: Synthetic oligonucleotide
ucuuuguuguucuccuuuu

SEQ ID NO: 2801278 - RNA, 19 nt, Artificial Sequence
  Description of Artificial Sequence: Synthetic oligonucleotide
aacuuagcagaaaucggua

SEQ ID NO: 2801279 - RNA, 19 nt, Artificial Sequence
  Description of Artificial Sequence: Synthetic oligonucleotide
cuuuauuguacucuuccgu

SEQ ID NO: 2801280 - RNA, 19 nt, Artificial Sequence
  Description of Artificial Sequence: Synthetic oligonucleotide
ucccuuucaggcucagaca

SEQ ID NO: 2801281 - RNA, 19 nt, Artificial Sequence
  Description of Artificial Sequence: Synthetic oligonucleotide
accugucucucugucaguc

SEQ ID NO: 2801282 - RNA, 19 nt, Artificial Sequence
  Description of Artificial Sequence: Synthetic oligonucleotide
ggaguccuuguuuaaaauc

SEQ ID NO: 2801283 - RNA, 19 nt, Artificial Sequence
  Description of Artificial Sequence: Synthetic oligonucleotide
accuuggucauuacaaaga

SEQ ID NO: 2801284 - RNA, 19 nt, Artificial Sequence
  Description of Artificial Sequence: Synthetic oligonucleotide
agaagcacguucaaaggaa

SEQ ID NO: 2801285 - RNA, 19 nt, Artificial Sequence
  Description of Artificial Sequence: Synthetic oligonucleotide
gcuuguuaaacuuuauugu

SEQ ID NO: 2801286 - RNA, 19 nt, Artificial Sequence
  Description of Artificial Sequence: Synthetic oligonucleotide
uuagcccucccagacagaa

SEQ ID NO: 2801287 - RNA, 19 nt, Artificial Sequence
  Description of Artificial Sequence: Synthetic oligonucleotide
agggaguccuuguuuaaaa

SEQ ID NO: 2801288 - RNA, 19 nt, Artificial Sequence
  Description of Artificial Sequence: Synthetic oligonucleotide
acaaaguauagaggaacaa

SEQ ID NO: 2801289 - RNA, 19 nt, Artificial Sequence
  Description of Artificial Sequence: Synthetic oligonucleotide
agacaacagaacaaaguau

SEQ ID NO: 2801290 - RNA, 19 nt, Artificial Sequence
  Description of Artificial Sequence: Synthetic oligonucleotide
uucucgcuuguuaaacuuu

SEQ ID NO: 2801291 - RNA, 19 nt, Artificial Sequence
  Description of Artificial Sequence: Synthetic oligonucleotide
auaggcaguuucauguugu

SEQ ID NO: 2801292 - RNA, 19 nt, Artificial Sequence
  Description of Artificial Sequence: Synthetic oligonucleotide
cuuucaggcucagacaaca

SEQ ID NO: 2801293 - RNA, 19 nt, Artificial Sequence
  Description of Artificial Sequence: Synthetic oligonucleotide
acucuuccgucccuuucag

SEQ ID NO: 2801294 - RNA, 19 nt, Artificial Sequence
  Description of Artificial Sequence: Synthetic oligonucleotide
auuacggcgugaauaggca

SEQ ID NO: 2801295 - RNA, 19 nt, Artificial Sequence
  Description of Artificial Sequence: Synthetic oligonucleotide
cagucgcucacccucgcag

SEQ ID NO: 2801296 - RNA, 19 nt, Artificial Sequence
  Description of Artificial Sequence: Synthetic oligonucleotide
guuucauguuguugggaga

SEQ ID NO: 2801297 - RNA, 19 nt, Artificial Sequence
  Description of Artificial Sequence: Synthetic oligonucleotide
cagaaagaauuacggcgug

SEQ ID NO: 2801298 - RNA, 19 nt, Artificial Sequence
  Description of Artificial Sequence: Synthetic oligonucleotide
agaacaaaguauagaggaa

SEQ ID NO: 2801299 - RNA, 19 nt, Artificial Sequence
  Description of Artificial Sequence: Synthetic oligonucleotide
cagcgcgugcgauaccucg

SEQ ID NO: 2801300 - RNA, 19 nt, Artificial Sequence
  Description of Artificial Sequence: Synthetic oligonucleotide
uuccgucccuuucaggcuc

SEQ ID NO: 2801301 - RNA, 19 nt, Artificial Sequence
  Description of Artificial Sequence: Synthetic oligonucleotide
ugcgagucagauagggauu

SEQ ID NO: 2801302 - RNA, 19 nt, Artificial Sequence
  Description of Artificial Sequence: Synthetic oligonucleotide
acaaagaagcacguucaaa

SEQ ID NO: 2801303 - RNA, 19 nt, Artificial Sequence
  Description of Artificial Sequence: Synthetic oligonucleotide
gcgugcgauaccucgaucc

SEQ ID NO: 2801304 - RNA, 19 nt, Artificial Sequence
  Description of Artificial Sequence: Synthetic oligonucleotide
caacagaacaaaguauaga

SEQ ID NO: 2801305 - RNA, 19 nt, Artificial Sequence
  Description of Artificial Sequence: Synthetic oligonucleotide
agaaagaauuacggcguga

SEQ ID NO: 2801306 - RNA, 19 nt, Artificial Sequence
  Description of Artificial Sequence: Synthetic oligonucleotide
ucugucagucccagcgcgu

SEQ ID NO: 2801307 - RNA, 19 nt, Artificial Sequence
  Description of Artificial Sequence: Synthetic oligonucleotide
gauagggauuaaauaggaa

SEQ ID NO: 2801308 - RNA, 19 nt, Artificial Sequence
  Description of Artificial Sequence: Synthetic oligonucleotide
gcuugcgagucagauaggg

SEQ ID NO: 2801309 - RNA, 19 nt, Artificial Sequence
  Description of Artificial Sequence: Synthetic oligonucleotide
caggcucagacaacagaac

SEQ ID NO: 2801310 - RNA, 19 nt, Artificial Sequence
  Description of Artificial Sequence: Synthetic oligonucleotide
gucgcucacccucgcaggg

SEQ ID NO: 2801311 - RNA, 19 nt, Artificial Sequence
  Description of Artificial Sequence: Synthetic oligonucleotide
agcagucgcucacccucgc

SEQ ID NO: 2801312 - RNA, 19 nt, Artificial Sequence
  Description of Artificial Sequence: Synthetic oligonucleotide
auuguacucuuccgucccu

SEQ ID NO: 2801313 - RNA, 19 nt, Artificial Sequence
  Description of Artificial Sequence: Synthetic oligonucleotide
ggcgugaauaggcaguuuc

SEQ ID NO: 2801314 - RNA, 19 nt, Artificial Sequence
  Description of Artificial Sequence: Synthetic oligonucleotide
uaccucgauccuccgcuug

SEQ ID NO: 2801315 - RNA, 19 nt, Artificial Sequence
  Description of Artificial Sequence: Synthetic oligonucleotide
gucagucccagcgcgugcg

SEQ ID NO: 2801316 - RNA, 19 nt, Artificial Sequence
  Description of Artificial Sequence: Synthetic oligonucleotide
uggggaacuugucuuuguu

SEQ ID NO: 2801317 - RNA, 19 nt, Artificial Sequence
  Description of Artificial Sequence: Synthetic oligonucleotide
aguccuuguuuaaaauccu

SEQ ID NO: 2801318 - RNA, 19 nt, Artificial Sequence
  Description of Artificial Sequence: Synthetic oligonucleotide
ggaacaacaaauauauaau

SEQ ID NO: 2801319 - RNA, 19 nt, Artificial Sequence
  Description of Artificial Sequence: Synthetic oligonucleotide
guaccuuggucauuacaaa

SEQ ID NO: 2801320 - RNA, 19 nt, Artificial Sequence
  Description of Artificial Sequence: Synthetic oligonucleotide
cucccagacagaaagaauu

SEQ ID NO: 2801321 - RNA, 19 nt, Artificial Sequence
  Description of Artificial Sequence: Synthetic oligonucleotide
aucgguaccuuggucauua

SEQ ID NO: 2801322 - RNA, 19 nt, Artificial Sequence
  Description of Artificial Sequence: Synthetic oligonucleotide
gauuaaauaggaacuccuu

SEQ ID NO: 2801323 - RNA, 19 nt, Artificial Sequence
  Description of Artificial Sequence: Synthetic oligonucleotide
cccaagagaagggagcucc

SEQ ID NO: 2801324 - RNA, 19 nt, Artificial Sequence
  Description of Artificial Sequence: Synthetic oligonucleotide
cuugcgagucagauaggga

SEQ ID NO: 2801325 - RNA, 19 nt, Artificial Sequence
  Description of Artificial Sequence: Synthetic oligonucleotide
aagcacguucaaaggaaaa

SEQ ID NO: 2801326 - RNA, 19 nt, Artificial Sequence
  Description of Artificial Sequence: Synthetic oligonucleotide
gaagcacguucaaaggaaa

SEQ ID NO: 2801327 - RNA, 19 nt, Artificial Sequence
  Description of Artificial Sequence: Synthetic oligonucleotide
cucuuccgucccuuucagg

SEQ ID NO: 2801328 - RNA, 19 nt, Artificial Sequence
  Description of Artificial Sequence: Synthetic oligonucleotide
aggcaguuucauguuguug

SEQ ID NO: 2801329 - RNA, 19 nt, Artificial Sequence
  Description of Artificial Sequence: Synthetic oligonucleotide
cagcagucgcucacccucg

SEQ ID NO: 2801330 - RNA, 19 nt, Artificial Sequence
  Description of Artificial Sequence: Synthetic oligonucleotide
auguuguugggagaacuua

SEQ ID NO: 2801331 - RNA, 19 nt, Artificial Sequence
  Description of Artificial Sequence: Synthetic oligonucleotide
uucauguuguugggagaac

SEQ ID NO: 2801332 - RNA, 19 nt, Artificial Sequence
  Description of Artificial Sequence: Synthetic oligonucleotide
uguacucuuccgucccuuu

SEQ ID NO: 2801333 - RNA, 19 nt, Artificial Sequence
  Description of Artificial Sequence: Synthetic oligonucleotide
uacugcuggggaacuuguc

SEQ ID NO: 2801334 - RNA, 19 nt, Artificial Sequence
  Description of Artificial Sequence: Synthetic oligonucleotide
guacucuuccgucccuuuc

SEQ ID NO: 2801335 - RNA, 19 nt, Artificial Sequence
  Description of Artificial Sequence: Synthetic oligonucleotide
gagucagauagggauuaaa

SEQ ID NO: 2801336 - RNA, 19 nt, Artificial Sequence
  Description of Artificial Sequence: Synthetic oligonucleotide
uccgcuugcgagucagaua

SEQ ID NO: 2801337 - RNA, 19 nt, Artificial Sequence
  Description of Artificial Sequence: Synthetic oligonucleotide
ugucuuuguuguucuccuu

SEQ ID NO: 2801338 - RNA, 19 nt, Artificial Sequence
  Description of Artificial Sequence: Synthetic oligonucleotide
ugcuggggaacuugucuuu

SEQ ID NO: 2801339 - RNA, 19 nt, Artificial Sequence
  Description of Artificial Sequence: Synthetic oligonucleotide
ggauuaaauaggaacuccu

SEQ ID NO: 2801340 - RNA, 19 nt, Artificial Sequence
  Description of Artificial Sequence: Synthetic oligonucleotide
gauccuccgcuugcgaguc

SEQ ID NO: 2801341 - RNA, 19 nt, Artificial Sequence
  Description of Artificial Sequence: Synthetic oligonucleotide
gcucgcauuuacugcuggg

SEQ ID NO: 2801342 - RNA, 19 nt, Artificial Sequence
  Description of Artificial Sequence: Synthetic oligonucleotide
gaauaggcaguuucauguu

SEQ ID NO: 2801343 - RNA, 19 nt, Artificial Sequence
  Description of Artificial Sequence: Synthetic oligonucleotide
ucucucugucagucccagc

SEQ ID NO: 2801344 - RNA, 19 nt, Artificial Sequence
  Description of Artificial Sequence: Synthetic oligonucleotide
uaggcaguuucauguuguu

SEQ ID NO: 2801345 - RNA, 19 nt, Artificial Sequence
  Description of Artificial Sequence: Synthetic oligonucleotide
ugggagaacuuagcagaaa

SEQ ID NO: 2801346 - RNA, 19 nt, Artificial Sequence
  Description of Artificial Sequence: Synthetic oligonucleotide
agggcgagggaguccuugu

SEQ ID NO: 2801347 - RNA, 19 nt, Artificial Sequence
  Description of Artificial Sequence: Synthetic oligonucleotide
accauugcacaaagaggcu

SEQ ID NO: 2801348 - RNA, 19 nt, Artificial Sequence
  Description of Artificial Sequence: Synthetic oligonucleotide
gucuuuguuguucuccuuu

SEQ ID NO: 2801349 - RNA, 19 nt, Artificial Sequence
  Description of Artificial Sequence: Synthetic oligonucleotide
cugcucgcauuuacugcug

SEQ ID NO: 2801350 - RNA, 19 nt, Artificial Sequence
  Description of Artificial Sequence: Synthetic oligonucleotide
gagggaguccuuguuuaaa

SEQ ID NO: 2801351 - RNA, 19 nt, Artificial Sequence
  Description of Artificial Sequence: Synthetic oligonucleotide
cugucagucccagcgcgug

SEQ ID NO: 2801352 - RNA, 19 nt, Artificial Sequence
  Description of Artificial Sequence: Synthetic oligonucleotide
gcucagacaacagaacaaa

SEQ ID NO: 2801353 - RNA, 19 nt, Artificial Sequence
  Description of Artificial Sequence: Synthetic oligonucleotide
cacccucgcagggcgaggg

SEQ ID NO: 2801354 - RNA, 19 nt, Artificial Sequence
  Description of Artificial Sequence: Synthetic oligonucleotide
cauugcacaaagaggcuuu

SEQ ID NO: 2801355 - RNA, 19 nt, Artificial Sequence
  Description of Artificial Sequence: Synthetic oligonucleotide
uuguacucuuccgucccuu

SEQ ID NO: 2801356 - RNA, 19 nt, Artificial Sequence
  Description of Artificial Sequence: Synthetic oligonucleotide
cucacccucgcagggcgag

SEQ ID NO: 2801357 - RNA, 19 nt, Artificial Sequence
  Description of Artificial Sequence: Synthetic oligonucleotide
ccuuggucauuacaaagaa

SEQ ID NO: 2801358 - RNA, 19 nt, Artificial Sequence
  Description of Artificial Sequence: Synthetic oligonucleotide
gucccagcgcgugcgauac

SEQ ID NO: 2801359 - RNA, 19 nt, Artificial Sequence
  Description of Artificial Sequence: Synthetic oligonucleotide
ucacccucgcagggcgagg

SEQ ID NO: 2801360 - RNA, 19 nt, Artificial Sequence
  Description of Artificial Sequence: Synthetic oligonucleotide
agucccagcgcgugcgaua

SEQ ID NO: 2801361 - RNA, 19 nt, Artificial Sequence
  Description of Artificial Sequence: Synthetic oligonucleotide
uagcccucccagacagaaa

SEQ ID NO: 2801362 - RNA, 19 nt, Artificial Sequence
  Description of Artificial Sequence: Synthetic oligonucleotide
ccugucucucugucagucc

SEQ ID NO: 2801363 - RNA, 19 nt, Artificial Sequence
  Description of Artificial Sequence: Synthetic oligonucleotide
cuccgguucuggaaccaga

SEQ ID NO: 2801364 - RNA, 19 nt, Artificial Sequence
  Description of Artificial Sequence: Synthetic oligonucleotide
ucgcucacccucgcagggc

SEQ ID NO: 2801365 - RNA, 19 nt, Artificial Sequence
  Description of Artificial Sequence: Synthetic oligonucleotide
aaucgguaccuuggucauu

SEQ ID NO: 2801366 - RNA, 19 nt, Artificial Sequence
  Description of Artificial Sequence: Synthetic oligonucleotide
ggcucagacaacagaacaa

SEQ ID NO: 2801367 - RNA, 19 nt, Artificial Sequence
  Description of Artificial Sequence: Synthetic oligonucleotide
cccuuucaggcucagacaa

SEQ ID NO: 2801368 - RNA, 19 nt, Artificial Sequence
  Description of Artificial Sequence: Synthetic oligonucleotide
cagaaaucgguaccuuggu

SEQ ID NO: 2801369 - RNA, 19 nt, Artificial Sequence
  Description of Artificial Sequence: Synthetic oligonucleotide
gaggaacaacaaauauaua

SEQ ID NO: 2801370 - RNA, 19 nt, Artificial Sequence
  Description of Artificial Sequence: Synthetic oligonucleotide
uggcaggcagcagucgcuc

SEQ ID NO: 2801371 - RNA, 19 nt, Artificial Sequence
  Description of Artificial Sequence: Synthetic oligonucleotide
auaccucgauccuccgcuu

SEQ ID NO: 2801372 - RNA, 19 nt, Artificial Sequence
  Description of Artificial Sequence: Synthetic oligonucleotide
cccagacagaaagaauuac

SEQ ID NO: 2801373 - RNA, 19 nt, Artificial Sequence
  Description of Artificial Sequence: Synthetic oligonucleotide
auuuacugcuggggaacuu

SEQ ID NO: 2801374 - RNA, 19 nt, Artificial Sequence
  Description of Artificial Sequence: Synthetic oligonucleotide
uagcagaaaucgguaccuu

SEQ ID NO: 2801375 - RNA, 19 nt, Artificial Sequence
  Description of Artificial Sequence: Synthetic oligonucleotide
caguuucauguuguuggga

SEQ ID NO: 2801376 - RNA, 19 nt, Artificial Sequence
  Description of Artificial Sequence: Synthetic oligonucleotide
ucgguaccuuggucauuac

SEQ ID NO: 2801377 - RNA, 19 nt, Artificial Sequence
  Description of Artificial Sequence: Synthetic oligonucleotide
gcaggcagcagucgcucac

SEQ ID NO: 2801378 - RNA, 19 nt, Artificial Sequence
  Description of Artificial Sequence: Synthetic oligonucleotide
gaagggagcuccagcuucu

SEQ ID NO: 2801379 - RNA, 19 nt, Artificial Sequence
  Description of Artificial Sequence: Synthetic oligonucleotide
cagggcgagggaguccuug

SEQ ID NO: 2801380 - RNA, 19 nt, Artificial Sequence
  Description of Artificial Sequence: Synthetic oligonucleotide
gugcgauaccucgauccuc

SEQ ID NO: 2801381 - RNA, 19 nt, Artificial Sequence
  Description of Artificial Sequence: Synthetic oligonucleotide
acggcgugaauaggcaguu

SEQ ID NO: 2801382 - RNA, 19 nt, Artificial Sequence
  Description of Artificial Sequence: Synthetic oligonucleotide
ccuuucaggcucagacaac

SEQ ID NO: 2801383 - RNA, 19 nt, Artificial Sequence
  Description of Artificial Sequence: Synthetic oligonucleotide
gcuggggaacuugucuuug

SEQ ID NO: 2801384 - RNA, 19 nt, Artificial Sequence
  Description of Artificial Sequence: Synthetic oligonucleotide
cuuccgucccuuucaggcu

SEQ ID NO: 2801385 - RNA, 19 nt, Artificial Sequence
  Description of Artificial Sequence: Synthetic oligonucleotide
gagaagggagcuccagcuu

SEQ ID NO: 2801386 - RNA, 19 nt, Artificial Sequence
  Description of Artificial Sequence: Synthetic oligonucleotide
ggcucuggcaggcagcagu

SEQ ID NO: 2801387 - RNA, 19 nt, Artificial Sequence
  Description of Artificial Sequence: Synthetic oligonucleotide
ccuuguuuaaaauccuuuu

SEQ ID NO: 2801388 - RNA, 19 nt, Artificial Sequence
  Description of Artificial Sequence: Synthetic oligonucleotide
gcgugaauaggcaguuuca

SEQ ID NO: 2801389 - RNA, 19 nt, Artificial Sequence
  Description of Artificial Sequence: Synthetic oligonucleotide
gcgauaccucgauccuccg

SEQ ID NO: 2801390 - RNA, 19 nt, Artificial Sequence
  Description of Artificial Sequence: Synthetic oligonucleotide
gcgagggaguccuuguuua

SEQ ID NO: 2801391 - RNA, 19 nt, Artificial Sequence
  Description of Artificial Sequence: Synthetic oligonucleotide
agcgcgugcgauaccucga

SEQ ID NO: 2801392 - RNA, 19 nt, Artificial Sequence
  Description of Artificial Sequence: Synthetic oligonucleotide
cucgauccuccgcuugcga

SEQ ID NO: 2801393 - RNA, 19 nt, Artificial Sequence
  Description of Artificial Sequence: Synthetic oligonucleotide
ccugcucgcauuuacugcu

SEQ ID NO: 2801394 - RNA, 19 nt, Artificial Sequence
  Description of Artificial Sequence: Synthetic oligonucleotide
ucccagcgcgugcgauacc

SEQ ID NO: 2801395 - RNA, 19 nt, Artificial Sequence
  Description of Artificial Sequence: Synthetic oligonucleotide
ucgcagggcgagggagucc

SEQ ID NO: 2801396 - RNA, 19 nt, Artificial Sequence
  Description of Artificial Sequence: Synthetic oligonucleotide
auuagcccucccagacaga

SEQ ID NO: 2801397 - RNA, 19 nt, Artificial Sequence
  Description of Artificial Sequence: Synthetic oligonucleotide
cugcuggggaacuugucuu

SEQ ID NO: 2801398 - RNA, 19 nt, Artificial Sequence
  Description of Artificial Sequence: Synthetic oligonucleotide
gggaguccuuguuuaaaau

SEQ ID NO: 2801399 - RNA, 19 nt, Artificial Sequence
  Description of Artificial Sequence: Synthetic oligonucleotide
cauuacaaagaagcacguu

SEQ ID NO: 2801400 - RNA, 19 nt, Artificial Sequence
  Description of Artificial Sequence: Synthetic oligonucleotide
cuggggaacuugucuuugu

SEQ ID NO: 2801401 - RNA, 19 nt, Artificial Sequence
  Description of Artificial Sequence: Synthetic oligonucleotide
cgcucacccucgcagggcg

SEQ ID NO: 2801402 - RNA, 19 nt, Artificial Sequence
  Description of Artificial Sequence: Synthetic oligonucleotide
cucgcuuguuaaacuuuau

SEQ ID NO: 2801403 - RNA, 19 nt, Artificial Sequence
  Description of Artificial Sequence: Synthetic oligonucleotide
cgauaccucgauccuccgc

SEQ ID NO: 2801404 - RNA, 19 nt, Artificial Sequence
  Description of Artificial Sequence: Synthetic oligonucleotide
gggagcuccagcuucucuu

SEQ ID NO: 2801405 - RNA, 19 nt, Artificial Sequence
  Description of Artificial Sequence: Synthetic oligonucleotide
ccucgauccuccgcuugcg

SEQ ID NO: 2801406 - RNA, 19 nt, Artificial Sequence
  Description of Artificial Sequence: Synthetic oligonucleotide
acccucgcagggcgaggga

SEQ ID NO: 2801407 - RNA, 19 nt, Artificial Sequence
  Description of Artificial Sequence: Synthetic oligonucleotide
guccuuguuuaaaauccuu

SEQ ID NO: 2801408 - RNA, 19 nt, Artificial Sequence
  Description of Artificial Sequence: Synthetic oligonucleotide
gcgagucagauagggauua

SEQ ID NO: 2801409 - RNA, 19 nt, Artificial Sequence
  Description of Artificial Sequence: Synthetic oligonucleotide
ccaagagaagggagcucca

SEQ ID NO: 2801410 - RNA, 19 nt, Artificial Sequence
  Description of Artificial Sequence: Synthetic oligonucleotide
ggagcuccagcuucucuuu

SEQ ID NO: 2801411 - RNA, 19 nt, Artificial Sequence
  Description of Artificial Sequence: Synthetic oligonucleotide
ggcaggcagcagucgcuca

SEQ ID NO: 2801412 - RNA, 19 nt, Artificial Sequence
  Description of Artificial Sequence: Synthetic oligonucleotide
cccucccagacagaaagaa

SEQ ID NO: 2801413 - RNA, 19 nt, Artificial Sequence
  Description of Artificial Sequence: Synthetic oligonucleotide
gcagucgcucacccucgca

SEQ ID NO: 2801414 - RNA, 19 nt, Artificial Sequence
  Description of Artificial Sequence: Synthetic oligonucleotide
ggcgagggaguccuuguuu

SEQ ID NO: 2801415 - RNA, 19 nt, Artificial Sequence
  Description of Artificial Sequence: Synthetic oligonucleotide
cuccgcuugcgagucagau

SEQ ID NO: 2801416 - RNA, 19 nt, Artificial Sequence
  Description of Artificial Sequence: Synthetic oligonucleotide
cgcuugcgagucagauagg

SEQ ID NO: 2801417 - RNA, 19 nt, Artificial Sequence
  Description of Artificial Sequence: Synthetic oligonucleotide
cgguaccuuggucauuaca

SEQ ID NO: 2801418 - RNA, 19 nt, Artificial Sequence
  Description of Artificial Sequence: Synthetic oligonucleotide
ccagcgcgugcgauaccuc

SEQ ID NO: 2801419 - RNA, 19 nt, Artificial Sequence
  Description of Artificial Sequence: Synthetic oligonucleotide
ggcagcagucgcucacccu

SEQ ID NO: 2801420 - RNA, 19 nt, Artificial Sequence
  Description of Artificial Sequence: Synthetic oligonucleotide
ccucccagacagaaagaau

SEQ ID NO: 2801421 - RNA, 19 nt, Artificial Sequence
  Description of Artificial Sequence: Synthetic oligonucleotide
ccauugcacaaagaggcuu

SEQ ID NO: 2801422 - RNA, 19 nt, Artificial Sequence
  Description of Artificial Sequence: Synthetic oligonucleotide
ccccaagagaagggagcuc

SEQ ID NO: 2801423 - RNA, 19 nt, Artificial Sequence
  Description of Artificial Sequence: Synthetic oligonucleotide
cgugaauaggcaguuucau

SEQ ID NO: 2801424 - RNA, 19 nt, Artificial Sequence
  Description of Artificial Sequence: Synthetic oligonucleotide
cgauccuccgcuugcgagu

SEQ ID NO: 2801425 - RNA, 19 nt, Artificial Sequence
  Description of Artificial Sequence: Synthetic oligonucleotide
cgagggaguccuuguuuaa

SEQ ID NO: 2801426 - RNA, 19 nt, Artificial Sequence
  Description of Artificial Sequence: Synthetic oligonucleotide
gcccucccagacagaaaga

SEQ ID NO: 2801427 - RNA, 19 nt, Artificial Sequence
  Description of Artificial Sequence: Synthetic oligonucleotide
cgugcgauaccucgauccu

SEQ ID NO: 2801428 - RNA, 19 nt, Artificial Sequence
  Description of Artificial Sequence: Synthetic oligonucleotide
cccagcgcgugcgauaccu

SEQ ID NO: 2801429 - RNA, 19 nt, Artificial Sequence
  Description of Artificial Sequence: Synthetic oligonucleotide
gcgcgugcgauaccucgau

SEQ ID NO: 2801430 - RNA, 19 nt, Artificial Sequence
  Description of Artificial Sequence: Synthetic oligonucleotide
cgcgugcgauaccucgauc

SEQ ID NO: 2801431 - RNA, 19 nt, Artificial Sequence
  Description of Artificial Sequence: Synthetic oligonucleotide
ccucgcagggcgagggagu

SEQ ID NO: 2801432 - RNA, 19 nt, Artificial Sequence
  Description of Artificial Sequence: Synthetic oligonucleotide
cuccuccugcucgcauuua

SEQ ID NO: 2801433 - RNA, 19 nt, Artificial Sequence
  Description of Artificial Sequence: Synthetic oligonucleotide
cagcuccuccugcucgcau

SEQ ID NO: 2801434 - RNA, 19 nt, Artificial Sequence
  Description of Artificial Sequence: Synthetic oligonucleotide
gggcgagggaguccuuguu

SEQ ID NO: 2801435 - RNA, 19 nt, Artificial Sequence
  Description of Artificial Sequence: Synthetic oligonucleotide
gcucacccucgcagggcga

SEQ ID NO: 2801436 - RNA, 19 nt, Artificial Sequence
  Description of Artificial Sequence: Synthetic oligonucleotide
ccuccgcuugcgagucaga

SEQ ID NO: 2801437 - RNA, 19 nt, Artificial Sequence
  Description of Artificial Sequence: Synthetic oligonucleotide
cagucccagcgcgugcgau

SEQ ID NO: 2801438 - RNA, 19 nt, Artificial Sequence
  Description of Artificial Sequence: Synthetic oligonucleotide
ccgucccuuucaggcucag

SEQ ID NO: 2801439 - RNA, 19 nt, Artificial Sequence
  Description of Artificial Sequence: Synthetic oligonucleotide
cgcagggcgagggaguccu

SEQ ID NO: 2801440 - RNA, 19 nt, Artificial Sequence
  Description of Artificial Sequence: Synthetic oligonucleotide
cgagucagauagggauuaa

SEQ ID NO: 2801441 - RNA, 19 nt, Artificial Sequence
  Description of Artificial Sequence: Synthetic oligonucleotide
cgucccuuucaggcucaga

SEQ ID NO: 2801442 - RNA, 19 nt, Artificial Sequence
  Description of Artificial Sequence: Synthetic oligonucleotide
gcagggcgagggaguccuu

SEQ ID NO: 2801443 - RNA, 19 nt, Artificial Sequence
  Description of Artificial Sequence: Synthetic oligonucleotide
cggcgugaauaggcaguuu

SEQ ID NO: 2801444 - RNA, 19 nt, Artificial Sequence
  Description of Artificial Sequence: Synthetic oligonucleotide
uuaaacuagucuuuaaugg

SEQ ID NO: 2801445 - RNA, 19 nt, Artificial Sequence
  Description of Artificial Sequence: Synthetic oligonucleotide
uugaacuucauuuuggcgg

SEQ ID NO: 2801446 - RNA, 19 nt, Artificial Sequence
  Description of Artificial Sequence: Synthetic oligonucleotide
uucgaaugggcauagaucg

SEQ ID NO: 2801447 - RNA, 19 nt, Artificial Sequence
  Description of Artificial Sequence: Synthetic oligonucleotide
gaagacaugaucuuccucc

SEQ ID NO: 2801448 - RNA, 19 nt, Artificial Sequence
  Description of Artificial Sequence: Synthetic oligonucleotide
gugauaaccaccuugcugg

SEQ ID NO: 2801449 - RNA, 19 nt, Artificial Sequence
  Description of Artificial Sequence: Synthetic oligonucleotide
aacauuguacuucugucuc

SEQ ID NO: 2801450 - RNA, 19 nt, Artificial Sequence
  Description of Artificial Sequence: Synthetic oligonucleotide
agaaggugcauugaaaugc

SEQ ID NO: 2801451 - RNA, 19 nt, Artificial Sequence
  Description of Artificial Sequence: Synthetic oligonucleotide
ucuuuguccagcuuuagcc

SEQ ID NO: 2801452 - RNA, 19 nt, Artificial Sequence
  Description of Artificial Sequence: Synthetic oligonucleotide
auugaaaugccguuugcgg

SEQ ID NO: 2801453 - RNA, 19 nt, Artificial Sequence
  Description of Artificial Sequence: Synthetic oligonucleotide
aagggauugaacuucauuu

SEQ ID NO: 2801454 - RNA, 19 nt, Artificial Sequence
  Description of Artificial Sequence: Synthetic oligonucleotide
ucuugcuucggucagaagu

SEQ ID NO: 2801455 - RNA, 19 nt, Artificial Sequence
  Description of Artificial Sequence: Synthetic oligonucleotide
cuuaaacuagucuuuaaug

SEQ ID NO: 2801456 - RNA, 19 nt, Artificial Sequence
  Description of Artificial Sequence: Synthetic oligonucleotide
acucguucaauguagauga

SEQ ID NO: 2801457 - RNA, 19 nt, Artificial Sequence
  Description of Artificial Sequence: Synthetic oligonucleotide
ucuccuuuccuacuugucg

SEQ ID NO: 2801458 - RNA, 19 nt, Artificial Sequence
  Description of Artificial Sequence: Synthetic oligonucleotide
aacuucaucauccuuucga

SEQ ID NO: 2801459 - RNA, 19 nt, Artificial Sequence
  Description of Artificial Sequence: Synthetic oligonucleotide
cauagaucgaacauuguac

SEQ ID NO: 2801460 - RNA, 19 nt, Artificial Sequence
  Description of Artificial Sequence: Synthetic oligonucleotide
ucagaagucacgaagggau

SEQ ID NO: 2801461 - RNA, 19 nt, Artificial Sequence
  Description of Artificial Sequence: Synthetic oligonucleotide
ucaucauccuuucgaaugg

SEQ ID NO: 2801462 - RNA, 19 nt, Artificial Sequence
  Description of Artificial Sequence: Synthetic oligonucleotide
uaaacuagucuuuaaugga

SEQ ID NO: 2801463 - RNA, 19 nt, Artificial Sequence
  Description of Artificial Sequence: Synthetic oligonucleotide
aagaggggaagacaugauc

SEQ ID NO: 2801464 - RNA, 19 nt, Artificial Sequence
  Description of Artificial Sequence: Synthetic oligonucleotide
aauggaagcaguguaugag

SEQ ID NO: 2801465 - RNA, 19 nt, Artificial Sequence
  Description of Artificial Sequence: Synthetic oligonucleotide
cuuuccaggaucuucuugc

SEQ ID NO: 2801466 - RNA, 19 nt, Artificial Sequence
  Description of Artificial Sequence: Synthetic oligonucleotide
auguagaugacguauuucu

SEQ ID NO: 2801467 - RNA, 19 nt, Artificial Sequence
  Description of Artificial Sequence: Synthetic oligonucleotide
auugaacuucauuuuggcg

SEQ ID NO: 2801468 - RNA, 19 nt, Artificial Sequence
  Description of Artificial Sequence: Synthetic oligonucleotide
cuuccuauacaccuggacc

SEQ ID NO: 2801469 - RNA, 19 nt, Artificial Sequence
  Description of Artificial Sequence: Synthetic oligonucleotide
aaucugcuggccuuuguag

SEQ ID NO: 2801470 - RNA, 19 nt, Artificial Sequence
  Description of Artificial Sequence: Synthetic oligonucleotide
cacuuugccaaucugcugg

SEQ ID NO: 2801471 - RNA, 19 nt, Artificial Sequence
  Description of Artificial Sequence: Synthetic oligonucleotide
aagacaugaucuuccuccg

SEQ ID NO: 2801472 - RNA, 19 nt, Artificial Sequence
  Description of Artificial Sequence: Synthetic oligonucleotide
cuuguauuugcccuucucc

SEQ ID NO: 2801473 - RNA, 19 nt, Artificial Sequence
  Description of Artificial Sequence: Synthetic oligonucleotide
gauugaacuucauuuuggc

SEQ ID NO: 2801474 - RNA, 19 nt, Artificial Sequence
  Description of Artificial Sequence: Synthetic oligonucleotide
aauguagaugacguauuuc

SEQ ID NO: 2801475 - RNA, 19 nt, Artificial Sequence
  Description of Artificial Sequence: Synthetic oligonucleotide
auuuuggcggcugcgaucc

SEQ ID NO: 2801476 - RNA, 19 nt, Artificial Sequence
  Description of Artificial Sequence: Synthetic oligonucleotide
gacaaccugaacuucauca

SEQ ID NO: 2801477 - RNA, 19 nt, Artificial Sequence
  Description of Artificial Sequence: Synthetic oligonucleotide
uggaagcaguguaugaggg

SEQ ID NO: 2801478 - RNA, 19 nt, Artificial Sequence
  Description of Artificial Sequence: Synthetic oligonucleotide
uccagcuuuagccugguga

SEQ ID NO: 2801479 - RNA, 19 nt, Artificial Sequence
  Description of Artificial Sequence: Synthetic oligonucleotide
uagaugacguauuucuucc

SEQ ID NO: 2801480 - RNA, 19 nt, Artificial Sequence
  Description of Artificial Sequence: Synthetic oligonucleotide
ucggucagaagucacgaag

SEQ ID NO: 2801481 - RNA, 19 nt, Artificial Sequence
  Description of Artificial Sequence: Synthetic oligonucleotide
uuccuauacaccuggacca

SEQ ID NO: 2801482 - RNA, 19 nt, Artificial Sequence
  Description of Artificial Sequence: Synthetic oligonucleotide
uccucggacaaccugaacu

SEQ ID NO: 2801483 - RNA, 19 nt, Artificial Sequence
  Description of Artificial Sequence: Synthetic oligonucleotide
uuuaauggaagcaguguau

SEQ ID NO: 2801484 - RNA, 19 nt, Artificial Sequence
  Description of Artificial Sequence: Synthetic oligonucleotide
auagaucgaacauuguacu

SEQ ID NO: 2801485 - RNA, 19 nt, Artificial Sequence
  Description of Artificial Sequence: Synthetic oligonucleotide
uuguacuucugucucagcu

SEQ ID NO: 2801486 - RNA, 19 nt, Artificial Sequence
  Description of Artificial Sequence: Synthetic oligonucleotide
uagucuuuaauggaagcag

SEQ ID NO: 2801487 - RNA, 19 nt, Artificial Sequence
  Description of Artificial Sequence: Synthetic oligonucleotide
cagcucuuuggaaagaggg

SEQ ID NO: 2801488 - RNA, 19 nt, Artificial Sequence
  Description of Artificial Sequence: Synthetic oligonucleotide
auggaagcaguguaugagg

SEQ ID NO: 2801489 - RNA, 19 nt, Artificial Sequence
  Description of Artificial Sequence: Synthetic oligonucleotide
uuucgaaugggcauagauc

SEQ ID NO: 2801490 - RNA, 19 nt, Artificial Sequence
  Description of Artificial Sequence: Synthetic oligonucleotide
aaugggcauagaucgaaca

SEQ ID NO: 2801491 - RNA, 19 nt, Artificial Sequence
  Description of Artificial Sequence: Synthetic oligonucleotide
agaucgaacauuguacuuc

SEQ ID NO: 2801492 - RNA, 19 nt, Artificial Sequence
  Description of Artificial Sequence: Synthetic oligonucleotide
ugagaaggugcauugaaau

SEQ ID NO: 2801493 - RNA, 19 nt, Artificial Sequence
  Description of Artificial Sequence: Synthetic oligonucleotide
uuuagccuggugauaacca

SEQ ID NO: 2801494 - RNA, 19 nt, Artificial Sequence
  Description of Artificial Sequence: Synthetic oligonucleotide
ugcauugaaaugccguuug

SEQ ID NO: 2801495 - RNA, 19 nt, Artificial Sequence
  Description of Artificial Sequence: Synthetic oligonucleotide
guuucuuccuuguauuugc

SEQ ID NO: 2801496 - RNA, 19 nt, Artificial Sequence
  Description of Artificial Sequence: Synthetic oligonucleotide
acuuaaacuagucuuuaau

SEQ ID NO: 2801497 - RNA, 19 nt, Artificial Sequence
  Description of Artificial Sequence: Synthetic oligonucleotide
gaagcaguguaugaggggc

SEQ ID NO: 2801498 - RNA, 19 nt, Artificial Sequence
  Description of Artificial Sequence: Synthetic oligonucleotide
uucaauguagaugacguau

SEQ ID NO: 2801499 - RNA, 19 nt, Artificial Sequence
  Description of Artificial Sequence: Synthetic oligonucleotide
ucauccuuucgaaugggca

SEQ ID NO: 2801500 - RNA, 19 nt, Artificial Sequence
  Description of Artificial Sequence: Synthetic oligonucleotide
cuggugauaaccaccuugc

SEQ ID NO: 2801501 - RNA, 19 nt, Artificial Sequence
  Description of Artificial Sequence: Synthetic oligonucleotide
ucugucucagcucuuugga

SEQ ID NO: 2801502 - RNA, 19 nt, Artificial Sequence
  Description of Artificial Sequence: Synthetic oligonucleotide
uuggcuuuccuuuccagga

SEQ ID NO: 2801503 - RNA, 19 nt, Artificial Sequence
  Description of Artificial Sequence: Synthetic oligonucleotide
uugaaaugccguuugcggu

SEQ ID NO: 2801504 - RNA, 19 nt, Artificial Sequence
  Description of Artificial Sequence: Synthetic oligonucleotide
cuuggcuuuccuuuccagg

SEQ ID NO: 2801505 - RNA, 19 nt, Artificial Sequence
  Description of Artificial Sequence: Synthetic oligonucleotide
acuucauuuuggcggcugc

SEQ ID NO: 2801506 - RNA, 19 nt, Artificial Sequence
  Description of Artificial Sequence: Synthetic oligonucleotide
ugugagaaggugcauugaa

SEQ ID NO: 2801507 - RNA, 19 nt, Artificial Sequence
  Description of Artificial Sequence: Synthetic oligonucleotide
uacaccuggaccacuuugc

SEQ ID NO: 2801508 - RNA, 19 nt, Artificial Sequence
  Description of Artificial Sequence: Synthetic oligonucleotide
ugcgauccagcgauggccg

SEQ ID NO: 2801509 - RNA, 19 nt, Artificial Sequence
  Description of Artificial Sequence: Synthetic oligonucleotide
ucguucaauguagaugacg

SEQ ID NO: 2801510 - RNA, 19 nt, Artificial Sequence
  Description of Artificial Sequence: Synthetic oligonucleotide
auaaccaccuugcuggggu

SEQ ID NO: 2801511 - RNA, 19 nt, Artificial Sequence
  Description of Artificial Sequence: Synthetic oligonucleotide
uacuugucgagacuuggcu

SEQ ID NO: 2801512 - RNA, 19 nt, Artificial Sequence
  Description of Artificial Sequence: Synthetic oligonucleotide
uccaggaucuucuugcggu

SEQ ID NO: 2801513 - RNA, 19 nt, Artificial Sequence
  Description of Artificial Sequence: Synthetic oligonucleotide
aacuagucuuuaauggaag

SEQ ID NO: 2801514 - RNA, 19 nt, Artificial Sequence
  Description of Artificial Sequence: Synthetic oligonucleotide
cauugaaaugccguuugcg

SEQ ID NO: 2801515 - RNA, 19 nt, Artificial Sequence
  Description of Artificial Sequence: Synthetic oligonucleotide
cuucucaaucguuucuucc

SEQ ID NO: 2801516 - RNA, 19 nt, Artificial Sequence
  Description of Artificial Sequence: Synthetic oligonucleotide
gagaaggugcauugaaaug

SEQ ID NO: 2801517 - RNA, 19 nt, Artificial Sequence
  Description of Artificial Sequence: Synthetic oligonucleotide
uuugccaaucugcuggccu

SEQ ID NO: 2801518 - RNA, 19 nt, Artificial Sequence
  Description of Artificial Sequence: Synthetic oligonucleotide
uccggaugugagaaggugc

SEQ ID NO: 2801519 - RNA, 19 nt, Artificial Sequence
  Description of Artificial Sequence: Synthetic oligonucleotide
gacguauuucuuccuauac

SEQ ID NO: 2801520 - RNA, 19 nt, Artificial Sequence
  Description of Artificial Sequence: Synthetic oligonucleotide
ucuuuaauggaagcagugu

SEQ ID NO: 2801521 - RNA, 19 nt, Artificial Sequence
  Description of Artificial Sequence: Synthetic oligonucleotide
ucuuccuauacaccuggac

SEQ ID NO: 2801522 - RNA, 19 nt, Artificial Sequence
  Description of Artificial Sequence: Synthetic oligonucleotide
agacuuggcuuuccuuucc

SEQ ID NO: 2801523 - RNA, 19 nt, Artificial Sequence
  Description of Artificial Sequence: Synthetic oligonucleotide
cuuuguaguguccucggac

SEQ ID NO: 2801524 - RNA, 19 nt, Artificial Sequence
  Description of Artificial Sequence: Synthetic oligonucleotide
aaacuagucuuuaauggaa

SEQ ID NO: 2801525 - RNA, 19 nt, Artificial Sequence
  Description of Artificial Sequence: Synthetic oligonucleotide
cuuuccuacuugucgagac

SEQ ID NO: 2801526 - RNA, 19 nt, Artificial Sequence
  Description of Artificial Sequence: Synthetic oligonucleotide
uaugaggggccccuacucc

SEQ ID NO: 2801527 - RNA, 19 nt, Artificial Sequence
  Description of Artificial Sequence: Synthetic oligonucleotide
uaauggaagcaguguauga

SEQ ID NO: 2801528 - RNA, 19 nt, Artificial Sequence
  Description of Artificial Sequence: Synthetic oligonucleotide
ugaacuucaucauccuuuc

SEQ ID NO: 2801529 - RNA, 19 nt, Artificial Sequence
  Description of Artificial Sequence: Synthetic oligonucleotide
ugucucagcucuuuggaaa

SEQ ID NO: 2801530 - RNA, 19 nt, Artificial Sequence
  Description of Artificial Sequence: Synthetic oligonucleotide
uguacuucugucucagcuc

SEQ ID NO: 2801531 - RNA, 19 nt, Artificial Sequence
  Description of Artificial Sequence: Synthetic oligonucleotide
uuuggaaagaggggaagac

SEQ ID NO: 2801532 - RNA, 19 nt, Artificial Sequence
  Description of Artificial Sequence: Synthetic oligonucleotide
ucugcuggccuuuguagug

SEQ ID NO: 2801533 - RNA, 19 nt, Artificial Sequence
  Description of Artificial Sequence: Synthetic oligonucleotide
uccuccggaugugagaagg

SEQ ID NO: 2801534 - RNA, 19 nt, Artificial Sequence
  Description of Artificial Sequence: Synthetic oligonucleotide
ucggacaaccugaacuuca

SEQ ID NO: 2801535 - RNA, 19 nt, Artificial Sequence
  Description of Artificial Sequence: Synthetic oligonucleotide
uuguccagcuuuagccugg

SEQ ID NO: 2801536 - RNA, 19 nt, Artificial Sequence
  Description of Artificial Sequence: Synthetic oligonucleotide
ugcaucuucucaaucguuu

SEQ ID NO: 2801537 - RNA, 19 nt, Artificial Sequence
  Description of Artificial Sequence: Synthetic oligonucleotide
agaggggaagacaugaucu

SEQ ID NO: 2801538 - RNA, 19 nt, Artificial Sequence
  Description of Artificial Sequence: Synthetic oligonucleotide
ucaauguagaugacguauu

SEQ ID NO: 2801539 - RNA, 19 nt, Artificial Sequence
  Description of Artificial Sequence: Synthetic oligonucleotide
gacaugaucuuccuccgga

SEQ ID NO: 2801540 - RNA, 19 nt, Artificial Sequence
  Description of Artificial Sequence: Synthetic oligonucleotide
uuucuuccuuguauuugcc

SEQ ID NO: 2801541 - RNA, 19 nt, Artificial Sequence
  Description of Artificial Sequence: Synthetic oligonucleotide
auuguacuucugucucagc

SEQ ID NO: 2801542 - RNA, 19 nt, Artificial Sequence
  Description of Artificial Sequence: Synthetic oligonucleotide
uuccaggaucuucuugcgg

SEQ ID NO: 2801543 - RNA, 19 nt, Artificial Sequence
  Description of Artificial Sequence: Synthetic oligonucleotide
ucaaucguuucuuccuugu

SEQ ID NO: 2801544 - RNA, 19 nt, Artificial Sequence
  Description of Artificial Sequence: Synthetic oligonucleotide
ggugauaaccaccuugcug

SEQ ID NO: 2801545 - RNA, 19 nt, Artificial Sequence
  Description of Artificial Sequence: Synthetic oligonucleotide
uucuuccuuguauuugccc

SEQ ID NO: 2801546 - RNA, 19 nt, Artificial Sequence
  Description of Artificial Sequence: Synthetic oligonucleotide
accuggaccacuuugccaa

SEQ ID NO: 2801547 - RNA, 19 nt, Artificial Sequence
  Description of Artificial Sequence: Synthetic oligonucleotide
gucacgaagggauugaacu

SEQ ID NO: 2801548 - RNA, 19 nt, Artificial Sequence
  Description of Artificial Sequence: Synthetic oligonucleotide
uagccuggugauaaccacc

SEQ ID NO: 2801549 - RNA, 19 nt, Artificial Sequence
  Description of Artificial Sequence: Synthetic oligonucleotide
gaccacuuugccaaucugc

SEQ ID NO: 2801550 - RNA, 19 nt, Artificial Sequence
  Description of Artificial Sequence: Synthetic oligonucleotide
acuucaucauccuuucgaa

SEQ ID NO: 2801551 - RNA, 19 nt, Artificial Sequence
  Description of Artificial Sequence: Synthetic oligonucleotide
auacaccuggaccacuuug

SEQ ID NO: 2801552 - RNA, 19 nt, Artificial Sequence
  Description of Artificial Sequence: Synthetic oligonucleotide
aagcaguguaugaggggcc

SEQ ID NO: 2801553 - RNA, 19 nt, Artificial Sequence
  Description of Artificial Sequence: Synthetic oligonucleotide
gaaggugcauugaaaugcc

SEQ ID NO: 2801554 - RNA, 19 nt, Artificial Sequence
  Description of Artificial Sequence: Synthetic oligonucleotide
uuagccuggugauaaccac

SEQ ID NO: 2801555 - RNA, 19 nt, Artificial Sequence
  Description of Artificial Sequence: Synthetic oligonucleotide
ugauaaccaccuugcuggg

SEQ ID NO: 2801556 - RNA, 19 nt, Artificial Sequence
  Description of Artificial Sequence: Synthetic oligonucleotide
ggauugaacuucauuuugg

SEQ ID NO: 2801557 - RNA, 19 nt, Artificial Sequence
  Description of Artificial Sequence: Synthetic oligonucleotide
cuuuagccuggugauaacc

SEQ ID NO: 2801558 - RNA, 19 nt, Artificial Sequence
  Description of Artificial Sequence: Synthetic oligonucleotide
ugaaaugccguuugcgguu

SEQ ID NO: 2801559 - RNA, 19 nt, Artificial Sequence
  Description of Artificial Sequence: Synthetic oligonucleotide
uuuccuacuugucgagacu

SEQ ID NO: 2801560 - RNA, 19 nt, Artificial Sequence
  Description of Artificial Sequence: Synthetic oligonucleotide
cugcacucguucaauguag

SEQ ID NO: 2801561 - RNA, 19 nt, Artificial Sequence
  Description of Artificial Sequence: Synthetic oligonucleotide
gaacauuguacuucugucu

SEQ ID NO: 2801562 - RNA, 19 nt, Artificial Sequence
  Description of Artificial Sequence: Synthetic oligonucleotide
gucucagcucuuuggaaag

SEQ ID NO: 2801563 - RNA, 19 nt, Artificial Sequence
  Description of Artificial Sequence: Synthetic oligonucleotide
cuuuaauggaagcagugua

SEQ ID NO: 2801564 - RNA, 19 nt, Artificial Sequence
  Description of Artificial Sequence: Synthetic oligonucleotide
cuacuugucgagacuuggc

SEQ ID NO: 2801565 - RNA, 19 nt, Artificial Sequence
  Description of Artificial Sequence: Synthetic oligonucleotide
gauggccgcaaaaggaaag

SEQ ID NO: 2801566 - RNA, 19 nt, Artificial Sequence
  Description of Artificial Sequence: Synthetic oligonucleotide
cguauuucuuccuauacac

SEQ ID NO: 2801567 - RNA, 19 nt, Artificial Sequence
  Description of Artificial Sequence: Synthetic oligonucleotide
uuucucgcugcacucguuc

SEQ ID NO: 2801568 - RNA, 19 nt, Artificial Sequence
  Description of Artificial Sequence: Synthetic oligonucleotide
gaacuucaucauccuuucg

SEQ ID NO: 2801569 - RNA, 19 nt, Artificial Sequence
  Description of Artificial Sequence: Synthetic oligonucleotide
cauuguacuucugucucag

SEQ ID NO: 2801570 - RNA, 19 nt, Artificial Sequence
  Description of Artificial Sequence: Synthetic oligonucleotide
agcaguguaugaggggccc

SEQ ID NO: 2801571 - RNA, 19 nt, Artificial Sequence
  Description of Artificial Sequence: Synthetic oligonucleotide
cacucguucaauguagaug

SEQ ID NO: 2801572 - RNA, 19 nt, Artificial Sequence
  Description of Artificial Sequence: Synthetic oligonucleotide
gggguggaugcccacaugg

SEQ ID NO: 2801573 - RNA, 19 nt, Artificial Sequence
  Description of Artificial Sequence: Synthetic oligonucleotide
uggaccacuuugccaaucu

SEQ ID NO: 2801574 - RNA, 19 nt, Artificial Sequence
  Description of Artificial Sequence: Synthetic oligonucleotide
uacuuaaacuagucuuuaa

SEQ ID NO: 2801575 - RNA, 19 nt, Artificial Sequence
  Description of Artificial Sequence: Synthetic oligonucleotide
guaguguccucggacaacc

SEQ ID NO: 2801576 - RNA, 19 nt, Artificial Sequence
  Description of Artificial Sequence: Synthetic oligonucleotide
aucauccuuucgaaugggc

SEQ ID NO: 2801577 - RNA, 19 nt, Artificial Sequence
  Description of Artificial Sequence: Synthetic oligonucleotide
agaagucacgaagggauug

SEQ ID NO: 2801578 - RNA, 19 nt, Artificial Sequence
  Description of Artificial Sequence: Synthetic oligonucleotide
agacaugaucuuccuccgg

SEQ ID NO: 2801579 - RNA, 19 nt, Artificial Sequence
  Description of Artificial Sequence: Synthetic oligonucleotide
agggauugaacuucauuuu

SEQ ID NO: 2801580 - RNA, 19 nt, Artificial Sequence
  Description of Artificial Sequence: Synthetic oligonucleotide
aucguuucuuccuuguauu

SEQ ID NO: 2801581 - RNA, 19 nt, Artificial Sequence
  Description of Artificial Sequence: Synthetic oligonucleotide
uccuuuccuacuugucgag

SEQ ID NO: 2801582 - RNA, 19 nt, Artificial Sequence
  Description of Artificial Sequence: Synthetic oligonucleotide
gggauugaacuucauuuug

SEQ ID NO: 2801583 - RNA, 19 nt, Artificial Sequence
  Description of Artificial Sequence: Synthetic oligonucleotide
uuacuuaaacuagucuuua

SEQ ID NO: 2801584 - RNA, 19 nt, Artificial Sequence
  Description of Artificial Sequence: Synthetic oligonucleotide
aguguccucggacaaccug

SEQ ID NO: 2801585 - RNA, 19 nt, Artificial Sequence
  Description of Artificial Sequence: Synthetic oligonucleotide
gucuuuaauggaagcagug

SEQ ID NO: 2801586 - RNA, 19 nt, Artificial Sequence
  Description of Artificial Sequence: Synthetic oligonucleotide
ugcacucguucaauguaga

SEQ ID NO: 2801587 - RNA, 19 nt, Artificial Sequence
  Description of Artificial Sequence: Synthetic oligonucleotide
augggcauagaucgaacau

SEQ ID NO: 2801588 - RNA, 19 nt, Artificial Sequence
  Description of Artificial Sequence: Synthetic oligonucleotide
uucauuuuggcggcugcga

SEQ ID NO: 2801589 - RNA, 19 nt, Artificial Sequence
  Description of Artificial Sequence: Synthetic oligonucleotide
ucuuccuccggaugugaga

SEQ ID NO: 2801590 - RNA, 19 nt, Artificial Sequence
  Description of Artificial Sequence: Synthetic oligonucleotide
uguauuugcccuucuccuu

SEQ ID NO: 2801591 - RNA, 19 nt, Artificial Sequence
  Description of Artificial Sequence: Synthetic oligonucleotide
ggucagaagucacgaaggg

SEQ ID NO: 2801592 - RNA, 19 nt, Artificial Sequence
  Description of Artificial Sequence: Synthetic oligonucleotide
guauuucuuccuauacacc

SEQ ID NO: 2801593 - RNA, 19 nt, Artificial Sequence
  Description of Artificial Sequence: Synthetic oligonucleotide
ucauuuuggcggcugcgau

SEQ ID NO: 2801594 - RNA, 19 nt, Artificial Sequence
  Description of Artificial Sequence: Synthetic oligonucleotide
gucuuuguccagcuuuagc

SEQ ID NO: 2801595 - RNA, 19 nt, Artificial Sequence
  Description of Artificial Sequence: Synthetic oligonucleotide
guggaugcccacauggacc

SEQ ID NO: 2801596 - RNA, 19 nt, Artificial Sequence
  Description of Artificial Sequence: Synthetic oligonucleotide
ucucaaucguuucuuccuu

SEQ ID NO: 2801597 - RNA, 19 nt, Artificial Sequence
  Description of Artificial Sequence: Synthetic oligonucleotide
gaucgaacauuguacuucu

SEQ ID NO: 2801598 - RNA, 19 nt, Artificial Sequence
  Description of Artificial Sequence: Synthetic oligonucleotide
gauaaccaccuugcugggg

SEQ ID NO: 2801599 - RNA, 19 nt, Artificial Sequence
  Description of Artificial Sequence: Synthetic oligonucleotide
aacuucauuuuggcggcug

SEQ ID NO: 2801600 - RNA, 19 nt, Artificial Sequence
  Description of Artificial Sequence: Synthetic oligonucleotide
aaggugcauugaaaugccg

SEQ ID NO: 2801601 - RNA, 19 nt, Artificial Sequence
  Description of Artificial Sequence: Synthetic oligonucleotide
gaugacguauuucuuccua

SEQ ID NO: 2801602 - RNA, 19 nt, Artificial Sequence
  Description of Artificial Sequence: Synthetic oligonucleotide
uggaccguugugccauuag

SEQ ID NO: 2801603 - RNA, 19 nt, Artificial Sequence
  Description of Artificial Sequence: Synthetic oligonucleotide
acauuguacuucugucuca

SEQ ID NO: 2801604 - RNA, 19 nt, Artificial Sequence
  Description of Artificial Sequence: Synthetic oligonucleotide
augacguauuucuuccuau

SEQ ID NO: 2801605 - RNA, 19 nt, Artificial Sequence
  Description of Artificial Sequence: Synthetic oligonucleotide
uuguaguguccucggacaa

SEQ ID NO: 2801606 - RNA, 19 nt, Artificial Sequence
  Description of Artificial Sequence: Synthetic oligonucleotide
cuagucuuuaauggaagca

SEQ ID NO: 2801607 - RNA, 19 nt, Artificial Sequence
  Description of Artificial Sequence: Synthetic oligonucleotide
acuuggcuuuccuuuccag

SEQ ID NO: 2801608 - RNA, 19 nt, Artificial Sequence
  Description of Artificial Sequence: Synthetic oligonucleotide
gagacuuggcuuuccuuuc

SEQ ID NO: 2801609 - RNA, 19 nt, Artificial Sequence
  Description of Artificial Sequence: Synthetic oligonucleotide
uuugcgguucuugcuucgg

SEQ ID NO: 2801610 - RNA, 19 nt, Artificial Sequence
  Description of Artificial Sequence: Synthetic oligonucleotide
ugccguuugcgguucuugc

SEQ ID NO: 2801611 - RNA, 19 nt, Artificial Sequence
  Description of Artificial Sequence: Synthetic oligonucleotide
agucacgaagggauugaac

SEQ ID NO: 2801612 - RNA, 19 nt, Artificial Sequence
  Description of Artificial Sequence: Synthetic oligonucleotide
ugacguauuucuuccuaua

SEQ ID NO: 2801613 - RNA, 19 nt, Artificial Sequence
  Description of Artificial Sequence: Synthetic oligonucleotide
cuucauuuuggcggcugcg

SEQ ID NO: 2801614 - RNA, 19 nt, Artificial Sequence
  Description of Artificial Sequence: Synthetic oligonucleotide
guuugcgguucuugcuucg

SEQ ID NO: 2801615 - RNA, 19 nt, Artificial Sequence
  Description of Artificial Sequence: Synthetic oligonucleotide
ucacgaagggauugaacuu

SEQ ID NO: 2801616 - RNA, 19 nt, Artificial Sequence
  Description of Artificial Sequence: Synthetic oligonucleotide
cuugcugggguggaugccc

SEQ ID NO: 2801617 - RNA, 19 nt, Artificial Sequence
  Description of Artificial Sequence: Synthetic oligonucleotide
ggaagcaguguaugagggg

SEQ ID NO: 2801618 - RNA, 19 nt, Artificial Sequence
  Description of Artificial Sequence: Synthetic oligonucleotide
cucaaucguuucuuccuug

SEQ ID NO: 2801619 - RNA, 19 nt, Artificial Sequence
  Description of Artificial Sequence: Synthetic oligonucleotide
ugcccuucuccuuuccuac

SEQ ID NO: 2801620 - RNA, 19 nt, Artificial Sequence
  Description of Artificial Sequence: Synthetic oligonucleotide
uccuacuugucgagacuug

SEQ ID NO: 2801621 - RNA, 19 nt, Artificial Sequence
  Description of Artificial Sequence: Synthetic oligonucleotide
cugcgauccagcgauggcc

SEQ ID NO: 2801622 - RNA, 19 nt, Artificial Sequence
  Description of Artificial Sequence: Synthetic oligonucleotide
agcuuuagccuggugauaa

SEQ ID NO: 2801623 - RNA, 19 nt, Artificial Sequence
  Description of Artificial Sequence: Synthetic oligonucleotide
aaccaccuugcuggggugg

SEQ ID NO: 2801624 - RNA, 19 nt, Artificial Sequence
  Description of Artificial Sequence: Synthetic oligonucleotide
agucuuuaauggaagcagu

SEQ ID NO: 2801625 - RNA, 19 nt, Artificial Sequence
  Description of Artificial Sequence: Synthetic oligonucleotide
cuugcggucuuuguccagc

SEQ ID NO: 2801626 - RNA, 19 nt, Artificial Sequence
  Description of Artificial Sequence: Synthetic oligonucleotide
cagcgauggccgcaaaagg

SEQ ID NO: 2801627 - RNA, 19 nt, Artificial Sequence
  Description of Artificial Sequence: Synthetic oligonucleotide
ucgaaugggcauagaucga

SEQ ID NO: 2801628 - RNA, 19 nt, Artificial Sequence
  Description of Artificial Sequence: Synthetic oligonucleotide
accacuuugccaaucugcu

SEQ ID NO: 2801629 - RNA, 19 nt, Artificial Sequence
  Description of Artificial Sequence: Synthetic oligonucleotide
cacgaagggauugaacuuc

SEQ ID NO: 2801630 - RNA, 19 nt, Artificial Sequence
  Description of Artificial Sequence: Synthetic oligonucleotide
uagaucgaacauuguacuu

SEQ ID NO: 2801631 - RNA, 19 nt, Artificial Sequence
  Description of Artificial Sequence: Synthetic oligonucleotide
acuugucgagacuuggcuu

SEQ ID NO: 2801632 - RNA, 19 nt, Artificial Sequence
  Description of Artificial Sequence: Synthetic oligonucleotide
cucagcucuuuggaaagag

SEQ ID NO: 2801633 - RNA, 19 nt, Artificial Sequence
  Description of Artificial Sequence: Synthetic oligonucleotide
cauuuuggcggcugcgauc

SEQ ID NO: 2801634 - RNA, 19 nt, Artificial Sequence
  Description of Artificial Sequence: Synthetic oligonucleotide
cuccuuuccuacuugucga

SEQ ID NO: 2801635 - RNA, 19 nt, Artificial Sequence
  Description of Artificial Sequence: Synthetic oligonucleotide
agaugacguauuucuuccu

SEQ ID NO: 2801636 - RNA, 19 nt, Artificial Sequence
  Description of Artificial Sequence: Synthetic oligonucleotide
ugcgguucuugcuucgguc

SEQ ID NO: 2801637 - RNA, 19 nt, Artificial Sequence
  Description of Artificial Sequence: Synthetic oligonucleotide
uggugauaaccaccuugcu

SEQ ID NO: 2801638 - RNA, 19 nt, Artificial Sequence
  Description of Artificial Sequence: Synthetic oligonucleotide
uucucgcugcacucguuca

SEQ ID NO: 2801639 - RNA, 19 nt, Artificial Sequence
  Description of Artificial Sequence: Synthetic oligonucleotide
ugggcauagaucgaacauu

SEQ ID NO: 2801640 - RNA, 19 nt, Artificial Sequence
  Description of Artificial Sequence: Synthetic oligonucleotide
uggccgcaaaaggaaagag

SEQ ID NO: 2801641 - RNA, 19 nt, Artificial Sequence
  Description of Artificial Sequence: Synthetic oligonucleotide
accguugugccauuagcuu

SEQ ID NO: 2801642 - RNA, 19 nt, Artificial Sequence
  Description of Artificial Sequence: Synthetic oligonucleotide
augaggggccccuacuccu

SEQ ID NO: 2801643 - RNA, 19 nt, Artificial Sequence
  Description of Artificial Sequence: Synthetic oligonucleotide
ugaucuuccuccggaugug

SEQ ID NO: 2801644 - RNA, 19 nt, Artificial Sequence
  Description of Artificial Sequence: Synthetic oligonucleotide
uccuuucgaaugggcauag

SEQ ID NO: 2801645 - RNA, 19 nt, Artificial Sequence
  Description of Artificial Sequence: Synthetic oligonucleotide
guaugaggggccccuacuc

SEQ ID NO: 2801646 - RNA, 19 nt, Artificial Sequence
  Description of Artificial Sequence: Synthetic oligonucleotide
agcgauggccgcaaaagga

SEQ ID NO: 2801647 - RNA, 19 nt, Artificial Sequence
  Description of Artificial Sequence: Synthetic oligonucleotide
ccuggugauaaccaccuug

SEQ ID NO: 2801648 - RNA, 19 nt, Artificial Sequence
  Description of Artificial Sequence: Synthetic oligonucleotide
uguaguguccucggacaac

SEQ ID NO: 2801649 - RNA, 19 nt, Artificial Sequence
  Description of Artificial Sequence: Synthetic oligonucleotide
ugcuucggucagaagucac

SEQ ID NO: 2801650 - RNA, 19 nt, Artificial Sequence
  Description of Artificial Sequence: Synthetic oligonucleotide
aggugcauugaaaugccgu

SEQ ID NO: 2801651 - RNA, 19 nt, Artificial Sequence
  Description of Artificial Sequence: Synthetic oligonucleotide
uuccuacuugucgagacuu

SEQ ID NO: 2801652 - RNA, 19 nt, Artificial Sequence
  Description of Artificial Sequence: Synthetic oligonucleotide
cugaacuucaucauccuuu

SEQ ID NO: 2801653 - RNA, 19 nt, Artificial Sequence
  Description of Artificial Sequence: Synthetic oligonucleotide
gggcauagaucgaacauug

SEQ ID NO: 2801654 - RNA, 19 nt, Artificial Sequence
  Description of Artificial Sequence: Synthetic oligonucleotide
gaagucacgaagggauuga

SEQ ID NO: 2801655 - RNA, 19 nt, Artificial Sequence
  Description of Artificial Sequence: Synthetic oligonucleotide
guacuucugucucagcucu

SEQ ID NO: 2801656 - RNA, 19 nt, Artificial Sequence
  Description of Artificial Sequence: Synthetic oligonucleotide
acauggaccguugugccau

SEQ ID NO: 2801657 - RNA, 19 nt, Artificial Sequence
  Description of Artificial Sequence: Synthetic oligonucleotide
ucucgcugcacucguucaa

SEQ ID NO: 2801658 - RNA, 19 nt, Artificial Sequence
  Description of Artificial Sequence: Synthetic oligonucleotide
gaaugggcauagaucgaac

SEQ ID NO: 2801659 - RNA, 19 nt, Artificial Sequence
  Description of Artificial Sequence: Synthetic oligonucleotide
ugaggggccccuacuccug

SEQ ID NO: 2801660 - RNA, 19 nt, Artificial Sequence
  Description of Artificial Sequence: Synthetic oligonucleotide
aaagaggggaagacaugau

SEQ ID NO: 2801661 - RNA, 19 nt, Artificial Sequence
  Description of Artificial Sequence: Synthetic oligonucleotide
ggggaagacaugaucuucc

SEQ ID NO: 2801662 - RNA, 19 nt, Artificial Sequence
  Description of Artificial Sequence: Synthetic oligonucleotide
gguggaugcccacauggac

SEQ ID NO: 2801663 - RNA, 19 nt, Artificial Sequence
  Description of Artificial Sequence: Synthetic oligonucleotide
ucguuucuuccuuguauuu

SEQ ID NO: 2801664 - RNA, 19 nt, Artificial Sequence
  Description of Artificial Sequence: Synthetic oligonucleotide
uguccucggacaaccugaa

SEQ ID NO: 2801665 - RNA, 19 nt, Artificial Sequence
  Description of Artificial Sequence: Synthetic oligonucleotide
uauacaccuggaccacuuu

SEQ ID NO: 2801666 - RNA, 19 nt, Artificial Sequence
  Description of Artificial Sequence: Synthetic oligonucleotide
gcauagaucgaacauugua

SEQ ID NO: 2801667 - RNA, 19 nt, Artificial Sequence
  Description of Artificial Sequence: Synthetic oligonucleotide
uauuugcccuucuccuuuc

SEQ ID NO: 2801668 - RNA, 19 nt, Artificial Sequence
  Description of Artificial Sequence: Synthetic oligonucleotide
ucuugcggucuuuguccag

SEQ ID NO: 2801669 - RNA, 19 nt, Artificial Sequence
  Description of Artificial Sequence: Synthetic oligonucleotide
cuuuggaaagaggggaaga

SEQ ID NO: 2801670 - RNA, 19 nt, Artificial Sequence
  Description of Artificial Sequence: Synthetic oligonucleotide
uccagcgauggccgcaaaa

SEQ ID NO: 2801671 - RNA, 19 nt, Artificial Sequence
  Description of Artificial Sequence: Synthetic oligonucleotide
uugcgguucuugcuucggu

SEQ ID NO: 2801672 - RNA, 19 nt, Artificial Sequence
  Description of Artificial Sequence: Synthetic oligonucleotide
ggaccguugugccauuagc

SEQ ID NO: 2801673 - RNA, 19 nt, Artificial Sequence
  Description of Artificial Sequence: Synthetic oligonucleotide
uccuauacaccuggaccac

SEQ ID NO: 2801674 - RNA, 19 nt, Artificial Sequence
  Description of Artificial Sequence: Synthetic oligonucleotide
cuuucgaaugggcauagau

SEQ ID NO: 2801675 - RNA, 19 nt, Artificial Sequence
  Description of Artificial Sequence: Synthetic oligonucleotide
uugccaaucugcuggccuu

SEQ ID NO: 2801676 - RNA, 19 nt, Artificial Sequence
  Description of Artificial Sequence: Synthetic oligonucleotide
gaagggauugaacuucauu

SEQ ID NO: 2801677 - RNA, 19 nt, Artificial Sequence
  Description of Artificial Sequence: Synthetic oligonucleotide
uaaccaccuugcuggggug

SEQ ID NO: 2801678 - RNA, 19 nt, Artificial Sequence
  Description of Artificial Sequence: Synthetic oligonucleotide
cuucugucucagcucuuug

SEQ ID NO: 2801679 - RNA, 19 nt, Artificial Sequence
  Description of Artificial Sequence: Synthetic oligonucleotide
uggcuuuccuuuccaggau

SEQ ID NO: 2801680 - RNA, 19 nt, Artificial Sequence
  Description of Artificial Sequence: Synthetic oligonucleotide
gacuuggcuuuccuuucca

SEQ ID NO: 2801681 - RNA, 19 nt, Artificial Sequence
  Description of Artificial Sequence: Synthetic oligonucleotide
cuuuguccagcuuuagccu

SEQ ID NO: 2801682 - RNA, 19 nt, Artificial Sequence
  Description of Artificial Sequence: Synthetic oligonucleotide
ggccuuuguaguguccucg

SEQ ID NO: 2801683 - RNA, 19 nt, Artificial Sequence
  Description of Artificial Sequence: Synthetic oligonucleotide
gcucuuuggaaagagggga

SEQ ID NO: 2801684 - RNA, 19 nt, Artificial Sequence
  Description of Artificial Sequence: Synthetic oligonucleotide
uucggucagaagucacgaa

SEQ ID NO: 2801685 - RNA, 19 nt, Artificial Sequence
  Description of Artificial Sequence: Synthetic oligonucleotide
gccuuuguaguguccucgg

SEQ ID NO: 2801686 - RNA, 19 nt, Artificial Sequence
  Description of Artificial Sequence: Synthetic oligonucleotide
cggucagaagucacgaagg

SEQ ID NO: 2801687 - RNA, 19 nt, Artificial Sequence
  Description of Artificial Sequence: Synthetic oligonucleotide
cgaacauuguacuucuguc

SEQ ID NO: 2801688 - RNA, 19 nt, Artificial Sequence
  Description of Artificial Sequence: Synthetic oligonucleotide
agccuggugauaaccaccu

SEQ ID NO: 2801689 - RNA, 19 nt, Artificial Sequence
  Description of Artificial Sequence: Synthetic oligonucleotide
aagucacgaagggauugaa

SEQ ID NO: 2801690 - RNA, 19 nt, Artificial Sequence
  Description of Artificial Sequence: Synthetic oligonucleotide
gucagaagucacgaaggga

SEQ ID NO: 2801691 - RNA, 19 nt, Artificial Sequence
  Description of Artificial Sequence: Synthetic oligonucleotide
uccuuguauuugcccuucu

SEQ ID NO: 2801692 - RNA, 19 nt, Artificial Sequence
  Description of Artificial Sequence: Synthetic oligonucleotide
gaaaugccguuugcgguuc

SEQ ID NO: 2801693 - RNA, 19 nt, Artificial Sequence
  Description of Artificial Sequence: Synthetic oligonucleotide
aaaugccguuugcgguucu

SEQ ID NO: 2801694 - RNA, 19 nt, Artificial Sequence
  Description of Artificial Sequence: Synthetic oligonucleotide
auggccgcaaaaggaaaga

SEQ ID NO: 2801695 - RNA, 19 nt, Artificial Sequence
  Description of Artificial Sequence: Synthetic oligonucleotide
gcuucggucagaagucacg

SEQ ID NO: 2801696 - RNA, 19 nt, Artificial Sequence
  Description of Artificial Sequence: Synthetic oligonucleotide
uucuugcuucggucagaag

SEQ ID NO: 2801697 - RNA, 19 nt, Artificial Sequence
  Description of Artificial Sequence: Synthetic oligonucleotide
cccacauggaccguugugc

SEQ ID NO: 2801698 - RNA, 19 nt, Artificial Sequence
  Description of Artificial Sequence: Synthetic oligonucleotide
uugcuucggucagaaguca

SEQ ID NO: 2801699 - RNA, 19 nt, Artificial Sequence
  Description of Artificial Sequence: Synthetic oligonucleotide
ccuacuugucgagacuugg

SEQ ID NO: 2801700 - RNA, 19 nt, Artificial Sequence
  Description of Artificial Sequence: Synthetic oligonucleotide
guguccucggacaaccuga

SEQ ID NO: 2801701 - RNA, 19 nt, Artificial Sequence
  Description of Artificial Sequence: Synthetic oligonucleotide
cuucggucagaagucacga

SEQ ID NO: 2801702 - RNA, 19 nt, Artificial Sequence
  Description of Artificial Sequence: Synthetic oligonucleotide
ucgagacuuggcuuuccuu

SEQ ID NO: 2801703 - RNA, 19 nt, Artificial Sequence
  Description of Artificial Sequence: Synthetic oligonucleotide
cuccggaugugagaaggug

SEQ ID NO: 2801704 - RNA, 19 nt, Artificial Sequence
  Description of Artificial Sequence: Synthetic oligonucleotide
gcauugaaaugccguuugc

SEQ ID NO: 2801705 - RNA, 19 nt, Artificial Sequence
  Description of Artificial Sequence: Synthetic oligonucleotide
uuccuuguauuugcccuuc

SEQ ID NO: 2801706 - RNA, 19 nt, Artificial Sequence
  Description of Artificial Sequence: Synthetic oligonucleotide
cuuccuccggaugugagaa

SEQ ID NO: 2801707 - RNA, 19 nt, Artificial Sequence
  Description of Artificial Sequence: Synthetic oligonucleotide
cucguucaauguagaugac

SEQ ID NO: 2801708 - RNA, 19 nt, Artificial Sequence
  Description of Artificial Sequence: Synthetic oligonucleotide
gaccguugugccauuagcu

SEQ ID NO: 2801709 - RNA, 19 nt, Artificial Sequence
  Description of Artificial Sequence: Synthetic oligonucleotide
ugggguggaugcccacaug

SEQ ID NO: 2801710 - RNA, 19 nt, Artificial Sequence
  Description of Artificial Sequence: Synthetic oligonucleotide
gcaucuucucaaucguuuc

SEQ ID NO: 2801711 - RNA, 19 nt, Artificial Sequence
  Description of Artificial Sequence: Synthetic oligonucleotide
uugcggucuuuguccagcu

SEQ ID NO: 2801712 - RNA, 19 nt, Artificial Sequence
  Description of Artificial Sequence: Synthetic oligonucleotide
guucaauguagaugacgua

SEQ ID NO: 2801713 - RNA, 19 nt, Artificial Sequence
  Description of Artificial Sequence: Synthetic oligonucleotide
uuuucucgcugcacucguu

SEQ ID NO: 2801714 - RNA, 19 nt, Artificial Sequence
  Description of Artificial Sequence: Synthetic oligonucleotide
guguaugaggggccccuac

SEQ ID NO: 2801715 - RNA, 19 nt, Artificial Sequence
  Description of Artificial Sequence: Synthetic oligonucleotide
uuccuccggaugugagaag

SEQ ID NO: 2801716 - RNA, 19 nt, Artificial Sequence
  Description of Artificial Sequence: Synthetic oligonucleotide
ccacauggaccguugugcc

SEQ ID NO: 2801717 - RNA, 19 nt, Artificial Sequence
  Description of Artificial Sequence: Synthetic oligonucleotide
gugagaaggugcauugaaa

SEQ ID NO: 2801718 - RNA, 19 nt, Artificial Sequence
  Description of Artificial Sequence: Synthetic oligonucleotide
ugucgagacuuggcuuucc

SEQ ID NO: 2801719 - RNA, 19 nt, Artificial Sequence
  Description of Artificial Sequence: Synthetic oligonucleotide
uaguguccucggacaaccu

SEQ ID NO: 2801720 - RNA, 19 nt, Artificial Sequence
  Description of Artificial Sequence: Synthetic oligonucleotide
ccagcgauggccgcaaaag

SEQ ID NO: 2801721 - RNA, 19 nt, Artificial Sequence
  Description of Artificial Sequence: Synthetic oligonucleotide
cauccuuucgaaugggcau

SEQ ID NO: 2801722 - RNA, 19 nt, Artificial Sequence
  Description of Artificial Sequence: Synthetic oligonucleotide
acgaagggauugaacuuca

SEQ ID NO: 2801723 - RNA, 19 nt, Artificial Sequence
  Description of Artificial Sequence: Synthetic oligonucleotide
cuugucgagacuuggcuuu

SEQ ID NO: 2801724 - RNA, 19 nt, Artificial Sequence
  Description of Artificial Sequence: Synthetic oligonucleotide
aucuuccuccggaugugag

SEQ ID NO: 2801725 - RNA, 19 nt, Artificial Sequence
  Description of Artificial Sequence: Synthetic oligonucleotide
cuuugccaaucugcuggcc

SEQ ID NO: 2801726 - RNA, 19 nt, Artificial Sequence
  Description of Artificial Sequence: Synthetic oligonucleotide
ggaagacaugaucuuccuc

SEQ ID NO: 2801727 - RNA, 19 nt, Artificial Sequence
  Description of Artificial Sequence: Synthetic oligonucleotide
augugagaaggugcauuga

SEQ ID NO: 2801728 - RNA, 19 nt, Artificial Sequence
  Description of Artificial Sequence: Synthetic oligonucleotide
ggaaagaggggaagacaug

SEQ ID NO: 2801729 - RNA, 19 nt, Artificial Sequence
  Description of Artificial Sequence: Synthetic oligonucleotide
caaucugcuggccuuugua

SEQ ID NO: 2801730 - RNA, 19 nt, Artificial Sequence
  Description of Artificial Sequence: Synthetic oligonucleotide
acuucugucucagcucuuu

SEQ ID NO: 2801731 - RNA, 19 nt, Artificial Sequence
  Description of Artificial Sequence: Synthetic oligonucleotide
guauuugcccuucuccuuu

SEQ ID NO: 2801732 - RNA, 19 nt, Artificial Sequence
  Description of Artificial Sequence: Synthetic oligonucleotide
auccuuucgaaugggcaua

SEQ ID NO: 2801733 - RNA, 19 nt, Artificial Sequence
  Description of Artificial Sequence: Synthetic oligonucleotide
augccguuugcgguucuug

SEQ ID NO: 2801734 - RNA, 19 nt, Artificial Sequence
  Description of Artificial Sequence: Synthetic oligonucleotide
aggaucuucuugcggucuu

SEQ ID NO: 2801735 - RNA, 19 nt, Artificial Sequence
  Description of Artificial Sequence: Synthetic oligonucleotide
gaggggccccuacuccugc

SEQ ID NO: 2801736 - RNA, 19 nt, Artificial Sequence
  Description of Artificial Sequence: Synthetic oligonucleotide
gaucuuccuccggauguga

SEQ ID NO: 2801737 - RNA, 19 nt, Artificial Sequence
  Description of Artificial Sequence: Synthetic oligonucleotide
ugcccacauggaccguugu

SEQ ID NO: 2801738 - RNA, 19 nt, Artificial Sequence
  Description of Artificial Sequence: Synthetic oligonucleotide
uggccuuuguaguguccuc

SEQ ID NO: 2801739 - RNA, 19 nt, Artificial Sequence
  Description of Artificial Sequence: Synthetic oligonucleotide
ggcuuuccuuuccaggauc

SEQ ID NO: 2801740 - RNA, 19 nt, Artificial Sequence
  Description of Artificial Sequence: Synthetic oligonucleotide
cugucucagcucuuuggaa

SEQ ID NO: 2801741 - RNA, 19 nt, Artificial Sequence
  Description of Artificial Sequence: Synthetic oligonucleotide
caccuggaccacuuugcca

SEQ ID NO: 2801742 - RNA, 19 nt, Artificial Sequence
  Description of Artificial Sequence: Synthetic oligonucleotide
cacauggaccguugugcca

SEQ ID NO: 2801743 - RNA, 19 nt, Artificial Sequence
  Description of Artificial Sequence: Synthetic oligonucleotide
cguucaauguagaugacgu

SEQ ID NO: 2801744 - RNA, 19 nt, Artificial Sequence
  Description of Artificial Sequence: Synthetic oligonucleotide
ggaccacuuugccaaucug

SEQ ID NO: 2801745 - RNA, 19 nt, Artificial Sequence
  Description of Artificial Sequence: Synthetic oligonucleotide
ggcugcgauccagcgaugg

SEQ ID NO: 2801746 - RNA, 19 nt, Artificial Sequence
  Description of Artificial Sequence: Synthetic oligonucleotide
uccuuuccaggaucuucuu

SEQ ID NO: 2801747 - RNA, 19 nt, Artificial Sequence
  Description of Artificial Sequence: Synthetic oligonucleotide
cucggacaaccugaacuuc

SEQ ID NO: 2801748 - RNA, 19 nt, Artificial Sequence
  Description of Artificial Sequence: Synthetic oligonucleotide
aaugccguuugcgguucuu

SEQ ID NO: 2801749 - RNA, 19 nt, Artificial Sequence
  Description of Artificial Sequence: Synthetic oligonucleotide
uugucgagacuuggcuuuc

SEQ ID NO: 2801750 - RNA, 19 nt, Artificial Sequence
  Description of Artificial Sequence: Synthetic oligonucleotide
cuucuccuuuccuacuugu

SEQ ID NO: 2801751 - RNA, 19 nt, Artificial Sequence
  Description of Artificial Sequence: Synthetic oligonucleotide
ccuuuccaggaucuucuug

SEQ ID NO: 2801752 - RNA, 19 nt, Artificial Sequence
  Description of Artificial Sequence: Synthetic oligonucleotide
caccuugcugggguggaug

SEQ ID NO: 2801753 - RNA, 19 nt, Artificial Sequence
  Description of Artificial Sequence: Synthetic oligonucleotide
gcgguucuugcuucgguca

SEQ ID NO: 2801754 - RNA, 19 nt, Artificial Sequence
  Description of Artificial Sequence: Synthetic oligonucleotide
gaggggaagacaugaucuu

SEQ ID NO: 2801755 - RNA, 19 nt, Artificial Sequence
  Description of Artificial Sequence: Synthetic oligonucleotide
gcugcacucguucaaugua

SEQ ID NO: 2801756 - RNA, 19 nt, Artificial Sequence
  Description of Artificial Sequence: Synthetic oligonucleotide
gcugcgauccagcgauggc

SEQ ID NO: 2801757 - RNA, 19 nt, Artificial Sequence
  Description of Artificial Sequence: Synthetic oligonucleotide
ccggaugugagaaggugca

SEQ ID NO: 2801758 - RNA, 19 nt, Artificial Sequence
  Description of Artificial Sequence: Synthetic oligonucleotide
gauccagcgauggccgcaa

SEQ ID NO: 2801759 - RNA, 19 nt, Artificial Sequence
  Description of Artificial Sequence: Synthetic oligonucleotide
uacuucugucucagcucuu

SEQ ID NO: 2801760 - RNA, 19 nt, Artificial Sequence
  Description of Artificial Sequence: Synthetic oligonucleotide
uguccagcuuuagccuggu

SEQ ID NO: 2801761 - RNA, 19 nt, Artificial Sequence
  Description of Artificial Sequence: Synthetic oligonucleotide
cuauacaccuggaccacuu

SEQ ID NO: 2801762 - RNA, 19 nt, Artificial Sequence
  Description of Artificial Sequence: Synthetic oligonucleotide
cuucaucauccuuucgaau

SEQ ID NO: 2801763 - RNA, 19 nt, Artificial Sequence
  Description of Artificial Sequence: Synthetic oligonucleotide
caaucguuucuuccuugua

SEQ ID NO: 2801764 - RNA, 19 nt, Artificial Sequence
  Description of Artificial Sequence: Synthetic oligonucleotide
ugcggucuuuguccagcuu

SEQ ID NO: 2801765 - RNA, 19 nt, Artificial Sequence
  Description of Artificial Sequence: Synthetic oligonucleotide
cguuucuuccuuguauuug

SEQ ID NO: 2801766 - RNA, 19 nt, Artificial Sequence
  Description of Artificial Sequence: Synthetic oligonucleotide
ccacuuugccaaucugcug

SEQ ID NO: 2801767 - RNA, 19 nt, Artificial Sequence
  Description of Artificial Sequence: Synthetic oligonucleotide
ggacaaccugaacuucauc

SEQ ID NO: 2801768 - RNA, 19 nt, Artificial Sequence
  Description of Artificial Sequence: Synthetic oligonucleotide
ccuucuccuuuccuacuug

SEQ ID NO: 2801769 - RNA, 19 nt, Artificial Sequence
  Description of Artificial Sequence: Synthetic oligonucleotide
gcccacauggaccguugug

SEQ ID NO: 2801770 - RNA, 19 nt, Artificial Sequence
  Description of Artificial Sequence: Synthetic oligonucleotide
cuggaccacuuugccaauc

SEQ ID NO: 2801771 - RNA, 19 nt, Artificial Sequence
  Description of Artificial Sequence: Synthetic oligonucleotide
accaccuugcuggggugga

SEQ ID NO: 2801772 - RNA, 19 nt, Artificial Sequence
  Description of Artificial Sequence: Synthetic oligonucleotide
gcuuuagccuggugauaac

SEQ ID NO: 2801773 - RNA, 19 nt, Artificial Sequence
  Description of Artificial Sequence: Synthetic oligonucleotide
ugcugggguggaugcccac

SEQ ID NO: 2801774 - RNA, 19 nt, Artificial Sequence
  Description of Artificial Sequence: Synthetic oligonucleotide
ccuacuccugcaucuucuc

SEQ ID NO: 2801775 - RNA, 19 nt, Artificial Sequence
  Description of Artificial Sequence: Synthetic oligonucleotide
gucgagacuuggcuuuccu

SEQ ID NO: 2801776 - RNA, 19 nt, Artificial Sequence
  Description of Artificial Sequence: Synthetic oligonucleotide
ugccaaucugcuggccuuu

SEQ ID NO: 2801777 - RNA, 19 nt, Artificial Sequence
  Description of Artificial Sequence: Synthetic oligonucleotide
ccaggaucuucuugcgguc

SEQ ID NO: 2801778 - RNA, 19 nt, Artificial Sequence
  Description of Artificial Sequence: Synthetic oligonucleotide
guccucggacaaccugaac

SEQ ID NO: 2801779 - RNA, 19 nt, Artificial Sequence
  Description of Artificial Sequence: Synthetic oligonucleotide
cuggccuuuguaguguccu

SEQ ID NO: 2801780 - RNA, 19 nt, Artificial Sequence
  Description of Artificial Sequence: Synthetic oligonucleotide
gggaagacaugaucuuccu

SEQ ID NO: 2801781 - RNA, 19 nt, Artificial Sequence
  Description of Artificial Sequence: Synthetic oligonucleotide
gcgauggccgcaaaaggaa

SEQ ID NO: 2801782 - RNA, 19 nt, Artificial Sequence
  Description of Artificial Sequence: Synthetic oligonucleotide
gcggcugcgauccagcgau

SEQ ID NO: 2801783 - RNA, 19 nt, Artificial Sequence
  Description of Artificial Sequence: Synthetic oligonucleotide
aguguaugaggggccccua

SEQ ID NO: 2801784 - RNA, 19 nt, Artificial Sequence
  Description of Artificial Sequence: Synthetic oligonucleotide
aggggccccuacuccugca

SEQ ID NO: 2801785 - RNA, 19 nt, Artificial Sequence
  Description of Artificial Sequence: Synthetic oligonucleotide
guccagcuuuagccuggug

SEQ ID NO: 2801786 - RNA, 19 nt, Artificial Sequence
  Description of Artificial Sequence: Synthetic oligonucleotide
gaugcccacauggaccguu

SEQ ID NO: 2801787 - RNA, 19 nt, Artificial Sequence
  Description of Artificial Sequence: Synthetic oligonucleotide
ccagcuuuagccuggugau

SEQ ID NO: 2801788 - RNA, 19 nt, Artificial Sequence
  Description of Artificial Sequence: Synthetic oligonucleotide
cguuugcgguucuugcuuc

SEQ ID NO: 2801789 - RNA, 19 nt, Artificial Sequence
  Description of Artificial Sequence: Synthetic oligonucleotide
gugcauugaaaugccguuu

SEQ ID NO: 2801790 - RNA, 19 nt, Artificial Sequence
  Description of Artificial Sequence: Synthetic oligonucleotide
ggaugugagaaggugcauu

SEQ ID NO: 2801791 - RNA, 19 nt, Artificial Sequence
  Description of Artificial Sequence: Synthetic oligonucleotide
cagaagucacgaagggauu

SEQ ID NO: 2801792 - RNA, 19 nt, Artificial Sequence
  Description of Artificial Sequence: Synthetic oligonucleotide
ccugcaucuucucaaucgu

SEQ ID NO: 2801793 - RNA, 19 nt, Artificial Sequence
  Description of Artificial Sequence: Synthetic oligonucleotide
cgguucuugcuucggucag

SEQ ID NO: 2801794 - RNA, 19 nt, Artificial Sequence
  Description of Artificial Sequence: Synthetic oligonucleotide
ggguggaugcccacaugga

SEQ ID NO: 2801795 - RNA, 19 nt, Artificial Sequence
  Description of Artificial Sequence: Synthetic oligonucleotide
gcuggccuuuguagugucc

SEQ ID NO: 2801796 - RNA, 19 nt, Artificial Sequence
  Description of Artificial Sequence: Synthetic oligonucleotide
ggccccuacuccugcaucu

SEQ ID NO: 2801797 - RNA, 19 nt, Artificial Sequence
  Description of Artificial Sequence: Synthetic oligonucleotide
gaacuucauuuuggcggcu

SEQ ID NO: 2801798 - RNA, 19 nt, Artificial Sequence
  Description of Artificial Sequence: Synthetic oligonucleotide
ggcggcugcgauccagcga

SEQ ID NO: 2801799 - RNA, 19 nt, Artificial Sequence
  Description of Artificial Sequence: Synthetic oligonucleotide
gccguuugcgguucuugcu

SEQ ID NO: 2801800 - RNA, 19 nt, Artificial Sequence
  Description of Artificial Sequence: Synthetic oligonucleotide
cugcaucuucucaaucguu

SEQ ID NO: 2801801 - RNA, 19 nt, Artificial Sequence
  Description of Artificial Sequence: Synthetic oligonucleotide
ccuuuguaguguccucgga

SEQ ID NO: 2801802 - RNA, 19 nt, Artificial Sequence
  Description of Artificial Sequence: Synthetic oligonucleotide
gcgauccagcgauggccgc

SEQ ID NO: 2801803 - RNA, 19 nt, Artificial Sequence
  Description of Artificial Sequence: Synthetic oligonucleotide
caggaucuucuugcggucu

SEQ ID NO: 2801804 - RNA, 19 nt, Artificial Sequence
  Description of Artificial Sequence: Synthetic oligonucleotide
auggaccguugugccauua

SEQ ID NO: 2801805 - RNA, 19 nt, Artificial Sequence
  Description of Artificial Sequence: Synthetic oligonucleotide
gggccccuacuccugcauc

SEQ ID NO: 2801806 - RNA, 19 nt, Artificial Sequence
  Description of Artificial Sequence: Synthetic oligonucleotide
cgaaugggcauagaucgaa

SEQ ID NO: 2801807 - RNA, 19 nt, Artificial Sequence
  Description of Artificial Sequence: Synthetic oligonucleotide
cgagacuuggcuuuccuuu

SEQ ID NO: 2801808 - RNA, 19 nt, Artificial Sequence
  Description of Artificial Sequence: Synthetic oligonucleotide
gcugggguggaugcccaca

SEQ ID NO: 2801809 - RNA, 19 nt, Artificial Sequence
  Description of Artificial Sequence: Synthetic oligonucleotide
auccagcgauggccgcaaa

SEQ ID NO: 2801810 - RNA, 19 nt, Artificial Sequence
  Description of Artificial Sequence: Synthetic oligonucleotide
ccucggacaaccugaacuu

SEQ ID NO: 2801811 - RNA, 19 nt, Artificial Sequence
  Description of Artificial Sequence: Synthetic oligonucleotide
ccuuuccuacuugucgaga

SEQ ID NO: 2801812 - RNA, 19 nt, Artificial Sequence
  Description of Artificial Sequence: Synthetic oligonucleotide
gcacucguucaauguagau

SEQ ID NO: 2801813 - RNA, 19 nt, Artificial Sequence
  Description of Artificial Sequence: Synthetic oligonucleotide
cccuacuccugcaucuucu

SEQ ID NO: 2801814 - RNA, 19 nt, Artificial Sequence
  Description of Artificial Sequence: Synthetic oligonucleotide
ccccuacuccugcaucuuc

SEQ ID NO: 2801815 - RNA, 19 nt, Artificial Sequence
  Description of Artificial Sequence: Synthetic oligonucleotide
cagcuuuagccuggugaua

SEQ ID NO: 2801816 - RNA, 19 nt, Artificial Sequence
  Description of Artificial Sequence: Synthetic oligonucleotide
cucgcugcacucguucaau

SEQ ID NO: 2801817 - RNA, 19 nt, Artificial Sequence
  Description of Artificial Sequence: Synthetic oligonucleotide
ggcauagaucgaacauugu

SEQ ID NO: 2801818 - RNA, 19 nt, Artificial Sequence
  Description of Artificial Sequence: Synthetic oligonucleotide
cgauggccgcaaaaggaaa

SEQ ID NO: 2801819 - RNA, 19 nt, Artificial Sequence
  Description of Artificial Sequence: Synthetic oligonucleotide
ccguugugccauuagcuuu

SEQ ID NO: 2801820 - RNA, 19 nt, Artificial Sequence
  Description of Artificial Sequence: Synthetic oligonucleotide
cuuuccuuuccaggaucuu

SEQ ID NO: 2801821 - RNA, 19 nt, Artificial Sequence
  Description of Artificial Sequence: Synthetic oligonucleotide
cguugugccauuagcuuuu

SEQ ID NO: 2801822 - RNA, 19 nt, Artificial Sequence
  Description of Artificial Sequence: Synthetic oligonucleotide
cggucuuuguccagcuuua

SEQ ID NO: 2801823 - RNA, 19 nt, Artificial Sequence
  Description of Artificial Sequence: Synthetic oligonucleotide
gcccuucuccuuuccuacu

SEQ ID NO: 2801824 - RNA, 19 nt, Artificial Sequence
  Description of Artificial Sequence: Synthetic oligonucleotide
ccguuugcgguucuugcuu

SEQ ID NO: 2801825 - RNA, 19 nt, Artificial Sequence
  Description of Artificial Sequence: Synthetic oligonucleotide
cgcugcacucguucaaugu

SEQ ID NO: 2801826 - RNA, 19 nt, Artificial Sequence
  Description of Artificial Sequence: Synthetic oligonucleotide
ccuauacaccuggaccacu

SEQ ID NO: 2801827 - RNA, 19 nt, Artificial Sequence
  Description of Artificial Sequence: Synthetic oligonucleotide
ccuccggaugugagaaggu

SEQ ID NO: 2801828 - RNA, 19 nt, Artificial Sequence
  Description of Artificial Sequence: Synthetic oligonucleotide
ccaaucugcuggccuuugu

SEQ ID NO: 2801829 - RNA, 19 nt, Artificial Sequence
  Description of Artificial Sequence: Synthetic oligonucleotide
cauggaccguugugccauu

SEQ ID NO: 2801830 - RNA, 19 nt, Artificial Sequence
  Description of Artificial Sequence: Synthetic oligonucleotide
ccuuucgaaugggcauaga

SEQ ID NO: 2801831 - RNA, 19 nt, Artificial Sequence
  Description of Artificial Sequence: Synthetic oligonucleotide
cgauccagcgauggccgca

SEQ ID NO: 2801832 - RNA, 19 nt, Artificial Sequence
  Description of Artificial Sequence: Synthetic oligonucleotide
ggggccccuacuccugcau

SEQ ID NO: 2801833 - RNA, 19 nt, Artificial Sequence
  Description of Artificial Sequence: Synthetic oligonucleotide
cggacaaccugaacuucau

SEQ ID NO: 2801834 - RNA, 19 nt, Artificial Sequence
  Description of Artificial Sequence: Synthetic oligonucleotide
ccuggaccacuuugccaau

SEQ ID NO: 2801835 - RNA, 19 nt, Artificial Sequence
  Description of Artificial Sequence: Synthetic oligonucleotide
gccuggugauaaccaccuu

SEQ ID NO: 2801836 - RNA, 19 nt, Artificial Sequence
  Description of Artificial Sequence: Synthetic oligonucleotide
cggcugcgauccagcgaug

SEQ ID NO: 2801837 - RNA, 19 nt, Artificial Sequence
  Description of Artificial Sequence: Synthetic oligonucleotide
ggaugcccacauggaccgu

SEQ ID NO: 2801838 - RNA, 19 nt, Artificial Sequence
  Description of Artificial Sequence: Synthetic oligonucleotide
gccccuacuccugcaucuu

SEQ ID NO: 2801839 - RNA, 19 nt, Artificial Sequence
  Description of Artificial Sequence: Synthetic oligonucleotide
cggaugugagaaggugcau

SEQ ID NO: 2801840 - RNA, 19 nt, Artificial Sequence
  Description of Artificial Sequence: Synthetic oligonucleotide
ccaccuugcugggguggau

SEQ ID NO: 2801841 - RNA, 19 nt, Artificial Sequence
  Description of Artificial Sequence: Synthetic oligonucleotide
uuugguucagucuugcugg

SEQ ID NO: 2801842 - RNA, 19 nt, Artificial Sequence
  Description of Artificial Sequence: Synthetic oligonucleotide
agucacuuggcuuacugcc

SEQ ID NO: 2801843 - RNA, 19 nt, Artificial Sequence
  Description of Artificial Sequence: Synthetic oligonucleotide
aaggagagguggcugagcc

SEQ ID NO: 2801844 - RNA, 19 nt, Artificial Sequence
  Description of Artificial Sequence: Synthetic oligonucleotide
aucucugugggcuuggggc

SEQ ID NO: 2801845 - RNA, 19 nt, Artificial Sequence
  Description of Artificial Sequence: Synthetic oligonucleotide
ucugucuuuguucuugggg

SEQ ID NO: 2801846 - RNA, 19 nt, Artificial Sequence
  Description of Artificial Sequence: Synthetic oligonucleotide
aacguuucagcugugcuac

SEQ ID NO: 2801847 - RNA, 19 nt, Artificial Sequence
  Description of Artificial Sequence: Synthetic oligonucleotide
ugaggugaguagcugaagg

SEQ ID NO: 2801848 - RNA, 19 nt, Artificial Sequence
  Description of Artificial Sequence: Synthetic oligonucleotide
uccaauaagccuccauugg

SEQ ID NO: 2801849 - RNA, 19 nt, Artificial Sequence
  Description of Artificial Sequence: Synthetic oligonucleotide
auucuuuggugccacgacc

SEQ ID NO: 2801850 - RNA, 19 nt, Artificial Sequence
  Description of Artificial Sequence: Synthetic oligonucleotide
uucacacacacacacacac

SEQ ID NO: 2801851 - RNA, 19 nt, Artificial Sequence
  Description of Artificial Sequence: Synthetic oligonucleotide
auuggcgucuccugcaugc

SEQ ID NO: 2801852 - RNA, 19 nt, Artificial Sequence
  Description of Artificial Sequence: Synthetic oligonucleotide
ucuccuuccaauaagccuc

SEQ ID NO: 2801853 - RNA, 19 nt, Artificial Sequence
  Description of Artificial Sequence: Synthetic oligonucleotide
  modified_base (15)..(15): a, c, u, g, unknown or other
cacacacaaacacanaccc

SEQ ID NO: 2801854 - RNA, 19 nt, Artificial Sequence
  Description of Artificial Sequence: Synthetic oligonucleotide
uuuucuggagugcuuagcu

SEQ ID NO: 2801855 - RNA, 19 nt, Artificial Sequence
  Description of Artificial Sequence: Synthetic oligonucleotide
uggagugcuuagcugaagg

SEQ ID NO: 2801856 - RNA, 19 nt, Artificial Sequence
  Description of Artificial Sequence: Synthetic oligonucleotide
caauaagccuccauuggcg

SEQ ID NO: 2801857 - RNA, 19 nt, Artificial Sequence
  Description of Artificial Sequence: Synthetic oligonucleotide
agguccauaccccucuucc

SEQ ID NO: 2801858 - RNA, 19 nt, Artificial Sequence
  Description of Artificial Sequence: Synthetic oligonucleotide
cugucuuuguucuuggggc

SEQ ID NO: 2801859 - RNA, 19 nt, Artificial Sequence
  Description of Artificial Sequence: Synthetic oligonucleotide
gacaaaggagugcagggag

SEQ ID NO: 2801860 - RNA, 19 nt, Artificial Sequence
  Description of Artificial Sequence: Synthetic oligonucleotide
uguccugccugacagaacu

SEQ ID NO: 2801861 - RNA, 19 nt, Artificial Sequence
  Description of Artificial Sequence: Synthetic oligonucleotide
ugccugacagaacugcugg

SEQ ID NO: 2801862 - RNA, 19 nt, Artificial Sequence
  Description of Artificial Sequence: Synthetic oligonucleotide
uuccaauaagccuccauug

SEQ ID NO: 2801863 - RNA, 19 nt, Artificial Sequence
  Description of Artificial Sequence: Synthetic oligonucleotide
agcggggagguccauaccc

SEQ ID NO: 2801864 - RNA, 19 nt, Artificial Sequence
  Description of Artificial Sequence: Synthetic oligonucleotide
uuguucuuggggcaguuug

SEQ ID NO: 2801865 - RNA, 19 nt, Artificial Sequence
  Description of Artificial Sequence: Synthetic oligonucleotide
guagcugaaggagaggugg

SEQ ID NO: 2801866 - RNA, 19 nt, Artificial Sequence
  Description of Artificial Sequence: Synthetic oligonucleotide
aauaagccuccauuggcgu

SEQ ID NO: 2801867 - RNA, 19 nt, Artificial Sequence
  Description of Artificial Sequence: Synthetic oligonucleotide
uguucuuggggcaguuugg

SEQ ID NO: 2801868 - RNA, 19 nt, Artificial Sequence
  Description of Artificial Sequence: Synthetic oligonucleotide
guuugguucagucuugcug

SEQ ID NO: 2801869 - RNA, 19 nt, Artificial Sequence
  Description of Artificial Sequence: Synthetic oligonucleotide
acaucucucuguuuucugg

SEQ ID NO: 2801870 - RNA, 19 nt, Artificial Sequence
  Description of Artificial Sequence: Synthetic oligonucleotide
uucuggagugcuuagcuga

SEQ ID NO: 2801871 - RNA, 19 nt, Artificial Sequence
  Description of Artificial Sequence: Synthetic oligonucleotide
aagggcacccaugucuucc

SEQ ID NO: 2801872 - RNA, 19 nt, Artificial Sequence
  Description of Artificial Sequence: Synthetic oligonucleotide
acccaugucuuccuuugcc

SEQ ID NO: 2801873 - RNA, 19 nt, Artificial Sequence
  Description of Artificial Sequence: Synthetic oligonucleotide
cuuuguagggugcacaguc

SEQ ID NO: 2801874 - RNA, 19 nt, Artificial Sequence
  Description of Artificial Sequence: Synthetic oligonucleotide
cacacacacacacaaacac

SEQ ID NO: 2801875 - RNA, 19 nt, Artificial Sequence
  Description of Artificial Sequence: Synthetic oligonucleotide
cacacacacacacacaaac

SEQ ID NO: 2801876 - RNA, 19 nt, Artificial Sequence
  Description of Artificial Sequence: Synthetic oligonucleotide
ucuuggggcaguuugguuc

SEQ ID NO: 2801877 - RNA, 19 nt, Artificial Sequence
  Description of Artificial Sequence: Synthetic oligonucleotide
  modified_base (14)..(14): a, c, u, g, unknown or other
acacacaaacacanacccc

SEQ ID NO: 2801878 - RNA, 19 nt, Artificial Sequence
  Description of Artificial Sequence: Synthetic oligonucleotide
ucuuccucuuuguagggug

SEQ ID NO: 2801879 - RNA, 19 nt, Artificial Sequence
  Description of Artificial Sequence: Synthetic oligonucleotide
aaggagugcagggagcggg

SEQ ID NO: 2801880 - RNA, 19 nt, Artificial Sequence
  Description of Artificial Sequence: Synthetic oligonucleotide
cacacacacacacacacac

SEQ ID NO: 2801881 - RNA, 19 nt, Artificial Sequence
  Description of Artificial Sequence: Synthetic oligonucleotide
uuagcugaaggcagcugag

SEQ ID NO: 2801882 - RNA, 19 nt, Artificial Sequence
  Description of Artificial Sequence: Synthetic oligonucleotide
uucuuuggugccacgaccu

SEQ ID NO: 2801883 - RNA, 19 nt, Artificial Sequence
  Description of Artificial Sequence: Synthetic oligonucleotide
ugaacguuucagcugugcu

SEQ ID NO: 2801884 - RNA, 19 nt, Artificial Sequence
  Description of Artificial Sequence: Synthetic oligonucleotide
ucgucugaacguuucagcu

SEQ ID NO: 2801885 - RNA, 19 nt, Artificial Sequence
  Description of Artificial Sequence: Synthetic oligonucleotide
ugagggacaaaggagugca

SEQ ID NO: 2801886 - RNA, 19 nt, Artificial Sequence
  Description of Artificial Sequence: Synthetic oligonucleotide
caugucuuccuuugccucg

SEQ ID NO: 2801887 - RNA, 19 nt, Artificial Sequence
  Description of Artificial Sequence: Synthetic oligonucleotide
ugcacagucacuuggcuua

SEQ ID NO: 2801888 - RNA, 19 nt, Artificial Sequence
  Description of Artificial Sequence: Synthetic oligonucleotide
acccugauucuuuggugcc

SEQ ID NO: 2801889 - RNA, 19 nt, Artificial Sequence
  Description of Artificial Sequence: Synthetic oligonucleotide
uuuguagggugcacaguca

SEQ ID NO: 2801890 - RNA, 19 nt, Artificial Sequence
  Description of Artificial Sequence: Synthetic oligonucleotide
agggugcacagucacuugg

SEQ ID NO: 2801891 - RNA, 19 nt, Artificial Sequence
  Description of Artificial Sequence: Synthetic oligonucleotide
cacccugauucuuuggugc

SEQ ID NO: 2801892 - RNA, 19 nt, Artificial Sequence
  Description of Artificial Sequence: Synthetic oligonucleotide
gugagucugccacugggcg

SEQ ID NO: 2801893 - RNA, 19 nt, Artificial Sequence
  Description of Artificial Sequence: Synthetic oligonucleotide
ucaucacugccuuuggguc

SEQ ID NO: 2801894 - RNA, 19 nt, Artificial Sequence
  Description of Artificial Sequence: Synthetic oligonucleotide
agugcuuagcugaaggcag

SEQ ID NO: 2801895 - RNA, 19 nt, Artificial Sequence
  Description of Artificial Sequence: Synthetic oligonucleotide
cucucuguuuucuggagug

SEQ ID NO: 2801896 - RNA, 19 nt, Artificial Sequence
  Description of Artificial Sequence: Synthetic oligonucleotide
gauucuuuggugccacgac

SEQ ID NO: 2801897 - RNA, 19 nt, Artificial Sequence
  Description of Artificial Sequence: Synthetic oligonucleotide
cuggcagugagucugccac

SEQ ID NO: 2801898 - RNA, 19 nt, Artificial Sequence
  Description of Artificial Sequence: Synthetic oligonucleotide
cacucuccuuccaauaagc

SEQ ID NO: 2801899 - RNA, 19 nt, Artificial Sequence
  Description of Artificial Sequence: Synthetic oligonucleotide
uguuuucuggagugcuuag

SEQ ID NO: 2801900 - RNA, 19 nt, Artificial Sequence
  Description of Artificial Sequence: Synthetic oligonucleotide
caaaggagugcagggagcg

SEQ ID NO: 2801901 - RNA, 19 nt, Artificial Sequence
  Description of Artificial Sequence: Synthetic oligonucleotide
uuucuggagugcuuagcug

SEQ ID NO: 2801902 - RNA, 19 nt, Artificial Sequence
  Description of Artificial Sequence: Synthetic oligonucleotide
ugugaggugaguagcugaa

SEQ ID NO: 2801903 - RNA, 19 nt, Artificial Sequence
  Description of Artificial Sequence: Synthetic oligonucleotide
uuguagggugcacagucac

SEQ ID NO: 2801904 - RNA, 19 nt, Artificial Sequence
  Description of Artificial Sequence: Synthetic oligonucleotide
cucuuuguagggugcacag

SEQ ID NO: 2801905 - RNA, 19 nt, Artificial Sequence
  Description of Artificial Sequence: Synthetic oligonucleotide
cucgucugaacguuucagc

SEQ ID NO: 2801906 - RNA, 19 nt, Artificial Sequence
  Description of Artificial Sequence: Synthetic oligonucleotide
acagucacuuggcuuacug

SEQ ID NO: 2801907 - RNA, 19 nt, Artificial Sequence
  Description of Artificial Sequence: Synthetic oligonucleotide
auaagccuccauuggcguc

SEQ ID NO: 2801908 - RNA, 19 nt, Artificial Sequence
  Description of Artificial Sequence: Synthetic oligonucleotide
cuuagcugaaggcagcuga

SEQ ID NO: 2801909 - RNA, 19 nt, Artificial Sequence
  Description of Artificial Sequence: Synthetic oligonucleotide
ugucuuuguucuuggggca

SEQ ID NO: 2801910 - RNA, 19 nt, Artificial Sequence
  Description of Artificial Sequence: Synthetic oligonucleotide
  modified_base (19)..(19): a, c, u, g, unknown or other
cacacacacacaaacacan

SEQ ID NO: 2801911 - RNA, 19 nt, Artificial Sequence
  Description of Artificial Sequence: Synthetic oligonucleotide
uggcaaagggcacccaugu

SEQ ID NO: 2801912 - RNA, 19 nt, Artificial Sequence
  Description of Artificial Sequence: Synthetic oligonucleotide
agggacaaaggagugcagg

SEQ ID NO: 2801913 - RNA, 19 nt, Artificial Sequence
  Description of Artificial Sequence: Synthetic oligonucleotide
agugagucugccacugggc

SEQ ID NO: 2801914 - RNA, 19 nt, Artificial Sequence
  Description of Artificial Sequence: Synthetic oligonucleotide
acaaaggagugcagggagc

SEQ ID NO: 2801915 - RNA, 19 nt, Artificial Sequence
  Description of Artificial Sequence: Synthetic oligonucleotide
ucucucuguuuucuggagu

SEQ ID NO: 2801916 - RNA, 19 nt, Artificial Sequence
  Description of Artificial Sequence: Synthetic oligonucleotide
uccugcaugcccagcagca

SEQ ID NO: 2801917 - RNA, 19 nt, Artificial Sequence
  Description of Artificial Sequence: Synthetic oligonucleotide
uuugggucccuugccaucc

SEQ ID NO: 2801918 - RNA, 19 nt, Artificial Sequence
  Description of Artificial Sequence: Synthetic oligonucleotide
gggacaaaggagugcaggg

SEQ ID NO: 2801919 - RNA, 19 nt, Artificial Sequence
  Description of Artificial Sequence: Synthetic oligonucleotide
aucacugccuuuggguccc

SEQ ID NO: 2801920 - RNA, 19 nt, Artificial Sequence
  Description of Artificial Sequence: Synthetic oligonucleotide
ugccacgaccucaucacug

SEQ ID NO: 2801921 - RNA, 19 nt, Artificial Sequence
  Description of Artificial Sequence: Synthetic oligonucleotide
acucuccuuccaauaagcc

SEQ ID NO: 2801922 - RNA, 19 nt, Artificial Sequence
  Description of Artificial Sequence: Synthetic oligonucleotide
aaagggcacccaugucuuc

SEQ ID NO: 2801923 - RNA, 19 nt, Artificial Sequence
  Description of Artificial Sequence: Synthetic oligonucleotide
gguucagucuugcuggugc

SEQ ID NO: 2801924 - RNA, 19 nt, Artificial Sequence
  Description of Artificial Sequence: Synthetic oligonucleotide
caucacugccuuugggucc

SEQ ID NO: 2801925 - RNA, 19 nt, Artificial Sequence
  Description of Artificial Sequence: Synthetic oligonucleotide
gacagaacugcuggcagug

SEQ ID NO: 2801926 - RNA, 19 nt, Artificial Sequence
  Description of Artificial Sequence: Synthetic oligonucleotide
gugaguagcugaaggagag

SEQ ID NO: 2801927 - RNA, 19 nt, Artificial Sequence
  Description of Artificial Sequence: Synthetic oligonucleotide
caucugucuuuguucuugg

SEQ ID NO: 2801928 - RNA, 19 nt, Artificial Sequence
  Description of Artificial Sequence: Synthetic oligonucleotide
ugauucuuuggugccacga

SEQ ID NO: 2801929 - RNA, 19 nt, Artificial Sequence
  Description of Artificial Sequence: Synthetic oligonucleotide
agucuugcuggugcugucc

SEQ ID NO: 2801930 - RNA, 19 nt, Artificial Sequence
  Description of Artificial Sequence: Synthetic oligonucleotide
ggcgcugccacccugauuc

SEQ ID NO: 2801931 - RNA, 19 nt, Artificial Sequence
  Description of Artificial Sequence: Synthetic oligonucleotide
ugcaugcccagcagcaucu

SEQ ID NO: 2801932 - RNA, 19 nt, Artificial Sequence
  Description of Artificial Sequence: Synthetic oligonucleotide
cugaaggcagcugagggac

SEQ ID NO: 2801933 - RNA, 19 nt, Artificial Sequence
  Description of Artificial Sequence: Synthetic oligonucleotide
cagugagucugccacuggg

SEQ ID NO: 2801934 - RNA, 19 nt, Artificial Sequence
  Description of Artificial Sequence: Synthetic oligonucleotide
aucucucuguuuucuggag

SEQ ID NO: 2801935 - RNA, 19 nt, Artificial Sequence
  Description of Artificial Sequence: Synthetic oligonucleotide
cagcugagggacaaaggag

SEQ ID NO: 2801936 - RNA, 19 nt, Artificial Sequence
  Description of Artificial Sequence: Synthetic oligonucleotide
uggugccacgaccucauca

SEQ ID NO: 2801937 - RNA, 19 nt, Artificial Sequence
  Description of Artificial Sequence: Synthetic oligonucleotide
uuuggugccacgaccucau

SEQ ID NO: 2801938 - RNA, 19 nt, Artificial Sequence
  Description of Artificial Sequence: Synthetic oligonucleotide
cugacagaacugcuggcag

SEQ ID NO: 2801939 - RNA, 19 nt, Artificial Sequence
  Description of Artificial Sequence: Synthetic oligonucleotide
guuucagcugugcuacuug

SEQ ID NO: 2801940 - RNA, 19 nt, Artificial Sequence
  Description of Artificial Sequence: Synthetic oligonucleotide
uuggcuuacugccccacuc

SEQ ID NO: 2801941 - RNA, 19 nt, Artificial Sequence
  Description of Artificial Sequence: Synthetic oligonucleotide
ucacacacacacacacaca

SEQ ID NO: 2801942 - RNA, 19 nt, Artificial Sequence
  Description of Artificial Sequence: Synthetic oligonucleotide
ucucugugggcuuggggca

SEQ ID NO: 2801943 - RNA, 19 nt, Artificial Sequence
  Description of Artificial Sequence: Synthetic oligonucleotide
uugccauccucagagggug

SEQ ID NO: 2801944 - RNA, 19 nt, Artificial Sequence
  Description of Artificial Sequence: Synthetic oligonucleotide
gugcuguccugccugacag

SEQ ID NO: 2801945 - RNA, 19 nt, Artificial Sequence
  Description of Artificial Sequence: Synthetic oligonucleotide
agagguggcugagccagcc

SEQ ID NO: 2801946 - RNA, 19 nt, Artificial Sequence
  Description of Artificial Sequence: Synthetic oligonucleotide
ugagucugccacugggcgc

SEQ ID NO: 2801947 - RNA, 19 nt, Artificial Sequence
  Description of Artificial Sequence: Synthetic oligonucleotide
uaagccuccauuggcgucu

SEQ ID NO: 2801948 - RNA, 19 nt, Artificial Sequence
  Description of Artificial Sequence: Synthetic oligonucleotide
ugaguagcugaaggagagg

SEQ ID NO: 2801949 - RNA, 19 nt, Artificial Sequence
  Description of Artificial Sequence: Synthetic oligonucleotide
ucuccugcaugcccagcag

SEQ ID NO: 2801950 - RNA, 19 nt, Artificial Sequence
  Description of Artificial Sequence: Synthetic oligonucleotide
acugccccacucuccuucc

SEQ ID NO: 2801951 - RNA, 19 nt, Artificial Sequence
  Description of Artificial Sequence: Synthetic oligonucleotide
cuugcuggugcuguccugc

SEQ ID NO: 2801952 - RNA, 19 nt, Artificial Sequence
  Description of Artificial Sequence: Synthetic oligonucleotide
uguagggugcacagucacu

SEQ ID NO: 2801953 - RNA, 19 nt, Artificial Sequence
  Description of Artificial Sequence: Synthetic oligonucleotide
cagucacuuggcuuacugc

SEQ ID NO: 2801954 - RNA, 19 nt, Artificial Sequence
  Description of Artificial Sequence: Synthetic oligonucleotide
gagugcuuagcugaaggca

SEQ ID NO: 2801955 - RNA, 19 nt, Artificial Sequence
  Description of Artificial Sequence: Synthetic oligonucleotide
aucugucuuuguucuuggg

SEQ ID NO: 2801956 - RNA, 19 nt, Artificial Sequence
  Description of Artificial Sequence: Synthetic oligonucleotide
ugccacugggcgcugugag

SEQ ID NO: 2801957 - RNA, 19 nt, Artificial Sequence
  Description of Artificial Sequence: Synthetic oligonucleotide
gaacguuucagcugugcua

SEQ ID NO: 2801958 - RNA, 19 nt, Artificial Sequence
  Description of Artificial Sequence: Synthetic oligonucleotide
agcugagggacaaaggagu

SEQ ID NO: 2801959 - RNA, 19 nt, Artificial Sequence
  Description of Artificial Sequence: Synthetic oligonucleotide
cacacacacacacacacaa

SEQ ID NO: 2801960 - RNA, 19 nt, Artificial Sequence
  Description of Artificial Sequence: Synthetic oligonucleotide
ugacagaacugcuggcagu

SEQ ID NO: 2801961 - RNA, 19 nt, Artificial Sequence
  Description of Artificial Sequence: Synthetic oligonucleotide
ccaauaagccuccauuggc

SEQ ID NO: 2801962 - RNA, 19 nt, Artificial Sequence
  Description of Artificial Sequence: Synthetic oligonucleotide
agugcagggagcggggagg

SEQ ID NO: 2801963 - RNA, 19 nt, Artificial Sequence
  Description of Artificial Sequence: Synthetic oligonucleotide
uagcugaaggagagguggc

SEQ ID NO: 2801964 - RNA, 19 nt, Artificial Sequence
  Description of Artificial Sequence: Synthetic oligonucleotide
cccucuuccucuuuguagg

SEQ ID NO: 2801965 - RNA, 19 nt, Artificial Sequence
  Description of Artificial Sequence: Synthetic oligonucleotide
uccauaccccucuuccucu

SEQ ID NO: 2801966 - RNA, 19 nt, Artificial Sequence
  Description of Artificial Sequence: Synthetic oligonucleotide
uggcuuacugccccacucu

SEQ ID NO: 2801967 - RNA, 19 nt, Artificial Sequence
  Description of Artificial Sequence: Synthetic oligonucleotide
ucagucuugcuggugcugu

SEQ ID NO: 2801968 - RNA, 19 nt, Artificial Sequence
  Description of Artificial Sequence: Synthetic oligonucleotide
uccugccugacagaacugc

SEQ ID NO: 2801969 - RNA, 19 nt, Artificial Sequence
  Description of Artificial Sequence: Synthetic oligonucleotide
ugaaggagagguggcugag

SEQ ID NO: 2801970 - RNA, 19 nt, Artificial Sequence
  Description of Artificial Sequence: Synthetic oligonucleotide
ucuggagugcuuagcugaa

SEQ ID NO: 2801971 - RNA, 19 nt, Artificial Sequence
  Description of Artificial Sequence: Synthetic oligonucleotide
ugggcuuggggcaucuguc

SEQ ID NO: 2801972 - RNA, 19 nt, Artificial Sequence
  Description of Artificial Sequence: Synthetic oligonucleotide
ugccuuugggucccuugcc

SEQ ID NO: 2801973 - RNA, 19 nt, Artificial Sequence
  Description of Artificial Sequence: Synthetic oligonucleotide
uacugccccacucuccuuc

SEQ ID NO: 2801974 - RNA, 19 nt, Artificial Sequence
  Description of Artificial Sequence: Synthetic oligonucleotide
cugccuuugggucccuugc

SEQ ID NO: 2801975 - RNA, 19 nt, Artificial Sequence
  Description of Artificial Sequence: Synthetic oligonucleotide
ucuguuuucuggagugcuu

SEQ ID NO: 2801976 - RNA, 19 nt, Artificial Sequence
  Description of Artificial Sequence: Synthetic oligonucleotide
cuccauuggcgucuccugc

SEQ ID NO: 2801977 - RNA, 19 nt, Artificial Sequence
  Description of Artificial Sequence: Synthetic oligonucleotide
auaccccucuuccucuuug

SEQ ID NO: 2801978 - RNA, 19 nt, Artificial Sequence
  Description of Artificial Sequence: Synthetic oligonucleotide
cuggcaaagggcacccaug

SEQ ID NO: 2801979 - RNA, 19 nt, Artificial Sequence
  Description of Artificial Sequence: Synthetic oligonucleotide
guuuucuggagugcuuagc

SEQ ID NO: 2801980 - RNA, 19 nt, Artificial Sequence
  Description of Artificial Sequence: Synthetic oligonucleotide
gucugaacguuucagcugu

SEQ ID NO: 2801981 - RNA, 19 nt, Artificial Sequence
  Description of Artificial Sequence: Synthetic oligonucleotide
caucucugugggcuugggg

SEQ ID NO: 2801982 - RNA, 19 nt, Artificial Sequence
  Description of Artificial Sequence: Synthetic oligonucleotide
cuuccuggcgcugccaccc

SEQ ID NO: 2801983 - RNA, 19 nt, Artificial Sequence
  Description of Artificial Sequence: Synthetic oligonucleotide
cuccuuccaauaagccucc

SEQ ID NO: 2801984 - RNA, 19 nt, Artificial Sequence
  Description of Artificial Sequence: Synthetic oligonucleotide
cugccugacagaacugcug

SEQ ID NO: 2801985 - RNA, 19 nt, Artificial Sequence
  Description of Artificial Sequence: Synthetic oligonucleotide
ggugccacgaccucaucac

SEQ ID NO: 2801986 - RNA, 19 nt, Artificial Sequence
  Description of Artificial Sequence: Synthetic oligonucleotide
ucucuguuuucuggagugc

SEQ ID NO: 2801987 - RNA, 19 nt, Artificial Sequence
  Description of Artificial Sequence: Synthetic oligonucleotide
acacacacacacaaacaca

SEQ ID NO: 2801988 - RNA, 19 nt, Artificial Sequence
  Description of Artificial Sequence: Synthetic oligonucleotide
cccagcagcaucucugugg

SEQ ID NO: 2801989 - RNA, 19 nt, Artificial Sequence
  Description of Artificial Sequence: Synthetic oligonucleotide
ggagugcuuagcugaaggc

SEQ ID NO: 2801990 - RNA, 19 nt, Artificial Sequence
  Description of Artificial Sequence: Synthetic oligonucleotide
guccauaccccucuuccuc

SEQ ID NO: 2801991 - RNA, 19 nt, Artificial Sequence
  Description of Artificial Sequence: Synthetic oligonucleotide
cuuggggcaguuugguuca

SEQ ID NO: 2801992 - RNA, 19 nt, Artificial Sequence
  Description of Artificial Sequence: Synthetic oligonucleotide
gagugcagggagcggggag

SEQ ID NO: 2801993 - RNA, 19 nt, Artificial Sequence
  Description of Artificial Sequence: Synthetic oligonucleotide
caucucucuguuuucugga

SEQ ID NO: 2801994 - RNA, 19 nt, Artificial Sequence
  Description of Artificial Sequence: Synthetic oligonucleotide
uuugccucgucugaacguu

SEQ ID NO: 2801995 - RNA, 19 nt, Artificial Sequence
  Description of Artificial Sequence: Synthetic oligonucleotide
ccagcagcaucucuguggg

SEQ ID NO: 2801996 - RNA, 19 nt, Artificial Sequence
  Description of Artificial Sequence: Synthetic oligonucleotide
aguuugguucagucuugcu

SEQ ID NO: 2801997 - RNA, 19 nt, Artificial Sequence
  Description of Artificial Sequence: Synthetic oligonucleotide
uccuuugccucgucugaac

SEQ ID NO: 2801998 - RNA, 19 nt, Artificial Sequence
  Description of Artificial Sequence: Synthetic oligonucleotide
acacacacacacacaaaca

SEQ ID NO: 2801999 - RNA, 19 nt, Artificial Sequence
  Description of Artificial Sequence: Synthetic oligonucleotide
ugccacccugauucuuugg

SEQ ID NO: 2802000 - RNA, 19 nt, Artificial Sequence
  Description of Artificial Sequence: Synthetic oligonucleotide
ugcuuccuggcgcugccac

SEQ ID NO: 2802001 - RNA, 19 nt, Artificial Sequence
  Description of Artificial Sequence: Synthetic oligonucleotide
ucugccacugggcgcugug

SEQ ID NO: 2802002 - RNA, 19 nt, Artificial Sequence
  Description of Artificial Sequence: Synthetic oligonucleotide
cugaacguuucagcugugc

SEQ ID NO: 2802003 - RNA, 19 nt, Artificial Sequence
  Description of Artificial Sequence: Synthetic oligonucleotide
ggcgcugugaggugaguag

SEQ ID NO: 2802004 - RNA, 19 nt, Artificial Sequence
  Description of Artificial Sequence: Synthetic oligonucleotide
cucaucacugccuuugggu

SEQ ID NO: 2802005 - RNA, 19 nt, Artificial Sequence
  Description of Artificial Sequence: Synthetic oligonucleotide
uagggugcacagucacuug

SEQ ID NO: 2802006 - RNA, 19 nt, Artificial Sequence
  Description of Artificial Sequence: Synthetic oligonucleotide
ucuuuggugccacgaccuc

SEQ ID NO: 2802007 - RNA, 19 nt, Artificial Sequence
  Description of Artificial Sequence: Synthetic oligonucleotide
ucuuuguagggugcacagu

SEQ ID NO: 2802008 - RNA, 19 nt, Artificial Sequence
  Description of Artificial Sequence: Synthetic oligonucleotide
cugauucuuuggugccacg

SEQ ID NO: 2802009 - RNA, 19 nt, Artificial Sequence
  Description of Artificial Sequence: Synthetic oligonucleotide
ucugaacguuucagcugug

SEQ ID NO: 2802010 - RNA, 19 nt, Artificial Sequence
  Description of Artificial Sequence: Synthetic oligonucleotide
aggcagcugagggacaaag

SEQ ID NO: 2802011 - RNA, 19 nt, Artificial Sequence
  Description of Artificial Sequence: Synthetic oligonucleotide
cuuugggucccuugccauc

SEQ ID NO: 2802012 - RNA, 19 nt, Artificial Sequence
  Description of Artificial Sequence: Synthetic oligonucleotide
cugaaggagagguggcuga

SEQ ID NO: 2802013 - RNA, 19 nt, Artificial Sequence
  Description of Artificial Sequence: Synthetic oligonucleotide
gucuuuguucuuggggcag

SEQ ID NO: 2802014 - RNA, 19 nt, Artificial Sequence
  Description of Artificial Sequence: Synthetic oligonucleotide
cugugaggugaguagcuga

SEQ ID NO: 2802015 - RNA, 19 nt, Artificial Sequence
  Description of Artificial Sequence: Synthetic oligonucleotide
cuuggggcaucugucuuug

SEQ ID NO: 2802016 - RNA, 19 nt, Artificial Sequence
  Description of Artificial Sequence: Synthetic oligonucleotide
cauccucagagggugcccc

SEQ ID NO: 2802017 - RNA, 19 nt, Artificial Sequence
  Description of Artificial Sequence: Synthetic oligonucleotide
agccagccugcuuccuggc

SEQ ID NO: 2802018 - RNA, 19 nt, Artificial Sequence
  Description of Artificial Sequence: Synthetic oligonucleotide
acgaccucaucacugccuu

SEQ ID NO: 2802019 - RNA, 19 nt, Artificial Sequence
  Description of Artificial Sequence: Synthetic oligonucleotide
ugcuuagcugaaggcagcu

SEQ ID NO: 2802020 - RNA, 19 nt, Artificial Sequence
  Description of Artificial Sequence: Synthetic oligonucleotide
ucuuuguucuuggggcagu

SEQ ID NO: 2802021 - RNA, 19 nt, Artificial Sequence
  Description of Artificial Sequence: Synthetic oligonucleotide
ugccucgucugaacguuuc

SEQ ID NO: 2802022 - RNA, 19 nt, Artificial Sequence
  Description of Artificial Sequence: Synthetic oligonucleotide
cuccugcaugcccagcagc

SEQ ID NO: 2802023 - RNA, 19 nt, Artificial Sequence
  Description of Artificial Sequence: Synthetic oligonucleotide
uugguucagucuugcuggu

SEQ ID NO: 2802024 - RNA, 19 nt, Artificial Sequence
  Description of Artificial Sequence: Synthetic oligonucleotide
caguuugguucagucuugc

SEQ ID NO: 2802025 - RNA, 19 nt, Artificial Sequence
  Description of Artificial Sequence: Synthetic oligonucleotide
cuuccuuugccucgucuga

SEQ ID NO: 2802026 - RNA, 19 nt, Artificial Sequence
  Description of Artificial Sequence: Synthetic oligonucleotide
gcaucugucuuuguucuug

SEQ ID NO: 2802027 - RNA, 19 nt, Artificial Sequence
  Description of Artificial Sequence: Synthetic oligonucleotide
cuuccaauaagccuccauu

SEQ ID NO: 2802028 - RNA, 19 nt, Artificial Sequence
  Description of Artificial Sequence: Synthetic oligonucleotide
ggggcaucugucuuuguuc

SEQ ID NO: 2802029 - RNA, 19 nt, Artificial Sequence
  Description of Artificial Sequence: Synthetic oligonucleotide
ccuuugccucgucugaacg

SEQ ID NO: 2802030 - RNA, 19 nt, Artificial Sequence
  Description of Artificial Sequence: Synthetic oligonucleotide
ggcugagccagccugcuuc

SEQ ID NO: 2802031 - RNA, 19 nt, Artificial Sequence
  Description of Artificial Sequence: Synthetic oligonucleotide
agaacugcuggcagugagu

SEQ ID NO: 2802032 - RNA, 19 nt, Artificial Sequence
  Description of Artificial Sequence: Synthetic oligonucleotide
uuccucuuuguagggugca

SEQ ID NO: 2802033 - RNA, 19 nt, Artificial Sequence
  Description of Artificial Sequence: Synthetic oligonucleotide
cugcaugcccagcagcauc

SEQ ID NO: 2802034 - RNA, 19 nt, Artificial Sequence
  Description of Artificial Sequence: Synthetic oligonucleotide
cuuacugccccacucuccu

SEQ ID NO: 2802035 - RNA, 19 nt, Artificial Sequence
  Description of Artificial Sequence: Synthetic oligonucleotide
uaccccucuuccucuuugu

SEQ ID NO: 2802036 - RNA, 19 nt, Artificial Sequence
  Description of Artificial Sequence: Synthetic oligonucleotide
ggagcggggagguccauac

SEQ ID NO: 2802037 - RNA, 19 nt, Artificial Sequence
  Description of Artificial Sequence: Synthetic oligonucleotide
uugcuggugcuguccugcc

SEQ ID NO: 2802038 - RNA, 19 nt, Artificial Sequence
  Description of Artificial Sequence: Synthetic oligonucleotide
ggugaguagcugaaggaga

SEQ ID NO: 2802039 - RNA, 19 nt, Artificial Sequence
  Description of Artificial Sequence: Synthetic oligonucleotide
aggagagguggcugagcca

SEQ ID NO: 2802040 - RNA, 19 nt, Artificial Sequence
  Description of Artificial Sequence: Synthetic oligonucleotide
ugccccacucuccuuccaa

SEQ ID NO: 2802041 - RNA, 19 nt, Artificial Sequence
  Description of Artificial Sequence: Synthetic oligonucleotide
agcaucucugugggcuugg

SEQ ID NO: 2802042 - RNA, 19 nt, Artificial Sequence
  Description of Artificial Sequence: Synthetic oligonucleotide
agcugaaggagagguggcu

SEQ ID NO: 2802043 - RNA, 19 nt, Artificial Sequence
  Description of Artificial Sequence: Synthetic oligonucleotide
ugcuggugcuguccugccu

SEQ ID NO: 2802044 - RNA, 19 nt, Artificial Sequence
  Description of Artificial Sequence: Synthetic oligonucleotide
gagguccauaccccucuuc

SEQ ID NO: 2802045 - RNA, 19 nt, Artificial Sequence
  Description of Artificial Sequence: Synthetic oligonucleotide
gccacgaccucaucacugc

SEQ ID NO: 2802046 - RNA, 19 nt, Artificial Sequence
  Description of Artificial Sequence: Synthetic oligonucleotide
uucuuggggcaguuugguu

SEQ ID NO: 2802047 - RNA, 19 nt, Artificial Sequence
  Description of Artificial Sequence: Synthetic oligonucleotide
ggucccuugccauccucag

SEQ ID NO: 2802048 - RNA, 19 nt, Artificial Sequence
  Description of Artificial Sequence: Synthetic oligonucleotide
gagggacaaaggagugcag

SEQ ID NO: 2802049 - RNA, 19 nt, Artificial Sequence
  Description of Artificial Sequence: Synthetic oligonucleotide
aggagugcagggagcgggg

SEQ ID NO: 2802050 - RNA, 19 nt, Artificial Sequence
  Description of Artificial Sequence: Synthetic oligonucleotide
ccccucuuccucuuuguag

SEQ ID NO: 2802051 - RNA, 19 nt, Artificial Sequence
  Description of Artificial Sequence: Synthetic oligonucleotide
ugguucagucuugcuggug

SEQ ID NO: 2802052 - RNA, 19 nt, Artificial Sequence
  Description of Artificial Sequence: Synthetic oligonucleotide
uccucuuuguagggugcac

SEQ ID NO: 2802053 - RNA, 19 nt, Artificial Sequence
  Description of Artificial Sequence: Synthetic oligonucleotide
cacccaugucuuccuuugc

SEQ ID NO: 2802054 - RNA, 19 nt, Artificial Sequence
  Description of Artificial Sequence: Synthetic oligonucleotide
uggcagugagucugccacu

SEQ ID NO: 2802055 - RNA, 19 nt, Artificial Sequence
  Description of Artificial Sequence: Synthetic oligonucleotide
cuuuggugccacgaccuca

SEQ ID NO: 2802056 - RNA, 19 nt, Artificial Sequence
  Description of Artificial Sequence: Synthetic oligonucleotide
cugccacccugauucuuug

SEQ ID NO: 2802057 - RNA, 19 nt, Artificial Sequence
  Description of Artificial Sequence: Synthetic oligonucleotide
cuugccauccucagagggu

SEQ ID NO: 2802058 - RNA, 19 nt, Artificial Sequence
  Description of Artificial Sequence: Synthetic oligonucleotide
gugcuuagcugaaggcagc

SEQ ID NO: 2802059 - RNA, 19 nt, Artificial Sequence
  Description of Artificial Sequence: Synthetic oligonucleotide
gcugaaggcagcugaggga

SEQ ID NO: 2802060 - RNA, 19 nt, Artificial Sequence
  Description of Artificial Sequence: Synthetic oligonucleotide
ggggcaguuugguucaguc

SEQ ID NO: 2802061 - RNA, 19 nt, Artificial Sequence
  Description of Artificial Sequence: Synthetic oligonucleotide
ugcuguccugccugacaga

SEQ ID NO: 2802062 - RNA, 19 nt, Artificial Sequence
  Description of Artificial Sequence: Synthetic oligonucleotide
cauuggcgucuccugcaug

SEQ ID NO: 2802063 - RNA, 19 nt, Artificial Sequence
  Description of Artificial Sequence: Synthetic oligonucleotide
augucuuccuuugccucgu

SEQ ID NO: 2802064 - RNA, 19 nt, Artificial Sequence
  Description of Artificial Sequence: Synthetic oligonucleotide
ccagccugcuuccuggcgc

SEQ ID NO: 2802065 - RNA, 19 nt, Artificial Sequence
  Description of Artificial Sequence: Synthetic oligonucleotide
acacacacacacacacaca

SEQ ID NO: 2802066 - RNA, 19 nt, Artificial Sequence
  Description of Artificial Sequence: Synthetic oligonucleotide
gcugaaggagagguggcug

SEQ ID NO: 2802067 - RNA, 19 nt, Artificial Sequence
  Description of Artificial Sequence: Synthetic oligonucleotide
aagccuccauuggcgucuc

SEQ ID NO: 2802068 - RNA, 19 nt, Artificial Sequence
  Description of Artificial Sequence: Synthetic oligonucleotide
acugggcgcugugagguga

SEQ ID NO: 2802069 - RNA, 19 nt, Artificial Sequence
  Description of Artificial Sequence: Synthetic oligonucleotide
ccacucuccuuccaauaag

SEQ ID NO: 2802070 - RNA, 19 nt, Artificial Sequence
  Description of Artificial Sequence: Synthetic oligonucleotide
uccuggcgcugccacccug

SEQ ID NO: 2802071 - RNA, 19 nt, Artificial Sequence
  Description of Artificial Sequence: Synthetic oligonucleotide
gagcggggagguccauacc

SEQ ID NO: 2802072 - RNA, 19 nt, Artificial Sequence
  Description of Artificial Sequence: Synthetic oligonucleotide
cuguccugccugacagaac

SEQ ID NO: 2802073 - RNA, 19 nt, Artificial Sequence
  Description of Artificial Sequence: Synthetic oligonucleotide
ggcagugagucugccacug

SEQ ID NO: 2802074 - RNA, 19 nt, Artificial Sequence
  Description of Artificial Sequence: Synthetic oligonucleotide
gagucugccacugggcgcu

SEQ ID NO: 2802075 - RNA, 19 nt, Artificial Sequence
  Description of Artificial Sequence: Synthetic oligonucleotide
cugggcgcugugaggugag

SEQ ID NO: 2802076 - RNA, 19 nt, Artificial Sequence
  Description of Artificial Sequence: Synthetic oligonucleotide
ccucaucacugccuuuggg

SEQ ID NO: 2802077 - RNA, 19 nt, Artificial Sequence
  Description of Artificial Sequence: Synthetic oligonucleotide
cuggagugcuuagcugaag

SEQ ID NO: 2802078 - RNA, 19 nt, Artificial Sequence
  Description of Artificial Sequence: Synthetic oligonucleotide
cuuugccucgucugaacgu

SEQ ID NO: 2802079 - RNA, 19 nt, Artificial Sequence
  Description of Artificial Sequence: Synthetic oligonucleotide
gcugagggacaaaggagug

SEQ ID NO: 2802080 - RNA, 19 nt, Artificial Sequence
  Description of Artificial Sequence: Synthetic oligonucleotide
ggacaaaggagugcaggga

SEQ ID NO: 2802081 - RNA, 19 nt, Artificial Sequence
  Description of Artificial Sequence: Synthetic oligonucleotide
gccacugggcgcugugagg

SEQ ID NO: 2802082 - RNA, 19 nt, Artificial Sequence
  Description of Artificial Sequence: Synthetic oligonucleotide
gcagugagucugccacugg

SEQ ID NO: 2802083 - RNA, 19 nt, Artificial Sequence
  Description of Artificial Sequence: Synthetic oligonucleotide
ggugcuguccugccugaca

SEQ ID NO: 2802084 - RNA, 19 nt, Artificial Sequence
  Description of Artificial Sequence: Synthetic oligonucleotide
guagggugcacagucacuu

SEQ ID NO: 2802085 - RNA, 19 nt, Artificial Sequence
  Description of Artificial Sequence: Synthetic oligonucleotide
uugggucccuugccauccu

SEQ ID NO: 2802086 - RNA, 19 nt, Artificial Sequence
  Description of Artificial Sequence: Synthetic oligonucleotide
ugggucccuugccauccuc

SEQ ID NO: 2802087 - RNA, 19 nt, Artificial Sequence
  Description of Artificial Sequence: Synthetic oligonucleotide
uugccucgucugaacguuu

SEQ ID NO: 2802088 - RNA, 19 nt, Artificial Sequence
  Description of Artificial Sequence: Synthetic oligonucleotide
  modified_base (18)..(18): a, c, u, g, unknown or other
acacacacacaaacacana

SEQ ID NO: 2802089 - RNA, 19 nt, Artificial Sequence
  Description of Artificial Sequence: Synthetic oligonucleotide
ccacccugauucuuuggug

SEQ ID NO: 2802090 - RNA, 19 nt, Artificial Sequence
  Description of Artificial Sequence: Synthetic oligonucleotide
cgucugaacguuucagcug

SEQ ID NO: 2802091 - RNA, 19 nt, Artificial Sequence
  Description of Artificial Sequence: Synthetic oligonucleotide
acagaacugcuggcaguga

SEQ ID NO: 2802092 - RNA, 19 nt, Artificial Sequence
  Description of Artificial Sequence: Synthetic oligonucleotide
gcuuacugccccacucucc

SEQ ID NO: 2802093 - RNA, 19 nt, Artificial Sequence
  Description of Artificial Sequence: Synthetic oligonucleotide
gugggcuuggggcaucugu

SEQ ID NO: 2802094 - RNA, 19 nt, Artificial Sequence
  Description of Artificial Sequence: Synthetic oligonucleotide
gcugugaggugaguagcug

SEQ ID NO: 2802095 - RNA, 19 nt, Artificial Sequence
  Description of Artificial Sequence: Synthetic oligonucleotide
agccuccauuggcgucucc

SEQ ID NO: 2802096 - RNA, 19 nt, Artificial Sequence
  Description of Artificial Sequence: Synthetic oligonucleotide
acacacacacacacacaaa

SEQ ID NO: 2802097 - RNA, 19 nt, Artificial Sequence
  Description of Artificial Sequence: Synthetic oligonucleotide
guucagucuugcuggugcu

SEQ ID NO: 2802098 - RNA, 19 nt, Artificial Sequence
  Description of Artificial Sequence: Synthetic oligonucleotide
gcaguuugguucagucuug

SEQ ID NO: 2802099 - RNA, 19 nt, Artificial Sequence
  Description of Artificial Sequence: Synthetic oligonucleotide
ccugauucuuuggugccac

SEQ ID NO: 2802100 - RNA, 19 nt, Artificial Sequence
  Description of Artificial Sequence: Synthetic oligonucleotide
ggcuuacugccccacucuc

SEQ ID NO: 2802101 - RNA, 19 nt, Artificial Sequence
  Description of Artificial Sequence: Synthetic oligonucleotide
ccucgucugaacguuucag

SEQ ID NO: 2802102 - RNA, 19 nt, Artificial Sequence
  Description of Artificial Sequence: Synthetic oligonucleotide
gggcaucugucuuuguucu

SEQ ID NO: 2802103 - RNA, 19 nt, Artificial Sequence
  Description of Artificial Sequence: Synthetic oligonucleotide
acguuucagcugugcuacu

SEQ ID NO: 2802104 - RNA, 19 nt, Artificial Sequence
  Description of Artificial Sequence: Synthetic oligonucleotide
gggugcacagucacuuggc

SEQ ID NO: 2802105 - RNA, 19 nt, Artificial Sequence
  Description of Artificial Sequence: Synthetic oligonucleotide
accccucuuccucuuugua

SEQ ID NO: 2802106 - RNA, 19 nt, Artificial Sequence
  Description of Artificial Sequence: Synthetic oligonucleotide
gucccuugccauccucaga

SEQ ID NO: 2802107 - RNA, 19 nt, Artificial Sequence
  Description of Artificial Sequence: Synthetic oligonucleotide
cucuguuuucuggagugcu

SEQ ID NO: 2802108 - RNA, 19 nt, Artificial Sequence
  Description of Artificial Sequence: Synthetic oligonucleotide
gccugacagaacugcuggc

SEQ ID NO: 2802109 - RNA, 19 nt, Artificial Sequence
  Description of Artificial Sequence: Synthetic oligonucleotide
guucuuggggcaguuuggu

SEQ ID NO: 2802110 - RNA, 19 nt, Artificial Sequence
  Description of Artificial Sequence: Synthetic oligonucleotide
cacgaccucaucacugccu

SEQ ID NO: 2802111 - RNA, 19 nt, Artificial Sequence
  Description of Artificial Sequence: Synthetic oligonucleotide
gagagguggcugagccagc

SEQ ID NO: 2802112 - RNA, 19 nt, Artificial Sequence
  Description of Artificial Sequence: Synthetic oligonucleotide
uggggcaguuugguucagu

SEQ ID NO: 2802113 - RNA, 19 nt, Artificial Sequence
  Description of Artificial Sequence: Synthetic oligonucleotide
aaggcagcugagggacaaa

SEQ ID NO: 2802114 - RNA, 19 nt, Artificial Sequence
  Description of Artificial Sequence: Synthetic oligonucleotide
gccagccugcuuccuggcg

SEQ ID NO: 2802115 - RNA, 19 nt, Artificial Sequence
  Description of Artificial Sequence: Synthetic oligonucleotide
uuccuggcgcugccacccu

SEQ ID NO: 2802116 - RNA, 19 nt, Artificial Sequence
  Description of Artificial Sequence: Synthetic oligonucleotide
uuggugccacgaccucauc

SEQ ID NO: 2802117 - RNA, 19 nt, Artificial Sequence
  Description of Artificial Sequence: Synthetic oligonucleotide
cagcagcaucucugugggc

SEQ ID NO: 2802118 - RNA, 19 nt, Artificial Sequence
  Description of Artificial Sequence: Synthetic oligonucleotide
ccugacagaacugcuggca

SEQ ID NO: 2802119 - RNA, 19 nt, Artificial Sequence
  Description of Artificial Sequence: Synthetic oligonucleotide
uuacugccccacucuccuu

SEQ ID NO: 2802120 - RNA, 19 nt, Artificial Sequence
  Description of Artificial Sequence: Synthetic oligonucleotide
uuggggcaucugucuuugu

SEQ ID NO: 2802121 - RNA, 19 nt, Artificial Sequence
  Description of Artificial Sequence: Synthetic oligonucleotide
uuggggcaguuugguucag

SEQ ID NO: 2802122 - RNA, 19 nt, Artificial Sequence
  Description of Artificial Sequence: Synthetic oligonucleotide
cacugggcgcugugaggug

SEQ ID NO: 2802123 - RNA, 19 nt, Artificial Sequence
  Description of Artificial Sequence: Synthetic oligonucleotide
uccuuccaauaagccucca

SEQ ID NO: 2802124 - RNA, 19 nt, Artificial Sequence
  Description of Artificial Sequence: Synthetic oligonucleotide
ggcaaagggcacccauguc

SEQ ID NO: 2802125 - RNA, 19 nt, Artificial Sequence
  Description of Artificial Sequence: Synthetic oligonucleotide
ugugggcuuggggcaucug

SEQ ID NO: 2802126 - RNA, 19 nt, Artificial Sequence
  Description of Artificial Sequence: Synthetic oligonucleotide
gcgcugugaggugaguagc

SEQ ID NO: 2802127 - RNA, 19 nt, Artificial Sequence
  Description of Artificial Sequence: Synthetic oligonucleotide
ucugugggcuuggggcauc

SEQ ID NO: 2802128 - RNA, 19 nt, Artificial Sequence
  Description of Artificial Sequence: Synthetic oligonucleotide
gugcacagucacuuggcuu

SEQ ID NO: 2802129 - RNA, 19 nt, Artificial Sequence
  Description of Artificial Sequence: Synthetic oligonucleotide
gcuguccugccugacagaa

SEQ ID NO: 2802130 - RNA, 19 nt, Artificial Sequence
  Description of Artificial Sequence: Synthetic oligonucleotide
gcuuagcugaaggcagcug

SEQ ID NO: 2802131 - RNA, 19 nt, Artificial Sequence
  Description of Artificial Sequence: Synthetic oligonucleotide
ggugcacagucacuuggcu

SEQ ID NO: 2802132 - RNA, 19 nt, Artificial Sequence
  Description of Artificial Sequence: Synthetic oligonucleotide
cuggugcuguccugccuga

SEQ ID NO: 2802133 - RNA, 19 nt, Artificial Sequence
  Description of Artificial Sequence: Synthetic oligonucleotide
gcuggcagugagucugcca

SEQ ID NO: 2802134 - RNA, 19 nt, Artificial Sequence
  Description of Artificial Sequence: Synthetic oligonucleotide
guccugccugacagaacug

SEQ ID NO: 2802135 - RNA, 19 nt, Artificial Sequence
  Description of Artificial Sequence: Synthetic oligonucleotide
gccacccugauucuuuggu

SEQ ID NO: 2802136 - RNA, 19 nt, Artificial Sequence
  Description of Artificial Sequence: Synthetic oligonucleotide
cagggagcggggaggucca

SEQ ID NO: 2802137 - RNA, 19 nt, Artificial Sequence
  Description of Artificial Sequence: Synthetic oligonucleotide
uggcugagccagccugcuu

SEQ ID NO: 2802138 - RNA, 19 nt, Artificial Sequence
  Description of Artificial Sequence: Synthetic oligonucleotide
gggagguccauaccccucu

SEQ ID NO: 2802139 - RNA, 19 nt, Artificial Sequence
  Description of Artificial Sequence: Synthetic oligonucleotide
ccacgaccucaucacugcc

SEQ ID NO: 2802140 - RNA, 19 nt, Artificial Sequence
  Description of Artificial Sequence: Synthetic oligonucleotide
gcggggagguccauacccc

SEQ ID NO: 2802141 - RNA, 19 nt, Artificial Sequence
  Description of Artificial Sequence: Synthetic oligonucleotide
uggcgcugccacccugauu

SEQ ID NO: 2802142 - RNA, 19 nt, Artificial Sequence
  Description of Artificial Sequence: Synthetic oligonucleotide
gcaucucugugggcuuggg

SEQ ID NO: 2802143 - RNA, 19 nt, Artificial Sequence
  Description of Artificial Sequence: Synthetic oligonucleotide
gagguggcugagccagccu

SEQ ID NO: 2802144 - RNA, 19 nt, Artificial Sequence
  Description of Artificial Sequence: Synthetic oligonucleotide
ccucuuuguagggugcaca

SEQ ID NO: 2802145 - RNA, 19 nt, Artificial Sequence
  Description of Artificial Sequence: Synthetic oligonucleotide
cccacucuccuuccaauaa

SEQ ID NO: 2802146 - RNA, 19 nt, Artificial Sequence
  Description of Artificial Sequence: Synthetic oligonucleotide
gcgucuccugcaugcccag

SEQ ID NO: 2802147 - RNA, 19 nt, Artificial Sequence
  Description of Artificial Sequence: Synthetic oligonucleotide
gugccacgaccucaucacu

SEQ ID NO: 2802148 - RNA, 19 nt, Artificial Sequence
  Description of Artificial Sequence: Synthetic oligonucleotide
ccauccucagagggugccc

SEQ ID NO: 2802149 - RNA, 19 nt, Artificial Sequence
  Description of Artificial Sequence: Synthetic oligonucleotide
ugggcgcugugaggugagu

SEQ ID NO: 2802150 - RNA, 19 nt, Artificial Sequence
  Description of Artificial Sequence: Synthetic oligonucleotide
gggcuuggggcaucugucu

SEQ ID NO: 2802151 - RNA, 19 nt, Artificial Sequence
  Description of Artificial Sequence: Synthetic oligonucleotide
gcccagcagcaucucugug

SEQ ID NO: 2802152 - RNA, 19 nt, Artificial Sequence
  Description of Artificial Sequence: Synthetic oligonucleotide
gcacagucacuuggcuuac

SEQ ID NO: 2802153 - RNA, 19 nt, Artificial Sequence
  Description of Artificial Sequence: Synthetic oligonucleotide
cagccugcuuccuggcgcu

SEQ ID NO: 2802154 - RNA, 19 nt, Artificial Sequence
  Description of Artificial Sequence: Synthetic oligonucleotide
ggggagguccauaccccuc

SEQ ID NO: 2802155 - RNA, 19 nt, Artificial Sequence
  Description of Artificial Sequence: Synthetic oligonucleotide
cugccacugggcgcuguga

SEQ ID NO: 2802156 - RNA, 19 nt, Artificial Sequence
  Description of Artificial Sequence: Synthetic oligonucleotide
ccccuggcaaagggcaccc

SEQ ID NO: 2802157 - RNA, 19 nt, Artificial Sequence
  Description of Artificial Sequence: Synthetic oligonucleotide
ggagugcagggagcgggga

SEQ ID NO: 2802158 - RNA, 19 nt, Artificial Sequence
  Description of Artificial Sequence: Synthetic oligonucleotide
ccuggcgcugccacccuga

SEQ ID NO: 2802159 - RNA, 19 nt, Artificial Sequence
  Description of Artificial Sequence: Synthetic oligonucleotide
agccugcuuccuggcgcug

SEQ ID NO: 2802160 - RNA, 19 nt, Artificial Sequence
  Description of Artificial Sequence: Synthetic oligonucleotide
cugccccacucuccuucca

SEQ ID NO: 2802161 - RNA, 19 nt, Artificial Sequence
  Description of Artificial Sequence: Synthetic oligonucleotide
cuuuguucuuggggcaguu

SEQ ID NO: 2802162 - RNA, 19 nt, Artificial Sequence
  Description of Artificial Sequence: Synthetic oligonucleotide
ccccacaucucucuguuuu

SEQ ID NO: 2802163 - RNA, 19 nt, Artificial Sequence
  Description of Artificial Sequence: Synthetic oligonucleotide
gcuuggggcaucugucuuu

SEQ ID NO: 2802164 - RNA, 19 nt, Artificial Sequence
  Description of Artificial Sequence: Synthetic oligonucleotide
ccugccugacagaacugcu

SEQ ID NO: 2802165 - RNA, 19 nt, Artificial Sequence
  Description of Artificial Sequence: Synthetic oligonucleotide
ggcacccaugucuuccuuu

SEQ ID NO: 2802166 - RNA, 19 nt, Artificial Sequence
  Description of Artificial Sequence: Synthetic oligonucleotide
gccuccauuggcgucuccu

SEQ ID NO: 2802167 - RNA, 19 nt, Artificial Sequence
  Description of Artificial Sequence: Synthetic oligonucleotide
ucacugccuuugggucccu

SEQ ID NO: 2802168 - RNA, 19 nt, Artificial Sequence
  Description of Artificial Sequence: Synthetic oligonucleotide
ccacugggcgcugugaggu

SEQ ID NO: 2802169 - RNA, 19 nt, Artificial Sequence
  Description of Artificial Sequence: Synthetic oligonucleotide
cccugauucuuuggugcca

SEQ ID NO: 2802170 - RNA, 19 nt, Artificial Sequence
  Description of Artificial Sequence: Synthetic oligonucleotide
cauaccccucuuccucuuu

SEQ ID NO: 2802171 - RNA, 19 nt, Artificial Sequence
  Description of Artificial Sequence: Synthetic oligonucleotide
ggcuuggggcaucugucuu

SEQ ID NO: 2802172 - RNA, 19 nt, Artificial Sequence
  Description of Artificial Sequence: Synthetic oligonucleotide
ccuuugggucccuugccau

SEQ ID NO: 2802173 - RNA, 19 nt, Artificial Sequence
  Description of Artificial Sequence: Synthetic oligonucleotide
ccuggcaaagggcacccau

SEQ ID NO: 2802174 - RNA, 19 nt, Artificial Sequence
  Description of Artificial Sequence: Synthetic oligonucleotide
ccuuccaauaagccuccau

SEQ ID NO: 2802175 - RNA, 19 nt, Artificial Sequence
  Description of Artificial Sequence: Synthetic oligonucleotide
ccccacucuccuuccaaua

SEQ ID NO: 2802176 - RNA, 19 nt, Artificial Sequence
  Description of Artificial Sequence: Synthetic oligonucleotide
gggcgcugugaggugagua

SEQ ID NO: 2802177 - RNA, 19 nt, Artificial Sequence
  Description of Artificial Sequence: Synthetic oligonucleotide
gcugccacccugauucuuu

SEQ ID NO: 2802178 - RNA, 19 nt, Artificial Sequence
  Description of Artificial Sequence: Synthetic oligonucleotide
ggcaucugucuuuguucuu

SEQ ID NO: 2802179 - RNA, 19 nt, Artificial Sequence
  Description of Artificial Sequence: Synthetic oligonucleotide
cucugugggcuuggggcau

SEQ ID NO: 2802180 - RNA, 19 nt, Artificial Sequence
  Description of Artificial Sequence: Synthetic oligonucleotide
cacagucacuuggcuuacu

SEQ ID NO: 2802181 - RNA, 19 nt, Artificial Sequence
  Description of Artificial Sequence: Synthetic oligonucleotide
agggagcggggagguccau

SEQ ID NO: 2802182 - RNA, 19 nt, Artificial Sequence
  Description of Artificial Sequence: Synthetic oligonucleotide
cgcugugaggugaguagcu

SEQ ID NO: 2802183 - RNA, 19 nt, Artificial Sequence
  Description of Artificial Sequence: Synthetic oligonucleotide
cugugggcuuggggcaucu

SEQ ID NO: 2802184 - RNA, 19 nt, Artificial Sequence
  Description of Artificial Sequence: Synthetic oligonucleotide
ggagguccauaccccucuu

SEQ ID NO: 2802185 - RNA, 19 nt, Artificial Sequence
  Description of Artificial Sequence: Synthetic oligonucleotide
gggagcggggagguccaua

SEQ ID NO: 2802186 - RNA, 19 nt, Artificial Sequence
  Description of Artificial Sequence: Synthetic oligonucleotide
cgucuccugcaugcccagc

SEQ ID NO: 2802187 - RNA, 19 nt, Artificial Sequence
  Description of Artificial Sequence: Synthetic oligonucleotide
ccauuggcgucuccugcau

SEQ ID NO: 2802188 - RNA, 19 nt, Artificial Sequence
  Description of Artificial Sequence: Synthetic oligonucleotide
cuggcgcugccacccugau

SEQ ID NO: 2802189 - RNA, 19 nt, Artificial Sequence
  Description of Artificial Sequence: Synthetic oligonucleotide
gucugccacugggcgcugu

SEQ ID NO: 2802190 - RNA, 19 nt, Artificial Sequence
  Description of Artificial Sequence: Synthetic oligonucleotide
cggggagguccauaccccu

SEQ ID NO: 2802191 - RNA, 19 nt, Artificial Sequence
  Description of Artificial Sequence: Synthetic oligonucleotide
cguuucagcugugcuacuu

SEQ ID NO: 2802192 - RNA, 19 nt, Artificial Sequence
  Description of Artificial Sequence: Synthetic oligonucleotide
ccauaccccucuuccucuu

SEQ ID NO: 2802193 - RNA, 19 nt, Artificial Sequence
  Description of Artificial Sequence: Synthetic oligonucleotide
gcgcugccacccugauucu

SEQ ID NO: 2802194 - RNA, 19 nt, Artificial Sequence
  Description of Artificial Sequence: Synthetic oligonucleotide
cccuggcaaagggcaccca

SEQ ID NO: 2802195 - RNA, 19 nt, Artificial Sequence
  Description of Artificial Sequence: Synthetic oligonucleotide
cacugccuuugggucccuu

SEQ ID NO: 2802196 - RNA, 19 nt, Artificial Sequence
  Description of Artificial Sequence: Synthetic oligonucleotide
cgaccucaucacugccuuu

SEQ ID NO: 2802197 - RNA, 19 nt, Artificial Sequence
  Description of Artificial Sequence: Synthetic oligonucleotide
cgcugccacccugauucuu

SEQ ID NO: 2802198 - RNA, 19 nt, Artificial Sequence
  Description of Artificial Sequence: Synthetic oligonucleotide
auugacaucgaguaugugc

SEQ ID NO: 2802199 - RNA, 19 nt, Artificial Sequence
  Description of Artificial Sequence: Synthetic oligonucleotide
aauaaaaguuuagaaaacg

SEQ ID NO: 2802200 - RNA, 19 nt, Artificial Sequence
  Description of Artificial Sequence: Synthetic oligonucleotide
ugcaguaauacaauaaaag

SEQ ID NO: 2802201 - RNA, 19 nt, Artificial Sequence
  Description of Artificial Sequence: Synthetic oligonucleotide
acuuggaagucucagaagc

SEQ ID NO: 2802202 - RNA, 19 nt, Artificial Sequence
  Description of Artificial Sequence: Synthetic oligonucleotide
aagcuuuugguucuuuucc

SEQ ID NO: 2802203 - RNA, 19 nt, Artificial Sequence
  Description of Artificial Sequence: Synthetic oligonucleotide
uaaauucacaugcugagag

SEQ ID NO: 2802204 - RNA, 19 nt, Artificial Sequence
  Description of Artificial Sequence: Synthetic oligonucleotide
uugacaucgaguaugugcg

SEQ ID NO: 2802205 - RNA, 19 nt, Artificial Sequence
  Description of Artificial Sequence: Synthetic oligonucleotide
aaacgugugugacuuaccc

SEQ ID NO: 2802206 - RNA, 19 nt, Artificial Sequence
  Description of Artificial Sequence: Synthetic oligonucleotide
uaaaaguuuagaaaacgug

SEQ ID NO: 2802207 - RNA, 19 nt, Artificial Sequence
  Description of Artificial Sequence: Synthetic oligonucleotide
aauacaauaaaaguuuaga

SEQ ID NO: 2802208 - RNA, 19 nt, Artificial Sequence
  Description of Artificial Sequence: Synthetic oligonucleotide
aaagcuuuugguucuuuuc

SEQ ID NO: 2802209 - RNA, 19 nt, Artificial Sequence
  Description of Artificial Sequence: Synthetic oligonucleotide
cugaucuaaauucacaugc

SEQ ID NO: 2802210 - RNA, 19 nt, Artificial Sequence
  Description of Artificial Sequence: Synthetic oligonucleotide
ucuaaauucacaugcugag

SEQ ID NO: 2802211 - RNA, 19 nt, Artificial Sequence
  Description of Artificial Sequence: Synthetic oligonucleotide
aaaaguuuagaaaacgugu

SEQ ID NO: 2802212 - RNA, 19 nt, Artificial Sequence
  Description of Artificial Sequence: Synthetic oligonucleotide
uuugcauucagccuccuca

SEQ ID NO: 2802213 - RNA, 19 nt, Artificial Sequence
  Description of Artificial Sequence: Synthetic oligonucleotide
aguggcguaacacagugcg

SEQ ID NO: 2802214 - RNA, 19 nt, Artificial Sequence
  Description of Artificial Sequence: Synthetic oligonucleotide
aaugcugaccagcugagug

SEQ ID NO: 2802215 - RNA, 19 nt, Artificial Sequence
  Description of Artificial Sequence: Synthetic oligonucleotide
aagucaacaguuuucuucu

SEQ ID NO: 2802216 - RNA, 19 nt, Artificial Sequence
  Description of Artificial Sequence: Synthetic oligonucleotide
uaauacaauaaaaguuuag

SEQ ID NO: 2802217 - RNA, 19 nt, Artificial Sequence
  Description of Artificial Sequence: Synthetic oligonucleotide
ucuucuucuacccaauugu

SEQ ID NO: 2802218 - RNA, 19 nt, Artificial Sequence
  Description of Artificial Sequence: Synthetic oligonucleotide
uguaacugaucuaaauuca

SEQ ID NO: 2802219 - RNA, 19 nt, Artificial Sequence
  Description of Artificial Sequence: Synthetic oligonucleotide
uuguaacugaucuaaauuc

SEQ ID NO: 2802220 - RNA, 19 nt, Artificial Sequence
  Description of Artificial Sequence: Synthetic oligonucleotide
aaauucacaugcugagagg

SEQ ID NO: 2802221 - RNA, 19 nt, Artificial Sequence
  Description of Artificial Sequence: Synthetic oligonucleotide
gauguuugcauucagccuc

SEQ ID NO: 2802222 - RNA, 19 nt, Artificial Sequence
  Description of Artificial Sequence: Synthetic oligonucleotide
aacugaucuaaauucacau

SEQ ID NO: 2802223 - RNA, 19 nt, Artificial Sequence
  Description of Artificial Sequence: Synthetic oligonucleotide
uuugggcagauugacaucg

SEQ ID NO: 2802224 - RNA, 19 nt, Artificial Sequence
  Description of Artificial Sequence: Synthetic oligonucleotide
ugcgagacaaugcugacca

SEQ ID NO: 2802225 - RNA, 19 nt, Artificial Sequence
  Description of Artificial Sequence: Synthetic oligonucleotide
caugcugagaggaacacag

SEQ ID NO: 2802226 - RNA, 19 nt, Artificial Sequence
  Description of Artificial Sequence: Synthetic oligonucleotide
auaggcaggguuguuaugc

SEQ ID NO: 2802227 - RNA, 19 nt, Artificial Sequence
  Description of Artificial Sequence: Synthetic oligonucleotide
ucggcuguaaagcuuuugg

SEQ ID NO: 2802228 - RNA, 19 nt, Artificial Sequence
  Description of Artificial Sequence: Synthetic oligonucleotide
aaaguuuagaaaacgugug

SEQ ID NO: 2802229 - RNA, 19 nt, Artificial Sequence
  Description of Artificial Sequence: Synthetic oligonucleotide
acagguaaaggauguuugc

SEQ ID NO: 2802230 - RNA, 19 nt, Artificial Sequence
  Description of Artificial Sequence: Synthetic oligonucleotide
gauaguauaggcaggguug

SEQ ID NO: 2802231 - RNA, 19 nt, Artificial Sequence
  Description of Artificial Sequence: Synthetic oligonucleotide
caagcuugcgguuaugccg

SEQ ID NO: 2802232 - RNA, 19 nt, Artificial Sequence
  Description of Artificial Sequence: Synthetic oligonucleotide
auacaauaaaaguuuagaa

SEQ ID NO: 2802233 - RNA, 19 nt, Artificial Sequence
  Description of Artificial Sequence: Synthetic oligonucleotide
aguaauacaauaaaaguuu

SEQ ID NO: 2802234 - RNA, 19 nt, Artificial Sequence
  Description of Artificial Sequence: Synthetic oligonucleotide
uauugcaguaauacaauaa

SEQ ID NO: 2802235 - RNA, 19 nt, Artificial Sequence
  Description of Artificial Sequence: Synthetic oligonucleotide
uaagugacuccucaaguca

SEQ ID NO: 2802236 - RNA, 19 nt, Artificial Sequence
  Description of Artificial Sequence: Synthetic oligonucleotide
aaguuuagaaaacgugugu

SEQ ID NO: 2802237 - RNA, 19 nt, Artificial Sequence
  Description of Artificial Sequence: Synthetic oligonucleotide
aagucucagaagcagcaag

SEQ ID NO: 2802238 - RNA, 19 nt, Artificial Sequence
  Description of Artificial Sequence: Synthetic oligonucleotide
ucuucuacccaauuguagu

SEQ ID NO: 2802239 - RNA, 19 nt, Artificial Sequence
  Description of Artificial Sequence: Synthetic oligonucleotide
aauucacaugcugagagga

SEQ ID NO: 2802240 - RNA, 19 nt, Artificial Sequence
  Description of Artificial Sequence: Synthetic oligonucleotide
auugcaguaauacaauaaa

SEQ ID NO: 2802241 - RNA, 19 nt, Artificial Sequence
  Description of Artificial Sequence: Synthetic oligonucleotide
uaugcagugguuguaacug

SEQ ID NO: 2802242 - RNA, 19 nt, Artificial Sequence
  Description of Artificial Sequence: Synthetic oligonucleotide
guuguuaugcuccauguca

SEQ ID NO: 2802243 - RNA, 19 nt, Artificial Sequence
  Description of Artificial Sequence: Synthetic oligonucleotide
aaggauuuauugcaguaau

SEQ ID NO: 2802244 - RNA, 19 nt, Artificial Sequence
  Description of Artificial Sequence: Synthetic oligonucleotide
aagguuccugaguguaugc

SEQ ID NO: 2802245 - RNA, 19 nt, Artificial Sequence
  Description of Artificial Sequence: Synthetic oligonucleotide
uuugcugagguuuucccca

SEQ ID NO: 2802246 - RNA, 19 nt, Artificial Sequence
  Description of Artificial Sequence: Synthetic oligonucleotide
gaucuaaauucacaugcug

SEQ ID NO: 2802247 - RNA, 19 nt, Artificial Sequence
  Description of Artificial Sequence: Synthetic oligonucleotide
caagucaacaguuuucuuc

SEQ ID NO: 2802248 - RNA, 19 nt, Artificial Sequence
  Description of Artificial Sequence: Synthetic oligonucleotide
uucuucuacccaauuguag

SEQ ID NO: 2802249 - RNA, 19 nt, Artificial Sequence
  Description of Artificial Sequence: Synthetic oligonucleotide
ucagccuccucacugcacg

SEQ ID NO: 2802250 - RNA, 19 nt, Artificial Sequence
  Description of Artificial Sequence: Synthetic oligonucleotide
aaggauguuugcauucagc

SEQ ID NO: 2802251 - RNA, 19 nt, Artificial Sequence
  Description of Artificial Sequence: Synthetic oligonucleotide
agguuuuccccacagaacu

SEQ ID NO: 2802252 - RNA, 19 nt, Artificial Sequence
  Description of Artificial Sequence: Synthetic oligonucleotide
ugacuuggaagucucagaa

SEQ ID NO: 2802253 - RNA, 19 nt, Artificial Sequence
  Description of Artificial Sequence: Synthetic oligonucleotide
uaacugaucuaaauucaca

SEQ ID NO: 2802254 - RNA, 19 nt, Artificial Sequence
  Description of Artificial Sequence: Synthetic oligonucleotide
uuuagaaaacgugugugac

SEQ ID NO: 2802255 - RNA, 19 nt, Artificial Sequence
  Description of Artificial Sequence: Synthetic oligonucleotide
gauuuauugcaguaauaca

SEQ ID NO: 2802256 - RNA, 19 nt, Artificial Sequence
  Description of Artificial Sequence: Synthetic oligonucleotide
uuaaaggauuuauugcagu

SEQ ID NO: 2802257 - RNA, 19 nt, Artificial Sequence
  Description of Artificial Sequence: Synthetic oligonucleotide
uucuucuucuacccaauug

SEQ ID NO: 2802258 - RNA, 19 nt, Artificial Sequence
  Description of Artificial Sequence: Synthetic oligonucleotide
aagcuugcgguuaugccgc

SEQ ID NO: 2802259 - RNA, 19 nt, Artificial Sequence
  Description of Artificial Sequence: Synthetic oligonucleotide
ugaguggcguaacacagug

SEQ ID NO: 2802260 - RNA, 19 nt, Artificial Sequence
  Description of Artificial Sequence: Synthetic oligonucleotide
aaaggauguuugcauucag

SEQ ID NO: 2802261 - RNA, 19 nt, Artificial Sequence
  Description of Artificial Sequence: Synthetic oligonucleotide
gaguaagugacuccucaag

SEQ ID NO: 2802262 - RNA, 19 nt, Artificial Sequence
  Description of Artificial Sequence: Synthetic oligonucleotide
acaguuuucuucuccacca

SEQ ID NO: 2802263 - RNA, 19 nt, Artificial Sequence
  Description of Artificial Sequence: Synthetic oligonucleotide
ucaacaguuuucuucucca

SEQ ID NO: 2802264 - RNA, 19 nt, Artificial Sequence
  Description of Artificial Sequence: Synthetic oligonucleotide
acgugugugacuuacccug

SEQ ID NO: 2802265 - RNA, 19 nt, Artificial Sequence
  Description of Artificial Sequence: Synthetic oligonucleotide
aguuuagaaaacgugugug

SEQ ID NO: 2802266 - RNA, 19 nt, Artificial Sequence
  Description of Artificial Sequence: Synthetic oligonucleotide
aguaagugacuccucaagu

SEQ ID NO: 2802267 - RNA, 19 nt, Artificial Sequence
  Description of Artificial Sequence: Synthetic oligonucleotide
gacaaugcugaccagcuga

SEQ ID NO: 2802268 - RNA, 19 nt, Artificial Sequence
  Description of Artificial Sequence: Synthetic oligonucleotide
aguaugugcgagacaaugc

SEQ ID NO: 2802269 - RNA, 19 nt, Artificial Sequence
  Description of Artificial Sequence: Synthetic oligonucleotide
acagaacucacuguugcac

SEQ ID NO: 2802270 - RNA, 19 nt, Artificial Sequence
  Description of Artificial Sequence: Synthetic oligonucleotide
ugaucuaaauucacaugcu

SEQ ID NO: 2802271 - RNA, 19 nt, Artificial Sequence
  Description of Artificial Sequence: Synthetic oligonucleotide
uuagaaaacgugugugacu

SEQ ID NO: 2802272 - RNA, 19 nt, Artificial Sequence
  Description of Artificial Sequence: Synthetic oligonucleotide
uccaugucaggcccguugg

SEQ ID NO: 2802273 - RNA, 19 nt, Artificial Sequence
  Description of Artificial Sequence: Synthetic oligonucleotide
acugaucuaaauucacaug

SEQ ID NO: 2802274 - RNA, 19 nt, Artificial Sequence
  Description of Artificial Sequence: Synthetic oligonucleotide
ucgaguaugugcgagacaa

SEQ ID NO: 2802275 - RNA, 19 nt, Artificial Sequence
  Description of Artificial Sequence: Synthetic oligonucleotide
auaaaaguuuagaaaacgu

SEQ ID NO: 2802276 - RNA, 19 nt, Artificial Sequence
  Description of Artificial Sequence: Synthetic oligonucleotide
uuccccacagaacucacug

SEQ ID NO: 2802277 - RNA, 19 nt, Artificial Sequence
  Description of Artificial Sequence: Synthetic oligonucleotide
aguuuucuucuccaccagg

SEQ ID NO: 2802278 - RNA, 19 nt, Artificial Sequence
  Description of Artificial Sequence: Synthetic oligonucleotide
aguaggcagaguaagugac

SEQ ID NO: 2802279 - RNA, 19 nt, Artificial Sequence
  Description of Artificial Sequence: Synthetic oligonucleotide
ugcugagaggaacacaggu

SEQ ID NO: 2802280 - RNA, 19 nt, Artificial Sequence
  Description of Artificial Sequence: Synthetic oligonucleotide
uugcaguaauacaauaaaa

SEQ ID NO: 2802281 - RNA, 19 nt, Artificial Sequence
  Description of Artificial Sequence: Synthetic oligonucleotide
uuguaguaggcagaguaag

SEQ ID NO: 2802282 - RNA, 19 nt, Artificial Sequence
  Description of Artificial Sequence: Synthetic oligonucleotide
aacucacuguugcacagcu

SEQ ID NO: 2802283 - RNA, 19 nt, Artificial Sequence
  Description of Artificial Sequence: Synthetic oligonucleotide
cacagugcggcgcugauag

SEQ ID NO: 2802284 - RNA, 19 nt, Artificial Sequence
  Description of Artificial Sequence: Synthetic oligonucleotide
ugauaguauaggcaggguu

SEQ ID NO: 2802285 - RNA, 19 nt, Artificial Sequence
  Description of Artificial Sequence: Synthetic oligonucleotide
uuaugcuccaugucaggcc

SEQ ID NO: 2802286 - RNA, 19 nt, Artificial Sequence
  Description of Artificial Sequence: Synthetic oligonucleotide
guuaaaggauuuauugcag

SEQ ID NO: 2802287 - RNA, 19 nt, Artificial Sequence
  Description of Artificial Sequence: Synthetic oligonucleotide
acccaauuguaguaggcag

SEQ ID NO: 2802288 - RNA, 19 nt, Artificial Sequence
  Description of Artificial Sequence: Synthetic oligonucleotide
augccgcugaaucuucucc

SEQ ID NO: 2802289 - RNA, 19 nt, Artificial Sequence
  Description of Artificial Sequence: Synthetic oligonucleotide
uaaaggauuuauugcagua

SEQ ID NO: 2802290 - RNA, 19 nt, Artificial Sequence
  Description of Artificial Sequence: Synthetic oligonucleotide
aaaacgugugugacuuacc

SEQ ID NO: 2802291 - RNA, 19 nt, Artificial Sequence
  Description of Artificial Sequence: Synthetic oligonucleotide
aaaggauuuauugcaguaa

SEQ ID NO: 2802292 - RNA, 19 nt, Artificial Sequence
  Description of Artificial Sequence: Synthetic oligonucleotide
gucaguuucuguuugcuga

SEQ ID NO: 2802293 - RNA, 19 nt, Artificial Sequence
  Description of Artificial Sequence: Synthetic oligonucleotide
gagaggaacacagguaaag

SEQ ID NO: 2802294 - RNA, 19 nt, Artificial Sequence
  Description of Artificial Sequence: Synthetic oligonucleotide
uguaguaggcagaguaagu

SEQ ID NO: 2802295 - RNA, 19 nt, Artificial Sequence
  Description of Artificial Sequence: Synthetic oligonucleotide
uguuaugcuccaugucagg

SEQ ID NO: 2802296 - RNA, 19 nt, Artificial Sequence
  Description of Artificial Sequence: Synthetic oligonucleotide
cagauugacaucgaguaug

SEQ ID NO: 2802297 - RNA, 19 nt, Artificial Sequence
  Description of Artificial Sequence: Synthetic oligonucleotide
agaggaacacagguaaagg

SEQ ID NO: 2802298 - RNA, 19 nt, Artificial Sequence
  Description of Artificial Sequence: Synthetic oligonucleotide
ggauuuauugcaguaauac

SEQ ID NO: 2802299 - RNA, 19 nt, Artificial Sequence
  Description of Artificial Sequence: Synthetic oligonucleotide
cacagguaaaggauguuug

SEQ ID NO: 2802300 - RNA, 19 nt, Artificial Sequence
  Description of Artificial Sequence: Synthetic oligonucleotide
uuggaagucucagaagcag

SEQ ID NO: 2802301 - RNA, 19 nt, Artificial Sequence
  Description of Artificial Sequence: Synthetic oligonucleotide
uaugugcgagacaaugcug

SEQ ID NO: 2802302 - RNA, 19 nt, Artificial Sequence
  Description of Artificial Sequence: Synthetic oligonucleotide
gugacuuacccugacuugg

SEQ ID NO: 2802303 - RNA, 19 nt, Artificial Sequence
  Description of Artificial Sequence: Synthetic oligonucleotide
acuuacccugacuuggaag

SEQ ID NO: 2802304 - RNA, 19 nt, Artificial Sequence
  Description of Artificial Sequence: Synthetic oligonucleotide
ugaguguaugcagugguug

SEQ ID NO: 2802305 - RNA, 19 nt, Artificial Sequence
  Description of Artificial Sequence: Synthetic oligonucleotide
guuuagaaaacguguguga

SEQ ID NO: 2802306 - RNA, 19 nt, Artificial Sequence
  Description of Artificial Sequence: Synthetic oligonucleotide
uuuugguucuuuuccuugu

SEQ ID NO: 2802307 - RNA, 19 nt, Artificial Sequence
  Description of Artificial Sequence: Synthetic oligonucleotide
gaaaacgugugugacuuac

SEQ ID NO: 2802308 - RNA, 19 nt, Artificial Sequence
  Description of Artificial Sequence: Synthetic oligonucleotide
augcugaccagcugagugg

SEQ ID NO: 2802309 - RNA, 19 nt, Artificial Sequence
  Description of Artificial Sequence: Synthetic oligonucleotide
gaguaugugcgagacaaug

SEQ ID NO: 2802310 - RNA, 19 nt, Artificial Sequence
  Description of Artificial Sequence: Synthetic oligonucleotide
cuuuugguucuuuuccuug

SEQ ID NO: 2802311 - RNA, 19 nt, Artificial Sequence
  Description of Artificial Sequence: Synthetic oligonucleotide
uggaagucucagaagcagc

SEQ ID NO: 2802312 - RNA, 19 nt, Artificial Sequence
  Description of Artificial Sequence: Synthetic oligonucleotide
ugugacuuacccugacuug

SEQ ID NO: 2802313 - RNA, 19 nt, Artificial Sequence
  Description of Artificial Sequence: Synthetic oligonucleotide
uaguaggcagaguaaguga

SEQ ID NO: 2802314 - RNA, 19 nt, Artificial Sequence
  Description of Artificial Sequence: Synthetic oligonucleotide
agaacucacuguugcacag

SEQ ID NO: 2802315 - RNA, 19 nt, Artificial Sequence
  Description of Artificial Sequence: Synthetic oligonucleotide
uagaaaacgugugugacuu

SEQ ID NO: 2802316 - RNA, 19 nt, Artificial Sequence
  Description of Artificial Sequence: Synthetic oligonucleotide
guaaaggauguuugcauuc

SEQ ID NO: 2802317 - RNA, 19 nt, Artificial Sequence
  Description of Artificial Sequence: Synthetic oligonucleotide
ucacaugcugagaggaaca

SEQ ID NO: 2802318 - RNA, 19 nt, Artificial Sequence
  Description of Artificial Sequence: Synthetic oligonucleotide
guaagugacuccucaaguc

SEQ ID NO: 2802319 - RNA, 19 nt, Artificial Sequence
  Description of Artificial Sequence: Synthetic oligonucleotide
guaguaggcagaguaagug

SEQ ID NO: 2802320 - RNA, 19 nt, Artificial Sequence
  Description of Artificial Sequence: Synthetic oligonucleotide
aacgugugugacuuacccu

SEQ ID NO: 2802321 - RNA, 19 nt, Artificial Sequence
  Description of Artificial Sequence: Synthetic oligonucleotide
gucaacaguuuucuucucc

SEQ ID NO: 2802322 - RNA, 19 nt, Artificial Sequence
  Description of Artificial Sequence: Synthetic oligonucleotide
ugacuccucaagucaacag

SEQ ID NO: 2802323 - RNA, 19 nt, Artificial Sequence
  Description of Artificial Sequence: Synthetic oligonucleotide
aucuaaauucacaugcuga

SEQ ID NO: 2802324 - RNA, 19 nt, Artificial Sequence
  Description of Artificial Sequence: Synthetic oligonucleotide
uaaaggauguuugcauuca

SEQ ID NO: 2802325 - RNA, 19 nt, Artificial Sequence
  Description of Artificial Sequence: Synthetic oligonucleotide
uggcguaacacagugcggc

SEQ ID NO: 2802326 - RNA, 19 nt, Artificial Sequence
  Description of Artificial Sequence: Synthetic oligonucleotide
guuugcugagguuuucccc

SEQ ID NO: 2802327 - RNA, 19 nt, Artificial Sequence
  Description of Artificial Sequence: Synthetic oligonucleotide
agguaaaggauguuugcau

SEQ ID NO: 2802328 - RNA, 19 nt, Artificial Sequence
  Description of Artificial Sequence: Synthetic oligonucleotide
uuucuguuugcugagguuu

SEQ ID NO: 2802329 - RNA, 19 nt, Artificial Sequence
  Description of Artificial Sequence: Synthetic oligonucleotide
agucucagaagcagcaagg

SEQ ID NO: 2802330 - RNA, 19 nt, Artificial Sequence
  Description of Artificial Sequence: Synthetic oligonucleotide
uuacuguuaaaggauuuau

SEQ ID NO: 2802331 - RNA, 19 nt, Artificial Sequence
  Description of Artificial Sequence: Synthetic oligonucleotide
uuuacuguuaaaggauuua

SEQ ID NO: 2802332 - RNA, 19 nt, Artificial Sequence
  Description of Artificial Sequence: Synthetic oligonucleotide
uucacaugcugagaggaac

SEQ ID NO: 2802333 - RNA, 19 nt, Artificial Sequence
  Description of Artificial Sequence: Synthetic oligonucleotide
cuacccaauuguaguaggc

SEQ ID NO: 2802334 - RNA, 19 nt, Artificial Sequence
  Description of Artificial Sequence: Synthetic oligonucleotide
aggcagaguaagugacucc

SEQ ID NO: 2802335 - RNA, 19 nt, Artificial Sequence
  Description of Artificial Sequence: Synthetic oligonucleotide
uuuauccuggugccgcugu

SEQ ID NO: 2802336 - RNA, 19 nt, Artificial Sequence
  Description of Artificial Sequence: Synthetic oligonucleotide
aggguuguuaugcuccaug

SEQ ID NO: 2802337 - RNA, 19 nt, Artificial Sequence
  Description of Artificial Sequence: Synthetic oligonucleotide
ugugcucggcuguaaagcu

SEQ ID NO: 2802338 - RNA, 19 nt, Artificial Sequence
  Description of Artificial Sequence: Synthetic oligonucleotide
ugggcagauugacaucgag

SEQ ID NO: 2802339 - RNA, 19 nt, Artificial Sequence
  Description of Artificial Sequence: Synthetic oligonucleotide
guuaugcuccaugucaggc

SEQ ID NO: 2802340 - RNA, 19 nt, Artificial Sequence
  Description of Artificial Sequence: Synthetic oligonucleotide
ugcggcgcugauaguauag

SEQ ID NO: 2802341 - RNA, 19 nt, Artificial Sequence
  Description of Artificial Sequence: Synthetic oligonucleotide
gacaucgaguaugugcgag

SEQ ID NO: 2802342 - RNA, 19 nt, Artificial Sequence
  Description of Artificial Sequence: Synthetic oligonucleotide
ugugugacuuacccugacu

SEQ ID NO: 2802343 - RNA, 19 nt, Artificial Sequence
  Description of Artificial Sequence: Synthetic oligonucleotide
gcagcaagguuccugagug

SEQ ID NO: 2802344 - RNA, 19 nt, Artificial Sequence
  Description of Artificial Sequence: Synthetic oligonucleotide
cugagaggaacacagguaa

SEQ ID NO: 2802345 - RNA, 19 nt, Artificial Sequence
  Description of Artificial Sequence: Synthetic oligonucleotide
agucaguuucuguuugcug

SEQ ID NO: 2802346 - RNA, 19 nt, Artificial Sequence
  Description of Artificial Sequence: Synthetic oligonucleotide
uacccaauuguaguaggca

SEQ ID NO: 2802347 - RNA, 19 nt, Artificial Sequence
  Description of Artificial Sequence: Synthetic oligonucleotide
agcuuuugguucuuuuccu

SEQ ID NO: 2802348 - RNA, 19 nt, Artificial Sequence
  Description of Artificial Sequence: Synthetic oligonucleotide
uccucaagucaacaguuuu

SEQ ID NO: 2802349 - RNA, 19 nt, Artificial Sequence
  Description of Artificial Sequence: Synthetic oligonucleotide
guaacugaucuaaauucac

SEQ ID NO: 2802350 - RNA, 19 nt, Artificial Sequence
  Description of Artificial Sequence: Synthetic oligonucleotide
acgagucaguuucuguuug

SEQ ID NO: 2802351 - RNA, 19 nt, Artificial Sequence
  Description of Artificial Sequence: Synthetic oligonucleotide
gcgcugauaguauaggcag

SEQ ID NO: 2802352 - RNA, 19 nt, Artificial Sequence
  Description of Artificial Sequence: Synthetic oligonucleotide
gcugauaguauaggcaggg

SEQ ID NO: 2802353 - RNA, 19 nt, Artificial Sequence
  Description of Artificial Sequence: Synthetic oligonucleotide
uguaugcagugguuguaac

SEQ ID NO: 2802354 - RNA, 19 nt, Artificial Sequence
  Description of Artificial Sequence: Synthetic oligonucleotide
caccagguccccaagcuug

SEQ ID NO: 2802355 - RNA, 19 nt, Artificial Sequence
  Description of Artificial Sequence: Synthetic oligonucleotide
guuguaacugaucuaaauu

SEQ ID NO: 2802356 - RNA, 19 nt, Artificial Sequence
  Description of Artificial Sequence: Synthetic oligonucleotide
uuggguuguuuucuucuuc

SEQ ID NO: 2802357 - RNA, 19 nt, Artificial Sequence
  Description of Artificial Sequence: Synthetic oligonucleotide
ugacuuacccugacuugga

SEQ ID NO: 2802358 - RNA, 19 nt, Artificial Sequence
  Description of Artificial Sequence: Synthetic oligonucleotide
uccugaguguaugcagugg

SEQ ID NO: 2802359 - RNA, 19 nt, Artificial Sequence
  Description of Artificial Sequence: Synthetic oligonucleotide
gguuccugaguguaugcag

SEQ ID NO: 2802360 - RNA, 19 nt, Artificial Sequence
  Description of Artificial Sequence: Synthetic oligonucleotide
auguuugcauucagccucc

SEQ ID NO: 2802361 - RNA, 19 nt, Artificial Sequence
  Description of Artificial Sequence: Synthetic oligonucleotide
ggcagauugacaucgagua

SEQ ID NO: 2802362 - RNA, 19 nt, Artificial Sequence
  Description of Artificial Sequence: Synthetic oligonucleotide
cugugcucggcuguaaagc

SEQ ID NO: 2802363 - RNA, 19 nt, Artificial Sequence
  Description of Artificial Sequence: Synthetic oligonucleotide
auaguauaggcaggguugu

SEQ ID NO: 2802364 - RNA, 19 nt, Artificial Sequence
  Description of Artificial Sequence: Synthetic oligonucleotide
gugguuguaacugaucuaa

SEQ ID NO: 2802365 - RNA, 19 nt, Artificial Sequence
  Description of Artificial Sequence: Synthetic oligonucleotide
uaggcagaguaagugacuc

SEQ ID NO: 2802366 - RNA, 19 nt, Artificial Sequence
  Description of Artificial Sequence: Synthetic oligonucleotide
cuuacccugacuuggaagu

SEQ ID NO: 2802367 - RNA, 19 nt, Artificial Sequence
  Description of Artificial Sequence: Synthetic oligonucleotide
aggaacacagguaaaggau

SEQ ID NO: 2802368 - RNA, 19 nt, Artificial Sequence
  Description of Artificial Sequence: Synthetic oligonucleotide
ugucaggcccguuggguug

SEQ ID NO: 2802369 - RNA, 19 nt, Artificial Sequence
  Description of Artificial Sequence: Synthetic oligonucleotide
uauaggcaggguuguuaug

SEQ ID NO: 2802370 - RNA, 19 nt, Artificial Sequence
  Description of Artificial Sequence: Synthetic oligonucleotide
ugagaggaacacagguaaa

SEQ ID NO: 2802371 - RNA, 19 nt, Artificial Sequence
  Description of Artificial Sequence: Synthetic oligonucleotide
ugcagugguuguaacugau

SEQ ID NO: 2802372 - RNA, 19 nt, Artificial Sequence
  Description of Artificial Sequence: Synthetic oligonucleotide
agaguaagugacuccucaa

SEQ ID NO: 2802373 - RNA, 19 nt, Artificial Sequence
  Description of Artificial Sequence: Synthetic oligonucleotide
guaugugcgagacaaugcu

SEQ ID NO: 2802374 - RNA, 19 nt, Artificial Sequence
  Description of Artificial Sequence: Synthetic oligonucleotide
ggaacacagguaaaggaug

SEQ ID NO: 2802375 - RNA, 19 nt, Artificial Sequence
  Description of Artificial Sequence: Synthetic oligonucleotide
aagcagcaagguuccugag

SEQ ID NO: 2802376 - RNA, 19 nt, Artificial Sequence
  Description of Artificial Sequence: Synthetic oligonucleotide
uuugguucuuuuccuuguu

SEQ ID NO: 2802377 - RNA, 19 nt, Artificial Sequence
  Description of Artificial Sequence: Synthetic oligonucleotide
ugcucggcuguaaagcuuu

SEQ ID NO: 2802378 - RNA, 19 nt, Artificial Sequence
  Description of Artificial Sequence: Synthetic oligonucleotide
augugcgagacaaugcuga

SEQ ID NO: 2802379 - RNA, 19 nt, Artificial Sequence
  Description of Artificial Sequence: Synthetic oligonucleotide
gagguuuuccccacagaac

SEQ ID NO: 2802380 - RNA, 19 nt, Artificial Sequence
  Description of Artificial Sequence: Synthetic oligonucleotide
gacuccucaagucaacagu

SEQ ID NO: 2802381 - RNA, 19 nt, Artificial Sequence
  Description of Artificial Sequence: Synthetic oligonucleotide
cuuggaagucucagaagca

SEQ ID NO: 2802382 - RNA, 19 nt, Artificial Sequence
  Description of Artificial Sequence: Synthetic oligonucleotide
ugcacgagucaguuucugu

SEQ ID NO: 2802383 - RNA, 19 nt, Artificial Sequence
  Description of Artificial Sequence: Synthetic oligonucleotide
acaucgaguaugugcgaga

SEQ ID NO: 2802384 - RNA, 19 nt, Artificial Sequence
  Description of Artificial Sequence: Synthetic oligonucleotide
ugccgcugaaucuucuccu

SEQ ID NO: 2802385 - RNA, 19 nt, Artificial Sequence
  Description of Artificial Sequence: Synthetic oligonucleotide
caagguuccugaguguaug

SEQ ID NO: 2802386 - RNA, 19 nt, Artificial Sequence
  Description of Artificial Sequence: Synthetic oligonucleotide
uugguucuuuuccuuguuu

SEQ ID NO: 2802387 - RNA, 19 nt, Artificial Sequence
  Description of Artificial Sequence: Synthetic oligonucleotide
ugcugaccagcugaguggc

SEQ ID NO: 2802388 - RNA, 19 nt, Artificial Sequence
  Description of Artificial Sequence: Synthetic oligonucleotide
uuaugccgcugaaucuucu

SEQ ID NO: 2802389 - RNA, 19 nt, Artificial Sequence
  Description of Artificial Sequence: Synthetic oligonucleotide
cagaguaagugacuccuca

SEQ ID NO: 2802390 - RNA, 19 nt, Artificial Sequence
  Description of Artificial Sequence: Synthetic oligonucleotide
aggcaggguuguuaugcuc

SEQ ID NO: 2802391 - RNA, 19 nt, Artificial Sequence
  Description of Artificial Sequence: Synthetic oligonucleotide
agugacuccucaagucaac

SEQ ID NO: 2802392 - RNA, 19 nt, Artificial Sequence
  Description of Artificial Sequence: Synthetic oligonucleotide
ugugcgagacaaugcugac

SEQ ID NO: 2802393 - RNA, 19 nt, Artificial Sequence
  Description of Artificial Sequence: Synthetic oligonucleotide
caucgaguaugugcgagac

SEQ ID NO: 2802394 - RNA, 19 nt, Artificial Sequence
  Description of Artificial Sequence: Synthetic oligonucleotide
guaauacaauaaaaguuua

SEQ ID NO: 2802395 - RNA, 19 nt, Artificial Sequence
  Description of Artificial Sequence: Synthetic oligonucleotide
uuuccccacagaacucacu

SEQ ID NO: 2802396 - RNA, 19 nt, Artificial Sequence
  Description of Artificial Sequence: Synthetic oligonucleotide
uuauccuggugccgcugug

SEQ ID NO: 2802397 - RNA, 19 nt, Artificial Sequence
  Description of Artificial Sequence: Synthetic oligonucleotide
aguauaggcaggguuguua

SEQ ID NO: 2802398 - RNA, 19 nt, Artificial Sequence
  Description of Artificial Sequence: Synthetic oligonucleotide
uucuguuugcugagguuuu

SEQ ID NO: 2802399 - RNA, 19 nt, Artificial Sequence
  Description of Artificial Sequence: Synthetic oligonucleotide
agugguuguaacugaucua

SEQ ID NO: 2802400 - RNA, 19 nt, Artificial Sequence
  Description of Artificial Sequence: Synthetic oligonucleotide
agauugacaucgaguaugu

SEQ ID NO: 2802401 - RNA, 19 nt, Artificial Sequence
  Description of Artificial Sequence: Synthetic oligonucleotide
cuccaugucaggcccguug

SEQ ID NO: 2802402 - RNA, 19 nt, Artificial Sequence
  Description of Artificial Sequence: Synthetic oligonucleotide
gcauucagccuccucacug

SEQ ID NO: 2802403 - RNA, 19 nt, Artificial Sequence
  Description of Artificial Sequence: Synthetic oligonucleotide
auuguaguaggcagaguaa

SEQ ID NO: 2802404 - RNA, 19 nt, Artificial Sequence
  Description of Artificial Sequence: Synthetic oligonucleotide
aagugacuccucaagucaa

SEQ ID NO: 2802405 - RNA, 19 nt, Artificial Sequence
  Description of Artificial Sequence: Synthetic oligonucleotide
uucuccaccagguccccaa

SEQ ID NO: 2802406 - RNA, 19 nt, Artificial Sequence
  Description of Artificial Sequence: Synthetic oligonucleotide
agguccccaagcuugcggu

SEQ ID NO: 2802407 - RNA, 19 nt, Artificial Sequence
  Description of Artificial Sequence: Synthetic oligonucleotide
uuuuauccuggugccgcug

SEQ ID NO: 2802408 - RNA, 19 nt, Artificial Sequence
  Description of Artificial Sequence: Synthetic oligonucleotide
cuaaauucacaugcugaga

SEQ ID NO: 2802409 - RNA, 19 nt, Artificial Sequence
  Description of Artificial Sequence: Synthetic oligonucleotide
agacaaugcugaccagcug

SEQ ID NO: 2802410 - RNA, 19 nt, Artificial Sequence
  Description of Artificial Sequence: Synthetic oligonucleotide
ugguuguaacugaucuaaa

SEQ ID NO: 2802411 - RNA, 19 nt, Artificial Sequence
  Description of Artificial Sequence: Synthetic oligonucleotide
uaugccgcugaaucuucuc

SEQ ID NO: 2802412 - RNA, 19 nt, Artificial Sequence
  Description of Artificial Sequence: Synthetic oligonucleotide
ccacagaacucacuguugc

SEQ ID NO: 2802413 - RNA, 19 nt, Artificial Sequence
  Description of Artificial Sequence: Synthetic oligonucleotide
gcgguuaugccgcugaauc

SEQ ID NO: 2802414 - RNA, 19 nt, Artificial Sequence
  Description of Artificial Sequence: Synthetic oligonucleotide
guuuuccccacagaacuca

SEQ ID NO: 2802415 - RNA, 19 nt, Artificial Sequence
  Description of Artificial Sequence: Synthetic oligonucleotide
uauccuggugccgcugugc

SEQ ID NO: 2802416 - RNA, 19 nt, Artificial Sequence
  Description of Artificial Sequence: Synthetic oligonucleotide
gaacucacuguugcacagc

SEQ ID NO: 2802417 - RNA, 19 nt, Artificial Sequence
  Description of Artificial Sequence: Synthetic oligonucleotide
caguuuucuucuccaccag

SEQ ID NO: 2802418 - RNA, 19 nt, Artificial Sequence
  Description of Artificial Sequence: Synthetic oligonucleotide
uaggcaggguuguuaugcu

SEQ ID NO: 2802419 - RNA, 19 nt, Artificial Sequence
  Description of Artificial Sequence: Synthetic oligonucleotide
gcugaguggcguaacacag

SEQ ID NO: 2802420 - RNA, 19 nt, Artificial Sequence
  Description of Artificial Sequence: Synthetic oligonucleotide
ggcaggguuguuaugcucc

SEQ ID NO: 2802421 - RNA, 19 nt, Artificial Sequence
  Description of Artificial Sequence: Synthetic oligonucleotide
cugacuuggaagucucaga

SEQ ID NO: 2802422 - RNA, 19 nt, Artificial Sequence
  Description of Artificial Sequence: Synthetic oligonucleotide
augcagugguuguaacuga

SEQ ID NO: 2802423 - RNA, 19 nt, Artificial Sequence
  Description of Artificial Sequence: Synthetic oligonucleotide
acacagguaaaggauguuu

SEQ ID NO: 2802424 - RNA, 19 nt, Artificial Sequence
  Description of Artificial Sequence: Synthetic oligonucleotide
ugacaucgaguaugugcga

SEQ ID NO: 2802425 - RNA, 19 nt, Artificial Sequence
  Description of Artificial Sequence: Synthetic oligonucleotide
ucaagucaacaguuuucuu

SEQ ID NO: 2802426 - RNA, 19 nt, Artificial Sequence
  Description of Artificial Sequence: Synthetic oligonucleotide
auucagccuccucacugca

SEQ ID NO: 2802427 - RNA, 19 nt, Artificial Sequence
  Description of Artificial Sequence: Synthetic oligonucleotide
ccaauuguaguaggcagag

SEQ ID NO: 2802428 - RNA, 19 nt, Artificial Sequence
  Description of Artificial Sequence: Synthetic oligonucleotide
cuugcgguuaugccgcuga

SEQ ID NO: 2802429 - RNA, 19 nt, Artificial Sequence
  Description of Artificial Sequence: Synthetic oligonucleotide
aacacagugcggcgcugau

SEQ ID NO: 2802430 - RNA, 19 nt, Artificial Sequence
  Description of Artificial Sequence: Synthetic oligonucleotide
uacccugacuuggaagucu

SEQ ID NO: 2802431 - RNA, 19 nt, Artificial Sequence
  Description of Artificial Sequence: Synthetic oligonucleotide
uucagccuccucacugcac

SEQ ID NO: 2802432 - RNA, 19 nt, Artificial Sequence
  Description of Artificial Sequence: Synthetic oligonucleotide
cagugguuguaacugaucu

SEQ ID NO: 2802433 - RNA, 19 nt, Artificial Sequence
  Description of Artificial Sequence: Synthetic oligonucleotide
cagguaaaggauguuugca

SEQ ID NO: 2802434 - RNA, 19 nt, Artificial Sequence
  Description of Artificial Sequence: Synthetic oligonucleotide
gaguguaugcagugguugu

SEQ ID NO: 2802435 - RNA, 19 nt, Artificial Sequence
  Description of Artificial Sequence: Synthetic oligonucleotide
gagacaaugcugaccagcu

SEQ ID NO: 2802436 - RNA, 19 nt, Artificial Sequence
  Description of Artificial Sequence: Synthetic oligonucleotide
cuucuacccaauuguagua

SEQ ID NO: 2802437 - RNA, 19 nt, Artificial Sequence
  Description of Artificial Sequence: Synthetic oligonucleotide
gaacacagguaaaggaugu

SEQ ID NO: 2802438 - RNA, 19 nt, Artificial Sequence
  Description of Artificial Sequence: Synthetic oligonucleotide
uaacacagugcggcgcuga

SEQ ID NO: 2802439 - RNA, 19 nt, Artificial Sequence
  Description of Artificial Sequence: Synthetic oligonucleotide
ccuggugccgcugugcucg

SEQ ID NO: 2802440 - RNA, 19 nt, Artificial Sequence
  Description of Artificial Sequence: Synthetic oligonucleotide
acuccucaagucaacaguu

SEQ ID NO: 2802441 - RNA, 19 nt, Artificial Sequence
  Description of Artificial Sequence: Synthetic oligonucleotide
auccuggugccgcugugcu

SEQ ID NO: 2802442 - RNA, 19 nt, Artificial Sequence
  Description of Artificial Sequence: Synthetic oligonucleotide
uccccacagaacucacugu

SEQ ID NO: 2802443 - RNA, 19 nt, Artificial Sequence
  Description of Artificial Sequence: Synthetic oligonucleotide
guaugcagugguuguaacu

SEQ ID NO: 2802444 - RNA, 19 nt, Artificial Sequence
  Description of Artificial Sequence: Synthetic oligonucleotide
ggcguaacacagugcggcg

SEQ ID NO: 2802445 - RNA, 19 nt, Artificial Sequence
  Description of Artificial Sequence: Synthetic oligonucleotide
uugggcagauugacaucga

SEQ ID NO: 2802446 - RNA, 19 nt, Artificial Sequence
  Description of Artificial Sequence: Synthetic oligonucleotide
cuucuucuacccaauugua

SEQ ID NO: 2802447 - RNA, 19 nt, Artificial Sequence
  Description of Artificial Sequence: Synthetic oligonucleotide
agcaagguuccugagugua

SEQ ID NO: 2802448 - RNA, 19 nt, Artificial Sequence
  Description of Artificial Sequence: Synthetic oligonucleotide
ggaagucucagaagcagca

SEQ ID NO: 2802449 - RNA, 19 nt, Artificial Sequence
  Description of Artificial Sequence: Synthetic oligonucleotide
aucgaguaugugcgagaca

SEQ ID NO: 2802450 - RNA, 19 nt, Artificial Sequence
  Description of Artificial Sequence: Synthetic oligonucleotide
augucaggcccguuggguu

SEQ ID NO: 2802451 - RNA, 19 nt, Artificial Sequence
  Description of Artificial Sequence: Synthetic oligonucleotide
gauugacaucgaguaugug

SEQ ID NO: 2802452 - RNA, 19 nt, Artificial Sequence
  Description of Artificial Sequence: Synthetic oligonucleotide
ucacuguugcacagcuuuu

SEQ ID NO: 2802453 - RNA, 19 nt, Artificial Sequence
  Description of Artificial Sequence: Synthetic oligonucleotide
ccaagcuugcgguuaugcc

SEQ ID NO: 2802454 - RNA, 19 nt, Artificial Sequence
  Description of Artificial Sequence: Synthetic oligonucleotide
uugcugagguuuuccccac

SEQ ID NO: 2802455 - RNA, 19 nt, Artificial Sequence
  Description of Artificial Sequence: Synthetic oligonucleotide
cucacuguugcacagcuuu

SEQ ID NO: 2802456 - RNA, 19 nt, Artificial Sequence
  Description of Artificial Sequence: Synthetic oligonucleotide
ccucaagucaacaguuuuc

SEQ ID NO: 2802457 - RNA, 19 nt, Artificial Sequence
  Description of Artificial Sequence: Synthetic oligonucleotide
guauaggcaggguuguuau

SEQ ID NO: 2802458 - RNA, 19 nt, Artificial Sequence
  Description of Artificial Sequence: Synthetic oligonucleotide
gguuguuaugcuccauguc

SEQ ID NO: 2802459 - RNA, 19 nt, Artificial Sequence
  Description of Artificial Sequence: Synthetic oligonucleotide
gcugugcucggcuguaaag

SEQ ID NO: 2802460 - RNA, 19 nt, Artificial Sequence
  Description of Artificial Sequence: Synthetic oligonucleotide
caguuucuguuugcugagg

SEQ ID NO: 2802461 - RNA, 19 nt, Artificial Sequence
  Description of Artificial Sequence: Synthetic oligonucleotide
cacaugcugagaggaacac

SEQ ID NO: 2802462 - RNA, 19 nt, Artificial Sequence
  Description of Artificial Sequence: Synthetic oligonucleotide
ucuguuugcugagguuuuc

SEQ ID NO: 2802463 - RNA, 19 nt, Artificial Sequence
  Description of Artificial Sequence: Synthetic oligonucleotide
accagcugaguggcguaac

SEQ ID NO: 2802464 - RNA, 19 nt, Artificial Sequence
  Description of Artificial Sequence: Synthetic oligonucleotide
cacagaacucacuguugca

SEQ ID NO: 2802465 - RNA, 19 nt, Artificial Sequence
  Description of Artificial Sequence: Synthetic oligonucleotide
gugcgagacaaugcugacc

SEQ ID NO: 2802466 - RNA, 19 nt, Artificial Sequence
  Description of Artificial Sequence: Synthetic oligonucleotide
agguuccugaguguaugca

SEQ ID NO: 2802467 - RNA, 19 nt, Artificial Sequence
  Description of Artificial Sequence: Synthetic oligonucleotide
acccugacuuggaagucuc

SEQ ID NO: 2802468 - RNA, 19 nt, Artificial Sequence
  Description of Artificial Sequence: Synthetic oligonucleotide
gugugacuuacccugacuu

SEQ ID NO: 2802469 - RNA, 19 nt, Artificial Sequence
  Description of Artificial Sequence: Synthetic oligonucleotide
augcugagaggaacacagg

SEQ ID NO: 2802470 - RNA, 19 nt, Artificial Sequence
  Description of Artificial Sequence: Synthetic oligonucleotide
cuccaccagguccccaagc

SEQ ID NO: 2802471 - RNA, 19 nt, Artificial Sequence
  Description of Artificial Sequence: Synthetic oligonucleotide
uuacccugacuuggaaguc

SEQ ID NO: 2802472 - RNA, 19 nt, Artificial Sequence
  Description of Artificial Sequence: Synthetic oligonucleotide
gguuguaacugaucuaaau

SEQ ID NO: 2802473 - RNA, 19 nt, Artificial Sequence
  Description of Artificial Sequence: Synthetic oligonucleotide
guggcguaacacagugcgg

SEQ ID NO: 2802474 - RNA, 19 nt, Artificial Sequence
  Description of Artificial Sequence: Synthetic oligonucleotide
gaagucucagaagcagcaa

SEQ ID NO: 2802475 - RNA, 19 nt, Artificial Sequence
  Description of Artificial Sequence: Synthetic oligonucleotide
guuugcauucagccuccuc

SEQ ID NO: 2802476 - RNA, 19 nt, Artificial Sequence
  Description of Artificial Sequence: Synthetic oligonucleotide
gacuuacccugacuuggaa

SEQ ID NO: 2802477 - RNA, 19 nt, Artificial Sequence
  Description of Artificial Sequence: Synthetic oligonucleotide
aguguaugcagugguugua

SEQ ID NO: 2802478 - RNA, 19 nt, Artificial Sequence
  Description of Artificial Sequence: Synthetic oligonucleotide
ggcgcugauaguauaggca

SEQ ID NO: 2802479 - RNA, 19 nt, Artificial Sequence
  Description of Artificial Sequence: Synthetic oligonucleotide
aggauuuauugcaguaaua

SEQ ID NO: 2802480 - RNA, 19 nt, Artificial Sequence
  Description of Artificial Sequence: Synthetic oligonucleotide
gugugugacuuacccugac

SEQ ID NO: 2802481 - RNA, 19 nt, Artificial Sequence
  Description of Artificial Sequence: Synthetic oligonucleotide
guuaugccgcugaaucuuc

SEQ ID NO: 2802482 - RNA, 19 nt, Artificial Sequence
  Description of Artificial Sequence: Synthetic oligonucleotide
ccugacuuggaagucucag

SEQ ID NO: 2802483 - RNA, 19 nt, Artificial Sequence
  Description of Artificial Sequence: Synthetic oligonucleotide
gaguggcguaacacagugc

SEQ ID NO: 2802484 - RNA, 19 nt, Artificial Sequence
  Description of Artificial Sequence: Synthetic oligonucleotide
uccccaagcuugcgguuau

SEQ ID NO: 2802485 - RNA, 19 nt, Artificial Sequence
  Description of Artificial Sequence: Synthetic oligonucleotide
guguaugcagugguuguaa

SEQ ID NO: 2802486 - RNA, 19 nt, Artificial Sequence
  Description of Artificial Sequence: Synthetic oligonucleotide
agaaaacgugugugacuua

SEQ ID NO: 2802487 - RNA, 19 nt, Artificial Sequence
  Description of Artificial Sequence: Synthetic oligonucleotide
ugccgcugugcucggcugu

SEQ ID NO: 2802488 - RNA, 19 nt, Artificial Sequence
  Description of Artificial Sequence: Synthetic oligonucleotide
gugacuccucaagucaaca

SEQ ID NO: 2802489 - RNA, 19 nt, Artificial Sequence
  Description of Artificial Sequence: Synthetic oligonucleotide
ugaccagcugaguggcgua

SEQ ID NO: 2802490 - RNA, 19 nt, Artificial Sequence
  Description of Artificial Sequence: Synthetic oligonucleotide
ggauguuugcauucagccu

SEQ ID NO: 2802491 - RNA, 19 nt, Artificial Sequence
  Description of Artificial Sequence: Synthetic oligonucleotide
gguaaaggauguuugcauu

SEQ ID NO: 2802492 - RNA, 19 nt, Artificial Sequence
  Description of Artificial Sequence: Synthetic oligonucleotide
ugcgguuaugccgcugaau

SEQ ID NO: 2802493 - RNA, 19 nt, Artificial Sequence
  Description of Artificial Sequence: Synthetic oligonucleotide
aggcccguuggguuguuuu

SEQ ID NO: 2802494 - RNA, 19 nt, Artificial Sequence
  Description of Artificial Sequence: Synthetic oligonucleotide
guuccugaguguaugcagu

SEQ ID NO: 2802495 - RNA, 19 nt, Artificial Sequence
  Description of Artificial Sequence: Synthetic oligonucleotide
gagucaguuucuguuugcu

SEQ ID NO: 2802496 - RNA, 19 nt, Artificial Sequence
  Description of Artificial Sequence: Synthetic oligonucleotide
uugcgguuaugccgcugaa

SEQ ID NO: 2802497 - RNA, 19 nt, Artificial Sequence
  Description of Artificial Sequence: Synthetic oligonucleotide
auucacaugcugagaggaa

SEQ ID NO: 2802498 - RNA, 19 nt, Artificial Sequence
  Description of Artificial Sequence: Synthetic oligonucleotide
cgagacaaugcugaccagc

SEQ ID NO: 2802499 - RNA, 19 nt, Artificial Sequence
  Description of Artificial Sequence: Synthetic oligonucleotide
cucggcuguaaagcuuuug

SEQ ID NO: 2802500 - RNA, 19 nt, Artificial Sequence
  Description of Artificial Sequence: Synthetic oligonucleotide
ugcuccaugucaggcccgu

SEQ ID NO: 2802501 - RNA, 19 nt, Artificial Sequence
  Description of Artificial Sequence: Synthetic oligonucleotide
cccaauuguaguaggcaga

SEQ ID NO: 2802502 - RNA, 19 nt, Artificial Sequence
  Description of Artificial Sequence: Synthetic oligonucleotide
cugagguuuuccccacaga

SEQ ID NO: 2802503 - RNA, 19 nt, Artificial Sequence
  Description of Artificial Sequence: Synthetic oligonucleotide
agccuccucacugcacgag

SEQ ID NO: 2802504 - RNA, 19 nt, Artificial Sequence
  Description of Artificial Sequence: Synthetic oligonucleotide
ggcagaguaagugacuccu

SEQ ID NO: 2802505 - RNA, 19 nt, Artificial Sequence
  Description of Artificial Sequence: Synthetic oligonucleotide
agugcggcgcugauaguau

SEQ ID NO: 2802506 - RNA, 19 nt, Artificial Sequence
  Description of Artificial Sequence: Synthetic oligonucleotide
ggguuguuaugcuccaugu

SEQ ID NO: 2802507 - RNA, 19 nt, Artificial Sequence
  Description of Artificial Sequence: Synthetic oligonucleotide
ucacugcacgagucaguuu

SEQ ID NO: 2802508 - RNA, 19 nt, Artificial Sequence
  Description of Artificial Sequence: Synthetic oligonucleotide
guaacacagugcggcgcug

SEQ ID NO: 2802509 - RNA, 19 nt, Artificial Sequence
  Description of Artificial Sequence: Synthetic oligonucleotide
guuucuguuugcugagguu

SEQ ID NO: 2802510 - RNA, 19 nt, Artificial Sequence
  Description of Artificial Sequence: Synthetic oligonucleotide
cgcugauaguauaggcagg

SEQ ID NO: 2802511 - RNA, 19 nt, Artificial Sequence
  Description of Artificial Sequence: Synthetic oligonucleotide
cccaagcuugcgguuaugc

SEQ ID NO: 2802512 - RNA, 19 nt, Artificial Sequence
  Description of Artificial Sequence: Synthetic oligonucleotide
gucucagaagcagcaaggu

SEQ ID NO: 2802513 - RNA, 19 nt, Artificial Sequence
  Description of Artificial Sequence: Synthetic oligonucleotide
uguuugcauucagccuccu

SEQ ID NO: 2802514 - RNA, 19 nt, Artificial Sequence
  Description of Artificial Sequence: Synthetic oligonucleotide
gcggcgcugauaguauagg

SEQ ID NO: 2802515 - RNA, 19 nt, Artificial Sequence
  Description of Artificial Sequence: Synthetic oligonucleotide
uccuggugccgcugugcuc

SEQ ID NO: 2802516 - RNA, 19 nt, Artificial Sequence
  Description of Artificial Sequence: Synthetic oligonucleotide
augcuccaugucaggcccg

SEQ ID NO: 2802517 - RNA, 19 nt, Artificial Sequence
  Description of Artificial Sequence: Synthetic oligonucleotide
uaguauaggcaggguuguu

SEQ ID NO: 2802518 - RNA, 19 nt, Artificial Sequence
  Description of Artificial Sequence: Synthetic oligonucleotide
gugccgcugugcucggcug

SEQ ID NO: 2802519 - RNA, 19 nt, Artificial Sequence
  Description of Artificial Sequence: Synthetic oligonucleotide
gguuuuccccacagaacuc

SEQ ID NO: 2802520 - RNA, 19 nt, Artificial Sequence
  Description of Artificial Sequence: Synthetic oligonucleotide
guaggcagaguaagugacu

SEQ ID NO: 2802521 - RNA, 19 nt, Artificial Sequence
  Description of Artificial Sequence: Synthetic oligonucleotide
cgagucaguuucuguuugc

SEQ ID NO: 2802522 - RNA, 19 nt, Artificial Sequence
  Description of Artificial Sequence: Synthetic oligonucleotide
cagugcggcgcugauagua

SEQ ID NO: 2802523 - RNA, 19 nt, Artificial Sequence
  Description of Artificial Sequence: Synthetic oligonucleotide
gcguaacacagugcggcgc

SEQ ID NO: 2802524 - RNA, 19 nt, Artificial Sequence
  Description of Artificial Sequence: Synthetic oligonucleotide
ccaugucaggcccguuggg

SEQ ID NO: 2802525 - RNA, 19 nt, Artificial Sequence
  Description of Artificial Sequence: Synthetic oligonucleotide
cugaguggcguaacacagu

SEQ ID NO: 2802526 - RNA, 19 nt, Artificial Sequence
  Description of Artificial Sequence: Synthetic oligonucleotide
gcugagaggaacacaggua

SEQ ID NO: 2802527 - RNA, 19 nt, Artificial Sequence
  Description of Artificial Sequence: Synthetic oligonucleotide
cacgagucaguuucuguuu

SEQ ID NO: 2802528 - RNA, 19 nt, Artificial Sequence
  Description of Artificial Sequence: Synthetic oligonucleotide
acagugcggcgcugauagu

SEQ ID NO: 2802529 - RNA, 19 nt, Artificial Sequence
  Description of Artificial Sequence: Synthetic oligonucleotide
gcaggguuguuaugcucca

SEQ ID NO: 2802530 - RNA, 19 nt, Artificial Sequence
  Description of Artificial Sequence: Synthetic oligonucleotide
caugucaggcccguugggu

SEQ ID NO: 2802531 - RNA, 19 nt, Artificial Sequence
  Description of Artificial Sequence: Synthetic oligonucleotide
gguuaugccgcugaaucuu

SEQ ID NO: 2802532 - RNA, 19 nt, Artificial Sequence
  Description of Artificial Sequence: Synthetic oligonucleotide
ggcccguuggguuguuuuc

SEQ ID NO: 2802533 - RNA, 19 nt, Artificial Sequence
  Description of Artificial Sequence: Synthetic oligonucleotide
gcacgagucaguuucuguu

SEQ ID NO: 2802534 - RNA, 19 nt, Artificial Sequence
  Description of Artificial Sequence: Synthetic oligonucleotide
cuggugccgcugugcucgg

SEQ ID NO: 2802535 - RNA, 19 nt, Artificial Sequence
  Description of Artificial Sequence: Synthetic oligonucleotide
cggcgcugauaguauaggc

SEQ ID NO: 2802536 - RNA, 19 nt, Artificial Sequence
  Description of Artificial Sequence: Synthetic oligonucleotide
gaccagcugaguggcguaa

SEQ ID NO: 2802537 - RNA, 19 nt, Artificial Sequence
  Description of Artificial Sequence: Synthetic oligonucleotide
cugaccagcugaguggcgu

SEQ ID NO: 2802538 - RNA, 19 nt, Artificial Sequence
  Description of Artificial Sequence: Synthetic oligonucleotide
gcagugguuguaacugauc

SEQ ID NO: 2802539 - RNA, 19 nt, Artificial Sequence
  Description of Artificial Sequence: Synthetic oligonucleotide
cugaguguaugcagugguu

SEQ ID NO: 2802540 - RNA, 19 nt, Artificial Sequence
  Description of Artificial Sequence: Synthetic oligonucleotide
ccugaguguaugcaguggu

SEQ ID NO: 2802541 - RNA, 19 nt, Artificial Sequence
  Description of Artificial Sequence: Synthetic oligonucleotide
cucacugcacgagucaguu

SEQ ID NO: 2802542 - RNA, 19 nt, Artificial Sequence
  Description of Artificial Sequence: Synthetic oligonucleotide
gcgagacaaugcugaccag

SEQ ID NO: 2802543 - RNA, 19 nt, Artificial Sequence
  Description of Artificial Sequence: Synthetic oligonucleotide
gggcagauugacaucgagu

SEQ ID NO: 2802544 - RNA, 19 nt, Artificial Sequence
  Description of Artificial Sequence: Synthetic oligonucleotide
acacagugcggcgcugaua

SEQ ID NO: 2802545 - RNA, 19 nt, Artificial Sequence
  Description of Artificial Sequence: Synthetic oligonucleotide
guccccaagcuugcgguua

SEQ ID NO: 2802546 - RNA, 19 nt, Artificial Sequence
  Description of Artificial Sequence: Synthetic oligonucleotide
gcagaguaagugacuccuc

SEQ ID NO: 2802547 - RNA, 19 nt, Artificial Sequence
  Description of Artificial Sequence: Synthetic oligonucleotide
gcuuuugguucuuuuccuu

SEQ ID NO: 2802548 - RNA, 19 nt, Artificial Sequence
  Description of Artificial Sequence: Synthetic oligonucleotide
ccguuggguuguuuucuuc

SEQ ID NO: 2802549 - RNA, 19 nt, Artificial Sequence
  Description of Artificial Sequence: Synthetic oligonucleotide
gcagauugacaucgaguau

SEQ ID NO: 2802550 - RNA, 19 nt, Artificial Sequence
  Description of Artificial Sequence: Synthetic oligonucleotide
cagccuccucacugcacga

SEQ ID NO: 2802551 - RNA, 19 nt, Artificial Sequence
  Description of Artificial Sequence: Synthetic oligonucleotide
cuccucaagucaacaguuu

SEQ ID NO: 2802552 - RNA, 19 nt, Artificial Sequence
  Description of Artificial Sequence: Synthetic oligonucleotide
cugauaguauaggcagggu

SEQ ID NO: 2802553 - RNA, 19 nt, Artificial Sequence
  Description of Artificial Sequence: Synthetic oligonucleotide
cuucuucuucuacccaauu

SEQ ID NO: 2802554 - RNA, 19 nt, Artificial Sequence
  Description of Artificial Sequence: Synthetic oligonucleotide
gcugaccagcugaguggcg

SEQ ID NO: 2802555 - RNA, 19 nt, Artificial Sequence
  Description of Artificial Sequence: Synthetic oligonucleotide
ccagcugaguggcguaaca

SEQ ID NO: 2802556 - RNA, 19 nt, Artificial Sequence
  Description of Artificial Sequence: Synthetic oligonucleotide
acucacuguugcacagcuu

SEQ ID NO: 2802557 - RNA, 19 nt, Artificial Sequence
  Description of Artificial Sequence: Synthetic oligonucleotide
ggugccgcugugcucggcu

SEQ ID NO: 2802558 - RNA, 19 nt, Artificial Sequence
  Description of Artificial Sequence: Synthetic oligonucleotide
cguuggguuguuuucuucu

SEQ ID NO: 2802559 - RNA, 19 nt, Artificial Sequence
  Description of Artificial Sequence: Synthetic oligonucleotide
gugcggcgcugauaguaua

SEQ ID NO: 2802560 - RNA, 19 nt, Artificial Sequence
  Description of Artificial Sequence: Synthetic oligonucleotide
caauuguaguaggcagagu

SEQ ID NO: 2802561 - RNA, 19 nt, Artificial Sequence
  Description of Artificial Sequence: Synthetic oligonucleotide
cagcaagguuccugagugu

SEQ ID NO: 2802562 - RNA, 19 nt, Artificial Sequence
  Description of Artificial Sequence: Synthetic oligonucleotide
cgugugugacuuacccuga

SEQ ID NO: 2802563 - RNA, 19 nt, Artificial Sequence
  Description of Artificial Sequence: Synthetic oligonucleotide
gcuugcgguuaugccgcug

SEQ ID NO: 2802564 - RNA, 19 nt, Artificial Sequence
  Description of Artificial Sequence: Synthetic oligonucleotide
caaugcugaccagcugagu

SEQ ID NO: 2802565 - RNA, 19 nt, Artificial Sequence
  Description of Artificial Sequence: Synthetic oligonucleotide
ggguuguuuucuucuucuu

SEQ ID NO: 2802566 - RNA, 19 nt, Artificial Sequence
  Description of Artificial Sequence: Synthetic oligonucleotide
gccuccucacugcacgagu

SEQ ID NO: 2802567 - RNA, 19 nt, Artificial Sequence
  Description of Artificial Sequence: Synthetic oligonucleotide
gucaggcccguuggguugu

SEQ ID NO: 2802568 - RNA, 19 nt, Artificial Sequence
  Description of Artificial Sequence: Synthetic oligonucleotide
cguaacacagugcggcgcu

SEQ ID NO: 2802569 - RNA, 19 nt, Artificial Sequence
  Description of Artificial Sequence: Synthetic oligonucleotide
ccccacagaacucacuguu

SEQ ID NO: 2802570 - RNA, 19 nt, Artificial Sequence
  Description of Artificial Sequence: Synthetic oligonucleotide
gugcucggcuguaaagcuu

SEQ ID NO: 2802571 - RNA, 19 nt, Artificial Sequence
  Description of Artificial Sequence: Synthetic oligonucleotide
gcccguuggguuguuuucu

SEQ ID NO: 2802572 - RNA, 19 nt, Artificial Sequence
  Description of Artificial Sequence: Synthetic oligonucleotide
cccugacuuggaagucuca

SEQ ID NO: 2802573 - RNA, 19 nt, Artificial Sequence
  Description of Artificial Sequence: Synthetic oligonucleotide
cggcuguaaagcuuuuggu

SEQ ID NO: 2802574 - RNA, 19 nt, Artificial Sequence
  Description of Artificial Sequence: Synthetic oligonucleotide
gcaagguuccugaguguau

SEQ ID NO: 2802575 - RNA, 19 nt, Artificial Sequence
  Description of Artificial Sequence: Synthetic oligonucleotide
gccgcugaaucuucuccuu

SEQ ID NO: 2802576 - RNA, 19 nt, Artificial Sequence
  Description of Artificial Sequence: Synthetic oligonucleotide
ucaggcccguuggguuguu

SEQ ID NO: 2802577 - RNA, 19 nt, Artificial Sequence
  Description of Artificial Sequence: Synthetic oligonucleotide
cgguuaugccgcugaaucu

SEQ ID NO: 2802578 - RNA, 19 nt, Artificial Sequence
  Description of Artificial Sequence: Synthetic oligonucleotide
gguccccaagcuugcgguu

SEQ ID NO: 2802579 - RNA, 19 nt, Artificial Sequence
  Description of Artificial Sequence: Synthetic oligonucleotide
cgcugaaucuucuccuuuu

SEQ ID NO: 2802580 - RNA, 19 nt, Artificial Sequence
  Description of Artificial Sequence: Synthetic oligonucleotide
caggguuguuaugcuccau

SEQ ID NO: 2802581 - RNA, 19 nt, Artificial Sequence
  Description of Artificial Sequence: Synthetic oligonucleotide
cagaagcagcaagguuccu

SEQ ID NO: 2802582 - RNA, 19 nt, Artificial Sequence
  Description of Artificial Sequence: Synthetic oligonucleotide
ccccaagcuugcgguuaug

SEQ ID NO: 2802583 - RNA, 19 nt, Artificial Sequence
  Description of Artificial Sequence: Synthetic oligonucleotide
cgcugugcucggcuguaaa

SEQ ID NO: 2802584 - RNA, 19 nt, Artificial Sequence
  Description of Artificial Sequence: Synthetic oligonucleotide
gccgcugugcucggcugua

SEQ ID NO: 2802585 - RNA, 19 nt, Artificial Sequence
  Description of Artificial Sequence: Synthetic oligonucleotide
cccguuggguuguuuucuu

SEQ ID NO: 2802586 - RNA, 19 nt, Artificial Sequence
  Description of Artificial Sequence: Synthetic oligonucleotide
ccgcugaaucuucuccuuu

SEQ ID NO: 2802587 - RNA, 19 nt, Artificial Sequence
  Description of Artificial Sequence: Synthetic oligonucleotide
cgaguaugugcgagacaau

SEQ ID NO: 2802588 - RNA, 19 nt, Artificial Sequence
  Description of Artificial Sequence: Synthetic oligonucleotide
gcucggcuguaaagcuuuu

SEQ ID NO: 2802589 - RNA, 19 nt, Artificial Sequence
  Description of Artificial Sequence: Synthetic oligonucleotide
caggcccguuggguuguuu

SEQ ID NO: 2802590 - RNA, 19 nt, Artificial Sequence
  Description of Artificial Sequence: Synthetic oligonucleotide
ccgcugugcucggcuguaa

SEQ ID NO: 2802591 - RNA, 19 nt, Artificial Sequence
  Description of Artificial Sequence: Synthetic oligonucleotide
gcuccaugucaggcccguu

SEQ ID NO: 2802592 - RNA, 19 nt, Artificial Sequence
  Description of Artificial Sequence: Synthetic oligonucleotide
augguaguaaggcagaucc

SEQ ID NO: 2802593 - RNA, 19 nt, Artificial Sequence
  Description of Artificial Sequence: Synthetic oligonucleotide
ucucuuaucagauaguugc

SEQ ID NO: 2802594 - RNA, 19 nt, Artificial Sequence
  Description of Artificial Sequence: Synthetic oligonucleotide
uuaaacgagacgcagaggc

SEQ ID NO: 2802595 - RNA, 19 nt, Artificial Sequence
  Description of Artificial Sequence: Synthetic oligonucleotide
aagauauccacauaguccu

SEQ ID NO: 2802596 - RNA, 19 nt, Artificial Sequence
  Description of Artificial Sequence: Synthetic oligonucleotide
uuuagauagacacuugcag

SEQ ID NO: 2802597 - RNA, 19 nt, Artificial Sequence
  Description of Artificial Sequence: Synthetic oligonucleotide
auuuuagauagacacuugc

SEQ ID NO: 2802598 - RNA, 19 nt, Artificial Sequence
  Description of Artificial Sequence: Synthetic oligonucleotide
ucuaacuucauccuucucc

SEQ ID NO: 2802599 - RNA, 19 nt, Artificial Sequence
  Description of Artificial Sequence: Synthetic oligonucleotide
ucuagguucggaaagaucu

SEQ ID NO: 2802600 - RNA, 19 nt, Artificial Sequence
  Description of Artificial Sequence: Synthetic oligonucleotide
uuuuaaacgagacgcagag

SEQ ID NO: 2802601 - RNA, 19 nt, Artificial Sequence
  Description of Artificial Sequence: Synthetic oligonucleotide
cuuguuuuguccuaugucc

SEQ ID NO: 2802602 - RNA, 19 nt, Artificial Sequence
  Description of Artificial Sequence: Synthetic oligonucleotide
auaaacauucaucucuaac

SEQ ID NO: 2802603 - RNA, 19 nt, Artificial Sequence
  Description of Artificial Sequence: Synthetic oligonucleotide
gaaagaucuguuuuggagc

SEQ ID NO: 2802604 - RNA, 19 nt, Artificial Sequence
  Description of Artificial Sequence: Synthetic oligonucleotide
aaucaccagaccuugaccu

SEQ ID NO: 2802605 - RNA, 19 nt, Artificial Sequence
  Description of Artificial Sequence: Synthetic oligonucleotide
aaaggugaaucaccagacc

SEQ ID NO: 2802606 - RNA, 19 nt, Artificial Sequence
  Description of Artificial Sequence: Synthetic oligonucleotide
uuugaaaggugaaucacca

SEQ ID NO: 2802607 - RNA, 19 nt, Artificial Sequence
  Description of Artificial Sequence: Synthetic oligonucleotide
uggcauuuuagauagacac

SEQ ID NO: 2802608 - RNA, 19 nt, Artificial Sequence
  Description of Artificial Sequence: Synthetic oligonucleotide
ucucuaucuuguaauaucc

SEQ ID NO: 2802609 - RNA, 19 nt, Artificial Sequence
  Description of Artificial Sequence: Synthetic oligonucleotide
agauaguugccauccaccc

SEQ ID NO: 2802610 - RNA, 19 nt, Artificial Sequence
  Description of Artificial Sequence: Synthetic oligonucleotide
uagauagacacuugcagag

SEQ ID NO: 2802611 - RNA, 19 nt, Artificial Sequence
  Description of Artificial Sequence: Synthetic oligonucleotide
guaauauccauguuucucc

SEQ ID NO: 2802612 - RNA, 19 nt, Artificial Sequence
  Description of Artificial Sequence: Synthetic oligonucleotide
uuagauagacacuugcaga

SEQ ID NO: 2802613 - RNA, 19 nt, Artificial Sequence
  Description of Artificial Sequence: Synthetic oligonucleotide
aaggugaaucaccagaccu

SEQ ID NO: 2802614 - RNA, 19 nt, Artificial Sequence
  Description of Artificial Sequence: Synthetic oligonucleotide
agauucgguagguauagac

SEQ ID NO: 2802615 - RNA, 19 nt, Artificial Sequence
  Description of Artificial Sequence: Synthetic oligonucleotide
gacuaauucuucuagguuc

SEQ ID NO: 2802616 - RNA, 19 nt, Artificial Sequence
  Description of Artificial Sequence: Synthetic oligonucleotide
uaguaaggcagauccaugg

SEQ ID NO: 2802617 - RNA, 19 nt, Artificial Sequence
  Description of Artificial Sequence: Synthetic oligonucleotide
ucuuguaauauccauguuu

SEQ ID NO: 2802618 - RNA, 19 nt, Artificial Sequence
  Description of Artificial Sequence: Synthetic oligonucleotide
uuuuagauagacacuugca

SEQ ID NO: 2802619 - RNA, 19 nt, Artificial Sequence
  Description of Artificial Sequence: Synthetic oligonucleotide
cauacuuggagacuaauuc

SEQ ID NO: 2802620 - RNA, 19 nt, Artificial Sequence
  Description of Artificial Sequence: Synthetic oligonucleotide
aacuucauccuucucccuc

SEQ ID NO: 2802621 - RNA, 19 nt, Artificial Sequence
  Description of Artificial Sequence: Synthetic oligonucleotide
uggcuuuucauacuuggag

SEQ ID NO: 2802622 - RNA, 19 nt, Artificial Sequence
  Description of Artificial Sequence: Synthetic oligonucleotide
uuaguguucucauaaacau

SEQ ID NO: 2802623 - RNA, 19 nt, Artificial Sequence
  Description of Artificial Sequence: Synthetic oligonucleotide
aauucuucuagguucggaa

SEQ ID NO: 2802624 - RNA, 19 nt, Artificial Sequence
  Description of Artificial Sequence: Synthetic oligonucleotide
cuaacuucauccuucuccc

SEQ ID NO: 2802625 - RNA, 19 nt, Artificial Sequence
  Description of Artificial Sequence: Synthetic oligonucleotide
aaacgagacgcagaggcac

SEQ ID NO: 2802626 - RNA, 19 nt, Artificial Sequence
  Description of Artificial Sequence: Synthetic oligonucleotide
ucuucaaggcaagauaucc

SEQ ID NO: 2802627 - RNA, 19 nt, Artificial Sequence
  Description of Artificial Sequence: Synthetic oligonucleotide
aggcaagauauccacauag

SEQ ID NO: 2802628 - RNA, 19 nt, Artificial Sequence
  Description of Artificial Sequence: Synthetic oligonucleotide
uguuucucccugaagauuc

SEQ ID NO: 2802629 - RNA, 19 nt, Artificial Sequence
  Description of Artificial Sequence: Synthetic oligonucleotide
uggagacuaauucuucuag

SEQ ID NO: 2802630 - RNA, 19 nt, Artificial Sequence
  Description of Artificial Sequence: Synthetic oligonucleotide
cuagaaguuggcauuuuag

SEQ ID NO: 2802631 - RNA, 19 nt, Artificial Sequence
  Description of Artificial Sequence: Synthetic oligonucleotide
uaucagauaguugccaucc

SEQ ID NO: 2802632 - RNA, 19 nt, Artificial Sequence
  Description of Artificial Sequence: Synthetic oligonucleotide
ucacauucuuucuugguca

SEQ ID NO: 2802633 - RNA, 19 nt, Artificial Sequence
  Description of Artificial Sequence: Synthetic oligonucleotide
gauccugcuacccagguca

SEQ ID NO: 2802634 - RNA, 19 nt, Artificial Sequence
  Description of Artificial Sequence: Synthetic oligonucleotide
ucagaggcccucuagaagu

SEQ ID NO: 2802635 - RNA, 19 nt, Artificial Sequence
  Description of Artificial Sequence: Synthetic oligonucleotide
ugucuucaaggcaagauau

SEQ ID NO: 2802636 - RNA, 19 nt, Artificial Sequence
  Description of Artificial Sequence: Synthetic oligonucleotide
caucauuggguuugaaagg

SEQ ID NO: 2802637 - RNA, 19 nt, Artificial Sequence
  Description of Artificial Sequence: Synthetic oligonucleotide
ucuguuuuggagcaccuuc

SEQ ID NO: 2802638 - RNA, 19 nt, Artificial Sequence
  Description of Artificial Sequence: Synthetic oligonucleotide
uucaaggcaagauauccac

SEQ ID NO: 2802639 - RNA, 19 nt, Artificial Sequence
  Description of Artificial Sequence: Synthetic oligonucleotide
ggaaagaucuguuuuggag

SEQ ID NO: 2802640 - RNA, 19 nt, Artificial Sequence
  Description of Artificial Sequence: Synthetic oligonucleotide
uuuggagcaccuuccacag

SEQ ID NO: 2802641 - RNA, 19 nt, Artificial Sequence
  Description of Artificial Sequence: Synthetic oligonucleotide
uguaauauccauguuucuc

SEQ ID NO: 2802642 - RNA, 19 nt, Artificial Sequence
  Description of Artificial Sequence: Synthetic oligonucleotide
gauauccacauaguccucg

SEQ ID NO: 2802643 - RNA, 19 nt, Artificial Sequence
  Description of Artificial Sequence: Synthetic oligonucleotide
uagacacuugcagaggugg

SEQ ID NO: 2802644 - RNA, 19 nt, Artificial Sequence
  Description of Artificial Sequence: Synthetic oligonucleotide
ugaaucaccagaccuugac

SEQ ID NO: 2802645 - RNA, 19 nt, Artificial Sequence
  Description of Artificial Sequence: Synthetic oligonucleotide
gaagauucgguagguauag

SEQ ID NO: 2802646 - RNA, 19 nt, Artificial Sequence
  Description of Artificial Sequence: Synthetic oligonucleotide
uucggaaagaucuguuuug

SEQ ID NO: 2802647 - RNA, 19 nt, Artificial Sequence
  Description of Artificial Sequence: Synthetic oligonucleotide
ucuaucuuguaauauccau

SEQ ID NO: 2802648 - RNA, 19 nt, Artificial Sequence
  Description of Artificial Sequence: Synthetic oligonucleotide
auauccauguuucucccug

SEQ ID NO: 2802649 - RNA, 19 nt, Artificial Sequence
  Description of Artificial Sequence: Synthetic oligonucleotide
auacuuggagacuaauucu

SEQ ID NO: 2802650 - RNA, 19 nt, Artificial Sequence
  Description of Artificial Sequence: Synthetic oligonucleotide
uugaccuggcuuuucauac

SEQ ID NO: 2802651 - RNA, 19 nt, Artificial Sequence
  Description of Artificial Sequence: Synthetic oligonucleotide
ucccugaagauucgguagg

SEQ ID NO: 2802652 - RNA, 19 nt, Artificial Sequence
  Description of Artificial Sequence: Synthetic oligonucleotide
agaggcacaggacuccugg

SEQ ID NO: 2802653 - RNA, 19 nt, Artificial Sequence
  Description of Artificial Sequence: Synthetic oligonucleotide
ucauaaacauucaucucua

SEQ ID NO: 2802654 - RNA, 19 nt, Artificial Sequence
  Description of Artificial Sequence: Synthetic oligonucleotide
cagauaguugccauccacc

SEQ ID NO: 2802655 - RNA, 19 nt, Artificial Sequence
  Description of Artificial Sequence: Synthetic oligonucleotide
ucggaaagaucuguuuugg

SEQ ID NO: 2802656 - RNA, 19 nt, Artificial Sequence
  Description of Artificial Sequence: Synthetic oligonucleotide
uuuucauacuuggagacua

SEQ ID NO: 2802657 - RNA, 19 nt, Artificial Sequence
  Description of Artificial Sequence: Synthetic oligonucleotide
gaaaggugaaucaccagac

SEQ ID NO: 2802658 - RNA, 19 nt, Artificial Sequence
  Description of Artificial Sequence: Synthetic oligonucleotide
ugaagauucgguagguaua

SEQ ID NO: 2802659 - RNA, 19 nt, Artificial Sequence
  Description of Artificial Sequence: Synthetic oligonucleotide
guuugaaaggugaaucacc

SEQ ID NO: 2802660 - RNA, 19 nt, Artificial Sequence
  Description of Artificial Sequence: Synthetic oligonucleotide
cuuucuuggucaucuggcc

SEQ ID NO: 2802661 - RNA, 19 nt, Artificial Sequence
  Description of Artificial Sequence: Synthetic oligonucleotide
uguccuugucuucaaggca

SEQ ID NO: 2802662 - RNA, 19 nt, Artificial Sequence
  Description of Artificial Sequence: Synthetic oligonucleotide
acuccuggcauagacucgc

SEQ ID NO: 2802663 - RNA, 19 nt, Artificial Sequence
  Description of Artificial Sequence: Synthetic oligonucleotide
ucuuaucagauaguugcca

SEQ ID NO: 2802664 - RNA, 19 nt, Artificial Sequence
  Description of Artificial Sequence: Synthetic oligonucleotide
uuguccuauguccuugucu

SEQ ID NO: 2802665 - RNA, 19 nt, Artificial Sequence
  Description of Artificial Sequence: Synthetic oligonucleotide
cucauaaacauucaucucu

SEQ ID NO: 2802666 - RNA, 19 nt, Artificial Sequence
  Description of Artificial Sequence: Synthetic oligonucleotide
cuguuuuggagcaccuucc

SEQ ID NO: 2802667 - RNA, 19 nt, Artificial Sequence
  Description of Artificial Sequence: Synthetic oligonucleotide
guuaguguucucauaaaca

SEQ ID NO: 2802668 - RNA, 19 nt, Artificial Sequence
  Description of Artificial Sequence: Synthetic oligonucleotide
uacuuggagacuaauucuu

SEQ ID NO: 2802669 - RNA, 19 nt, Artificial Sequence
  Description of Artificial Sequence: Synthetic oligonucleotide
uuuaaacgagacgcagagg

SEQ ID NO: 2802670 - RNA, 19 nt, Artificial Sequence
  Description of Artificial Sequence: Synthetic oligonucleotide
guuggcauuuuagauagac

SEQ ID NO: 2802671 - RNA, 19 nt, Artificial Sequence
  Description of Artificial Sequence: Synthetic oligonucleotide
ucaaggcaagauauccaca

SEQ ID NO: 2802672 - RNA, 19 nt, Artificial Sequence
  Description of Artificial Sequence: Synthetic oligonucleotide
uguuuuggagcaccuucca

SEQ ID NO: 2802673 - RNA, 19 nt, Artificial Sequence
  Description of Artificial Sequence: Synthetic oligonucleotide
ggagacuaauucuucuagg

SEQ ID NO: 2802674 - RNA, 19 nt, Artificial Sequence
  Description of Artificial Sequence: Synthetic oligonucleotide
uggguuugaaaggugaauc

SEQ ID NO: 2802675 - RNA, 19 nt, Artificial Sequence
  Description of Artificial Sequence: Synthetic oligonucleotide
uugaaaggugaaucaccag

SEQ ID NO: 2802676 - RNA, 19 nt, Artificial Sequence
  Description of Artificial Sequence: Synthetic oligonucleotide
ucauacuuggagacuaauu

SEQ ID NO: 2802677 - RNA, 19 nt, Artificial Sequence
  Description of Artificial Sequence: Synthetic oligonucleotide
cucuuaucagauaguugcc

SEQ ID NO: 2802678 - RNA, 19 nt, Artificial Sequence
  Description of Artificial Sequence: Synthetic oligonucleotide
uaaacgagacgcagaggca

SEQ ID NO: 2802679 - RNA, 19 nt, Artificial Sequence
  Description of Artificial Sequence: Synthetic oligonucleotide
gucucuaucuuguaauauc

SEQ ID NO: 2802680 - RNA, 19 nt, Artificial Sequence
  Description of Artificial Sequence: Synthetic oligonucleotide
ucucauaaacauucaucuc

SEQ ID NO: 2802681 - RNA, 19 nt, Artificial Sequence
  Description of Artificial Sequence: Synthetic oligonucleotide
cucccugaagauucgguag

SEQ ID NO: 2802682 - RNA, 19 nt, Artificial Sequence
  Description of Artificial Sequence: Synthetic oligonucleotide
acauaguccucguuagugu

SEQ ID NO: 2802683 - RNA, 19 nt, Artificial Sequence
  Description of Artificial Sequence: Synthetic oligonucleotide
uccauguuucucccugaag

SEQ ID NO: 2802684 - RNA, 19 nt, Artificial Sequence
  Description of Artificial Sequence: Synthetic oligonucleotide
gauucgguagguauagaca

SEQ ID NO: 2802685 - RNA, 19 nt, Artificial Sequence
  Description of Artificial Sequence: Synthetic oligonucleotide
ucuagaaguuggcauuuua

SEQ ID NO: 2802686 - RNA, 19 nt, Artificial Sequence
  Description of Artificial Sequence: Synthetic oligonucleotide
aucauuggguuugaaaggu

SEQ ID NO: 2802687 - RNA, 19 nt, Artificial Sequence
  Description of Artificial Sequence: Synthetic oligonucleotide
uuaucagauaguugccauc

SEQ ID NO: 2802688 - RNA, 19 nt, Artificial Sequence
  Description of Artificial Sequence: Synthetic oligonucleotide
cuucucaucauuggguuug

SEQ ID NO: 2802689 - RNA, 19 nt, Artificial Sequence
  Description of Artificial Sequence: Synthetic oligonucleotide
cauuuuagauagacacuug

SEQ ID NO: 2802690 - RNA, 19 nt, Artificial Sequence
  Description of Artificial Sequence: Synthetic oligonucleotide
acacuugcagagguggugg

SEQ ID NO: 2802691 - RNA, 19 nt, Artificial Sequence
  Description of Artificial Sequence: Synthetic oligonucleotide
ucgguagguauagacaaac

SEQ ID NO: 2802692 - RNA, 19 nt, Artificial Sequence
  Description of Artificial Sequence: Synthetic oligonucleotide
ucauuggguuugaaaggug

SEQ ID NO: 2802693 - RNA, 19 nt, Artificial Sequence
  Description of Artificial Sequence: Synthetic oligonucleotide
auccacccucccuugacgg

SEQ ID NO: 2802694 - RNA, 19 nt, Artificial Sequence
  Description of Artificial Sequence: Synthetic oligonucleotide
aucucagcccucccuuagc

SEQ ID NO: 2802695 - RNA, 19 nt, Artificial Sequence
  Description of Artificial Sequence: Synthetic oligonucleotide
agauagacacuugcagagg

SEQ ID NO: 2802696 - RNA, 19 nt, Artificial Sequence
  Description of Artificial Sequence: Synthetic oligonucleotide
uccuauguccuugucuuca

SEQ ID NO: 2802697 - RNA, 19 nt, Artificial Sequence
  Description of Artificial Sequence: Synthetic oligonucleotide
gauagacacuugcagaggu

SEQ ID NO: 2802698 - RNA, 19 nt, Artificial Sequence
  Description of Artificial Sequence: Synthetic oligonucleotide
cauuggguuugaaagguga

SEQ ID NO: 2802699 - RNA, 19 nt, Artificial Sequence
  Description of Artificial Sequence: Synthetic oligonucleotide
uucuuggucaucuggccau

SEQ ID NO: 2802700 - RNA, 19 nt, Artificial Sequence
  Description of Artificial Sequence: Synthetic oligonucleotide
uuguaauauccauguuucu

SEQ ID NO: 2802701 - RNA, 19 nt, Artificial Sequence
  Description of Artificial Sequence: Synthetic oligonucleotide
agacuaauucuucuagguu

SEQ ID NO: 2802702 - RNA, 19 nt, Artificial Sequence
  Description of Artificial Sequence: Synthetic oligonucleotide
cucguuaguguucucauaa

SEQ ID NO: 2802703 - RNA, 19 nt, Artificial Sequence
  Description of Artificial Sequence: Synthetic oligonucleotide
auccacauaguccucguua

SEQ ID NO: 2802704 - RNA, 19 nt, Artificial Sequence
  Description of Artificial Sequence: Synthetic oligonucleotide
ugucucuuaucagauaguu

SEQ ID NO: 2802705 - RNA, 19 nt, Artificial Sequence
  Description of Artificial Sequence: Synthetic oligonucleotide
gacucgcugucucuuauca

SEQ ID NO: 2802706 - RNA, 19 nt, Artificial Sequence
  Description of Artificial Sequence: Synthetic oligonucleotide
auucuucuagguucggaaa

SEQ ID NO: 2802707 - RNA, 19 nt, Artificial Sequence
  Description of Artificial Sequence: Synthetic oligonucleotide
accuuccacagucucuauc

SEQ ID NO: 2802708 - RNA, 19 nt, Artificial Sequence
  Description of Artificial Sequence: Synthetic oligonucleotide
ucucagcccucccuuagcu

SEQ ID NO: 2802709 - RNA, 19 nt, Artificial Sequence
  Description of Artificial Sequence: Synthetic oligonucleotide
gcuuuucauacuuggagac

SEQ ID NO: 2802710 - RNA, 19 nt, Artificial Sequence
  Description of Artificial Sequence: Synthetic oligonucleotide
uaauucuucuagguucgga

SEQ ID NO: 2802711 - RNA, 19 nt, Artificial Sequence
  Description of Artificial Sequence: Synthetic oligonucleotide
cucgcugucucuuaucaga

SEQ ID NO: 2802712 - RNA, 19 nt, Artificial Sequence
  Description of Artificial Sequence: Synthetic oligonucleotide
uuuuguccuauguccuugu

SEQ ID NO: 2802713 - RNA, 19 nt, Artificial Sequence
  Description of Artificial Sequence: Synthetic oligonucleotide
ucucccugaagauucggua

SEQ ID NO: 2802714 - RNA, 19 nt, Artificial Sequence
  Description of Artificial Sequence: Synthetic oligonucleotide
ucugccaucucagcccucc

SEQ ID NO: 2802715 - RNA, 19 nt, Artificial Sequence
  Description of Artificial Sequence: Synthetic oligonucleotide
cuagguucggaaagaucug

SEQ ID NO: 2802716 - RNA, 19 nt, Artificial Sequence
  Description of Artificial Sequence: Synthetic oligonucleotide
uucuagguucggaaagauc

SEQ ID NO: 2802717 - RNA, 19 nt, Artificial Sequence
  Description of Artificial Sequence: Synthetic oligonucleotide
uaguguucucauaaacauu

SEQ ID NO: 2802718 - RNA, 19 nt, Artificial Sequence
  Description of Artificial Sequence: Synthetic oligonucleotide
cucagaggcccucuagaag

SEQ ID NO: 2802719 - RNA, 19 nt, Artificial Sequence
  Description of Artificial Sequence: Synthetic oligonucleotide
uuucauacuuggagacuaa

SEQ ID NO: 2802720 - RNA, 19 nt, Artificial Sequence
  Description of Artificial Sequence: Synthetic oligonucleotide
gcaagauauccacauaguc

SEQ ID NO: 2802721 - RNA, 19 nt, Artificial Sequence
  Description of Artificial Sequence: Synthetic oligonucleotide
gagagcucugccaucucag

SEQ ID NO: 2802722 - RNA, 19 nt, Artificial Sequence
  Description of Artificial Sequence: Synthetic oligonucleotide
ggucaucuggccaugguag

SEQ ID NO: 2802723 - RNA, 19 nt, Artificial Sequence
  Description of Artificial Sequence: Synthetic oligonucleotide
agccgcuucucaucauugg

SEQ ID NO: 2802724 - RNA, 19 nt, Artificial Sequence
  Description of Artificial Sequence: Synthetic oligonucleotide
cuucaaggcaagauaucca

SEQ ID NO: 2802725 - RNA, 19 nt, Artificial Sequence
  Description of Artificial Sequence: Synthetic oligonucleotide
gacacuugcagagguggug

SEQ ID NO: 2802726 - RNA, 19 nt, Artificial Sequence
  Description of Artificial Sequence: Synthetic oligonucleotide
uauccauguuucucccuga

SEQ ID NO: 2802727 - RNA, 19 nt, Artificial Sequence
  Description of Artificial Sequence: Synthetic oligonucleotide
gacgcagaggcacaggacu

SEQ ID NO: 2802728 - RNA, 19 nt, Artificial Sequence
  Description of Artificial Sequence: Synthetic oligonucleotide
cagaggugguggcugagag

SEQ ID NO: 2802729 - RNA, 19 nt, Artificial Sequence
  Description of Artificial Sequence: Synthetic oligonucleotide
ugguaguaaggcagaucca

SEQ ID NO: 2802730 - RNA, 19 nt, Artificial Sequence
  Description of Artificial Sequence: Synthetic oligonucleotide
gagcaggguuuucacauuc

SEQ ID NO: 2802731 - RNA, 19 nt, Artificial Sequence
  Description of Artificial Sequence: Synthetic oligonucleotide
uugccauccacccucccuu

SEQ ID NO: 2802732 - RNA, 19 nt, Artificial Sequence
  Description of Artificial Sequence: Synthetic oligonucleotide
caggacuccuggcauagac

SEQ ID NO: 2802733 - RNA, 19 nt, Artificial Sequence
  Description of Artificial Sequence: Synthetic oligonucleotide
auauccacauaguccucgu

SEQ ID NO: 2802734 - RNA, 19 nt, Artificial Sequence
  Description of Artificial Sequence: Synthetic oligonucleotide
ggcuuuucauacuuggaga

SEQ ID NO: 2802735 - RNA, 19 nt, Artificial Sequence
  Description of Artificial Sequence: Synthetic oligonucleotide
cuugcagaggugguggcug

SEQ ID NO: 2802736 - RNA, 19 nt, Artificial Sequence
  Description of Artificial Sequence: Synthetic oligonucleotide
guuuuggagcaccuuccac

SEQ ID NO: 2802737 - RNA, 19 nt, Artificial Sequence
  Description of Artificial Sequence: Synthetic oligonucleotide
auaguccucguuaguguuc

SEQ ID NO: 2802738 - RNA, 19 nt, Artificial Sequence
  Description of Artificial Sequence: Synthetic oligonucleotide
uagguucggaaagaucugu

SEQ ID NO: 2802739 - RNA, 19 nt, Artificial Sequence
  Description of Artificial Sequence: Synthetic oligonucleotide
uguuuuguccuauguccuu

SEQ ID NO: 2802740 - RNA, 19 nt, Artificial Sequence
  Description of Artificial Sequence: Synthetic oligonucleotide
uccucguuaguguucucau

SEQ ID NO: 2802741 - RNA, 19 nt, Artificial Sequence
  Description of Artificial Sequence: Synthetic oligonucleotide
uggccaugguaguaaggca

SEQ ID NO: 2802742 - RNA, 19 nt, Artificial Sequence
  Description of Artificial Sequence: Synthetic oligonucleotide
uaguccucguuaguguucu

SEQ ID NO: 2802743 - RNA, 19 nt, Artificial Sequence
  Description of Artificial Sequence: Synthetic oligonucleotide
ggacuccuggcauagacuc

SEQ ID NO: 2802744 - RNA, 19 nt, Artificial Sequence
  Description of Artificial Sequence: Synthetic oligonucleotide
gacggagcaggguuuucac

SEQ ID NO: 2802745 - RNA, 19 nt, Artificial Sequence
  Description of Artificial Sequence: Synthetic oligonucleotide
guaguaaggcagauccaug

SEQ ID NO: 2802746 - RNA, 19 nt, Artificial Sequence
  Description of Artificial Sequence: Synthetic oligonucleotide
ccauguuucucccugaaga

SEQ ID NO: 2802747 - RNA, 19 nt, Artificial Sequence
  Description of Artificial Sequence: Synthetic oligonucleotide
uuggguuugaaaggugaau

SEQ ID NO: 2802748 - RNA, 19 nt, Artificial Sequence
  Description of Artificial Sequence: Synthetic oligonucleotide
guagguauagacaaacuuu

SEQ ID NO: 2802749 - RNA, 19 nt, Artificial Sequence
  Description of Artificial Sequence: Synthetic oligonucleotide
aggcacaggacuccuggca

SEQ ID NO: 2802750 - RNA, 19 nt, Artificial Sequence
  Description of Artificial Sequence: Synthetic oligonucleotide
cuauguccuugucuucaag

SEQ ID NO: 2802751 - RNA, 19 nt, Artificial Sequence
  Description of Artificial Sequence: Synthetic oligonucleotide
ucguuaguguucucauaaa

SEQ ID NO: 2802752 - RNA, 19 nt, Artificial Sequence
  Description of Artificial Sequence: Synthetic oligonucleotide
acucgcugucucuuaucag

SEQ ID NO: 2802753 - RNA, 19 nt, Artificial Sequence
  Description of Artificial Sequence: Synthetic oligonucleotide
cucuaucuuguaauaucca

SEQ ID NO: 2802754 - RNA, 19 nt, Artificial Sequence
  Description of Artificial Sequence: Synthetic oligonucleotide
gucucuuaucagauaguug

SEQ ID NO: 2802755 - RNA, 19 nt, Artificial Sequence
  Description of Artificial Sequence: Synthetic oligonucleotide
gguuugaaaggugaaucac

SEQ ID NO: 2802756 - RNA, 19 nt, Artificial Sequence
  Description of Artificial Sequence: Synthetic oligonucleotide
ugacggagcaggguuuuca

SEQ ID NO: 2802757 - RNA, 19 nt, Artificial Sequence
  Description of Artificial Sequence: Synthetic oligonucleotide
uuuguccuauguccuuguc

SEQ ID NO: 2802758 - RNA, 19 nt, Artificial Sequence
  Description of Artificial Sequence: Synthetic oligonucleotide
ucccuuagcuuguuuuguc

SEQ ID NO: 2802759 - RNA, 19 nt, Artificial Sequence
  Description of Artificial Sequence: Synthetic oligonucleotide
ggccaugguaguaaggcag

SEQ ID NO: 2802760 - RNA, 19 nt, Artificial Sequence
  Description of Artificial Sequence: Synthetic oligonucleotide
uagacucgcugucucuuau

SEQ ID NO: 2802761 - RNA, 19 nt, Artificial Sequence
  Description of Artificial Sequence: Synthetic oligonucleotide
cuggcauagacucgcuguc

SEQ ID NO: 2802762 - RNA, 19 nt, Artificial Sequence
  Description of Artificial Sequence: Synthetic oligonucleotide
agucucuaucuuguaauau

SEQ ID NO: 2802763 - RNA, 19 nt, Artificial Sequence
  Description of Artificial Sequence: Synthetic oligonucleotide
caucucagcccucccuuag

SEQ ID NO: 2802764 - RNA, 19 nt, Artificial Sequence
  Description of Artificial Sequence: Synthetic oligonucleotide
aagccgcuucucaucauug

SEQ ID NO: 2802765 - RNA, 19 nt, Artificial Sequence
  Description of Artificial Sequence: Synthetic oligonucleotide
ggguuugaaaggugaauca

SEQ ID NO: 2802766 - RNA, 19 nt, Artificial Sequence
  Description of Artificial Sequence: Synthetic oligonucleotide
gccgcuucucaucauuggg

SEQ ID NO: 2802767 - RNA, 19 nt, Artificial Sequence
  Description of Artificial Sequence: Synthetic oligonucleotide
uucauacuuggagacuaau

SEQ ID NO: 2802768 - RNA, 19 nt, Artificial Sequence
  Description of Artificial Sequence: Synthetic oligonucleotide
ugccaucucagcccucccu

SEQ ID NO: 2802769 - RNA, 19 nt, Artificial Sequence
  Description of Artificial Sequence: Synthetic oligonucleotide
gacuccuggcauagacucg

SEQ ID NO: 2802770 - RNA, 19 nt, Artificial Sequence
  Description of Artificial Sequence: Synthetic oligonucleotide
guuucucccugaagauucg

SEQ ID NO: 2802771 - RNA, 19 nt, Artificial Sequence
  Description of Artificial Sequence: Synthetic oligonucleotide
cugaagauucgguagguau

SEQ ID NO: 2802772 - RNA, 19 nt, Artificial Sequence
  Description of Artificial Sequence: Synthetic oligonucleotide
uaguugccauccacccucc

SEQ ID NO: 2802773 - RNA, 19 nt, Artificial Sequence
  Description of Artificial Sequence: Synthetic oligonucleotide
gaggcacaggacuccuggc

SEQ ID NO: 2802774 - RNA, 19 nt, Artificial Sequence
  Description of Artificial Sequence: Synthetic oligonucleotide
cucccuugacggagcaggg

SEQ ID NO: 2802775 - RNA, 19 nt, Artificial Sequence
  Description of Artificial Sequence: Synthetic oligonucleotide
cuuggagacuaauucuucu

SEQ ID NO: 2802776 - RNA, 19 nt, Artificial Sequence
  Description of Artificial Sequence: Synthetic oligonucleotide
gauaguugccauccacccu

SEQ ID NO: 2802777 - RNA, 19 nt, Artificial Sequence
  Description of Artificial Sequence: Synthetic oligonucleotide
uaacuucauccuucucccu

SEQ ID NO: 2802778 - RNA, 19 nt, Artificial Sequence
  Description of Artificial Sequence: Synthetic oligonucleotide
cacaggacuccuggcauag

SEQ ID NO: 2802779 - RNA, 19 nt, Artificial Sequence
  Description of Artificial Sequence: Synthetic oligonucleotide
auagacacuugcagaggug

SEQ ID NO: 2802780 - RNA, 19 nt, Artificial Sequence
  Description of Artificial Sequence: Synthetic oligonucleotide
cuugaccuggcuuuucaua

SEQ ID NO: 2802781 - RNA, 19 nt, Artificial Sequence
  Description of Artificial Sequence: Synthetic oligonucleotide
caugguaguaaggcagauc

SEQ ID NO: 2802782 - RNA, 19 nt, Artificial Sequence
  Description of Artificial Sequence: Synthetic oligonucleotide
guccuugucuucaaggcaa

SEQ ID NO: 2802783 - RNA, 19 nt, Artificial Sequence
  Description of Artificial Sequence: Synthetic oligonucleotide
cuuaucagauaguugccau

SEQ ID NO: 2802784 - RNA, 19 nt, Artificial Sequence
  Description of Artificial Sequence: Synthetic oligonucleotide
gguagguauagacaaacuu

SEQ ID NO: 2802785 - RNA, 19 nt, Artificial Sequence
  Description of Artificial Sequence: Synthetic oligonucleotide
aacgagacgcagaggcaca

SEQ ID NO: 2802786 - RNA, 19 nt, Artificial Sequence
  Description of Artificial Sequence: Synthetic oligonucleotide
aagauucgguagguauaga

SEQ ID NO: 2802787 - RNA, 19 nt, Artificial Sequence
  Description of Artificial Sequence: Synthetic oligonucleotide
guucggaaagaucuguuuu

SEQ ID NO: 2802788 - RNA, 19 nt, Artificial Sequence
  Description of Artificial Sequence: Synthetic oligonucleotide
gcuacccaggucaggaggg

SEQ ID NO: 2802789 - RNA, 19 nt, Artificial Sequence
  Description of Artificial Sequence: Synthetic oligonucleotide
acggagcaggguuuucaca

SEQ ID NO: 2802790 - RNA, 19 nt, Artificial Sequence
  Description of Artificial Sequence: Synthetic oligonucleotide
uauccacauaguccucguu

SEQ ID NO: 2802791 - RNA, 19 nt, Artificial Sequence
  Description of Artificial Sequence: Synthetic oligonucleotide
cguuaguguucucauaaac

SEQ ID NO: 2802792 - RNA, 19 nt, Artificial Sequence
  Description of Artificial Sequence: Synthetic oligonucleotide
cacagucucuaucuuguaa

SEQ ID NO: 2802793 - RNA, 19 nt, Artificial Sequence
  Description of Artificial Sequence: Synthetic oligonucleotide
cacuugcagaggugguggc

SEQ ID NO: 2802794 - RNA, 19 nt, Artificial Sequence
  Description of Artificial Sequence: Synthetic oligonucleotide
ccucccuugacggagcagg

SEQ ID NO: 2802795 - RNA, 19 nt, Artificial Sequence
  Description of Artificial Sequence: Synthetic oligonucleotide
auccauguuucucccugaa

SEQ ID NO: 2802796 - RNA, 19 nt, Artificial Sequence
  Description of Artificial Sequence: Synthetic oligonucleotide
auagacucgcugucucuua

SEQ ID NO: 2802797 - RNA, 19 nt, Artificial Sequence
  Description of Artificial Sequence: Synthetic oligonucleotide
aucuuguaauauccauguu

SEQ ID NO: 2802798 - RNA, 19 nt, Artificial Sequence
  Description of Artificial Sequence: Synthetic oligonucleotide
uggcauagacucgcugucu

SEQ ID NO: 2802799 - RNA, 19 nt, Artificial Sequence
  Description of Artificial Sequence: Synthetic oligonucleotide
acgcagaggcacaggacuc

SEQ ID NO: 2802800 - RNA, 19 nt, Artificial Sequence
  Description of Artificial Sequence: Synthetic oligonucleotide
aggcccucuagaaguuggc

SEQ ID NO: 2802801 - RNA, 19 nt, Artificial Sequence
  Description of Artificial Sequence: Synthetic oligonucleotide
ggucucagaggcccucuag

SEQ ID NO: 2802802 - RNA, 19 nt, Artificial Sequence
  Description of Artificial Sequence: Synthetic oligonucleotide
uucucaucauuggguuuga

SEQ ID NO: 2802803 - RNA, 19 nt, Artificial Sequence
  Description of Artificial Sequence: Synthetic oligonucleotide
cugcuacccaggucaggag

SEQ ID NO: 2802804 - RNA, 19 nt, Artificial Sequence
  Description of Artificial Sequence: Synthetic oligonucleotide
ggcauagacucgcugucuc

SEQ ID NO: 2802805 - RNA, 19 nt, Artificial Sequence
  Description of Artificial Sequence: Synthetic oligonucleotide
uccugcuacccaggucagg

SEQ ID NO: 2802806 - RNA, 19 nt, Artificial Sequence
  Description of Artificial Sequence: Synthetic oligonucleotide
cauguuucucccugaagau

SEQ ID NO: 2802807 - RNA, 19 nt, Artificial Sequence
  Description of Artificial Sequence: Synthetic oligonucleotide
acuugcagaggugguggcu

SEQ ID NO: 2802808 - RNA, 19 nt, Artificial Sequence
  Description of Artificial Sequence: Synthetic oligonucleotide
guccucguuaguguucuca

SEQ ID NO: 2802809 - RNA, 19 nt, Artificial Sequence
  Description of Artificial Sequence: Synthetic oligonucleotide
gcauuuuagauagacacuu

SEQ ID NO: 2802810 - RNA, 19 nt, Artificial Sequence
  Description of Artificial Sequence: Synthetic oligonucleotide
gucuucaaggcaagauauc

SEQ ID NO: 2802811 - RNA, 19 nt, Artificial Sequence
  Description of Artificial Sequence: Synthetic oligonucleotide
aggacuccuggcauagacu

SEQ ID NO: 2802812 - RNA, 19 nt, Artificial Sequence
  Description of Artificial Sequence: Synthetic oligonucleotide
acgagacgcagaggcacag

SEQ ID NO: 2802813 - RNA, 19 nt, Artificial Sequence
  Description of Artificial Sequence: Synthetic oligonucleotide
cucuaacuucauccuucuc

SEQ ID NO: 2802814 - RNA, 19 nt, Artificial Sequence
  Description of Artificial Sequence: Synthetic oligonucleotide
caggagggucucagaggcc

SEQ ID NO: 2802815 - RNA, 19 nt, Artificial Sequence
  Description of Artificial Sequence: Synthetic oligonucleotide
cagucucuaucuuguaaua

SEQ ID NO: 2802816 - RNA, 19 nt, Artificial Sequence
  Description of Artificial Sequence: Synthetic oligonucleotide
cagaccuugaccuggcuuu

SEQ ID NO: 2802817 - RNA, 19 nt, Artificial Sequence
  Description of Artificial Sequence: Synthetic oligonucleotide
aguccucguuaguguucuc

SEQ ID NO: 2802818 - RNA, 19 nt, Artificial Sequence
  Description of Artificial Sequence: Synthetic oligonucleotide
agaggcccucuagaaguug

SEQ ID NO: 2802819 - RNA, 19 nt, Artificial Sequence
  Description of Artificial Sequence: Synthetic oligonucleotide
cuugucuucaaggcaagau

SEQ ID NO: 2802820 - RNA, 19 nt, Artificial Sequence
  Description of Artificial Sequence: Synthetic oligonucleotide
gguaguaaggcagauccau

SEQ ID NO: 2802821 - RNA, 19 nt, Artificial Sequence
  Description of Artificial Sequence: Synthetic oligonucleotide
ccuucucccucuugggcag

SEQ ID NO: 2802822 - RNA, 19 nt, Artificial Sequence
  Description of Artificial Sequence: Synthetic oligonucleotide
gaagccgcuucucaucauu

SEQ ID NO: 2802823 - RNA, 19 nt, Artificial Sequence
  Description of Artificial Sequence: Synthetic oligonucleotide
agcaggguuuucacauucu

SEQ ID NO: 2802824 - RNA, 19 nt, Artificial Sequence
  Description of Artificial Sequence: Synthetic oligonucleotide
acccaggucaggagggucu

SEQ ID NO: 2802825 - RNA, 19 nt, Artificial Sequence
  Description of Artificial Sequence: Synthetic oligonucleotide
cacccucccuugacggagc

SEQ ID NO: 2802826 - RNA, 19 nt, Artificial Sequence
  Description of Artificial Sequence: Synthetic oligonucleotide
ucccuugacggagcagggu

SEQ ID NO: 2802827 - RNA, 19 nt, Artificial Sequence
  Description of Artificial Sequence: Synthetic oligonucleotide
agacacuugcagagguggu

SEQ ID NO: 2802828 - RNA, 19 nt, Artificial Sequence
  Description of Artificial Sequence: Synthetic oligonucleotide
cuuuucauacuuggagacu

SEQ ID NO: 2802829 - RNA, 19 nt, Artificial Sequence
  Description of Artificial Sequence: Synthetic oligonucleotide
cauaguccucguuaguguu

SEQ ID NO: 2802830 - RNA, 19 nt, Artificial Sequence
  Description of Artificial Sequence: Synthetic oligonucleotide
cagaggcacaggacuccug

SEQ ID NO: 2802831 - RNA, 19 nt, Artificial Sequence
  Description of Artificial Sequence: Synthetic oligonucleotide
agaagccgcuucucaucau

SEQ ID NO: 2802832 - RNA, 19 nt, Artificial Sequence
  Description of Artificial Sequence: Synthetic oligonucleotide
caucuggccaugguaguaa

SEQ ID NO: 2802833 - RNA, 19 nt, Artificial Sequence
  Description of Artificial Sequence: Synthetic oligonucleotide
ucucccucuugggcagaag

SEQ ID NO: 2802834 - RNA, 19 nt, Artificial Sequence
  Description of Artificial Sequence: Synthetic oligonucleotide
gaccuggcuuuucauacuu

SEQ ID NO: 2802835 - RNA, 19 nt, Artificial Sequence
  Description of Artificial Sequence: Synthetic oligonucleotide
ugggcagaagccgcuucuc

SEQ ID NO: 2802836 - RNA, 19 nt, Artificial Sequence
  Description of Artificial Sequence: Synthetic oligonucleotide
uacccaggucaggaggguc

SEQ ID NO: 2802837 - RNA, 19 nt, Artificial Sequence
  Description of Artificial Sequence: Synthetic oligonucleotide
accuggcuuuucauacuug

SEQ ID NO: 2802838 - RNA, 19 nt, Artificial Sequence
  Description of Artificial Sequence: Synthetic oligonucleotide
gucaucuggccaugguagu

SEQ ID NO: 2802839 - RNA, 19 nt, Artificial Sequence
  Description of Artificial Sequence: Synthetic oligonucleotide
ggguuuucacauucuuucu

SEQ ID NO: 2802840 - RNA, 19 nt, Artificial Sequence
  Description of Artificial Sequence: Synthetic oligonucleotide
agguucggaaagaucuguu

SEQ ID NO: 2802841 - RNA, 19 nt, Artificial Sequence
  Description of Artificial Sequence: Synthetic oligonucleotide
cugucucuuaucagauagu

SEQ ID NO: 2802842 - RNA, 19 nt, Artificial Sequence
  Description of Artificial Sequence: Synthetic oligonucleotide
gguucggaaagaucuguuu

SEQ ID NO: 2802843 - RNA, 19 nt, Artificial Sequence
  Description of Artificial Sequence: Synthetic oligonucleotide
auccugcuacccaggucag

SEQ ID NO: 2802844 - RNA, 19 nt, Artificial Sequence
  Description of Artificial Sequence: Synthetic oligonucleotide
gagggucucagaggcccuc

SEQ ID NO: 2802845 - RNA, 19 nt, Artificial Sequence
  Description of Artificial Sequence: Synthetic oligonucleotide
gugaaucaccagaccuuga

SEQ ID NO: 2802846 - RNA, 19 nt, Artificial Sequence
  Description of Artificial Sequence: Synthetic oligonucleotide
cugagagcucugccaucuc

SEQ ID NO: 2802847 - RNA, 19 nt, Artificial Sequence
  Description of Artificial Sequence: Synthetic oligonucleotide
ccugcuacccaggucagga

SEQ ID NO: 2802848 - RNA, 19 nt, Artificial Sequence
  Description of Artificial Sequence: Synthetic oligonucleotide
uugacggagcaggguuuuc

SEQ ID NO: 2802849 - RNA, 19 nt, Artificial Sequence
  Description of Artificial Sequence: Synthetic oligonucleotide
acccucccuugacggagca

SEQ ID NO: 2802850 - RNA, 19 nt, Artificial Sequence
  Description of Artificial Sequence: Synthetic oligonucleotide
agggucucagaggcccucu

SEQ ID NO: 2802851 - RNA, 19 nt, Artificial Sequence
  Description of Artificial Sequence: Synthetic oligonucleotide
caucucuaacuucauccuu

SEQ ID NO: 2802852 - RNA, 19 nt, Artificial Sequence
  Description of Artificial Sequence: Synthetic oligonucleotide
ggcaagauauccacauagu

SEQ ID NO: 2802853 - RNA, 19 nt, Artificial Sequence
  Description of Artificial Sequence: Synthetic oligonucleotide
gccaugguaguaaggcaga

SEQ ID NO: 2802854 - RNA, 19 nt, Artificial Sequence
  Description of Artificial Sequence: Synthetic oligonucleotide
ccacccucccuugacggag

SEQ ID NO: 2802855 - RNA, 19 nt, Artificial Sequence
  Description of Artificial Sequence: Synthetic oligonucleotide
cucccuuagcuuguuuugu

SEQ ID NO: 2802856 - RNA, 19 nt, Artificial Sequence
  Description of Artificial Sequence: Synthetic oligonucleotide
cauagacucgcugucucuu

SEQ ID NO: 2802857 - RNA, 19 nt, Artificial Sequence
  Description of Artificial Sequence: Synthetic oligonucleotide
acaggacuccuggcauaga

SEQ ID NO: 2802858 - RNA, 19 nt, Artificial Sequence
  Description of Artificial Sequence: Synthetic oligonucleotide
gcccucuagaaguuggcau

SEQ ID NO: 2802859 - RNA, 19 nt, Artificial Sequence
  Description of Artificial Sequence: Synthetic oligonucleotide
gcauagacucgcugucucu

SEQ ID NO: 2802860 - RNA, 19 nt, Artificial Sequence
  Description of Artificial Sequence: Synthetic oligonucleotide
cucugccaucucagcccuc

SEQ ID NO: 2802861 - RNA, 19 nt, Artificial Sequence
  Description of Artificial Sequence: Synthetic oligonucleotide
cggaaagaucuguuuugga

SEQ ID NO: 2802862 - RNA, 19 nt, Artificial Sequence
  Description of Artificial Sequence: Synthetic oligonucleotide
ccgcuucucaucauugggu

SEQ ID NO: 2802863 - RNA, 19 nt, Artificial Sequence
  Description of Artificial Sequence: Synthetic oligonucleotide
gcacaggacuccuggcaua

SEQ ID NO: 2802864 - RNA, 19 nt, Artificial Sequence
  Description of Artificial Sequence: Synthetic oligonucleotide
cuugacggagcaggguuuu

SEQ ID NO: 2802865 - RNA, 19 nt, Artificial Sequence
  Description of Artificial Sequence: Synthetic oligonucleotide
cccucuagaaguuggcauu

SEQ ID NO: 2802866 - RNA, 19 nt, Artificial Sequence
  Description of Artificial Sequence: Synthetic oligonucleotide
gccaucucagcccucccuu

SEQ ID NO: 2802867 - RNA, 19 nt, Artificial Sequence
  Description of Artificial Sequence: Synthetic oligonucleotide
ccucguuaguguucucaua

SEQ ID NO: 2802868 - RNA, 19 nt, Artificial Sequence
  Description of Artificial Sequence: Synthetic oligonucleotide
cgagacgcagaggcacagg

SEQ ID NO: 2802869 - RNA, 19 nt, Artificial Sequence
  Description of Artificial Sequence: Synthetic oligonucleotide
cagcccucccuuagcuugu

SEQ ID NO: 2802870 - RNA, 19 nt, Artificial Sequence
  Description of Artificial Sequence: Synthetic oligonucleotide
cagaggcccucuagaaguu

SEQ ID NO: 2802871 - RNA, 19 nt, Artificial Sequence
  Description of Artificial Sequence: Synthetic oligonucleotide
cucagcccucccuuagcuu

SEQ ID NO: 2802872 - RNA, 19 nt, Artificial Sequence
  Description of Artificial Sequence: Synthetic oligonucleotide
cuucucccucuugggcaga

SEQ ID NO: 2802873 - RNA, 19 nt, Artificial Sequence
  Description of Artificial Sequence: Synthetic oligonucleotide
cuacccaggucaggagggu

SEQ ID NO: 2802874 - RNA, 19 nt, Artificial Sequence
  Description of Artificial Sequence: Synthetic oligonucleotide
ccugaagauucgguaggua

SEQ ID NO: 2802875 - RNA, 19 nt, Artificial Sequence
  Description of Artificial Sequence: Synthetic oligonucleotide
cccuugacggagcaggguu

SEQ ID NO: 2802876 - RNA, 19 nt, Artificial Sequence
  Description of Artificial Sequence: Synthetic oligonucleotide
cucuagaaguuggcauuuu

SEQ ID NO: 2802877 - RNA, 19 nt, Artificial Sequence
  Description of Artificial Sequence: Synthetic oligonucleotide
gggucucagaggcccucua

SEQ ID NO: 2802878 - RNA, 19 nt, Artificial Sequence
  Description of Artificial Sequence: Synthetic oligonucleotide
cccucccuuagcuuguuuu

SEQ ID NO: 2802879 - RNA, 19 nt, Artificial Sequence
  Description of Artificial Sequence: Synthetic oligonucleotide
gcagaggcacaggacuccu

SEQ ID NO: 2802880 - RNA, 19 nt, Artificial Sequence
  Description of Artificial Sequence: Synthetic oligonucleotide
agcccucccuuagcuuguu

SEQ ID NO: 2802881 - RNA, 19 nt, Artificial Sequence
  Description of Artificial Sequence: Synthetic oligonucleotide
ccagaccuugaccuggcuu

SEQ ID NO: 2802882 - RNA, 19 nt, Artificial Sequence
  Description of Artificial Sequence: Synthetic oligonucleotide
cgguagguauagacaaacu

SEQ ID NO: 2802883 - RNA, 19 nt, Artificial Sequence
  Description of Artificial Sequence: Synthetic oligonucleotide
ccacagucucuaucuugua

SEQ ID NO: 2802884 - RNA, 19 nt, Artificial Sequence
  Description of Artificial Sequence: Synthetic oligonucleotide
ccuugacggagcaggguuu

SEQ ID NO: 2802885 - RNA, 19 nt, Artificial Sequence
  Description of Artificial Sequence: Synthetic oligonucleotide
caccuuccacagucucuau

SEQ ID NO: 2802886 - RNA, 19 nt, Artificial Sequence
  Description of Artificial Sequence: Synthetic oligonucleotide
cccucccuugacggagcag

SEQ ID NO: 2802887 - RNA, 19 nt, Artificial Sequence
  Description of Artificial Sequence: Synthetic oligonucleotide
ccucuagaaguuggcauuu

SEQ ID NO: 2802888 - RNA, 19 nt, Artificial Sequence
  Description of Artificial Sequence: Synthetic oligonucleotide
cccugaagauucgguaggu

SEQ ID NO: 2802889 - RNA, 19 nt, Artificial Sequence
  Description of Artificial Sequence: Synthetic oligonucleotide
ggagggucucagaggcccu

SEQ ID NO: 2802890 - RNA, 19 nt, Artificial Sequence
  Description of Artificial Sequence: Synthetic oligonucleotide
ccaggucaggagggucuca

SEQ ID NO: 2802891 - RNA, 19 nt, Artificial Sequence
  Description of Artificial Sequence: Synthetic oligonucleotide
ccaugguaguaaggcagau

SEQ ID NO: 2802892 - RNA, 19 nt, Artificial Sequence
  Description of Artificial Sequence: Synthetic oligonucleotide
gcccucccuuagcuuguuu

SEQ ID NO: 2802893 - RNA, 19 nt, Artificial Sequence
  Description of Artificial Sequence: Synthetic oligonucleotide
uuaaaauucuuaaagaaug

SEQ ID NO: 2802894 - RNA, 19 nt, Artificial Sequence
  Description of Artificial Sequence: Synthetic oligonucleotide
gauuuaaucaaggugaugg

SEQ ID NO: 2802895 - RNA, 19 nt, Artificial Sequence
  Description of Artificial Sequence: Synthetic oligonucleotide
ugggauuuaaucaagguga

SEQ ID NO: 2802896 - RNA, 19 nt, Artificial Sequence
  Description of Artificial Sequence: Synthetic oligonucleotide
aaagaagucauacucagaa

SEQ ID NO: 2802897 - RNA, 19 nt, Artificial Sequence
  Description of Artificial Sequence: Synthetic oligonucleotide
uuagguagcuuucuggugg

SEQ ID NO: 2802898 - RNA, 19 nt, Artificial Sequence
  Description of Artificial Sequence: Synthetic oligonucleotide
aauucuuaaagaaugcauc

SEQ ID NO: 2802899 - RNA, 19 nt, Artificial Sequence
  Description of Artificial Sequence: Synthetic oligonucleotide
agaaagugcacccuggagg

SEQ ID NO: 2802900 - RNA, 19 nt, Artificial Sequence
  Description of Artificial Sequence: Synthetic oligonucleotide
ucuuaaaauucuuaaagaa

SEQ ID NO: 2802901 - RNA, 19 nt, Artificial Sequence
  Description of Artificial Sequence: Synthetic oligonucleotide
aacuucauugucuuuaggu

SEQ ID NO: 2802902 - RNA, 19 nt, Artificial Sequence
  Description of Artificial Sequence: Synthetic oligonucleotide
uacucagaaaacuucauug

SEQ ID NO: 2802903 - RNA, 19 nt, Artificial Sequence
  Description of Artificial Sequence: Synthetic oligonucleotide
uaaaauucuuaaagaaugc

SEQ ID NO: 2802904 - RNA, 19 nt, Artificial Sequence
  Description of Artificial Sequence: Synthetic oligonucleotide
uuuguaagcgugaagcuga

SEQ ID NO: 2802905 - RNA, 19 nt, Artificial Sequence
  Description of Artificial Sequence: Synthetic oligonucleotide
uucuuuguaagcgugaagc

SEQ ID NO: 2802906 - RNA, 19 nt, Artificial Sequence
  Description of Artificial Sequence: Synthetic oligonucleotide
gaugauaacaaagaaguca

SEQ ID NO: 2802907 - RNA, 19 nt, Artificial Sequence
  Description of Artificial Sequence: Synthetic oligonucleotide
aucauuuucuuuguaagcg

SEQ ID NO: 2802908 - RNA, 19 nt, Artificial Sequence
  Description of Artificial Sequence: Synthetic oligonucleotide
agagcauugaugaaggugg

SEQ ID NO: 2802909 - RNA, 19 nt, Artificial Sequence
  Description of Artificial Sequence: Synthetic oligonucleotide
gauaacaaagaagucauac

SEQ ID NO: 2802910 - RNA, 19 nt, Artificial Sequence
  Description of Artificial Sequence: Synthetic oligonucleotide
ucuuuagguagcuuucugg

SEQ ID NO: 2802911 - RNA, 19 nt, Artificial Sequence
  Description of Artificial Sequence: Synthetic oligonucleotide
ucagaaaacuucauugucu

SEQ ID NO: 2802912 - RNA, 19 nt, Artificial Sequence
  Description of Artificial Sequence: Synthetic oligonucleotide
gucacagcaauguucaggg

SEQ ID NO: 2802913 - RNA, 19 nt, Artificial Sequence
  Description of Artificial Sequence: Synthetic oligonucleotide
ucauacucagaaaacuuca

SEQ ID NO: 2802914 - RNA, 19 nt, Artificial Sequence
  Description of Artificial Sequence: Synthetic oligonucleotide
aaaauucuuaaagaaugca

SEQ ID NO: 2802915 - RNA, 19 nt, Artificial Sequence
  Description of Artificial Sequence: Synthetic oligonucleotide
ugcccuauccccaucagag

SEQ ID NO: 2802916 - RNA, 19 nt, Artificial Sequence
  Description of Artificial Sequence: Synthetic oligonucleotide
cuucauugucuuuagguag

SEQ ID NO: 2802917 - RNA, 19 nt, Artificial Sequence
  Description of Artificial Sequence: Synthetic oligonucleotide
uguggauugcagaaagugc

SEQ ID NO: 2802918 - RNA, 19 nt, Artificial Sequence
  Description of Artificial Sequence: Synthetic oligonucleotide
gagaugauaacaaagaagu

SEQ ID NO: 2802919 - RNA, 19 nt, Artificial Sequence
  Description of Artificial Sequence: Synthetic oligonucleotide
uuaaucaaggugaugguuu

SEQ ID NO: 2802920 - RNA, 19 nt, Artificial Sequence
  Description of Artificial Sequence: Synthetic oligonucleotide
auaacaaagaagucauacu

SEQ ID NO: 2802921 - RNA, 19 nt, Artificial Sequence
  Description of Artificial Sequence: Synthetic oligonucleotide
aagaccuguagagauuucg

SEQ ID NO: 2802922 - RNA, 19 nt, Artificial Sequence
  Description of Artificial Sequence: Synthetic oligonucleotide
uucauugucuuuagguagc

SEQ ID NO: 2802923 - RNA, 19 nt, Artificial Sequence
  Description of Artificial Sequence: Synthetic oligonucleotide
gauugcagaaagugcaccc

SEQ ID NO: 2802924 - RNA, 19 nt, Artificial Sequence
  Description of Artificial Sequence: Synthetic oligonucleotide
aagguggacuucccugucc

SEQ ID NO: 2802925 - RNA, 19 nt, Artificial Sequence
  Description of Artificial Sequence: Synthetic oligonucleotide
uagagauuucgcuaguugu

SEQ ID NO: 2802926 - RNA, 19 nt, Artificial Sequence
  Description of Artificial Sequence: Synthetic oligonucleotide
uauggcauucucuccuugg

SEQ ID NO: 2802927 - RNA, 19 nt, Artificial Sequence
  Description of Artificial Sequence: Synthetic oligonucleotide
aagcgugaagcugagauga

SEQ ID NO: 2802928 - RNA, 19 nt, Artificial Sequence
  Description of Artificial Sequence: Synthetic oligonucleotide
caucauuuucuuuguaagc

SEQ ID NO: 2802929 - RNA, 19 nt, Artificial Sequence
  Description of Artificial Sequence: Synthetic oligonucleotide
ugucacagcaauguucagg

SEQ ID NO: 2802930 - RNA, 19 nt, Artificial Sequence
  Description of Artificial Sequence: Synthetic oligonucleotide
ugaagcugagaugauaaca

SEQ ID NO: 2802931 - RNA, 19 nt, Artificial Sequence
  Description of Artificial Sequence: Synthetic oligonucleotide
aaacuucauugucuuuagg

SEQ ID NO: 2802932 - RNA, 19 nt, Artificial Sequence
  Description of Artificial Sequence: Synthetic oligonucleotide
auugucuuuagguagcuuu

SEQ ID NO: 2802933 - RNA, 19 nt, Artificial Sequence
  Description of Artificial Sequence: Synthetic oligonucleotide
gugggauuuaaucaaggug

SEQ ID NO: 2802934 - RNA, 19 nt, Artificial Sequence
  Description of Artificial Sequence: Synthetic oligonucleotide
ccucuuaaaauucuuaaag

SEQ ID NO: 2802935 - RNA, 19 nt, Artificial Sequence
  Description of Artificial Sequence: Synthetic oligonucleotide
uaguugugcaucauuuucu

SEQ ID NO: 2802936 - RNA, 19 nt, Artificial Sequence
  Description of Artificial Sequence: Synthetic oligonucleotide
ugcagaaagugcacccugg

SEQ ID NO: 2802937 - RNA, 19 nt, Artificial Sequence
  Description of Artificial Sequence: Synthetic oligonucleotide
acucagaaaacuucauugu

SEQ ID NO: 2802938 - RNA, 19 nt, Artificial Sequence
  Description of Artificial Sequence: Synthetic oligonucleotide
gucucugucacuccaguag

SEQ ID NO: 2802939 - RNA, 19 nt, Artificial Sequence
  Description of Artificial Sequence: Synthetic oligonucleotide
ugcaucauuuucuuuguaa

SEQ ID NO: 2802940 - RNA, 19 nt, Artificial Sequence
  Description of Artificial Sequence: Synthetic oligonucleotide
gaaugugggauuuaaucaa

SEQ ID NO: 2802941 - RNA, 19 nt, Artificial Sequence
  Description of Artificial Sequence: Synthetic oligonucleotide
cucuuaaaauucuuaaaga

SEQ ID NO: 2802942 - RNA, 19 nt, Artificial Sequence
  Description of Artificial Sequence: Synthetic oligonucleotide
gaggauuuggcuuucccuc

SEQ ID NO: 2802943 - RNA, 19 nt, Artificial Sequence
  Description of Artificial Sequence: Synthetic oligonucleotide
aaucaaggugaugguuucc

SEQ ID NO: 2802944 - RNA, 19 nt, Artificial Sequence
  Description of Artificial Sequence: Synthetic oligonucleotide
uuuagguagcuuucuggug

SEQ ID NO: 2802945 - RNA, 19 nt, Artificial Sequence
  Description of Artificial Sequence: Synthetic oligonucleotide
auauugucaccugaggaag

SEQ ID NO: 2802946 - RNA, 19 nt, Artificial Sequence
  Description of Artificial Sequence: Synthetic oligonucleotide
aaugugggauuuaaucaag

SEQ ID NO: 2802947 - RNA, 19 nt, Artificial Sequence
  Description of Artificial Sequence: Synthetic oligonucleotide
cuaguugugcaucauuuuc

SEQ ID NO: 2802948 - RNA, 19 nt, Artificial Sequence
  Description of Artificial Sequence: Synthetic oligonucleotide
ucauuuucuuuguaagcgu

SEQ ID NO: 2802949 - RNA, 19 nt, Artificial Sequence
  Description of Artificial Sequence: Synthetic oligonucleotide
uuucuuuguaagcgugaag

SEQ ID NO: 2802950 - RNA, 19 nt, Artificial Sequence
  Description of Artificial Sequence: Synthetic oligonucleotide
agguggacuucccuguccc

SEQ ID NO: 2802951 - RNA, 19 nt, Artificial Sequence
  Description of Artificial Sequence: Synthetic oligonucleotide
uuucuggugggaaggaagu

SEQ ID NO: 2802952 - RNA, 19 nt, Artificial Sequence
  Description of Artificial Sequence: Synthetic oligonucleotide
cucucgaugucucucagug

SEQ ID NO: 2802953 - RNA, 19 nt, Artificial Sequence
  Description of Artificial Sequence: Synthetic oligonucleotide
aucagagcauugaugaagg

SEQ ID NO: 2802954 - RNA, 19 nt, Artificial Sequence
  Description of Artificial Sequence: Synthetic oligonucleotide
ucccauauugucaccugag

SEQ ID NO: 2802955 - RNA, 19 nt, Artificial Sequence
  Description of Artificial Sequence: Synthetic oligonucleotide
auuuaaucaaggugauggu

SEQ ID NO: 2802956 - RNA, 19 nt, Artificial Sequence
  Description of Artificial Sequence: Synthetic oligonucleotide
ugcacuguggauugcagaa

SEQ ID NO: 2802957 - RNA, 19 nt, Artificial Sequence
  Description of Artificial Sequence: Synthetic oligonucleotide
caucagagcauugaugaag

SEQ ID NO: 2802958 - RNA, 19 nt, Artificial Sequence
  Description of Artificial Sequence: Synthetic oligonucleotide
guagagauuucgcuaguug

SEQ ID NO: 2802959 - RNA, 19 nt, Artificial Sequence
  Description of Artificial Sequence: Synthetic oligonucleotide
ucgucuuccugcccuaucc

SEQ ID NO: 2802960 - RNA, 19 nt, Artificial Sequence
  Description of Artificial Sequence: Synthetic oligonucleotide
ugucacuccaguaggggcu

SEQ ID NO: 2802961 - RNA, 19 nt, Artificial Sequence
  Description of Artificial Sequence: Synthetic oligonucleotide
ucuuuguaagcgugaagcu

SEQ ID NO: 2802962 - RNA, 19 nt, Artificial Sequence
  Description of Artificial Sequence: Synthetic oligonucleotide
acuucauugucuuuaggua

SEQ ID NO: 2802963 - RNA, 19 nt, Artificial Sequence
  Description of Artificial Sequence: Synthetic oligonucleotide
ucuccugucacagcaaugu

SEQ ID NO: 2802964 - RNA, 19 nt, Artificial Sequence
  Description of Artificial Sequence: Synthetic oligonucleotide
ucucucagugcacugugga

SEQ ID NO: 2802965 - RNA, 19 nt, Artificial Sequence
  Description of Artificial Sequence: Synthetic oligonucleotide
ugaagguggacuucccugu

SEQ ID NO: 2802966 - RNA, 19 nt, Artificial Sequence
  Description of Artificial Sequence: Synthetic oligonucleotide
ucccucuuaaaauucuuaa

SEQ ID NO: 2802967 - RNA, 19 nt, Artificial Sequence
  Description of Artificial Sequence: Synthetic oligonucleotide
ucugucacuccaguagggg

SEQ ID NO: 2802968 - RNA, 19 nt, Artificial Sequence
  Description of Artificial Sequence: Synthetic oligonucleotide
uauugucaccugaggaagc

SEQ ID NO: 2802969 - RNA, 19 nt, Artificial Sequence
  Description of Artificial Sequence: Synthetic oligonucleotide
gcaucauuuucuuuguaag

SEQ ID NO: 2802970 - RNA, 19 nt, Artificial Sequence
  Description of Artificial Sequence: Synthetic oligonucleotide
cauauugucaccugaggaa

SEQ ID NO: 2802971 - RNA, 19 nt, Artificial Sequence
  Description of Artificial Sequence: Synthetic oligonucleotide
uaagcgugaagcugagaug

SEQ ID NO: 2802972 - RNA, 19 nt, Artificial Sequence
  Description of Artificial Sequence: Synthetic oligonucleotide
uguggguauggcauucucu

SEQ ID NO: 2802973 - RNA, 19 nt, Artificial Sequence
  Description of Artificial Sequence: Synthetic oligonucleotide
ugugcaucauuuucuuugu

SEQ ID NO: 2802974 - RNA, 19 nt, Artificial Sequence
  Description of Artificial Sequence: Synthetic oligonucleotide
cuuaaaauucuuaaagaau

SEQ ID NO: 2802975 - RNA, 19 nt, Artificial Sequence
  Description of Artificial Sequence: Synthetic oligonucleotide
agaccuguagagauuucgc

SEQ ID NO: 2802976 - RNA, 19 nt, Artificial Sequence
  Description of Artificial Sequence: Synthetic oligonucleotide
guagcuuucuggugggaag

SEQ ID NO: 2802977 - RNA, 19 nt, Artificial Sequence
  Description of Artificial Sequence: Synthetic oligonucleotide
uccugucacagcaauguuc

SEQ ID NO: 2802978 - RNA, 19 nt, Artificial Sequence
  Description of Artificial Sequence: Synthetic oligonucleotide
agcugagaugauaacaaag

SEQ ID NO: 2802979 - RNA, 19 nt, Artificial Sequence
  Description of Artificial Sequence: Synthetic oligonucleotide
uugucuuuagguagcuuuc

SEQ ID NO: 2802980 - RNA, 19 nt, Artificial Sequence
  Description of Artificial Sequence: Synthetic oligonucleotide
ucagagaggauuuggcuuu

SEQ ID NO: 2802981 - RNA, 19 nt, Artificial Sequence
  Description of Artificial Sequence: Synthetic oligonucleotide
ugucucucagugcacugug

SEQ ID NO: 2802982 - RNA, 19 nt, Artificial Sequence
  Description of Artificial Sequence: Synthetic oligonucleotide
cuuuguaagcgugaagcug

SEQ ID NO: 2802983 - RNA, 19 nt, Artificial Sequence
  Description of Artificial Sequence: Synthetic oligonucleotide
uuuggguguggguauggca

SEQ ID NO: 2802984 - RNA, 19 nt, Artificial Sequence
  Description of Artificial Sequence: Synthetic oligonucleotide
uugcagaaagugcacccug

SEQ ID NO: 2802985 - RNA, 19 nt, Artificial Sequence
  Description of Artificial Sequence: Synthetic oligonucleotide
cacuguggauugcagaaag

SEQ ID NO: 2802986 - RNA, 19 nt, Artificial Sequence
  Description of Artificial Sequence: Synthetic oligonucleotide
uuuaaucaaggugaugguu

SEQ ID NO: 2802987 - RNA, 19 nt, Artificial Sequence
  Description of Artificial Sequence: Synthetic oligonucleotide
uccaguaggggcugcaccu

SEQ ID NO: 2802988 - RNA, 19 nt, Artificial Sequence
  Description of Artificial Sequence: Synthetic oligonucleotide
auuucgcuaguugugcauc

SEQ ID NO: 2802989 - RNA, 19 nt, Artificial Sequence
  Description of Artificial Sequence: Synthetic oligonucleotide
uagcuuucuggugggaagg

SEQ ID NO: 2802990 - RNA, 19 nt, Artificial Sequence
  Description of Artificial Sequence: Synthetic oligonucleotide
cuguggauugcagaaagug

SEQ ID NO: 2802991 - RNA, 19 nt, Artificial Sequence
  Description of Artificial Sequence: Synthetic oligonucleotide
cucgaugucucucagugca

SEQ ID NO: 2802992 - RNA, 19 nt, Artificial Sequence
  Description of Artificial Sequence: Synthetic oligonucleotide
uuuucuuuguaagcgugaa

SEQ ID NO: 2802993 - RNA, 19 nt, Artificial Sequence
  Description of Artificial Sequence: Synthetic oligonucleotide
agaugauaacaaagaaguc

SEQ ID NO: 2802994 - RNA, 19 nt, Artificial Sequence
  Description of Artificial Sequence: Synthetic oligonucleotide
guggguauggcauucucuc

SEQ ID NO: 2802995 - RNA, 19 nt, Artificial Sequence
  Description of Artificial Sequence: Synthetic oligonucleotide
ggugaugguuuccucagag

SEQ ID NO: 2802996 - RNA, 19 nt, Artificial Sequence
  Description of Artificial Sequence: Synthetic oligonucleotide
agagauuucgcuaguugug

SEQ ID NO: 2802997 - RNA, 19 nt, Artificial Sequence
  Description of Artificial Sequence: Synthetic oligonucleotide
uggauugcagaaagugcac

SEQ ID NO: 2802998 - RNA, 19 nt, Artificial Sequence
  Description of Artificial Sequence: Synthetic oligonucleotide
cucagugcacuguggauug

SEQ ID NO: 2802999 - RNA, 19 nt, Artificial Sequence
  Description of Artificial Sequence: Synthetic oligonucleotide
uucuuaaagaaugcaucaa

SEQ ID NO: 2803000 - RNA, 19 nt, Artificial Sequence
  Description of Artificial Sequence: Synthetic oligonucleotide
uggcuuucccucuuaaaau

SEQ ID NO: 2803001 - RNA, 19 nt, Artificial Sequence
  Description of Artificial Sequence: Synthetic oligonucleotide
cugucacuccaguaggggc

SEQ ID NO: 2803002 - RNA, 19 nt, Artificial Sequence
  Description of Artificial Sequence: Synthetic oligonucleotide
gaaagugcacccuggaggu

SEQ ID NO: 2803003 - RNA, 19 nt, Artificial Sequence
  Description of Artificial Sequence: Synthetic oligonucleotide
aggggcugcaccuucgucu

SEQ ID NO: 2803004 - RNA, 19 nt, Artificial Sequence
  Description of Artificial Sequence: Synthetic oligonucleotide
auacucagaaaacuucauu

SEQ ID NO: 2803005 - RNA, 19 nt, Artificial Sequence
  Description of Artificial Sequence: Synthetic oligonucleotide
ggcauucucuccuugguug

SEQ ID NO: 2803006 - RNA, 19 nt, Artificial Sequence
  Description of Artificial Sequence: Synthetic oligonucleotide
uggacccagugccaggcag

SEQ ID NO: 2803007 - RNA, 19 nt, Artificial Sequence
  Description of Artificial Sequence: Synthetic oligonucleotide
aagugcacccuggagguca

SEQ ID NO: 2803008 - RNA, 19 nt, Artificial Sequence
  Description of Artificial Sequence: Synthetic oligonucleotide
ucugaaugugggauuuaau

SEQ ID NO: 2803009 - RNA, 19 nt, Artificial Sequence
  Description of Artificial Sequence: Synthetic oligonucleotide
uuucgcuaguugugcauca

SEQ ID NO: 2803010 - RNA, 19 nt, Artificial Sequence
  Description of Artificial Sequence: Synthetic oligonucleotide
guaagcgugaagcugagau

SEQ ID NO: 2803011 - RNA, 19 nt, Artificial Sequence
  Description of Artificial Sequence: Synthetic oligonucleotide
cagagcauugaugaaggug

SEQ ID NO: 2803012 - RNA, 19 nt, Artificial Sequence
  Description of Artificial Sequence: Synthetic oligonucleotide
ccuguagagauuucgcuag

SEQ ID NO: 2803013 - RNA, 19 nt, Artificial Sequence
  Description of Artificial Sequence: Synthetic oligonucleotide
ugucaccugaggaagcuuu

SEQ ID NO: 2803014 - RNA, 19 nt, Artificial Sequence
  Description of Artificial Sequence: Synthetic oligonucleotide
gucauacucagaaaacuuc

SEQ ID NO: 2803015 - RNA, 19 nt, Artificial Sequence
  Description of Artificial Sequence: Synthetic oligonucleotide
uccuugguugucucuguca

SEQ ID NO: 2803016 - RNA, 19 nt, Artificial Sequence
  Description of Artificial Sequence: Synthetic oligonucleotide
uucccucuuaaaauucuua

SEQ ID NO: 2803017 - RNA, 19 nt, Artificial Sequence
  Description of Artificial Sequence: Synthetic oligonucleotide
uuguaagcgugaagcugag

SEQ ID NO: 2803018 - RNA, 19 nt, Artificial Sequence
  Description of Artificial Sequence: Synthetic oligonucleotide
ucaccugaggaagcuuugg

SEQ ID NO: 2803019 - RNA, 19 nt, Artificial Sequence
  Description of Artificial Sequence: Synthetic oligonucleotide
accuguagagauuucgcua

SEQ ID NO: 2803020 - RNA, 19 nt, Artificial Sequence
  Description of Artificial Sequence: Synthetic oligonucleotide
uggguauggcauucucucc

SEQ ID NO: 2803021 - RNA, 19 nt, Artificial Sequence
  Description of Artificial Sequence: Synthetic oligonucleotide
agauuucgcuaguugugca

SEQ ID NO: 2803022 - RNA, 19 nt, Artificial Sequence
  Description of Artificial Sequence: Synthetic oligonucleotide
augugggauuuaaucaagg

SEQ ID NO: 2803023 - RNA, 19 nt, Artificial Sequence
  Description of Artificial Sequence: Synthetic oligonucleotide
cagaaagugcacccuggag

SEQ ID NO: 2803024 - RNA, 19 nt, Artificial Sequence
  Description of Artificial Sequence: Synthetic oligonucleotide
caaggugaugguuuccuca

SEQ ID NO: 2803025 - RNA, 19 nt, Artificial Sequence
  Description of Artificial Sequence: Synthetic oligonucleotide
aguugugcaucauuuucuu

SEQ ID NO: 2803026 - RNA, 19 nt, Artificial Sequence
  Description of Artificial Sequence: Synthetic oligonucleotide
caccugaggaagcuuuggg

SEQ ID NO: 2803027 - RNA, 19 nt, Artificial Sequence
  Description of Artificial Sequence: Synthetic oligonucleotide
aggauuuggcuuucccucu

SEQ ID NO: 2803028 - RNA, 19 nt, Artificial Sequence
  Description of Artificial Sequence: Synthetic oligonucleotide
uuuggcuuucccucuuaaa

SEQ ID NO: 2803029 - RNA, 19 nt, Artificial Sequence
  Description of Artificial Sequence: Synthetic oligonucleotide
uucugaaugugggauuuaa

SEQ ID NO: 2803030 - RNA, 19 nt, Artificial Sequence
  Description of Artificial Sequence: Synthetic oligonucleotide
ucucagugcacuguggauu

SEQ ID NO: 2803031 - RNA, 19 nt, Artificial Sequence
  Description of Artificial Sequence: Synthetic oligonucleotide
aucaaggugaugguuuccu

SEQ ID NO: 2803032 - RNA, 19 nt, Artificial Sequence
  Description of Artificial Sequence: Synthetic oligonucleotide
gucuuuagguagcuuucug

SEQ ID NO: 2803033 - RNA, 19 nt, Artificial Sequence
  Description of Artificial Sequence: Synthetic oligonucleotide
ugauaacaaagaagucaua

SEQ ID NO: 2803034 - RNA, 19 nt, Artificial Sequence
  Description of Artificial Sequence: Synthetic oligonucleotide
ucucgaugucucucagugc

SEQ ID NO: 2803035 - RNA, 19 nt, Artificial Sequence
  Description of Artificial Sequence: Synthetic oligonucleotide
uuucccucuuaaaauucuu

SEQ ID NO: 2803036 - RNA, 19 nt, Artificial Sequence
  Description of Artificial Sequence: Synthetic oligonucleotide
cuuuagguagcuuucuggu

SEQ ID NO: 2803037 - RNA, 19 nt, Artificial Sequence
  Description of Artificial Sequence: Synthetic oligonucleotide
auggcauucucuccuuggu

SEQ ID NO: 2803038 - RNA, 19 nt, Artificial Sequence
  Description of Artificial Sequence: Synthetic oligonucleotide
ugucuuuagguagcuuucu

SEQ ID NO: 2803039 - RNA, 19 nt, Artificial Sequence
  Description of Artificial Sequence: Synthetic oligonucleotide
gcugagaugauaacaaaga

SEQ ID NO: 2803040 - RNA, 19 nt, Artificial Sequence
  Description of Artificial Sequence: Synthetic oligonucleotide
auugcagaaagugcacccu

SEQ ID NO: 2803041 - RNA, 19 nt, Artificial Sequence
  Description of Artificial Sequence: Synthetic oligonucleotide
ucucuccugucacagcaau

SEQ ID NO: 2803042 - RNA, 19 nt, Artificial Sequence
  Description of Artificial Sequence: Synthetic oligonucleotide
cccaucagagcauugauga

SEQ ID NO: 2803043 - RNA, 19 nt, Artificial Sequence
  Description of Artificial Sequence: Synthetic oligonucleotide
ugaggaagcuuugggugug

SEQ ID NO: 2803044 - RNA, 19 nt, Artificial Sequence
  Description of Artificial Sequence: Synthetic oligonucleotide
uccugcccuauccccauca

SEQ ID NO: 2803045 - RNA, 19 nt, Artificial Sequence
  Description of Artificial Sequence: Synthetic oligonucleotide
auugucaccugaggaagcu

SEQ ID NO: 2803046 - RNA, 19 nt, Artificial Sequence
  Description of Artificial Sequence: Synthetic oligonucleotide
agucauacucagaaaacuu

SEQ ID NO: 2803047 - RNA, 19 nt, Artificial Sequence
  Description of Artificial Sequence: Synthetic oligonucleotide
ucaaggugaugguuuccuc

SEQ ID NO: 2803048 - RNA, 19 nt, Artificial Sequence
  Description of Artificial Sequence: Synthetic oligonucleotide
cuccaguaggggcugcacc

SEQ ID NO: 2803049 - RNA, 19 nt, Artificial Sequence
  Description of Artificial Sequence: Synthetic oligonucleotide
aaagugcacccuggagguc

SEQ ID NO: 2803050 - RNA, 19 nt, Artificial Sequence
  Description of Artificial Sequence: Synthetic oligonucleotide
uccccaucagagcauugau

SEQ ID NO: 2803051 - RNA, 19 nt, Artificial Sequence
  Description of Artificial Sequence: Synthetic oligonucleotide
ucauugucuuuagguagcu

SEQ ID NO: 2803052 - RNA, 19 nt, Artificial Sequence
  Description of Artificial Sequence: Synthetic oligonucleotide
caaagaagucauacucaga

SEQ ID NO: 2803053 - RNA, 19 nt, Artificial Sequence
  Description of Artificial Sequence: Synthetic oligonucleotide
ucagagcauugaugaaggu

SEQ ID NO: 2803054 - RNA, 19 nt, Artificial Sequence
  Description of Artificial Sequence: Synthetic oligonucleotide
gugaagcugagaugauaac

SEQ ID NO: 2803055 - RNA, 19 nt, Artificial Sequence
  Description of Artificial Sequence: Synthetic oligonucleotide
gaccuguagagauuucgcu

SEQ ID NO: 2803056 - RNA, 19 nt, Artificial Sequence
  Description of Artificial Sequence: Synthetic oligonucleotide
ucuccuugguugucucugu

SEQ ID NO: 2803057 - RNA, 19 nt, Artificial Sequence
  Description of Artificial Sequence: Synthetic oligonucleotide
ucccugucucuccugucac

SEQ ID NO: 2803058 - RNA, 19 nt, Artificial Sequence
  Description of Artificial Sequence: Synthetic oligonucleotide
gaugaagguggacuucccu

SEQ ID NO: 2803059 - RNA, 19 nt, Artificial Sequence
  Description of Artificial Sequence: Synthetic oligonucleotide
ucgaugucucucagugcac

SEQ ID NO: 2803060 - RNA, 19 nt, Artificial Sequence
  Description of Artificial Sequence: Synthetic oligonucleotide
uucuggugggaaggaagug

SEQ ID NO: 2803061 - RNA, 19 nt, Artificial Sequence
  Description of Artificial Sequence: Synthetic oligonucleotide
guauggcauucucuccuug

SEQ ID NO: 2803062 - RNA, 19 nt, Artificial Sequence
  Description of Artificial Sequence: Synthetic oligonucleotide
uauccccaucagagcauug

SEQ ID NO: 2803063 - RNA, 19 nt, Artificial Sequence
  Description of Artificial Sequence: Synthetic oligonucleotide
aguaggggcugcaccuucg

SEQ ID NO: 2803064 - RNA, 19 nt, Artificial Sequence
  Description of Artificial Sequence: Synthetic oligonucleotide
gaagguggacuucccuguc

SEQ ID NO: 2803065 - RNA, 19 nt, Artificial Sequence
  Description of Artificial Sequence: Synthetic oligonucleotide
uggcauucucuccuugguu

SEQ ID NO: 2803066 - RNA, 19 nt, Artificial Sequence
  Description of Artificial Sequence: Synthetic oligonucleotide
uaagaccuguagagauuuc

SEQ ID NO: 2803067 - RNA, 19 nt, Artificial Sequence
  Description of Artificial Sequence: Synthetic oligonucleotide
cccauauugucaccugagg

SEQ ID NO: 2803068 - RNA, 19 nt, Artificial Sequence
  Description of Artificial Sequence: Synthetic oligonucleotide
gugaugguuuccucagaga

SEQ ID NO: 2803069 - RNA, 19 nt, Artificial Sequence
  Description of Artificial Sequence: Synthetic oligonucleotide
agugcacuguggauugcag

SEQ ID NO: 2803070 - RNA, 19 nt, Artificial Sequence
  Description of Artificial Sequence: Synthetic oligonucleotide
gucccauauugucaccuga

SEQ ID NO: 2803071 - RNA, 19 nt, Artificial Sequence
  Description of Artificial Sequence: Synthetic oligonucleotide
auccccaucagagcauuga

SEQ ID NO: 2803072 - RNA, 19 nt, Artificial Sequence
  Description of Artificial Sequence: Synthetic oligonucleotide
cucuccugucacagcaaug

SEQ ID NO: 2803073 - RNA, 19 nt, Artificial Sequence
  Description of Artificial Sequence: Synthetic oligonucleotide
aggucccauauugucaccu

SEQ ID NO: 2803074 - RNA, 19 nt, Artificial Sequence
  Description of Artificial Sequence: Synthetic oligonucleotide
ccuugguugucucugucac

SEQ ID NO: 2803075 - RNA, 19 nt, Artificial Sequence
  Description of Artificial Sequence: Synthetic oligonucleotide
ccauauugucaccugagga

SEQ ID NO: 2803076 - RNA, 19 nt, Artificial Sequence
  Description of Artificial Sequence: Synthetic oligonucleotide
ucgcuaguugugcaucauu

SEQ ID NO: 2803077 - RNA, 19 nt, Artificial Sequence
  Description of Artificial Sequence: Synthetic oligonucleotide
uucucuccuugguugucuc

SEQ ID NO: 2803078 - RNA, 19 nt, Artificial Sequence
  Description of Artificial Sequence: Synthetic oligonucleotide
uucgucuuccugcccuauc

SEQ ID NO: 2803079 - RNA, 19 nt, Artificial Sequence
  Description of Artificial Sequence: Synthetic oligonucleotide
gauuucgcuaguugugcau

SEQ ID NO: 2803080 - RNA, 19 nt, Artificial Sequence
  Description of Artificial Sequence: Synthetic oligonucleotide
cuuucccucuuaaaauucu

SEQ ID NO: 2803081 - RNA, 19 nt, Artificial Sequence
  Description of Artificial Sequence: Synthetic oligonucleotide
gaggaagcuuugggugugg

SEQ ID NO: 2803082 - RNA, 19 nt, Artificial Sequence
  Description of Artificial Sequence: Synthetic oligonucleotide
guggacuucccugucccug

SEQ ID NO: 2803083 - RNA, 19 nt, Artificial Sequence
  Description of Artificial Sequence: Synthetic oligonucleotide
augucucucagugcacugu

SEQ ID NO: 2803084 - RNA, 19 nt, Artificial Sequence
  Description of Artificial Sequence: Synthetic oligonucleotide
gucccugucucuccuguca

SEQ ID NO: 2803085 - RNA, 19 nt, Artificial Sequence
  Description of Artificial Sequence: Synthetic oligonucleotide
gucucucagugcacugugg

SEQ ID NO: 2803086 - RNA, 19 nt, Artificial Sequence
  Description of Artificial Sequence: Synthetic oligonucleotide
cagaaaacuucauugucuu

SEQ ID NO: 2803087 - RNA, 19 nt, Artificial Sequence
  Description of Artificial Sequence: Synthetic oligonucleotide
cugucucuccugucacagc

SEQ ID NO: 2803088 - RNA, 19 nt, Artificial Sequence
  Description of Artificial Sequence: Synthetic oligonucleotide
gugcacuguggauugcaga

SEQ ID NO: 2803089 - RNA, 19 nt, Artificial Sequence
  Description of Artificial Sequence: Synthetic oligonucleotide
uguaagcgugaagcugaga

SEQ ID NO: 2803090 - RNA, 19 nt, Artificial Sequence
  Description of Artificial Sequence: Synthetic oligonucleotide
aggugaugguuuccucaga

SEQ ID NO: 2803091 - RNA, 19 nt, Artificial Sequence
  Description of Artificial Sequence: Synthetic oligonucleotide
ggauuuaaucaaggugaug

SEQ ID NO: 2803092 - RNA, 19 nt, Artificial Sequence
  Description of Artificial Sequence: Synthetic oligonucleotide
ugcacccuggaggucauuu

SEQ ID NO: 2803093 - RNA, 19 nt, Artificial Sequence
  Description of Artificial Sequence: Synthetic oligonucleotide
gauuuggcuuucccucuua

SEQ ID NO: 2803094 - RNA, 19 nt, Artificial Sequence
  Description of Artificial Sequence: Synthetic oligonucleotide
gcaccuucgucuuccugcc

SEQ ID NO: 2803095 - RNA, 19 nt, Artificial Sequence
  Description of Artificial Sequence: Synthetic oligonucleotide
acuguggauugcagaaagu

SEQ ID NO: 2803096 - RNA, 19 nt, Artificial Sequence
  Description of Artificial Sequence: Synthetic oligonucleotide
ggucccauauugucaccug

SEQ ID NO: 2803097 - RNA, 19 nt, Artificial Sequence
  Description of Artificial Sequence: Synthetic oligonucleotide
gucaccugaggaagcuuug

SEQ ID NO: 2803098 - RNA, 19 nt, Artificial Sequence
  Description of Artificial Sequence: Synthetic oligonucleotide
cugaggaagcuuugggugu

SEQ ID NO: 2803099 - RNA, 19 nt, Artificial Sequence
  Description of Artificial Sequence: Synthetic oligonucleotide
uaggggcugcaccuucguc

SEQ ID NO: 2803100 - RNA, 19 nt, Artificial Sequence
  Description of Artificial Sequence: Synthetic oligonucleotide
cauacucagaaaacuucau

SEQ ID NO: 2803101 - RNA, 19 nt, Artificial Sequence
  Description of Artificial Sequence: Synthetic oligonucleotide
gcauugaugaagguggacu

SEQ ID NO: 2803102 - RNA, 19 nt, Artificial Sequence
  Description of Artificial Sequence: Synthetic oligonucleotide
uuucugaaugugggauuua

SEQ ID NO: 2803103 - RNA, 19 nt, Artificial Sequence
  Description of Artificial Sequence: Synthetic oligonucleotide
uggguguggguauggcauu

SEQ ID NO: 2803104 - RNA, 19 nt, Artificial Sequence
  Description of Artificial Sequence: Synthetic oligonucleotide
gucacuccaguaggggcug

SEQ ID NO: 2803105 - RNA, 19 nt, Artificial Sequence
  Description of Artificial Sequence: Synthetic oligonucleotide
gagcauugaugaaggugga

SEQ ID NO: 2803106 - RNA, 19 nt, Artificial Sequence
  Description of Artificial Sequence: Synthetic oligonucleotide
cuccuugguugucucuguc

SEQ ID NO: 2803107 - RNA, 19 nt, Artificial Sequence
  Description of Artificial Sequence: Synthetic oligonucleotide
ccugucucuccugucacag

SEQ ID NO: 2803108 - RNA, 19 nt, Artificial Sequence
  Description of Artificial Sequence: Synthetic oligonucleotide
ugucccugucucuccuguc

SEQ ID NO: 2803109 - RNA, 19 nt, Artificial Sequence
  Description of Artificial Sequence: Synthetic oligonucleotide
ucagugcacuguggauugc

SEQ ID NO: 2803110 - RNA, 19 nt, Artificial Sequence
  Description of Artificial Sequence: Synthetic oligonucleotide
cgugaagcugagaugauaa

SEQ ID NO: 2803111 - RNA, 19 nt, Artificial Sequence
  Description of Artificial Sequence: Synthetic oligonucleotide
uucgcuaguugugcaucau

SEQ ID NO: 2803112 - RNA, 19 nt, Artificial Sequence
  Description of Artificial Sequence: Synthetic oligonucleotide
ggguauggcauucucuccu

SEQ ID NO: 2803113 - RNA, 19 nt, Artificial Sequence
  Description of Artificial Sequence: Synthetic oligonucleotide
gcuuucccucuuaaaauuc

SEQ ID NO: 2803114 - RNA, 19 nt, Artificial Sequence
  Description of Artificial Sequence: Synthetic oligonucleotide
cccuauccccaucagagca

SEQ ID NO: 2803115 - RNA, 19 nt, Artificial Sequence
  Description of Artificial Sequence: Synthetic oligonucleotide
caguaggggcugcaccuuc

SEQ ID NO: 2803116 - RNA, 19 nt, Artificial Sequence
  Description of Artificial Sequence: Synthetic oligonucleotide
ggacccagugccaggcagg

SEQ ID NO: 2803117 - RNA, 19 nt, Artificial Sequence
  Description of Artificial Sequence: Synthetic oligonucleotide
ccccaucagagcauugaug

SEQ ID NO: 2803118 - RNA, 19 nt, Artificial Sequence
  Description of Artificial Sequence: Synthetic oligonucleotide
gcagaaagugcacccugga

SEQ ID NO: 2803119 - RNA, 19 nt, Artificial Sequence
  Description of Artificial Sequence: Synthetic oligonucleotide
cauucucuccuugguuguc

SEQ ID NO: 2803120 - RNA, 19 nt, Artificial Sequence
  Description of Artificial Sequence: Synthetic oligonucleotide
cugcccuauccccaucaga

SEQ ID NO: 2803121 - RNA, 19 nt, Artificial Sequence
  Description of Artificial Sequence: Synthetic oligonucleotide
gcccuauccccaucagagc

SEQ ID NO: 2803122 - RNA, 19 nt, Artificial Sequence
  Description of Artificial Sequence: Synthetic oligonucleotide
uugucaccugaggaagcuu

SEQ ID NO: 2803123 - RNA, 19 nt, Artificial Sequence
  Description of Artificial Sequence: Synthetic oligonucleotide
cagugcacuguggauugca

SEQ ID NO: 2803124 - RNA, 19 nt, Artificial Sequence
  Description of Artificial Sequence: Synthetic oligonucleotide
ggcuuucccucuuaaaauu

SEQ ID NO: 2803125 - RNA, 19 nt, Artificial Sequence
  Description of Artificial Sequence: Synthetic oligonucleotide
cuugguugucucugucacu

SEQ ID NO: 2803126 - RNA, 19 nt, Artificial Sequence
  Description of Artificial Sequence: Synthetic oligonucleotide
caccuucgucuuccugccc

SEQ ID NO: 2803127 - RNA, 19 nt, Artificial Sequence
  Description of Artificial Sequence: Synthetic oligonucleotide
uuccugcccuauccccauc

SEQ ID NO: 2803128 - RNA, 19 nt, Artificial Sequence
  Description of Artificial Sequence: Synthetic oligonucleotide
guugugcaucauuuucuuu

SEQ ID NO: 2803129 - RNA, 19 nt, Artificial Sequence
  Description of Artificial Sequence: Synthetic oligonucleotide
ucacuccaguaggggcugc

SEQ ID NO: 2803130 - RNA, 19 nt, Artificial Sequence
  Description of Artificial Sequence: Synthetic oligonucleotide
gugcaucauuuucuuugua

SEQ ID NO: 2803131 - RNA, 19 nt, Artificial Sequence
  Description of Artificial Sequence: Synthetic oligonucleotide
cucucagugcacuguggau

SEQ ID NO: 2803132 - RNA, 19 nt, Artificial Sequence
  Description of Artificial Sequence: Synthetic oligonucleotide
gcauucucuccuugguugu

SEQ ID NO: 2803133 - RNA, 19 nt, Artificial Sequence
  Description of Artificial Sequence: Synthetic oligonucleotide
cgucuuccugcccuauccc

SEQ ID NO: 2803134 - RNA, 19 nt, Artificial Sequence
  Description of Artificial Sequence: Synthetic oligonucleotide
gcuaguugugcaucauuuu

SEQ ID NO: 2803135 - RNA, 19 nt, Artificial Sequence
  Description of Artificial Sequence: Synthetic oligonucleotide
cuguagagauuucgcuagu

SEQ ID NO: 2803136 - RNA, 19 nt, Artificial Sequence
  Description of Artificial Sequence: Synthetic oligonucleotide
ggcgcucucgaugucucuc

SEQ ID NO: 2803137 - RNA, 19 nt, Artificial Sequence
  Description of Artificial Sequence: Synthetic oligonucleotide
gacccagugccaggcaggu

SEQ ID NO: 2803138 - RNA, 19 nt, Artificial Sequence
  Description of Artificial Sequence: Synthetic oligonucleotide
guaggggcugcaccuucgu

SEQ ID NO: 2803139 - RNA, 19 nt, Artificial Sequence
  Description of Artificial Sequence: Synthetic oligonucleotide
gcgcucucgaugucucuca

SEQ ID NO: 2803140 - RNA, 19 nt, Artificial Sequence
  Description of Artificial Sequence: Synthetic oligonucleotide
cugucccugucucuccugu

SEQ ID NO: 2803141 - RNA, 19 nt, Artificial Sequence
  Description of Artificial Sequence: Synthetic oligonucleotide
agcgugaagcugagaugau

SEQ ID NO: 2803142 - RNA, 19 nt, Artificial Sequence
  Description of Artificial Sequence: Synthetic oligonucleotide
ccugcccuauccccaucag

SEQ ID NO: 2803143 - RNA, 19 nt, Artificial Sequence
  Description of Artificial Sequence: Synthetic oligonucleotide
gggauuuaaucaaggugau

SEQ ID NO: 2803144 - RNA, 19 nt, Artificial Sequence
  Description of Artificial Sequence: Synthetic oligonucleotide
ggguguggguauggcauuc

SEQ ID NO: 2803145 - RNA, 19 nt, Artificial Sequence
  Description of Artificial Sequence: Synthetic oligonucleotide
ccaucagagcauugaugaa

SEQ ID NO: 2803146 - RNA, 19 nt, Artificial Sequence
  Description of Artificial Sequence: Synthetic oligonucleotide
agugcacccuggaggucau

SEQ ID NO: 2803147 - RNA, 19 nt, Artificial Sequence
  Description of Artificial Sequence: Synthetic oligonucleotide
gguauggcauucucuccuu

SEQ ID NO: 2803148 - RNA, 19 nt, Artificial Sequence
  Description of Artificial Sequence: Synthetic oligonucleotide
cacuccaguaggggcugca

SEQ ID NO: 2803149 - RNA, 19 nt, Artificial Sequence
  Description of Artificial Sequence: Synthetic oligonucleotide
gcacuguggauugcagaaa

SEQ ID NO: 2803150 - RNA, 19 nt, Artificial Sequence
  Description of Artificial Sequence: Synthetic oligonucleotide
gcgugaagcugagaugaua

SEQ ID NO: 2803151 - RNA, 19 nt, Artificial Sequence
  Description of Artificial Sequence: Synthetic oligonucleotide
cuauccccaucagagcauu

SEQ ID NO: 2803152 - RNA, 19 nt, Artificial Sequence
  Description of Artificial Sequence: Synthetic oligonucleotide
ggauuuggcuuucccucuu

SEQ ID NO: 2803153 - RNA, 19 nt, Artificial Sequence
  Description of Artificial Sequence: Synthetic oligonucleotide
cgcucucgaugucucucag

SEQ ID NO: 2803154 - RNA, 19 nt, Artificial Sequence
  Description of Artificial Sequence: Synthetic oligonucleotide
ggggcgcucucgaugucuc

SEQ ID NO: 2803155 - RNA, 19 nt, Artificial Sequence
  Description of Artificial Sequence: Synthetic oligonucleotide
gcucucgaugucucucagu

SEQ ID NO: 2803156 - RNA, 19 nt, Artificial Sequence
  Description of Artificial Sequence: Synthetic oligonucleotide
cgcuaguugugcaucauuu

SEQ ID NO: 2803157 - RNA, 19 nt, Artificial Sequence
  Description of Artificial Sequence: Synthetic oligonucleotide
gguggacuucccugucccu

SEQ ID NO: 2803158 - RNA, 19 nt, Artificial Sequence
  Description of Artificial Sequence: Synthetic oligonucleotide
cuccugucacagcaauguu

SEQ ID NO: 2803159 - RNA, 19 nt, Artificial Sequence
  Description of Artificial Sequence: Synthetic oligonucleotide
ccuauccccaucagagcau

SEQ ID NO: 2803160 - RNA, 19 nt, Artificial Sequence
  Description of Artificial Sequence: Synthetic oligonucleotide
ccuucgucuuccugcccua

SEQ ID NO: 2803161 - RNA, 19 nt, Artificial Sequence
  Description of Artificial Sequence: Synthetic oligonucleotide
cuucgucuuccugcccuau

SEQ ID NO: 2803162 - RNA, 19 nt, Artificial Sequence
  Description of Artificial Sequence: Synthetic oligonucleotide
gggcugcaccuucgucuuc

SEQ ID NO: 2803163 - RNA, 19 nt, Artificial Sequence
  Description of Artificial Sequence: Synthetic oligonucleotide
gcacccuggaggucauuuu

SEQ ID NO: 2803164 - RNA, 19 nt, Artificial Sequence
  Description of Artificial Sequence: Synthetic oligonucleotide
cagugccaggcagguccca

SEQ ID NO: 2803165 - RNA, 19 nt, Artificial Sequence
  Description of Artificial Sequence: Synthetic oligonucleotide
gcugcaccuucgucuuccu

SEQ ID NO: 2803166 - RNA, 19 nt, Artificial Sequence
  Description of Artificial Sequence: Synthetic oligonucleotide
gggcgcucucgaugucucu

SEQ ID NO: 2803167 - RNA, 19 nt, Artificial Sequence
  Description of Artificial Sequence: Synthetic oligonucleotide
gugcacccuggaggucauu

SEQ ID NO: 2803168 - RNA, 19 nt, Artificial Sequence
  Description of Artificial Sequence: Synthetic oligonucleotide
aagacuaggccauugcccg

SEQ ID NO: 2803169 - RNA, 19 nt, Artificial Sequence
  Description of Artificial Sequence: Synthetic oligonucleotide
aagaugagccgacagcgcc

SEQ ID NO: 2803170 - RNA, 19 nt, Artificial Sequence
  Description of Artificial Sequence: Synthetic oligonucleotide
aaagggcaaggucagggcc

SEQ ID NO: 2803171 - RNA, 19 nt, Artificial Sequence
  Description of Artificial Sequence: Synthetic oligonucleotide
acuaaaagccuggacaucc

SEQ ID NO: 2803172 - RNA, 19 nt, Artificial Sequence
  Description of Artificial Sequence: Synthetic oligonucleotide
aagaccgagaccaagugcg

SEQ ID NO: 2803173 - RNA, 19 nt, Artificial Sequence
  Description of Artificial Sequence: Synthetic oligonucleotide
aagagcucgagcgauggcc

SEQ ID NO: 2803174 - RNA, 19 nt, Artificial Sequence
  Description of Artificial Sequence: Synthetic oligonucleotide
acuuccuagauuccagccc

SEQ ID NO: 2803175 - RNA, 19 nt, Artificial Sequence
  Description of Artificial Sequence: Synthetic oligonucleotide
ugggagaucggguaauucg

SEQ ID NO: 2803176 - RNA, 19 nt, Artificial Sequence
  Description of Artificial Sequence: Synthetic oligonucleotide
caugcuaggaagaggaagc

SEQ ID NO: 2803177 - RNA, 19 nt, Artificial Sequence
  Description of Artificial Sequence: Synthetic oligonucleotide
gaguagagacccgagaugg

SEQ ID NO: 2803178 - RNA, 19 nt, Artificial Sequence
  Description of Artificial Sequence: Synthetic oligonucleotide
uagauuccagcccugaaga

SEQ ID NO: 2803179 - RNA, 19 nt, Artificial Sequence
  Description of Artificial Sequence: Synthetic oligonucleotide
aaaagccuggacauccgcc

SEQ ID NO: 2803180 - RNA, 19 nt, Artificial Sequence
  Description of Artificial Sequence: Synthetic oligonucleotide
cuuguaacagaguuccggc

SEQ ID NO: 2803181 - RNA, 19 nt, Artificial Sequence
  Description of Artificial Sequence: Synthetic oligonucleotide
agcgacaacagccacacga

SEQ ID NO: 2803182 - RNA, 19 nt, Artificial Sequence
  Description of Artificial Sequence: Synthetic oligonucleotide
aauaggaggucagccaggg

SEQ ID NO: 2803183 - RNA, 19 nt, Artificial Sequence
  Description of Artificial Sequence: Synthetic oligonucleotide
ugaaggcccgacuaaaagc

SEQ ID NO: 2803184 - RNA, 19 nt, Artificial Sequence
  Description of Artificial Sequence: Synthetic oligonucleotide
uugaaggcccgacuaaaag

SEQ ID NO: 2803185 - RNA, 19 nt, Artificial Sequence
  Description of Artificial Sequence: Synthetic oligonucleotide
agaccaagugcgcacggcc

SEQ ID NO: 2803186 - RNA, 19 nt, Artificial Sequence
  Description of Artificial Sequence: Synthetic oligonucleotide
ucgagcgauggccacauag

SEQ ID NO: 2803187 - RNA, 19 nt, Artificial Sequence
  Description of Artificial Sequence: Synthetic oligonucleotide
caagacuaggccauugccc

SEQ ID NO: 2803188 - RNA, 19 nt, Artificial Sequence
  Description of Artificial Sequence: Synthetic oligonucleotide
gcugauacaugcuaggaag

SEQ ID NO: 2803189 - RNA, 19 nt, Artificial Sequence
  Description of Artificial Sequence: Synthetic oligonucleotide
uguaacagaguuccggcaa

SEQ ID NO: 2803190 - RNA, 19 nt, Artificial Sequence
  Description of Artificial Sequence: Synthetic oligonucleotide
acagaguuccggcaacggc

SEQ ID NO: 2803191 - RNA, 19 nt, Artificial Sequence
  Description of Artificial Sequence: Synthetic oligonucleotide
uggacauccgccuuguaac

SEQ ID NO: 2803192 - RNA, 19 nt, Artificial Sequence
  Description of Artificial Sequence: Synthetic oligonucleotide
ggagacacuggguugaagg

SEQ ID NO: 2803193 - RNA, 19 nt, Artificial Sequence
  Description of Artificial Sequence: Synthetic oligonucleotide
ggugguacuuccuagauuc

SEQ ID NO: 2803194 - RNA, 19 nt, Artificial Sequence
  Description of Artificial Sequence: Synthetic oligonucleotide
gaaggcccgacuaaaagcc

SEQ ID NO: 2803195 - RNA, 19 nt, Artificial Sequence
  Description of Artificial Sequence: Synthetic oligonucleotide
cuagauuccagcccugaag

SEQ ID NO: 2803196 - RNA, 19 nt, Artificial Sequence
  Description of Artificial Sequence: Synthetic oligonucleotide
agaucggguaauucguccg

SEQ ID NO: 2803197 - RNA, 19 nt, Artificial Sequence
  Description of Artificial Sequence: Synthetic oligonucleotide
cagaguuccggcaacggcc

SEQ ID NO: 2803198 - RNA, 19 nt, Artificial Sequence
  Description of Artificial Sequence: Synthetic oligonucleotide
ugaguagagacccgagaug

SEQ ID NO: 2803199 - RNA, 19 nt, Artificial Sequence
  Description of Artificial Sequence: Synthetic oligonucleotide
ucugcgugaggccuucagg

SEQ ID NO: 2803200 - RNA, 19 nt, Artificial Sequence
  Description of Artificial Sequence: Synthetic oligonucleotide
aaggucagggccaauagga

SEQ ID NO: 2803201 - RNA, 19 nt, Artificial Sequence
  Description of Artificial Sequence: Synthetic oligonucleotide
gagcgauggccacauagcg

SEQ ID NO: 2803202 - RNA, 19 nt, Artificial Sequence
  Description of Artificial Sequence: Synthetic oligonucleotide
uaauucguccggcugccag

SEQ ID NO: 2803203 - RNA, 19 nt, Artificial Sequence
  Description of Artificial Sequence: Synthetic oligonucleotide
auacaugcuaggaagagga

SEQ ID NO: 2803204 - RNA, 19 nt, Artificial Sequence
  Description of Artificial Sequence: Synthetic oligonucleotide
ugauacaugcuaggaagag

SEQ ID NO: 2803205 - RNA, 19 nt, Artificial Sequence
  Description of Artificial Sequence: Synthetic oligonucleotide
uccggcaacggcccaaccg

SEQ ID NO: 2803206 - RNA, 19 nt, Artificial Sequence
  Description of Artificial Sequence: Synthetic oligonucleotide
cugcgugaggccuucaggg

SEQ ID NO: 2803207 - RNA, 19 nt, Artificial Sequence
  Description of Artificial Sequence: Synthetic oligonucleotide
ggaagaugagccgacagcg

SEQ ID NO: 2803208 - RNA, 19 nt, Artificial Sequence
  Description of Artificial Sequence: Synthetic oligonucleotide
gaacggaggugggagaucg

SEQ ID NO: 2803209 - RNA, 19 nt, Artificial Sequence
  Description of Artificial Sequence: Synthetic oligonucleotide
agacacuggguugaaggcc

SEQ ID NO: 2803210 - RNA, 19 nt, Artificial Sequence
  Description of Artificial Sequence: Synthetic oligonucleotide
gaagaccgagaccaagugc

SEQ ID NO: 2803211 - RNA, 19 nt, Artificial Sequence
  Description of Artificial Sequence: Synthetic oligonucleotide
uaaaagccuggacauccgc

SEQ ID NO: 2803212 - RNA, 19 nt, Artificial Sequence
  Description of Artificial Sequence: Synthetic oligonucleotide
cacacgaagaccgagacca

SEQ ID NO: 2803213 - RNA, 19 nt, Artificial Sequence
  Description of Artificial Sequence: Synthetic oligonucleotide
agcaggugaacggaggugg

SEQ ID NO: 2803214 - RNA, 19 nt, Artificial Sequence
  Description of Artificial Sequence: Synthetic oligonucleotide
gaucggguaauucguccgg

SEQ ID NO: 2803215 - RNA, 19 nt, Artificial Sequence
  Description of Artificial Sequence: Synthetic oligonucleotide
gagaucggguaauucgucc

SEQ ID NO: 2803216 - RNA, 19 nt, Artificial Sequence
  Description of Artificial Sequence: Synthetic oligonucleotide
uccgccuuguaacagaguu

SEQ ID NO: 2803217 - RNA, 19 nt, Artificial Sequence
  Description of Artificial Sequence: Synthetic oligonucleotide
gagauggcucggcaggugg

SEQ ID NO: 2803218 - RNA, 19 nt, Artificial Sequence
  Description of Artificial Sequence: Synthetic oligonucleotide
gauuccagcccugaagagc

SEQ ID NO: 2803219 - RNA, 19 nt, Artificial Sequence
  Description of Artificial Sequence: Synthetic oligonucleotide
agagacccgagauggcucg

SEQ ID NO: 2803220 - RNA, 19 nt, Artificial Sequence
  Description of Artificial Sequence: Synthetic oligonucleotide
uggagcaggugaacggagg

SEQ ID NO: 2803221 - RNA, 19 nt, Artificial Sequence
  Description of Artificial Sequence: Synthetic oligonucleotide
acaugcuaggaagaggaag

SEQ ID NO: 2803222 - RNA, 19 nt, Artificial Sequence
  Description of Artificial Sequence: Synthetic oligonucleotide
cuaaaagccuggacauccg

SEQ ID NO: 2803223 - RNA, 19 nt, Artificial Sequence
  Description of Artificial Sequence: Synthetic oligonucleotide
aauucguccggcugccaga

SEQ ID NO: 2803224 - RNA, 19 nt, Artificial Sequence
  Description of Artificial Sequence: Synthetic oligonucleotide
accgagaccaagugcgcac

SEQ ID NO: 2803225 - RNA, 19 nt, Artificial Sequence
  Description of Artificial Sequence: Synthetic oligonucleotide
gaugggguggccaagacua

SEQ ID NO: 2803226 - RNA, 19 nt, Artificial Sequence
  Description of Artificial Sequence: Synthetic oligonucleotide
uuguaacagaguuccggca

SEQ ID NO: 2803227 - RNA, 19 nt, Artificial Sequence
  Description of Artificial Sequence: Synthetic oligonucleotide
gacacuggguugaaggccc

SEQ ID NO: 2803228 - RNA, 19 nt, Artificial Sequence
  Description of Artificial Sequence: Synthetic oligonucleotide
uagcgguccgcgcugauac

SEQ ID NO: 2803229 - RNA, 19 nt, Artificial Sequence
  Description of Artificial Sequence: Synthetic oligonucleotide
ucagggagacacuggguug

SEQ ID NO: 2803230 - RNA, 19 nt, Artificial Sequence
  Description of Artificial Sequence: Synthetic oligonucleotide
gaaaaggagcgcaggcagg

SEQ ID NO: 2803231 - RNA, 19 nt, Artificial Sequence
  Description of Artificial Sequence: Synthetic oligonucleotide
agggaagaugagccgacag

SEQ ID NO: 2803232 - RNA, 19 nt, Artificial Sequence
  Description of Artificial Sequence: Synthetic oligonucleotide
uaacagaguuccggcaacg

SEQ ID NO: 2803233 - RNA, 19 nt, Artificial Sequence
  Description of Artificial Sequence: Synthetic oligonucleotide
caaagggcaaggucagggc

SEQ ID NO: 2803234 - RNA, 19 nt, Artificial Sequence
  Description of Artificial Sequence: Synthetic oligonucleotide
aaaggagcgcaggcagggc

SEQ ID NO: 2803235 - RNA, 19 nt, Artificial Sequence
  Description of Artificial Sequence: Synthetic oligonucleotide
caauaggaggucagccagg

SEQ ID NO: 2803236 - RNA, 19 nt, Artificial Sequence
  Description of Artificial Sequence: Synthetic oligonucleotide
gacaacagccacacgaaga

SEQ ID NO: 2803237 - RNA, 19 nt, Artificial Sequence
  Description of Artificial Sequence: Synthetic oligonucleotide
aggaagccggcguggaagg

SEQ ID NO: 2803238 - RNA, 19 nt, Artificial Sequence
  Description of Artificial Sequence: Synthetic oligonucleotide
guacuuccuagauuccagc

SEQ ID NO: 2803239 - RNA, 19 nt, Artificial Sequence
  Description of Artificial Sequence: Synthetic oligonucleotide
agugcgcacggccaggugu

SEQ ID NO: 2803240 - RNA, 19 nt, Artificial Sequence
  Description of Artificial Sequence: Synthetic oligonucleotide
uggguugaaggcccgacua

SEQ ID NO: 2803241 - RNA, 19 nt, Artificial Sequence
  Description of Artificial Sequence: Synthetic oligonucleotide
ucagggaagaugagccgac

SEQ ID NO: 2803242 - RNA, 19 nt, Artificial Sequence
  Description of Artificial Sequence: Synthetic oligonucleotide
gaggccuucagggaagaug

SEQ ID NO: 2803243 - RNA, 19 nt, Artificial Sequence
  Description of Artificial Sequence: Synthetic oligonucleotide
agacuaggccauugcccgc

SEQ ID NO: 2803244 - RNA, 19 nt, Artificial Sequence
  Description of Artificial Sequence: Synthetic oligonucleotide
gccauugcccgccagaccc

SEQ ID NO: 2803245 - RNA, 19 nt, Artificial Sequence
  Description of Artificial Sequence: Synthetic oligonucleotide
aucggguaauucguccggc

SEQ ID NO: 2803246 - RNA, 19 nt, Artificial Sequence
  Description of Artificial Sequence: Synthetic oligonucleotide
caacuggagcaggugaacg

SEQ ID NO: 2803247 - RNA, 19 nt, Artificial Sequence
  Description of Artificial Sequence: Synthetic oligonucleotide
guaacagaguuccggcaac

SEQ ID NO: 2803248 - RNA, 19 nt, Artificial Sequence
  Description of Artificial Sequence: Synthetic oligonucleotide
ugguacuuccuagauucca

SEQ ID NO: 2803249 - RNA, 19 nt, Artificial Sequence
  Description of Artificial Sequence: Synthetic oligonucleotide
cugcaaagggcaaggucag

SEQ ID NO: 2803250 - RNA, 19 nt, Artificial Sequence
  Description of Artificial Sequence: Synthetic oligonucleotide
cauccgccuuguaacagag

SEQ ID NO: 2803251 - RNA, 19 nt, Artificial Sequence
  Description of Artificial Sequence: Synthetic oligonucleotide
gcaaagggcaaggucaggg

SEQ ID NO: 2803252 - RNA, 19 nt, Artificial Sequence
  Description of Artificial Sequence: Synthetic oligonucleotide
cucggcaggugguacuucc

SEQ ID NO: 2803253 - RNA, 19 nt, Artificial Sequence
  Description of Artificial Sequence: Synthetic oligonucleotide
uagagacccgagauggcuc

SEQ ID NO: 2803254 - RNA, 19 nt, Artificial Sequence
  Description of Artificial Sequence: Synthetic oligonucleotide
gcugcaaagggcaagguca

SEQ ID NO: 2803255 - RNA, 19 nt, Artificial Sequence
  Description of Artificial Sequence: Synthetic oligonucleotide
uguggagggccgccgcccg

SEQ ID NO: 2803256 - RNA, 19 nt, Artificial Sequence
  Description of Artificial Sequence: Synthetic oligonucleotide
ccuuguaacagaguuccgg

SEQ ID NO: 2803257 - RNA, 19 nt, Artificial Sequence
  Description of Artificial Sequence: Synthetic oligonucleotide
accaagugcgcacggccag

SEQ ID NO: 2803258 - RNA, 19 nt, Artificial Sequence
  Description of Artificial Sequence: Synthetic oligonucleotide
gccaccaucagggagacac

SEQ ID NO: 2803259 - RNA, 19 nt, Artificial Sequence
  Description of Artificial Sequence: Synthetic oligonucleotide
ccaauaggaggucagccag

SEQ ID NO: 2803260 - RNA, 19 nt, Artificial Sequence
  Description of Artificial Sequence: Synthetic oligonucleotide
gaagaugagccgacagcgc

SEQ ID NO: 2803261 - RNA, 19 nt, Artificial Sequence
  Description of Artificial Sequence: Synthetic oligonucleotide
gcugaaaaggagcgcaggc

SEQ ID NO: 2803262 - RNA, 19 nt, Artificial Sequence
  Description of Artificial Sequence: Synthetic oligonucleotide
uggaagagcucgagcgaug

SEQ ID NO: 2803263 - RNA, 19 nt, Artificial Sequence
  Description of Artificial Sequence: Synthetic oligonucleotide
cacagccaccaucagggag

SEQ ID NO: 2803264 - RNA, 19 nt, Artificial Sequence
  Description of Artificial Sequence: Synthetic oligonucleotide
acuggguugaaggcccgac

SEQ ID NO: 2803265 - RNA, 19 nt, Artificial Sequence
  Description of Artificial Sequence: Synthetic oligonucleotide
aagccggcguggaaggagg

SEQ ID NO: 2803266 - RNA, 19 nt, Artificial Sequence
  Description of Artificial Sequence: Synthetic oligonucleotide
uccgcgcugauacaugcua

SEQ ID NO: 2803267 - RNA, 19 nt, Artificial Sequence
  Description of Artificial Sequence: Synthetic oligonucleotide
agcgauggccacauagcgg

SEQ ID NO: 2803268 - RNA, 19 nt, Artificial Sequence
  Description of Artificial Sequence: Synthetic oligonucleotide
cugauacaugcuaggaaga

SEQ ID NO: 2803269 - RNA, 19 nt, Artificial Sequence
  Description of Artificial Sequence: Synthetic oligonucleotide
gaagccggcguggaaggag

SEQ ID NO: 2803270 - RNA, 19 nt, Artificial Sequence
  Description of Artificial Sequence: Synthetic oligonucleotide
ggguaauucguccggcugc

SEQ ID NO: 2803271 - RNA, 19 nt, Artificial Sequence
  Description of Artificial Sequence: Synthetic oligonucleotide
gguacuuccuagauuccag

SEQ ID NO: 2803272 - RNA, 19 nt, Artificial Sequence
  Description of Artificial Sequence: Synthetic oligonucleotide
gggaagaugagccgacagc

SEQ ID NO: 2803273 - RNA, 19 nt, Artificial Sequence
  Description of Artificial Sequence: Synthetic oligonucleotide
gacauccgccuuguaacag

SEQ ID NO: 2803274 - RNA, 19 nt, Artificial Sequence
  Description of Artificial Sequence: Synthetic oligonucleotide
acggaggugggagaucggg

SEQ ID NO: 2803275 - RNA, 19 nt, Artificial Sequence
  Description of Artificial Sequence: Synthetic oligonucleotide
ccgacuaaaagccuggaca

SEQ ID NO: 2803276 - RNA, 19 nt, Artificial Sequence
  Description of Artificial Sequence: Synthetic oligonucleotide
ccaucagggagacacuggg

SEQ ID NO: 2803277 - RNA, 19 nt, Artificial Sequence
  Description of Artificial Sequence: Synthetic oligonucleotide
agaugagccgacagcgccg

SEQ ID NO: 2803278 - RNA, 19 nt, Artificial Sequence
  Description of Artificial Sequence: Synthetic oligonucleotide
ugggguggccaagacuagg

SEQ ID NO: 2803279 - RNA, 19 nt, Artificial Sequence
  Description of Artificial Sequence: Synthetic oligonucleotide
ugcgugaggccuucaggga

SEQ ID NO: 2803280 - RNA, 19 nt, Artificial Sequence
  Description of Artificial Sequence: Synthetic oligonucleotide
ggaagagcucgagcgaugg

SEQ ID NO: 2803281 - RNA, 19 nt, Artificial Sequence
  Description of Artificial Sequence: Synthetic oligonucleotide
gacuaggccauugcccgcc

SEQ ID NO: 2803282 - RNA, 19 nt, Artificial Sequence
  Description of Artificial Sequence: Synthetic oligonucleotide
uacaugcuaggaagaggaa

SEQ ID NO: 2803283 - RNA, 19 nt, Artificial Sequence
  Description of Artificial Sequence: Synthetic oligonucleotide
aggccauugcccgccagac

SEQ ID NO: 2803284 - RNA, 19 nt, Artificial Sequence
  Description of Artificial Sequence: Synthetic oligonucleotide
agcgccgcuggccuucccg

SEQ ID NO: 2803285 - RNA, 19 nt, Artificial Sequence
  Description of Artificial Sequence: Synthetic oligonucleotide
gaugagccgacagcgccgc

SEQ ID NO: 2803286 - RNA, 19 nt, Artificial Sequence
  Description of Artificial Sequence: Synthetic oligonucleotide
agacccagcacagccacca

SEQ ID NO: 2803287 - RNA, 19 nt, Artificial Sequence
  Description of Artificial Sequence: Synthetic oligonucleotide
ucggguaauucguccggcu

SEQ ID NO: 2803288 - RNA, 19 nt, Artificial Sequence
  Description of Artificial Sequence: Synthetic oligonucleotide
gcaaggucagggccaauag

SEQ ID NO: 2803289 - RNA, 19 nt, Artificial Sequence
  Description of Artificial Sequence: Synthetic oligonucleotide
agaccgagaccaagugcgc

SEQ ID NO: 2803290 - RNA, 19 nt, Artificial Sequence
  Description of Artificial Sequence: Synthetic oligonucleotide
ugcaaagggcaaggucagg

SEQ ID NO: 2803291 - RNA, 19 nt, Artificial Sequence
  Description of Artificial Sequence: Synthetic oligonucleotide
ugagccgacagcgccgcug

SEQ ID NO: 2803292 - RNA, 19 nt, Artificial Sequence
  Description of Artificial Sequence: Synthetic oligonucleotide
cuuccuagauuccagcccu

SEQ ID NO: 2803293 - RNA, 19 nt, Artificial Sequence
  Description of Artificial Sequence: Synthetic oligonucleotide
acgaagaccgagaccaagu

SEQ ID NO: 2803294 - RNA, 19 nt, Artificial Sequence
  Description of Artificial Sequence: Synthetic oligonucleotide
uccggcugccagauggggu

SEQ ID NO: 2803295 - RNA, 19 nt, Artificial Sequence
  Description of Artificial Sequence: Synthetic oligonucleotide
uuccuagauuccagcccug

SEQ ID NO: 2803296 - RNA, 19 nt, Artificial Sequence
  Description of Artificial Sequence: Synthetic oligonucleotide
cugaaaaggagcgcaggca

SEQ ID NO: 2803297 - RNA, 19 nt, Artificial Sequence
  Description of Artificial Sequence: Synthetic oligonucleotide
agacccgagauggcucggc

SEQ ID NO: 2803298 - RNA, 19 nt, Artificial Sequence
  Description of Artificial Sequence: Synthetic oligonucleotide
cuggacauccgccuuguaa

SEQ ID NO: 2803299 - RNA, 19 nt, Artificial Sequence
  Description of Artificial Sequence: Synthetic oligonucleotide
ggcaggugguacuuccuag

SEQ ID NO: 2803300 - RNA, 19 nt, Artificial Sequence
  Description of Artificial Sequence: Synthetic oligonucleotide
cacgaagaccgagaccaag

SEQ ID NO: 2803301 - RNA, 19 nt, Artificial Sequence
  Description of Artificial Sequence: Synthetic oligonucleotide
cacggccagguguggaggg

SEQ ID NO: 2803302 - RNA, 19 nt, Artificial Sequence
  Description of Artificial Sequence: Synthetic oligonucleotide
uccuagauuccagcccuga

SEQ ID NO: 2803303 - RNA, 19 nt, Artificial Sequence
  Description of Artificial Sequence: Synthetic oligonucleotide
cacauagcgguccgcgcug

SEQ ID NO: 2803304 - RNA, 19 nt, Artificial Sequence
  Description of Artificial Sequence: Synthetic oligonucleotide
gguggccaagacuaggcca

SEQ ID NO: 2803305 - RNA, 19 nt, Artificial Sequence
  Description of Artificial Sequence: Synthetic oligonucleotide
gacuaaaagccuggacauc

SEQ ID NO: 2803306 - RNA, 19 nt, Artificial Sequence
  Description of Artificial Sequence: Synthetic oligonucleotide
gucugcgugaggccuucag

SEQ ID NO: 2803307 - RNA, 19 nt, Artificial Sequence
  Description of Artificial Sequence: Synthetic oligonucleotide
gagaccaagugcgcacggc

SEQ ID NO: 2803308 - RNA, 19 nt, Artificial Sequence
  Description of Artificial Sequence: Synthetic oligonucleotide
gaggcugaguagagacccg

SEQ ID NO: 2803309 - RNA, 19 nt, Artificial Sequence
  Description of Artificial Sequence: Synthetic oligonucleotide
agccuggacauccgccuug

SEQ ID NO: 2803310 - RNA, 19 nt, Artificial Sequence
  Description of Artificial Sequence: Synthetic oligonucleotide
cugaguagagacccgagau

SEQ ID NO: 2803311 - RNA, 19 nt, Artificial Sequence
  Description of Artificial Sequence: Synthetic oligonucleotide
caccaucagggagacacug

SEQ ID NO: 2803312 - RNA, 19 nt, Artificial Sequence
  Description of Artificial Sequence: Synthetic oligonucleotide
gguccgcgcugauacaugc

SEQ ID NO: 2803313 - RNA, 19 nt, Artificial Sequence
  Description of Artificial Sequence: Synthetic oligonucleotide
gguaauucguccggcugcc

SEQ ID NO: 2803314 - RNA, 19 nt, Artificial Sequence
  Description of Artificial Sequence: Synthetic oligonucleotide
aagugcgcacggccaggug

SEQ ID NO: 2803315 - RNA, 19 nt, Artificial Sequence
  Description of Artificial Sequence: Synthetic oligonucleotide
ugccagaugggguggccaa

SEQ ID NO: 2803316 - RNA, 19 nt, Artificial Sequence
  Description of Artificial Sequence: Synthetic oligonucleotide
gaaggaggcugaguagaga

SEQ ID NO: 2803317 - RNA, 19 nt, Artificial Sequence
  Description of Artificial Sequence: Synthetic oligonucleotide
gccaauaggaggucagcca

SEQ ID NO: 2803318 - RNA, 19 nt, Artificial Sequence
  Description of Artificial Sequence: Synthetic oligonucleotide
ucggcaggugguacuuccu

SEQ ID NO: 2803319 - RNA, 19 nt, Artificial Sequence
  Description of Artificial Sequence: Synthetic oligonucleotide
agagcucgagcgauggcca

SEQ ID NO: 2803320 - RNA, 19 nt, Artificial Sequence
  Description of Artificial Sequence: Synthetic oligonucleotide
aggugguacuuccuagauu

SEQ ID NO: 2803321 - RNA, 19 nt, Artificial Sequence
  Description of Artificial Sequence: Synthetic oligonucleotide
ggccaauaggaggucagcc

SEQ ID NO: 2803322 - RNA, 19 nt, Artificial Sequence
  Description of Artificial Sequence: Synthetic oligonucleotide
gaggugggagaucggguaa

SEQ ID NO: 2803323 - RNA, 19 nt, Artificial Sequence
  Description of Artificial Sequence: Synthetic oligonucleotide
agggccaauaggaggucag

SEQ ID NO: 2803324 - RNA, 19 nt, Artificial Sequence
  Description of Artificial Sequence: Synthetic oligonucleotide
cccgagauggcucggcagg

SEQ ID NO: 2803325 - RNA, 19 nt, Artificial Sequence
  Description of Artificial Sequence: Synthetic oligonucleotide
gcagcgacaacagccacac

SEQ ID NO: 2803326 - RNA, 19 nt, Artificial Sequence
  Description of Artificial Sequence: Synthetic oligonucleotide
aaggcccgacuaaaagccu

SEQ ID NO: 2803327 - RNA, 19 nt, Artificial Sequence
  Description of Artificial Sequence: Synthetic oligonucleotide
gaccaagugcgcacggcca

SEQ ID NO: 2803328 - RNA, 19 nt, Artificial Sequence
  Description of Artificial Sequence: Synthetic oligonucleotide
gagcagcgacaacagccac

SEQ ID NO: 2803329 - RNA, 19 nt, Artificial Sequence
  Description of Artificial Sequence: Synthetic oligonucleotide
ggaaggaggcugaguagag

SEQ ID NO: 2803330 - RNA, 19 nt, Artificial Sequence
  Description of Artificial Sequence: Synthetic oligonucleotide
ggccacauagcgguccgcg

SEQ ID NO: 2803331 - RNA, 19 nt, Artificial Sequence
  Description of Artificial Sequence: Synthetic oligonucleotide
gccacacgaagaccgagac

SEQ ID NO: 2803332 - RNA, 19 nt, Artificial Sequence
  Description of Artificial Sequence: Synthetic oligonucleotide
acggccagguguggagggc

SEQ ID NO: 2803333 - RNA, 19 nt, Artificial Sequence
  Description of Artificial Sequence: Synthetic oligonucleotide
cuucccgcggcccgcccgg

SEQ ID NO: 2803334 - RNA, 19 nt, Artificial Sequence
  Description of Artificial Sequence: Synthetic oligonucleotide
cgagcgauggccacauagc

SEQ ID NO: 2803335 - RNA, 19 nt, Artificial Sequence
  Description of Artificial Sequence: Synthetic oligonucleotide
gcgauggccacauagcggu

SEQ ID NO: 2803336 - RNA, 19 nt, Artificial Sequence
  Description of Artificial Sequence: Synthetic oligonucleotide
guugaaggcccgacuaaaa

SEQ ID NO: 2803337 - RNA, 19 nt, Artificial Sequence
  Description of Artificial Sequence: Synthetic oligonucleotide
aggcccgacuaaaagccug

SEQ ID NO: 2803338 - RNA, 19 nt, Artificial Sequence
  Description of Artificial Sequence: Synthetic oligonucleotide
aggcugaguagagacccga

SEQ ID NO: 2803339 - RNA, 19 nt, Artificial Sequence
  Description of Artificial Sequence: Synthetic oligonucleotide
agcagcgacaacagccaca

SEQ ID NO: 2803340 - RNA, 19 nt, Artificial Sequence
  Description of Artificial Sequence: Synthetic oligonucleotide
cagaugggguggccaagac

SEQ ID NO: 2803341 - RNA, 19 nt, Artificial Sequence
  Description of Artificial Sequence: Synthetic oligonucleotide
gacccgagauggcucggca

SEQ ID NO: 2803342 - RNA, 19 nt, Artificial Sequence
  Description of Artificial Sequence: Synthetic oligonucleotide
uggcucggcaggugguacu

SEQ ID NO: 2803343 - RNA, 19 nt, Artificial Sequence
  Description of Artificial Sequence: Synthetic oligonucleotide
ugaacggaggugggagauc

SEQ ID NO: 2803344 - RNA, 19 nt, Artificial Sequence
  Description of Artificial Sequence: Synthetic oligonucleotide
gaccgagaccaagugcgca

SEQ ID NO: 2803345 - RNA, 19 nt, Artificial Sequence
  Description of Artificial Sequence: Synthetic oligonucleotide
gugguacuuccuagauucc

SEQ ID NO: 2803346 - RNA, 19 nt, Artificial Sequence
  Description of Artificial Sequence: Synthetic oligonucleotide
agccacacgaagaccgaga

SEQ ID NO: 2803347 - RNA, 19 nt, Artificial Sequence
  Description of Artificial Sequence: Synthetic oligonucleotide
cagggagacacuggguuga

SEQ ID NO: 2803348 - RNA, 19 nt, Artificial Sequence
  Description of Artificial Sequence: Synthetic oligonucleotide
gcaggugguacuuccuaga

SEQ ID NO: 2803349 - RNA, 19 nt, Artificial Sequence
  Description of Artificial Sequence: Synthetic oligonucleotide
ggguggccaagacuaggcc

SEQ ID NO: 2803350 - RNA, 19 nt, Artificial Sequence
  Description of Artificial Sequence: Synthetic oligonucleotide
ggaggugggagaucgggua

SEQ ID NO: 2803351 - RNA, 19 nt, Artificial Sequence
  Description of Artificial Sequence: Synthetic oligonucleotide
auucguccggcugccagau

SEQ ID NO: 2803352 - RNA, 19 nt, Artificial Sequence
  Description of Artificial Sequence: Synthetic oligonucleotide
uuccggcaacggcccaacc

SEQ ID NO: 2803353 - RNA, 19 nt, Artificial Sequence
  Description of Artificial Sequence: Synthetic oligonucleotide
ggcccgacuaaaagccugg

SEQ ID NO: 2803354 - RNA, 19 nt, Artificial Sequence
  Description of Artificial Sequence: Synthetic oligonucleotide
gagcucgagcgauggccac

SEQ ID NO: 2803355 - RNA, 19 nt, Artificial Sequence
  Description of Artificial Sequence: Synthetic oligonucleotide
ggacauccgccuuguaaca

SEQ ID NO: 2803356 - RNA, 19 nt, Artificial Sequence
  Description of Artificial Sequence: Synthetic oligonucleotide
cagggccaggagcagcgac

SEQ ID NO: 2803357 - RNA, 19 nt, Artificial Sequence
  Description of Artificial Sequence: Synthetic oligonucleotide
gcuggaagagcucgagcga

SEQ ID NO: 2803358 - RNA, 19 nt, Artificial Sequence
  Description of Artificial Sequence: Synthetic oligonucleotide
cuaggccauugcccgccag

SEQ ID NO: 2803359 - RNA, 19 nt, Artificial Sequence
  Description of Artificial Sequence: Synthetic oligonucleotide
cauugcccgccagacccag

SEQ ID NO: 2803360 - RNA, 19 nt, Artificial Sequence
  Description of Artificial Sequence: Synthetic oligonucleotide
cagguguggagggccgccg

SEQ ID NO: 2803361 - RNA, 19 nt, Artificial Sequence
  Description of Artificial Sequence: Synthetic oligonucleotide
agcgcaggcagggccagga

SEQ ID NO: 2803362 - RNA, 19 nt, Artificial Sequence
  Description of Artificial Sequence: Synthetic oligonucleotide
cagccacacgaagaccgag

SEQ ID NO: 2803363 - RNA, 19 nt, Artificial Sequence
  Description of Artificial Sequence: Synthetic oligonucleotide
ggugaacggaggugggaga

SEQ ID NO: 2803364 - RNA, 19 nt, Artificial Sequence
  Description of Artificial Sequence: Synthetic oligonucleotide
ccggcugccagauggggug

SEQ ID NO: 2803365 - RNA, 19 nt, Artificial Sequence
  Description of Artificial Sequence: Synthetic oligonucleotide
gugggagaucggguaauuc

SEQ ID NO: 2803366 - RNA, 19 nt, Artificial Sequence
  Description of Artificial Sequence: Synthetic oligonucleotide
gcccggcugaaaaggagcg

SEQ ID NO: 2803367 - RNA, 19 nt, Artificial Sequence
  Description of Artificial Sequence: Synthetic oligonucleotide
cgcgcugauacaugcuagg

SEQ ID NO: 2803368 - RNA, 19 nt, Artificial Sequence
  Description of Artificial Sequence: Synthetic oligonucleotide
ucagggccaauaggagguc

SEQ ID NO: 2803369 - RNA, 19 nt, Artificial Sequence
  Description of Artificial Sequence: Synthetic oligonucleotide
gguguggagggccgccgcc

SEQ ID NO: 2803370 - RNA, 19 nt, Artificial Sequence
  Description of Artificial Sequence: Synthetic oligonucleotide
uucguccggcugccagaug

SEQ ID NO: 2803371 - RNA, 19 nt, Artificial Sequence
  Description of Artificial Sequence: Synthetic oligonucleotide
acacuggguugaaggcccg

SEQ ID NO: 2803372 - RNA, 19 nt, Artificial Sequence
  Description of Artificial Sequence: Synthetic oligonucleotide
gguugaaggcccgacuaaa

SEQ ID NO: 2803373 - RNA, 19 nt, Artificial Sequence
  Description of Artificial Sequence: Synthetic oligonucleotide
gacagcgccgcuggccuuc

SEQ ID NO: 2803374 - RNA, 19 nt, Artificial Sequence
  Description of Artificial Sequence: Synthetic oligonucleotide
cgaagaccgagaccaagug

SEQ ID NO: 2803375 - RNA, 19 nt, Artificial Sequence
  Description of Artificial Sequence: Synthetic oligonucleotide
guguggagggccgccgccc

SEQ ID NO: 2803376 - RNA, 19 nt, Artificial Sequence
  Description of Artificial Sequence: Synthetic oligonucleotide
agauggcucggcagguggu

SEQ ID NO: 2803377 - RNA, 19 nt, Artificial Sequence
  Description of Artificial Sequence: Synthetic oligonucleotide
ggagaucggguaauucguc

SEQ ID NO: 2803378 - RNA, 19 nt, Artificial Sequence
  Description of Artificial Sequence: Synthetic oligonucleotide
aggagcgcaggcagggcca

SEQ ID NO: 2803379 - RNA, 19 nt, Artificial Sequence
  Description of Artificial Sequence: Synthetic oligonucleotide
agcucgagcgauggccaca

SEQ ID NO: 2803380 - RNA, 19 nt, Artificial Sequence
  Description of Artificial Sequence: Synthetic oligonucleotide
gccacauagcgguccgcgc

SEQ ID NO: 2803381 - RNA, 19 nt, Artificial Sequence
  Description of Artificial Sequence: Synthetic oligonucleotide
cccgacuaaaagccuggac

SEQ ID NO: 2803382 - RNA, 19 nt, Artificial Sequence
  Description of Artificial Sequence: Synthetic oligonucleotide
aguuccggcaacggcccaa

SEQ ID NO: 2803383 - RNA, 19 nt, Artificial Sequence
  Description of Artificial Sequence: Synthetic oligonucleotide
augggguggccaagacuag

SEQ ID NO: 2803384 - RNA, 19 nt, Artificial Sequence
  Description of Artificial Sequence: Synthetic oligonucleotide
aggugggagaucggguaau

SEQ ID NO: 2803385 - RNA, 19 nt, Artificial Sequence
  Description of Artificial Sequence: Synthetic oligonucleotide
ggcugaguagagacccgag

SEQ ID NO: 2803386 - RNA, 19 nt, Artificial Sequence
  Description of Artificial Sequence: Synthetic oligonucleotide
gauggcucggcagguggua

SEQ ID NO: 2803387 - RNA, 19 nt, Artificial Sequence
  Description of Artificial Sequence: Synthetic oligonucleotide
gcaggugaacggagguggg

SEQ ID NO: 2803388 - RNA, 19 nt, Artificial Sequence
  Description of Artificial Sequence: Synthetic oligonucleotide
ugcccgccagacccagcac

SEQ ID NO: 2803389 - RNA, 19 nt, Artificial Sequence
  Description of Artificial Sequence: Synthetic oligonucleotide
ccgcgcugauacaugcuag

SEQ ID NO: 2803390 - RNA, 19 nt, Artificial Sequence
  Description of Artificial Sequence: Synthetic oligonucleotide
ggagcaggugaacggaggu

SEQ ID NO: 2803391 - RNA, 19 nt, Artificial Sequence
  Description of Artificial Sequence: Synthetic oligonucleotide
guuccggcaacggcccaac

SEQ ID NO: 2803392 - RNA, 19 nt, Artificial Sequence
  Description of Artificial Sequence: Synthetic oligonucleotide
guggagggccgccgcccgg

SEQ ID NO: 2803393 - RNA, 19 nt, Artificial Sequence
  Description of Artificial Sequence: Synthetic oligonucleotide
cccgccagacccagcacag

SEQ ID NO: 2803394 - RNA, 19 nt, Artificial Sequence
  Description of Artificial Sequence: Synthetic oligonucleotide
guggccaagacuaggccau

SEQ ID NO: 2803395 - RNA, 19 nt, Artificial Sequence
  Description of Artificial Sequence: Synthetic oligonucleotide
auagcgguccgcgcugaua

SEQ ID NO: 2803396 - RNA, 19 nt, Artificial Sequence
  Description of Artificial Sequence: Synthetic oligonucleotide
acauagcgguccgcgcuga

SEQ ID NO: 2803397 - RNA, 19 nt, Artificial Sequence
  Description of Artificial Sequence: Synthetic oligonucleotide
agcgguccgcgcugauaca

SEQ ID NO: 2803398 - RNA, 19 nt, Artificial Sequence
  Description of Artificial Sequence: Synthetic oligonucleotide
caucagggagacacugggu

SEQ ID NO: 2803399 - RNA, 19 nt, Artificial Sequence
  Description of Artificial Sequence: Synthetic oligonucleotide
gggagaucggguaauucgu

SEQ ID NO: 2803400 - RNA, 19 nt, Artificial Sequence
  Description of Artificial Sequence: Synthetic oligonucleotide
gcccggcuggaagagcucg

SEQ ID NO: 2803401 - RNA, 19 nt, Artificial Sequence
  Description of Artificial Sequence: Synthetic oligonucleotide
ggucagccagggccaacug

SEQ ID NO: 2803402 - RNA, 19 nt, Artificial Sequence
  Description of Artificial Sequence: Synthetic oligonucleotide
ggguugaaggcccgacuaa

SEQ ID NO: 2803403 - RNA, 19 nt, Artificial Sequence
  Description of Artificial Sequence: Synthetic oligonucleotide
cagccaccaucagggagac

SEQ ID NO: 2803404 - RNA, 19 nt, Artificial Sequence
  Description of Artificial Sequence: Synthetic oligonucleotide
cgcccggcugaaaaggagc

SEQ ID NO: 2803405 - RNA, 19 nt, Artificial Sequence
  Description of Artificial Sequence: Synthetic oligonucleotide
agggcaaggucagggccaa

SEQ ID NO: 2803406 - RNA, 19 nt, Artificial Sequence
  Description of Artificial Sequence: Synthetic oligonucleotide
ccaacuggagcaggugaac

SEQ ID NO: 2803407 - RNA, 19 nt, Artificial Sequence
  Description of Artificial Sequence: Synthetic oligonucleotide
ccgagaccaagugcgcacg

SEQ ID NO: 2803408 - RNA, 19 nt, Artificial Sequence
  Description of Artificial Sequence: Synthetic oligonucleotide
gcccgcccggcugaaaagg

SEQ ID NO: 2803409 - RNA, 19 nt, Artificial Sequence
  Description of Artificial Sequence: Synthetic oligonucleotide
ggccaagacuaggccauug

SEQ ID NO: 2803410 - RNA, 19 nt, Artificial Sequence
  Description of Artificial Sequence: Synthetic oligonucleotide
ccgccuuguaacagaguuc

SEQ ID NO: 2803411 - RNA, 19 nt, Artificial Sequence
  Description of Artificial Sequence: Synthetic oligonucleotide
ccggcaacggcccaaccga

SEQ ID NO: 2803412 - RNA, 19 nt, Artificial Sequence
  Description of Artificial Sequence: Synthetic oligonucleotide
cagcgacaacagccacacg

SEQ ID NO: 2803413 - RNA, 19 nt, Artificial Sequence
  Description of Artificial Sequence: Synthetic oligonucleotide
uggccacauagcgguccgc

SEQ ID NO: 2803414 - RNA, 19 nt, Artificial Sequence
  Description of Artificial Sequence: Synthetic oligonucleotide
caggugaacggagguggga

SEQ ID NO: 2803415 - RNA, 19 nt, Artificial Sequence
  Description of Artificial Sequence: Synthetic oligonucleotide
cggguaauucguccggcug

SEQ ID NO: 2803416 - RNA, 19 nt, Artificial Sequence
  Description of Artificial Sequence: Synthetic oligonucleotide
ggcaaggucagggccaaua

SEQ ID NO: 2803417 - RNA, 19 nt, Artificial Sequence
  Description of Artificial Sequence: Synthetic oligonucleotide
caggugguacuuccuagau

SEQ ID NO: 2803418 - RNA, 19 nt, Artificial Sequence
  Description of Artificial Sequence: Synthetic oligonucleotide
gugaacggaggugggagau

SEQ ID NO: 2803419 - RNA, 19 nt, Artificial Sequence
  Description of Artificial Sequence: Synthetic oligonucleotide
ugaggccuucagggaagau

SEQ ID NO: 2803420 - RNA, 19 nt, Artificial Sequence
  Description of Artificial Sequence: Synthetic oligonucleotide
ccggcugaaaaggagcgca

SEQ ID NO: 2803421 - RNA, 19 nt, Artificial Sequence
  Description of Artificial Sequence: Synthetic oligonucleotide
gccuuguaacagaguuccg

SEQ ID NO: 2803422 - RNA, 19 nt, Artificial Sequence
  Description of Artificial Sequence: Synthetic oligonucleotide
gcgacaacagccacacgaa

SEQ ID NO: 2803423 - RNA, 19 nt, Artificial Sequence
  Description of Artificial Sequence: Synthetic oligonucleotide
cuggguugaaggcccgacu

SEQ ID NO: 2803424 - RNA, 19 nt, Artificial Sequence
  Description of Artificial Sequence: Synthetic oligonucleotide
cugccagaugggguggcca

SEQ ID NO: 2803425 - RNA, 19 nt, Artificial Sequence
  Description of Artificial Sequence: Synthetic oligonucleotide
guaauucguccggcugcca

SEQ ID NO: 2803426 - RNA, 19 nt, Artificial Sequence
  Description of Artificial Sequence: Synthetic oligonucleotide
gccgccgcccggcuggaag

SEQ ID NO: 2803427 - RNA, 19 nt, Artificial Sequence
  Description of Artificial Sequence: Synthetic oligonucleotide
ggcccgcccggcugaaaag

SEQ ID NO: 2803428 - RNA, 19 nt, Artificial Sequence
  Description of Artificial Sequence: Synthetic oligonucleotide
gggagacacuggguugaag

SEQ ID NO: 2803429 - RNA, 19 nt, Artificial Sequence
  Description of Artificial Sequence: Synthetic oligonucleotide
cagggccaauaggagguca

SEQ ID NO: 2803430 - RNA, 19 nt, Artificial Sequence
  Description of Artificial Sequence: Synthetic oligonucleotide
acagucugcgugaggccuu

SEQ ID NO: 2803431 - RNA, 19 nt, Artificial Sequence
  Description of Artificial Sequence: Synthetic oligonucleotide
ggccagguguggagggccg

SEQ ID NO: 2803432 - RNA, 19 nt, Artificial Sequence
  Description of Artificial Sequence: Synthetic oligonucleotide
gccgacagcgccgcuggcc

SEQ ID NO: 2803433 - RNA, 19 nt, Artificial Sequence
  Description of Artificial Sequence: Synthetic oligonucleotide
gagcgcaggcagggccagg

SEQ ID NO: 2803434 - RNA, 19 nt, Artificial Sequence
  Description of Artificial Sequence: Synthetic oligonucleotide
gcccgccagacccagcaca

SEQ ID NO: 2803435 - RNA, 19 nt, Artificial Sequence
  Description of Artificial Sequence: Synthetic oligonucleotide
ccaagugcgcacggccagg

SEQ ID NO: 2803436 - RNA, 19 nt, Artificial Sequence
  Description of Artificial Sequence: Synthetic oligonucleotide
cagucugcgugaggccuuc

SEQ ID NO: 2803437 - RNA, 19 nt, Artificial Sequence
  Description of Artificial Sequence: Synthetic oligonucleotide
gcgcugauacaugcuagga

SEQ ID NO: 2803438 - RNA, 19 nt, Artificial Sequence
  Description of Artificial Sequence: Synthetic oligonucleotide
cgagaccaagugcgcacgg

SEQ ID NO: 2803439 - RNA, 19 nt, Artificial Sequence
  Description of Artificial Sequence: Synthetic oligonucleotide
ccgcccggcugaaaaggag

SEQ ID NO: 2803440 - RNA, 19 nt, Artificial Sequence
  Description of Artificial Sequence: Synthetic oligonucleotide
cgacuaaaagccuggacau

SEQ ID NO: 2803441 - RNA, 19 nt, Artificial Sequence
  Description of Artificial Sequence: Synthetic oligonucleotide
auccgccuuguaacagagu

SEQ ID NO: 2803442 - RNA, 19 nt, Artificial Sequence
  Description of Artificial Sequence: Synthetic oligonucleotide
gccagaugggguggccaag

SEQ ID NO: 2803443 - RNA, 19 nt, Artificial Sequence
  Description of Artificial Sequence: Synthetic oligonucleotide
cgcacggccagguguggag

SEQ ID NO: 2803444 - RNA, 19 nt, Artificial Sequence
  Description of Artificial Sequence: Synthetic oligonucleotide
gcgccgcuggccuucccgc

SEQ ID NO: 2803445 - RNA, 19 nt, Artificial Sequence
  Description of Artificial Sequence: Synthetic oligonucleotide
acacgaagaccgagaccaa

SEQ ID NO: 2803446 - RNA, 19 nt, Artificial Sequence
  Description of Artificial Sequence: Synthetic oligonucleotide
ccuucccgcggcccgcccg

SEQ ID NO: 2803447 - RNA, 19 nt, Artificial Sequence
  Description of Artificial Sequence: Synthetic oligonucleotide
ccuagauuccagcccugaa

SEQ ID NO: 2803448 - RNA, 19 nt, Artificial Sequence
  Description of Artificial Sequence: Synthetic oligonucleotide
ggcguggaaggaggcugag

SEQ ID NO: 2803449 - RNA, 19 nt, Artificial Sequence
  Description of Artificial Sequence: Synthetic oligonucleotide
ccagguguggagggccgcc

SEQ ID NO: 2803450 - RNA, 19 nt, Artificial Sequence
  Description of Artificial Sequence: Synthetic oligonucleotide
uggccaagacuaggccauu

SEQ ID NO: 2803451 - RNA, 19 nt, Artificial Sequence
  Description of Artificial Sequence: Synthetic oligonucleotide
gcugccagaugggguggcc

SEQ ID NO: 2803452 - RNA, 19 nt, Artificial Sequence
  Description of Artificial Sequence: Synthetic oligonucleotide
ccggcuggaagagcucgag

SEQ ID NO: 2803453 - RNA, 19 nt, Artificial Sequence
  Description of Artificial Sequence: Synthetic oligonucleotide
cccggcugaaaaggagcgc

SEQ ID NO: 2803454 - RNA, 19 nt, Artificial Sequence
  Description of Artificial Sequence: Synthetic oligonucleotide
ccacauagcgguccgcgcu

SEQ ID NO: 2803455 - RNA, 19 nt, Artificial Sequence
  Description of Artificial Sequence: Synthetic oligonucleotide
agucugcgugaggccuuca

SEQ ID NO: 2803456 - RNA, 19 nt, Artificial Sequence
  Description of Artificial Sequence: Synthetic oligonucleotide
ccagaugggguggccaaga

SEQ ID NO: 2803457 - RNA, 19 nt, Artificial Sequence
  Description of Artificial Sequence: Synthetic oligonucleotide
caagugcgcacggccaggu

SEQ ID NO: 2803458 - RNA, 19 nt, Artificial Sequence
  Description of Artificial Sequence: Synthetic oligonucleotide
cacuggguugaaggcccga

SEQ ID NO: 2803459 - RNA, 19 nt, Artificial Sequence
  Description of Artificial Sequence: Synthetic oligonucleotide
gcuggccuucccgcggccc

SEQ ID NO: 2803460 - RNA, 19 nt, Artificial Sequence
  Description of Artificial Sequence: Synthetic oligonucleotide
gccagguguggagggccgc

SEQ ID NO: 2803461 - RNA, 19 nt, Artificial Sequence
  Description of Artificial Sequence: Synthetic oligonucleotide
gacccagcacagccaccau

SEQ ID NO: 2803462 - RNA, 19 nt, Artificial Sequence
  Description of Artificial Sequence: Synthetic oligonucleotide
ggaagccggcguggaagga

SEQ ID NO: 2803463 - RNA, 19 nt, Artificial Sequence
  Description of Artificial Sequence: Synthetic oligonucleotide
ccauugcccgccagaccca

SEQ ID NO: 2803464 - RNA, 19 nt, Artificial Sequence
  Description of Artificial Sequence: Synthetic oligonucleotide
cgguccgcgcugauacaug

SEQ ID NO: 2803465 - RNA, 19 nt, Artificial Sequence
  Description of Artificial Sequence: Synthetic oligonucleotide
cggccagguguggagggcc

SEQ ID NO: 2803466 - RNA, 19 nt, Artificial Sequence
  Description of Artificial Sequence: Synthetic oligonucleotide
guccgcgcugauacaugcu

SEQ ID NO: 2803467 - RNA, 19 nt, Artificial Sequence
  Description of Artificial Sequence: Synthetic oligonucleotide
gcccgacuaaaagccugga

SEQ ID NO: 2803468 - RNA, 19 nt, Artificial Sequence
  Description of Artificial Sequence: Synthetic oligonucleotide
cgccgcuggccuucccgcg

SEQ ID NO: 2803469 - RNA, 19 nt, Artificial Sequence
  Description of Artificial Sequence: Synthetic oligonucleotide
ccgacagcgccgcuggccu

SEQ ID NO: 2803470 - RNA, 19 nt, Artificial Sequence
  Description of Artificial Sequence: Synthetic oligonucleotide
cccggcuggaagagcucga

SEQ ID NO: 2803471 - RNA, 19 nt, Artificial Sequence
  Description of Artificial Sequence: Synthetic oligonucleotide
gcucgagcgauggccacau

SEQ ID NO: 2803472 - RNA, 19 nt, Artificial Sequence
  Description of Artificial Sequence: Synthetic oligonucleotide
gcucggcaggugguacuuc

SEQ ID NO: 2803473 - RNA, 19 nt, Artificial Sequence
  Description of Artificial Sequence: Synthetic oligonucleotide
ccgccagacccagcacagc

SEQ ID NO: 2803474 - RNA, 19 nt, Artificial Sequence
  Description of Artificial Sequence: Synthetic oligonucleotide
ggugggagaucggguaauu

SEQ ID NO: 2803475 - RNA, 19 nt, Artificial Sequence
  Description of Artificial Sequence: Synthetic oligonucleotide
ccgcccggcuggaagagcu

SEQ ID NO: 2803476 - RNA, 19 nt, Artificial Sequence
  Description of Artificial Sequence: Synthetic oligonucleotide
ggccuucccgcggcccgcc

SEQ ID NO: 2803477 - RNA, 19 nt, Artificial Sequence
  Description of Artificial Sequence: Synthetic oligonucleotide
gcgguccgcgcugauacau

SEQ ID NO: 2803478 - RNA, 19 nt, Artificial Sequence
  Description of Artificial Sequence: Synthetic oligonucleotide
ccgccgcccggcuggaaga

SEQ ID NO: 2803479 - RNA, 19 nt, Artificial Sequence
  Description of Artificial Sequence: Synthetic oligonucleotide
ccaccaucagggagacacu

SEQ ID NO: 2803480 - RNA, 19 nt, Artificial Sequence
  Description of Artificial Sequence: Synthetic oligonucleotide
cggcguggaaggaggcuga

SEQ ID NO: 2803481 - RNA, 19 nt, Artificial Sequence
  Description of Artificial Sequence: Synthetic oligonucleotide
gccuggacauccgccuugu

SEQ ID NO: 2803482 - RNA, 19 nt, Artificial Sequence
  Description of Artificial Sequence: Synthetic oligonucleotide
cucgagcgauggccacaua

SEQ ID NO: 2803483 - RNA, 19 nt, Artificial Sequence
  Description of Artificial Sequence: Synthetic oligonucleotide
gcguggaaggaggcugagu

SEQ ID NO: 2803484 - RNA, 19 nt, Artificial Sequence
  Description of Artificial Sequence: Synthetic oligonucleotide
ggcucggcaggugguacuu

SEQ ID NO: 2803485 - RNA, 19 nt, Artificial Sequence
  Description of Artificial Sequence: Synthetic oligonucleotide
gccggcguggaaggaggcu

SEQ ID NO: 2803486 - RNA, 19 nt, Artificial Sequence
  Description of Artificial Sequence: Synthetic oligonucleotide
cgcccggcuggaagagcuc

SEQ ID NO: 2803487 - RNA, 19 nt, Artificial Sequence
  Description of Artificial Sequence: Synthetic oligonucleotide
ccgagauggcucggcaggu

SEQ ID NO: 2803488 - RNA, 19 nt, Artificial Sequence
  Description of Artificial Sequence: Synthetic oligonucleotide
cgccgcccggcuggaagag

SEQ ID NO: 2803489 - RNA, 19 nt, Artificial Sequence
  Description of Artificial Sequence: Synthetic oligonucleotide
ccuggacauccgccuugua

SEQ ID NO: 2803490 - RNA, 19 nt, Artificial Sequence
  Description of Artificial Sequence: Synthetic oligonucleotide
gcggcccgcccggcugaaa

SEQ ID NO: 2803491 - RNA, 19 nt, Artificial Sequence
  Description of Artificial Sequence: Synthetic oligonucleotide
ggccgccgcccggcuggaa

SEQ ID NO: 2803492 - RNA, 19 nt, Artificial Sequence
  Description of Artificial Sequence: Synthetic oligonucleotide
cgacagcgccgcuggccuu

SEQ ID NO: 2803493 - RNA, 19 nt, Artificial Sequence
  Description of Artificial Sequence: Synthetic oligonucleotide
cgcggcccgcccggcugaa

SEQ ID NO: 2803494 - RNA, 19 nt, Artificial Sequence
  Description of Artificial Sequence: Synthetic oligonucleotide
aaacaaaacaacuaugauc

SEQ ID NO: 2803495 - RNA, 19 nt, Artificial Sequence
  Description of Artificial Sequence: Synthetic oligonucleotide
ucuccaaagaacaaaauga

SEQ ID NO: 2803496 - RNA, 19 nt, Artificial Sequence
  Description of Artificial Sequence: Synthetic oligonucleotide
aacuuuaauaguuuacaag

SEQ ID NO: 2803497 - RNA, 19 nt, Artificial Sequence
  Description of Artificial Sequence: Synthetic oligonucleotide
acuuuaauaguuuacaagu

SEQ ID NO: 2803498 - RNA, 19 nt, Artificial Sequence
  Description of Artificial Sequence: Synthetic oligonucleotide
aguuaacugacacaggcac

SEQ ID NO: 2803499 - RNA, 19 nt, Artificial Sequence
  Description of Artificial Sequence: Synthetic oligonucleotide
auaguuuacaaguuaacug

SEQ ID NO: 2803500 - RNA, 19 nt, Artificial Sequence
  Description of Artificial Sequence: Synthetic oligonucleotide
agaacaaaaugaccaaagc

SEQ ID NO: 2803501 - RNA, 19 nt, Artificial Sequence
  Description of Artificial Sequence: Synthetic oligonucleotide
agcacagguacacaguucc

SEQ ID NO: 2803502 - RNA, 19 nt, Artificial Sequence
  Description of Artificial Sequence: Synthetic oligonucleotide
acagauaucacuccagcuc

SEQ ID NO: 2803503 - RNA, 19 nt, Artificial Sequence
  Description of Artificial Sequence: Synthetic oligonucleotide
uaguuuacaaguuaacuga

SEQ ID NO: 2803504 - RNA, 19 nt, Artificial Sequence
  Description of Artificial Sequence: Synthetic oligonucleotide
uuaauaguuuacaaguuaa

SEQ ID NO: 2803505 - RNA, 19 nt, Artificial Sequence
  Description of Artificial Sequence: Synthetic oligonucleotide
acaacuaugauccuuuuaa

SEQ ID NO: 2803506 - RNA, 19 nt, Artificial Sequence
  Description of Artificial Sequence: Synthetic oligonucleotide
uccaaagucgauuccaucc

SEQ ID NO: 2803507 - RNA, 19 nt, Artificial Sequence
  Description of Artificial Sequence: Synthetic oligonucleotide
uuuaauaguuuacaaguua

SEQ ID NO: 2803508 - RNA, 19 nt, Artificial Sequence
  Description of Artificial Sequence: Synthetic oligonucleotide
aaaugaccaaagcccaaac

SEQ ID NO: 2803509 - RNA, 19 nt, Artificial Sequence
  Description of Artificial Sequence: Synthetic oligonucleotide
cauuguguccuccaaaugc

SEQ ID NO: 2803510 - RNA, 19 nt, Artificial Sequence
  Description of Artificial Sequence: Synthetic oligonucleotide
aagucgauuccaucccucc

SEQ ID NO: 2803511 - RNA, 19 nt, Artificial Sequence
  Description of Artificial Sequence: Synthetic oligonucleotide
ugugaaucugugcacagga

SEQ ID NO: 2803512 - RNA, 19 nt, Artificial Sequence
  Description of Artificial Sequence: Synthetic oligonucleotide
cagagguuagcuuagcugc

SEQ ID NO: 2803513 - RNA, 19 nt, Artificial Sequence
  Description of Artificial Sequence: Synthetic oligonucleotide
aacugacacaggcacugcc

SEQ ID NO: 2803514 - RNA, 19 nt, Artificial Sequence
  Description of Artificial Sequence: Synthetic oligonucleotide
uccaaagaacaaaaugacc

SEQ ID NO: 2803515 - RNA, 19 nt, Artificial Sequence
  Description of Artificial Sequence: Synthetic oligonucleotide
ugauggucuccaaagaaca

SEQ ID NO: 2803516 - RNA, 19 nt, Artificial Sequence
  Description of Artificial Sequence: Synthetic oligonucleotide
ugggcuagaacagauauca

SEQ ID NO: 2803517 - RNA, 19 nt, Artificial Sequence
  Description of Artificial Sequence: Synthetic oligonucleotide
aaaugcugcuccaaagucg

SEQ ID NO: 2803518 - RNA, 19 nt, Artificial Sequence
  Description of Artificial Sequence: Synthetic oligonucleotide
ugaaucugugcacaggacu

SEQ ID NO: 2803519 - RNA, 19 nt, Artificial Sequence
  Description of Artificial Sequence: Synthetic oligonucleotide
uacuggacugcagugaugg

SEQ ID NO: 2803520 - RNA, 19 nt, Artificial Sequence
  Description of Artificial Sequence: Synthetic oligonucleotide
aaugaccaaagcccaaaca

SEQ ID NO: 2803521 - RNA, 19 nt, Artificial Sequence
  Description of Artificial Sequence: Synthetic oligonucleotide
auggauucuucauuguguc

SEQ ID NO: 2803522 - RNA, 19 nt, Artificial Sequence
  Description of Artificial Sequence: Synthetic oligonucleotide
uagcuuagcugcuugcugg

SEQ ID NO: 2803523 - RNA, 19 nt, Artificial Sequence
  Description of Artificial Sequence: Synthetic oligonucleotide
gauuaaguccuugugaauc

SEQ ID NO: 2803524 - RNA, 19 nt, Artificial Sequence
  Description of Artificial Sequence: Synthetic oligonucleotide
uuaacugacacaggcacug

SEQ ID NO: 2803525 - RNA, 19 nt, Artificial Sequence
  Description of Artificial Sequence: Synthetic oligonucleotide
aacagauaucacuccagcu

SEQ ID NO: 2803526 - RNA, 19 nt, Artificial Sequence
  Description of Artificial Sequence: Synthetic oligonucleotide
aauacuggacugcagugau

SEQ ID NO: 2803527 - RNA, 19 nt, Artificial Sequence
  Description of Artificial Sequence: Synthetic oligonucleotide
gucuccaaagaacaaaaug

SEQ ID NO: 2803528 - RNA, 19 nt, Artificial Sequence
  Description of Artificial Sequence: Synthetic oligonucleotide
uaauaguuuacaaguuaac

SEQ ID NO: 2803529 - RNA, 19 nt, Artificial Sequence
  Description of Artificial Sequence: Synthetic oligonucleotide
augaccaaagcccaaacaa

SEQ ID NO: 2803530 - RNA, 19 nt, Artificial Sequence
  Description of Artificial Sequence: Synthetic oligonucleotide
uggaauacuggacugcagu

SEQ ID NO: 2803531 - RNA, 19 nt, Artificial Sequence
  Description of Artificial Sequence: Synthetic oligonucleotide
aaugauaagcuggaauacu

SEQ ID NO: 2803532 - RNA, 19 nt, Artificial Sequence
  Description of Artificial Sequence: Synthetic oligonucleotide
aguccuugugaaucugugc

SEQ ID NO: 2803533 - RNA, 19 nt, Artificial Sequence
  Description of Artificial Sequence: Synthetic oligonucleotide
auggauggauucuucauug

SEQ ID NO: 2803534 - RNA, 19 nt, Artificial Sequence
  Description of Artificial Sequence: Synthetic oligonucleotide
uuuuccaucagcacaggua

SEQ ID NO: 2803535 - RNA, 19 nt, Artificial Sequence
  Description of Artificial Sequence: Synthetic oligonucleotide
cuccaaagaacaaaaugac

SEQ ID NO: 2803536 - RNA, 19 nt, Artificial Sequence
  Description of Artificial Sequence: Synthetic oligonucleotide
ugacaggguaccacgacag

SEQ ID NO: 2803537 - RNA, 19 nt, Artificial Sequence
  Description of Artificial Sequence: Synthetic oligonucleotide
gaacagauaucacuccagc

SEQ ID NO: 2803538 - RNA, 19 nt, Artificial Sequence
  Description of Artificial Sequence: Synthetic oligonucleotide
accacgacagcccagauua

SEQ ID NO: 2803539 - RNA, 19 nt, Artificial Sequence
  Description of Artificial Sequence: Synthetic oligonucleotide
uccagcucaucugacaggg

SEQ ID NO: 2803540 - RNA, 19 nt, Artificial Sequence
  Description of Artificial Sequence: Synthetic oligonucleotide
uggacugcagugauggucu

SEQ ID NO: 2803541 - RNA, 19 nt, Artificial Sequence
  Description of Artificial Sequence: Synthetic oligonucleotide
uuagcuuagcugcuugcug

SEQ ID NO: 2803542 - RNA, 19 nt, Artificial Sequence
  Description of Artificial Sequence: Synthetic oligonucleotide
auuaaguccuugugaaucu

SEQ ID NO: 2803543 - RNA, 19 nt, Artificial Sequence
  Description of Artificial Sequence: Synthetic oligonucleotide
acagguacacaguuccagg

SEQ ID NO: 2803544 - RNA, 19 nt, Artificial Sequence
  Description of Artificial Sequence: Synthetic oligonucleotide
acaggguaccacgacagcc

SEQ ID NO: 2803545 - RNA, 19 nt, Artificial Sequence
  Description of Artificial Sequence: Synthetic oligonucleotide
aaaacaacuaugauccuuu

SEQ ID NO: 2803546 - RNA, 19 nt, Artificial Sequence
  Description of Artificial Sequence: Synthetic oligonucleotide
ugcuugcugggcuagaaca

SEQ ID NO: 2803547 - RNA, 19 nt, Artificial Sequence
  Description of Artificial Sequence: Synthetic oligonucleotide
gauaagcuggaauacugga

SEQ ID NO: 2803548 - RNA, 19 nt, Artificial Sequence
  Description of Artificial Sequence: Synthetic oligonucleotide
uccaacaauggauggauuc

SEQ ID NO: 2803549 - RNA, 19 nt, Artificial Sequence
  Description of Artificial Sequence: Synthetic oligonucleotide
ccaaagaacaaaaugacca

SEQ ID NO: 2803550 - RNA, 19 nt, Artificial Sequence
  Description of Artificial Sequence: Synthetic oligonucleotide
cuagaacagauaucacucc

SEQ ID NO: 2803551 - RNA, 19 nt, Artificial Sequence
  Description of Artificial Sequence: Synthetic oligonucleotide
uucauuguguccuccaaau

SEQ ID NO: 2803552 - RNA, 19 nt, Artificial Sequence
  Description of Artificial Sequence: Synthetic oligonucleotide
uuccaggcaaugauaagcu

SEQ ID NO: 2803553 - RNA, 19 nt, Artificial Sequence
  Description of Artificial Sequence: Synthetic oligonucleotide
gacagcccagauuaagucc

SEQ ID NO: 2803554 - RNA, 19 nt, Artificial Sequence
  Description of Artificial Sequence: Synthetic oligonucleotide
uguguccuccaaaugcugc

SEQ ID NO: 2803555 - RNA, 19 nt, Artificial Sequence
  Description of Artificial Sequence: Synthetic oligonucleotide
guuccaggcaaugauaagc

SEQ ID NO: 2803556 - RNA, 19 nt, Artificial Sequence
  Description of Artificial Sequence: Synthetic oligonucleotide
auaagcuggaauacuggac

SEQ ID NO: 2803557 - RNA, 19 nt, Artificial Sequence
  Description of Artificial Sequence: Synthetic oligonucleotide
aaagaacaaaaugaccaaa

SEQ ID NO: 2803558 - RNA, 19 nt, Artificial Sequence
  Description of Artificial Sequence: Synthetic oligonucleotide
aguuuacaaguuaacugac

SEQ ID NO: 2803559 - RNA, 19 nt, Artificial Sequence
  Description of Artificial Sequence: Synthetic oligonucleotide
agucgauuccaucccuccc

SEQ ID NO: 2803560 - RNA, 19 nt, Artificial Sequence
  Description of Artificial Sequence: Synthetic oligonucleotide
caucugacaggguaccacg

SEQ ID NO: 2803561 - RNA, 19 nt, Artificial Sequence
  Description of Artificial Sequence: Synthetic oligonucleotide
gucgauuccaucccucccg

SEQ ID NO: 2803562 - RNA, 19 nt, Artificial Sequence
  Description of Artificial Sequence: Synthetic oligonucleotide
aaugcugcuccaaagucga

SEQ ID NO: 2803563 - RNA, 19 nt, Artificial Sequence
  Description of Artificial Sequence: Synthetic oligonucleotide
aacaauggauggauucuuc

SEQ ID NO: 2803564 - RNA, 19 nt, Artificial Sequence
  Description of Artificial Sequence: Synthetic oligonucleotide
gaacuuuaauaguuuacaa

SEQ ID NO: 2803565 - RNA, 19 nt, Artificial Sequence
  Description of Artificial Sequence: Synthetic oligonucleotide
cacaggacuccaacaaugg

SEQ ID NO: 2803566 - RNA, 19 nt, Artificial Sequence
  Description of Artificial Sequence: Synthetic oligonucleotide
ugaccaaagcccaaacaaa

SEQ ID NO: 2803567 - RNA, 19 nt, Artificial Sequence
  Description of Artificial Sequence: Synthetic oligonucleotide
uggucuccaaagaacaaaa

SEQ ID NO: 2803568 - RNA, 19 nt, Artificial Sequence
  Description of Artificial Sequence: Synthetic oligonucleotide
caucagcacagguacacag

SEQ ID NO: 2803569 - RNA, 19 nt, Artificial Sequence
  Description of Artificial Sequence: Synthetic oligonucleotide
aaaaugaccaaagcccaaa

SEQ ID NO: 2803570 - RNA, 19 nt, Artificial Sequence
  Description of Artificial Sequence: Synthetic oligonucleotide
uaucacuccagcucaucug

SEQ ID NO: 2803571 - RNA, 19 nt, Artificial Sequence
  Description of Artificial Sequence: Synthetic oligonucleotide
agugauggucuccaaagaa

SEQ ID NO: 2803572 - RNA, 19 nt, Artificial Sequence
  Description of Artificial Sequence: Synthetic oligonucleotide
aagcuggaauacuggacug

SEQ ID NO: 2803573 - RNA, 19 nt, Artificial Sequence
  Description of Artificial Sequence: Synthetic oligonucleotide
auaucacuccagcucaucu

SEQ ID NO: 2803574 - RNA, 19 nt, Artificial Sequence
  Description of Artificial Sequence: Synthetic oligonucleotide
aaagucgauuccaucccuc

SEQ ID NO: 2803575 - RNA, 19 nt, Artificial Sequence
  Description of Artificial Sequence: Synthetic oligonucleotide
aucacuccagcucaucuga

SEQ ID NO: 2803576 - RNA, 19 nt, Artificial Sequence
  Description of Artificial Sequence: Synthetic oligonucleotide
guccuugugaaucugugca

SEQ ID NO: 2803577 - RNA, 19 nt, Artificial Sequence
  Description of Artificial Sequence: Synthetic oligonucleotide
ccaggcaaugauaagcugg

SEQ ID NO: 2803578 - RNA, 19 nt, Artificial Sequence
  Description of Artificial Sequence: Synthetic oligonucleotide
aacaacuaugauccuuuua

SEQ ID NO: 2803579 - RNA, 19 nt, Artificial Sequence
  Description of Artificial Sequence: Synthetic oligonucleotide
caaaugcugcuccaaaguc

SEQ ID NO: 2803580 - RNA, 19 nt, Artificial Sequence
  Description of Artificial Sequence: Synthetic oligonucleotide
cagauuaaguccuugugaa

SEQ ID NO: 2803581 - RNA, 19 nt, Artificial Sequence
  Description of Artificial Sequence: Synthetic oligonucleotide
cagguacacaguuccaggc

SEQ ID NO: 2803582 - RNA, 19 nt, Artificial Sequence
  Description of Artificial Sequence: Synthetic oligonucleotide
gcagugauggucuccaaag

SEQ ID NO: 2803583 - RNA, 19 nt, Artificial Sequence
  Description of Artificial Sequence: Synthetic oligonucleotide
gaaucugugcacaggacuc

SEQ ID NO: 2803584 - RNA, 19 nt, Artificial Sequence
  Description of Artificial Sequence: Synthetic oligonucleotide
ucagcacagguacacaguu

SEQ ID NO: 2803585 - RNA, 19 nt, Artificial Sequence
  Description of Artificial Sequence: Synthetic oligonucleotide
cuugugaaucugugcacag

SEQ ID NO: 2803586 - RNA, 19 nt, Artificial Sequence
  Description of Artificial Sequence: Synthetic oligonucleotide
caaugauaagcuggaauac

SEQ ID NO: 2803587 - RNA, 19 nt, Artificial Sequence
  Description of Artificial Sequence: Synthetic oligonucleotide
uugugaaucugugcacagg

SEQ ID NO: 2803588 - RNA, 19 nt, Artificial Sequence
  Description of Artificial Sequence: Synthetic oligonucleotide
caggguaccacgacagccc

SEQ ID NO: 2803589 - RNA, 19 nt, Artificial Sequence
  Description of Artificial Sequence: Synthetic oligonucleotide
accaaagcccaaacaaaac

SEQ ID NO: 2803590 - RNA, 19 nt, Artificial Sequence
  Description of Artificial Sequence: Synthetic oligonucleotide
agaacagauaucacuccag

SEQ ID NO: 2803591 - RNA, 19 nt, Artificial Sequence
  Description of Artificial Sequence: Synthetic oligonucleotide
ggaacuuuaauaguuuaca

SEQ ID NO: 2803592 - RNA, 19 nt, Artificial Sequence
  Description of Artificial Sequence: Synthetic oligonucleotide
ucuucauuguguccuccaa

SEQ ID NO: 2803593 - RNA, 19 nt, Artificial Sequence
  Description of Artificial Sequence: Synthetic oligonucleotide
agcuggaauacuggacugc

SEQ ID NO: 2803594 - RNA, 19 nt, Artificial Sequence
  Description of Artificial Sequence: Synthetic oligonucleotide
ucugacaggguaccacgac

SEQ ID NO: 2803595 - RNA, 19 nt, Artificial Sequence
  Description of Artificial Sequence: Synthetic oligonucleotide
cagauaucacuccagcuca

SEQ ID NO: 2803596 - RNA, 19 nt, Artificial Sequence
  Description of Artificial Sequence: Synthetic oligonucleotide
aggacuccaacaauggaug

SEQ ID NO: 2803597 - RNA, 19 nt, Artificial Sequence
  Description of Artificial Sequence: Synthetic oligonucleotide
gcaaugauaagcuggaaua

SEQ ID NO: 2803598 - RNA, 19 nt, Artificial Sequence
  Description of Artificial Sequence: Synthetic oligonucleotide
agcuuagcugcuugcuggg

SEQ ID NO: 2803599 - RNA, 19 nt, Artificial Sequence
  Description of Artificial Sequence: Synthetic oligonucleotide
gcuagaacagauaucacuc

SEQ ID NO: 2803600 - RNA, 19 nt, Artificial Sequence
  Description of Artificial Sequence: Synthetic oligonucleotide
ugcuccaaagucgauucca

SEQ ID NO: 2803601 - RNA, 19 nt, Artificial Sequence
  Description of Artificial Sequence: Synthetic oligonucleotide
aguuccaggcaaugauaag

SEQ ID NO: 2803602 - RNA, 19 nt, Artificial Sequence
  Description of Artificial Sequence: Synthetic oligonucleotide
aaguccuugugaaucugug

SEQ ID NO: 2803603 - RNA, 19 nt, Artificial Sequence
  Description of Artificial Sequence: Synthetic oligonucleotide
ugcagugauggucuccaaa

SEQ ID NO: 2803604 - RNA, 19 nt, Artificial Sequence
  Description of Artificial Sequence: Synthetic oligonucleotide
uuguguccuccaaaugcug

SEQ ID NO: 2803605 - RNA, 19 nt, Artificial Sequence
  Description of Artificial Sequence: Synthetic oligonucleotide
auuguguccuccaaaugcu

SEQ ID NO: 2803606 - RNA, 19 nt, Artificial Sequence
  Description of Artificial Sequence: Synthetic oligonucleotide
gaauacuggacugcaguga

SEQ ID NO: 2803607 - RNA, 19 nt, Artificial Sequence
  Description of Artificial Sequence: Synthetic oligonucleotide
ucgauuccaucccucccgc

SEQ ID NO: 2803608 - RNA, 19 nt, Artificial Sequence
  Description of Artificial Sequence: Synthetic oligonucleotide
ggaauacuggacugcagug

SEQ ID NO: 2803609 - RNA, 19 nt, Artificial Sequence
  Description of Artificial Sequence: Synthetic oligonucleotide
agcucaucugacaggguac

SEQ ID NO: 2803610 - RNA, 19 nt, Artificial Sequence
  Description of Artificial Sequence: Synthetic oligonucleotide
gauggauucuucauugugu

SEQ ID NO: 2803611 - RNA, 19 nt, Artificial Sequence
  Description of Artificial Sequence: Synthetic oligonucleotide
agguacacaguuccaggca

SEQ ID NO: 2803612 - RNA, 19 nt, Artificial Sequence
  Description of Artificial Sequence: Synthetic oligonucleotide
ggauggauucuucauugug

SEQ ID NO: 2803613 - RNA, 19 nt, Artificial Sequence
  Description of Artificial Sequence: Synthetic oligonucleotide
uccuugugaaucugugcac

SEQ ID NO: 2803614 - RNA, 19 nt, Artificial Sequence
  Description of Artificial Sequence: Synthetic oligonucleotide
uccgggaucccgcagcaaa

SEQ ID NO: 2803615 - RNA, 19 nt, Artificial Sequence
  Description of Artificial Sequence: Synthetic oligonucleotide
caucccucccgcuauccgc

SEQ ID NO: 2803616 - RNA, 19 nt, Artificial Sequence
  Description of Artificial Sequence: Synthetic oligonucleotide
cacagguacacaguuccag

SEQ ID NO: 2803617 - RNA, 19 nt, Artificial Sequence
  Description of Artificial Sequence: Synthetic oligonucleotide
cuauccgccccacuccggg

SEQ ID NO: 2803618 - RNA, 19 nt, Artificial Sequence
  Description of Artificial Sequence: Synthetic oligonucleotide
gaccaaagcccaaacaaaa

SEQ ID NO: 2803619 - RNA, 19 nt, Artificial Sequence
  Description of Artificial Sequence: Synthetic oligonucleotide
gugauggucuccaaagaac

SEQ ID NO: 2803620 - RNA, 19 nt, Artificial Sequence
  Description of Artificial Sequence: Synthetic oligonucleotide
agauuaaguccuugugaau

SEQ ID NO: 2803621 - RNA, 19 nt, Artificial Sequence
  Description of Artificial Sequence: Synthetic oligonucleotide
uacacaguuccaggcaaug

SEQ ID NO: 2803622 - RNA, 19 nt, Artificial Sequence
  Description of Artificial Sequence: Synthetic oligonucleotide
acuccaacaauggauggau

SEQ ID NO: 2803623 - RNA, 19 nt, Artificial Sequence
  Description of Artificial Sequence: Synthetic oligonucleotide
aaacaacuaugauccuuuu

SEQ ID NO: 2803624 - RNA, 19 nt, Artificial Sequence
  Description of Artificial Sequence: Synthetic oligonucleotide
ugcacaggacuccaacaau

SEQ ID NO: 2803625 - RNA, 19 nt, Artificial Sequence
  Description of Artificial Sequence: Synthetic oligonucleotide
gauucuucauuguguccuc

SEQ ID NO: 2803626 - RNA, 19 nt, Artificial Sequence
  Description of Artificial Sequence: Synthetic oligonucleotide
uccaggcaaugauaagcug

SEQ ID NO: 2803627 - RNA, 19 nt, Artificial Sequence
  Description of Artificial Sequence: Synthetic oligonucleotide
agguuagcuuagcugcuug

SEQ ID NO: 2803628 - RNA, 19 nt, Artificial Sequence
  Description of Artificial Sequence: Synthetic oligonucleotide
acaggacuccaacaaugga

SEQ ID NO: 2803629 - RNA, 19 nt, Artificial Sequence
  Description of Artificial Sequence: Synthetic oligonucleotide
acagcccagauuaaguccu

SEQ ID NO: 2803630 - RNA, 19 nt, Artificial Sequence
  Description of Artificial Sequence: Synthetic oligonucleotide
caggcaaugauaagcugga

SEQ ID NO: 2803631 - RNA, 19 nt, Artificial Sequence
  Description of Artificial Sequence: Synthetic oligonucleotide
cugacacaggcacugccac

SEQ ID NO: 2803632 - RNA, 19 nt, Artificial Sequence
  Description of Artificial Sequence: Synthetic oligonucleotide
uggauggauucuucauugu

SEQ ID NO: 2803633 - RNA, 19 nt, Artificial Sequence
  Description of Artificial Sequence: Synthetic oligonucleotide
gauuccaucccucccgcua

SEQ ID NO: 2803634 - RNA, 19 nt, Artificial Sequence
  Description of Artificial Sequence: Synthetic oligonucleotide
uuagcugcuugcugggcua

SEQ ID NO: 2803635 - RNA, 19 nt, Artificial Sequence
  Description of Artificial Sequence: Synthetic oligonucleotide
aucccucccgcuauccgcc

SEQ ID NO: 2803636 - RNA, 19 nt, Artificial Sequence
  Description of Artificial Sequence: Synthetic oligonucleotide
cuccagcucaucugacagg

SEQ ID NO: 2803637 - RNA, 19 nt, Artificial Sequence
  Description of Artificial Sequence: Synthetic oligonucleotide
auuccaucccucccgcuau

SEQ ID NO: 2803638 - RNA, 19 nt, Artificial Sequence
  Description of Artificial Sequence: Synthetic oligonucleotide
ccaaagucgauuccauccc

SEQ ID NO: 2803639 - RNA, 19 nt, Artificial Sequence
  Description of Artificial Sequence: Synthetic oligonucleotide
cuggacugcagugaugguc

SEQ ID NO: 2803640 - RNA, 19 nt, Artificial Sequence
  Description of Artificial Sequence: Synthetic oligonucleotide
uugcugggcuagaacagau

SEQ ID NO: 2803641 - RNA, 19 nt, Artificial Sequence
  Description of Artificial Sequence: Synthetic oligonucleotide
gacaggguaccacgacagc

SEQ ID NO: 2803642 - RNA, 19 nt, Artificial Sequence
  Description of Artificial Sequence: Synthetic oligonucleotide
guccuccaaaugcugcucc

SEQ ID NO: 2803643 - RNA, 19 nt, Artificial Sequence
  Description of Artificial Sequence: Synthetic oligonucleotide
ggacuccaacaauggaugg

SEQ ID NO: 2803644 - RNA, 19 nt, Artificial Sequence
  Description of Artificial Sequence: Synthetic oligonucleotide
caguuccaggcaaugauaa

SEQ ID NO: 2803645 - RNA, 19 nt, Artificial Sequence
  Description of Artificial Sequence: Synthetic oligonucleotide
uccuccaaaugcugcucca

SEQ ID NO: 2803646 - RNA, 19 nt, Artificial Sequence
  Description of Artificial Sequence: Synthetic oligonucleotide
uuccaucagcacagguaca

SEQ ID NO: 2803647 - RNA, 19 nt, Artificial Sequence
  Description of Artificial Sequence: Synthetic oligonucleotide
gcugcuccaaagucgauuc

SEQ ID NO: 2803648 - RNA, 19 nt, Artificial Sequence
  Description of Artificial Sequence: Synthetic oligonucleotide
cacgacagcccagauuaag

SEQ ID NO: 2803649 - RNA, 19 nt, Artificial Sequence
  Description of Artificial Sequence: Synthetic oligonucleotide
acugacacaggcacugcca

SEQ ID NO: 2803650 - RNA, 19 nt, Artificial Sequence
  Description of Artificial Sequence: Synthetic oligonucleotide
gacuccaacaauggaugga

SEQ ID NO: 2803651 - RNA, 19 nt, Artificial Sequence
  Description of Artificial Sequence: Synthetic oligonucleotide
ggcuagaacagauaucacu

SEQ ID NO: 2803652 - RNA, 19 nt, Artificial Sequence
  Description of Artificial Sequence: Synthetic oligonucleotide
gauaucacuccagcucauc

SEQ ID NO: 2803653 - RNA, 19 nt, Artificial Sequence
  Description of Artificial Sequence: Synthetic oligonucleotide
gguuagcuuagcugcuugc

SEQ ID NO: 2803654 - RNA, 19 nt, Artificial Sequence
  Description of Artificial Sequence: Synthetic oligonucleotide
cugggcuagaacagauauc

SEQ ID NO: 2803655 - RNA, 19 nt, Artificial Sequence
  Description of Artificial Sequence: Synthetic oligonucleotide
cuccaaagucgauuccauc

SEQ ID NO: 2803656 - RNA, 19 nt, Artificial Sequence
  Description of Artificial Sequence: Synthetic oligonucleotide
cacuccgggaucccgcagc

SEQ ID NO: 2803657 - RNA, 19 nt, Artificial Sequence
  Description of Artificial Sequence: Synthetic oligonucleotide
ccagauuaaguccuuguga

SEQ ID NO: 2803658 - RNA, 19 nt, Artificial Sequence
  Description of Artificial Sequence: Synthetic oligonucleotide
cugacaggguaccacgaca

SEQ ID NO: 2803659 - RNA, 19 nt, Artificial Sequence
  Description of Artificial Sequence: Synthetic oligonucleotide
caaacaaaacaacuaugau

SEQ ID NO: 2803660 - RNA, 19 nt, Artificial Sequence
  Description of Artificial Sequence: Synthetic oligonucleotide
agcccaaacaaaacaacua

SEQ ID NO: 2803661 - RNA, 19 nt, Artificial Sequence
  Description of Artificial Sequence: Synthetic oligonucleotide
ucacuccagcucaucugac

SEQ ID NO: 2803662 - RNA, 19 nt, Artificial Sequence
  Description of Artificial Sequence: Synthetic oligonucleotide
acgacagcccagauuaagu

SEQ ID NO: 2803663 - RNA, 19 nt, Artificial Sequence
  Description of Artificial Sequence: Synthetic oligonucleotide
caaaaugaccaaagcccaa

SEQ ID NO: 2803664 - RNA, 19 nt, Artificial Sequence
  Description of Artificial Sequence: Synthetic oligonucleotide
cuucauuguguccuccaaa

SEQ ID NO: 2803665 - RNA, 19 nt, Artificial Sequence
  Description of Artificial Sequence: Synthetic oligonucleotide
uaacugacacaggcacugc

SEQ ID NO: 2803666 - RNA, 19 nt, Artificial Sequence
  Description of Artificial Sequence: Synthetic oligonucleotide
aggguaccacgacagccca

SEQ ID NO: 2803667 - RNA, 19 nt, Artificial Sequence
  Description of Artificial Sequence: Synthetic oligonucleotide
uaccacgacagcccagauu

SEQ ID NO: 2803668 - RNA, 19 nt, Artificial Sequence
  Description of Artificial Sequence: Synthetic oligonucleotide
caggacuccaacaauggau

SEQ ID NO: 2803669 - RNA, 19 nt, Artificial Sequence
  Description of Artificial Sequence: Synthetic oligonucleotide
gguacacaguuccaggcaa

SEQ ID NO: 2803670 - RNA, 19 nt, Artificial Sequence
  Description of Artificial Sequence: Synthetic oligonucleotide
ugcugcuccaaagucgauu

SEQ ID NO: 2803671 - RNA, 19 nt, Artificial Sequence
  Description of Artificial Sequence: Synthetic oligonucleotide
gauggucuccaaagaacaa

SEQ ID NO: 2803672 - RNA, 19 nt, Artificial Sequence
  Description of Artificial Sequence: Synthetic oligonucleotide
acacaguuccaggcaauga

SEQ ID NO: 2803673 - RNA, 19 nt, Artificial Sequence
  Description of Artificial Sequence: Synthetic oligonucleotide
gacugcagugauggucucc

SEQ ID NO: 2803674 - RNA, 19 nt, Artificial Sequence
  Description of Artificial Sequence: Synthetic oligonucleotide
cccagauuaaguccuugug

SEQ ID NO: 2803675 - RNA, 19 nt, Artificial Sequence
  Description of Artificial Sequence: Synthetic oligonucleotide
acaggcacugccacuguga

SEQ ID NO: 2803676 - RNA, 19 nt, Artificial Sequence
  Description of Artificial Sequence: Synthetic oligonucleotide
ugcugggcuagaacagaua

SEQ ID NO: 2803677 - RNA, 19 nt, Artificial Sequence
  Description of Artificial Sequence: Synthetic oligonucleotide
uccaucccucccgcuaucc

SEQ ID NO: 2803678 - RNA, 19 nt, Artificial Sequence
  Description of Artificial Sequence: Synthetic oligonucleotide
agagguuagcuuagcugcu

SEQ ID NO: 2803679 - RNA, 19 nt, Artificial Sequence
  Description of Artificial Sequence: Synthetic oligonucleotide
cugcuccaaagucgauucc

SEQ ID NO: 2803680 - RNA, 19 nt, Artificial Sequence
  Description of Artificial Sequence: Synthetic oligonucleotide
cugcuugcugggcuagaac

SEQ ID NO: 2803681 - RNA, 19 nt, Artificial Sequence
  Description of Artificial Sequence: Synthetic oligonucleotide
cagcacagguacacaguuc

SEQ ID NO: 2803682 - RNA, 19 nt, Artificial Sequence
  Description of Artificial Sequence: Synthetic oligonucleotide
acuccgggaucccgcagca

SEQ ID NO: 2803683 - RNA, 19 nt, Artificial Sequence
  Description of Artificial Sequence: Synthetic oligonucleotide
acaguuccaggcaaugaua

SEQ ID NO: 2803684 - RNA, 19 nt, Artificial Sequence
  Description of Artificial Sequence: Synthetic oligonucleotide
cagugauggucuccaaaga

SEQ ID NO: 2803685 - RNA, 19 nt, Artificial Sequence
  Description of Artificial Sequence: Synthetic oligonucleotide
gugaaucugugcacaggac

SEQ ID NO: 2803686 - RNA, 19 nt, Artificial Sequence
  Description of Artificial Sequence: Synthetic oligonucleotide
ggcaaugauaagcuggaau

SEQ ID NO: 2803687 - RNA, 19 nt, Artificial Sequence
  Description of Artificial Sequence: Synthetic oligonucleotide
guuagcuuagcugcuugcu

SEQ ID NO: 2803688 - RNA, 19 nt, Artificial Sequence
  Description of Artificial Sequence: Synthetic oligonucleotide
cuuagcugcuugcugggcu

SEQ ID NO: 2803689 - RNA, 19 nt, Artificial Sequence
  Description of Artificial Sequence: Synthetic oligonucleotide
cuugcugggcuagaacaga

SEQ ID NO: 2803690 - RNA, 19 nt, Artificial Sequence
  Description of Artificial Sequence: Synthetic oligonucleotide
aucugugcacaggacucca

SEQ ID NO: 2803691 - RNA, 19 nt, Artificial Sequence
  Description of Artificial Sequence: Synthetic oligonucleotide
gcuugcugggcuagaacag

SEQ ID NO: 2803692 - RNA, 19 nt, Artificial Sequence
  Description of Artificial Sequence: Synthetic oligonucleotide
caauggauggauucuucau

SEQ ID NO: 2803693 - RNA, 19 nt, Artificial Sequence
  Description of Artificial Sequence: Synthetic oligonucleotide
cacaggcacugccacugug

SEQ ID NO: 2803694 - RNA, 19 nt, Artificial Sequence
  Description of Artificial Sequence: Synthetic oligonucleotide
uauccgccccacuccggga

SEQ ID NO: 2803695 - RNA, 19 nt, Artificial Sequence
  Description of Artificial Sequence: Synthetic oligonucleotide
cacaguuccaggcaaugau

SEQ ID NO: 2803696 - RNA, 19 nt, Artificial Sequence
  Description of Artificial Sequence: Synthetic oligonucleotide
aggcacugccacugugaug

SEQ ID NO: 2803697 - RNA, 19 nt, Artificial Sequence
  Description of Artificial Sequence: Synthetic oligonucleotide
uagcugcuugcugggcuag

SEQ ID NO: 2803698 - RNA, 19 nt, Artificial Sequence
  Description of Artificial Sequence: Synthetic oligonucleotide
gguaccacgacagcccaga

SEQ ID NO: 2803699 - RNA, 19 nt, Artificial Sequence
  Description of Artificial Sequence: Synthetic oligonucleotide
aucugacaggguaccacga

SEQ ID NO: 2803700 - RNA, 19 nt, Artificial Sequence
  Description of Artificial Sequence: Synthetic oligonucleotide
caaaacaacuaugauccuu

SEQ ID NO: 2803701 - RNA, 19 nt, Artificial Sequence
  Description of Artificial Sequence: Synthetic oligonucleotide
gcucaucugacaggguacc

SEQ ID NO: 2803702 - RNA, 19 nt, Artificial Sequence
  Description of Artificial Sequence: Synthetic oligonucleotide
agcccagauuaaguccuug

SEQ ID NO: 2803703 - RNA, 19 nt, Artificial Sequence
  Description of Artificial Sequence: Synthetic oligonucleotide
gcugggcuagaacagauau

SEQ ID NO: 2803704 - RNA, 19 nt, Artificial Sequence
  Description of Artificial Sequence: Synthetic oligonucleotide
guuaacugacacaggcacu

SEQ ID NO: 2803705 - RNA, 19 nt, Artificial Sequence
  Description of Artificial Sequence: Synthetic oligonucleotide
auacuggacugcagugaug

SEQ ID NO: 2803706 - RNA, 19 nt, Artificial Sequence
  Description of Artificial Sequence: Synthetic oligonucleotide
gcuggaauacuggacugca

SEQ ID NO: 2803707 - RNA, 19 nt, Artificial Sequence
  Description of Artificial Sequence: Synthetic oligonucleotide
uuccaucccucccgcuauc

SEQ ID NO: 2803708 - RNA, 19 nt, Artificial Sequence
  Description of Artificial Sequence: Synthetic oligonucleotide
auccgccccacuccgggau

SEQ ID NO: 2803709 - RNA, 19 nt, Artificial Sequence
  Description of Artificial Sequence: Synthetic oligonucleotide
acacaggcacugccacugu

SEQ ID NO: 2803710 - RNA, 19 nt, Artificial Sequence
  Description of Artificial Sequence: Synthetic oligonucleotide
caaagucgauuccaucccu

SEQ ID NO: 2803711 - RNA, 19 nt, Artificial Sequence
  Description of Artificial Sequence: Synthetic oligonucleotide
cgacagcccagauuaaguc

SEQ ID NO: 2803712 - RNA, 19 nt, Artificial Sequence
  Description of Artificial Sequence: Synthetic oligonucleotide
agauaucacuccagcucau

SEQ ID NO: 2803713 - RNA, 19 nt, Artificial Sequence
  Description of Artificial Sequence: Synthetic oligonucleotide
cccgcuauccgccccacuc

SEQ ID NO: 2803714 - RNA, 19 nt, Artificial Sequence
  Description of Artificial Sequence: Synthetic oligonucleotide
ccaaaugcugcuccaaagu

SEQ ID NO: 2803715 - RNA, 19 nt, Artificial Sequence
  Description of Artificial Sequence: Synthetic oligonucleotide
ucccucccgcuauccgccc

SEQ ID NO: 2803716 - RNA, 19 nt, Artificial Sequence
  Description of Artificial Sequence: Synthetic oligonucleotide
ccuugugaaucugugcaca

SEQ ID NO: 2803717 - RNA, 19 nt, Artificial Sequence
  Description of Artificial Sequence: Synthetic oligonucleotide
uccgccccacuccgggauc

SEQ ID NO: 2803718 - RNA, 19 nt, Artificial Sequence
  Description of Artificial Sequence: Synthetic oligonucleotide
ccaucccucccgcuauccg

SEQ ID NO: 2803719 - RNA, 19 nt, Artificial Sequence
  Description of Artificial Sequence: Synthetic oligonucleotide
cucaucugacaggguacca

SEQ ID NO: 2803720 - RNA, 19 nt, Artificial Sequence
  Description of Artificial Sequence: Synthetic oligonucleotide
ccgcuauccgccccacucc

SEQ ID NO: 2803721 - RNA, 19 nt, Artificial Sequence
  Description of Artificial Sequence: Synthetic oligonucleotide
aggcaaugauaagcuggaa

SEQ ID NO: 2803722 - RNA, 19 nt, Artificial Sequence
  Description of Artificial Sequence: Synthetic oligonucleotide
ucccgcuauccgccccacu

SEQ ID NO: 2803723 - RNA, 19 nt, Artificial Sequence
  Description of Artificial Sequence: Synthetic oligonucleotide
cgcuauccgccccacuccg

SEQ ID NO: 2803724 - RNA, 19 nt, Artificial Sequence
  Description of Artificial Sequence: Synthetic oligonucleotide
caacaauggauggauucuu

SEQ ID NO: 2803725 - RNA, 19 nt, Artificial Sequence
  Description of Artificial Sequence: Synthetic oligonucleotide
gcuuagcugcuugcugggc

SEQ ID NO: 2803726 - RNA, 19 nt, Artificial Sequence
  Description of Artificial Sequence: Synthetic oligonucleotide
gcuauccgccccacuccgg

SEQ ID NO: 2803727 - RNA, 19 nt, Artificial Sequence
  Description of Artificial Sequence: Synthetic oligonucleotide
ccaacaauggauggauucu

SEQ ID NO: 2803728 - RNA, 19 nt, Artificial Sequence
  Description of Artificial Sequence: Synthetic oligonucleotide
gcccagauuaaguccuugu

SEQ ID NO: 2803729 - RNA, 19 nt, Artificial Sequence
  Description of Artificial Sequence: Synthetic oligonucleotide
ccccacuccgggaucccgc

SEQ ID NO: 2803730 - RNA, 19 nt, Artificial Sequence
  Description of Artificial Sequence: Synthetic oligonucleotide
gagguuagcuuagcugcuu

SEQ ID NO: 2803731 - RNA, 19 nt, Artificial Sequence
  Description of Artificial Sequence: Synthetic oligonucleotide
gggcuagaacagauaucac

SEQ ID NO: 2803732 - RNA, 19 nt, Artificial Sequence
  Description of Artificial Sequence: Synthetic oligonucleotide
caggcacugccacugugau

SEQ ID NO: 2803733 - RNA, 19 nt, Artificial Sequence
  Description of Artificial Sequence: Synthetic oligonucleotide
guacacaguuccaggcaau

SEQ ID NO: 2803734 - RNA, 19 nt, Artificial Sequence
  Description of Artificial Sequence: Synthetic oligonucleotide
ggguaccacgacagcccag

SEQ ID NO: 2803735 - RNA, 19 nt, Artificial Sequence
  Description of Artificial Sequence: Synthetic oligonucleotide
ggacugcagugauggucuc

SEQ ID NO: 2803736 - RNA, 19 nt, Artificial Sequence
  Description of Artificial Sequence: Synthetic oligonucleotide
cuccaacaauggauggauu

SEQ ID NO: 2803737 - RNA, 19 nt, Artificial Sequence
  Description of Artificial Sequence: Synthetic oligonucleotide
cugcagugauggucuccaa

SEQ ID NO: 2803738 - RNA, 19 nt, Artificial Sequence
  Description of Artificial Sequence: Synthetic oligonucleotide
gcacagguacacaguucca

SEQ ID NO: 2803739 - RNA, 19 nt, Artificial Sequence
  Description of Artificial Sequence: Synthetic oligonucleotide
gccccacuccgggaucccg

SEQ ID NO: 2803740 - RNA, 19 nt, Artificial Sequence
  Description of Artificial Sequence: Synthetic oligonucleotide
cucccgcuauccgccccac

SEQ ID NO: 2803741 - RNA, 19 nt, Artificial Sequence
  Description of Artificial Sequence: Synthetic oligonucleotide
guaccacgacagcccagau

SEQ ID NO: 2803742 - RNA, 19 nt, Artificial Sequence
  Description of Artificial Sequence: Synthetic oligonucleotide
gcuccaaagucgauuccau

SEQ ID NO: 2803743 - RNA, 19 nt, Artificial Sequence
  Description of Artificial Sequence: Synthetic oligonucleotide
ccaucagcacagguacaca

SEQ ID NO: 2803744 - RNA, 19 nt, Artificial Sequence
  Description of Artificial Sequence: Synthetic oligonucleotide
ccacuccgggaucccgcag

SEQ ID NO: 2803745 - RNA, 19 nt, Artificial Sequence
  Description of Artificial Sequence: Synthetic oligonucleotide
augcugcuccaaagucgau

SEQ ID NO: 2803746 - RNA, 19 nt, Artificial Sequence
  Description of Artificial Sequence: Synthetic oligonucleotide
ccgggaucccgcagcaaaa

SEQ ID NO: 2803747 - RNA, 19 nt, Artificial Sequence
  Description of Artificial Sequence: Synthetic oligonucleotide
cccacuccgggaucccgca

SEQ ID NO: 2803748 - RNA, 19 nt, Artificial Sequence
  Description of Artificial Sequence: Synthetic oligonucleotide
cccucccgcuauccgcccc

SEQ ID NO: 2803749 - RNA, 19 nt, Artificial Sequence
  Description of Artificial Sequence: Synthetic oligonucleotide
ccuccaaaugcugcuccaa

SEQ ID NO: 2803750 - RNA, 19 nt, Artificial Sequence
  Description of Artificial Sequence: Synthetic oligonucleotide
ccucccgcuauccgcccca

SEQ ID NO: 2803751 - RNA, 19 nt, Artificial Sequence
  Description of Artificial Sequence: Synthetic oligonucleotide
cagcccagauuaaguccuu

SEQ ID NO: 2803752 - RNA, 19 nt, Artificial Sequence
  Description of Artificial Sequence: Synthetic oligonucleotide
cuccgggaucccgcagcaa

SEQ ID NO: 2803753 - RNA, 19 nt, Artificial Sequence
  Description of Artificial Sequence: Synthetic oligonucleotide
ccacgacagcccagauuaa

SEQ ID NO: 2803754 - RNA, 19 nt, Artificial Sequence
  Description of Artificial Sequence: Synthetic oligonucleotide
ccagcucaucugacagggu

SEQ ID NO: 2803755 - RNA, 19 nt, Artificial Sequence
  Description of Artificial Sequence: Synthetic oligonucleotide
cgauuccaucccucccgcu

SEQ ID NO: 2803756 - RNA, 19 nt, Artificial Sequence
  Description of Artificial Sequence: Synthetic oligonucleotide
cgccccacuccgggauccc

SEQ ID NO: 2803757 - RNA, 19 nt, Artificial Sequence
  Description of Artificial Sequence: Synthetic oligonucleotide
aauuccuugauuauuauac

SEQ ID NO: 2803758 - RNA, 19 nt, Artificial Sequence
  Description of Artificial Sequence: Synthetic oligonucleotide
aaauacagaauagagcucc

SEQ ID NO: 2803759 - RNA, 19 nt, Artificial Sequence
  Description of Artificial Sequence: Synthetic oligonucleotide
agaaauacagaauagagcu

SEQ ID NO: 2803760 - RNA, 19 nt, Artificial Sequence
  Description of Artificial Sequence: Synthetic oligonucleotide
ugauuauuauaccagcugg

SEQ ID NO: 2803761 - RNA, 19 nt, Artificial Sequence
  Description of Artificial Sequence: Synthetic oligonucleotide
aaugcuucgaacuuggaga

SEQ ID NO: 2803762 - RNA, 19 nt, Artificial Sequence
  Description of Artificial Sequence: Synthetic oligonucleotide
aacaucauagcuuuuauuu

SEQ ID NO: 2803763 - RNA, 19 nt, Artificial Sequence
  Description of Artificial Sequence: Synthetic oligonucleotide
uguguuacuguauaugucc

SEQ ID NO: 2803764 - RNA, 19 nt, Artificial Sequence
  Description of Artificial Sequence: Synthetic oligonucleotide
uauauguccauguagaaau

SEQ ID NO: 2803765 - RNA, 19 nt, Artificial Sequence
  Description of Artificial Sequence: Synthetic oligonucleotide
uuuaacaauuccuugauua

SEQ ID NO: 2803766 - RNA, 19 nt, Artificial Sequence
  Description of Artificial Sequence: Synthetic oligonucleotide
uuauuuaacaauuccuuga

SEQ ID NO: 2803767 - RNA, 19 nt, Artificial Sequence
  Description of Artificial Sequence: Synthetic oligonucleotide
auauuugucauggaaauuc

SEQ ID NO: 2803768 - RNA, 19 nt, Artificial Sequence
  Description of Artificial Sequence: Synthetic oligonucleotide
uagaaauacagaauagagc

SEQ ID NO: 2803769 - RNA, 19 nt, Artificial Sequence
  Description of Artificial Sequence: Synthetic oligonucleotide
uuggagacggcuuagugcg

SEQ ID NO: 2803770 - RNA, 19 nt, Artificial Sequence
  Description of Artificial Sequence: Synthetic oligonucleotide
acaguuacugccucggugc

SEQ ID NO: 2803771 - RNA, 19 nt, Artificial Sequence
  Description of Artificial Sequence: Synthetic oligonucleotide
uaauauagcauuuccauau

SEQ ID NO: 2803772 - RNA, 19 nt, Artificial Sequence
  Description of Artificial Sequence: Synthetic oligonucleotide
acagaauagagcuccaccg

SEQ ID NO: 2803773 - RNA, 19 nt, Artificial Sequence
  Description of Artificial Sequence: Synthetic oligonucleotide
uuuuauuuaacaauuccuu

SEQ ID NO: 2803774 - RNA, 19 nt, Artificial Sequence
  Description of Artificial Sequence: Synthetic oligonucleotide
uauuauaccagcuggcaug

SEQ ID NO: 2803775 - RNA, 19 nt, Artificial Sequence
  Description of Artificial Sequence: Synthetic oligonucleotide
uguccauguagaaauacag

SEQ ID NO: 2803776 - RNA, 19 nt, Artificial Sequence
  Description of Artificial Sequence: Synthetic oligonucleotide
auuuccauauuugucaugg

SEQ ID NO: 2803777 - RNA, 19 nt, Artificial Sequence
  Description of Artificial Sequence: Synthetic oligonucleotide
uauagcauuuccauauuug

SEQ ID NO: 2803778 - RNA, 19 nt, Artificial Sequence
  Description of Artificial Sequence: Synthetic oligonucleotide
uugauuauuauaccagcug

SEQ ID NO: 2803779 - RNA, 19 nt, Artificial Sequence
  Description of Artificial Sequence: Synthetic oligonucleotide
aaguagcugaaacugcagg

SEQ ID NO: 2803780 - RNA, 19 nt, Artificial Sequence
  Description of Artificial Sequence: Synthetic oligonucleotide
uuuguguuacuguauaugu

SEQ ID NO: 2803781 - RNA, 19 nt, Artificial Sequence
  Description of Artificial Sequence: Synthetic oligonucleotide
uauuugucauggaaauucg

SEQ ID NO: 2803782 - RNA, 19 nt, Artificial Sequence
  Description of Artificial Sequence: Synthetic oligonucleotide
agaauagagcuccaccggc

SEQ ID NO: 2803783 - RNA, 19 nt, Artificial Sequence
  Description of Artificial Sequence: Synthetic oligonucleotide
uccuugauuauuauaccag

SEQ ID NO: 2803784 - RNA, 19 nt, Artificial Sequence
  Description of Artificial Sequence: Synthetic oligonucleotide
agcauuuccauauuuguca

SEQ ID NO: 2803785 - RNA, 19 nt, Artificial Sequence
  Description of Artificial Sequence: Synthetic oligonucleotide
auuccuugauuauuauacc

SEQ ID NO: 2803786 - RNA, 19 nt, Artificial Sequence
  Description of Artificial Sequence: Synthetic oligonucleotide
uccauguagaaauacagaa

SEQ ID NO: 2803787 - RNA, 19 nt, Artificial Sequence
  Description of Artificial Sequence: Synthetic oligonucleotide
auagcuuuuauuuaacaau

SEQ ID NO: 2803788 - RNA, 19 nt, Artificial Sequence
  Description of Artificial Sequence: Synthetic oligonucleotide
aguagcugaaacugcaggg

SEQ ID NO: 2803789 - RNA, 19 nt, Artificial Sequence
  Description of Artificial Sequence: Synthetic oligonucleotide
guagaaauacagaauagag

SEQ ID NO: 2803790 - RNA, 19 nt, Artificial Sequence
  Description of Artificial Sequence: Synthetic oligonucleotide
acuguauauguccauguag

SEQ ID NO: 2803791 - RNA, 19 nt, Artificial Sequence
  Description of Artificial Sequence: Synthetic oligonucleotide
uuugucauggaaauucggu

SEQ ID NO: 2803792 - RNA, 19 nt, Artificial Sequence
  Description of Artificial Sequence: Synthetic oligonucleotide
acugccucggugcagauuc

SEQ ID NO: 2803793 - RNA, 19 nt, Artificial Sequence
  Description of Artificial Sequence: Synthetic oligonucleotide
cuggcgaagggcaacaucg

SEQ ID NO: 2803794 - RNA, 19 nt, Artificial Sequence
  Description of Artificial Sequence: Synthetic oligonucleotide
uguagaaauacagaauaga

SEQ ID NO: 2803795 - RNA, 19 nt, Artificial Sequence
  Description of Artificial Sequence: Synthetic oligonucleotide
uacagaauagagcuccacc

SEQ ID NO: 2803796 - RNA, 19 nt, Artificial Sequence
  Description of Artificial Sequence: Synthetic oligonucleotide
uucuauuccaauuuguguu

SEQ ID NO: 2803797 - RNA, 19 nt, Artificial Sequence
  Description of Artificial Sequence: Synthetic oligonucleotide
aacaucgcggagaaguagc

SEQ ID NO: 2803798 - RNA, 19 nt, Artificial Sequence
  Description of Artificial Sequence: Synthetic oligonucleotide
gaaugcuucgaacuuggag

SEQ ID NO: 2803799 - RNA, 19 nt, Artificial Sequence
  Description of Artificial Sequence: Synthetic oligonucleotide
acuacugaucucuccauuc

SEQ ID NO: 2803800 - RNA, 19 nt, Artificial Sequence
  Description of Artificial Sequence: Synthetic oligonucleotide
uccauauuugucauggaaa

SEQ ID NO: 2803801 - RNA, 19 nt, Artificial Sequence
  Description of Artificial Sequence: Synthetic oligonucleotide
uauuuaacaauuccuugau

SEQ ID NO: 2803802 - RNA, 19 nt, Artificial Sequence
  Description of Artificial Sequence: Synthetic oligonucleotide
uuuggggugacucugccaa

SEQ ID NO: 2803803 - RNA, 19 nt, Artificial Sequence
  Description of Artificial Sequence: Synthetic oligonucleotide
uugucauggaaauucggug

SEQ ID NO: 2803804 - RNA, 19 nt, Artificial Sequence
  Description of Artificial Sequence: Synthetic oligonucleotide
gaucucuccauuccuuugg

SEQ ID NO: 2803805 - RNA, 19 nt, Artificial Sequence
  Description of Artificial Sequence: Synthetic oligonucleotide
auucuauuccaauuugugu

SEQ ID NO: 2803806 - RNA, 19 nt, Artificial Sequence
  Description of Artificial Sequence: Synthetic oligonucleotide
cauucuauuccaauuugug

SEQ ID NO: 2803807 - RNA, 19 nt, Artificial Sequence
  Description of Artificial Sequence: Synthetic oligonucleotide
ugucauggaaauucggugu

SEQ ID NO: 2803808 - RNA, 19 nt, Artificial Sequence
  Description of Artificial Sequence: Synthetic oligonucleotide
uuccuugauuauuauacca

SEQ ID NO: 2803809 - RNA, 19 nt, Artificial Sequence
  Description of Artificial Sequence: Synthetic oligonucleotide
agggaccacaguuacugcc

SEQ ID NO: 2803810 - RNA, 19 nt, Artificial Sequence
  Description of Artificial Sequence: Synthetic oligonucleotide
cuuggagacggcuuagugc

SEQ ID NO: 2803811 - RNA, 19 nt, Artificial Sequence
  Description of Artificial Sequence: Synthetic oligonucleotide
gauuauuauaccagcuggc

SEQ ID NO: 2803812 - RNA, 19 nt, Artificial Sequence
  Description of Artificial Sequence: Synthetic oligonucleotide
uccauucuauuccaauuug

SEQ ID NO: 2803813 - RNA, 19 nt, Artificial Sequence
  Description of Artificial Sequence: Synthetic oligonucleotide
uagcuuuuauuuaacaauu

SEQ ID NO: 2803814 - RNA, 19 nt, Artificial Sequence
  Description of Artificial Sequence: Synthetic oligonucleotide
uuccauauuugucauggaa

SEQ ID NO: 2803815 - RNA, 19 nt, Artificial Sequence
  Description of Artificial Sequence: Synthetic oligonucleotide
cauguagaaauacagaaua

SEQ ID NO: 2803816 - RNA, 19 nt, Artificial Sequence
  Description of Artificial Sequence: Synthetic oligonucleotide
augcuucgaacuuggagac

SEQ ID NO: 2803817 - RNA, 19 nt, Artificial Sequence
  Description of Artificial Sequence: Synthetic oligonucleotide
uuaacaauuccuugauuau

SEQ ID NO: 2803818 - RNA, 19 nt, Artificial Sequence
  Description of Artificial Sequence: Synthetic oligonucleotide
uuuaacaucauagcuuuua

SEQ ID NO: 2803819 - RNA, 19 nt, Artificial Sequence
  Description of Artificial Sequence: Synthetic oligonucleotide
uauaccagcuggcaugacu

SEQ ID NO: 2803820 - RNA, 19 nt, Artificial Sequence
  Description of Artificial Sequence: Synthetic oligonucleotide
uccaauuuguguuacugua

SEQ ID NO: 2803821 - RNA, 19 nt, Artificial Sequence
  Description of Artificial Sequence: Synthetic oligonucleotide
cugaaugcuucgaacuugg

SEQ ID NO: 2803822 - RNA, 19 nt, Artificial Sequence
  Description of Artificial Sequence: Synthetic oligonucleotide
auuuguguuacuguauaug

SEQ ID NO: 2803823 - RNA, 19 nt, Artificial Sequence
  Description of Artificial Sequence: Synthetic oligonucleotide
aauuuguguuacuguauau

SEQ ID NO: 2803824 - RNA, 19 nt, Artificial Sequence
  Description of Artificial Sequence: Synthetic oligonucleotide
uuauuauaccagcuggcau

SEQ ID NO: 2803825 - RNA, 19 nt, Artificial Sequence
  Description of Artificial Sequence: Synthetic oligonucleotide
uuaacaucauagcuuuuau

SEQ ID NO: 2803826 - RNA, 19 nt, Artificial Sequence
  Description of Artificial Sequence: Synthetic oligonucleotide
ucauagcuuuuauuuaaca

SEQ ID NO: 2803827 - RNA, 19 nt, Artificial Sequence
  Description of Artificial Sequence: Synthetic oligonucleotide
gcuuuuauuuaacaauucc

SEQ ID NO: 2803828 - RNA, 19 nt, Artificial Sequence
  Description of Artificial Sequence: Synthetic oligonucleotide
gacucugccaaccggagac

SEQ ID NO: 2803829 - RNA, 19 nt, Artificial Sequence
  Description of Artificial Sequence: Synthetic oligonucleotide
augacuacugaucucucca

SEQ ID NO: 2803830 - RNA, 19 nt, Artificial Sequence
  Description of Artificial Sequence: Synthetic oligonucleotide
aacugcagggaccacaguu

SEQ ID NO: 2803831 - RNA, 19 nt, Artificial Sequence
  Description of Artificial Sequence: Synthetic oligonucleotide
uccaccggcuaauauagca

SEQ ID NO: 2803832 - RNA, 19 nt, Artificial Sequence
  Description of Artificial Sequence: Synthetic oligonucleotide
cuguauauguccauguaga

SEQ ID NO: 2803833 - RNA, 19 nt, Artificial Sequence
  Description of Artificial Sequence: Synthetic oligonucleotide
uugcugaaugcuucgaacu

SEQ ID NO: 2803834 - RNA, 19 nt, Artificial Sequence
  Description of Artificial Sequence: Synthetic oligonucleotide
auuauuauaccagcuggca

SEQ ID NO: 2803835 - RNA, 19 nt, Artificial Sequence
  Description of Artificial Sequence: Synthetic oligonucleotide
aacaauuccuugauuauua

SEQ ID NO: 2803836 - RNA, 19 nt, Artificial Sequence
  Description of Artificial Sequence: Synthetic oligonucleotide
auuccaauuuguguuacug

SEQ ID NO: 2803837 - RNA, 19 nt, Artificial Sequence
  Description of Artificial Sequence: Synthetic oligonucleotide
cuugcugaaugcuucgaac

SEQ ID NO: 2803838 - RNA, 19 nt, Artificial Sequence
  Description of Artificial Sequence: Synthetic oligonucleotide
gacagguuccauucuauuc

SEQ ID NO: 2803839 - RNA, 19 nt, Artificial Sequence
  Description of Artificial Sequence: Synthetic oligonucleotide
cagaauagagcuccaccgg

SEQ ID NO: 2803840 - RNA, 19 nt, Artificial Sequence
  Description of Artificial Sequence: Synthetic oligonucleotide
aauauagcauuuccauauu

SEQ ID NO: 2803841 - RNA, 19 nt, Artificial Sequence
  Description of Artificial Sequence: Synthetic oligonucleotide
ucuccauuccuuuggggug

SEQ ID NO: 2803842 - RNA, 19 nt, Artificial Sequence
  Description of Artificial Sequence: Synthetic oligonucleotide
gaaacugcagggaccacag

SEQ ID NO: 2803843 - RNA, 19 nt, Artificial Sequence
  Description of Artificial Sequence: Synthetic oligonucleotide
uguauauguccauguagaa

SEQ ID NO: 2803844 - RNA, 19 nt, Artificial Sequence
  Description of Artificial Sequence: Synthetic oligonucleotide
ucuauuccaauuuguguua

SEQ ID NO: 2803845 - RNA, 19 nt, Artificial Sequence
  Description of Artificial Sequence: Synthetic oligonucleotide
aucgcggagaaguagcuga

SEQ ID NO: 2803846 - RNA, 19 nt, Artificial Sequence
  Description of Artificial Sequence: Synthetic oligonucleotide
auggaaauucgguguccgc

SEQ ID NO: 2803847 - RNA, 19 nt, Artificial Sequence
  Description of Artificial Sequence: Synthetic oligonucleotide
cauagcuuuuauuuaacaa

SEQ ID NO: 2803848 - RNA, 19 nt, Artificial Sequence
  Description of Artificial Sequence: Synthetic oligonucleotide
ggagaaguagcugaaacug

SEQ ID NO: 2803849 - RNA, 19 nt, Artificial Sequence
  Description of Artificial Sequence: Synthetic oligonucleotide
guuacuguauauguccaug

SEQ ID NO: 2803850 - RNA, 19 nt, Artificial Sequence
  Description of Artificial Sequence: Synthetic oligonucleotide
uuccaauuuguguuacugu

SEQ ID NO: 2803851 - RNA, 19 nt, Artificial Sequence
  Description of Artificial Sequence: Synthetic oligonucleotide
agauucgcccgggauaccc

SEQ ID NO: 2803852 - RNA, 19 nt, Artificial Sequence
  Description of Artificial Sequence: Synthetic oligonucleotide
cuacugaucucuccauucc

SEQ ID NO: 2803853 - RNA, 19 nt, Artificial Sequence
  Description of Artificial Sequence: Synthetic oligonucleotide
uuguguuacuguauauguc

SEQ ID NO: 2803854 - RNA, 19 nt, Artificial Sequence
  Description of Artificial Sequence: Synthetic oligonucleotide
caugacuacugaucucucc

SEQ ID NO: 2803855 - RNA, 19 nt, Artificial Sequence
  Description of Artificial Sequence: Synthetic oligonucleotide
uauguccauguagaaauac

SEQ ID NO: 2803856 - RNA, 19 nt, Artificial Sequence
  Description of Artificial Sequence: Synthetic oligonucleotide
ugaaacugcagggaccaca

SEQ ID NO: 2803857 - RNA, 19 nt, Artificial Sequence
  Description of Artificial Sequence: Synthetic oligonucleotide
uggaaauucgguguccgcu

SEQ ID NO: 2803858 - RNA, 19 nt, Artificial Sequence
  Description of Artificial Sequence: Synthetic oligonucleotide
cucggugcagauucgcccg

SEQ ID NO: 2803859 - RNA, 19 nt, Artificial Sequence
  Description of Artificial Sequence: Synthetic oligonucleotide
auguagaaauacagaauag

SEQ ID NO: 2803860 - RNA, 19 nt, Artificial Sequence
  Description of Artificial Sequence: Synthetic oligonucleotide
agcuuuuauuuaacaauuc

SEQ ID NO: 2803861 - RNA, 19 nt, Artificial Sequence
  Description of Artificial Sequence: Synthetic oligonucleotide
uagcugaaacugcagggac

SEQ ID NO: 2803862 - RNA, 19 nt, Artificial Sequence
  Description of Artificial Sequence: Synthetic oligonucleotide
ugaucucuccauuccuuug

SEQ ID NO: 2803863 - RNA, 19 nt, Artificial Sequence
  Description of Artificial Sequence: Synthetic oligonucleotide
cauggaaauucgguguccg

SEQ ID NO: 2803864 - RNA, 19 nt, Artificial Sequence
  Description of Artificial Sequence: Synthetic oligonucleotide
aauagagcuccaccggcua

SEQ ID NO: 2803865 - RNA, 19 nt, Artificial Sequence
  Description of Artificial Sequence: Synthetic oligonucleotide
ucugccuugcuaccacuug

SEQ ID NO: 2803866 - RNA, 19 nt, Artificial Sequence
  Description of Artificial Sequence: Synthetic oligonucleotide
gagaaguagcugaaacugc

SEQ ID NO: 2803867 - RNA, 19 nt, Artificial Sequence
  Description of Artificial Sequence: Synthetic oligonucleotide
cuuagugcguuucuggcga

SEQ ID NO: 2803868 - RNA, 19 nt, Artificial Sequence
  Description of Artificial Sequence: Synthetic oligonucleotide
auuugucauggaaauucgg

SEQ ID NO: 2803869 - RNA, 19 nt, Artificial Sequence
  Description of Artificial Sequence: Synthetic oligonucleotide
ucucuccauuccuuugggg

SEQ ID NO: 2803870 - RNA, 19 nt, Artificial Sequence
  Description of Artificial Sequence: Synthetic oligonucleotide
uacugaucucuccauuccu

SEQ ID NO: 2803871 - RNA, 19 nt, Artificial Sequence
  Description of Artificial Sequence: Synthetic oligonucleotide
agaaguagcugaaacugca

SEQ ID NO: 2803872 - RNA, 19 nt, Artificial Sequence
  Description of Artificial Sequence: Synthetic oligonucleotide
agcugaaacugcagggacc

SEQ ID NO: 2803873 - RNA, 19 nt, Artificial Sequence
  Description of Artificial Sequence: Synthetic oligonucleotide
cuugcuaccacuugcugaa

SEQ ID NO: 2803874 - RNA, 19 nt, Artificial Sequence
  Description of Artificial Sequence: Synthetic oligonucleotide
auacagaauagagcuccac

SEQ ID NO: 2803875 - RNA, 19 nt, Artificial Sequence
  Description of Artificial Sequence: Synthetic oligonucleotide
auauagcauuuccauauuu

SEQ ID NO: 2803876 - RNA, 19 nt, Artificial Sequence
  Description of Artificial Sequence: Synthetic oligonucleotide
accacuugcugaaugcuuc

SEQ ID NO: 2803877 - RNA, 19 nt, Artificial Sequence
  Description of Artificial Sequence: Synthetic oligonucleotide
aaauucgguguccgcuucu

SEQ ID NO: 2803878 - RNA, 19 nt, Artificial Sequence
  Description of Artificial Sequence: Synthetic oligonucleotide
ugcagauucgcccgggaua

SEQ ID NO: 2803879 - RNA, 19 nt, Artificial Sequence
  Description of Artificial Sequence: Synthetic oligonucleotide
gaaguagcugaaacugcag

SEQ ID NO: 2803880 - RNA, 19 nt, Artificial Sequence
  Description of Artificial Sequence: Synthetic oligonucleotide
ccuugauuauuauaccagc

SEQ ID NO: 2803881 - RNA, 19 nt, Artificial Sequence
  Description of Artificial Sequence: Synthetic oligonucleotide
ucugccaaccggagacagg

SEQ ID NO: 2803882 - RNA, 19 nt, Artificial Sequence
  Description of Artificial Sequence: Synthetic oligonucleotide
ugcguuucuggcgaagggc

SEQ ID NO: 2803883 - RNA, 19 nt, Artificial Sequence
  Description of Artificial Sequence: Synthetic oligonucleotide
uucgguguccgcuucuggu

SEQ ID NO: 2803884 - RNA, 19 nt, Artificial Sequence
  Description of Artificial Sequence: Synthetic oligonucleotide
gaaauacagaauagagcuc

SEQ ID NO: 2803885 - RNA, 19 nt, Artificial Sequence
  Description of Artificial Sequence: Synthetic oligonucleotide
auuccuuuggggugacucu

SEQ ID NO: 2803886 - RNA, 19 nt, Artificial Sequence
  Description of Artificial Sequence: Synthetic oligonucleotide
cuaauauagcauuuccaua

SEQ ID NO: 2803887 - RNA, 19 nt, Artificial Sequence
  Description of Artificial Sequence: Synthetic oligonucleotide
cacaguuacugccucggug

SEQ ID NO: 2803888 - RNA, 19 nt, Artificial Sequence
  Description of Artificial Sequence: Synthetic oligonucleotide
agugcguuucuggcgaagg

SEQ ID NO: 2803889 - RNA, 19 nt, Artificial Sequence
  Description of Artificial Sequence: Synthetic oligonucleotide
auuauaccagcuggcauga

SEQ ID NO: 2803890 - RNA, 19 nt, Artificial Sequence
  Description of Artificial Sequence: Synthetic oligonucleotide
uaacaucauagcuuuuauu

SEQ ID NO: 2803891 - RNA, 19 nt, Artificial Sequence
  Description of Artificial Sequence: Synthetic oligonucleotide
uaacaauuccuugauuauu

SEQ ID NO: 2803892 - RNA, 19 nt, Artificial Sequence
  Description of Artificial Sequence: Synthetic oligonucleotide
ugcugaaugcuucgaacuu

SEQ ID NO: 2803893 - RNA, 19 nt, Artificial Sequence
  Description of Artificial Sequence: Synthetic oligonucleotide
auuuaacaauuccuugauu

SEQ ID NO: 2803894 - RNA, 19 nt, Artificial Sequence
  Description of Artificial Sequence: Synthetic oligonucleotide
uauuccaauuuguguuacu

SEQ ID NO: 2803895 - RNA, 19 nt, Artificial Sequence
  Description of Artificial Sequence: Synthetic oligonucleotide
uguuacuguauauguccau

SEQ ID NO: 2803896 - RNA, 19 nt, Artificial Sequence
  Description of Artificial Sequence: Synthetic oligonucleotide
cauuccuuuggggugacuc

SEQ ID NO: 2803897 - RNA, 19 nt, Artificial Sequence
  Description of Artificial Sequence: Synthetic oligonucleotide
cuugauuauuauaccagcu

SEQ ID NO: 2803898 - RNA, 19 nt, Artificial Sequence
  Description of Artificial Sequence: Synthetic oligonucleotide
gcuuagugcguuucuggcg

SEQ ID NO: 2803899 - RNA, 19 nt, Artificial Sequence
  Description of Artificial Sequence: Synthetic oligonucleotide
ucauggaaauucggugucc

SEQ ID NO: 2803900 - RNA, 19 nt, Artificial Sequence
  Description of Artificial Sequence: Synthetic oligonucleotide
aauacagaauagagcucca

SEQ ID NO: 2803901 - RNA, 19 nt, Artificial Sequence
  Description of Artificial Sequence: Synthetic oligonucleotide
aauucgguguccgcuucug

SEQ ID NO: 2803902 - RNA, 19 nt, Artificial Sequence
  Description of Artificial Sequence: Synthetic oligonucleotide
cugccuugcuaccacuugc

SEQ ID NO: 2803903 - RNA, 19 nt, Artificial Sequence
  Description of Artificial Sequence: Synthetic oligonucleotide
ucgguguccgcuucuggug

SEQ ID NO: 2803904 - RNA, 19 nt, Artificial Sequence
  Description of Artificial Sequence: Synthetic oligonucleotide
acaauuccuugauuauuau

SEQ ID NO: 2803905 - RNA, 19 nt, Artificial Sequence
  Description of Artificial Sequence: Synthetic oligonucleotide
gucauggaaauucgguguc

SEQ ID NO: 2803906 - RNA, 19 nt, Artificial Sequence
  Description of Artificial Sequence: Synthetic oligonucleotide
uuuccauauuugucaugga

SEQ ID NO: 2803907 - RNA, 19 nt, Artificial Sequence
  Description of Artificial Sequence: Synthetic oligonucleotide
ugccuugcuaccacuugcu

SEQ ID NO: 2803908 - RNA, 19 nt, Artificial Sequence
  Description of Artificial Sequence: Synthetic oligonucleotide
ucgaacuuggagacggcuu

SEQ ID NO: 2803909 - RNA, 19 nt, Artificial Sequence
  Description of Artificial Sequence: Synthetic oligonucleotide
gcuaauauagcauuuccau

SEQ ID NO: 2803910 - RNA, 19 nt, Artificial Sequence
  Description of Artificial Sequence: Synthetic oligonucleotide
gaaauucgguguccgcuuc

SEQ ID NO: 2803911 - RNA, 19 nt, Artificial Sequence
  Description of Artificial Sequence: Synthetic oligonucleotide
auucgguguccgcuucugg

SEQ ID NO: 2803912 - RNA, 19 nt, Artificial Sequence
  Description of Artificial Sequence: Synthetic oligonucleotide
uccuuuggggugacucugc

SEQ ID NO: 2803913 - RNA, 19 nt, Artificial Sequence
  Description of Artificial Sequence: Synthetic oligonucleotide
uuccuuuggggugacucug

SEQ ID NO: 2803914 - RNA, 19 nt, Artificial Sequence
  Description of Artificial Sequence: Synthetic oligonucleotide
ucuggcgaagggcaacauc

SEQ ID NO: 2803915 - RNA, 19 nt, Artificial Sequence
  Description of Artificial Sequence: Synthetic oligonucleotide
acuugcugaaugcuucgaa

SEQ ID NO: 2803916 - RNA, 19 nt, Artificial Sequence
  Description of Artificial Sequence: Synthetic oligonucleotide
agcuccaccggcuaauaua

SEQ ID NO: 2803917 - RNA, 19 nt, Artificial Sequence
  Description of Artificial Sequence: Synthetic oligonucleotide
cauuuccauauuugucaug

SEQ ID NO: 2803918 - RNA, 19 nt, Artificial Sequence
  Description of Artificial Sequence: Synthetic oligonucleotide
guauauguccauguagaaa

SEQ ID NO: 2803919 - RNA, 19 nt, Artificial Sequence
  Description of Artificial Sequence: Synthetic oligonucleotide
caauuuguguuacuguaua

SEQ ID NO: 2803920 - RNA, 19 nt, Artificial Sequence
  Description of Artificial Sequence: Synthetic oligonucleotide
ugacucugccaaccggaga

SEQ ID NO: 2803921 - RNA, 19 nt, Artificial Sequence
  Description of Artificial Sequence: Synthetic oligonucleotide
guagcugaaacugcaggga

SEQ ID NO: 2803922 - RNA, 19 nt, Artificial Sequence
  Description of Artificial Sequence: Synthetic oligonucleotide
cuauuccaauuuguguuac

SEQ ID NO: 2803923 - RNA, 19 nt, Artificial Sequence
  Description of Artificial Sequence: Synthetic oligonucleotide
gugcguuucuggcgaaggg

SEQ ID NO: 2803924 - RNA, 19 nt, Artificial Sequence
  Description of Artificial Sequence: Synthetic oligonucleotide
ugacuacugaucucuccau

SEQ ID NO: 2803925 - RNA, 19 nt, Artificial Sequence
  Description of Artificial Sequence: Synthetic oligonucleotide
uuucuggcgaagggcaaca

SEQ ID NO: 2803926 - RNA, 19 nt, Artificial Sequence
  Description of Artificial Sequence: Synthetic oligonucleotide
gcagggaccacaguuacug

SEQ ID NO: 2803927 - RNA, 19 nt, Artificial Sequence
  Description of Artificial Sequence: Synthetic oligonucleotide
ugaaugcuucgaacuugga

SEQ ID NO: 2803928 - RNA, 19 nt, Artificial Sequence
  Description of Artificial Sequence: Synthetic oligonucleotide
ucggugcagauucgcccgg

SEQ ID NO: 2803929 - RNA, 19 nt, Artificial Sequence
  Description of Artificial Sequence: Synthetic oligonucleotide
uggggugacucugccaacc

SEQ ID NO: 2803930 - RNA, 19 nt, Artificial Sequence
  Description of Artificial Sequence: Synthetic oligonucleotide
auguccauguagaaauaca

SEQ ID NO: 2803931 - RNA, 19 nt, Artificial Sequence
  Description of Artificial Sequence: Synthetic oligonucleotide
uggcgaagggcaacaucgc

SEQ ID NO: 2803932 - RNA, 19 nt, Artificial Sequence
  Description of Artificial Sequence: Synthetic oligonucleotide
uaccacuugcugaaugcuu

SEQ ID NO: 2803933 - RNA, 19 nt, Artificial Sequence
  Description of Artificial Sequence: Synthetic oligonucleotide
gaacuuggagacggcuuag

SEQ ID NO: 2803934 - RNA, 19 nt, Artificial Sequence
  Description of Artificial Sequence: Synthetic oligonucleotide
uuuuaacaucauagcuuuu

SEQ ID NO: 2803935 - RNA, 19 nt, Artificial Sequence
  Description of Artificial Sequence: Synthetic oligonucleotide
ggcuuagugcguuucuggc

SEQ ID NO: 2803936 - RNA, 19 nt, Artificial Sequence
  Description of Artificial Sequence: Synthetic oligonucleotide
caacaucgcggagaaguag

SEQ ID NO: 2803937 - RNA, 19 nt, Artificial Sequence
  Description of Artificial Sequence: Synthetic oligonucleotide
gcuccaccggcuaauauag

SEQ ID NO: 2803938 - RNA, 19 nt, Artificial Sequence
  Description of Artificial Sequence: Synthetic oligonucleotide
ggcgaagggcaacaucgcg

SEQ ID NO: 2803939 - RNA, 19 nt, Artificial Sequence
  Description of Artificial Sequence: Synthetic oligonucleotide
auaccagcuggcaugacua

SEQ ID NO: 2803940 - RNA, 19 nt, Artificial Sequence
  Description of Artificial Sequence: Synthetic oligonucleotide
ugcuucgaacuuggagacg

SEQ ID NO: 2803941 - RNA, 19 nt, Artificial Sequence
  Description of Artificial Sequence: Synthetic oligonucleotide
guuacugccucggugcaga

SEQ ID NO: 2803942 - RNA, 19 nt, Artificial Sequence
  Description of Artificial Sequence: Synthetic oligonucleotide
aacuuggagacggcuuagu

SEQ ID NO: 2803943 - RNA, 19 nt, Artificial Sequence
  Description of Artificial Sequence: Synthetic oligonucleotide
cugcagggaccacaguuac

SEQ ID NO: 2803944 - RNA, 19 nt, Artificial Sequence
  Description of Artificial Sequence: Synthetic oligonucleotide
guccauguagaaauacaga

SEQ ID NO: 2803945 - RNA, 19 nt, Artificial Sequence
  Description of Artificial Sequence: Synthetic oligonucleotide
gcggagaaguagcugaaac

SEQ ID NO: 2803946 - RNA, 19 nt, Artificial Sequence
  Description of Artificial Sequence: Synthetic oligonucleotide
gcgaagggcaacaucgcgg

SEQ ID NO: 2803947 - RNA, 19 nt, Artificial Sequence
  Description of Artificial Sequence: Synthetic oligonucleotide
cuucgaacuuggagacggc

SEQ ID NO: 2803948 - RNA, 19 nt, Artificial Sequence
  Description of Artificial Sequence: Synthetic oligonucleotide
agacagguuccauucuauu

SEQ ID NO: 2803949 - RNA, 19 nt, Artificial Sequence
  Description of Artificial Sequence: Synthetic oligonucleotide
cuggcaugacuacugaucu

SEQ ID NO: 2803950 - RNA, 19 nt, Artificial Sequence
  Description of Artificial Sequence: Synthetic oligonucleotide
caauuccuugauuauuaua

SEQ ID NO: 2803951 - RNA, 19 nt, Artificial Sequence
  Description of Artificial Sequence: Synthetic oligonucleotide
gaagggcaacaucgcggag

SEQ ID NO: 2803952 - RNA, 19 nt, Artificial Sequence
  Description of Artificial Sequence: Synthetic oligonucleotide
ugcagggaccacaguuacu

SEQ ID NO: 2803953 - RNA, 19 nt, Artificial Sequence
  Description of Artificial Sequence: Synthetic oligonucleotide
uucugguggcucugccuug

SEQ ID NO: 2803954 - RNA, 19 nt, Artificial Sequence
  Description of Artificial Sequence: Synthetic oligonucleotide
auagagcuccaccggcuaa

SEQ ID NO: 2803955 - RNA, 19 nt, Artificial Sequence
  Description of Artificial Sequence: Synthetic oligonucleotide
ggcaacaucgcggagaagu

SEQ ID NO: 2803956 - RNA, 19 nt, Artificial Sequence
  Description of Artificial Sequence: Synthetic oligonucleotide
guguuacuguauaugucca

SEQ ID NO: 2803957 - RNA, 19 nt, Artificial Sequence
  Description of Artificial Sequence: Synthetic oligonucleotide
ggcuaauauagcauuucca

SEQ ID NO: 2803958 - RNA, 19 nt, Artificial Sequence
  Description of Artificial Sequence: Synthetic oligonucleotide
agacggcuuagugcguuuc

SEQ ID NO: 2803959 - RNA, 19 nt, Artificial Sequence
  Description of Artificial Sequence: Synthetic oligonucleotide
gcugaaugcuucgaacuug

SEQ ID NO: 2803960 - RNA, 19 nt, Artificial Sequence
  Description of Artificial Sequence: Synthetic oligonucleotide
accggagacagguuccauu

SEQ ID NO: 2803961 - RNA, 19 nt, Artificial Sequence
  Description of Artificial Sequence: Synthetic oligonucleotide
ccaaccggagacagguucc

SEQ ID NO: 2803962 - RNA, 19 nt, Artificial Sequence
  Description of Artificial Sequence: Synthetic oligonucleotide
aguuacugccucggugcag

SEQ ID NO: 2803963 - RNA, 19 nt, Artificial Sequence
  Description of Artificial Sequence: Synthetic oligonucleotide
guuucuggcgaagggcaac

SEQ ID NO: 2803964 - RNA, 19 nt, Artificial Sequence
  Description of Artificial Sequence: Synthetic oligonucleotide
ucgcggagaaguagcugaa

SEQ ID NO: 2803965 - RNA, 19 nt, Artificial Sequence
  Description of Artificial Sequence: Synthetic oligonucleotide
gcuggcaugacuacugauc

SEQ ID NO: 2803966 - RNA, 19 nt, Artificial Sequence
  Description of Artificial Sequence: Synthetic oligonucleotide
cagggaccacaguuacugc

SEQ ID NO: 2803967 - RNA, 19 nt, Artificial Sequence
  Description of Artificial Sequence: Synthetic oligonucleotide
cucugccaaccggagacag

SEQ ID NO: 2803968 - RNA, 19 nt, Artificial Sequence
  Description of Artificial Sequence: Synthetic oligonucleotide
ccucggugcagauucgccc

SEQ ID NO: 2803969 - RNA, 19 nt, Artificial Sequence
  Description of Artificial Sequence: Synthetic oligonucleotide
gugacucugccaaccggag

SEQ ID NO: 2803970 - RNA, 19 nt, Artificial Sequence
  Description of Artificial Sequence: Synthetic oligonucleotide
guggcucugccuugcuacc

SEQ ID NO: 2803971 - RNA, 19 nt, Artificial Sequence
  Description of Artificial Sequence: Synthetic oligonucleotide
acggcuuagugcguuucug

SEQ ID NO: 2803972 - RNA, 19 nt, Artificial Sequence
  Description of Artificial Sequence: Synthetic oligonucleotide
gcugaaacugcagggacca

SEQ ID NO: 2803973 - RNA, 19 nt, Artificial Sequence
  Description of Artificial Sequence: Synthetic oligonucleotide
uggcaugacuacugaucuc

SEQ ID NO: 2803974 - RNA, 19 nt, Artificial Sequence
  Description of Artificial Sequence: Synthetic oligonucleotide
gcagauucgcccgggauac

SEQ ID NO: 2803975 - RNA, 19 nt, Artificial Sequence
  Description of Artificial Sequence: Synthetic oligonucleotide
uagugcguuucuggcgaag

SEQ ID NO: 2803976 - RNA, 19 nt, Artificial Sequence
  Description of Artificial Sequence: Synthetic oligonucleotide
gaauagagcuccaccggcu

SEQ ID NO: 2803977 - RNA, 19 nt, Artificial Sequence
  Description of Artificial Sequence: Synthetic oligonucleotide
gggugacucugccaaccgg

SEQ ID NO: 2803978 - RNA, 19 nt, Artificial Sequence
  Description of Artificial Sequence: Synthetic oligonucleotide
ggggugacucugccaaccg

SEQ ID NO: 2803979 - RNA, 19 nt, Artificial Sequence
  Description of Artificial Sequence: Synthetic oligonucleotide
uagagcuccaccggcuaau

SEQ ID NO: 2803980 - RNA, 19 nt, Artificial Sequence
  Description of Artificial Sequence: Synthetic oligonucleotide
ccggagacagguuccauuc

SEQ ID NO: 2803981 - RNA, 19 nt, Artificial Sequence
  Description of Artificial Sequence: Synthetic oligonucleotide
acugaucucuccauuccuu

SEQ ID NO: 2803982 - RNA, 19 nt, Artificial Sequence
  Description of Artificial Sequence: Synthetic oligonucleotide
agcuggcaugacuacugau

SEQ ID NO: 2803983 - RNA, 19 nt, Artificial Sequence
  Description of Artificial Sequence: Synthetic oligonucleotide
uuagugcguuucuggcgaa

SEQ ID NO: 2803984 - RNA, 19 nt, Artificial Sequence
  Description of Artificial Sequence: Synthetic oligonucleotide
gccaaccggagacagguuc

SEQ ID NO: 2803985 - RNA, 19 nt, Artificial Sequence
  Description of Artificial Sequence: Synthetic oligonucleotide
ggugacucugccaaccgga

SEQ ID NO: 2803986 - RNA, 19 nt, Artificial Sequence
  Description of Artificial Sequence: Synthetic oligonucleotide
accagcuggcaugacuacu

SEQ ID NO: 2803987 - RNA, 19 nt, Artificial Sequence
  Description of Artificial Sequence: Synthetic oligonucleotide
ggcaugacuacugaucucu

SEQ ID NO: 2803988 - RNA, 19 nt, Artificial Sequence
  Description of Artificial Sequence: Synthetic oligonucleotide
ugccucggugcagauucgc

SEQ ID NO: 2803989 - RNA, 19 nt, Artificial Sequence
  Description of Artificial Sequence: Synthetic oligonucleotide
cuccaccggcuaauauagc

SEQ ID NO: 2803990 - RNA, 19 nt, Artificial Sequence
  Description of Artificial Sequence: Synthetic oligonucleotide
uuggggugacucugccaac

SEQ ID NO: 2803991 - RNA, 19 nt, Artificial Sequence
  Description of Artificial Sequence: Synthetic oligonucleotide
cggcuaauauagcauuucc

SEQ ID NO: 2803992 - RNA, 19 nt, Artificial Sequence
  Description of Artificial Sequence: Synthetic oligonucleotide
acaucgcggagaaguagcu

SEQ ID NO: 2803993 - RNA, 19 nt, Artificial Sequence
  Description of Artificial Sequence: Synthetic oligonucleotide
uccgcuucugguggcucug

SEQ ID NO: 2803994 - RNA, 19 nt, Artificial Sequence
  Description of Artificial Sequence: Synthetic oligonucleotide
ccuugcuaccacuugcuga

SEQ ID NO: 2803995 - RNA, 19 nt, Artificial Sequence
  Description of Artificial Sequence: Synthetic oligonucleotide
uggagacggcuuagugcgu

SEQ ID NO: 2803996 - RNA, 19 nt, Artificial Sequence
  Description of Artificial Sequence: Synthetic oligonucleotide
caucgcggagaaguagcug

SEQ ID NO: 2803997 - RNA, 19 nt, Artificial Sequence
  Description of Artificial Sequence: Synthetic oligonucleotide
ggagacagguuccauucua

SEQ ID NO: 2803998 - RNA, 19 nt, Artificial Sequence
  Description of Artificial Sequence: Synthetic oligonucleotide
uggcucugccuugcuacca

SEQ ID NO: 2803999 - RNA, 19 nt, Artificial Sequence
  Description of Artificial Sequence: Synthetic oligonucleotide
auucgcccgggauacccuu

SEQ ID NO: 2804000 - RNA, 19 nt, Artificial Sequence
  Description of Artificial Sequence: Synthetic oligonucleotide
auauguccauguagaaaua

SEQ ID NO: 2804001 - RNA, 19 nt, Artificial Sequence
  Description of Artificial Sequence: Synthetic oligonucleotide
cugccucggugcagauucg

SEQ ID NO: 2804002 - RNA, 19 nt, Artificial Sequence
  Description of Artificial Sequence: Synthetic oligonucleotide
cuccauuccuuugggguga

SEQ ID NO: 2804003 - RNA, 19 nt, Artificial Sequence
  Description of Artificial Sequence: Synthetic oligonucleotide
gacuacugaucucuccauu

SEQ ID NO: 2804004 - RNA, 19 nt, Artificial Sequence
  Description of Artificial Sequence: Synthetic oligonucleotide
gguuccauucuauuccaau

SEQ ID NO: 2804005 - RNA, 19 nt, Artificial Sequence
  Description of Artificial Sequence: Synthetic oligonucleotide
cggcuuagugcguuucugg

SEQ ID NO: 2804006 - RNA, 19 nt, Artificial Sequence
  Description of Artificial Sequence: Synthetic oligonucleotide
cugccaaccggagacaggu

SEQ ID NO: 2804007 - RNA, 19 nt, Artificial Sequence
  Description of Artificial Sequence: Synthetic oligonucleotide
gacggcuuagugcguuucu

SEQ ID NO: 2804008 - RNA, 19 nt, Artificial Sequence
  Description of Artificial Sequence: Synthetic oligonucleotide
uuauaccagcuggcaugac

SEQ ID NO: 2804009 - RNA, 19 nt, Artificial Sequence
  Description of Artificial Sequence: Synthetic oligonucleotide
ccuuuggggugacucugcc

SEQ ID NO: 2804010 - RNA, 19 nt, Artificial Sequence
  Description of Artificial Sequence: Synthetic oligonucleotide
gagacagguuccauucuau

SEQ ID NO: 2804011 - RNA, 19 nt, Artificial Sequence
  Description of Artificial Sequence: Synthetic oligonucleotide
accggcuaauauagcauuu

SEQ ID NO: 2804012 - RNA, 19 nt, Artificial Sequence
  Description of Artificial Sequence: Synthetic oligonucleotide
aaccggagacagguuccau

SEQ ID NO: 2804013 - RNA, 19 nt, Artificial Sequence
  Description of Artificial Sequence: Synthetic oligonucleotide
caguuacugccucggugca

SEQ ID NO: 2804014 - RNA, 19 nt, Artificial Sequence
  Description of Artificial Sequence: Synthetic oligonucleotide
gguguccgcuucugguggc

SEQ ID NO: 2804015 - RNA, 19 nt, Artificial Sequence
  Description of Artificial Sequence: Synthetic oligonucleotide
gcguuucuggcgaagggca

SEQ ID NO: 2804016 - RNA, 19 nt, Artificial Sequence
  Description of Artificial Sequence: Synthetic oligonucleotide
ggcucugccuugcuaccac

SEQ ID NO: 2804017 - RNA, 19 nt, Artificial Sequence
  Description of Artificial Sequence: Synthetic oligonucleotide
uuacugccucggugcagau

SEQ ID NO: 2804018 - RNA, 19 nt, Artificial Sequence
  Description of Artificial Sequence: Synthetic oligonucleotide
ggaccacaguuacugccuc

SEQ ID NO: 2804019 - RNA, 19 nt, Artificial Sequence
  Description of Artificial Sequence: Synthetic oligonucleotide
uccauuccuuuggggugac

SEQ ID NO: 2804020 - RNA, 19 nt, Artificial Sequence
  Description of Artificial Sequence: Synthetic oligonucleotide
gccuugcuaccacuugcug

SEQ ID NO: 2804021 - RNA, 19 nt, Artificial Sequence
  Description of Artificial Sequence: Synthetic oligonucleotide
uguccgcuucugguggcuc

SEQ ID NO: 2804022 - RNA, 19 nt, Artificial Sequence
  Description of Artificial Sequence: Synthetic oligonucleotide
ggaaauucgguguccgcuu

SEQ ID NO: 2804023 - RNA, 19 nt, Artificial Sequence
  Description of Artificial Sequence: Synthetic oligonucleotide
ccauguagaaauacagaau

SEQ ID NO: 2804024 - RNA, 19 nt, Artificial Sequence
  Description of Artificial Sequence: Synthetic oligonucleotide
cugaucucuccauuccuuu

SEQ ID NO: 2804025 - RNA, 19 nt, Artificial Sequence
  Description of Artificial Sequence: Synthetic oligonucleotide
ccauucuauuccaauuugu

SEQ ID NO: 2804026 - RNA, 19 nt, Artificial Sequence
  Description of Artificial Sequence: Synthetic oligonucleotide
uucuggcgaagggcaacau

SEQ ID NO: 2804027 - RNA, 19 nt, Artificial Sequence
  Description of Artificial Sequence: Synthetic oligonucleotide
ugccaaccggagacagguu

SEQ ID NO: 2804028 - RNA, 19 nt, Artificial Sequence
  Description of Artificial Sequence: Synthetic oligonucleotide
ccggcuaauauagcauuuc

SEQ ID NO: 2804029 - RNA, 19 nt, Artificial Sequence
  Description of Artificial Sequence: Synthetic oligonucleotide
cagcuggcaugacuacuga

SEQ ID NO: 2804030 - RNA, 19 nt, Artificial Sequence
  Description of Artificial Sequence: Synthetic oligonucleotide
cgaagggcaacaucgcgga

SEQ ID NO: 2804031 - RNA, 19 nt, Artificial Sequence
  Description of Artificial Sequence: Synthetic oligonucleotide
cgguguccgcuucuggugg

SEQ ID NO: 2804032 - RNA, 19 nt, Artificial Sequence
  Description of Artificial Sequence: Synthetic oligonucleotide
cacuugcugaaugcuucga

SEQ ID NO: 2804033 - RNA, 19 nt, Artificial Sequence
  Description of Artificial Sequence: Synthetic oligonucleotide
caccggcuaauauagcauu

SEQ ID NO: 2804034 - RNA, 19 nt, Artificial Sequence
  Description of Artificial Sequence: Synthetic oligonucleotide
cugaaacugcagggaccac

SEQ ID NO: 2804035 - RNA, 19 nt, Artificial Sequence
  Description of Artificial Sequence: Synthetic oligonucleotide
caaccggagacagguucca

SEQ ID NO: 2804036 - RNA, 19 nt, Artificial Sequence
  Description of Artificial Sequence: Synthetic oligonucleotide
ggugcagauucgcccggga

SEQ ID NO: 2804037 - RNA, 19 nt, Artificial Sequence
  Description of Artificial Sequence: Synthetic oligonucleotide
agagcuccaccggcuaaua

SEQ ID NO: 2804038 - RNA, 19 nt, Artificial Sequence
  Description of Artificial Sequence: Synthetic oligonucleotide
gauucgcccgggauacccu

SEQ ID NO: 2804039 - RNA, 19 nt, Artificial Sequence
  Description of Artificial Sequence: Synthetic oligonucleotide
ccaauuuguguuacuguau

SEQ ID NO: 2804040 - RNA, 19 nt, Artificial Sequence
  Description of Artificial Sequence: Synthetic oligonucleotide
uacugccucggugcagauu

SEQ ID NO: 2804041 - RNA, 19 nt, Artificial Sequence
  Description of Artificial Sequence: Synthetic oligonucleotide
cagauucgcccgggauacc

SEQ ID NO: 2804042 - RNA, 19 nt, Artificial Sequence
  Description of Artificial Sequence: Synthetic oligonucleotide
gugcagauucgcccgggau

SEQ ID NO: 2804043 - RNA, 19 nt, Artificial Sequence
  Description of Artificial Sequence: Synthetic oligonucleotide
gccucggugcagauucgcc

SEQ ID NO: 2804044 - RNA, 19 nt, Artificial Sequence
  Description of Artificial Sequence: Synthetic oligonucleotide
gggaccacaguuacugccu

SEQ ID NO: 2804045 - RNA, 19 nt, Artificial Sequence
  Description of Artificial Sequence: Synthetic oligonucleotide
gagcuccaccggcuaauau

SEQ ID NO: 2804046 - RNA, 19 nt, Artificial Sequence
  Description of Artificial Sequence: Synthetic oligonucleotide
cgaacuuggagacggcuua

SEQ ID NO: 2804047 - RNA, 19 nt, Artificial Sequence
  Description of Artificial Sequence: Synthetic oligonucleotide
guccgcuucugguggcucu

SEQ ID NO: 2804048 - RNA, 19 nt, Artificial Sequence
  Description of Artificial Sequence: Synthetic oligonucleotide
gcaacaucgcggagaagua

SEQ ID NO: 2804049 - RNA, 19 nt, Artificial Sequence
  Description of Artificial Sequence: Synthetic oligonucleotide
gcaugacuacugaucucuc

SEQ ID NO: 2804050 - RNA, 19 nt, Artificial Sequence
  Description of Artificial Sequence: Synthetic oligonucleotide
gagacggcuuagugcguuu

SEQ ID NO: 2804051 - RNA, 19 nt, Artificial Sequence
  Description of Artificial Sequence: Synthetic oligonucleotide
cggagaaguagcugaaacu

SEQ ID NO: 2804052 - RNA, 19 nt, Artificial Sequence
  Description of Artificial Sequence: Synthetic oligonucleotide
cucugccuugcuaccacuu

SEQ ID NO: 2804053 - RNA, 19 nt, Artificial Sequence
  Description of Artificial Sequence: Synthetic oligonucleotide
ccaccggcuaauauagcau

SEQ ID NO: 2804054 - RNA, 19 nt, Artificial Sequence
  Description of Artificial Sequence: Synthetic oligonucleotide
gcucugccuugcuaccacu

SEQ ID NO: 2804055 - RNA, 19 nt, Artificial Sequence
  Description of Artificial Sequence: Synthetic oligonucleotide
ggagacggcuuagugcguu

SEQ ID NO: 2804056 - RNA, 19 nt, Artificial Sequence
  Description of Artificial Sequence: Synthetic oligonucleotide
guguccgcuucugguggcu

SEQ ID NO: 2804057 - RNA, 19 nt, Artificial Sequence
  Description of Artificial Sequence: Synthetic oligonucleotide
cguuucuggcgaagggcaa

SEQ ID NO: 2804058 - RNA, 19 nt, Artificial Sequence
  Description of Artificial Sequence: Synthetic oligonucleotide
gggcaacaucgcggagaag

SEQ ID NO: 2804059 - RNA, 19 nt, Artificial Sequence
  Description of Artificial Sequence: Synthetic oligonucleotide
ccgcuucugguggcucugc

SEQ ID NO: 2804060 - RNA, 19 nt, Artificial Sequence
  Description of Artificial Sequence: Synthetic oligonucleotide
cggugcagauucgcccggg

SEQ ID NO: 2804061 - RNA, 19 nt, Artificial Sequence
  Description of Artificial Sequence: Synthetic oligonucleotide
ccacaguuacugccucggu

SEQ ID NO: 2804062 - RNA, 19 nt, Artificial Sequence
  Description of Artificial Sequence: Synthetic oligonucleotide
cggagacagguuccauucu

SEQ ID NO: 2804063 - RNA, 19 nt, Artificial Sequence
  Description of Artificial Sequence: Synthetic oligonucleotide
cgcggagaaguagcugaaa

SEQ ID NO: 2804064 - RNA, 19 nt, Artificial Sequence
  Description of Artificial Sequence: Synthetic oligonucleotide
ccauuccuuuggggugacu

SEQ ID NO: 2804065 - RNA, 19 nt, Artificial Sequence
  Description of Artificial Sequence: Synthetic oligonucleotide
aauacugaugccgaggacc

SEQ ID NO: 2804066 - RNA, 19 nt, Artificial Sequence
  Description of Artificial Sequence: Synthetic oligonucleotide
aaauaguuuauuuugcugu

SEQ ID NO: 2804067 - RNA, 19 nt, Artificial Sequence
  Description of Artificial Sequence: Synthetic oligonucleotide
aaugcuugcucuuucugcc

SEQ ID NO: 2804068 - RNA, 19 nt, Artificial Sequence
  Description of Artificial Sequence: Synthetic oligonucleotide
accaaauagacguaagcgc

SEQ ID NO: 2804069 - RNA, 19 nt, Artificial Sequence
  Description of Artificial Sequence: Synthetic oligonucleotide
aaaauaguuuauuuugcug

SEQ ID NO: 2804070 - RNA, 19 nt, Artificial Sequence
  Description of Artificial Sequence: Synthetic oligonucleotide
uuucaaacaacucgguagg

SEQ ID NO: 2804071 - RNA, 19 nt, Artificial Sequence
  Description of Artificial Sequence: Synthetic oligonucleotide
ucugcaaagaauauccacc

SEQ ID NO: 2804072 - RNA, 19 nt, Artificial Sequence
  Description of Artificial Sequence: Synthetic oligonucleotide
gauaacuacaccccaacag

SEQ ID NO: 2804073 - RNA, 19 nt, Artificial Sequence
  Description of Artificial Sequence: Synthetic oligonucleotide
cuuucaaacaacucgguag

SEQ ID NO: 2804074 - RNA, 19 nt, Artificial Sequence
  Description of Artificial Sequence: Synthetic oligonucleotide
auaacuacaccccaacagg

SEQ ID NO: 2804075 - RNA, 19 nt, Artificial Sequence
  Description of Artificial Sequence: Synthetic oligonucleotide
acaucugcaaagaauaucc

SEQ ID NO: 2804076 - RNA, 19 nt, Artificial Sequence
  Description of Artificial Sequence: Synthetic oligonucleotide
aacuguaaacauccagagc

SEQ ID NO: 2804077 - RNA, 19 nt, Artificial Sequence
  Description of Artificial Sequence: Synthetic oligonucleotide
aauggagacagcaaguauc

SEQ ID NO: 2804078 - RNA, 19 nt, Artificial Sequence
  Description of Artificial Sequence: Synthetic oligonucleotide
uccaccaacacaaugcuug

SEQ ID NO: 2804079 - RNA, 19 nt, Artificial Sequence
  Description of Artificial Sequence: Synthetic oligonucleotide
auauccaccaacacaaugc

SEQ ID NO: 2804080 - RNA, 19 nt, Artificial Sequence
  Description of Artificial Sequence: Synthetic oligonucleotide
uaaaaugaagcgcaucucu

SEQ ID NO: 2804081 - RNA, 19 nt, Artificial Sequence
  Description of Artificial Sequence: Synthetic oligonucleotide
gaaaacuguaaacauccag

SEQ ID NO: 2804082 - RNA, 19 nt, Artificial Sequence
  Description of Artificial Sequence: Synthetic oligonucleotide
ugucaggauaacuacaccc

SEQ ID NO: 2804083 - RNA, 19 nt, Artificial Sequence
  Description of Artificial Sequence: Synthetic oligonucleotide
ggugcuuucaaacaacucg

SEQ ID NO: 2804084 - RNA, 19 nt, Artificial Sequence
  Description of Artificial Sequence: Synthetic oligonucleotide
aaagaauggcaguucaugu

SEQ ID NO: 2804085 - RNA, 19 nt, Artificial Sequence
  Description of Artificial Sequence: Synthetic oligonucleotide
agaggagaaaacuguaaac

SEQ ID NO: 2804086 - RNA, 19 nt, Artificial Sequence
  Description of Artificial Sequence: Synthetic oligonucleotide
aaugaagcgcaucucuguc

SEQ ID NO: 2804087 - RNA, 19 nt, Artificial Sequence
  Description of Artificial Sequence: Synthetic oligonucleotide
aauauccaccaacacaaug

SEQ ID NO: 2804088 - RNA, 19 nt, Artificial Sequence
  Description of Artificial Sequence: Synthetic oligonucleotide
uuuuaaaagccgaauccug

SEQ ID NO: 2804089 - RNA, 19 nt, Artificial Sequence
  Description of Artificial Sequence: Synthetic oligonucleotide
guugucacagucuucuugg

SEQ ID NO: 2804090 - RNA, 19 nt, Artificial Sequence
  Description of Artificial Sequence: Synthetic oligonucleotide
uuuaaaagccgaauccugu

SEQ ID NO: 2804091 - RNA, 19 nt, Artificial Sequence
  Description of Artificial Sequence: Synthetic oligonucleotide
uuuauaaccugagaggaga

SEQ ID NO: 2804092 - RNA, 19 nt, Artificial Sequence
  Description of Artificial Sequence: Synthetic oligonucleotide
uaaaagccgaauccugugg

SEQ ID NO: 2804093 - RNA, 19 nt, Artificial Sequence
  Description of Artificial Sequence: Synthetic oligonucleotide
aggaaauggagacagcaag

SEQ ID NO: 2804094 - RNA, 19 nt, Artificial Sequence
  Description of Artificial Sequence: Synthetic oligonucleotide
caacaggcaauacugaugc

SEQ ID NO: 2804095 - RNA, 19 nt, Artificial Sequence
  Description of Artificial Sequence: Synthetic oligonucleotide
aucugcaaagaauauccac

SEQ ID NO: 2804096 - RNA, 19 nt, Artificial Sequence
  Description of Artificial Sequence: Synthetic oligonucleotide
acgucuuaaaaugaagcgc

SEQ ID NO: 2804097 - RNA, 19 nt, Artificial Sequence
  Description of Artificial Sequence: Synthetic oligonucleotide
aguucauguugucacaguc

SEQ ID NO: 2804098 - RNA, 19 nt, Artificial Sequence
  Description of Artificial Sequence: Synthetic oligonucleotide
cuuggcacgucuuaaaaug

SEQ ID NO: 2804099 - RNA, 19 nt, Artificial Sequence
  Description of Artificial Sequence: Synthetic oligonucleotide
uaaacauccagagccaaag

SEQ ID NO: 2804100 - RNA, 19 nt, Artificial Sequence
  Description of Artificial Sequence: Synthetic oligonucleotide
gauuccaagcuucaugggc

SEQ ID NO: 2804101 - RNA, 19 nt, Artificial Sequence
  Description of Artificial Sequence: Synthetic oligonucleotide
cacgucuuaaaaugaagcg

SEQ ID NO: 2804102 - RNA, 19 nt, Artificial Sequence
  Description of Artificial Sequence: Synthetic oligonucleotide
uccacaucugcaaagaaua

SEQ ID NO: 2804103 - RNA, 19 nt, Artificial Sequence
  Description of Artificial Sequence: Synthetic oligonucleotide
gaugccgaggaccaucugg

SEQ ID NO: 2804104 - RNA, 19 nt, Artificial Sequence
  Description of Artificial Sequence: Synthetic oligonucleotide
agaauggcaguucauguug

SEQ ID NO: 2804105 - RNA, 19 nt, Artificial Sequence
  Description of Artificial Sequence: Synthetic oligonucleotide
uauuugccccuuuauaacc

SEQ ID NO: 2804106 - RNA, 19 nt, Artificial Sequence
  Description of Artificial Sequence: Synthetic oligonucleotide
aaaugaagcgcaucucugu

SEQ ID NO: 2804107 - RNA, 19 nt, Artificial Sequence
  Description of Artificial Sequence: Synthetic oligonucleotide
ucugucaggauaacuacac

SEQ ID NO: 2804108 - RNA, 19 nt, Artificial Sequence
  Description of Artificial Sequence: Synthetic oligonucleotide
aacauccagagccaaagaa

SEQ ID NO: 2804109 - RNA, 19 nt, Artificial Sequence
  Description of Artificial Sequence: Synthetic oligonucleotide
agcaaguaucugcuggugc

SEQ ID NO: 2804110 - RNA, 19 nt, Artificial Sequence
  Description of Artificial Sequence: Synthetic oligonucleotide
auuccaagcuucaugggcc

SEQ ID NO: 2804111 - RNA, 19 nt, Artificial Sequence
  Description of Artificial Sequence: Synthetic oligonucleotide
accaacacaaugcuugcuc

SEQ ID NO: 2804112 - RNA, 19 nt, Artificial Sequence
  Description of Artificial Sequence: Synthetic oligonucleotide
agacguaagcgccggaccc

SEQ ID NO: 2804113 - RNA, 19 nt, Artificial Sequence
  Description of Artificial Sequence: Synthetic oligonucleotide
uuaaaagccgaauccugug

SEQ ID NO: 2804114 - RNA, 19 nt, Artificial Sequence
  Description of Artificial Sequence: Synthetic oligonucleotide
ucugcuggugcuuucaaac

SEQ ID NO: 2804115 - RNA, 19 nt, Artificial Sequence
  Description of Artificial Sequence: Synthetic oligonucleotide
aggauaacuacaccccaac

SEQ ID NO: 2804116 - RNA, 19 nt, Artificial Sequence
  Description of Artificial Sequence: Synthetic oligonucleotide
caccaaauagacguaagcg

SEQ ID NO: 2804117 - RNA, 19 nt, Artificial Sequence
  Description of Artificial Sequence: Synthetic oligonucleotide
aauaguuuauuuugcuguu

SEQ ID NO: 2804118 - RNA, 19 nt, Artificial Sequence
  Description of Artificial Sequence: Synthetic oligonucleotide
uuauuugccccuuuauaac

SEQ ID NO: 2804119 - RNA, 19 nt, Artificial Sequence
  Description of Artificial Sequence: Synthetic oligonucleotide
acaggcaauacugaugccg

SEQ ID NO: 2804120 - RNA, 19 nt, Artificial Sequence
  Description of Artificial Sequence: Synthetic oligonucleotide
uaacuacaccccaacaggc

SEQ ID NO: 2804121 - RNA, 19 nt, Artificial Sequence
  Description of Artificial Sequence: Synthetic oligonucleotide
aauccuguggaggggaggg

SEQ ID NO: 2804122 - RNA, 19 nt, Artificial Sequence
  Description of Artificial Sequence: Synthetic oligonucleotide
cauccagagccaaagaaug

SEQ ID NO: 2804123 - RNA, 19 nt, Artificial Sequence
  Description of Artificial Sequence: Synthetic oligonucleotide
aaauagacguaagcgccgg

SEQ ID NO: 2804124 - RNA, 19 nt, Artificial Sequence
  Description of Artificial Sequence: Synthetic oligonucleotide
gggauuccaagcuucaugg

SEQ ID NO: 2804125 - RNA, 19 nt, Artificial Sequence
  Description of Artificial Sequence: Synthetic oligonucleotide
caaauagacguaagcgccg

SEQ ID NO: 2804126 - RNA, 19 nt, Artificial Sequence
  Description of Artificial Sequence: Synthetic oligonucleotide
caaagaauauccaccaaca

SEQ ID NO: 2804127 - RNA, 19 nt, Artificial Sequence
  Description of Artificial Sequence: Synthetic oligonucleotide
aaaaugaagcgcaucucug

SEQ ID NO: 2804128 - RNA, 19 nt, Artificial Sequence
  Description of Artificial Sequence: Synthetic oligonucleotide
ugggauuccaagcuucaug

SEQ ID NO: 2804129 - RNA, 19 nt, Artificial Sequence
  Description of Artificial Sequence: Synthetic oligonucleotide
aaagccgaauccuguggag

SEQ ID NO: 2804130 - RNA, 19 nt, Artificial Sequence
  Description of Artificial Sequence: Synthetic oligonucleotide
aauggcaguucauguuguc

SEQ ID NO: 2804131 - RNA, 19 nt, Artificial Sequence
  Description of Artificial Sequence: Synthetic oligonucleotide
ugaagcgcaucucugucca

SEQ ID NO: 2804132 - RNA, 19 nt, Artificial Sequence
  Description of Artificial Sequence: Synthetic oligonucleotide
aaauggagacagcaaguau

SEQ ID NO: 2804133 - RNA, 19 nt, Artificial Sequence
  Description of Artificial Sequence: Synthetic oligonucleotide
uauccaccaacacaaugcu

SEQ ID NO: 2804134 - RNA, 19 nt, Artificial Sequence
  Description of Artificial Sequence: Synthetic oligonucleotide
caaugcuugcucuuucugc

SEQ ID NO: 2804135 - RNA, 19 nt, Artificial Sequence
  Description of Artificial Sequence: Synthetic oligonucleotide
ucaggauaacuacacccca

SEQ ID NO: 2804136 - RNA, 19 nt, Artificial Sequence
  Description of Artificial Sequence: Synthetic oligonucleotide
cuuuauaaccugagaggag

SEQ ID NO: 2804137 - RNA, 19 nt, Artificial Sequence
  Description of Artificial Sequence: Synthetic oligonucleotide
aacaggcaauacugaugcc

SEQ ID NO: 2804138 - RNA, 19 nt, Artificial Sequence
  Description of Artificial Sequence: Synthetic oligonucleotide
ccaaauagacguaagcgcc

SEQ ID NO: 2804139 - RNA, 19 nt, Artificial Sequence
  Description of Artificial Sequence: Synthetic oligonucleotide
uucauguugucacagucuu

SEQ ID NO: 2804140 - RNA, 19 nt, Artificial Sequence
  Description of Artificial Sequence: Synthetic oligonucleotide
aggagaaaacuguaaacau

SEQ ID NO: 2804141 - RNA, 19 nt, Artificial Sequence
  Description of Artificial Sequence: Synthetic oligonucleotide
ucccuuucgggucugucag

SEQ ID NO: 2804142 - RNA, 19 nt, Artificial Sequence
  Description of Artificial Sequence: Synthetic oligonucleotide
aagaauggcaguucauguu

SEQ ID NO: 2804143 - RNA, 19 nt, Artificial Sequence
  Description of Artificial Sequence: Synthetic oligonucleotide
cuuucugccgugcagccag

SEQ ID NO: 2804144 - RNA, 19 nt, Artificial Sequence
  Description of Artificial Sequence: Synthetic oligonucleotide
cuuaaaaugaagcgcaucu

SEQ ID NO: 2804145 - RNA, 19 nt, Artificial Sequence
  Description of Artificial Sequence: Synthetic oligonucleotide
gugcuuucaaacaacucgg

SEQ ID NO: 2804146 - RNA, 19 nt, Artificial Sequence
  Description of Artificial Sequence: Synthetic oligonucleotide
ugagaggagaaaacuguaa

SEQ ID NO: 2804147 - RNA, 19 nt, Artificial Sequence
  Description of Artificial Sequence: Synthetic oligonucleotide
uaaccugagaggagaaaac

SEQ ID NO: 2804148 - RNA, 19 nt, Artificial Sequence
  Description of Artificial Sequence: Synthetic oligonucleotide
caaagaauggcaguucaug

SEQ ID NO: 2804149 - RNA, 19 nt, Artificial Sequence
  Description of Artificial Sequence: Synthetic oligonucleotide
ggagacagcaaguaucugc

SEQ ID NO: 2804150 - RNA, 19 nt, Artificial Sequence
  Description of Artificial Sequence: Synthetic oligonucleotide
uaguuuauuuugcuguuuu

SEQ ID NO: 2804151 - RNA, 19 nt, Artificial Sequence
  Description of Artificial Sequence: Synthetic oligonucleotide
uauguugccugguugcggu

SEQ ID NO: 2804152 - RNA, 19 nt, Artificial Sequence
  Description of Artificial Sequence: Synthetic oligonucleotide
auagacguaagcgccggac

SEQ ID NO: 2804153 - RNA, 19 nt, Artificial Sequence
  Description of Artificial Sequence: Synthetic oligonucleotide
agccgaauccuguggaggg

SEQ ID NO: 2804154 - RNA, 19 nt, Artificial Sequence
  Description of Artificial Sequence: Synthetic oligonucleotide
aacucgguaggccuucccu

SEQ ID NO: 2804155 - RNA, 19 nt, Artificial Sequence
  Description of Artificial Sequence: Synthetic oligonucleotide
uccagagccaaagaauggc

SEQ ID NO: 2804156 - RNA, 19 nt, Artificial Sequence
  Description of Artificial Sequence: Synthetic oligonucleotide
aagccgaauccuguggagg

SEQ ID NO: 2804157 - RNA, 19 nt, Artificial Sequence
  Description of Artificial Sequence: Synthetic oligonucleotide
uagacguaagcgccggacc

SEQ ID NO: 2804158 - RNA, 19 nt, Artificial Sequence
  Description of Artificial Sequence: Synthetic oligonucleotide
aaccugagaggagaaaacu

SEQ ID NO: 2804159 - RNA, 19 nt, Artificial Sequence
  Description of Artificial Sequence: Synthetic oligonucleotide
accccaagagcgcggaccc

SEQ ID NO: 2804160 - RNA, 19 nt, Artificial Sequence
  Description of Artificial Sequence: Synthetic oligonucleotide
gagaggagaaaacuguaaa

SEQ ID NO: 2804161 - RNA, 19 nt, Artificial Sequence
  Description of Artificial Sequence: Synthetic oligonucleotide
guugcggugggauuccaag

SEQ ID NO: 2804162 - RNA, 19 nt, Artificial Sequence
  Description of Artificial Sequence: Synthetic oligonucleotide
ucacagucuucuuggcacg

SEQ ID NO: 2804163 - RNA, 19 nt, Artificial Sequence
  Description of Artificial Sequence: Synthetic oligonucleotide
ugucacagucuucuuggca

SEQ ID NO: 2804164 - RNA, 19 nt, Artificial Sequence
  Description of Artificial Sequence: Synthetic oligonucleotide
aaacauccagagccaaaga

SEQ ID NO: 2804165 - RNA, 19 nt, Artificial Sequence
  Description of Artificial Sequence: Synthetic oligonucleotide
uuggcacgucuuaaaauga

SEQ ID NO: 2804166 - RNA, 19 nt, Artificial Sequence
  Description of Artificial Sequence: Synthetic oligonucleotide
ugcggugggauuccaagcu

SEQ ID NO: 2804167 - RNA, 19 nt, Artificial Sequence
  Description of Artificial Sequence: Synthetic oligonucleotide
gcaaagaauauccaccaac

SEQ ID NO: 2804168 - RNA, 19 nt, Artificial Sequence
  Description of Artificial Sequence: Synthetic oligonucleotide
auaaccugagaggagaaaa

SEQ ID NO: 2804169 - RNA, 19 nt, Artificial Sequence
  Description of Artificial Sequence: Synthetic oligonucleotide
uucaugggccuccuggcca

SEQ ID NO: 2804170 - RNA, 19 nt, Artificial Sequence
  Description of Artificial Sequence: Synthetic oligonucleotide
cccuuuauaaccugagagg

SEQ ID NO: 2804171 - RNA, 19 nt, Artificial Sequence
  Description of Artificial Sequence: Synthetic oligonucleotide
gucaggauaacuacacccc

SEQ ID NO: 2804172 - RNA, 19 nt, Artificial Sequence
  Description of Artificial Sequence: Synthetic oligonucleotide
uuucgggucugucaggaua

SEQ ID NO: 2804173 - RNA, 19 nt, Artificial Sequence
  Description of Artificial Sequence: Synthetic oligonucleotide
uuaaaaugaagcgcaucuc

SEQ ID NO: 2804174 - RNA, 19 nt, Artificial Sequence
  Description of Artificial Sequence: Synthetic oligonucleotide
cuggccaccaaauagacgu

SEQ ID NO: 2804175 - RNA, 19 nt, Artificial Sequence
  Description of Artificial Sequence: Synthetic oligonucleotide
uucuuggcacgucuuaaaa

SEQ ID NO: 2804176 - RNA, 19 nt, Artificial Sequence
  Description of Artificial Sequence: Synthetic oligonucleotide
agagccaaagaauggcagu

SEQ ID NO: 2804177 - RNA, 19 nt, Artificial Sequence
  Description of Artificial Sequence: Synthetic oligonucleotide
uuauaaccugagaggagaa

SEQ ID NO: 2804178 - RNA, 19 nt, Artificial Sequence
  Description of Artificial Sequence: Synthetic oligonucleotide
cagagccaaagaauggcag

SEQ ID NO: 2804179 - RNA, 19 nt, Artificial Sequence
  Description of Artificial Sequence: Synthetic oligonucleotide
agccaggaaauggagacag

SEQ ID NO: 2804180 - RNA, 19 nt, Artificial Sequence
  Description of Artificial Sequence: Synthetic oligonucleotide
aacaacucgguaggccuuc

SEQ ID NO: 2804181 - RNA, 19 nt, Artificial Sequence
  Description of Artificial Sequence: Synthetic oligonucleotide
acaaugcuugcucuuucug

SEQ ID NO: 2804182 - RNA, 19 nt, Artificial Sequence
  Description of Artificial Sequence: Synthetic oligonucleotide
uaggccuucccuuucgggu

SEQ ID NO: 2804183 - RNA, 19 nt, Artificial Sequence
  Description of Artificial Sequence: Synthetic oligonucleotide
ugcuggugcuuucaaacaa

SEQ ID NO: 2804184 - RNA, 19 nt, Artificial Sequence
  Description of Artificial Sequence: Synthetic oligonucleotide
acacaaugcuugcucuuuc

SEQ ID NO: 2804185 - RNA, 19 nt, Artificial Sequence
  Description of Artificial Sequence: Synthetic oligonucleotide
agcgccggaccccaagagc

SEQ ID NO: 2804186 - RNA, 19 nt, Artificial Sequence
  Description of Artificial Sequence: Synthetic oligonucleotide
ucuuggcacgucuuaaaau

SEQ ID NO: 2804187 - RNA, 19 nt, Artificial Sequence
  Description of Artificial Sequence: Synthetic oligonucleotide
ucuuaaaaugaagcgcauc

SEQ ID NO: 2804188 - RNA, 19 nt, Artificial Sequence
  Description of Artificial Sequence: Synthetic oligonucleotide
ugccccuuuauaaccugag

SEQ ID NO: 2804189 - RNA, 19 nt, Artificial Sequence
  Description of Artificial Sequence: Synthetic oligonucleotide
uucgggucugucaggauaa

SEQ ID NO: 2804190 - RNA, 19 nt, Artificial Sequence
  Description of Artificial Sequence: Synthetic oligonucleotide
acagcaaguaucugcuggu

SEQ ID NO: 2804191 - RNA, 19 nt, Artificial Sequence
  Description of Artificial Sequence: Synthetic oligonucleotide
cugcaaagaauauccacca

SEQ ID NO: 2804192 - RNA, 19 nt, Artificial Sequence
  Description of Artificial Sequence: Synthetic oligonucleotide
ugcagccaggaaauggaga

SEQ ID NO: 2804193 - RNA, 19 nt, Artificial Sequence
  Description of Artificial Sequence: Synthetic oligonucleotide
uucccuuucgggucuguca

SEQ ID NO: 2804194 - RNA, 19 nt, Artificial Sequence
  Description of Artificial Sequence: Synthetic oligonucleotide
acugaugccgaggaccauc

SEQ ID NO: 2804195 - RNA, 19 nt, Artificial Sequence
  Description of Artificial Sequence: Synthetic oligonucleotide
caagcgacagcuccagcag

SEQ ID NO: 2804196 - RNA, 19 nt, Artificial Sequence
  Description of Artificial Sequence: Synthetic oligonucleotide
uguugccugguugcggugg

SEQ ID NO: 2804197 - RNA, 19 nt, Artificial Sequence
  Description of Artificial Sequence: Synthetic oligonucleotide
agagcgcggacccggaaag

SEQ ID NO: 2804198 - RNA, 19 nt, Artificial Sequence
  Description of Artificial Sequence: Synthetic oligonucleotide
aguaucugcuggugcuuuc

SEQ ID NO: 2804199 - RNA, 19 nt, Artificial Sequence
  Description of Artificial Sequence: Synthetic oligonucleotide
aucugggcuauguugccug

SEQ ID NO: 2804200 - RNA, 19 nt, Artificial Sequence
  Description of Artificial Sequence: Synthetic oligonucleotide
uccuguggaggggagggcg

SEQ ID NO: 2804201 - RNA, 19 nt, Artificial Sequence
  Description of Artificial Sequence: Synthetic oligonucleotide
ugcuuucaaacaacucggu

SEQ ID NO: 2804202 - RNA, 19 nt, Artificial Sequence
  Description of Artificial Sequence: Synthetic oligonucleotide
uuugccccuuuauaaccug

SEQ ID NO: 2804203 - RNA, 19 nt, Artificial Sequence
  Description of Artificial Sequence: Synthetic oligonucleotide
accccaacaggcaauacug

SEQ ID NO: 2804204 - RNA, 19 nt, Artificial Sequence
  Description of Artificial Sequence: Synthetic oligonucleotide
aggccuucccuuucggguc

SEQ ID NO: 2804205 - RNA, 19 nt, Artificial Sequence
  Description of Artificial Sequence: Synthetic oligonucleotide
ccccuuuauaaccugagag

SEQ ID NO: 2804206 - RNA, 19 nt, Artificial Sequence
  Description of Artificial Sequence: Synthetic oligonucleotide
acuacaccccaacaggcaa

SEQ ID NO: 2804207 - RNA, 19 nt, Artificial Sequence
  Description of Artificial Sequence: Synthetic oligonucleotide
ugcaaagaauauccaccaa

SEQ ID NO: 2804208 - RNA, 19 nt, Artificial Sequence
  Description of Artificial Sequence: Synthetic oligonucleotide
augcuugcucuuucugccg

SEQ ID NO: 2804209 - RNA, 19 nt, Artificial Sequence
  Description of Artificial Sequence: Synthetic oligonucleotide
aacacaaugcuugcucuuu

SEQ ID NO: 2804210 - RNA, 19 nt, Artificial Sequence
  Description of Artificial Sequence: Synthetic oligonucleotide
aauagacguaagcgccgga

SEQ ID NO: 2804211 - RNA, 19 nt, Artificial Sequence
  Description of Artificial Sequence: Synthetic oligonucleotide
gaaauggagacagcaagua

SEQ ID NO: 2804212 - RNA, 19 nt, Artificial Sequence
  Description of Artificial Sequence: Synthetic oligonucleotide
aagagcgcggacccggaaa

SEQ ID NO: 2804213 - RNA, 19 nt, Artificial Sequence
  Description of Artificial Sequence: Synthetic oligonucleotide
uugcggugggauuccaagc

SEQ ID NO: 2804214 - RNA, 19 nt, Artificial Sequence
  Description of Artificial Sequence: Synthetic oligonucleotide
ucugggcuauguugccugg

SEQ ID NO: 2804215 - RNA, 19 nt, Artificial Sequence
  Description of Artificial Sequence: Synthetic oligonucleotide
uguaaacauccagagccaa

SEQ ID NO: 2804216 - RNA, 19 nt, Artificial Sequence
  Description of Artificial Sequence: Synthetic oligonucleotide
uccuggccaccaaauagac

SEQ ID NO: 2804217 - RNA, 19 nt, Artificial Sequence
  Description of Artificial Sequence: Synthetic oligonucleotide
gcagccaggaaauggagac

SEQ ID NO: 2804218 - RNA, 19 nt, Artificial Sequence
  Description of Artificial Sequence: Synthetic oligonucleotide
auggagacagcaaguaucu

SEQ ID NO: 2804219 - RNA, 19 nt, Artificial Sequence
  Description of Artificial Sequence: Synthetic oligonucleotide
aagcgccggaccccaagag

SEQ ID NO: 2804220 - RNA, 19 nt, Artificial Sequence
  Description of Artificial Sequence: Synthetic oligonucleotide
augccgaggaccaucuggg

SEQ ID NO: 2804221 - RNA, 19 nt, Artificial Sequence
  Description of Artificial Sequence: Synthetic oligonucleotide
aagcaagcgacagcuccag

SEQ ID NO: 2804222 - RNA, 19 nt, Artificial Sequence
  Description of Artificial Sequence: Synthetic oligonucleotide
guaggccuucccuuucggg

SEQ ID NO: 2804223 - RNA, 19 nt, Artificial Sequence
  Description of Artificial Sequence: Synthetic oligonucleotide
uaagcgccggaccccaaga

SEQ ID NO: 2804224 - RNA, 19 nt, Artificial Sequence
  Description of Artificial Sequence: Synthetic oligonucleotide
aacuacaccccaacaggca

SEQ ID NO: 2804225 - RNA, 19 nt, Artificial Sequence
  Description of Artificial Sequence: Synthetic oligonucleotide
gacccggaaagcaagcgac

SEQ ID NO: 2804226 - RNA, 19 nt, Artificial Sequence
  Description of Artificial Sequence: Synthetic oligonucleotide
uggcacgucuuaaaaugaa

SEQ ID NO: 2804227 - RNA, 19 nt, Artificial Sequence
  Description of Artificial Sequence: Synthetic oligonucleotide
uucaaacaacucgguaggc

SEQ ID NO: 2804228 - RNA, 19 nt, Artificial Sequence
  Description of Artificial Sequence: Synthetic oligonucleotide
ggcuauguugccugguugc

SEQ ID NO: 2804229 - RNA, 19 nt, Artificial Sequence
  Description of Artificial Sequence: Synthetic oligonucleotide
cacaucugcaaagaauauc

SEQ ID NO: 2804230 - RNA, 19 nt, Artificial Sequence
  Description of Artificial Sequence: Synthetic oligonucleotide
cugucaggauaacuacacc

SEQ ID NO: 2804231 - RNA, 19 nt, Artificial Sequence
  Description of Artificial Sequence: Synthetic oligonucleotide
gaauccuguggaggggagg

SEQ ID NO: 2804232 - RNA, 19 nt, Artificial Sequence
  Description of Artificial Sequence: Synthetic oligonucleotide
ugcuugcucuuucugccgu

SEQ ID NO: 2804233 - RNA, 19 nt, Artificial Sequence
  Description of Artificial Sequence: Synthetic oligonucleotide
cuauguugccugguugcgg

SEQ ID NO: 2804234 - RNA, 19 nt, Artificial Sequence
  Description of Artificial Sequence: Synthetic oligonucleotide
accugagaggagaaaacug

SEQ ID NO: 2804235 - RNA, 19 nt, Artificial Sequence
  Description of Artificial Sequence: Synthetic oligonucleotide
gcacgucuuaaaaugaagc

SEQ ID NO: 2804236 - RNA, 19 nt, Artificial Sequence
  Description of Artificial Sequence: Synthetic oligonucleotide
acauccagagccaaagaau

SEQ ID NO: 2804237 - RNA, 19 nt, Artificial Sequence
  Description of Artificial Sequence: Synthetic oligonucleotide
ucuucuuggcacgucuuaa

SEQ ID NO: 2804238 - RNA, 19 nt, Artificial Sequence
  Description of Artificial Sequence: Synthetic oligonucleotide
aagcgacagcuccagcagu

SEQ ID NO: 2804239 - RNA, 19 nt, Artificial Sequence
  Description of Artificial Sequence: Synthetic oligonucleotide
aagcgcaucucuguccaca

SEQ ID NO: 2804240 - RNA, 19 nt, Artificial Sequence
  Description of Artificial Sequence: Synthetic oligonucleotide
uggugcuuucaaacaacuc

SEQ ID NO: 2804241 - RNA, 19 nt, Artificial Sequence
  Description of Artificial Sequence: Synthetic oligonucleotide
caaacaacucgguaggccu

SEQ ID NO: 2804242 - RNA, 19 nt, Artificial Sequence
  Description of Artificial Sequence: Synthetic oligonucleotide
ugccgugcagccaggaaau

SEQ ID NO: 2804243 - RNA, 19 nt, Artificial Sequence
  Description of Artificial Sequence: Synthetic oligonucleotide
agccaaagaauggcaguuc

SEQ ID NO: 2804244 - RNA, 19 nt, Artificial Sequence
  Description of Artificial Sequence: Synthetic oligonucleotide
ggagaaaacuguaaacauc

SEQ ID NO: 2804245 - RNA, 19 nt, Artificial Sequence
  Description of Artificial Sequence: Synthetic oligonucleotide
ggcaauacugaugccgagg

SEQ ID NO: 2804246 - RNA, 19 nt, Artificial Sequence
  Description of Artificial Sequence: Synthetic oligonucleotide
ggucugucaggauaacuac

SEQ ID NO: 2804247 - RNA, 19 nt, Artificial Sequence
  Description of Artificial Sequence: Synthetic oligonucleotide
uugccccuuuauaaccuga

SEQ ID NO: 2804248 - RNA, 19 nt, Artificial Sequence
  Description of Artificial Sequence: Synthetic oligonucleotide
gaccccaagagcgcggacc

SEQ ID NO: 2804249 - RNA, 19 nt, Artificial Sequence
  Description of Artificial Sequence: Synthetic oligonucleotide
agcaagcgacagcuccagc

SEQ ID NO: 2804250 - RNA, 19 nt, Artificial Sequence
  Description of Artificial Sequence: Synthetic oligonucleotide
caggcaauacugaugccga

SEQ ID NO: 2804251 - RNA, 19 nt, Artificial Sequence
  Description of Artificial Sequence: Synthetic oligonucleotide
auacugaugccgaggacca

SEQ ID NO: 2804252 - RNA, 19 nt, Artificial Sequence
  Description of Artificial Sequence: Synthetic oligonucleotide
gagacagcaaguaucugcu

SEQ ID NO: 2804253 - RNA, 19 nt, Artificial Sequence
  Description of Artificial Sequence: Synthetic oligonucleotide
cauguugucacagucuucu

SEQ ID NO: 2804254 - RNA, 19 nt, Artificial Sequence
  Description of Artificial Sequence: Synthetic oligonucleotide
aucucuguccacaucugca

SEQ ID NO: 2804255 - RNA, 19 nt, Artificial Sequence
  Description of Artificial Sequence: Synthetic oligonucleotide
uuccaagcuucaugggccu

SEQ ID NO: 2804256 - RNA, 19 nt, Artificial Sequence
  Description of Artificial Sequence: Synthetic oligonucleotide
auuugccccuuuauaaccu

SEQ ID NO: 2804257 - RNA, 19 nt, Artificial Sequence
  Description of Artificial Sequence: Synthetic oligonucleotide
cuccuggccaccaaauaga

SEQ ID NO: 2804258 - RNA, 19 nt, Artificial Sequence
  Description of Artificial Sequence: Synthetic oligonucleotide
ccaacaggcaauacugaug

SEQ ID NO: 2804259 - RNA, 19 nt, Artificial Sequence
  Description of Artificial Sequence: Synthetic oligonucleotide
guaagcgccggaccccaag

SEQ ID NO: 2804260 - RNA, 19 nt, Artificial Sequence
  Description of Artificial Sequence: Synthetic oligonucleotide
ccaccaaauagacguaagc

SEQ ID NO: 2804261 - RNA, 19 nt, Artificial Sequence
  Description of Artificial Sequence: Synthetic oligonucleotide
guugccugguugcgguggg

SEQ ID NO: 2804262 - RNA, 19 nt, Artificial Sequence
  Description of Artificial Sequence: Synthetic oligonucleotide
aggcaauacugaugccgag

SEQ ID NO: 2804263 - RNA, 19 nt, Artificial Sequence
  Description of Artificial Sequence: Synthetic oligonucleotide
agacagcaaguaucugcug

SEQ ID NO: 2804264 - RNA, 19 nt, Artificial Sequence
  Description of Artificial Sequence: Synthetic oligonucleotide
ccuuuauaaccugagagga

SEQ ID NO: 2804265 - RNA, 19 nt, Artificial Sequence
  Description of Artificial Sequence: Synthetic oligonucleotide
gcaagcgacagcuccagca

SEQ ID NO: 2804266 - RNA, 19 nt, Artificial Sequence
  Description of Artificial Sequence: Synthetic oligonucleotide
cgucuuaaaaugaagcgca

SEQ ID NO: 2804267 - RNA, 19 nt, Artificial Sequence
  Description of Artificial Sequence: Synthetic oligonucleotide
ccuccuggccaccaaauag

SEQ ID NO: 2804268 - RNA, 19 nt, Artificial Sequence
  Description of Artificial Sequence: Synthetic oligonucleotide
uuucugccgugcagccagg

SEQ ID NO: 2804269 - RNA, 19 nt, Artificial Sequence
  Description of Artificial Sequence: Synthetic oligonucleotide
ucaugggccuccuggccac

SEQ ID NO: 2804270 - RNA, 19 nt, Artificial Sequence
  Description of Artificial Sequence: Synthetic oligonucleotide
ugggcuauguugccugguu

SEQ ID NO: 2804271 - RNA, 19 nt, Artificial Sequence
  Description of Artificial Sequence: Synthetic oligonucleotide
caucugcaaagaauaucca

SEQ ID NO: 2804272 - RNA, 19 nt, Artificial Sequence
  Description of Artificial Sequence: Synthetic oligonucleotide
caauacugaugccgaggac

SEQ ID NO: 2804273 - RNA, 19 nt, Artificial Sequence
  Description of Artificial Sequence: Synthetic oligonucleotide
aggaccaucugggcuaugu

SEQ ID NO: 2804274 - RNA, 19 nt, Artificial Sequence
  Description of Artificial Sequence: Synthetic oligonucleotide
acaacucgguaggccuucc

SEQ ID NO: 2804275 - RNA, 19 nt, Artificial Sequence
  Description of Artificial Sequence: Synthetic oligonucleotide
auaguuuauuuugcuguuu

SEQ ID NO: 2804276 - RNA, 19 nt, Artificial Sequence
  Description of Artificial Sequence: Synthetic oligonucleotide
gacguaagcgccggacccc

SEQ ID NO: 2804277 - RNA, 19 nt, Artificial Sequence
  Description of Artificial Sequence: Synthetic oligonucleotide
aaguaucugcuggugcuuu

SEQ ID NO: 2804278 - RNA, 19 nt, Artificial Sequence
  Description of Artificial Sequence: Synthetic oligonucleotide
ggcacgucuuaaaaugaag

SEQ ID NO: 2804279 - RNA, 19 nt, Artificial Sequence
  Description of Artificial Sequence: Synthetic oligonucleotide
caggaaauggagacagcaa

SEQ ID NO: 2804280 - RNA, 19 nt, Artificial Sequence
  Description of Artificial Sequence: Synthetic oligonucleotide
ucugccgugcagccaggaa

SEQ ID NO: 2804281 - RNA, 19 nt, Artificial Sequence
  Description of Artificial Sequence: Synthetic oligonucleotide
gcaguucauguugucacag

SEQ ID NO: 2804282 - RNA, 19 nt, Artificial Sequence
  Description of Artificial Sequence: Synthetic oligonucleotide
uguggaggggagggcggcg

SEQ ID NO: 2804283 - RNA, 19 nt, Artificial Sequence
  Description of Artificial Sequence: Synthetic oligonucleotide
acucgguaggccuucccuu

SEQ ID NO: 2804284 - RNA, 19 nt, Artificial Sequence
  Description of Artificial Sequence: Synthetic oligonucleotide
cugagaggagaaaacugua

SEQ ID NO: 2804285 - RNA, 19 nt, Artificial Sequence
  Description of Artificial Sequence: Synthetic oligonucleotide
gccaaagaauggcaguuca

SEQ ID NO: 2804286 - RNA, 19 nt, Artificial Sequence
  Description of Artificial Sequence: Synthetic oligonucleotide
acagucuucuuggcacguc

SEQ ID NO: 2804287 - RNA, 19 nt, Artificial Sequence
  Description of Artificial Sequence: Synthetic oligonucleotide
ggauaacuacaccccaaca

SEQ ID NO: 2804288 - RNA, 19 nt, Artificial Sequence
  Description of Artificial Sequence: Synthetic oligonucleotide
aucugcuggugcuuucaaa

SEQ ID NO: 2804289 - RNA, 19 nt, Artificial Sequence
  Description of Artificial Sequence: Synthetic oligonucleotide
aaacaacucgguaggccuu

SEQ ID NO: 2804290 - RNA, 19 nt, Artificial Sequence
  Description of Artificial Sequence: Synthetic oligonucleotide
gcuauguugccugguugcg

SEQ ID NO: 2804291 - RNA, 19 nt, Artificial Sequence
  Description of Artificial Sequence: Synthetic oligonucleotide
gguaggccuucccuuucgg

SEQ ID NO: 2804292 - RNA, 19 nt, Artificial Sequence
  Description of Artificial Sequence: Synthetic oligonucleotide
cuucuuggcacgucuuaaa

SEQ ID NO: 2804293 - RNA, 19 nt, Artificial Sequence
  Description of Artificial Sequence: Synthetic oligonucleotide
cugcuggugcuuucaaaca

SEQ ID NO: 2804294 - RNA, 19 nt, Artificial Sequence
  Description of Artificial Sequence: Synthetic oligonucleotide
gucugucaggauaacuaca

SEQ ID NO: 2804295 - RNA, 19 nt, Artificial Sequence
  Description of Artificial Sequence: Synthetic oligonucleotide
caggauaacuacaccccaa

SEQ ID NO: 2804296 - RNA, 19 nt, Artificial Sequence
  Description of Artificial Sequence: Synthetic oligonucleotide
ucgguaggccuucccuuuc

SEQ ID NO: 2804297 - RNA, 19 nt, Artificial Sequence
  Description of Artificial Sequence: Synthetic oligonucleotide
auccuguggaggggagggc

SEQ ID NO: 2804298 - RNA, 19 nt, Artificial Sequence
  Description of Artificial Sequence: Synthetic oligonucleotide
agcgcaucucuguccacau

SEQ ID NO: 2804299 - RNA, 19 nt, Artificial Sequence
  Description of Artificial Sequence: Synthetic oligonucleotide
ugccgaggaccaucugggc

SEQ ID NO: 2804300 - RNA, 19 nt, Artificial Sequence
  Description of Artificial Sequence: Synthetic oligonucleotide
ugaugccgaggaccaucug

SEQ ID NO: 2804301 - RNA, 19 nt, Artificial Sequence
  Description of Artificial Sequence: Synthetic oligonucleotide
guucauguugucacagucu

SEQ ID NO: 2804302 - RNA, 19 nt, Artificial Sequence
  Description of Artificial Sequence: Synthetic oligonucleotide
gcgccggaccccaagagcg

SEQ ID NO: 2804303 - RNA, 19 nt, Artificial Sequence
  Description of Artificial Sequence: Synthetic oligonucleotide
uggagacagcaaguaucug

SEQ ID NO: 2804304 - RNA, 19 nt, Artificial Sequence
  Description of Artificial Sequence: Synthetic oligonucleotide
cugccgugcagccaggaaa

SEQ ID NO: 2804305 - RNA, 19 nt, Artificial Sequence
  Description of Artificial Sequence: Synthetic oligonucleotide
uacaccccaacaggcaaua

SEQ ID NO: 2804306 - RNA, 19 nt, Artificial Sequence
  Description of Artificial Sequence: Synthetic oligonucleotide
guaucugcuggugcuuuca

SEQ ID NO: 2804307 - RNA, 19 nt, Artificial Sequence
  Description of Artificial Sequence: Synthetic oligonucleotide
gcaaguaucugcuggugcu

SEQ ID NO: 2804308 - RNA, 19 nt, Artificial Sequence
  Description of Artificial Sequence: Synthetic oligonucleotide
guaaacauccagagccaaa

SEQ ID NO: 2804309 - RNA, 19 nt, Artificial Sequence
  Description of Artificial Sequence: Synthetic oligonucleotide
agcgcggacccggaaagca

SEQ ID NO: 2804310 - RNA, 19 nt, Artificial Sequence
  Description of Artificial Sequence: Synthetic oligonucleotide
gggcuauguugccugguug

SEQ ID NO: 2804311 - RNA, 19 nt, Artificial Sequence
  Description of Artificial Sequence: Synthetic oligonucleotide
caacucgguaggccuuccc

SEQ ID NO: 2804312 - RNA, 19 nt, Artificial Sequence
  Description of Artificial Sequence: Synthetic oligonucleotide
ccaccaacacaaugcuugc

SEQ ID NO: 2804313 - RNA, 19 nt, Artificial Sequence
  Description of Artificial Sequence: Synthetic oligonucleotide
auguugccugguugcggug

SEQ ID NO: 2804314 - RNA, 19 nt, Artificial Sequence
  Description of Artificial Sequence: Synthetic oligonucleotide
cuggugcuuucaaacaacu

SEQ ID NO: 2804315 - RNA, 19 nt, Artificial Sequence
  Description of Artificial Sequence: Synthetic oligonucleotide
cagcaaguaucugcuggug

SEQ ID NO: 2804316 - RNA, 19 nt, Artificial Sequence
  Description of Artificial Sequence: Synthetic oligonucleotide
acaccccaacaggcaauac

SEQ ID NO: 2804317 - RNA, 19 nt, Artificial Sequence
  Description of Artificial Sequence: Synthetic oligonucleotide
gggucugucaggauaacua

SEQ ID NO: 2804318 - RNA, 19 nt, Artificial Sequence
  Description of Artificial Sequence: Synthetic oligonucleotide
ccuggccaccaaauagacg

SEQ ID NO: 2804319 - RNA, 19 nt, Artificial Sequence
  Description of Artificial Sequence: Synthetic oligonucleotide
gcuuucaaacaacucggua

SEQ ID NO: 2804320 - RNA, 19 nt, Artificial Sequence
  Description of Artificial Sequence: Synthetic oligonucleotide
gaauggcaguucauguugu

SEQ ID NO: 2804321 - RNA, 19 nt, Artificial Sequence
  Description of Artificial Sequence: Synthetic oligonucleotide
gaagcgcaucucuguccac

SEQ ID NO: 2804322 - RNA, 19 nt, Artificial Sequence
  Description of Artificial Sequence: Synthetic oligonucleotide
cugguugcggugggauucc

SEQ ID NO: 2804323 - RNA, 19 nt, Artificial Sequence
  Description of Artificial Sequence: Synthetic oligonucleotide
ccugagaggagaaaacugu

SEQ ID NO: 2804324 - RNA, 19 nt, Artificial Sequence
  Description of Artificial Sequence: Synthetic oligonucleotide
uggccaccaaauagacgua

SEQ ID NO: 2804325 - RNA, 19 nt, Artificial Sequence
  Description of Artificial Sequence: Synthetic oligonucleotide
ggcaguucauguugucaca

SEQ ID NO: 2804326 - RNA, 19 nt, Artificial Sequence
  Description of Artificial Sequence: Synthetic oligonucleotide
ggaaauggagacagcaagu

SEQ ID NO: 2804327 - RNA, 19 nt, Artificial Sequence
  Description of Artificial Sequence: Synthetic oligonucleotide
gcuggugcuuucaaacaac

SEQ ID NO: 2804328 - RNA, 19 nt, Artificial Sequence
  Description of Artificial Sequence: Synthetic oligonucleotide
ggacccggaaagcaagcga

SEQ ID NO: 2804329 - RNA, 19 nt, Artificial Sequence
  Description of Artificial Sequence: Synthetic oligonucleotide
gccaccaaauagacguaag

SEQ ID NO: 2804330 - RNA, 19 nt, Artificial Sequence
  Description of Artificial Sequence: Synthetic oligonucleotide
cacaaugcuugcucuuucu

SEQ ID NO: 2804331 - RNA, 19 nt, Artificial Sequence
  Description of Artificial Sequence: Synthetic oligonucleotide
gagccaaagaauggcaguu

SEQ ID NO: 2804332 - RNA, 19 nt, Artificial Sequence
  Description of Artificial Sequence: Synthetic oligonucleotide
ugccugguugcggugggau

SEQ ID NO: 2804333 - RNA, 19 nt, Artificial Sequence
  Description of Artificial Sequence: Synthetic oligonucleotide
ccaagcuucaugggccucc

SEQ ID NO: 2804334 - RNA, 19 nt, Artificial Sequence
  Description of Artificial Sequence: Synthetic oligonucleotide
auguugucacagucuucuu

SEQ ID NO: 2804335 - RNA, 19 nt, Artificial Sequence
  Description of Artificial Sequence: Synthetic oligonucleotide
cucuguccacaucugcaaa

SEQ ID NO: 2804336 - RNA, 19 nt, Artificial Sequence
  Description of Artificial Sequence: Synthetic oligonucleotide
ccuguggaggggagggcgg

SEQ ID NO: 2804337 - RNA, 19 nt, Artificial Sequence
  Description of Artificial Sequence: Synthetic oligonucleotide
ccaucugggcuauguugcc

SEQ ID NO: 2804338 - RNA, 19 nt, Artificial Sequence
  Description of Artificial Sequence: Synthetic oligonucleotide
ccagagccaaagaauggca

SEQ ID NO: 2804339 - RNA, 19 nt, Artificial Sequence
  Description of Artificial Sequence: Synthetic oligonucleotide
acguaagcgccggacccca

SEQ ID NO: 2804340 - RNA, 19 nt, Artificial Sequence
  Description of Artificial Sequence: Synthetic oligonucleotide
caccccaacaggcaauacu

SEQ ID NO: 2804341 - RNA, 19 nt, Artificial Sequence
  Description of Artificial Sequence: Synthetic oligonucleotide
ccugguugcggugggauuc

SEQ ID NO: 2804342 - RNA, 19 nt, Artificial Sequence
  Description of Artificial Sequence: Synthetic oligonucleotide
gaggggagggcggcgcggc

SEQ ID NO: 2804343 - RNA, 19 nt, Artificial Sequence
  Description of Artificial Sequence: Synthetic oligonucleotide
ccggaaagcaagcgacagc

SEQ ID NO: 2804344 - RNA, 19 nt, Artificial Sequence
  Description of Artificial Sequence: Synthetic oligonucleotide
cccaagagcgcggacccgg

SEQ ID NO: 2804345 - RNA, 19 nt, Artificial Sequence
  Description of Artificial Sequence: Synthetic oligonucleotide
cugaugccgaggaccaucu

SEQ ID NO: 2804346 - RNA, 19 nt, Artificial Sequence
  Description of Artificial Sequence: Synthetic oligonucleotide
agcgacagcuccagcaguu

SEQ ID NO: 2804347 - RNA, 19 nt, Artificial Sequence
  Description of Artificial Sequence: Synthetic oligonucleotide
cccggaaagcaagcgacag

SEQ ID NO: 2804348 - RNA, 19 nt, Artificial Sequence
  Description of Artificial Sequence: Synthetic oligonucleotide
agggcggcgcggcggcuuc

SEQ ID NO: 2804349 - RNA, 19 nt, Artificial Sequence
  Description of Artificial Sequence: Synthetic oligonucleotide
cagucuucuuggcacgucu

SEQ ID NO: 2804350 - RNA, 19 nt, Artificial Sequence
  Description of Artificial Sequence: Synthetic oligonucleotide
cuucccuuucgggucuguc

SEQ ID NO: 2804351 - RNA, 19 nt, Artificial Sequence
  Description of Artificial Sequence: Synthetic oligonucleotide
aggggagggcggcgcggcg

SEQ ID NO: 2804352 - RNA, 19 nt, Artificial Sequence
  Description of Artificial Sequence: Synthetic oligonucleotide
guggaggggagggcggcgc

SEQ ID NO: 2804353 - RNA, 19 nt, Artificial Sequence
  Description of Artificial Sequence: Synthetic oligonucleotide
acccggaaagcaagcgaca

SEQ ID NO: 2804354 - RNA, 19 nt, Artificial Sequence
  Description of Artificial Sequence: Synthetic oligonucleotide
ggugggauuccaagcuuca

SEQ ID NO: 2804355 - RNA, 19 nt, Artificial Sequence
  Description of Artificial Sequence: Synthetic oligonucleotide
uccaagcuucaugggccuc

SEQ ID NO: 2804356 - RNA, 19 nt, Artificial Sequence
  Description of Artificial Sequence: Synthetic oligonucleotide
gccgaauccuguggagggg

SEQ ID NO: 2804357 - RNA, 19 nt, Artificial Sequence
  Description of Artificial Sequence: Synthetic oligonucleotide
agucuucuuggcacgucuu

SEQ ID NO: 2804358 - RNA, 19 nt, Artificial Sequence
  Description of Artificial Sequence: Synthetic oligonucleotide
ugggccuccuggccaccaa

SEQ ID NO: 2804359 - RNA, 19 nt, Artificial Sequence
  Description of Artificial Sequence: Synthetic oligonucleotide
gagcgcggacccggaaagc

SEQ ID NO: 2804360 - RNA, 19 nt, Artificial Sequence
  Description of Artificial Sequence: Synthetic oligonucleotide
gaauauccaccaacacaau

SEQ ID NO: 2804361 - RNA, 19 nt, Artificial Sequence
  Description of Artificial Sequence: Synthetic oligonucleotide
caguucauguugucacagu

SEQ ID NO: 2804362 - RNA, 19 nt, Artificial Sequence
  Description of Artificial Sequence: Synthetic oligonucleotide
gccccuuuauaaccugaga

SEQ ID NO: 2804363 - RNA, 19 nt, Artificial Sequence
  Description of Artificial Sequence: Synthetic oligonucleotide
gcaucucuguccacaucug

SEQ ID NO: 2804364 - RNA, 19 nt, Artificial Sequence
  Description of Artificial Sequence: Synthetic oligonucleotide
ucgggucugucaggauaac

SEQ ID NO: 2804365 - RNA, 19 nt, Artificial Sequence
  Description of Artificial Sequence: Synthetic oligonucleotide
ccaacacaaugcuugcucu

SEQ ID NO: 2804366 - RNA, 19 nt, Artificial Sequence
  Description of Artificial Sequence: Synthetic oligonucleotide
gccggaccccaagagcgcg

SEQ ID NO: 2804367 - RNA, 19 nt, Artificial Sequence
  Description of Artificial Sequence: Synthetic oligonucleotide
uugccugguugcgguggga

SEQ ID NO: 2804368 - RNA, 19 nt, Artificial Sequence
  Description of Artificial Sequence: Synthetic oligonucleotide
gucuuaaaaugaagcgcau

SEQ ID NO: 2804369 - RNA, 19 nt, Artificial Sequence
  Description of Artificial Sequence: Synthetic oligonucleotide
caacacaaugcuugcucuu

SEQ ID NO: 2804370 - RNA, 19 nt, Artificial Sequence
  Description of Artificial Sequence: Synthetic oligonucleotide
cagccaggaaauggagaca

SEQ ID NO: 2804371 - RNA, 19 nt, Artificial Sequence
  Description of Artificial Sequence: Synthetic oligonucleotide
ugguugcggugggauucca

SEQ ID NO: 2804372 - RNA, 19 nt, Artificial Sequence
  Description of Artificial Sequence: Synthetic oligonucleotide
ggaaagcaagcgacagcuc

SEQ ID NO: 2804373 - RNA, 19 nt, Artificial Sequence
  Description of Artificial Sequence: Synthetic oligonucleotide
cgcggacccggaaagcaag

SEQ ID NO: 2804374 - RNA, 19 nt, Artificial Sequence
  Description of Artificial Sequence: Synthetic oligonucleotide
uacugaugccgaggaccau

SEQ ID NO: 2804375 - RNA, 19 nt, Artificial Sequence
  Description of Artificial Sequence: Synthetic oligonucleotide
cuacaccccaacaggcaau

SEQ ID NO: 2804376 - RNA, 19 nt, Artificial Sequence
  Description of Artificial Sequence: Synthetic oligonucleotide
ggcggcuuccgcggguggg

SEQ ID NO: 2804377 - RNA, 19 nt, Artificial Sequence
  Description of Artificial Sequence: Synthetic oligonucleotide
ccgaggaccaucugggcua

SEQ ID NO: 2804378 - RNA, 19 nt, Artificial Sequence
  Description of Artificial Sequence: Synthetic oligonucleotide
ccuuucgggucugucagga

SEQ ID NO: 2804379 - RNA, 19 nt, Artificial Sequence
  Description of Artificial Sequence: Synthetic oligonucleotide
gccgaggaccaucugggcu

SEQ ID NO: 2804380 - RNA, 19 nt, Artificial Sequence
  Description of Artificial Sequence: Synthetic oligonucleotide
ggccaccaaauagacguaa

SEQ ID NO: 2804381 - RNA, 19 nt, Artificial Sequence
  Description of Artificial Sequence: Synthetic oligonucleotide
cgaauccuguggaggggag

SEQ ID NO: 2804382 - RNA, 19 nt, Artificial Sequence
  Description of Artificial Sequence: Synthetic oligonucleotide
cucgguaggccuucccuuu

SEQ ID NO: 2804383 - RNA, 19 nt, Artificial Sequence
  Description of Artificial Sequence: Synthetic oligonucleotide
ggggagggcggcgcggcgg

SEQ ID NO: 2804384 - RNA, 19 nt, Artificial Sequence
  Description of Artificial Sequence: Synthetic oligonucleotide
cggaaagcaagcgacagcu

SEQ ID NO: 2804385 - RNA, 19 nt, Artificial Sequence
  Description of Artificial Sequence: Synthetic oligonucleotide
cgguaggccuucccuuucg

SEQ ID NO: 2804386 - RNA, 19 nt, Artificial Sequence
  Description of Artificial Sequence: Synthetic oligonucleotide
augggccuccuggccacca

SEQ ID NO: 2804387 - RNA, 19 nt, Artificial Sequence
  Description of Artificial Sequence: Synthetic oligonucleotide
caugggccuccuggccacc

SEQ ID NO: 2804388 - RNA, 19 nt, Artificial Sequence
  Description of Artificial Sequence: Synthetic oligonucleotide
gccaggaaauggagacagc

SEQ ID NO: 2804389 - RNA, 19 nt, Artificial Sequence
  Description of Artificial Sequence: Synthetic oligonucleotide
caagagcgcggacccggaa

SEQ ID NO: 2804390 - RNA, 19 nt, Artificial Sequence
  Description of Artificial Sequence: Synthetic oligonucleotide
ccggaccccaagagcgcgg

SEQ ID NO: 2804391 - RNA, 19 nt, Artificial Sequence
  Description of Artificial Sequence: Synthetic oligonucleotide
caucugggcuauguugccu

SEQ ID NO: 2804392 - RNA, 19 nt, Artificial Sequence
  Description of Artificial Sequence: Synthetic oligonucleotide
ccccaacaggcaauacuga

SEQ ID NO: 2804393 - RNA, 19 nt, Artificial Sequence
  Description of Artificial Sequence: Synthetic oligonucleotide
cggacccggaaagcaagcg

SEQ ID NO: 2804394 - RNA, 19 nt, Artificial Sequence
  Description of Artificial Sequence: Synthetic oligonucleotide
gcggacccggaaagcaagc

SEQ ID NO: 2804395 - RNA, 19 nt, Artificial Sequence
  Description of Artificial Sequence: Synthetic oligonucleotide
cccaacaggcaauacugau

SEQ ID NO: 2804396 - RNA, 19 nt, Artificial Sequence
  Description of Artificial Sequence: Synthetic oligonucleotide
caaguaucugcuggugcuu

SEQ ID NO: 2804397 - RNA, 19 nt, Artificial Sequence
  Description of Artificial Sequence: Synthetic oligonucleotide
gaggaccaucugggcuaug

SEQ ID NO: 2804398 - RNA, 19 nt, Artificial Sequence
  Description of Artificial Sequence: Synthetic oligonucleotide
ccaaagaauggcaguucau

SEQ ID NO: 2804399 - RNA, 19 nt, Artificial Sequence
  Description of Artificial Sequence: Synthetic oligonucleotide
ccgaauccuguggagggga

SEQ ID NO: 2804400 - RNA, 19 nt, Artificial Sequence
  Description of Artificial Sequence: Synthetic oligonucleotide
cacagucuucuuggcacgu

SEQ ID NO: 2804401 - RNA, 19 nt, Artificial Sequence
  Description of Artificial Sequence: Synthetic oligonucleotide
cuuucgggucugucaggau

SEQ ID NO: 2804402 - RNA, 19 nt, Artificial Sequence
  Description of Artificial Sequence: Synthetic oligonucleotide
caccaacacaaugcuugcu

SEQ ID NO: 2804403 - RNA, 19 nt, Artificial Sequence
  Description of Artificial Sequence: Synthetic oligonucleotide
caagcuucaugggccuccu

SEQ ID NO: 2804404 - RNA, 19 nt, Artificial Sequence
  Description of Artificial Sequence: Synthetic oligonucleotide
gccuccuggccaccaaaua

SEQ ID NO: 2804405 - RNA, 19 nt, Artificial Sequence
  Description of Artificial Sequence: Synthetic oligonucleotide
gugggauuccaagcuucau

SEQ ID NO: 2804406 - RNA, 19 nt, Artificial Sequence
  Description of Artificial Sequence: Synthetic oligonucleotide
ggaccccaagagcgcggac

SEQ ID NO: 2804407 - RNA, 19 nt, Artificial Sequence
  Description of Artificial Sequence: Synthetic oligonucleotide
gcgcaucucuguccacauc

SEQ ID NO: 2804408 - RNA, 19 nt, Artificial Sequence
  Description of Artificial Sequence: Synthetic oligonucleotide
gguugcggugggauuccaa

SEQ ID NO: 2804409 - RNA, 19 nt, Artificial Sequence
  Description of Artificial Sequence: Synthetic oligonucleotide
ggcggcgcggcggcuuccg

SEQ ID NO: 2804410 - RNA, 19 nt, Artificial Sequence
  Description of Artificial Sequence: Synthetic oligonucleotide
ggaccaucugggcuauguu

SEQ ID NO: 2804411 - RNA, 19 nt, Artificial Sequence
  Description of Artificial Sequence: Synthetic oligonucleotide
gggccuccuggccaccaaa

SEQ ID NO: 2804412 - RNA, 19 nt, Artificial Sequence
  Description of Artificial Sequence: Synthetic oligonucleotide
ccacaucugcaaagaauau

SEQ ID NO: 2804413 - RNA, 19 nt, Artificial Sequence
  Description of Artificial Sequence: Synthetic oligonucleotide
cggcgcggcggcuuccgcg

SEQ ID NO: 2804414 - RNA, 19 nt, Artificial Sequence
  Description of Artificial Sequence: Synthetic oligonucleotide
ggccuucccuuucgggucu

SEQ ID NO: 2804415 - RNA, 19 nt, Artificial Sequence
  Description of Artificial Sequence: Synthetic oligonucleotide
gccgugcagccaggaaaug

SEQ ID NO: 2804416 - RNA, 19 nt, Artificial Sequence
  Description of Artificial Sequence: Synthetic oligonucleotide
cgccggaccccaagagcgc

SEQ ID NO: 2804417 - RNA, 19 nt, Artificial Sequence
  Description of Artificial Sequence: Synthetic oligonucleotide
cugggcuauguugccuggu

SEQ ID NO: 2804418 - RNA, 19 nt, Artificial Sequence
  Description of Artificial Sequence: Synthetic oligonucleotide
ccccaagagcgcggacccg

SEQ ID NO: 2804419 - RNA, 19 nt, Artificial Sequence
  Description of Artificial Sequence: Synthetic oligonucleotide
gcgcggcggcuuccgcggg

SEQ ID NO: 2804420 - RNA, 19 nt, Artificial Sequence
  Description of Artificial Sequence: Synthetic oligonucleotide
gcggugggauuccaagcuu

SEQ ID NO: 2804421 - RNA, 19 nt, Artificial Sequence
  Description of Artificial Sequence: Synthetic oligonucleotide
gcgcggacccggaaagcaa

SEQ ID NO: 2804422 - RNA, 19 nt, Artificial Sequence
  Description of Artificial Sequence: Synthetic oligonucleotide
gccuucccuuucgggucug

SEQ ID NO: 2804423 - RNA, 19 nt, Artificial Sequence
  Description of Artificial Sequence: Synthetic oligonucleotide
ggccuccuggccaccaaau

SEQ ID NO: 2804424 - RNA, 19 nt, Artificial Sequence
  Description of Artificial Sequence: Synthetic oligonucleotide
gcggcgcggcggcuuccgc

SEQ ID NO: 2804425 - RNA, 19 nt, Artificial Sequence
  Description of Artificial Sequence: Synthetic oligonucleotide
gagggcggcgcggcggcuu

SEQ ID NO: 2804426 - RNA, 19 nt, Artificial Sequence
  Description of Artificial Sequence: Synthetic oligonucleotide
gccugguugcggugggauu

SEQ ID NO: 2804427 - RNA, 19 nt, Artificial Sequence
  Description of Artificial Sequence: Synthetic oligonucleotide
cggcggcuuccgcgggugg

SEQ ID NO: 2804428 - RNA, 19 nt, Artificial Sequence
  Description of Artificial Sequence: Synthetic oligonucleotide
gcgacagcuccagcaguuu

SEQ ID NO: 2804429 - RNA, 19 nt, Artificial Sequence
  Description of Artificial Sequence: Synthetic oligonucleotide
cggaccccaagagcgcgga

SEQ ID NO: 2804430 - RNA, 19 nt, Artificial Sequence
  Description of Artificial Sequence: Synthetic oligonucleotide
gggcggcgcggcggcuucc

SEQ ID NO: 2804431 - RNA, 19 nt, Artificial Sequence
  Description of Artificial Sequence: Synthetic oligonucleotide
cgggucugucaggauaacu

SEQ ID NO: 2804432 - RNA, 19 nt, Artificial Sequence
  Description of Artificial Sequence: Synthetic oligonucleotide
cgacagcuccagcaguuuu

SEQ ID NO: 2804433 - RNA, 19 nt, Artificial Sequence
  Description of Artificial Sequence: Synthetic oligonucleotide
cguaagcgccggaccccaa

SEQ ID NO: 2804434 - RNA, 19 nt, Artificial Sequence
  Description of Artificial Sequence: Synthetic oligonucleotide
ccuucccuuucgggucugu

SEQ ID NO: 2804435 - RNA, 19 nt, Artificial Sequence
  Description of Artificial Sequence: Synthetic oligonucleotide
cgaggaccaucugggcuau

SEQ ID NO: 2804436 - RNA, 19 nt, Artificial Sequence
  Description of Artificial Sequence: Synthetic oligonucleotide
cgcggcggcuuccgcgggu

SEQ ID NO: 2804437 - RNA, 19 nt, Artificial Sequence
  Description of Artificial Sequence: Synthetic oligonucleotide
aaaugaaaagcuuugaagg

SEQ ID NO: 2804438 - RNA, 19 nt, Artificial Sequence
  Description of Artificial Sequence: Synthetic oligonucleotide
aaaaugaaaagcuuugaag

SEQ ID NO: 2804439 - RNA, 19 nt, Artificial Sequence
  Description of Artificial Sequence: Synthetic oligonucleotide
aaugaaaagcuuugaaggg

SEQ ID NO: 2804440 - RNA, 19 nt, Artificial Sequence
  Description of Artificial Sequence: Synthetic oligonucleotide
auagauguaacuuuuccgg

SEQ ID NO: 2804441 - RNA, 19 nt, Artificial Sequence
  Description of Artificial Sequence: Synthetic oligonucleotide
auguacuucauuuccaucc

SEQ ID NO: 2804442 - RNA, 19 nt, Artificial Sequence
  Description of Artificial Sequence: Synthetic oligonucleotide
uaaacuuaaaggaaaugcc

SEQ ID NO: 2804443 - RNA, 19 nt, Artificial Sequence
  Description of Artificial Sequence: Synthetic oligonucleotide
uucauuuccauccuguugc

SEQ ID NO: 2804444 - RNA, 19 nt, Artificial Sequence
  Description of Artificial Sequence: Synthetic oligonucleotide
aagggaaagucauagaugu

SEQ ID NO: 2804445 - RNA, 19 nt, Artificial Sequence
  Description of Artificial Sequence: Synthetic oligonucleotide
gaagauguccauuagaguc

SEQ ID NO: 2804446 - RNA, 19 nt, Artificial Sequence
  Description of Artificial Sequence: Synthetic oligonucleotide
auuuccauccuguugcugc

SEQ ID NO: 2804447 - RNA, 19 nt, Artificial Sequence
  Description of Artificial Sequence: Synthetic oligonucleotide
uggaagauguccauuagag

SEQ ID NO: 2804448 - RNA, 19 nt, Artificial Sequence
  Description of Artificial Sequence: Synthetic oligonucleotide
uagguauucaucaucaaac

SEQ ID NO: 2804449 - RNA, 19 nt, Artificial Sequence
  Description of Artificial Sequence: Synthetic oligonucleotide
uuaguaaacuuaaaggaaa

SEQ ID NO: 2804450 - RNA, 19 nt, Artificial Sequence
  Description of Artificial Sequence: Synthetic oligonucleotide
guaaacuuaaaggaaaugc

SEQ ID NO: 2804451 - RNA, 19 nt, Artificial Sequence
  Description of Artificial Sequence: Synthetic oligonucleotide
aaugccuggacuugugagg

SEQ ID NO: 2804452 - RNA, 19 nt, Artificial Sequence
  Description of Artificial Sequence: Synthetic oligonucleotide
uuugaagggaaagucauag

SEQ ID NO: 2804453 - RNA, 19 nt, Artificial Sequence
  Description of Artificial Sequence: Synthetic oligonucleotide
aaggagucugcucucgagc

SEQ ID NO: 2804454 - RNA, 19 nt, Artificial Sequence
  Description of Artificial Sequence: Synthetic oligonucleotide
cauagauguaacuuuuccg

SEQ ID NO: 2804455 - RNA, 19 nt, Artificial Sequence
  Description of Artificial Sequence: Synthetic oligonucleotide
aagaucccggcauuguccc

SEQ ID NO: 2804456 - RNA, 19 nt, Artificial Sequence
  Description of Artificial Sequence: Synthetic oligonucleotide
uccauuagagucauggcug

SEQ ID NO: 2804457 - RNA, 19 nt, Artificial Sequence
  Description of Artificial Sequence: Synthetic oligonucleotide
uucaaaaugucccaucuuc

SEQ ID NO: 2804458 - RNA, 19 nt, Artificial Sequence
  Description of Artificial Sequence: Synthetic oligonucleotide
uucaucaucaaacgaauuc

SEQ ID NO: 2804459 - RNA, 19 nt, Artificial Sequence
  Description of Artificial Sequence: Synthetic oligonucleotide
acuuaaaggaaaugccugg

SEQ ID NO: 2804460 - RNA, 19 nt, Artificial Sequence
  Description of Artificial Sequence: Synthetic oligonucleotide
uucacagcucuguugaacg

SEQ ID NO: 2804461 - RNA, 19 nt, Artificial Sequence
  Description of Artificial Sequence: Synthetic oligonucleotide
aacuuuuccgggaauggcc

SEQ ID NO: 2804462 - RNA, 19 nt, Artificial Sequence
  Description of Artificial Sequence: Synthetic oligonucleotide
aucaaacgaauucucugcc

SEQ ID NO: 2804463 - RNA, 19 nt, Artificial Sequence
  Description of Artificial Sequence: Synthetic oligonucleotide
ucugccuucaccuggaaga

SEQ ID NO: 2804464 - RNA, 19 nt, Artificial Sequence
  Description of Artificial Sequence: Synthetic oligonucleotide
aauguacuucauuuccauc

SEQ ID NO: 2804465 - RNA, 19 nt, Artificial Sequence
  Description of Artificial Sequence: Synthetic oligonucleotide
aaaugccuggacuugugag

SEQ ID NO: 2804466 - RNA, 19 nt, Artificial Sequence
  Description of Artificial Sequence: Synthetic oligonucleotide
ucaucaaacgaauucucug

SEQ ID NO: 2804467 - RNA, 19 nt, Artificial Sequence
  Description of Artificial Sequence: Synthetic oligonucleotide
uaaaggaaaugccuggacu

SEQ ID NO: 2804468 - RNA, 19 nt, Artificial Sequence
  Description of Artificial Sequence: Synthetic oligonucleotide
aaaagcuuugaagggaaag

SEQ ID NO: 2804469 - RNA, 19 nt, Artificial Sequence
  Description of Artificial Sequence: Synthetic oligonucleotide
acuuuagguauucaucauc

SEQ ID NO: 2804470 - RNA, 19 nt, Artificial Sequence
  Description of Artificial Sequence: Synthetic oligonucleotide
ugaccauuucaaaaugucc

SEQ ID NO: 2804471 - RNA, 19 nt, Artificial Sequence
  Description of Artificial Sequence: Synthetic oligonucleotide
cugaauguacuucauuucc

SEQ ID NO: 2804472 - RNA, 19 nt, Artificial Sequence
  Description of Artificial Sequence: Synthetic oligonucleotide
aaaaugucccaucuucacu

SEQ ID NO: 2804473 - RNA, 19 nt, Artificial Sequence
  Description of Artificial Sequence: Synthetic oligonucleotide
agguauucaucaucaaacg

SEQ ID NO: 2804474 - RNA, 19 nt, Artificial Sequence
  Description of Artificial Sequence: Synthetic oligonucleotide
caucaaacgaauucucugc

SEQ ID NO: 2804475 - RNA, 19 nt, Artificial Sequence
  Description of Artificial Sequence: Synthetic oligonucleotide
aaaugucccaucuucacuu

SEQ ID NO: 2804476 - RNA, 19 nt, Artificial Sequence
  Description of Artificial Sequence: Synthetic oligonucleotide
aaaggaaaugccuggacuu

SEQ ID NO: 2804477 - RNA, 19 nt, Artificial Sequence
  Description of Artificial Sequence: Synthetic oligonucleotide
auuucaaaaugucccaucu

SEQ ID NO: 2804478 - RNA, 19 nt, Artificial Sequence
  Description of Artificial Sequence: Synthetic oligonucleotide
auguccauuagagucaugg

SEQ ID NO: 2804479 - RNA, 19 nt, Artificial Sequence
  Description of Artificial Sequence: Synthetic oligonucleotide
aaacuuaaaggaaaugccu

SEQ ID NO: 2804480 - RNA, 19 nt, Artificial Sequence
  Description of Artificial Sequence: Synthetic oligonucleotide
uuagguauucaucaucaaa

SEQ ID NO: 2804481 - RNA, 19 nt, Artificial Sequence
  Description of Artificial Sequence: Synthetic oligonucleotide
auggcuggcgcuuuccucc

SEQ ID NO: 2804482 - RNA, 19 nt, Artificial Sequence
  Description of Artificial Sequence: Synthetic oligonucleotide
uacaccacgucuuuguagc

SEQ ID NO: 2804483 - RNA, 19 nt, Artificial Sequence
  Description of Artificial Sequence: Synthetic oligonucleotide
uagauguaacuuuuccggg

SEQ ID NO: 2804484 - RNA, 19 nt, Artificial Sequence
  Description of Artificial Sequence: Synthetic oligonucleotide
acuugugagguacaccacg

SEQ ID NO: 2804485 - RNA, 19 nt, Artificial Sequence
  Description of Artificial Sequence: Synthetic oligonucleotide
ucugccaugucuaacacuu

SEQ ID NO: 2804486 - RNA, 19 nt, Artificial Sequence
  Description of Artificial Sequence: Synthetic oligonucleotide
aagcuuugaagggaaaguc

SEQ ID NO: 2804487 - RNA, 19 nt, Artificial Sequence
  Description of Artificial Sequence: Synthetic oligonucleotide
aacuuaaaggaaaugccug

SEQ ID NO: 2804488 - RNA, 19 nt, Artificial Sequence
  Description of Artificial Sequence: Synthetic oligonucleotide
ucaaaaugucccaucuuca

SEQ ID NO: 2804489 - RNA, 19 nt, Artificial Sequence
  Description of Artificial Sequence: Synthetic oligonucleotide
uaggaguucuugaagguca

SEQ ID NO: 2804490 - RNA, 19 nt, Artificial Sequence
  Description of Artificial Sequence: Synthetic oligonucleotide
uauucaucaucaaacgaau

SEQ ID NO: 2804491 - RNA, 19 nt, Artificial Sequence
  Description of Artificial Sequence: Synthetic oligonucleotide
aggagucugcucucgagcc

SEQ ID NO: 2804492 - RNA, 19 nt, Artificial Sequence
  Description of Artificial Sequence: Synthetic oligonucleotide
aagucauagauguaacuuu

SEQ ID NO: 2804493 - RNA, 19 nt, Artificial Sequence
  Description of Artificial Sequence: Synthetic oligonucleotide
gaguucuugaaggucaggg

SEQ ID NO: 2804494 - RNA, 19 nt, Artificial Sequence
  Description of Artificial Sequence: Synthetic oligonucleotide
ugaauguacuucauuucca

SEQ ID NO: 2804495 - RNA, 19 nt, Artificial Sequence
  Description of Artificial Sequence: Synthetic oligonucleotide
uccauaggaguucuugaag

SEQ ID NO: 2804496 - RNA, 19 nt, Artificial Sequence
  Description of Artificial Sequence: Synthetic oligonucleotide
aguucuugaaggucagggg

SEQ ID NO: 2804497 - RNA, 19 nt, Artificial Sequence
  Description of Artificial Sequence: Synthetic oligonucleotide
gucacgaacgccaucaggg

SEQ ID NO: 2804498 - RNA, 19 nt, Artificial Sequence
  Description of Artificial Sequence: Synthetic oligonucleotide
aacgccaucagggcuauuc

SEQ ID NO: 2804499 - RNA, 19 nt, Artificial Sequence
  Description of Artificial Sequence: Synthetic oligonucleotide
augucuaacacuucugccu

SEQ ID NO: 2804500 - RNA, 19 nt, Artificial Sequence
  Description of Artificial Sequence: Synthetic oligonucleotide
gucuuuguagcugucaccg

SEQ ID NO: 2804501 - RNA, 19 nt, Artificial Sequence
  Description of Artificial Sequence: Synthetic oligonucleotide
ucaucaucaaacgaauucu

SEQ ID NO: 2804502 - RNA, 19 nt, Artificial Sequence
  Description of Artificial Sequence: Synthetic oligonucleotide
aaagcuuugaagggaaagu

SEQ ID NO: 2804503 - RNA, 19 nt, Artificial Sequence
  Description of Artificial Sequence: Synthetic oligonucleotide
ugugagguacaccacgucu

SEQ ID NO: 2804504 - RNA, 19 nt, Artificial Sequence
  Description of Artificial Sequence: Synthetic oligonucleotide
aaaggagucugcucucgag

SEQ ID NO: 2804505 - RNA, 19 nt, Artificial Sequence
  Description of Artificial Sequence: Synthetic oligonucleotide
ugcacuuuagguauucauc

SEQ ID NO: 2804506 - RNA, 19 nt, Artificial Sequence
  Description of Artificial Sequence: Synthetic oligonucleotide
ugaaaagcuuugaagggaa

SEQ ID NO: 2804507 - RNA, 19 nt, Artificial Sequence
  Description of Artificial Sequence: Synthetic oligonucleotide
cuuuagguauucaucauca

SEQ ID NO: 2804508 - RNA, 19 nt, Artificial Sequence
  Description of Artificial Sequence: Synthetic oligonucleotide
agggcuauuccauaggagu

SEQ ID NO: 2804509 - RNA, 19 nt, Artificial Sequence
  Description of Artificial Sequence: Synthetic oligonucleotide
uuaaaggaaaugccuggac

SEQ ID NO: 2804510 - RNA, 19 nt, Artificial Sequence
  Description of Artificial Sequence: Synthetic oligonucleotide
uucaccuggaagaugucca

SEQ ID NO: 2804511 - RNA, 19 nt, Artificial Sequence
  Description of Artificial Sequence: Synthetic oligonucleotide
uauuccauaggaguucuug

SEQ ID NO: 2804512 - RNA, 19 nt, Artificial Sequence
  Description of Artificial Sequence: Synthetic oligonucleotide
aucuucacagcucuguuga

SEQ ID NO: 2804513 - RNA, 19 nt, Artificial Sequence
  Description of Artificial Sequence: Synthetic oligonucleotide
uuagagucauggcugccag

SEQ ID NO: 2804514 - RNA, 19 nt, Artificial Sequence
  Description of Artificial Sequence: Synthetic oligonucleotide
ugcugaauguacuucauuu

SEQ ID NO: 2804515 - RNA, 19 nt, Artificial Sequence
  Description of Artificial Sequence: Synthetic oligonucleotide
uguaacuuuuccgggaaug

SEQ ID NO: 2804516 - RNA, 19 nt, Artificial Sequence
  Description of Artificial Sequence: Synthetic oligonucleotide
aacgaauucucugccaugu

SEQ ID NO: 2804517 - RNA, 19 nt, Artificial Sequence
  Description of Artificial Sequence: Synthetic oligonucleotide
acgucuuuguagcugucac

SEQ ID NO: 2804518 - RNA, 19 nt, Artificial Sequence
  Description of Artificial Sequence: Synthetic oligonucleotide
uguacuucauuuccauccu

SEQ ID NO: 2804519 - RNA, 19 nt, Artificial Sequence
  Description of Artificial Sequence: Synthetic oligonucleotide
caugucuaacacuucugcc

SEQ ID NO: 2804520 - RNA, 19 nt, Artificial Sequence
  Description of Artificial Sequence: Synthetic oligonucleotide
uguagcugucaccgcaagg

SEQ ID NO: 2804521 - RNA, 19 nt, Artificial Sequence
  Description of Artificial Sequence: Synthetic oligonucleotide
caagaucccggcauugucc

SEQ ID NO: 2804522 - RNA, 19 nt, Artificial Sequence
  Description of Artificial Sequence: Synthetic oligonucleotide
uaguaaacuuaaaggaaau

SEQ ID NO: 2804523 - RNA, 19 nt, Artificial Sequence
  Description of Artificial Sequence: Synthetic oligonucleotide
aaacgaauucucugccaug

SEQ ID NO: 2804524 - RNA, 19 nt, Artificial Sequence
  Description of Artificial Sequence: Synthetic oligonucleotide
caaaaugucccaucuucac

SEQ ID NO: 2804525 - RNA, 19 nt, Artificial Sequence
  Description of Artificial Sequence: Synthetic oligonucleotide
uguugcugcacuuuaggua

SEQ ID NO: 2804526 - RNA, 19 nt, Artificial Sequence
  Description of Artificial Sequence: Synthetic oligonucleotide
guagcugucaccgcaaggc

SEQ ID NO: 2804527 - RNA, 19 nt, Artificial Sequence
  Description of Artificial Sequence: Synthetic oligonucleotide
ucagggcuauuccauagga

SEQ ID NO: 2804528 - RNA, 19 nt, Artificial Sequence
  Description of Artificial Sequence: Synthetic oligonucleotide
agauguaacuuuuccggga

SEQ ID NO: 2804529 - RNA, 19 nt, Artificial Sequence
  Description of Artificial Sequence: Synthetic oligonucleotide
uugaacagcugcugaaugu

SEQ ID NO: 2804530 - RNA, 19 nt, Artificial Sequence
  Description of Artificial Sequence: Synthetic oligonucleotide
guaacuuuuccgggaaugg

SEQ ID NO: 2804531 - RNA, 19 nt, Artificial Sequence
  Description of Artificial Sequence: Synthetic oligonucleotide
guauucaucaucaaacgaa

SEQ ID NO: 2804532 - RNA, 19 nt, Artificial Sequence
  Description of Artificial Sequence: Synthetic oligonucleotide
aagauguccauuagaguca

SEQ ID NO: 2804533 - RNA, 19 nt, Artificial Sequence
  Description of Artificial Sequence: Synthetic oligonucleotide
uuccgagcaucccacaaga

SEQ ID NO: 2804534 - RNA, 19 nt, Artificial Sequence
  Description of Artificial Sequence: Synthetic oligonucleotide
ucaaacgaauucucugcca

SEQ ID NO: 2804535 - RNA, 19 nt, Artificial Sequence
  Description of Artificial Sequence: Synthetic oligonucleotide
auuccauaggaguucuuga

SEQ ID NO: 2804536 - RNA, 19 nt, Artificial Sequence
  Description of Artificial Sequence: Synthetic oligonucleotide
uggugaccauuucaaaaug

SEQ ID NO: 2804537 - RNA, 19 nt, Artificial Sequence
  Description of Artificial Sequence: Synthetic oligonucleotide
auaggaguucuugaagguc

SEQ ID NO: 2804538 - RNA, 19 nt, Artificial Sequence
  Description of Artificial Sequence: Synthetic oligonucleotide
aguaaacuuaaaggaaaug

SEQ ID NO: 2804539 - RNA, 19 nt, Artificial Sequence
  Description of Artificial Sequence: Synthetic oligonucleotide
agcucuguugaacgugugg

SEQ ID NO: 2804540 - RNA, 19 nt, Artificial Sequence
  Description of Artificial Sequence: Synthetic oligonucleotide
ccauaggaguucuugaagg

SEQ ID NO: 2804541 - RNA, 19 nt, Artificial Sequence
  Description of Artificial Sequence: Synthetic oligonucleotide
uguccauuagagucauggc

SEQ ID NO: 2804542 - RNA, 19 nt, Artificial Sequence
  Description of Artificial Sequence: Synthetic oligonucleotide
aaaaggagucugcucucga

SEQ ID NO: 2804543 - RNA, 19 nt, Artificial Sequence
  Description of Artificial Sequence: Synthetic oligonucleotide
aauggccagccaucuucac

SEQ ID NO: 2804544 - RNA, 19 nt, Artificial Sequence
  Description of Artificial Sequence: Synthetic oligonucleotide
cauugucccacacagucuc

SEQ ID NO: 2804545 - RNA, 19 nt, Artificial Sequence
  Description of Artificial Sequence: Synthetic oligonucleotide
aucagggcuauuccauagg

SEQ ID NO: 2804546 - RNA, 19 nt, Artificial Sequence
  Description of Artificial Sequence: Synthetic oligonucleotide
augaaaagcuuugaaggga

SEQ ID NO: 2804547 - RNA, 19 nt, Artificial Sequence
  Description of Artificial Sequence: Synthetic oligonucleotide
cauuucaaaaugucccauc

SEQ ID NO: 2804548 - RNA, 19 nt, Artificial Sequence
  Description of Artificial Sequence: Synthetic oligonucleotide
accgcaaggccuucucagc

SEQ ID NO: 2804549 - RNA, 19 nt, Artificial Sequence
  Description of Artificial Sequence: Synthetic oligonucleotide
uccaggagccuauggcugg

SEQ ID NO: 2804550 - RNA, 19 nt, Artificial Sequence
  Description of Artificial Sequence: Synthetic oligonucleotide
aaggaaaugccuggacuug

SEQ ID NO: 2804551 - RNA, 19 nt, Artificial Sequence
  Description of Artificial Sequence: Synthetic oligonucleotide
uuccauaggaguucuugaa

SEQ ID NO: 2804552 - RNA, 19 nt, Artificial Sequence
  Description of Artificial Sequence: Synthetic oligonucleotide
acgccaucagggcuauucc

SEQ ID NO: 2804553 - RNA, 19 nt, Artificial Sequence
  Description of Artificial Sequence: Synthetic oligonucleotide
ucuguugaacgugugguaa

SEQ ID NO: 2804554 - RNA, 19 nt, Artificial Sequence
  Description of Artificial Sequence: Synthetic oligonucleotide
gauguaacuuuuccgggaa

SEQ ID NO: 2804555 - RNA, 19 nt, Artificial Sequence
  Description of Artificial Sequence: Synthetic oligonucleotide
aauucucugccaugucuaa

SEQ ID NO: 2804556 - RNA, 19 nt, Artificial Sequence
  Description of Artificial Sequence: Synthetic oligonucleotide
ggacuugugagguacacca

SEQ ID NO: 2804557 - RNA, 19 nt, Artificial Sequence
  Description of Artificial Sequence: Synthetic oligonucleotide
gaucugagccuuccgagca

SEQ ID NO: 2804558 - RNA, 19 nt, Artificial Sequence
  Description of Artificial Sequence: Synthetic oligonucleotide
caucccacaagaucccggc

SEQ ID NO: 2804559 - RNA, 19 nt, Artificial Sequence
  Description of Artificial Sequence: Synthetic oligonucleotide
cgagcaucccacaagaucc

SEQ ID NO: 2804560 - RNA, 19 nt, Artificial Sequence
  Description of Artificial Sequence: Synthetic oligonucleotide
uaacuuuuccgggaauggc

SEQ ID NO: 2804561 - RNA, 19 nt, Artificial Sequence
  Description of Artificial Sequence: Synthetic oligonucleotide
guacaccacgucuuuguag

SEQ ID NO: 2804562 - RNA, 19 nt, Artificial Sequence
  Description of Artificial Sequence: Synthetic oligonucleotide
caucagggcuauuccauag

SEQ ID NO: 2804563 - RNA, 19 nt, Artificial Sequence
  Description of Artificial Sequence: Synthetic oligonucleotide
uuuguagcugucaccgcaa

SEQ ID NO: 2804564 - RNA, 19 nt, Artificial Sequence
  Description of Artificial Sequence: Synthetic oligonucleotide
agagucauggcugccagca

SEQ ID NO: 2804565 - RNA, 19 nt, Artificial Sequence
  Description of Artificial Sequence: Synthetic oligonucleotide
ucggucacgaacgccauca

SEQ ID NO: 2804566 - RNA, 19 nt, Artificial Sequence
  Description of Artificial Sequence: Synthetic oligonucleotide
ucuaacacuucugccuuca

SEQ ID NO: 2804567 - RNA, 19 nt, Artificial Sequence
  Description of Artificial Sequence: Synthetic oligonucleotide
gucuccaggagccuauggc

SEQ ID NO: 2804568 - RNA, 19 nt, Artificial Sequence
  Description of Artificial Sequence: Synthetic oligonucleotide
uugaagggaaagucauaga

SEQ ID NO: 2804569 - RNA, 19 nt, Artificial Sequence
  Description of Artificial Sequence: Synthetic oligonucleotide
uuucaaaaugucccaucuu

SEQ ID NO: 2804570 - RNA, 19 nt, Artificial Sequence
  Description of Artificial Sequence: Synthetic oligonucleotide
ugucccaucuucacuuuuc

SEQ ID NO: 2804571 - RNA, 19 nt, Artificial Sequence
  Description of Artificial Sequence: Synthetic oligonucleotide
agguacaccacgucuuugu

SEQ ID NO: 2804572 - RNA, 19 nt, Artificial Sequence
  Description of Artificial Sequence: Synthetic oligonucleotide
cacuucugccuucaccugg

SEQ ID NO: 2804573 - RNA, 19 nt, Artificial Sequence
  Description of Artificial Sequence: Synthetic oligonucleotide
gcacuuuagguauucauca

SEQ ID NO: 2804574 - RNA, 19 nt, Artificial Sequence
  Description of Artificial Sequence: Synthetic oligonucleotide
uuuagguauucaucaucaa

SEQ ID NO: 2804575 - RNA, 19 nt, Artificial Sequence
  Description of Artificial Sequence: Synthetic oligonucleotide
ucacgaacgccaucagggc

SEQ ID NO: 2804576 - RNA, 19 nt, Artificial Sequence
  Description of Artificial Sequence: Synthetic oligonucleotide
aggagccuauggcuggcgc

SEQ ID NO: 2804577 - RNA, 19 nt, Artificial Sequence
  Description of Artificial Sequence: Synthetic oligonucleotide
auuagagucauggcugcca

SEQ ID NO: 2804578 - RNA, 19 nt, Artificial Sequence
  Description of Artificial Sequence: Synthetic oligonucleotide
cuuuguagcugucaccgca

SEQ ID NO: 2804579 - RNA, 19 nt, Artificial Sequence
  Description of Artificial Sequence: Synthetic oligonucleotide
ggcauugucccacacaguc

SEQ ID NO: 2804580 - RNA, 19 nt, Artificial Sequence
  Description of Artificial Sequence: Synthetic oligonucleotide
gaaagucauagauguaacu

SEQ ID NO: 2804581 - RNA, 19 nt, Artificial Sequence
  Description of Artificial Sequence: Synthetic oligonucleotide
accacgucuuuguagcugu

SEQ ID NO: 2804582 - RNA, 19 nt, Artificial Sequence
  Description of Artificial Sequence: Synthetic oligonucleotide
uuuccauccuguugcugca

SEQ ID NO: 2804583 - RNA, 19 nt, Artificial Sequence
  Description of Artificial Sequence: Synthetic oligonucleotide
ucccacaagaucccggcau

SEQ ID NO: 2804584 - RNA, 19 nt, Artificial Sequence
  Description of Artificial Sequence: Synthetic oligonucleotide
guugcugcacuuuagguau

SEQ ID NO: 2804585 - RNA, 19 nt, Artificial Sequence
  Description of Artificial Sequence: Synthetic oligonucleotide
cuucaccuggaagaugucc

SEQ ID NO: 2804586 - RNA, 19 nt, Artificial Sequence
  Description of Artificial Sequence: Synthetic oligonucleotide
ugaacagcugcugaaugua

SEQ ID NO: 2804587 - RNA, 19 nt, Artificial Sequence
  Description of Artificial Sequence: Synthetic oligonucleotide
uuguagcugucaccgcaag

SEQ ID NO: 2804588 - RNA, 19 nt, Artificial Sequence
  Description of Artificial Sequence: Synthetic oligonucleotide
uagcugucaccgcaaggcc

SEQ ID NO: 2804589 - RNA, 19 nt, Artificial Sequence
  Description of Artificial Sequence: Synthetic oligonucleotide
cuuccgagcaucccacaag

SEQ ID NO: 2804590 - RNA, 19 nt, Artificial Sequence
  Description of Artificial Sequence: Synthetic oligonucleotide
uccuugaacagcugcugaa

SEQ ID NO: 2804591 - RNA, 19 nt, Artificial Sequence
  Description of Artificial Sequence: Synthetic oligonucleotide
gguauucaucaucaaacga

SEQ ID NO: 2804592 - RNA, 19 nt, Artificial Sequence
  Description of Artificial Sequence: Synthetic oligonucleotide
agucuccaggagccuaugg

SEQ ID NO: 2804593 - RNA, 19 nt, Artificial Sequence
  Description of Artificial Sequence: Synthetic oligonucleotide
aucaucaaacgaauucucu

SEQ ID NO: 2804594 - RNA, 19 nt, Artificial Sequence
  Description of Artificial Sequence: Synthetic oligonucleotide
ucucugccaugucuaacac

SEQ ID NO: 2804595 - RNA, 19 nt, Artificial Sequence
  Description of Artificial Sequence: Synthetic oligonucleotide
ucgagccucggucacgaac

SEQ ID NO: 2804596 - RNA, 19 nt, Artificial Sequence
  Description of Artificial Sequence: Synthetic oligonucleotide
ggaauggccagccaucuuc

SEQ ID NO: 2804597 - RNA, 19 nt, Artificial Sequence
  Description of Artificial Sequence: Synthetic oligonucleotide
auucucugccaugucuaac

SEQ ID NO: 2804598 - RNA, 19 nt, Artificial Sequence
  Description of Artificial Sequence: Synthetic oligonucleotide
guccauuagagucauggcu

SEQ ID NO: 2804599 - RNA, 19 nt, Artificial Sequence
  Description of Artificial Sequence: Synthetic oligonucleotide
ucuuuguagcugucaccgc

SEQ ID NO: 2804600 - RNA, 19 nt, Artificial Sequence
  Description of Artificial Sequence: Synthetic oligonucleotide
uccgggaauggccagccau

SEQ ID NO: 2804601 - RNA, 19 nt, Artificial Sequence
  Description of Artificial Sequence: Synthetic oligonucleotide
uguugaacgugugguaaaa

SEQ ID NO: 2804602 - RNA, 19 nt, Artificial Sequence
  Description of Artificial Sequence: Synthetic oligonucleotide
accuggaagauguccauua

SEQ ID NO: 2804603 - RNA, 19 nt, Artificial Sequence
  Description of Artificial Sequence: Synthetic oligonucleotide
ugcucucgagccucgguca

SEQ ID NO: 2804604 - RNA, 19 nt, Artificial Sequence
  Description of Artificial Sequence: Synthetic oligonucleotide
gucauggcugccagcagcg

SEQ ID NO: 2804605 - RNA, 19 nt, Artificial Sequence
  Description of Artificial Sequence: Synthetic oligonucleotide
gucccacacagucuccagg

SEQ ID NO: 2804606 - RNA, 19 nt, Artificial Sequence
  Description of Artificial Sequence: Synthetic oligonucleotide
gugaccauuucaaaauguc

SEQ ID NO: 2804607 - RNA, 19 nt, Artificial Sequence
  Description of Artificial Sequence: Synthetic oligonucleotide
caccgcaaggccuucucag

SEQ ID NO: 2804608 - RNA, 19 nt, Artificial Sequence
  Description of Artificial Sequence: Synthetic oligonucleotide
acgaauucucugccauguc

SEQ ID NO: 2804609 - RNA, 19 nt, Artificial Sequence
  Description of Artificial Sequence: Synthetic oligonucleotide
cagggcuauuccauaggag

SEQ ID NO: 2804610 - RNA, 19 nt, Artificial Sequence
  Description of Artificial Sequence: Synthetic oligonucleotide
agcuuugaagggaaaguca

SEQ ID NO: 2804611 - RNA, 19 nt, Artificial Sequence
  Description of Artificial Sequence: Synthetic oligonucleotide
aaugucccaucuucacuuu

SEQ ID NO: 2804612 - RNA, 19 nt, Artificial Sequence
  Description of Artificial Sequence: Synthetic oligonucleotide
uuuccgggaauggccagcc

SEQ ID NO: 2804613 - RNA, 19 nt, Artificial Sequence
  Description of Artificial Sequence: Synthetic oligonucleotide
ggugcagggcucuugucag

SEQ ID NO: 2804614 - RNA, 19 nt, Artificial Sequence
  Description of Artificial Sequence: Synthetic oligonucleotide
ccaugucuaacacuucugc

SEQ ID NO: 2804615 - RNA, 19 nt, Artificial Sequence
  Description of Artificial Sequence: Synthetic oligonucleotide
ggggacggggaucugagcc

SEQ ID NO: 2804616 - RNA, 19 nt, Artificial Sequence
  Description of Artificial Sequence: Synthetic oligonucleotide
uuuuccgggaauggccagc

SEQ ID NO: 2804617 - RNA, 19 nt, Artificial Sequence
  Description of Artificial Sequence: Synthetic oligonucleotide
ugagguacaccacgucuuu

SEQ ID NO: 2804618 - RNA, 19 nt, Artificial Sequence
  Description of Artificial Sequence: Synthetic oligonucleotide
uggacuugugagguacacc

SEQ ID NO: 2804619 - RNA, 19 nt, Artificial Sequence
  Description of Artificial Sequence: Synthetic oligonucleotide
cuuaaaggaaaugccugga

SEQ ID NO: 2804620 - RNA, 19 nt, Artificial Sequence
  Description of Artificial Sequence: Synthetic oligonucleotide
agucauagauguaacuuuu

SEQ ID NO: 2804621 - RNA, 19 nt, Artificial Sequence
  Description of Artificial Sequence: Synthetic oligonucleotide
ucauuuccauccuguugcu

SEQ ID NO: 2804622 - RNA, 19 nt, Artificial Sequence
  Description of Artificial Sequence: Synthetic oligonucleotide
gaauucucugccaugucua

SEQ ID NO: 2804623 - RNA, 19 nt, Artificial Sequence
  Description of Artificial Sequence: Synthetic oligonucleotide
aaggccuucucagcaggug

SEQ ID NO: 2804624 - RNA, 19 nt, Artificial Sequence
  Description of Artificial Sequence: Synthetic oligonucleotide
gggaucugagccuuccgag

SEQ ID NO: 2804625 - RNA, 19 nt, Artificial Sequence
  Description of Artificial Sequence: Synthetic oligonucleotide
acuuuuccgggaauggcca

SEQ ID NO: 2804626 - RNA, 19 nt, Artificial Sequence
  Description of Artificial Sequence: Synthetic oligonucleotide
gggaaagucauagauguaa

SEQ ID NO: 2804627 - RNA, 19 nt, Artificial Sequence
  Description of Artificial Sequence: Synthetic oligonucleotide
uauggcuggcgcuuuccuc

SEQ ID NO: 2804628 - RNA, 19 nt, Artificial Sequence
  Description of Artificial Sequence: Synthetic oligonucleotide
ucaccgcaaggccuucuca

SEQ ID NO: 2804629 - RNA, 19 nt, Artificial Sequence
  Description of Artificial Sequence: Synthetic oligonucleotide
gcugaauguacuucauuuc

SEQ ID NO: 2804630 - RNA, 19 nt, Artificial Sequence
  Description of Artificial Sequence: Synthetic oligonucleotide
guacuucauuuccauccug

SEQ ID NO: 2804631 - RNA, 19 nt, Artificial Sequence
  Description of Artificial Sequence: Synthetic oligonucleotide
ggucacgaacgccaucagg

SEQ ID NO: 2804632 - RNA, 19 nt, Artificial Sequence
  Description of Artificial Sequence: Synthetic oligonucleotide
ucacagcucuguugaacgu

SEQ ID NO: 2804633 - RNA, 19 nt, Artificial Sequence
  Description of Artificial Sequence: Synthetic oligonucleotide
cuggaagauguccauuaga

SEQ ID NO: 2804634 - RNA, 19 nt, Artificial Sequence
  Description of Artificial Sequence: Synthetic oligonucleotide
ccuguugcugcacuuuagg

SEQ ID NO: 2804635 - RNA, 19 nt, Artificial Sequence
  Description of Artificial Sequence: Synthetic oligonucleotide
ucugcucucgagccucggu

SEQ ID NO: 2804636 - RNA, 19 nt, Artificial Sequence
  Description of Artificial Sequence: Synthetic oligonucleotide
guggugaccauuucaaaau

SEQ ID NO: 2804637 - RNA, 19 nt, Artificial Sequence
  Description of Artificial Sequence: Synthetic oligonucleotide
ggaucugagccuuccgagc

SEQ ID NO: 2804638 - RNA, 19 nt, Artificial Sequence
  Description of Artificial Sequence: Synthetic oligonucleotide
gagccuuccgagcauccca

SEQ ID NO: 2804639 - RNA, 19 nt, Artificial Sequence
  Description of Artificial Sequence: Synthetic oligonucleotide
acggggaucugagccuucc

SEQ ID NO: 2804640 - RNA, 19 nt, Artificial Sequence
  Description of Artificial Sequence: Synthetic oligonucleotide
auugucccacacagucucc

SEQ ID NO: 2804641 - RNA, 19 nt, Artificial Sequence
  Description of Artificial Sequence: Synthetic oligonucleotide
ccggcauugucccacacag

SEQ ID NO: 2804642 - RNA, 19 nt, Artificial Sequence
  Description of Artificial Sequence: Synthetic oligonucleotide
cuuuuccgggaauggccag

SEQ ID NO: 2804643 - RNA, 19 nt, Artificial Sequence
  Description of Artificial Sequence: Synthetic oligonucleotide
ggaaagucauagauguaac

SEQ ID NO: 2804644 - RNA, 19 nt, Artificial Sequence
  Description of Artificial Sequence: Synthetic oligonucleotide
gaacagcugcugaauguac

SEQ ID NO: 2804645 - RNA, 19 nt, Artificial Sequence
  Description of Artificial Sequence: Synthetic oligonucleotide
augccuggacuugugaggu

SEQ ID NO: 2804646 - RNA, 19 nt, Artificial Sequence
  Description of Artificial Sequence: Synthetic oligonucleotide
gaucccggcauugucccac

SEQ ID NO: 2804647 - RNA, 19 nt, Artificial Sequence
  Description of Artificial Sequence: Synthetic oligonucleotide
gcgcuuuccuccuugaaca

SEQ ID NO: 2804648 - RNA, 19 nt, Artificial Sequence
  Description of Artificial Sequence: Synthetic oligonucleotide
acacuucugccuucaccug

SEQ ID NO: 2804649 - RNA, 19 nt, Artificial Sequence
  Description of Artificial Sequence: Synthetic oligonucleotide
uagagucauggcugccagc

SEQ ID NO: 2804650 - RNA, 19 nt, Artificial Sequence
  Description of Artificial Sequence: Synthetic oligonucleotide
ucaccuggaagauguccau

SEQ ID NO: 2804651 - RNA, 19 nt, Artificial Sequence
  Description of Artificial Sequence: Synthetic oligonucleotide
ggcgcuuuccuccuugaac

SEQ ID NO: 2804652 - RNA, 19 nt, Artificial Sequence
  Description of Artificial Sequence: Synthetic oligonucleotide
uugucccacacagucucca

SEQ ID NO: 2804653 - RNA, 19 nt, Artificial Sequence
  Description of Artificial Sequence: Synthetic oligonucleotide
cgagccucggucacgaacg

SEQ ID NO: 2804654 - RNA, 19 nt, Artificial Sequence
  Description of Artificial Sequence: Synthetic oligonucleotide
cacagcucuguugaacgug

SEQ ID NO: 2804655 - RNA, 19 nt, Artificial Sequence
  Description of Artificial Sequence: Synthetic oligonucleotide
gagucauggcugccagcag

SEQ ID NO: 2804656 - RNA, 19 nt, Artificial Sequence
  Description of Artificial Sequence: Synthetic oligonucleotide
gaauggccagccaucuuca

SEQ ID NO: 2804657 - RNA, 19 nt, Artificial Sequence
  Description of Artificial Sequence: Synthetic oligonucleotide
ccauuagagucauggcugc

SEQ ID NO: 2804658 - RNA, 19 nt, Artificial Sequence
  Description of Artificial Sequence: Synthetic oligonucleotide
aggaaaugccuggacuugu

SEQ ID NO: 2804659 - RNA, 19 nt, Artificial Sequence
  Description of Artificial Sequence: Synthetic oligonucleotide
acagcucuguugaacgugu

SEQ ID NO: 2804660 - RNA, 19 nt, Artificial Sequence
  Description of Artificial Sequence: Synthetic oligonucleotide
cugcucucgagccucgguc

SEQ ID NO: 2804661 - RNA, 19 nt, Artificial Sequence
  Description of Artificial Sequence: Synthetic oligonucleotide
agcaucccacaagaucccg

SEQ ID NO: 2804662 - RNA, 19 nt, Artificial Sequence
  Description of Artificial Sequence: Synthetic oligonucleotide
agccuuccgagcaucccac

SEQ ID NO: 2804663 - RNA, 19 nt, Artificial Sequence
  Description of Artificial Sequence: Synthetic oligonucleotide
cauuagagucauggcugcc

SEQ ID NO: 2804664 - RNA, 19 nt, Artificial Sequence
  Description of Artificial Sequence: Synthetic oligonucleotide
agcguggugaccauuucaa

SEQ ID NO: 2804665 - RNA, 19 nt, Artificial Sequence
  Description of Artificial Sequence: Synthetic oligonucleotide
cauaggaguucuugaaggu

SEQ ID NO: 2804666 - RNA, 19 nt, Artificial Sequence
  Description of Artificial Sequence: Synthetic oligonucleotide
gagcaucccacaagauccc

SEQ ID NO: 2804667 - RNA, 19 nt, Artificial Sequence
  Description of Artificial Sequence: Synthetic oligonucleotide
gagucugcucucgagccuc

SEQ ID NO: 2804668 - RNA, 19 nt, Artificial Sequence
  Description of Artificial Sequence: Synthetic oligonucleotide
ucuucacagcucuguugaa

SEQ ID NO: 2804669 - RNA, 19 nt, Artificial Sequence
  Description of Artificial Sequence: Synthetic oligonucleotide
auguaacuuuuccgggaau

SEQ ID NO: 2804670 - RNA, 19 nt, Artificial Sequence
  Description of Artificial Sequence: Synthetic oligonucleotide
ucagcaggugcagggcucu

SEQ ID NO: 2804671 - RNA, 19 nt, Artificial Sequence
  Description of Artificial Sequence: Synthetic oligonucleotide
cuugugagguacaccacgu

SEQ ID NO: 2804672 - RNA, 19 nt, Artificial Sequence
  Description of Artificial Sequence: Synthetic oligonucleotide
ccacacagucuccaggagc

SEQ ID NO: 2804673 - RNA, 19 nt, Artificial Sequence
  Description of Artificial Sequence: Synthetic oligonucleotide
agauguccauuagagucau

SEQ ID NO: 2804674 - RNA, 19 nt, Artificial Sequence
  Description of Artificial Sequence: Synthetic oligonucleotide
ucugagccuuccgagcauc

SEQ ID NO: 2804675 - RNA, 19 nt, Artificial Sequence
  Description of Artificial Sequence: Synthetic oligonucleotide
cuuugaagggaaagucaua

SEQ ID NO: 2804676 - RNA, 19 nt, Artificial Sequence
  Description of Artificial Sequence: Synthetic oligonucleotide
cuggacuugugagguacac

SEQ ID NO: 2804677 - RNA, 19 nt, Artificial Sequence
  Description of Artificial Sequence: Synthetic oligonucleotide
cuaacacuucugccuucac

SEQ ID NO: 2804678 - RNA, 19 nt, Artificial Sequence
  Description of Artificial Sequence: Synthetic oligonucleotide
gacuugugagguacaccac

SEQ ID NO: 2804679 - RNA, 19 nt, Artificial Sequence
  Description of Artificial Sequence: Synthetic oligonucleotide
agccucggucacgaacgcc

SEQ ID NO: 2804680 - RNA, 19 nt, Artificial Sequence
  Description of Artificial Sequence: Synthetic oligonucleotide
ugcugcacuuuagguauuc

SEQ ID NO: 2804681 - RNA, 19 nt, Artificial Sequence
  Description of Artificial Sequence: Synthetic oligonucleotide
gcugccagcagcgugguga

SEQ ID NO: 2804682 - RNA, 19 nt, Artificial Sequence
  Description of Artificial Sequence: Synthetic oligonucleotide
gugcagggcucuugucagg

SEQ ID NO: 2804683 - RNA, 19 nt, Artificial Sequence
  Description of Artificial Sequence: Synthetic oligonucleotide
acaccacgucuuuguagcu

SEQ ID NO: 2804684 - RNA, 19 nt, Artificial Sequence
  Description of Artificial Sequence: Synthetic oligonucleotide
cuccuugaacagcugcuga

SEQ ID NO: 2804685 - RNA, 19 nt, Artificial Sequence
  Description of Artificial Sequence: Synthetic oligonucleotide
aucccacaagaucccggca

SEQ ID NO: 2804686 - RNA, 19 nt, Artificial Sequence
  Description of Artificial Sequence: Synthetic oligonucleotide
uccgagcaucccacaagau

SEQ ID NO: 2804687 - RNA, 19 nt, Artificial Sequence
  Description of Artificial Sequence: Synthetic oligonucleotide
cuguugaacgugugguaaa

SEQ ID NO: 2804688 - RNA, 19 nt, Artificial Sequence
  Description of Artificial Sequence: Synthetic oligonucleotide
agcugucaccgcaaggccu

SEQ ID NO: 2804689 - RNA, 19 nt, Artificial Sequence
  Description of Artificial Sequence: Synthetic oligonucleotide
auucaucaucaaacgaauu

SEQ ID NO: 2804690 - RNA, 19 nt, Artificial Sequence
  Description of Artificial Sequence: Synthetic oligonucleotide
cauuuccauccuguugcug

SEQ ID NO: 2804691 - RNA, 19 nt, Artificial Sequence
  Description of Artificial Sequence: Synthetic oligonucleotide
caccacgucuuuguagcug

SEQ ID NO: 2804692 - RNA, 19 nt, Artificial Sequence
  Description of Artificial Sequence: Synthetic oligonucleotide
cugccagcagcguggugac

SEQ ID NO: 2804693 - RNA, 19 nt, Artificial Sequence
  Description of Artificial Sequence: Synthetic oligonucleotide
gagccucggucacgaacgc

SEQ ID NO: 2804694 - RNA, 19 nt, Artificial Sequence
  Description of Artificial Sequence: Synthetic oligonucleotide
ccgagcaucccacaagauc

SEQ ID NO: 2804695 - RNA, 19 nt, Artificial Sequence
  Description of Artificial Sequence: Synthetic oligonucleotide
cagggcucuugucagguaa

SEQ ID NO: 2804696 - RNA, 19 nt, Artificial Sequence
  Description of Artificial Sequence: Synthetic oligonucleotide
ggcuauuccauaggaguuc

SEQ ID NO: 2804697 - RNA, 19 nt, Artificial Sequence
  Description of Artificial Sequence: Synthetic oligonucleotide
ggaagauguccauuagagu

SEQ ID NO: 2804698 - RNA, 19 nt, Artificial Sequence
  Description of Artificial Sequence: Synthetic oligonucleotide
ggggaucugagccuuccga

SEQ ID NO: 2804699 - RNA, 19 nt, Artificial Sequence
  Description of Artificial Sequence: Synthetic oligonucleotide
cucuguugaacguguggua

SEQ ID NO: 2804700 - RNA, 19 nt, Artificial Sequence
  Description of Artificial Sequence: Synthetic oligonucleotide
aucugagccuuccgagcau

SEQ ID NO: 2804701 - RNA, 19 nt, Artificial Sequence
  Description of Artificial Sequence: Synthetic oligonucleotide
ugccuucaccuggaagaug

SEQ ID NO: 2804702 - RNA, 19 nt, Artificial Sequence
  Description of Artificial Sequence: Synthetic oligonucleotide
cagcguggugaccauuuca

SEQ ID NO: 2804703 - RNA, 19 nt, Artificial Sequence
  Description of Artificial Sequence: Synthetic oligonucleotide
gucaccgcaaggccuucuc

SEQ ID NO: 2804704 - RNA, 19 nt, Artificial Sequence
  Description of Artificial Sequence: Synthetic oligonucleotide
cuguugcugcacuuuaggu

SEQ ID NO: 2804705 - RNA, 19 nt, Artificial Sequence
  Description of Artificial Sequence: Synthetic oligonucleotide
gcaucccacaagaucccgg

SEQ ID NO: 2804706 - RNA, 19 nt, Artificial Sequence
  Description of Artificial Sequence: Synthetic oligonucleotide
acgaacgccaucagggcua

SEQ ID NO: 2804707 - RNA, 19 nt, Artificial Sequence
  Description of Artificial Sequence: Synthetic oligonucleotide
cagcugcugaauguacuuc

SEQ ID NO: 2804708 - RNA, 19 nt, Artificial Sequence
  Description of Artificial Sequence: Synthetic oligonucleotide
uggcgcuuuccuccuugaa

SEQ ID NO: 2804709 - RNA, 19 nt, Artificial Sequence
  Description of Artificial Sequence: Synthetic oligonucleotide
cucucgagccucggucacg

SEQ ID NO: 2804710 - RNA, 19 nt, Artificial Sequence
  Description of Artificial Sequence: Synthetic oligonucleotide
ggaguucuugaaggucagg

SEQ ID NO: 2804711 - RNA, 19 nt, Artificial Sequence
  Description of Artificial Sequence: Synthetic oligonucleotide
agcaggugcagggcucuug

SEQ ID NO: 2804712 - RNA, 19 nt, Artificial Sequence
  Description of Artificial Sequence: Synthetic oligonucleotide
uuccgggaauggccagcca

SEQ ID NO: 2804713 - RNA, 19 nt, Artificial Sequence
  Description of Artificial Sequence: Synthetic oligonucleotide
agcagcguggugaccauuu

SEQ ID NO: 2804714 - RNA, 19 nt, Artificial Sequence
  Description of Artificial Sequence: Synthetic oligonucleotide
cugccaugucuaacacuuc

SEQ ID NO: 2804715 - RNA, 19 nt, Artificial Sequence
  Description of Artificial Sequence: Synthetic oligonucleotide
cagcucuguugaacgugug

SEQ ID NO: 2804716 - RNA, 19 nt, Artificial Sequence
  Description of Artificial Sequence: Synthetic oligonucleotide
cugcacuuuagguauucau

SEQ ID NO: 2804717 - RNA, 19 nt, Artificial Sequence
  Description of Artificial Sequence: Synthetic oligonucleotide
cgucuuuguagcugucacc

SEQ ID NO: 2804718 - RNA, 19 nt, Artificial Sequence
  Description of Artificial Sequence: Synthetic oligonucleotide
uuccauccuguugcugcac

SEQ ID NO: 2804719 - RNA, 19 nt, Artificial Sequence
  Description of Artificial Sequence: Synthetic oligonucleotide
gccaugucuaacacuucug

SEQ ID NO: 2804720 - RNA, 19 nt, Artificial Sequence
  Description of Artificial Sequence: Synthetic oligonucleotide
acagucuccaggagccuau

SEQ ID NO: 2804721 - RNA, 19 nt, Artificial Sequence
  Description of Artificial Sequence: Synthetic oligonucleotide
cacgucuuuguagcuguca

SEQ ID NO: 2804722 - RNA, 19 nt, Artificial Sequence
  Description of Artificial Sequence: Synthetic oligonucleotide
agaucccggcauuguccca

SEQ ID NO: 2804723 - RNA, 19 nt, Artificial Sequence
  Description of Artificial Sequence: Synthetic oligonucleotide
agucugcucucgagccucg

SEQ ID NO: 2804724 - RNA, 19 nt, Artificial Sequence
  Description of Artificial Sequence: Synthetic oligonucleotide
uggcuggcgcuuuccuccu

SEQ ID NO: 2804725 - RNA, 19 nt, Artificial Sequence
  Description of Artificial Sequence: Synthetic oligonucleotide
gauguccauuagagucaug

SEQ ID NO: 2804726 - RNA, 19 nt, Artificial Sequence
  Description of Artificial Sequence: Synthetic oligonucleotide
gcuggcgcuuuccuccuug

SEQ ID NO: 2804727 - RNA, 19 nt, Artificial Sequence
  Description of Artificial Sequence: Synthetic oligonucleotide
gccuggacuugugagguac

SEQ ID NO: 2804728 - RNA, 19 nt, Artificial Sequence
  Description of Artificial Sequence: Synthetic oligonucleotide
cguggugaccauuucaaaa

SEQ ID NO: 2804729 - RNA, 19 nt, Artificial Sequence
  Description of Artificial Sequence: Synthetic oligonucleotide
ugucaccgcaaggccuucu

SEQ ID NO: 2804730 - RNA, 19 nt, Artificial Sequence
  Description of Artificial Sequence: Synthetic oligonucleotide
ggugaccauuucaaaaugu

SEQ ID NO: 2804731 - RNA, 19 nt, Artificial Sequence
  Description of Artificial Sequence: Synthetic oligonucleotide
gcuuugaagggaaagucau

SEQ ID NO: 2804732 - RNA, 19 nt, Artificial Sequence
  Description of Artificial Sequence: Synthetic oligonucleotide
gccagcagcguggugacca

SEQ ID NO: 2804733 - RNA, 19 nt, Artificial Sequence
  Description of Artificial Sequence: Synthetic oligonucleotide
gccucggucacgaacgcca

SEQ ID NO: 2804734 - RNA, 19 nt, Artificial Sequence
  Description of Artificial Sequence: Synthetic oligonucleotide
uugcugcacuuuagguauu

SEQ ID NO: 2804735 - RNA, 19 nt, Artificial Sequence
  Description of Artificial Sequence: Synthetic oligonucleotide
cacuuuagguauucaucau

SEQ ID NO: 2804736 - RNA, 19 nt, Artificial Sequence
  Description of Artificial Sequence: Synthetic oligonucleotide
ucauggcugccagcagcgu

SEQ ID NO: 2804737 - RNA, 19 nt, Artificial Sequence
  Description of Artificial Sequence: Synthetic oligonucleotide
cacgaacgccaucagggcu

SEQ ID NO: 2804738 - RNA, 19 nt, Artificial Sequence
  Description of Artificial Sequence: Synthetic oligonucleotide
gguacaccacgucuuugua

SEQ ID NO: 2804739 - RNA, 19 nt, Artificial Sequence
  Description of Artificial Sequence: Synthetic oligonucleotide
cucggucacgaacgccauc

SEQ ID NO: 2804740 - RNA, 19 nt, Artificial Sequence
  Description of Artificial Sequence: Synthetic oligonucleotide
ccuucucagcaggugcagg

SEQ ID NO: 2804741 - RNA, 19 nt, Artificial Sequence
  Description of Artificial Sequence: Synthetic oligonucleotide
gucugcucucgagccucgg

SEQ ID NO: 2804742 - RNA, 19 nt, Artificial Sequence
  Description of Artificial Sequence: Synthetic oligonucleotide
gugagguacaccacgucuu

SEQ ID NO: 2804743 - RNA, 19 nt, Artificial Sequence
  Description of Artificial Sequence: Synthetic oligonucleotide
ccuauggcuggcgcuuucc

SEQ ID NO: 2804744 - RNA, 19 nt, Artificial Sequence
  Description of Artificial Sequence: Synthetic oligonucleotide
ccgggaauggccagccauc

SEQ ID NO: 2804745 - RNA, 19 nt, Artificial Sequence
  Description of Artificial Sequence: Synthetic oligonucleotide
agggcucuugucagguaaa

SEQ ID NO: 2804746 - RNA, 19 nt, Artificial Sequence
  Description of Artificial Sequence: Synthetic oligonucleotide
ugccuggacuugugaggua

SEQ ID NO: 2804747 - RNA, 19 nt, Artificial Sequence
  Description of Artificial Sequence: Synthetic oligonucleotide
agggaaagucauagaugua

SEQ ID NO: 2804748 - RNA, 19 nt, Artificial Sequence
  Description of Artificial Sequence: Synthetic oligonucleotide
cuggcgcuuuccuccuuga

SEQ ID NO: 2804749 - RNA, 19 nt, Artificial Sequence
  Description of Artificial Sequence: Synthetic oligonucleotide
gcuauuccauaggaguucu

SEQ ID NO: 2804750 - RNA, 19 nt, Artificial Sequence
  Description of Artificial Sequence: Synthetic oligonucleotide
cuauggcuggcgcuuuccu

SEQ ID NO: 2804751 - RNA, 19 nt, Artificial Sequence
  Description of Artificial Sequence: Synthetic oligonucleotide
cgcaaggccuucucagcag

SEQ ID NO: 2804752 - RNA, 19 nt, Artificial Sequence
  Description of Artificial Sequence: Synthetic oligonucleotide
cagucuccaggagccuaug

SEQ ID NO: 2804753 - RNA, 19 nt, Artificial Sequence
  Description of Artificial Sequence: Synthetic oligonucleotide
ggagccuauggcuggcgcu

SEQ ID NO: 2804754 - RNA, 19 nt, Artificial Sequence
  Description of Artificial Sequence: Synthetic oligonucleotide
gcucucgagccucggucac

SEQ ID NO: 2804755 - RNA, 19 nt, Artificial Sequence
  Description of Artificial Sequence: Synthetic oligonucleotide
cacaagaucccggcauugu

SEQ ID NO: 2804756 - RNA, 19 nt, Artificial Sequence
  Description of Artificial Sequence: Synthetic oligonucleotide
cacagucuccaggagccua

SEQ ID NO: 2804757 - RNA, 19 nt, Artificial Sequence
  Description of Artificial Sequence: Synthetic oligonucleotide
ccacaagaucccggcauug

SEQ ID NO: 2804758 - RNA, 19 nt, Artificial Sequence
  Description of Artificial Sequence: Synthetic oligonucleotide
gagccuauggcuggcgcuu

SEQ ID NO: 2804759 - RNA, 19 nt, Artificial Sequence
  Description of Artificial Sequence: Synthetic oligonucleotide
cgcuuuccuccuugaacag

SEQ ID NO: 2804760 - RNA, 19 nt, Artificial Sequence
  Description of Artificial Sequence: Synthetic oligonucleotide
caaggccuucucagcaggu

SEQ ID NO: 2804761 - RNA, 19 nt, Artificial Sequence
  Description of Artificial Sequence: Synthetic oligonucleotide
cgaauucucugccaugucu

SEQ ID NO: 2804762 - RNA, 19 nt, Artificial Sequence
  Description of Artificial Sequence: Synthetic oligonucleotide
uggcugccagcagcguggu

SEQ ID NO: 2804763 - RNA, 19 nt, Artificial Sequence
  Description of Artificial Sequence: Synthetic oligonucleotide
ugccagcagcguggugacc

SEQ ID NO: 2804764 - RNA, 19 nt, Artificial Sequence
  Description of Artificial Sequence: Synthetic oligonucleotide
gcaggugcagggcucuugu

SEQ ID NO: 2804765 - RNA, 19 nt, Artificial Sequence
  Description of Artificial Sequence: Synthetic oligonucleotide
gcagcguggugaccauuuc

SEQ ID NO: 2804766 - RNA, 19 nt, Artificial Sequence
  Description of Artificial Sequence: Synthetic oligonucleotide
ccgcaaggccuucucagca

SEQ ID NO: 2804767 - RNA, 19 nt, Artificial Sequence
  Description of Artificial Sequence: Synthetic oligonucleotide
gggacggggaucugagccu

SEQ ID NO: 2804768 - RNA, 19 nt, Artificial Sequence
  Description of Artificial Sequence: Synthetic oligonucleotide
cugcugaauguacuucauu

SEQ ID NO: 2804769 - RNA, 19 nt, Artificial Sequence
  Description of Artificial Sequence: Synthetic oligonucleotide
gcugcacuuuagguauuca

SEQ ID NO: 2804770 - RNA, 19 nt, Artificial Sequence
  Description of Artificial Sequence: Synthetic oligonucleotide
gcguggugaccauuucaaa

SEQ ID NO: 2804771 - RNA, 19 nt, Artificial Sequence
  Description of Artificial Sequence: Synthetic oligonucleotide
ggagucugcucucgagccu

SEQ ID NO: 2804772 - RNA, 19 nt, Artificial Sequence
  Description of Artificial Sequence: Synthetic oligonucleotide
gacggggaucugagccuuc

SEQ ID NO: 2804773 - RNA, 19 nt, Artificial Sequence
  Description of Artificial Sequence: Synthetic oligonucleotide
ccuuccgagcaucccacaa

SEQ ID NO: 2804774 - RNA, 19 nt, Artificial Sequence
  Description of Artificial Sequence: Synthetic oligonucleotide
cuucugccuucaccuggaa

SEQ ID NO: 2804775 - RNA, 19 nt, Artificial Sequence
  Description of Artificial Sequence: Synthetic oligonucleotide
ccaggagccuauggcuggc

SEQ ID NO: 2804776 - RNA, 19 nt, Artificial Sequence
  Description of Artificial Sequence: Synthetic oligonucleotide
ccaucagggcuauuccaua

SEQ ID NO: 2804777 - RNA, 19 nt, Artificial Sequence
  Description of Artificial Sequence: Synthetic oligonucleotide
gccaucagggcuauuccau

SEQ ID NO: 2804778 - RNA, 19 nt, Artificial Sequence
  Description of Artificial Sequence: Synthetic oligonucleotide
gcauugucccacacagucu

SEQ ID NO: 2804779 - RNA, 19 nt, Artificial Sequence
  Description of Artificial Sequence: Synthetic oligonucleotide
ccuggacuugugagguaca

SEQ ID NO: 2804780 - RNA, 19 nt, Artificial Sequence
  Description of Artificial Sequence: Synthetic oligonucleotide
cauccuguugcugcacuuu

SEQ ID NO: 2804781 - RNA, 19 nt, Artificial Sequence
  Description of Artificial Sequence: Synthetic oligonucleotide
gggcuauuccauaggaguu

SEQ ID NO: 2804782 - RNA, 19 nt, Artificial Sequence
  Description of Artificial Sequence: Synthetic oligonucleotide
cugucaccgcaaggccuuc

SEQ ID NO: 2804783 - RNA, 19 nt, Artificial Sequence
  Description of Artificial Sequence: Synthetic oligonucleotide
agccuauggcuggcgcuuu

SEQ ID NO: 2804784 - RNA, 19 nt, Artificial Sequence
  Description of Artificial Sequence: Synthetic oligonucleotide
gggcucuugucagguaaaa

SEQ ID NO: 2804785 - RNA, 19 nt, Artificial Sequence
  Description of Artificial Sequence: Synthetic oligonucleotide
cggggaucugagccuuccg

SEQ ID NO: 2804786 - RNA, 19 nt, Artificial Sequence
  Description of Artificial Sequence: Synthetic oligonucleotide
cccggcauugucccacaca

SEQ ID NO: 2804787 - RNA, 19 nt, Artificial Sequence
  Description of Artificial Sequence: Synthetic oligonucleotide
cugccuucaccuggaagau

SEQ ID NO: 2804788 - RNA, 19 nt, Artificial Sequence
  Description of Artificial Sequence: Synthetic oligonucleotide
cuauuccauaggaguucuu

SEQ ID NO: 2804789 - RNA, 19 nt, Artificial Sequence
  Description of Artificial Sequence: Synthetic oligonucleotide
gccuauggcuggcgcuuuc

SEQ ID NO: 2804790 - RNA, 19 nt, Artificial Sequence
  Description of Artificial Sequence: Synthetic oligonucleotide
cgccaucagggcuauucca

SEQ ID NO: 2804791 - RNA, 19 nt, Artificial Sequence
  Description of Artificial Sequence: Synthetic oligonucleotide
ccacgucuuuguagcuguc

SEQ ID NO: 2804792 - RNA, 19 nt, Artificial Sequence
  Description of Artificial Sequence: Synthetic oligonucleotide
gccuuccgagcaucccaca

SEQ ID NO: 2804793 - RNA, 19 nt, Artificial Sequence
  Description of Artificial Sequence: Synthetic oligonucleotide
ccauuucaaaaugucccau

SEQ ID NO: 2804794 - RNA, 19 nt, Artificial Sequence
  Description of Artificial Sequence: Synthetic oligonucleotide
gcugcugaauguacuucau

SEQ ID NO: 2804795 - RNA, 19 nt, Artificial Sequence
  Description of Artificial Sequence: Synthetic oligonucleotide
gcugucaccgcaaggccuu

SEQ ID NO: 2804796 - RNA, 19 nt, Artificial Sequence
  Description of Artificial Sequence: Synthetic oligonucleotide
ccuugaacagcugcugaau

SEQ ID NO: 2804797 - RNA, 19 nt, Artificial Sequence
  Description of Artificial Sequence: Synthetic oligonucleotide
cggucacgaacgccaucag

SEQ ID NO: 2804798 - RNA, 19 nt, Artificial Sequence
  Description of Artificial Sequence: Synthetic oligonucleotide
cucgagccucggucacgaa

SEQ ID NO: 2804799 - RNA, 19 nt, Artificial Sequence
  Description of Artificial Sequence: Synthetic oligonucleotide
ggcugccagcagcguggug

SEQ ID NO: 2804800 - RNA, 19 nt, Artificial Sequence
  Description of Artificial Sequence: Synthetic oligonucleotide
caccuggaagauguccauu

SEQ ID NO: 2804801 - RNA, 19 nt, Artificial Sequence
  Description of Artificial Sequence: Synthetic oligonucleotide
gggaauggccagccaucuu

SEQ ID NO: 2804802 - RNA, 19 nt, Artificial Sequence
  Description of Artificial Sequence: Synthetic oligonucleotide
ggacggggaucugagccuu

SEQ ID NO: 2804803 - RNA, 19 nt, Artificial Sequence
  Description of Artificial Sequence: Synthetic oligonucleotide
cccacaagaucccggcauu

SEQ ID NO: 2804804 - RNA, 19 nt, Artificial Sequence
  Description of Artificial Sequence: Synthetic oligonucleotide
ccauccuguugcugcacuu

SEQ ID NO: 2804805 - RNA, 19 nt, Artificial Sequence
  Description of Artificial Sequence: Synthetic oligonucleotide
ccucggucacgaacgccau

SEQ ID NO: 2804806 - RNA, 19 nt, Artificial Sequence
  Description of Artificial Sequence: Synthetic oligonucleotide
cgggaauggccagccaucu

SEQ ID NO: 2804807 - RNA, 19 nt, Artificial Sequence
  Description of Artificial Sequence: Synthetic oligonucleotide
ccagcagcguggugaccau

SEQ ID NO: 2804808 - RNA, 19 nt, Artificial Sequence
  Description of Artificial Sequence: Synthetic oligonucleotide
cggcauugucccacacagu

SEQ ID NO: 2804809 - RNA, 19 nt, Artificial Sequence
  Description of Artificial Sequence: Synthetic oligonucleotide
gaacgccaucagggcuauu

SEQ ID NO: 2804810 - RNA, 19 nt, Artificial Sequence
  Description of Artificial Sequence: Synthetic oligonucleotide
ggcuggcgcuuuccuccuu

SEQ ID NO: 2804811 - RNA, 19 nt, Artificial Sequence
  Description of Artificial Sequence: Synthetic oligonucleotide
cagcaggugcagggcucuu

SEQ ID NO: 2804812 - RNA, 19 nt, Artificial Sequence
  Description of Artificial Sequence: Synthetic oligonucleotide
cgaacgccaucagggcuau

SEQ ID NO: 2804813 - RNA, 19 nt, Artificial Sequence
  Description of Artificial Sequence: Synthetic oligonucleotide
ugaauaaucacuuuuauac

SEQ ID NO: 2804814 - RNA, 19 nt, Artificial Sequence
  Description of Artificial Sequence: Synthetic oligonucleotide
agagggaauacuuauagcc

SEQ ID NO: 2804815 - RNA, 19 nt, Artificial Sequence
  Description of Artificial Sequence: Synthetic oligonucleotide
ucugaaaugagcuaacagg

SEQ ID NO: 2804816 - RNA, 19 nt, Artificial Sequence
  Description of Artificial Sequence: Synthetic oligonucleotide
uuauacaaggcucagauac

SEQ ID NO: 2804817 - RNA, 19 nt, Artificial Sequence
  Description of Artificial Sequence: Synthetic oligonucleotide
aauacuuuaguaauaagag

SEQ ID NO: 2804818 - RNA, 19 nt, Artificial Sequence
  Description of Artificial Sequence: Synthetic oligonucleotide
uacuuuaguaauaagagga

SEQ ID NO: 2804819 - RNA, 19 nt, Artificial Sequence
  Description of Artificial Sequence: Synthetic oligonucleotide
uuuaguaauaagaggagag

SEQ ID NO: 2804820 - RNA, 19 nt, Artificial Sequence
  Description of Artificial Sequence: Synthetic oligonucleotide
uaauacuuuaguaauaaga

SEQ ID NO: 2804821 - RNA, 19 nt, Artificial Sequence
  Description of Artificial Sequence: Synthetic oligonucleotide
aaauacaaacuuucucucc

SEQ ID NO: 2804822 - RNA, 19 nt, Artificial Sequence
  Description of Artificial Sequence: Synthetic oligonucleotide
ucugacaagacucacagga

SEQ ID NO: 2804823 - RNA, 19 nt, Artificial Sequence
  Description of Artificial Sequence: Synthetic oligonucleotide
uuuuguacuagauuaguag

SEQ ID NO: 2804824 - RNA, 19 nt, Artificial Sequence
  Description of Artificial Sequence: Synthetic oligonucleotide
uuuguacuagauuaguagg

SEQ ID NO: 2804825 - RNA, 19 nt, Artificial Sequence
  Description of Artificial Sequence: Synthetic oligonucleotide
auacuuauagcccaccuac

SEQ ID NO: 2804826 - RNA, 19 nt, Artificial Sequence
  Description of Artificial Sequence: Synthetic oligonucleotide
acaggagagacauagacag

SEQ ID NO: 2804827 - RNA, 19 nt, Artificial Sequence
  Description of Artificial Sequence: Synthetic oligonucleotide
gacaggagcauuuuaaucc

SEQ ID NO: 2804828 - RNA, 19 nt, Artificial Sequence
  Description of Artificial Sequence: Synthetic oligonucleotide
aauaaucacuuuuauacaa

SEQ ID NO: 2804829 - RNA, 19 nt, Artificial Sequence
  Description of Artificial Sequence: Synthetic oligonucleotide
gaaaugagcuaacaggagg

SEQ ID NO: 2804830 - RNA, 19 nt, Artificial Sequence
  Description of Artificial Sequence: Synthetic oligonucleotide
aauacaaagucugacaaga

SEQ ID NO: 2804831 - RNA, 19 nt, Artificial Sequence
  Description of Artificial Sequence: Synthetic oligonucleotide
aaauauuaauacuuuagua

SEQ ID NO: 2804832 - RNA, 19 nt, Artificial Sequence
  Description of Artificial Sequence: Synthetic oligonucleotide
uuuuauacaaggcucagau

SEQ ID NO: 2804833 - RNA, 19 nt, Artificial Sequence
  Description of Artificial Sequence: Synthetic oligonucleotide
ugagcuaacaggaggagag

SEQ ID NO: 2804834 - RNA, 19 nt, Artificial Sequence
  Description of Artificial Sequence: Synthetic oligonucleotide
ucaauauucagucauccaa

SEQ ID NO: 2804835 - RNA, 19 nt, Artificial Sequence
  Description of Artificial Sequence: Synthetic oligonucleotide
ucauccaacaaccagguaa

SEQ ID NO: 2804836 - RNA, 19 nt, Artificial Sequence
  Description of Artificial Sequence: Synthetic oligonucleotide
aaaauagguaaggaauuac

SEQ ID NO: 2804837 - RNA, 19 nt, Artificial Sequence
  Description of Artificial Sequence: Synthetic oligonucleotide
uaaucacuuuuauacaagg

SEQ ID NO: 2804838 - RNA, 19 nt, Artificial Sequence
  Description of Artificial Sequence: Synthetic oligonucleotide
auacuuuaguaauaagagg

SEQ ID NO: 2804839 - RNA, 19 nt, Artificial Sequence
  Description of Artificial Sequence: Synthetic oligonucleotide
aauagguaaggaauuacag

SEQ ID NO: 2804840 - RNA, 19 nt, Artificial Sequence
  Description of Artificial Sequence: Synthetic oligonucleotide
uagguaaggaauuacagaa

SEQ ID NO: 2804841 - RNA, 19 nt, Artificial Sequence
  Description of Artificial Sequence: Synthetic oligonucleotide
uaguaauaagaggagaggg

SEQ ID NO: 2804842 - RNA, 19 nt, Artificial Sequence
  Description of Artificial Sequence: Synthetic oligonucleotide
ucaaagagguccuacaaac

SEQ ID NO: 2804843 - RNA, 19 nt, Artificial Sequence
  Description of Artificial Sequence: Synthetic oligonucleotide
ugcucaacaacacagugga

SEQ ID NO: 2804844 - RNA, 19 nt, Artificial Sequence
  Description of Artificial Sequence: Synthetic oligonucleotide
aucacuuuuauacaaggcu

SEQ ID NO: 2804845 - RNA, 19 nt, Artificial Sequence
  Description of Artificial Sequence: Synthetic oligonucleotide
uaaaugaauaaucacuuuu

SEQ ID NO: 2804846 - RNA, 19 nt, Artificial Sequence
  Description of Artificial Sequence: Synthetic oligonucleotide
aaugcucaacaacacagug

SEQ ID NO: 2804847 - RNA, 19 nt, Artificial Sequence
  Description of Artificial Sequence: Synthetic oligonucleotide
uuuaauccgagugagaaaa

SEQ ID NO: 2804848 - RNA, 19 nt, Artificial Sequence
  Description of Artificial Sequence: Synthetic oligonucleotide
uuaguaauaagaggagagg

SEQ ID NO: 2804849 - RNA, 19 nt, Artificial Sequence
  Description of Artificial Sequence: Synthetic oligonucleotide
auuaguaggugcuugacau

SEQ ID NO: 2804850 - RNA, 19 nt, Artificial Sequence
  Description of Artificial Sequence: Synthetic oligonucleotide
aaugaauaaucacuuuuau

SEQ ID NO: 2804851 - RNA, 19 nt, Artificial Sequence
  Description of Artificial Sequence: Synthetic oligonucleotide
aauauucagucauccaaca

SEQ ID NO: 2804852 - RNA, 19 nt, Artificial Sequence
  Description of Artificial Sequence: Synthetic oligonucleotide
gaggcuagaauacaaaguc

SEQ ID NO: 2804853 - RNA, 19 nt, Artificial Sequence
  Description of Artificial Sequence: Synthetic oligonucleotide
aaagagguccuacaaacau

SEQ ID NO: 2804854 - RNA, 19 nt, Artificial Sequence
  Description of Artificial Sequence: Synthetic oligonucleotide
gagcauuuuaauccgagug

SEQ ID NO: 2804855 - RNA, 19 nt, Artificial Sequence
  Description of Artificial Sequence: Synthetic oligonucleotide
acaaagucugacaagacuc

SEQ ID NO: 2804856 - RNA, 19 nt, Artificial Sequence
  Description of Artificial Sequence: Synthetic oligonucleotide
aacaggaggagagagcagg

SEQ ID NO: 2804857 - RNA, 19 nt, Artificial Sequence
  Description of Artificial Sequence: Synthetic oligonucleotide
ucagucauccaacaaccag

SEQ ID NO: 2804858 - RNA, 19 nt, Artificial Sequence
  Description of Artificial Sequence: Synthetic oligonucleotide
uagaauacaaagucugaca

SEQ ID NO: 2804859 - RNA, 19 nt, Artificial Sequence
  Description of Artificial Sequence: Synthetic oligonucleotide
agagguccuacaaacaugc

SEQ ID NO: 2804860 - RNA, 19 nt, Artificial Sequence
  Description of Artificial Sequence: Synthetic oligonucleotide
ugacccauggcuauguaug

SEQ ID NO: 2804861 - RNA, 19 nt, Artificial Sequence
  Description of Artificial Sequence: Synthetic oligonucleotide
ucacuuuuauacaaggcuc

SEQ ID NO: 2804862 - RNA, 19 nt, Artificial Sequence
  Description of Artificial Sequence: Synthetic oligonucleotide
agaauacaaagucugacaa

SEQ ID NO: 2804863 - RNA, 19 nt, Artificial Sequence
  Description of Artificial Sequence: Synthetic oligonucleotide
ucuuggaaguuucugacaa

SEQ ID NO: 2804864 - RNA, 19 nt, Artificial Sequence
  Description of Artificial Sequence: Synthetic oligonucleotide
uauguaugcuuccuucucc

SEQ ID NO: 2804865 - RNA, 19 nt, Artificial Sequence
  Description of Artificial Sequence: Synthetic oligonucleotide
guuacaaugcucaacaaca

SEQ ID NO: 2804866 - RNA, 19 nt, Artificial Sequence
  Description of Artificial Sequence: Synthetic oligonucleotide
ggaaagcucacucaaagag

SEQ ID NO: 2804867 - RNA, 19 nt, Artificial Sequence
  Description of Artificial Sequence: Synthetic oligonucleotide
agcucacucaaagaggucc

SEQ ID NO: 2804868 - RNA, 19 nt, Artificial Sequence
  Description of Artificial Sequence: Synthetic oligonucleotide
aacuuucucuccuauuaug

SEQ ID NO: 2804869 - RNA, 19 nt, Artificial Sequence
  Description of Artificial Sequence: Synthetic oligonucleotide
ucuccuauuaugcuuuugu

SEQ ID NO: 2804870 - RNA, 19 nt, Artificial Sequence
  Description of Artificial Sequence: Synthetic oligonucleotide
aggugcuugacaucaaggg

SEQ ID NO: 2804871 - RNA, 19 nt, Artificial Sequence
  Description of Artificial Sequence: Synthetic oligonucleotide
cacuuuagcacuugguggg

SEQ ID NO: 2804872 - RNA, 19 nt, Artificial Sequence
  Description of Artificial Sequence: Synthetic oligonucleotide
acuuucucuccuauuaugc

SEQ ID NO: 2804873 - RNA, 19 nt, Artificial Sequence
  Description of Artificial Sequence: Synthetic oligonucleotide
uacaaacaugcguugaccc

SEQ ID NO: 2804874 - RNA, 19 nt, Artificial Sequence
  Description of Artificial Sequence: Synthetic oligonucleotide
uacaaagucugacaagacu

SEQ ID NO: 2804875 - RNA, 19 nt, Artificial Sequence
  Description of Artificial Sequence: Synthetic oligonucleotide
gagaggcuagaauacaaag

SEQ ID NO: 2804876 - RNA, 19 nt, Artificial Sequence
  Description of Artificial Sequence: Synthetic oligonucleotide
cagucauccaacaaccagg

SEQ ID NO: 2804877 - RNA, 19 nt, Artificial Sequence
  Description of Artificial Sequence: Synthetic oligonucleotide
gagguuacaaugcucaaca

SEQ ID NO: 2804878 - RNA, 19 nt, Artificial Sequence
  Description of Artificial Sequence: Synthetic oligonucleotide
uccuauuaugcuuuuguac

SEQ ID NO: 2804879 - RNA, 19 nt, Artificial Sequence
  Description of Artificial Sequence: Synthetic oligonucleotide
ugaaaugagcuaacaggag

SEQ ID NO: 2804880 - RNA, 19 nt, Artificial Sequence
  Description of Artificial Sequence: Synthetic oligonucleotide
uuaauacuuuaguaauaag

SEQ ID NO: 2804881 - RNA, 19 nt, Artificial Sequence
  Description of Artificial Sequence: Synthetic oligonucleotide
auagguaaggaauuacaga

SEQ ID NO: 2804882 - RNA, 19 nt, Artificial Sequence
  Description of Artificial Sequence: Synthetic oligonucleotide
gaauacaaagucugacaag

SEQ ID NO: 2804883 - RNA, 19 nt, Artificial Sequence
  Description of Artificial Sequence: Synthetic oligonucleotide
gaaagcucacucaaagagg

SEQ ID NO: 2804884 - RNA, 19 nt, Artificial Sequence
  Description of Artificial Sequence: Synthetic oligonucleotide
acaggagcauuuuaauccg

SEQ ID NO: 2804885 - RNA, 19 nt, Artificial Sequence
  Description of Artificial Sequence: Synthetic oligonucleotide
aaauagguaaggaauuaca

SEQ ID NO: 2804886 - RNA, 19 nt, Artificial Sequence
  Description of Artificial Sequence: Synthetic oligonucleotide
uuguacuagauuaguaggu

SEQ ID NO: 2804887 - RNA, 19 nt, Artificial Sequence
  Description of Artificial Sequence: Synthetic oligonucleotide
aaagcucacucaaagaggu

SEQ ID NO: 2804888 - RNA, 19 nt, Artificial Sequence
  Description of Artificial Sequence: Synthetic oligonucleotide
ucugguguccaucugggcu

SEQ ID NO: 2804889 - RNA, 19 nt, Artificial Sequence
  Description of Artificial Sequence: Synthetic oligonucleotide
auuaauacuuuaguaauaa

SEQ ID NO: 2804890 - RNA, 19 nt, Artificial Sequence
  Description of Artificial Sequence: Synthetic oligonucleotide
augcuuuuguacuagauua

SEQ ID NO: 2804891 - RNA, 19 nt, Artificial Sequence
  Description of Artificial Sequence: Synthetic oligonucleotide
uuucuuggaaguuucugac

SEQ ID NO: 2804892 - RNA, 19 nt, Artificial Sequence
  Description of Artificial Sequence: Synthetic oligonucleotide
ugacaagacucacaggaga

SEQ ID NO: 2804893 - RNA, 19 nt, Artificial Sequence
  Description of Artificial Sequence: Synthetic oligonucleotide
caauauucagucauccaac

SEQ ID NO: 2804894 - RNA, 19 nt, Artificial Sequence
  Description of Artificial Sequence: Synthetic oligonucleotide
uacuagauuaguaggugcu

SEQ ID NO: 2804895 - RNA, 19 nt, Artificial Sequence
  Description of Artificial Sequence: Synthetic oligonucleotide
agacaggagcauuuuaauc

SEQ ID NO: 2804896 - RNA, 19 nt, Artificial Sequence
  Description of Artificial Sequence: Synthetic oligonucleotide
gaauaaucacuuuuauaca

SEQ ID NO: 2804897 - RNA, 19 nt, Artificial Sequence
  Description of Artificial Sequence: Synthetic oligonucleotide
uaggugcuugacaucaagg

SEQ ID NO: 2804898 - RNA, 19 nt, Artificial Sequence
  Description of Artificial Sequence: Synthetic oligonucleotide
cugaaaugagcuaacagga

SEQ ID NO: 2804899 - RNA, 19 nt, Artificial Sequence
  Description of Artificial Sequence: Synthetic oligonucleotide
agcauuuuaauccgaguga

SEQ ID NO: 2804900 - RNA, 19 nt, Artificial Sequence
  Description of Artificial Sequence: Synthetic oligonucleotide
agggaaagcucacucaaag

SEQ ID NO: 2804901 - RNA, 19 nt, Artificial Sequence
  Description of Artificial Sequence: Synthetic oligonucleotide
aauacuuauagcccaccua

SEQ ID NO: 2804902 - RNA, 19 nt, Artificial Sequence
  Description of Artificial Sequence: Synthetic oligonucleotide
auuuuaauccgagugagaa

SEQ ID NO: 2804903 - RNA, 19 nt, Artificial Sequence
  Description of Artificial Sequence: Synthetic oligonucleotide
agguaaaugaauaaucacu

SEQ ID NO: 2804904 - RNA, 19 nt, Artificial Sequence
  Description of Artificial Sequence: Synthetic oligonucleotide
cuugagguuacaaugcuca

SEQ ID NO: 2804905 - RNA, 19 nt, Artificial Sequence
  Description of Artificial Sequence: Synthetic oligonucleotide
aauaagaggagagggaaua

SEQ ID NO: 2804906 - RNA, 19 nt, Artificial Sequence
  Description of Artificial Sequence: Synthetic oligonucleotide
ugggcuaccaacucuggcc

SEQ ID NO: 2804907 - RNA, 19 nt, Artificial Sequence
  Description of Artificial Sequence: Synthetic oligonucleotide
ugcuuuuguacuagauuag

SEQ ID NO: 2804908 - RNA, 19 nt, Artificial Sequence
  Description of Artificial Sequence: Synthetic oligonucleotide
acucacaggagagacauag

SEQ ID NO: 2804909 - RNA, 19 nt, Artificial Sequence
  Description of Artificial Sequence: Synthetic oligonucleotide
aaaugagcuaacaggagga

SEQ ID NO: 2804910 - RNA, 19 nt, Artificial Sequence
  Description of Artificial Sequence: Synthetic oligonucleotide
uaugcuuuuguacuagauu

SEQ ID NO: 2804911 - RNA, 19 nt, Artificial Sequence
  Description of Artificial Sequence: Synthetic oligonucleotide
uguacuagauuaguaggug

SEQ ID NO: 2804912 - RNA, 19 nt, Artificial Sequence
  Description of Artificial Sequence: Synthetic oligonucleotide
aaagucugacaagacucac

SEQ ID NO: 2804913 - RNA, 19 nt, Artificial Sequence
  Description of Artificial Sequence: Synthetic oligonucleotide
uccucugguguccaucugg

SEQ ID NO: 2804914 - RNA, 19 nt, Artificial Sequence
  Description of Artificial Sequence: Synthetic oligonucleotide
aaaugaauaaucacuuuua

SEQ ID NO: 2804915 - RNA, 19 nt, Artificial Sequence
  Description of Artificial Sequence: Synthetic oligonucleotide
auacucugugccuugaggu

SEQ ID NO: 2804916 - RNA, 19 nt, Artificial Sequence
  Description of Artificial Sequence: Synthetic oligonucleotide
gagagacauagacaggagc

SEQ ID NO: 2804917 - RNA, 19 nt, Artificial Sequence
  Description of Artificial Sequence: Synthetic oligonucleotide
accagguaaaugaauaauc

SEQ ID NO: 2804918 - RNA, 19 nt, Artificial Sequence
  Description of Artificial Sequence: Synthetic oligonucleotide
uauuaugcuuuuguacuag

SEQ ID NO: 2804919 - RNA, 19 nt, Artificial Sequence
  Description of Artificial Sequence: Synthetic oligonucleotide
aaguuucugacaauuaaaa

SEQ ID NO: 2804920 - RNA, 19 nt, Artificial Sequence
  Description of Artificial Sequence: Synthetic oligonucleotide
aguucucucugaaaugagc

SEQ ID NO: 2804921 - RNA, 19 nt, Artificial Sequence
  Description of Artificial Sequence: Synthetic oligonucleotide
aaggcucagauacucugug

SEQ ID NO: 2804922 - RNA, 19 nt, Artificial Sequence
  Description of Artificial Sequence: Synthetic oligonucleotide
ugccuugagguuacaaugc

SEQ ID NO: 2804923 - RNA, 19 nt, Artificial Sequence
  Description of Artificial Sequence: Synthetic oligonucleotide
ggagagggaauacuuauag

SEQ ID NO: 2804924 - RNA, 19 nt, Artificial Sequence
  Description of Artificial Sequence: Synthetic oligonucleotide
uuacaaugcucaacaacac

SEQ ID NO: 2804925 - RNA, 19 nt, Artificial Sequence
  Description of Artificial Sequence: Synthetic oligonucleotide
acuuauagcccaccuaccu

SEQ ID NO: 2804926 - RNA, 19 nt, Artificial Sequence
  Description of Artificial Sequence: Synthetic oligonucleotide
agggaauacuuauagccca

SEQ ID NO: 2804927 - RNA, 19 nt, Artificial Sequence
  Description of Artificial Sequence: Synthetic oligonucleotide
cagguaaaugaauaaucac

SEQ ID NO: 2804928 - RNA, 19 nt, Artificial Sequence
  Description of Artificial Sequence: Synthetic oligonucleotide
guacuagauuaguaggugc

SEQ ID NO: 2804929 - RNA, 19 nt, Artificial Sequence
  Description of Artificial Sequence: Synthetic oligonucleotide
acaaggcucagauacucug

SEQ ID NO: 2804930 - RNA, 19 nt, Artificial Sequence
  Description of Artificial Sequence: Synthetic oligonucleotide
aaacuuucucuccuauuau

SEQ ID NO: 2804931 - RNA, 19 nt, Artificial Sequence
  Description of Artificial Sequence: Synthetic oligonucleotide
gaaguucucucugaaauga

SEQ ID NO: 2804932 - RNA, 19 nt, Artificial Sequence
  Description of Artificial Sequence: Synthetic oligonucleotide
gagggaauacuuauagccc

SEQ ID NO: 2804933 - RNA, 19 nt, Artificial Sequence
  Description of Artificial Sequence: Synthetic oligonucleotide
cucugaaaugagcuaacag

SEQ ID NO: 2804934 - RNA, 19 nt, Artificial Sequence
  Description of Artificial Sequence: Synthetic oligonucleotide
uuuagcacuuggugggaag

SEQ ID NO: 2804935 - RNA, 19 nt, Artificial Sequence
  Description of Artificial Sequence: Synthetic oligonucleotide
agagacauagacaggagca

SEQ ID NO: 2804936 - RNA, 19 nt, Artificial Sequence
  Description of Artificial Sequence: Synthetic oligonucleotide
auaaucacuuuuauacaag

SEQ ID NO: 2804937 - RNA, 19 nt, Artificial Sequence
  Description of Artificial Sequence: Synthetic oligonucleotide
uaguaggugcuugacauca

SEQ ID NO: 2804938 - RNA, 19 nt, Artificial Sequence
  Description of Artificial Sequence: Synthetic oligonucleotide
gacaagacucacaggagag

SEQ ID NO: 2804939 - RNA, 19 nt, Artificial Sequence
  Description of Artificial Sequence: Synthetic oligonucleotide
gugccuugagguuacaaug

SEQ ID NO: 2804940 - RNA, 19 nt, Artificial Sequence
  Description of Artificial Sequence: Synthetic oligonucleotide
aaugagcuaacaggaggag

SEQ ID NO: 2804941 - RNA, 19 nt, Artificial Sequence
  Description of Artificial Sequence: Synthetic oligonucleotide
acuuuaguaauaagaggag

SEQ ID NO: 2804942 - RNA, 19 nt, Artificial Sequence
  Description of Artificial Sequence: Synthetic oligonucleotide
cuuucuuggaaguuucuga

SEQ ID NO: 2804943 - RNA, 19 nt, Artificial Sequence
  Description of Artificial Sequence: Synthetic oligonucleotide
gauuaguaggugcuugaca

SEQ ID NO: 2804944 - RNA, 19 nt, Artificial Sequence
  Description of Artificial Sequence: Synthetic oligonucleotide
uuaugcuuuuguacuagau

SEQ ID NO: 2804945 - RNA, 19 nt, Artificial Sequence
  Description of Artificial Sequence: Synthetic oligonucleotide
ggugcuugacaucaagggg

SEQ ID NO: 2804946 - RNA, 19 nt, Artificial Sequence
  Description of Artificial Sequence: Synthetic oligonucleotide
agguccuacaaacaugcgu

SEQ ID NO: 2804947 - RNA, 19 nt, Artificial Sequence
  Description of Artificial Sequence: Synthetic oligonucleotide
uuauagcccaccuaccuuu

SEQ ID NO: 2804948 - RNA, 19 nt, Artificial Sequence
  Description of Artificial Sequence: Synthetic oligonucleotide
uagauuaguaggugcuuga

SEQ ID NO: 2804949 - RNA, 19 nt, Artificial Sequence
  Description of Artificial Sequence: Synthetic oligonucleotide
aggagagacauagacagga

SEQ ID NO: 2804950 - RNA, 19 nt, Artificial Sequence
  Description of Artificial Sequence: Synthetic oligonucleotide
uccaucugggcuaccaacu

SEQ ID NO: 2804951 - RNA, 19 nt, Artificial Sequence
  Description of Artificial Sequence: Synthetic oligonucleotide
augaauaaucacuuuuaua

SEQ ID NO: 2804952 - RNA, 19 nt, Artificial Sequence
  Description of Artificial Sequence: Synthetic oligonucleotide
aacaugcguugacccaugg

SEQ ID NO: 2804953 - RNA, 19 nt, Artificial Sequence
  Description of Artificial Sequence: Synthetic oligonucleotide
uuuuaauccgagugagaaa

SEQ ID NO: 2804954 - RNA, 19 nt, Artificial Sequence
  Description of Artificial Sequence: Synthetic oligonucleotide
acaugcguugacccauggc

SEQ ID NO: 2804955 - RNA, 19 nt, Artificial Sequence
  Description of Artificial Sequence: Synthetic oligonucleotide
aacacaguggagaggcuag

SEQ ID NO: 2804956 - RNA, 19 nt, Artificial Sequence
  Description of Artificial Sequence: Synthetic oligonucleotide
gagagggaauacuuauagc

SEQ ID NO: 2804957 - RNA, 19 nt, Artificial Sequence
  Description of Artificial Sequence: Synthetic oligonucleotide
ccaacaaccagguaaauga

SEQ ID NO: 2804958 - RNA, 19 nt, Artificial Sequence
  Description of Artificial Sequence: Synthetic oligonucleotide
ugugccuugagguuacaau

SEQ ID NO: 2804959 - RNA, 19 nt, Artificial Sequence
  Description of Artificial Sequence: Synthetic oligonucleotide
auaagaggagagggaauac

SEQ ID NO: 2804960 - RNA, 19 nt, Artificial Sequence
  Description of Artificial Sequence: Synthetic oligonucleotide
uacuuauagcccaccuacc

SEQ ID NO: 2804961 - RNA, 19 nt, Artificial Sequence
  Description of Artificial Sequence: Synthetic oligonucleotide
ucucucugaaaugagcuaa

SEQ ID NO: 2804962 - RNA, 19 nt, Artificial Sequence
  Description of Artificial Sequence: Synthetic oligonucleotide
uccaacaaccagguaaaug

SEQ ID NO: 2804963 - RNA, 19 nt, Artificial Sequence
  Description of Artificial Sequence: Synthetic oligonucleotide
aguaauaagaggagaggga

SEQ ID NO: 2804964 - RNA, 19 nt, Artificial Sequence
  Description of Artificial Sequence: Synthetic oligonucleotide
uaauaagaggagagggaau

SEQ ID NO: 2804965 - RNA, 19 nt, Artificial Sequence
  Description of Artificial Sequence: Synthetic oligonucleotide
agauuaguaggugcuugac

SEQ ID NO: 2804966 - RNA, 19 nt, Artificial Sequence
  Description of Artificial Sequence: Synthetic oligonucleotide
uucucuccuauuaugcuuu

SEQ ID NO: 2804967 - RNA, 19 nt, Artificial Sequence
  Description of Artificial Sequence: Synthetic oligonucleotide
cuaacaggaggagagagca

SEQ ID NO: 2804968 - RNA, 19 nt, Artificial Sequence
  Description of Artificial Sequence: Synthetic oligonucleotide
aggcucagauacucugugc

SEQ ID NO: 2804969 - RNA, 19 nt, Artificial Sequence
  Description of Artificial Sequence: Synthetic oligonucleotide
cucaacaacacaguggaga

SEQ ID NO: 2804970 - RNA, 19 nt, Artificial Sequence
  Description of Artificial Sequence: Synthetic oligonucleotide
acaaacaugcguugaccca

SEQ ID NO: 2804971 - RNA, 19 nt, Artificial Sequence
  Description of Artificial Sequence: Synthetic oligonucleotide
aaccagguaaaugaauaau

SEQ ID NO: 2804972 - RNA, 19 nt, Artificial Sequence
  Description of Artificial Sequence: Synthetic oligonucleotide
guaauaagaggagagggaa

SEQ ID NO: 2804973 - RNA, 19 nt, Artificial Sequence
  Description of Artificial Sequence: Synthetic oligonucleotide
uucuuggaaguuucugaca

SEQ ID NO: 2804974 - RNA, 19 nt, Artificial Sequence
  Description of Artificial Sequence: Synthetic oligonucleotide
aagagguccuacaaacaug

SEQ ID NO: 2804975 - RNA, 19 nt, Artificial Sequence
  Description of Artificial Sequence: Synthetic oligonucleotide
cuacaaacaugcguugacc

SEQ ID NO: 2804976 - RNA, 19 nt, Artificial Sequence
  Description of Artificial Sequence: Synthetic oligonucleotide
uuucucuccuauuaugcuu

SEQ ID NO: 2804977 - RNA, 19 nt, Artificial Sequence
  Description of Artificial Sequence: Synthetic oligonucleotide
gguaaggaauuacagaaaa

SEQ ID NO: 2804978 - RNA, 19 nt, Artificial Sequence
  Description of Artificial Sequence: Synthetic oligonucleotide
gguuacaaugcucaacaac

SEQ ID NO: 2804979 - RNA, 19 nt, Artificial Sequence
  Description of Artificial Sequence: Synthetic oligonucleotide
uggagaggcuagaauacaa

SEQ ID NO: 2804980 - RNA, 19 nt, Artificial Sequence
  Description of Artificial Sequence: Synthetic oligonucleotide
caaacuuucucuccuauua

SEQ ID NO: 2804981 - RNA, 19 nt, Artificial Sequence
  Description of Artificial Sequence: Synthetic oligonucleotide
augcucaacaacacagugg

SEQ ID NO: 2804982 - RNA, 19 nt, Artificial Sequence
  Description of Artificial Sequence: Synthetic oligonucleotide
cuagauuaguaggugcuug

SEQ ID NO: 2804983 - RNA, 19 nt, Artificial Sequence
  Description of Artificial Sequence: Synthetic oligonucleotide
caagacucacaggagagac

SEQ ID NO: 2804984 - RNA, 19 nt, Artificial Sequence
  Description of Artificial Sequence: Synthetic oligonucleotide
uacaaacuuucucuccuau

SEQ ID NO: 2804985 - RNA, 19 nt, Artificial Sequence
  Description of Artificial Sequence: Synthetic oligonucleotide
cugacaagacucacaggag

SEQ ID NO: 2804986 - RNA, 19 nt, Artificial Sequence
  Description of Artificial Sequence: Synthetic oligonucleotide
ucagauacucugugccuug

SEQ ID NO: 2804987 - RNA, 19 nt, Artificial Sequence
  Description of Artificial Sequence: Synthetic oligonucleotide
gaggagagagcagggaaag

SEQ ID NO: 2804988 - RNA, 19 nt, Artificial Sequence
  Description of Artificial Sequence: Synthetic oligonucleotide
uagacaggagcauuuuaau

SEQ ID NO: 2804989 - RNA, 19 nt, Artificial Sequence
  Description of Artificial Sequence: Synthetic oligonucleotide
auuaugcuuuuguacuaga

SEQ ID NO: 2804990 - RNA, 19 nt, Artificial Sequence
  Description of Artificial Sequence: Synthetic oligonucleotide
ugagguuacaaugcucaac

SEQ ID NO: 2804991 - RNA, 19 nt, Artificial Sequence
  Description of Artificial Sequence: Synthetic oligonucleotide
ccacuuuagcacuuggugg

SEQ ID NO: 2804992 - RNA, 19 nt, Artificial Sequence
  Description of Artificial Sequence: Synthetic oligonucleotide
uaagaggagagggaauacu

SEQ ID NO: 2804993 - RNA, 19 nt, Artificial Sequence
  Description of Artificial Sequence: Synthetic oligonucleotide
acucaaagagguccuacaa

SEQ ID NO: 2804994 - RNA, 19 nt, Artificial Sequence
  Description of Artificial Sequence: Synthetic oligonucleotide
guaggugcuugacaucaag

SEQ ID NO: 2804995 - RNA, 19 nt, Artificial Sequence
  Description of Artificial Sequence: Synthetic oligonucleotide
uuuauacaaggcucagaua

SEQ ID NO: 2804996 - RNA, 19 nt, Artificial Sequence
  Description of Artificial Sequence: Synthetic oligonucleotide
auguaugcuuccuucuccu

SEQ ID NO: 2804997 - RNA, 19 nt, Artificial Sequence
  Description of Artificial Sequence: Synthetic oligonucleotide
auacaaagucugacaagac

SEQ ID NO: 2804998 - RNA, 19 nt, Artificial Sequence
  Description of Artificial Sequence: Synthetic oligonucleotide
uaccuuucuuggaaguuuc

SEQ ID NO: 2804999 - RNA, 19 nt, Artificial Sequence
  Description of Artificial Sequence: Synthetic oligonucleotide
cacuuuuauacaaggcuca

SEQ ID NO: 2805000 - RNA, 19 nt, Artificial Sequence
  Description of Artificial Sequence: Synthetic oligonucleotide
agcuaacaggaggagagag

SEQ ID NO: 2805001 - RNA, 19 nt, Artificial Sequence
  Description of Artificial Sequence: Synthetic oligonucleotide
ucugggcuaccaacucugg

SEQ ID NO: 2805002 - RNA, 19 nt, Artificial Sequence
  Description of Artificial Sequence: Synthetic oligonucleotide
ggcucagauacucugugcc

SEQ ID NO: 2805003 - RNA, 19 nt, Artificial Sequence
  Description of Artificial Sequence: Synthetic oligonucleotide
ggcuagaauacaaagucug

SEQ ID NO: 2805004 - RNA, 19 nt, Artificial Sequence
  Description of Artificial Sequence: Synthetic oligonucleotide
cuauguaugcuuccuucuc

SEQ ID NO: 2805005 - RNA, 19 nt, Artificial Sequence
  Description of Artificial Sequence: Synthetic oligonucleotide
agaggcuagaauacaaagu

SEQ ID NO: 2805006 - RNA, 19 nt, Artificial Sequence
  Description of Artificial Sequence: Synthetic oligonucleotide
acuuuuauacaaggcucag

SEQ ID NO: 2805007 - RNA, 19 nt, Artificial Sequence
  Description of Artificial Sequence: Synthetic oligonucleotide
uuggaaguuucugacaauu

SEQ ID NO: 2805008 - RNA, 19 nt, Artificial Sequence
  Description of Artificial Sequence: Synthetic oligonucleotide
cauggcuauguaugcuucc

SEQ ID NO: 2805009 - RNA, 19 nt, Artificial Sequence
  Description of Artificial Sequence: Synthetic oligonucleotide
agacucacaggagagacau

SEQ ID NO: 2805010 - RNA, 19 nt, Artificial Sequence
  Description of Artificial Sequence: Synthetic oligonucleotide
cuuuaguaauaagaggaga

SEQ ID NO: 2805011 - RNA, 19 nt, Artificial Sequence
  Description of Artificial Sequence: Synthetic oligonucleotide
ucuccucugguguccaucu

SEQ ID NO: 2805012 - RNA, 19 nt, Artificial Sequence
  Description of Artificial Sequence: Synthetic oligonucleotide
gccacuuuagcacuuggug

SEQ ID NO: 2805013 - RNA, 19 nt, Artificial Sequence
  Description of Artificial Sequence: Synthetic oligonucleotide
gacccauggcuauguaugc

SEQ ID NO: 2805014 - RNA, 19 nt, Artificial Sequence
  Description of Artificial Sequence: Synthetic oligonucleotide
aagaggagagggaauacuu

SEQ ID NO: 2805015 - RNA, 19 nt, Artificial Sequence
  Description of Artificial Sequence: Synthetic oligonucleotide
acaaccagguaaaugaaua

SEQ ID NO: 2805016 - RNA, 19 nt, Artificial Sequence
  Description of Artificial Sequence: Synthetic oligonucleotide
gcauuuuaauccgagugag

SEQ ID NO: 2805017 - RNA, 19 nt, Artificial Sequence
  Description of Artificial Sequence: Synthetic oligonucleotide
uggaaguuucugacaauua

SEQ ID NO: 2805018 - RNA, 19 nt, Artificial Sequence
  Description of Artificial Sequence: Synthetic oligonucleotide
uggugggaaguucucucug

SEQ ID NO: 2805019 - RNA, 19 nt, Artificial Sequence
  Description of Artificial Sequence: Synthetic oligonucleotide
aaguucucucugaaaugag

SEQ ID NO: 2805020 - RNA, 19 nt, Artificial Sequence
  Description of Artificial Sequence: Synthetic oligonucleotide
caaagucugacaagacuca

SEQ ID NO: 2805021 - RNA, 19 nt, Artificial Sequence
  Description of Artificial Sequence: Synthetic oligonucleotide
agcagggaaagcucacuca

SEQ ID NO: 2805022 - RNA, 19 nt, Artificial Sequence
  Description of Artificial Sequence: Synthetic oligonucleotide
aacaaccagguaaaugaau

SEQ ID NO: 2805023 - RNA, 19 nt, Artificial Sequence
  Description of Artificial Sequence: Synthetic oligonucleotide
ggaaguucucucugaaaug

SEQ ID NO: 2805024 - RNA, 19 nt, Artificial Sequence
  Description of Artificial Sequence: Synthetic oligonucleotide
ucucugaaaugagcuaaca

SEQ ID NO: 2805025 - RNA, 19 nt, Artificial Sequence
  Description of Artificial Sequence: Synthetic oligonucleotide
caugcguugacccauggcu

SEQ ID NO: 2805026 - RNA, 19 nt, Artificial Sequence
  Description of Artificial Sequence: Synthetic oligonucleotide
agauacucugugccuugag

SEQ ID NO: 2805027 - RNA, 19 nt, Artificial Sequence
  Description of Artificial Sequence: Synthetic oligonucleotide
aagucugacaagacucaca

SEQ ID NO: 2805028 - RNA, 19 nt, Artificial Sequence
  Description of Artificial Sequence: Synthetic oligonucleotide
uaccaacucuggccguugg

SEQ ID NO: 2805029 - RNA, 19 nt, Artificial Sequence
  Description of Artificial Sequence: Synthetic oligonucleotide
ggaaguuucugacaauuaa

SEQ ID NO: 2805030 - RNA, 19 nt, Artificial Sequence
  Description of Artificial Sequence: Synthetic oligonucleotide
cuuuuguacuagauuagua

SEQ ID NO: 2805031 - RNA, 19 nt, Artificial Sequence
  Description of Artificial Sequence: Synthetic oligonucleotide
uuagcacuuggugggaagu

SEQ ID NO: 2805032 - RNA, 19 nt, Artificial Sequence
  Description of Artificial Sequence: Synthetic oligonucleotide
cauccaacaaccagguaaa

SEQ ID NO: 2805033 - RNA, 19 nt, Artificial Sequence
  Description of Artificial Sequence: Synthetic oligonucleotide
uugacccauggcuauguau

SEQ ID NO: 2805034 - RNA, 19 nt, Artificial Sequence
  Description of Artificial Sequence: Synthetic oligonucleotide
uuaguaggugcuugacauc

SEQ ID NO: 2805035 - RNA, 19 nt, Artificial Sequence
  Description of Artificial Sequence: Synthetic oligonucleotide
cacaggagagacauagaca

SEQ ID NO: 2805036 - RNA, 19 nt, Artificial Sequence
  Description of Artificial Sequence: Synthetic oligonucleotide
gcaggagccacuuuagcac

SEQ ID NO: 2805037 - RNA, 19 nt, Artificial Sequence
  Description of Artificial Sequence: Synthetic oligonucleotide
uccuacaaacaugcguuga

SEQ ID NO: 2805038 - RNA, 19 nt, Artificial Sequence
  Description of Artificial Sequence: Synthetic oligonucleotide
gagccacuuuagcacuugg

SEQ ID NO: 2805039 - RNA, 19 nt, Artificial Sequence
  Description of Artificial Sequence: Synthetic oligonucleotide
gaauacuuauagcccaccu

SEQ ID NO: 2805040 - RNA, 19 nt, Artificial Sequence
  Description of Artificial Sequence: Synthetic oligonucleotide
cucucugaaaugagcuaac

SEQ ID NO: 2805041 - RNA, 19 nt, Artificial Sequence
  Description of Artificial Sequence: Synthetic oligonucleotide
aggagcauuuuaauccgag

SEQ ID NO: 2805042 - RNA, 19 nt, Artificial Sequence
  Description of Artificial Sequence: Synthetic oligonucleotide
uucucucugaaaugagcua

SEQ ID NO: 2805043 - RNA, 19 nt, Artificial Sequence
  Description of Artificial Sequence: Synthetic oligonucleotide
ccagguaaaugaauaauca

SEQ ID NO: 2805044 - RNA, 19 nt, Artificial Sequence
  Description of Artificial Sequence: Synthetic oligonucleotide
caguggagaggcuagaaua

SEQ ID NO: 2805045 - RNA, 19 nt, Artificial Sequence
  Description of Artificial Sequence: Synthetic oligonucleotide
acaguggagaggcuagaau

SEQ ID NO: 2805046 - RNA, 19 nt, Artificial Sequence
  Description of Artificial Sequence: Synthetic oligonucleotide
caaagagguccuacaaaca

SEQ ID NO: 2805047 - RNA, 19 nt, Artificial Sequence
  Description of Artificial Sequence: Synthetic oligonucleotide
gagcagggaaagcucacuc

SEQ ID NO: 2805048 - RNA, 19 nt, Artificial Sequence
  Description of Artificial Sequence: Synthetic oligonucleotide
gggcuaccaacucuggccg

SEQ ID NO: 2805049 - RNA, 19 nt, Artificial Sequence
  Description of Artificial Sequence: Synthetic oligonucleotide
caggagagacauagacagg

SEQ ID NO: 2805050 - RNA, 19 nt, Artificial Sequence
  Description of Artificial Sequence: Synthetic oligonucleotide
agcccaccuaccuuucuug

SEQ ID NO: 2805051 - RNA, 19 nt, Artificial Sequence
  Description of Artificial Sequence: Synthetic oligonucleotide
agucauccaacaaccaggu

SEQ ID NO: 2805052 - RNA, 19 nt, Artificial Sequence
  Description of Artificial Sequence: Synthetic oligonucleotide
gucugacaagacucacagg

SEQ ID NO: 2805053 - RNA, 19 nt, Artificial Sequence
  Description of Artificial Sequence: Synthetic oligonucleotide
aggagagagcagggaaagc

SEQ ID NO: 2805054 - RNA, 19 nt, Artificial Sequence
  Description of Artificial Sequence: Synthetic oligonucleotide
uauagcccaccuaccuuuc

SEQ ID NO: 2805055 - RNA, 19 nt, Artificial Sequence
  Description of Artificial Sequence: Synthetic oligonucleotide
uugagguuacaaugcucaa

SEQ ID NO: 2805056 - RNA, 19 nt, Artificial Sequence
  Description of Artificial Sequence: Synthetic oligonucleotide
cauuuuaauccgagugaga

SEQ ID NO: 2805057 - RNA, 19 nt, Artificial Sequence
  Description of Artificial Sequence: Synthetic oligonucleotide
ccuauuaugcuuuuguacu

SEQ ID NO: 2805058 - RNA, 19 nt, Artificial Sequence
  Description of Artificial Sequence: Synthetic oligonucleotide
gaggagagggaauacuuau

SEQ ID NO: 2805059 - RNA, 19 nt, Artificial Sequence
  Description of Artificial Sequence: Synthetic oligonucleotide
agagagcagggaaagcuca

SEQ ID NO: 2805060 - RNA, 19 nt, Artificial Sequence
  Description of Artificial Sequence: Synthetic oligonucleotide
uguccaucugggcuaccaa

SEQ ID NO: 2805061 - RNA, 19 nt, Artificial Sequence
  Description of Artificial Sequence: Synthetic oligonucleotide
auacaaacuuucucuccua

SEQ ID NO: 2805062 - RNA, 19 nt, Artificial Sequence
  Description of Artificial Sequence: Synthetic oligonucleotide
ugcguugacccauggcuau

SEQ ID NO: 2805063 - RNA, 19 nt, Artificial Sequence
  Description of Artificial Sequence: Synthetic oligonucleotide
aucugggcuaccaacucug

SEQ ID NO: 2805064 - RNA, 19 nt, Artificial Sequence
  Description of Artificial Sequence: Synthetic oligonucleotide
aagacucacaggagagaca

SEQ ID NO: 2805065 - RNA, 19 nt, Artificial Sequence
  Description of Artificial Sequence: Synthetic oligonucleotide
guccuacaaacaugcguug

SEQ ID NO: 2805066 - RNA, 19 nt, Artificial Sequence
  Description of Artificial Sequence: Synthetic oligonucleotide
gagagagcagggaaagcuc

SEQ ID NO: 2805067 - RNA, 19 nt, Artificial Sequence
  Description of Artificial Sequence: Synthetic oligonucleotide
cucaaagagguccuacaaa

SEQ ID NO: 2805068 - RNA, 19 nt, Artificial Sequence
  Description of Artificial Sequence: Synthetic oligonucleotide
uacucugugccuugagguu

SEQ ID NO: 2805069 - RNA, 19 nt, Artificial Sequence
  Description of Artificial Sequence: Synthetic oligonucleotide
cacucaaagagguccuaca

SEQ ID NO: 2805070 - RNA, 19 nt, Artificial Sequence
  Description of Artificial Sequence: Synthetic oligonucleotide
augagcuaacaggaggaga

SEQ ID NO: 2805071 - RNA, 19 nt, Artificial Sequence
  Description of Artificial Sequence: Synthetic oligonucleotide
ggcuauguaugcuuccuuc

SEQ ID NO: 2805072 - RNA, 19 nt, Artificial Sequence
  Description of Artificial Sequence: Synthetic oligonucleotide
uguaugcuuccuucuccuc

SEQ ID NO: 2805073 - RNA, 19 nt, Artificial Sequence
  Description of Artificial Sequence: Synthetic oligonucleotide
ggcaggagccacuuuagca

SEQ ID NO: 2805074 - RNA, 19 nt, Artificial Sequence
  Description of Artificial Sequence: Synthetic oligonucleotide
caaccagguaaaugaauaa

SEQ ID NO: 2805075 - RNA, 19 nt, Artificial Sequence
  Description of Artificial Sequence: Synthetic oligonucleotide
aaacaugcguugacccaug

SEQ ID NO: 2805076 - RNA, 19 nt, Artificial Sequence
  Description of Artificial Sequence: Synthetic oligonucleotide
guucucucugaaaugagcu

SEQ ID NO: 2805077 - RNA, 19 nt, Artificial Sequence
  Description of Artificial Sequence: Synthetic oligonucleotide
auggcuauguaugcuuccu

SEQ ID NO: 2805078 - RNA, 19 nt, Artificial Sequence
  Description of Artificial Sequence: Synthetic oligonucleotide
aagcucacucaaagagguc

SEQ ID NO: 2805079 - RNA, 19 nt, Artificial Sequence
  Description of Artificial Sequence: Synthetic oligonucleotide
cugggcuaccaacucuggc

SEQ ID NO: 2805080 - RNA, 19 nt, Artificial Sequence
  Description of Artificial Sequence: Synthetic oligonucleotide
caacaacacaguggagagg

SEQ ID NO: 2805081 - RNA, 19 nt, Artificial Sequence
  Description of Artificial Sequence: Synthetic oligonucleotide
aggcuagaauacaaagucu

SEQ ID NO: 2805082 - RNA, 19 nt, Artificial Sequence
  Description of Artificial Sequence: Synthetic oligonucleotide
gguaaaugaauaaucacuu

SEQ ID NO: 2805083 - RNA, 19 nt, Artificial Sequence
  Description of Artificial Sequence: Synthetic oligonucleotide
acaagacucacaggagaga

SEQ ID NO: 2805084 - RNA, 19 nt, Artificial Sequence
  Description of Artificial Sequence: Synthetic oligonucleotide
ccuacaaacaugcguugac

SEQ ID NO: 2805085 - RNA, 19 nt, Artificial Sequence
  Description of Artificial Sequence: Synthetic oligonucleotide
cuuuuauacaaggcucaga

SEQ ID NO: 2805086 - RNA, 19 nt, Artificial Sequence
  Description of Artificial Sequence: Synthetic oligonucleotide
gggaaguucucucugaaau

SEQ ID NO: 2805087 - RNA, 19 nt, Artificial Sequence
  Description of Artificial Sequence: Synthetic oligonucleotide
cucugugccuugagguuac

SEQ ID NO: 2805088 - RNA, 19 nt, Artificial Sequence
  Description of Artificial Sequence: Synthetic oligonucleotide
gcuuccuucuccucuggug

SEQ ID NO: 2805089 - RNA, 19 nt, Artificial Sequence
  Description of Artificial Sequence: Synthetic oligonucleotide
acuagauuaguaggugcuu

SEQ ID NO: 2805090 - RNA, 19 nt, Artificial Sequence
  Description of Artificial Sequence: Synthetic oligonucleotide
gagguccuacaaacaugcg

SEQ ID NO: 2805091 - RNA, 19 nt, Artificial Sequence
  Description of Artificial Sequence: Synthetic oligonucleotide
guaaaugaauaaucacuuu

SEQ ID NO: 2805092 - RNA, 19 nt, Artificial Sequence
  Description of Artificial Sequence: Synthetic oligonucleotide
agguuacaaugcucaacaa

SEQ ID NO: 2805093 - RNA, 19 nt, Artificial Sequence
  Description of Artificial Sequence: Synthetic oligonucleotide
cuuucucuccuauuaugcu

SEQ ID NO: 2805094 - RNA, 19 nt, Artificial Sequence
  Description of Artificial Sequence: Synthetic oligonucleotide
caacaaccagguaaaugaa

SEQ ID NO: 2805095 - RNA, 19 nt, Artificial Sequence
  Description of Artificial Sequence: Synthetic oligonucleotide
agacauagacaggagcauu

SEQ ID NO: 2805096 - RNA, 19 nt, Artificial Sequence
  Description of Artificial Sequence: Synthetic oligonucleotide
ugcuuccuucuccucuggu

SEQ ID NO: 2805097 - RNA, 19 nt, Artificial Sequence
  Description of Artificial Sequence: Synthetic oligonucleotide
uagcccaccuaccuuucuu

SEQ ID NO: 2805098 - RNA, 19 nt, Artificial Sequence
  Description of Artificial Sequence: Synthetic oligonucleotide
agagcagggaaagcucacu

SEQ ID NO: 2805099 - RNA, 19 nt, Artificial Sequence
  Description of Artificial Sequence: Synthetic oligonucleotide
cucugguguccaucugggc

SEQ ID NO: 2805100 - RNA, 19 nt, Artificial Sequence
  Description of Artificial Sequence: Synthetic oligonucleotide
uggcuauguaugcuuccuu

SEQ ID NO: 2805101 - RNA, 19 nt, Artificial Sequence
  Description of Artificial Sequence: Synthetic oligonucleotide
agguaaggaauuacagaaa

SEQ ID NO: 2805102 - RNA, 19 nt, Artificial Sequence
  Description of Artificial Sequence: Synthetic oligonucleotide
ggaauacuuauagcccacc

SEQ ID NO: 2805103 - RNA, 19 nt, Artificial Sequence
  Description of Artificial Sequence: Synthetic oligonucleotide
ccucugguguccaucuggg

SEQ ID NO: 2805104 - RNA, 19 nt, Artificial Sequence
  Description of Artificial Sequence: Synthetic oligonucleotide
auagcccaccuaccuuucu

SEQ ID NO: 2805105 - RNA, 19 nt, Artificial Sequence
  Description of Artificial Sequence: Synthetic oligonucleotide
cuccuauuaugcuuuugua

SEQ ID NO: 2805106 - RNA, 19 nt, Artificial Sequence
  Description of Artificial Sequence: Synthetic oligonucleotide
gggaaagcucacucaaaga

SEQ ID NO: 2805107 - RNA, 19 nt, Artificial Sequence
  Description of Artificial Sequence: Synthetic oligonucleotide
gcuaacaggaggagagagc

SEQ ID NO: 2805108 - RNA, 19 nt, Artificial Sequence
  Description of Artificial Sequence: Synthetic oligonucleotide
uucuccucugguguccauc

SEQ ID NO: 2805109 - RNA, 19 nt, Artificial Sequence
  Description of Artificial Sequence: Synthetic oligonucleotide
acucugugccuugagguua

SEQ ID NO: 2805110 - RNA, 19 nt, Artificial Sequence
  Description of Artificial Sequence: Synthetic oligonucleotide
gagagcagggaaagcucac

SEQ ID NO: 2805111 - RNA, 19 nt, Artificial Sequence
  Description of Artificial Sequence: Synthetic oligonucleotide
cauagacaggagcauuuua

SEQ ID NO: 2805112 - RNA, 19 nt, Artificial Sequence
  Description of Artificial Sequence: Synthetic oligonucleotide
agaggagagggaauacuua

SEQ ID NO: 2805113 - RNA, 19 nt, Artificial Sequence
  Description of Artificial Sequence: Synthetic oligonucleotide
acuuuagcacuugguggga

SEQ ID NO: 2805114 - RNA, 19 nt, Artificial Sequence
  Description of Artificial Sequence: Synthetic oligonucleotide
gcagggaaagcucacucaa

SEQ ID NO: 2805115 - RNA, 19 nt, Artificial Sequence
  Description of Artificial Sequence: Synthetic oligonucleotide
cacuuggugggaaguucuc

SEQ ID NO: 2805116 - RNA, 19 nt, Artificial Sequence
  Description of Artificial Sequence: Synthetic oligonucleotide
caaugcucaacaacacagu

SEQ ID NO: 2805117 - RNA, 19 nt, Artificial Sequence
  Description of Artificial Sequence: Synthetic oligonucleotide
cugguguccaucugggcua

SEQ ID NO: 2805118 - RNA, 19 nt, Artificial Sequence
  Description of Artificial Sequence: Synthetic oligonucleotide
acauagacaggagcauuuu

SEQ ID NO: 2805119 - RNA, 19 nt, Artificial Sequence
  Description of Artificial Sequence: Synthetic oligonucleotide
gacauagacaggagcauuu

SEQ ID NO: 2805120 - RNA, 19 nt, Artificial Sequence
  Description of Artificial Sequence: Synthetic oligonucleotide
gcuagaauacaaagucuga

SEQ ID NO: 2805121 - RNA, 19 nt, Artificial Sequence
  Description of Artificial Sequence: Synthetic oligonucleotide
ggagagagcagggaaagcu

SEQ ID NO: 2805122 - RNA, 19 nt, Artificial Sequence
  Description of Artificial Sequence: Synthetic oligonucleotide
gcccaccuaccuuucuugg

SEQ ID NO: 2805123 - RNA, 19 nt, Artificial Sequence
  Description of Artificial Sequence: Synthetic oligonucleotide
cucacaggagagacauaga

SEQ ID NO: 2805124 - RNA, 19 nt, Artificial Sequence
  Description of Artificial Sequence: Synthetic oligonucleotide
guggagaggcuagaauaca

SEQ ID NO: 2805125 - RNA, 19 nt, Artificial Sequence
  Description of Artificial Sequence: Synthetic oligonucleotide
ccuugagguuacaaugcuc

SEQ ID NO: 2805126 - RNA, 19 nt, Artificial Sequence
  Description of Artificial Sequence: Synthetic oligonucleotide
cucuccuauuaugcuuuug

SEQ ID NO: 2805127 - RNA, 19 nt, Artificial Sequence
  Description of Artificial Sequence: Synthetic oligonucleotide
gagcuaacaggaggagaga

SEQ ID NO: 2805128 - RNA, 19 nt, Artificial Sequence
  Description of Artificial Sequence: Synthetic oligonucleotide
acccauggcuauguaugcu

SEQ ID NO: 2805129 - RNA, 19 nt, Artificial Sequence
  Description of Artificial Sequence: Synthetic oligonucleotide
gagacauagacaggagcau

SEQ ID NO: 2805130 - RNA, 19 nt, Artificial Sequence
  Description of Artificial Sequence: Synthetic oligonucleotide
gguccuacaaacaugcguu

SEQ ID NO: 2805131 - RNA, 19 nt, Artificial Sequence
  Description of Artificial Sequence: Synthetic oligonucleotide
gcuauguaugcuuccuucu

SEQ ID NO: 2805132 - RNA, 19 nt, Artificial Sequence
  Description of Artificial Sequence: Synthetic oligonucleotide
cuaccaacucuggccguug

SEQ ID NO: 2805133 - RNA, 19 nt, Artificial Sequence
  Description of Artificial Sequence: Synthetic oligonucleotide
gggaauacuuauagcccac

SEQ ID NO: 2805134 - RNA, 19 nt, Artificial Sequence
  Description of Artificial Sequence: Synthetic oligonucleotide
caaggcucagauacucugu

SEQ ID NO: 2805135 - RNA, 19 nt, Artificial Sequence
  Description of Artificial Sequence: Synthetic oligonucleotide
ucucuccuauuaugcuuuu

SEQ ID NO: 2805136 - RNA, 19 nt, Artificial Sequence
  Description of Artificial Sequence: Synthetic oligonucleotide
caggagcauuuuaauccga

SEQ ID NO: 2805137 - RNA, 19 nt, Artificial Sequence
  Description of Artificial Sequence: Synthetic oligonucleotide
guguccaucugggcuacca

SEQ ID NO: 2805138 - RNA, 19 nt, Artificial Sequence
  Description of Artificial Sequence: Synthetic oligonucleotide
caaacaugcguugacccau

SEQ ID NO: 2805139 - RNA, 19 nt, Artificial Sequence
  Description of Artificial Sequence: Synthetic oligonucleotide
ccauggcuauguaugcuuc

SEQ ID NO: 2805140 - RNA, 19 nt, Artificial Sequence
  Description of Artificial Sequence: Synthetic oligonucleotide
aggagagggaauacuuaua

SEQ ID NO: 2805141 - RNA, 19 nt, Artificial Sequence
  Description of Artificial Sequence: Synthetic oligonucleotide
cuuauagcccaccuaccuu

SEQ ID NO: 2805142 - RNA, 19 nt, Artificial Sequence
  Description of Artificial Sequence: Synthetic oligonucleotide
uagcacuuggugggaaguu

SEQ ID NO: 2805143 - RNA, 19 nt, Artificial Sequence
  Description of Artificial Sequence: Synthetic oligonucleotide
ggagcauuuuaauccgagu

SEQ ID NO: 2805144 - RNA, 19 nt, Artificial Sequence
  Description of Artificial Sequence: Synthetic oligonucleotide
cagggaaagcucacucaaa

SEQ ID NO: 2805145 - RNA, 19 nt, Artificial Sequence
  Description of Artificial Sequence: Synthetic oligonucleotide
augcguugacccauggcua

SEQ ID NO: 2805146 - RNA, 19 nt, Artificial Sequence
  Description of Artificial Sequence: Synthetic oligonucleotide
ugguguccaucugggcuac

SEQ ID NO: 2805147 - RNA, 19 nt, Artificial Sequence
  Description of Artificial Sequence: Synthetic oligonucleotide
ggagaggcuagaauacaaa

SEQ ID NO: 2805148 - RNA, 19 nt, Artificial Sequence
  Description of Artificial Sequence: Synthetic oligonucleotide
acacaguggagaggcuaga

SEQ ID NO: 2805149 - RNA, 19 nt, Artificial Sequence
  Description of Artificial Sequence: Synthetic oligonucleotide
accuuucuuggaaguuucu

SEQ ID NO: 2805150 - RNA, 19 nt, Artificial Sequence
  Description of Artificial Sequence: Synthetic oligonucleotide
ggaggagagagcagggaaa

SEQ ID NO: 2805151 - RNA, 19 nt, Artificial Sequence
  Description of Artificial Sequence: Synthetic oligonucleotide
gggcaggagccacuuuagc

SEQ ID NO: 2805152 - RNA, 19 nt, Artificial Sequence
  Description of Artificial Sequence: Synthetic oligonucleotide
ggggcaggagccacuuuag

SEQ ID NO: 2805153 - RNA, 19 nt, Artificial Sequence
  Description of Artificial Sequence: Synthetic oligonucleotide
cuuuagcacuuggugggaa

SEQ ID NO: 2805154 - RNA, 19 nt, Artificial Sequence
  Description of Artificial Sequence: Synthetic oligonucleotide
caucugggcuaccaacucu

SEQ ID NO: 2805155 - RNA, 19 nt, Artificial Sequence
  Description of Artificial Sequence: Synthetic oligonucleotide
gcuuuuguacuagauuagu

SEQ ID NO: 2805156 - RNA, 19 nt, Artificial Sequence
  Description of Artificial Sequence: Synthetic oligonucleotide
caggagccacuuuagcacu

SEQ ID NO: 2805157 - RNA, 19 nt, Artificial Sequence
  Description of Artificial Sequence: Synthetic oligonucleotide
cuccucugguguccaucug

SEQ ID NO: 2805158 - RNA, 19 nt, Artificial Sequence
  Description of Artificial Sequence: Synthetic oligonucleotide
ggagccacuuuagcacuug

SEQ ID NO: 2805159 - RNA, 19 nt, Artificial Sequence
  Description of Artificial Sequence: Synthetic oligonucleotide
ccaccuaccuuucuuggaa

SEQ ID NO: 2805160 - RNA, 19 nt, Artificial Sequence
  Description of Artificial Sequence: Synthetic oligonucleotide
ccaucugggcuaccaacuc

SEQ ID NO: 2805161 - RNA, 19 nt, Artificial Sequence
  Description of Artificial Sequence: Synthetic oligonucleotide
aguaggugcuugacaucaa

SEQ ID NO: 2805162 - RNA, 19 nt, Artificial Sequence
  Description of Artificial Sequence: Synthetic oligonucleotide
cuuggaaguuucugacaau

SEQ ID NO: 2805163 - RNA, 19 nt, Artificial Sequence
  Description of Artificial Sequence: Synthetic oligonucleotide
cacaguggagaggcuagaa

SEQ ID NO: 2805164 - RNA, 19 nt, Artificial Sequence
  Description of Artificial Sequence: Synthetic oligonucleotide
guugacccauggcuaugua

SEQ ID NO: 2805165 - RNA, 19 nt, Artificial Sequence
  Description of Artificial Sequence: Synthetic oligonucleotide
auccaacaaccagguaaau

SEQ ID NO: 2805166 - RNA, 19 nt, Artificial Sequence
  Description of Artificial Sequence: Synthetic oligonucleotide
ucugugccuugagguuaca

SEQ ID NO: 2805167 - RNA, 19 nt, Artificial Sequence
  Description of Artificial Sequence: Synthetic oligonucleotide
cucagauacucugugccuu

SEQ ID NO: 2805168 - RNA, 19 nt, Artificial Sequence
  Description of Artificial Sequence: Synthetic oligonucleotide
cagauacucugugccuuga

SEQ ID NO: 2805169 - RNA, 19 nt, Artificial Sequence
  Description of Artificial Sequence: Synthetic oligonucleotide
gcucagauacucugugccu

SEQ ID NO: 2805170 - RNA, 19 nt, Artificial Sequence
  Description of Artificial Sequence: Synthetic oligonucleotide
gcucaacaacacaguggag

SEQ ID NO: 2805171 - RNA, 19 nt, Artificial Sequence
  Description of Artificial Sequence: Synthetic oligonucleotide
gucauccaacaaccaggua

SEQ ID NO: 2805172 - RNA, 19 nt, Artificial Sequence
  Description of Artificial Sequence: Synthetic oligonucleotide
gccuugagguuacaaugcu

SEQ ID NO: 2805173 - RNA, 19 nt, Artificial Sequence
  Description of Artificial Sequence: Synthetic oligonucleotide
cugugccuugagguuacaa

SEQ ID NO: 2805174 - RNA, 19 nt, Artificial Sequence
  Description of Artificial Sequence: Synthetic oligonucleotide
cccaccuaccuuucuugga

SEQ ID NO: 2805175 - RNA, 19 nt, Artificial Sequence
  Description of Artificial Sequence: Synthetic oligonucleotide
aggagccacuuuagcacuu

SEQ ID NO: 2805176 - RNA, 19 nt, Artificial Sequence
  Description of Artificial Sequence: Synthetic oligonucleotide
cucacucaaagagguccua

SEQ ID NO: 2805177 - RNA, 19 nt, Artificial Sequence
  Description of Artificial Sequence: Synthetic oligonucleotide
gcacuuggugggaaguucu

SEQ ID NO: 2805178 - RNA, 19 nt, Artificial Sequence
  Description of Artificial Sequence: Synthetic oligonucleotide
gacucacaggagagacaua

SEQ ID NO: 2805179 - RNA, 19 nt, Artificial Sequence
  Description of Artificial Sequence: Synthetic oligonucleotide
gcguugacccauggcuaug

SEQ ID NO: 2805180 - RNA, 19 nt, Artificial Sequence
  Description of Artificial Sequence: Synthetic oligonucleotide
gcucacucaaagagguccu

SEQ ID NO: 2805181 - RNA, 19 nt, Artificial Sequence
  Description of Artificial Sequence: Synthetic oligonucleotide
cccauggcuauguaugcuu

SEQ ID NO: 2805182 - RNA, 19 nt, Artificial Sequence
  Description of Artificial Sequence: Synthetic oligonucleotide
gguguccaucugggcuacc

SEQ ID NO: 2805183 - RNA, 19 nt, Artificial Sequence
  Description of Artificial Sequence: Synthetic oligonucleotide
ggcuaccaacucuggccgu

SEQ ID NO: 2805184 - RNA, 19 nt, Artificial Sequence
  Description of Artificial Sequence: Synthetic oligonucleotide
gcuaccaacucuggccguu

SEQ ID NO: 2805185 - RNA, 19 nt, Artificial Sequence
  Description of Artificial Sequence: Synthetic oligonucleotide
cuucuccucugguguccau

SEQ ID NO: 2805186 - RNA, 19 nt, Artificial Sequence
  Description of Artificial Sequence: Synthetic oligonucleotide
cguugacccauggcuaugu

SEQ ID NO: 2805187 - RNA, 19 nt, Artificial Sequence
  Description of Artificial Sequence: Synthetic oligonucleotide
aaaaugauucuucaucucg

SEQ ID NO: 2805188 - RNA, 19 nt, Artificial Sequence
  Description of Artificial Sequence: Synthetic oligonucleotide
aaaggcagcagccuggacc

SEQ ID NO: 2805189 - RNA, 19 nt, Artificial Sequence
  Description of Artificial Sequence: Synthetic oligonucleotide
agucauaucgggcugaacc

SEQ ID NO: 2805190 - RNA, 19 nt, Artificial Sequence
  Description of Artificial Sequence: Synthetic oligonucleotide
aaccccuuaaaauauagag

SEQ ID NO: 2805191 - RNA, 19 nt, Artificial Sequence
  Description of Artificial Sequence: Synthetic oligonucleotide
cuugacacugucaacaugg

SEQ ID NO: 2805192 - RNA, 19 nt, Artificial Sequence
  Description of Artificial Sequence: Synthetic oligonucleotide
caugggagaagucauaucg

SEQ ID NO: 2805193 - RNA, 19 nt, Artificial Sequence
  Description of Artificial Sequence: Synthetic oligonucleotide
ucuaacacgugaaccaagg

SEQ ID NO: 2805194 - RNA, 19 nt, Artificial Sequence
  Description of Artificial Sequence: Synthetic oligonucleotide
aucucgaaggaucucaugg

SEQ ID NO: 2805195 - RNA, 19 nt, Artificial Sequence
  Description of Artificial Sequence: Synthetic oligonucleotide
ucaacauggggcuugaugu

SEQ ID NO: 2805196 - RNA, 19 nt, Artificial Sequence
  Description of Artificial Sequence: Synthetic oligonucleotide
agcuucauaacacuugggg

SEQ ID NO: 2805197 - RNA, 19 nt, Artificial Sequence
  Description of Artificial Sequence: Synthetic oligonucleotide
ugaaccaaggguagcaggg

SEQ ID NO: 2805198 - RNA, 19 nt, Artificial Sequence
  Description of Artificial Sequence: Synthetic oligonucleotide
uuaaaauauagagggagcc

SEQ ID NO: 2805199 - RNA, 19 nt, Artificial Sequence
  Description of Artificial Sequence: Synthetic oligonucleotide
aaaauauagagggagccug

SEQ ID NO: 2805200 - RNA, 19 nt, Artificial Sequence
  Description of Artificial Sequence: Synthetic oligonucleotide
aacaguuccagccacugcu

SEQ ID NO: 2805201 - RNA, 19 nt, Artificial Sequence
  Description of Artificial Sequence: Synthetic oligonucleotide
cuuaaaauauagagggagc

SEQ ID NO: 2805202 - RNA, 19 nt, Artificial Sequence
  Description of Artificial Sequence: Synthetic oligonucleotide
aaaucacugagaugcgccg

SEQ ID NO: 2805203 - RNA, 19 nt, Artificial Sequence
  Description of Artificial Sequence: Synthetic oligonucleotide
gacacugucaacauggggc

SEQ ID NO: 2805204 - RNA, 19 nt, Artificial Sequence
  Description of Artificial Sequence: Synthetic oligonucleotide
aacacuuggggacaacaag

SEQ ID NO: 2805205 - RNA, 19 nt, Artificial Sequence
  Description of Artificial Sequence: Synthetic oligonucleotide
cuucauaacacuuggggac

SEQ ID NO: 2805206 - RNA, 19 nt, Artificial Sequence
  Description of Artificial Sequence: Synthetic oligonucleotide
cuugcaucagaccagcggg

SEQ ID NO: 2805207 - RNA, 19 nt, Artificial Sequence
  Description of Artificial Sequence: Synthetic oligonucleotide
uuuggucagggccaaaggc

SEQ ID NO: 2805208 - RNA, 19 nt, Artificial Sequence
  Description of Artificial Sequence: Synthetic oligonucleotide
aauauagagggagccuggc

SEQ ID NO: 2805209 - RNA, 19 nt, Artificial Sequence
  Description of Artificial Sequence: Synthetic oligonucleotide
gauccacagaacuugacac

SEQ ID NO: 2805210 - RNA, 19 nt, Artificial Sequence
  Description of Artificial Sequence: Synthetic oligonucleotide
ccccuuaaaauauagaggg

SEQ ID NO: 2805211 - RNA, 19 nt, Artificial Sequence
  Description of Artificial Sequence: Synthetic oligonucleotide
ugaaccccuuaaaauauag

SEQ ID NO: 2805212 - RNA, 19 nt, Artificial Sequence
  Description of Artificial Sequence: Synthetic oligonucleotide
uucuccgucucccugaagc

SEQ ID NO: 2805213 - RNA, 19 nt, Artificial Sequence
  Description of Artificial Sequence: Synthetic oligonucleotide
uaacacgugaaccaagggu

SEQ ID NO: 2805214 - RNA, 19 nt, Artificial Sequence
  Description of Artificial Sequence: Synthetic oligonucleotide
aaggaaaggccagcgaugg

SEQ ID NO: 2805215 - RNA, 19 nt, Artificial Sequence
  Description of Artificial Sequence: Synthetic oligonucleotide
ugggagaagucauaucggg

SEQ ID NO: 2805216 - RNA, 19 nt, Artificial Sequence
  Description of Artificial Sequence: Synthetic oligonucleotide
uauagagggagccuggcuc

SEQ ID NO: 2805217 - RNA, 19 nt, Artificial Sequence
  Description of Artificial Sequence: Synthetic oligonucleotide
auagagggagccuggcucc

SEQ ID NO: 2805218 - RNA, 19 nt, Artificial Sequence
  Description of Artificial Sequence: Synthetic oligonucleotide
caaaucacugagaugcgcc

SEQ ID NO: 2805219 - RNA, 19 nt, Artificial Sequence
  Description of Artificial Sequence: Synthetic oligonucleotide
agaccagcgggauuucucc

SEQ ID NO: 2805220 - RNA, 19 nt, Artificial Sequence
  Description of Artificial Sequence: Synthetic oligonucleotide
ucucgaaggaucucauggg

SEQ ID NO: 2805221 - RNA, 19 nt, Artificial Sequence
  Description of Artificial Sequence: Synthetic oligonucleotide
uucuucaucucgaaggauc

SEQ ID NO: 2805222 - RNA, 19 nt, Artificial Sequence
  Description of Artificial Sequence: Synthetic oligonucleotide
aaauauagagggagccugg

SEQ ID NO: 2805223 - RNA, 19 nt, Artificial Sequence
  Description of Artificial Sequence: Synthetic oligonucleotide
ugcaccagcuucauaacac

SEQ ID NO: 2805224 - RNA, 19 nt, Artificial Sequence
  Description of Artificial Sequence: Synthetic oligonucleotide
gaacuugacacugucaaca

SEQ ID NO: 2805225 - RNA, 19 nt, Artificial Sequence
  Description of Artificial Sequence: Synthetic oligonucleotide
uggggcuugauguagcccc

SEQ ID NO: 2805226 - RNA, 19 nt, Artificial Sequence
  Description of Artificial Sequence: Synthetic oligonucleotide
acugagaugcgccggcccc

SEQ ID NO: 2805227 - RNA, 19 nt, Artificial Sequence
  Description of Artificial Sequence: Synthetic oligonucleotide
agaacuugacacugucaac

SEQ ID NO: 2805228 - RNA, 19 nt, Artificial Sequence
  Description of Artificial Sequence: Synthetic oligonucleotide
ucgaaggaucucaugggag

SEQ ID NO: 2805229 - RNA, 19 nt, Artificial Sequence
  Description of Artificial Sequence: Synthetic oligonucleotide
ugacacugucaacaugggg

SEQ ID NO: 2805230 - RNA, 19 nt, Artificial Sequence
  Description of Artificial Sequence: Synthetic oligonucleotide
ugcaggauagccuggcuug

SEQ ID NO: 2805231 - RNA, 19 nt, Artificial Sequence
  Description of Artificial Sequence: Synthetic oligonucleotide
aggucuaacacgugaacca

SEQ ID NO: 2805232 - RNA, 19 nt, Artificial Sequence
  Description of Artificial Sequence: Synthetic oligonucleotide
acaacaaggaaaggccagc

SEQ ID NO: 2805233 - RNA, 19 nt, Artificial Sequence
  Description of Artificial Sequence: Synthetic oligonucleotide
uaaaauauagagggagccu

SEQ ID NO: 2805234 - RNA, 19 nt, Artificial Sequence
  Description of Artificial Sequence: Synthetic oligonucleotide
aaaugauucuucaucucga

SEQ ID NO: 2805235 - RNA, 19 nt, Artificial Sequence
  Description of Artificial Sequence: Synthetic oligonucleotide
aguggucguacucguaacg

SEQ ID NO: 2805236 - RNA, 19 nt, Artificial Sequence
  Description of Artificial Sequence: Synthetic oligonucleotide
aacacgugaaccaagggua

SEQ ID NO: 2805237 - RNA, 19 nt, Artificial Sequence
  Description of Artificial Sequence: Synthetic oligonucleotide
acacuuggggacaacaagg

SEQ ID NO: 2805238 - RNA, 19 nt, Artificial Sequence
  Description of Artificial Sequence: Synthetic oligonucleotide
uggggcuccaguucgcugg

SEQ ID NO: 2805239 - RNA, 19 nt, Artificial Sequence
  Description of Artificial Sequence: Synthetic oligonucleotide
accccuuaaaauauagagg

SEQ ID NO: 2805240 - RNA, 19 nt, Artificial Sequence
  Description of Artificial Sequence: Synthetic oligonucleotide
uggucagggccaaaggcag

SEQ ID NO: 2805241 - RNA, 19 nt, Artificial Sequence
  Description of Artificial Sequence: Synthetic oligonucleotide
gucauaucgggcugaaccc

SEQ ID NO: 2805242 - RNA, 19 nt, Artificial Sequence
  Description of Artificial Sequence: Synthetic oligonucleotide
aacauggggcuugauguag

SEQ ID NO: 2805243 - RNA, 19 nt, Artificial Sequence
  Description of Artificial Sequence: Synthetic oligonucleotide
aaucacugagaugcgccgg

SEQ ID NO: 2805244 - RNA, 19 nt, Artificial Sequence
  Description of Artificial Sequence: Synthetic oligonucleotide
uucaucucgaaggaucuca

SEQ ID NO: 2805245 - RNA, 19 nt, Artificial Sequence
  Description of Artificial Sequence: Synthetic oligonucleotide
uugacacugucaacauggg

SEQ ID NO: 2805246 - RNA, 19 nt, Artificial Sequence
  Description of Artificial Sequence: Synthetic oligonucleotide
gaaaggccagcgauggugg

SEQ ID NO: 2805247 - RNA, 19 nt, Artificial Sequence
  Description of Artificial Sequence: Synthetic oligonucleotide
aacaaggaaaggccagcga

SEQ ID NO: 2805248 - RNA, 19 nt, Artificial Sequence
  Description of Artificial Sequence: Synthetic oligonucleotide
ccuuaaaauauagagggag

SEQ ID NO: 2805249 - RNA, 19 nt, Artificial Sequence
  Description of Artificial Sequence: Synthetic oligonucleotide
uccaguucgcuggucagcg

SEQ ID NO: 2805250 - RNA, 19 nt, Artificial Sequence
  Description of Artificial Sequence: Synthetic oligonucleotide
gucaacauggggcuugaug

SEQ ID NO: 2805251 - RNA, 19 nt, Artificial Sequence
  Description of Artificial Sequence: Synthetic oligonucleotide
augguggauccacagaacu

SEQ ID NO: 2805252 - RNA, 19 nt, Artificial Sequence
  Description of Artificial Sequence: Synthetic oligonucleotide
ugauguagccccgagguuc

SEQ ID NO: 2805253 - RNA, 19 nt, Artificial Sequence
  Description of Artificial Sequence: Synthetic oligonucleotide
gacaacaaggaaaggccag

SEQ ID NO: 2805254 - RNA, 19 nt, Artificial Sequence
  Description of Artificial Sequence: Synthetic oligonucleotide
cuuggggacaacaaggaaa

SEQ ID NO: 2805255 - RNA, 19 nt, Artificial Sequence
  Description of Artificial Sequence: Synthetic oligonucleotide
gaucucaugggagaaguca

SEQ ID NO: 2805256 - RNA, 19 nt, Artificial Sequence
  Description of Artificial Sequence: Synthetic oligonucleotide
gugugcaccagcuucauaa

SEQ ID NO: 2805257 - RNA, 19 nt, Artificial Sequence
  Description of Artificial Sequence: Synthetic oligonucleotide
gugaaccaaggguagcagg

SEQ ID NO: 2805258 - RNA, 19 nt, Artificial Sequence
  Description of Artificial Sequence: Synthetic oligonucleotide
guuuggucagggccaaagg

SEQ ID NO: 2805259 - RNA, 19 nt, Artificial Sequence
  Description of Artificial Sequence: Synthetic oligonucleotide
cuaacacgugaaccaaggg

SEQ ID NO: 2805260 - RNA, 19 nt, Artificial Sequence
  Description of Artificial Sequence: Synthetic oligonucleotide
agcggcaaaucacugagau

SEQ ID NO: 2805261 - RNA, 19 nt, Artificial Sequence
  Description of Artificial Sequence: Synthetic oligonucleotide
uucauaacacuuggggaca

SEQ ID NO: 2805262 - RNA, 19 nt, Artificial Sequence
  Description of Artificial Sequence: Synthetic oligonucleotide
uaacacuuggggacaacaa

SEQ ID NO: 2805263 - RNA, 19 nt, Artificial Sequence
  Description of Artificial Sequence: Synthetic oligonucleotide
acacugucaacauggggcu

SEQ ID NO: 2805264 - RNA, 19 nt, Artificial Sequence
  Description of Artificial Sequence: Synthetic oligonucleotide
gagaagucauaucgggcug

SEQ ID NO: 2805265 - RNA, 19 nt, Artificial Sequence
  Description of Artificial Sequence: Synthetic oligonucleotide
aggguagcaggguuugguc

SEQ ID NO: 2805266 - RNA, 19 nt, Artificial Sequence
  Description of Artificial Sequence: Synthetic oligonucleotide
ucccugaagccguggauag

SEQ ID NO: 2805267 - RNA, 19 nt, Artificial Sequence
  Description of Artificial Sequence: Synthetic oligonucleotide
caaggaaaggccagcgaug

SEQ ID NO: 2805268 - RNA, 19 nt, Artificial Sequence
  Description of Artificial Sequence: Synthetic oligonucleotide
auagccgcgucccaguggu

SEQ ID NO: 2805269 - RNA, 19 nt, Artificial Sequence
  Description of Artificial Sequence: Synthetic oligonucleotide
gauuucuccgucucccuga

SEQ ID NO: 2805270 - RNA, 19 nt, Artificial Sequence
  Description of Artificial Sequence: Synthetic oligonucleotide
agcagccuggacccgcugc

SEQ ID NO: 2805271 - RNA, 19 nt, Artificial Sequence
  Description of Artificial Sequence: Synthetic oligonucleotide
gauagccgcgucccagugg

SEQ ID NO: 2805272 - RNA, 19 nt, Artificial Sequence
  Description of Artificial Sequence: Synthetic oligonucleotide
ucuccugaccuuccuggcc

SEQ ID NO: 2805273 - RNA, 19 nt, Artificial Sequence
  Description of Artificial Sequence: Synthetic oligonucleotide
ggagcggcaaaucacugag

SEQ ID NO: 2805274 - RNA, 19 nt, Artificial Sequence
  Description of Artificial Sequence: Synthetic oligonucleotide
caggucuaacacgugaacc

SEQ ID NO: 2805275 - RNA, 19 nt, Artificial Sequence
  Description of Artificial Sequence: Synthetic oligonucleotide
agcgaugguggauccacag

SEQ ID NO: 2805276 - RNA, 19 nt, Artificial Sequence
  Description of Artificial Sequence: Synthetic oligonucleotide
cggcaaaucacugagaugc

SEQ ID NO: 2805277 - RNA, 19 nt, Artificial Sequence
  Description of Artificial Sequence: Synthetic oligonucleotide
uggucguacucguaacgcc

SEQ ID NO: 2805278 - RNA, 19 nt, Artificial Sequence
  Description of Artificial Sequence: Synthetic oligonucleotide
cagaacuugacacugucaa

SEQ ID NO: 2805279 - RNA, 19 nt, Artificial Sequence
  Description of Artificial Sequence: Synthetic oligonucleotide
ugaagccguggauagccgc

SEQ ID NO: 2805280 - RNA, 19 nt, Artificial Sequence
  Description of Artificial Sequence: Synthetic oligonucleotide
auaacacuuggggacaaca

SEQ ID NO: 2805281 - RNA, 19 nt, Artificial Sequence
  Description of Artificial Sequence: Synthetic oligonucleotide
agggccaaaggcagcagcc

SEQ ID NO: 2805282 - RNA, 19 nt, Artificial Sequence
  Description of Artificial Sequence: Synthetic oligonucleotide
gaagccguggauagccgcg

SEQ ID NO: 2805283 - RNA, 19 nt, Artificial Sequence
  Description of Artificial Sequence: Synthetic oligonucleotide
ucauaucgggcugaacccc

SEQ ID NO: 2805284 - RNA, 19 nt, Artificial Sequence
  Description of Artificial Sequence: Synthetic oligonucleotide
gcuugcaucagaccagcgg

SEQ ID NO: 2805285 - RNA, 19 nt, Artificial Sequence
  Description of Artificial Sequence: Synthetic oligonucleotide
gggacaacaaggaaaggcc

SEQ ID NO: 2805286 - RNA, 19 nt, Artificial Sequence
  Description of Artificial Sequence: Synthetic oligonucleotide
aaggguagcaggguuuggu

SEQ ID NO: 2805287 - RNA, 19 nt, Artificial Sequence
  Description of Artificial Sequence: Synthetic oligonucleotide
cuugauguagccccgaggu

SEQ ID NO: 2805288 - RNA, 19 nt, Artificial Sequence
  Description of Artificial Sequence: Synthetic oligonucleotide
agcgggauuucuccgucuc

SEQ ID NO: 2805289 - RNA, 19 nt, Artificial Sequence
  Description of Artificial Sequence: Synthetic oligonucleotide
guacucguaacgccggcgc

SEQ ID NO: 2805290 - RNA, 19 nt, Artificial Sequence
  Description of Artificial Sequence: Synthetic oligonucleotide
cuccugaccuuccuggccc

SEQ ID NO: 2805291 - RNA, 19 nt, Artificial Sequence
  Description of Artificial Sequence: Synthetic oligonucleotide
caacaaggaaaggccagcg

SEQ ID NO: 2805292 - RNA, 19 nt, Artificial Sequence
  Description of Artificial Sequence: Synthetic oligonucleotide
auccacagaacuugacacu

SEQ ID NO: 2805293 - RNA, 19 nt, Artificial Sequence
  Description of Artificial Sequence: Synthetic oligonucleotide
augggagaagucauaucgg

SEQ ID NO: 2805294 - RNA, 19 nt, Artificial Sequence
  Description of Artificial Sequence: Synthetic oligonucleotide
acuugacacugucaacaug

SEQ ID NO: 2805295 - RNA, 19 nt, Artificial Sequence
  Description of Artificial Sequence: Synthetic oligonucleotide
ucuccgucucccugaagcc

SEQ ID NO: 2805296 - RNA, 19 nt, Artificial Sequence
  Description of Artificial Sequence: Synthetic oligonucleotide
agcaggguuuggucagggc

SEQ ID NO: 2805297 - RNA, 19 nt, Artificial Sequence
  Description of Artificial Sequence: Synthetic oligonucleotide
ggggacaacaaggaaaggc

SEQ ID NO: 2805298 - RNA, 19 nt, Artificial Sequence
  Description of Artificial Sequence: Synthetic oligonucleotide
ugggugugcaccagcuuca

SEQ ID NO: 2805299 - RNA, 19 nt, Artificial Sequence
  Description of Artificial Sequence: Synthetic oligonucleotide
cugggugugcaccagcuuc

SEQ ID NO: 2805300 - RNA, 19 nt, Artificial Sequence
  Description of Artificial Sequence: Synthetic oligonucleotide
gguggauccacagaacuug

SEQ ID NO: 2805301 - RNA, 19 nt, Artificial Sequence
  Description of Artificial Sequence: Synthetic oligonucleotide
gguagcaggguuuggucag

SEQ ID NO: 2805302 - RNA, 19 nt, Artificial Sequence
  Description of Artificial Sequence: Synthetic oligonucleotide
gcaggguuuggucagggcc

SEQ ID NO: 2805303 - RNA, 19 nt, Artificial Sequence
  Description of Artificial Sequence: Synthetic oligonucleotide
acugucaacauggggcuug

SEQ ID NO: 2805304 - RNA, 19 nt, Artificial Sequence
  Description of Artificial Sequence: Synthetic oligonucleotide
agguuccugggugugcacc

SEQ ID NO: 2805305 - RNA, 19 nt, Artificial Sequence
  Description of Artificial Sequence: Synthetic oligonucleotide
guagccccgagguuccagg

SEQ ID NO: 2805306 - RNA, 19 nt, Artificial Sequence
  Description of Artificial Sequence: Synthetic oligonucleotide
uggacccgcugcaggauag

SEQ ID NO: 2805307 - RNA, 19 nt, Artificial Sequence
  Description of Artificial Sequence: Synthetic oligonucleotide
ugugcaccagcuucauaac

SEQ ID NO: 2805308 - RNA, 19 nt, Artificial Sequence
  Description of Artificial Sequence: Synthetic oligonucleotide
aaccaaggguagcaggguu

SEQ ID NO: 2805309 - RNA, 19 nt, Artificial Sequence
  Description of Artificial Sequence: Synthetic oligonucleotide
gauguagccccgagguucc

SEQ ID NO: 2805310 - RNA, 19 nt, Artificial Sequence
  Description of Artificial Sequence: Synthetic oligonucleotide
uugcaucagaccagcggga

SEQ ID NO: 2805311 - RNA, 19 nt, Artificial Sequence
  Description of Artificial Sequence: Synthetic oligonucleotide
cacagaacuugacacuguc

SEQ ID NO: 2805312 - RNA, 19 nt, Artificial Sequence
  Description of Artificial Sequence: Synthetic oligonucleotide
gaccagcgggauuucuccg

SEQ ID NO: 2805313 - RNA, 19 nt, Artificial Sequence
  Description of Artificial Sequence: Synthetic oligonucleotide
gcuucauaacacuugggga

SEQ ID NO: 2805314 - RNA, 19 nt, Artificial Sequence
  Description of Artificial Sequence: Synthetic oligonucleotide
cauggggcuugauguagcc

SEQ ID NO: 2805315 - RNA, 19 nt, Artificial Sequence
  Description of Artificial Sequence: Synthetic oligonucleotide
uccgucucccugaagccgu

SEQ ID NO: 2805316 - RNA, 19 nt, Artificial Sequence
  Description of Artificial Sequence: Synthetic oligonucleotide
ggaaaggccagcgauggug

SEQ ID NO: 2805317 - RNA, 19 nt, Artificial Sequence
  Description of Artificial Sequence: Synthetic oligonucleotide
ucaucucgaaggaucucau

SEQ ID NO: 2805318 - RNA, 19 nt, Artificial Sequence
  Description of Artificial Sequence: Synthetic oligonucleotide
aagucauaucgggcugaac

SEQ ID NO: 2805319 - RNA, 19 nt, Artificial Sequence
  Description of Artificial Sequence: Synthetic oligonucleotide
gcucuccugaccuuccugg

SEQ ID NO: 2805320 - RNA, 19 nt, Artificial Sequence
  Description of Artificial Sequence: Synthetic oligonucleotide
uacucguaacgccggcgcc

SEQ ID NO: 2805321 - RNA, 19 nt, Artificial Sequence
  Description of Artificial Sequence: Synthetic oligonucleotide
acauggggcuugauguagc

SEQ ID NO: 2805322 - RNA, 19 nt, Artificial Sequence
  Description of Artificial Sequence: Synthetic oligonucleotide
accagcuucauaacacuug

SEQ ID NO: 2805323 - RNA, 19 nt, Artificial Sequence
  Description of Artificial Sequence: Synthetic oligonucleotide
acucguaacgccggcgccg

SEQ ID NO: 2805324 - RNA, 19 nt, Artificial Sequence
  Description of Artificial Sequence: Synthetic oligonucleotide
gucccaguggucguacucg

SEQ ID NO: 2805325 - RNA, 19 nt, Artificial Sequence
  Description of Artificial Sequence: Synthetic oligonucleotide
ggucguacucguaacgccg

SEQ ID NO: 2805326 - RNA, 19 nt, Artificial Sequence
  Description of Artificial Sequence: Synthetic oligonucleotide
ucagguuccugggugugca

SEQ ID NO: 2805327 - RNA, 19 nt, Artificial Sequence
  Description of Artificial Sequence: Synthetic oligonucleotide
cacugcucagguuccuggg

SEQ ID NO: 2805328 - RNA, 19 nt, Artificial Sequence
  Description of Artificial Sequence: Synthetic oligonucleotide
uggcuccagcaacaguucc

SEQ ID NO: 2805329 - RNA, 19 nt, Artificial Sequence
  Description of Artificial Sequence: Synthetic oligonucleotide
uggauccacagaacuugac

SEQ ID NO: 2805330 - RNA, 19 nt, Artificial Sequence
  Description of Artificial Sequence: Synthetic oligonucleotide
ucaugggagaagucauauc

SEQ ID NO: 2805331 - RNA, 19 nt, Artificial Sequence
  Description of Artificial Sequence: Synthetic oligonucleotide
ggauccacagaacuugaca

SEQ ID NO: 2805332 - RNA, 19 nt, Artificial Sequence
  Description of Artificial Sequence: Synthetic oligonucleotide
agaugcgccggccccgggg

SEQ ID NO: 2805333 - RNA, 19 nt, Artificial Sequence
  Description of Artificial Sequence: Synthetic oligonucleotide
ggagaagucauaucgggcu

SEQ ID NO: 2805334 - RNA, 19 nt, Artificial Sequence
  Description of Artificial Sequence: Synthetic oligonucleotide
cagcuucauaacacuuggg

SEQ ID NO: 2805335 - RNA, 19 nt, Artificial Sequence
  Description of Artificial Sequence: Synthetic oligonucleotide
ucucaugggagaagucaua

SEQ ID NO: 2805336 - RNA, 19 nt, Artificial Sequence
  Description of Artificial Sequence: Synthetic oligonucleotide
ugguggauccacagaacuu

SEQ ID NO: 2805337 - RNA, 19 nt, Artificial Sequence
  Description of Artificial Sequence: Synthetic oligonucleotide
guggucguacucguaacgc

SEQ ID NO: 2805338 - RNA, 19 nt, Artificial Sequence
  Description of Artificial Sequence: Synthetic oligonucleotide
caguucgcuggucagcgug

SEQ ID NO: 2805339 - RNA, 19 nt, Artificial Sequence
  Description of Artificial Sequence: Synthetic oligonucleotide
cugaagccguggauagccg

SEQ ID NO: 2805340 - RNA, 19 nt, Artificial Sequence
  Description of Artificial Sequence: Synthetic oligonucleotide
gaugguggauccacagaac

SEQ ID NO: 2805341 - RNA, 19 nt, Artificial Sequence
  Description of Artificial Sequence: Synthetic oligonucleotide
cagcuggggcuccaguucg

SEQ ID NO: 2805342 - RNA, 19 nt, Artificial Sequence
  Description of Artificial Sequence: Synthetic oligonucleotide
aaaggccagcgauggugga

SEQ ID NO: 2805343 - RNA, 19 nt, Artificial Sequence
  Description of Artificial Sequence: Synthetic oligonucleotide
ggcugaaccccuuaaaaua

SEQ ID NO: 2805344 - RNA, 19 nt, Artificial Sequence
  Description of Artificial Sequence: Synthetic oligonucleotide
acugcucagguuccugggu

SEQ ID NO: 2805345 - RNA, 19 nt, Artificial Sequence
  Description of Artificial Sequence: Synthetic oligonucleotide
cucgaaggaucucauggga

SEQ ID NO: 2805346 - RNA, 19 nt, Artificial Sequence
  Description of Artificial Sequence: Synthetic oligonucleotide
gcuugauguagccccgagg

SEQ ID NO: 2805347 - RNA, 19 nt, Artificial Sequence
  Description of Artificial Sequence: Synthetic oligonucleotide
aggccagcgaugguggauc

SEQ ID NO: 2805348 - RNA, 19 nt, Artificial Sequence
  Description of Artificial Sequence: Synthetic oligonucleotide
acuuggggacaacaaggaa

SEQ ID NO: 2805349 - RNA, 19 nt, Artificial Sequence
  Description of Artificial Sequence: Synthetic oligonucleotide
cacuuggggacaacaagga

SEQ ID NO: 2805350 - RNA, 19 nt, Artificial Sequence
  Description of Artificial Sequence: Synthetic oligonucleotide
ugcucagguuccugggugu

SEQ ID NO: 2805351 - RNA, 19 nt, Artificial Sequence
  Description of Artificial Sequence: Synthetic oligonucleotide
gucguacucguaacgccgg

SEQ ID NO: 2805352 - RNA, 19 nt, Artificial Sequence
  Description of Artificial Sequence: Synthetic oligonucleotide
cauccccucagggagggag

SEQ ID NO: 2805353 - RNA, 19 nt, Artificial Sequence
  Description of Artificial Sequence: Synthetic oligonucleotide
agaagucauaucgggcuga

SEQ ID NO: 2805354 - RNA, 19 nt, Artificial Sequence
  Description of Artificial Sequence: Synthetic oligonucleotide
uggauagccgcgucccagu

SEQ ID NO: 2805355 - RNA, 19 nt, Artificial Sequence
  Description of Artificial Sequence: Synthetic oligonucleotide
ccagccacugcucagguuc

SEQ ID NO: 2805356 - RNA, 19 nt, Artificial Sequence
  Description of Artificial Sequence: Synthetic oligonucleotide
caacaguuccagccacugc

SEQ ID NO: 2805357 - RNA, 19 nt, Artificial Sequence
  Description of Artificial Sequence: Synthetic oligonucleotide
gucuaacacgugaaccaag

SEQ ID NO: 2805358 - RNA, 19 nt, Artificial Sequence
  Description of Artificial Sequence: Synthetic oligonucleotide
ucgcuggucagcguguccu

SEQ ID NO: 2805359 - RNA, 19 nt, Artificial Sequence
  Description of Artificial Sequence: Synthetic oligonucleotide
caucucgaaggaucucaug

SEQ ID NO: 2805360 - RNA, 19 nt, Artificial Sequence
  Description of Artificial Sequence: Synthetic oligonucleotide
agccgcgucccaguggucg

SEQ ID NO: 2805361 - RNA, 19 nt, Artificial Sequence
  Description of Artificial Sequence: Synthetic oligonucleotide
acgugaaccaaggguagca

SEQ ID NO: 2805362 - RNA, 19 nt, Artificial Sequence
  Description of Artificial Sequence: Synthetic oligonucleotide
caggguuuggucagggcca

SEQ ID NO: 2805363 - RNA, 19 nt, Artificial Sequence
  Description of Artificial Sequence: Synthetic oligonucleotide
gaaccccuuaaaauauaga

SEQ ID NO: 2805364 - RNA, 19 nt, Artificial Sequence
  Description of Artificial Sequence: Synthetic oligonucleotide
ccugaagccguggauagcc

SEQ ID NO: 2805365 - RNA, 19 nt, Artificial Sequence
  Description of Artificial Sequence: Synthetic oligonucleotide
cagaccagcgggauuucuc

SEQ ID NO: 2805366 - RNA, 19 nt, Artificial Sequence
  Description of Artificial Sequence: Synthetic oligonucleotide
ucguacucguaacgccggc

SEQ ID NO: 2805367 - RNA, 19 nt, Artificial Sequence
  Description of Artificial Sequence: Synthetic oligonucleotide
gguuuggucagggccaaag

SEQ ID NO: 2805368 - RNA, 19 nt, Artificial Sequence
  Description of Artificial Sequence: Synthetic oligonucleotide
ucucccugaagccguggau

SEQ ID NO: 2805369 - RNA, 19 nt, Artificial Sequence
  Description of Artificial Sequence: Synthetic oligonucleotide
uggcuugcaucagaccagc

SEQ ID NO: 2805370 - RNA, 19 nt, Artificial Sequence
  Description of Artificial Sequence: Synthetic oligonucleotide
uucgcuggucagcgugucc

SEQ ID NO: 2805371 - RNA, 19 nt, Artificial Sequence
  Description of Artificial Sequence: Synthetic oligonucleotide
accagcgggauuucuccgu

SEQ ID NO: 2805372 - RNA, 19 nt, Artificial Sequence
  Description of Artificial Sequence: Synthetic oligonucleotide
gaaggaucucaugggagaa

SEQ ID NO: 2805373 - RNA, 19 nt, Artificial Sequence
  Description of Artificial Sequence: Synthetic oligonucleotide
uagcaggguuuggucaggg

SEQ ID NO: 2805374 - RNA, 19 nt, Artificial Sequence
  Description of Artificial Sequence: Synthetic oligonucleotide
acacgugaaccaaggguag

SEQ ID NO: 2805375 - RNA, 19 nt, Artificial Sequence
  Description of Artificial Sequence: Synthetic oligonucleotide
cagggccaaaggcagcagc

SEQ ID NO: 2805376 - RNA, 19 nt, Artificial Sequence
  Description of Artificial Sequence: Synthetic oligonucleotide
ucgggcugaaccccuuaaa

SEQ ID NO: 2805377 - RNA, 19 nt, Artificial Sequence
  Description of Artificial Sequence: Synthetic oligonucleotide
uugauguagccccgagguu

SEQ ID NO: 2805378 - RNA, 19 nt, Artificial Sequence
  Description of Artificial Sequence: Synthetic oligonucleotide
ccuggcuugcaucagacca

SEQ ID NO: 2805379 - RNA, 19 nt, Artificial Sequence
  Description of Artificial Sequence: Synthetic oligonucleotide
acagaacuugacacuguca

SEQ ID NO: 2805380 - RNA, 19 nt, Artificial Sequence
  Description of Artificial Sequence: Synthetic oligonucleotide
ugagaugcgccggccccgg

SEQ ID NO: 2805381 - RNA, 19 nt, Artificial Sequence
  Description of Artificial Sequence: Synthetic oligonucleotide
aucucaugggagaagucau

SEQ ID NO: 2805382 - RNA, 19 nt, Artificial Sequence
  Description of Artificial Sequence: Synthetic oligonucleotide
guggauagccgcgucccag

SEQ ID NO: 2805383 - RNA, 19 nt, Artificial Sequence
  Description of Artificial Sequence: Synthetic oligonucleotide
caguggucguacucguaac

SEQ ID NO: 2805384 - RNA, 19 nt, Artificial Sequence
  Description of Artificial Sequence: Synthetic oligonucleotide
cacugagaugcgccggccc

SEQ ID NO: 2805385 - RNA, 19 nt, Artificial Sequence
  Description of Artificial Sequence: Synthetic oligonucleotide
cuccgucucccugaagccg

SEQ ID NO: 2805386 - RNA, 19 nt, Artificial Sequence
  Description of Artificial Sequence: Synthetic oligonucleotide
uguagccccgagguuccag

SEQ ID NO: 2805387 - RNA, 19 nt, Artificial Sequence
  Description of Artificial Sequence: Synthetic oligonucleotide
agccccgagguuccagguc

SEQ ID NO: 2805388 - RNA, 19 nt, Artificial Sequence
  Description of Artificial Sequence: Synthetic oligonucleotide
acgccggcgccgcagcugg

SEQ ID NO: 2805389 - RNA, 19 nt, Artificial Sequence
  Description of Artificial Sequence: Synthetic oligonucleotide
uuucuccgucucccugaag

SEQ ID NO: 2805390 - RNA, 19 nt, Artificial Sequence
  Description of Artificial Sequence: Synthetic oligonucleotide
auuucuccgucucccugaa

SEQ ID NO: 2805391 - RNA, 19 nt, Artificial Sequence
  Description of Artificial Sequence: Synthetic oligonucleotide
uggggacaacaaggaaagg

SEQ ID NO: 2805392 - RNA, 19 nt, Artificial Sequence
  Description of Artificial Sequence: Synthetic oligonucleotide
ucauaacacuuggggacaa

SEQ ID NO: 2805393 - RNA, 19 nt, Artificial Sequence
  Description of Artificial Sequence: Synthetic oligonucleotide
ucccaguggucguacucgu

SEQ ID NO: 2805394 - RNA, 19 nt, Artificial Sequence
  Description of Artificial Sequence: Synthetic oligonucleotide
cuggcuccagcaacaguuc

SEQ ID NO: 2805395 - RNA, 19 nt, Artificial Sequence
  Description of Artificial Sequence: Synthetic oligonucleotide
gugcaccagcuucauaaca

SEQ ID NO: 2805396 - RNA, 19 nt, Artificial Sequence
  Description of Artificial Sequence: Synthetic oligonucleotide
uggucagcguguccucuuc

SEQ ID NO: 2805397 - RNA, 19 nt, Artificial Sequence
  Description of Artificial Sequence: Synthetic oligonucleotide
auccccucagggagggagc

SEQ ID NO: 2805398 - RNA, 19 nt, Artificial Sequence
  Description of Artificial Sequence: Synthetic oligonucleotide
gggagaagucauaucgggc

SEQ ID NO: 2805399 - RNA, 19 nt, Artificial Sequence
  Description of Artificial Sequence: Synthetic oligonucleotide
guagcaggguuuggucagg

SEQ ID NO: 2805400 - RNA, 19 nt, Artificial Sequence
  Description of Artificial Sequence: Synthetic oligonucleotide
ggagccuggcuccagcaac

SEQ ID NO: 2805401 - RNA, 19 nt, Artificial Sequence
  Description of Artificial Sequence: Synthetic oligonucleotide
ugcaucagaccagcgggau

SEQ ID NO: 2805402 - RNA, 19 nt, Artificial Sequence
  Description of Artificial Sequence: Synthetic oligonucleotide
gcaaaucacugagaugcgc

SEQ ID NO: 2805403 - RNA, 19 nt, Artificial Sequence
  Description of Artificial Sequence: Synthetic oligonucleotide
aaggccagcgaugguggau

SEQ ID NO: 2805404 - RNA, 19 nt, Artificial Sequence
  Description of Artificial Sequence: Synthetic oligonucleotide
cacgugaaccaaggguagc

SEQ ID NO: 2805405 - RNA, 19 nt, Artificial Sequence
  Description of Artificial Sequence: Synthetic oligonucleotide
cagccacugcucagguucc

SEQ ID NO: 2805406 - RNA, 19 nt, Artificial Sequence
  Description of Artificial Sequence: Synthetic oligonucleotide
cugagaugcgccggccccg

SEQ ID NO: 2805407 - RNA, 19 nt, Artificial Sequence
  Description of Artificial Sequence: Synthetic oligonucleotide
gacccgcugcaggauagcc

SEQ ID NO: 2805408 - RNA, 19 nt, Artificial Sequence
  Description of Artificial Sequence: Synthetic oligonucleotide
aagccguggauagccgcgu

SEQ ID NO: 2805409 - RNA, 19 nt, Artificial Sequence
  Description of Artificial Sequence: Synthetic oligonucleotide
cccgcugcaggauagccug

SEQ ID NO: 2805410 - RNA, 19 nt, Artificial Sequence
  Description of Artificial Sequence: Synthetic oligonucleotide
ggguagcaggguuugguca

SEQ ID NO: 2805411 - RNA, 19 nt, Artificial Sequence
  Description of Artificial Sequence: Synthetic oligonucleotide
aucgggcugaaccccuuaa

SEQ ID NO: 2805412 - RNA, 19 nt, Artificial Sequence
  Description of Artificial Sequence: Synthetic oligonucleotide
uccugaccuuccuggcccc

SEQ ID NO: 2805413 - RNA, 19 nt, Artificial Sequence
  Description of Artificial Sequence: Synthetic oligonucleotide
agggagggagcggcaaauc

SEQ ID NO: 2805414 - RNA, 19 nt, Artificial Sequence
  Description of Artificial Sequence: Synthetic oligonucleotide
ggcaaaucacugagaugcg

SEQ ID NO: 2805415 - RNA, 19 nt, Artificial Sequence
  Description of Artificial Sequence: Synthetic oligonucleotide
uaucgggcugaaccccuua

SEQ ID NO: 2805416 - RNA, 19 nt, Artificial Sequence
  Description of Artificial Sequence: Synthetic oligonucleotide
ccacugcucagguuccugg

SEQ ID NO: 2805417 - RNA, 19 nt, Artificial Sequence
  Description of Artificial Sequence: Synthetic oligonucleotide
gguuccaggucuaacacgu

SEQ ID NO: 2805418 - RNA, 19 nt, Artificial Sequence
  Description of Artificial Sequence: Synthetic oligonucleotide
ggccaaaggcagcagccug

SEQ ID NO: 2805419 - RNA, 19 nt, Artificial Sequence
  Description of Artificial Sequence: Synthetic oligonucleotide
ucagaccagcgggauuucu

SEQ ID NO: 2805420 - RNA, 19 nt, Artificial Sequence
  Description of Artificial Sequence: Synthetic oligonucleotide
ggagggagcggcaaaucac

SEQ ID NO: 2805421 - RNA, 19 nt, Artificial Sequence
  Description of Artificial Sequence: Synthetic oligonucleotide
cauaacacuuggggacaac

SEQ ID NO: 2805422 - RNA, 19 nt, Artificial Sequence
  Description of Artificial Sequence: Synthetic oligonucleotide
agccguggauagccgcguc

SEQ ID NO: 2805423 - RNA, 19 nt, Artificial Sequence
  Description of Artificial Sequence: Synthetic oligonucleotide
gcaacaguuccagccacug

SEQ ID NO: 2805424 - RNA, 19 nt, Artificial Sequence
  Description of Artificial Sequence: Synthetic oligonucleotide
cucguaacgccggcgccgc

SEQ ID NO: 2805425 - RNA, 19 nt, Artificial Sequence
  Description of Artificial Sequence: Synthetic oligonucleotide
cuccagcaacaguuccagc

SEQ ID NO: 2805426 - RNA, 19 nt, Artificial Sequence
  Description of Artificial Sequence: Synthetic oligonucleotide
gaagucauaucgggcugaa

SEQ ID NO: 2805427 - RNA, 19 nt, Artificial Sequence
  Description of Artificial Sequence: Synthetic oligonucleotide
gagggagcggcaaaucacu

SEQ ID NO: 2805428 - RNA, 19 nt, Artificial Sequence
  Description of Artificial Sequence: Synthetic oligonucleotide
uagccccgagguuccaggu

SEQ ID NO: 2805429 - RNA, 19 nt, Artificial Sequence
  Description of Artificial Sequence: Synthetic oligonucleotide
caaggguagcaggguuugg

SEQ ID NO: 2805430 - RNA, 19 nt, Artificial Sequence
  Description of Artificial Sequence: Synthetic oligonucleotide
gggagggagcggcaaauca

SEQ ID NO: 2805431 - RNA, 19 nt, Artificial Sequence
  Description of Artificial Sequence: Synthetic oligonucleotide
aggaaaggccagcgauggu

SEQ ID NO: 2805432 - RNA, 19 nt, Artificial Sequence
  Description of Artificial Sequence: Synthetic oligonucleotide
aucagaccagcgggauuuc

SEQ ID NO: 2805433 - RNA, 19 nt, Artificial Sequence
  Description of Artificial Sequence: Synthetic oligonucleotide
ggcuugauguagccccgag

SEQ ID NO: 2805434 - RNA, 19 nt, Artificial Sequence
  Description of Artificial Sequence: Synthetic oligonucleotide
aguucgcuggucagcgugu

SEQ ID NO: 2805435 - RNA, 19 nt, Artificial Sequence
  Description of Artificial Sequence: Synthetic oligonucleotide
gacccggugcuccccaaaa

SEQ ID NO: 2805436 - RNA, 19 nt, Artificial Sequence
  Description of Artificial Sequence: Synthetic oligonucleotide
cuucaucucgaaggaucuc

SEQ ID NO: 2805437 - RNA, 19 nt, Artificial Sequence
  Description of Artificial Sequence: Synthetic oligonucleotide
cugaaccccuuaaaauaua

SEQ ID NO: 2805438 - RNA, 19 nt, Artificial Sequence
  Description of Artificial Sequence: Synthetic oligonucleotide
gucucccugaagccgugga

SEQ ID NO: 2805439 - RNA, 19 nt, Artificial Sequence
  Description of Artificial Sequence: Synthetic oligonucleotide
gagccuggcuccagcaaca

SEQ ID NO: 2805440 - RNA, 19 nt, Artificial Sequence
  Description of Artificial Sequence: Synthetic oligonucleotide
ccaggucuaacacgugaac

SEQ ID NO: 2805441 - RNA, 19 nt, Artificial Sequence
  Description of Artificial Sequence: Synthetic oligonucleotide
agcaacaguuccagccacu

SEQ ID NO: 2805442 - RNA, 19 nt, Artificial Sequence
  Description of Artificial Sequence: Synthetic oligonucleotide
agcuggggcuccaguucgc

SEQ ID NO: 2805443 - RNA, 19 nt, Artificial Sequence
  Description of Artificial Sequence: Synthetic oligonucleotide
caacauggggcuugaugua

SEQ ID NO: 2805444 - RNA, 19 nt, Artificial Sequence
  Description of Artificial Sequence: Synthetic oligonucleotide
gcggcaaaucacugagaug

SEQ ID NO: 2805445 - RNA, 19 nt, Artificial Sequence
  Description of Artificial Sequence: Synthetic oligonucleotide
ggucagcguguccucuucc

SEQ ID NO: 2805446 - RNA, 19 nt, Artificial Sequence
  Description of Artificial Sequence: Synthetic oligonucleotide
guggauccacagaacuuga

SEQ ID NO: 2805447 - RNA, 19 nt, Artificial Sequence
  Description of Artificial Sequence: Synthetic oligonucleotide
cauaucgggcugaaccccu

SEQ ID NO: 2805448 - RNA, 19 nt, Artificial Sequence
  Description of Artificial Sequence: Synthetic oligonucleotide
agggagcggcaaaucacug

SEQ ID NO: 2805449 - RNA, 19 nt, Artificial Sequence
  Description of Artificial Sequence: Synthetic oligonucleotide
ggauagccgcgucccagug

SEQ ID NO: 2805450 - RNA, 19 nt, Artificial Sequence
  Description of Artificial Sequence: Synthetic oligonucleotide
accaaggguagcaggguuu

SEQ ID NO: 2805451 - RNA, 19 nt, Artificial Sequence
  Description of Artificial Sequence: Synthetic oligonucleotide
guuccugggugugcaccag

SEQ ID NO: 2805452 - RNA, 19 nt, Artificial Sequence
  Description of Artificial Sequence: Synthetic oligonucleotide
gggagcggcaaaucacuga

SEQ ID NO: 2805453 - RNA, 19 nt, Artificial Sequence
  Description of Artificial Sequence: Synthetic oligonucleotide
uagagggagccuggcucca

SEQ ID NO: 2805454 - RNA, 19 nt, Artificial Sequence
  Description of Artificial Sequence: Synthetic oligonucleotide
gaaccaaggguagcagggu

SEQ ID NO: 2805455 - RNA, 19 nt, Artificial Sequence
  Description of Artificial Sequence: Synthetic oligonucleotide
caucagaccagcgggauuu

SEQ ID NO: 2805456 - RNA, 19 nt, Artificial Sequence
  Description of Artificial Sequence: Synthetic oligonucleotide
cgagguuccaggucuaaca

SEQ ID NO: 2805457 - RNA, 19 nt, Artificial Sequence
  Description of Artificial Sequence: Synthetic oligonucleotide
uaacgccggcgccgcagcu

SEQ ID NO: 2805458 - RNA, 19 nt, Artificial Sequence
  Description of Artificial Sequence: Synthetic oligonucleotide
ggcucuccugaccuuccug

SEQ ID NO: 2805459 - RNA, 19 nt, Artificial Sequence
  Description of Artificial Sequence: Synthetic oligonucleotide
ccagcgaugguggauccac

SEQ ID NO: 2805460 - RNA, 19 nt, Artificial Sequence
  Description of Artificial Sequence: Synthetic oligonucleotide
guuccaggucuaacacgug

SEQ ID NO: 2805461 - RNA, 19 nt, Artificial Sequence
  Description of Artificial Sequence: Synthetic oligonucleotide
cgaaggaucucaugggaga

SEQ ID NO: 2805462 - RNA, 19 nt, Artificial Sequence
  Description of Artificial Sequence: Synthetic oligonucleotide
gagaugcgccggccccggg

SEQ ID NO: 2805463 - RNA, 19 nt, Artificial Sequence
  Description of Artificial Sequence: Synthetic oligonucleotide
ggucuaacacgugaaccaa

SEQ ID NO: 2805464 - RNA, 19 nt, Artificial Sequence
  Description of Artificial Sequence: Synthetic oligonucleotide
cucaugggagaagucauau

SEQ ID NO: 2805465 - RNA, 19 nt, Artificial Sequence
  Description of Artificial Sequence: Synthetic oligonucleotide
cccuuaaaauauagaggga

SEQ ID NO: 2805466 - RNA, 19 nt, Artificial Sequence
  Description of Artificial Sequence: Synthetic oligonucleotide
cucccugaagccguggaua

SEQ ID NO: 2805467 - RNA, 19 nt, Artificial Sequence
  Description of Artificial Sequence: Synthetic oligonucleotide
guggcucuccugaccuucc

SEQ ID NO: 2805468 - RNA, 19 nt, Artificial Sequence
  Description of Artificial Sequence: Synthetic oligonucleotide
gccguggauagccgcgucc

SEQ ID NO: 2805469 - RNA, 19 nt, Artificial Sequence
  Description of Artificial Sequence: Synthetic oligonucleotide
cgaugguggauccacagaa

SEQ ID NO: 2805470 - RNA, 19 nt, Artificial Sequence
  Description of Artificial Sequence: Synthetic oligonucleotide
agccuggcuccagcaacag

SEQ ID NO: 2805471 - RNA, 19 nt, Artificial Sequence
  Description of Artificial Sequence: Synthetic oligonucleotide
ccaaggguagcaggguuug

SEQ ID NO: 2805472 - RNA, 19 nt, Artificial Sequence
  Description of Artificial Sequence: Synthetic oligonucleotide
cagguuccugggugugcac

SEQ ID NO: 2805473 - RNA, 19 nt, Artificial Sequence
  Description of Artificial Sequence: Synthetic oligonucleotide
ggggcuugauguagccccg

SEQ ID NO: 2805474 - RNA, 19 nt, Artificial Sequence
  Description of Artificial Sequence: Synthetic oligonucleotide
ccaguggucguacucguaa

SEQ ID NO: 2805475 - RNA, 19 nt, Artificial Sequence
  Description of Artificial Sequence: Synthetic oligonucleotide
gggcugaaccccuuaaaau

SEQ ID NO: 2805476 - RNA, 19 nt, Artificial Sequence
  Description of Artificial Sequence: Synthetic oligonucleotide
gguggcucuccugaccuuc

SEQ ID NO: 2805477 - RNA, 19 nt, Artificial Sequence
  Description of Artificial Sequence: Synthetic oligonucleotide
acccgcugcaggauagccu

SEQ ID NO: 2805478 - RNA, 19 nt, Artificial Sequence
  Description of Artificial Sequence: Synthetic oligonucleotide
gcgggauuucuccgucucc

SEQ ID NO: 2805479 - RNA, 19 nt, Artificial Sequence
  Description of Artificial Sequence: Synthetic oligonucleotide
gagcggcaaaucacugaga

SEQ ID NO: 2805480 - RNA, 19 nt, Artificial Sequence
  Description of Artificial Sequence: Synthetic oligonucleotide
uccagccacugcucagguu

SEQ ID NO: 2805481 - RNA, 19 nt, Artificial Sequence
  Description of Artificial Sequence: Synthetic oligonucleotide
cgggauuucuccgucuccc

SEQ ID NO: 2805482 - RNA, 19 nt, Artificial Sequence
  Description of Artificial Sequence: Synthetic oligonucleotide
gcugaaccccuuaaaauau

SEQ ID NO: 2805483 - RNA, 19 nt, Artificial Sequence
  Description of Artificial Sequence: Synthetic oligonucleotide
gcgaugguggauccacaga

SEQ ID NO: 2805484 - RNA, 19 nt, Artificial Sequence
  Description of Artificial Sequence: Synthetic oligonucleotide
ccuggcuccagcaacaguu

SEQ ID NO: 2805485 - RNA, 19 nt, Artificial Sequence
  Description of Artificial Sequence: Synthetic oligonucleotide
ccguggauagccgcguccc

SEQ ID NO: 2805486 - RNA, 19 nt, Artificial Sequence
  Description of Artificial Sequence: Synthetic oligonucleotide
gcaggauagccuggcuugc

SEQ ID NO: 2805487 - RNA, 19 nt, Artificial Sequence
  Description of Artificial Sequence: Synthetic oligonucleotide
aggguuuggucagggccaa

SEQ ID NO: 2805488 - RNA, 19 nt, Artificial Sequence
  Description of Artificial Sequence: Synthetic oligonucleotide
gcagccuggacccgcugca

SEQ ID NO: 2805489 - RNA, 19 nt, Artificial Sequence
  Description of Artificial Sequence: Synthetic oligonucleotide
gccuggcuugcaucagacc

SEQ ID NO: 2805490 - RNA, 19 nt, Artificial Sequence
  Description of Artificial Sequence: Synthetic oligonucleotide
cagcgaugguggauccaca

SEQ ID NO: 2805491 - RNA, 19 nt, Artificial Sequence
  Description of Artificial Sequence: Synthetic oligonucleotide
cguacucguaacgccggcg

SEQ ID NO: 2805492 - RNA, 19 nt, Artificial Sequence
  Description of Artificial Sequence: Synthetic oligonucleotide
ucguaacgccggcgccgca

SEQ ID NO: 2805493 - RNA, 19 nt, Artificial Sequence
  Description of Artificial Sequence: Synthetic oligonucleotide
guucgcuggucagcguguc

SEQ ID NO: 2805494 - RNA, 19 nt, Artificial Sequence
  Description of Artificial Sequence: Synthetic oligonucleotide
ggcuugcaucagaccagcg

SEQ ID NO: 2805495 - RNA, 19 nt, Artificial Sequence
  Description of Artificial Sequence: Synthetic oligonucleotide
ggccagcgaugguggaucc

SEQ ID NO: 2805496 - RNA, 19 nt, Artificial Sequence
  Description of Artificial Sequence: Synthetic oligonucleotide
gcaccagcuucauaacacu

SEQ ID NO: 2805497 - RNA, 19 nt, Artificial Sequence
  Description of Artificial Sequence: Synthetic oligonucleotide
gggguggcucuccugaccu

SEQ ID NO: 2805498 - RNA, 19 nt, Artificial Sequence
  Description of Artificial Sequence: Synthetic oligonucleotide
cagccuggacccgcugcag

SEQ ID NO: 2805499 - RNA, 19 nt, Artificial Sequence
  Description of Artificial Sequence: Synthetic oligonucleotide
caggauagccuggcuugca

SEQ ID NO: 2805500 - RNA, 19 nt, Artificial Sequence
  Description of Artificial Sequence: Synthetic oligonucleotide
cgugaaccaaggguagcag

SEQ ID NO: 2805501 - RNA, 19 nt, Artificial Sequence
  Description of Artificial Sequence: Synthetic oligonucleotide
cugcaggauagccuggcuu

SEQ ID NO: 2805502 - RNA, 19 nt, Artificial Sequence
  Description of Artificial Sequence: Synthetic oligonucleotide
ugucaacauggggcuugau

SEQ ID NO: 2805503 - RNA, 19 nt, Artificial Sequence
  Description of Artificial Sequence: Synthetic oligonucleotide
cugucaacauggggcuuga

SEQ ID NO: 2805504 - RNA, 19 nt, Artificial Sequence
  Description of Artificial Sequence: Synthetic oligonucleotide
caccagcuucauaacacuu

SEQ ID NO: 2805505 - RNA, 19 nt, Artificial Sequence
  Description of Artificial Sequence: Synthetic oligonucleotide
ccagcgggauuucuccguc

SEQ ID NO: 2805506 - RNA, 19 nt, Artificial Sequence
  Description of Artificial Sequence: Synthetic oligonucleotide
gccccgagguuccaggucu

SEQ ID NO: 2805507 - RNA, 19 nt, Artificial Sequence
  Description of Artificial Sequence: Synthetic oligonucleotide
gcucagguuccugggugug

SEQ ID NO: 2805508 - RNA, 19 nt, Artificial Sequence
  Description of Artificial Sequence: Synthetic oligonucleotide
cuggacccgcugcaggaua

SEQ ID NO: 2805509 - RNA, 19 nt, Artificial Sequence
  Description of Artificial Sequence: Synthetic oligonucleotide
auaucgggcugaaccccuu

SEQ ID NO: 2805510 - RNA, 19 nt, Artificial Sequence
  Description of Artificial Sequence: Synthetic oligonucleotide
agccacugcucagguuccu

SEQ ID NO: 2805511 - RNA, 19 nt, Artificial Sequence
  Description of Artificial Sequence: Synthetic oligonucleotide
gccacugcucagguuccug

SEQ ID NO: 2805512 - RNA, 19 nt, Artificial Sequence
  Description of Artificial Sequence: Synthetic oligonucleotide
gggauuucuccgucucccu

SEQ ID NO: 2805513 - RNA, 19 nt, Artificial Sequence
  Description of Artificial Sequence: Synthetic oligonucleotide
uagccgcgucccagugguc

SEQ ID NO: 2805514 - RNA, 19 nt, Artificial Sequence
  Description of Artificial Sequence: Synthetic oligonucleotide
cgggcugaaccccuuaaaa

SEQ ID NO: 2805515 - RNA, 19 nt, Artificial Sequence
  Description of Artificial Sequence: Synthetic oligonucleotide
ccgagguuccaggucuaac

SEQ ID NO: 2805516 - RNA, 19 nt, Artificial Sequence
  Description of Artificial Sequence: Synthetic oligonucleotide
cguaacgccggcgccgcag

SEQ ID NO: 2805517 - RNA, 19 nt, Artificial Sequence
  Description of Artificial Sequence: Synthetic oligonucleotide
gggagccuggcuccagcaa

SEQ ID NO: 2805518 - RNA, 19 nt, Artificial Sequence
  Description of Artificial Sequence: Synthetic oligonucleotide
cgucccaguggucguacuc

SEQ ID NO: 2805519 - RNA, 19 nt, Artificial Sequence
  Description of Artificial Sequence: Synthetic oligonucleotide
auguagccccgagguucca

SEQ ID NO: 2805520 - RNA, 19 nt, Artificial Sequence
  Description of Artificial Sequence: Synthetic oligonucleotide
ggugugcaccagcuucaua

SEQ ID NO: 2805521 - RNA, 19 nt, Artificial Sequence
  Description of Artificial Sequence: Synthetic oligonucleotide
ccaaaggcagcagccugga

SEQ ID NO: 2805522 - RNA, 19 nt, Artificial Sequence
  Description of Artificial Sequence: Synthetic oligonucleotide
cccugaagccguggauagc

SEQ ID NO: 2805523 - RNA, 19 nt, Artificial Sequence
  Description of Artificial Sequence: Synthetic oligonucleotide
cgcugcaggauagccuggc

SEQ ID NO: 2805524 - RNA, 19 nt, Artificial Sequence
  Description of Artificial Sequence: Synthetic oligonucleotide
cagcgggauuucuccgucu

SEQ ID NO: 2805525 - RNA, 19 nt, Artificial Sequence
  Description of Artificial Sequence: Synthetic oligonucleotide
cuggucagcguguccucuu

SEQ ID NO: 2805526 - RNA, 19 nt, Artificial Sequence
  Description of Artificial Sequence: Synthetic oligonucleotide
ggggacccggugcucccca

SEQ ID NO: 2805527 - RNA, 19 nt, Artificial Sequence
  Description of Artificial Sequence: Synthetic oligonucleotide
gcugcaggauagccuggcu

SEQ ID NO: 2805528 - RNA, 19 nt, Artificial Sequence
  Description of Artificial Sequence: Synthetic oligonucleotide
ggacccggugcuccccaaa

SEQ ID NO: 2805529 - RNA, 19 nt, Artificial Sequence
  Description of Artificial Sequence: Synthetic oligonucleotide
cagggagggagcggcaaau

SEQ ID NO: 2805530 - RNA, 19 nt, Artificial Sequence
  Description of Artificial Sequence: Synthetic oligonucleotide
ccacagaacuugacacugu

SEQ ID NO: 2805531 - RNA, 19 nt, Artificial Sequence
  Description of Artificial Sequence: Synthetic oligonucleotide
gggcuugauguagccccga

SEQ ID NO: 2805532 - RNA, 19 nt, Artificial Sequence
  Description of Artificial Sequence: Synthetic oligonucleotide
ccgucucccugaagccgug

SEQ ID NO: 2805533 - RNA, 19 nt, Artificial Sequence
  Description of Artificial Sequence: Synthetic oligonucleotide
gcaucagaccagcgggauu

SEQ ID NO: 2805534 - RNA, 19 nt, Artificial Sequence
  Description of Artificial Sequence: Synthetic oligonucleotide
gcuggucagcguguccucu

SEQ ID NO: 2805535 - RNA, 19 nt, Artificial Sequence
  Description of Artificial Sequence: Synthetic oligonucleotide
ccccucagggagggagcgg

SEQ ID NO: 2805536 - RNA, 19 nt, Artificial Sequence
  Description of Artificial Sequence: Synthetic oligonucleotide
cgucucccugaagccgugg

SEQ ID NO: 2805537 - RNA, 19 nt, Artificial Sequence
  Description of Artificial Sequence: Synthetic oligonucleotide
gccagcgaugguggaucca

SEQ ID NO: 2805538 - RNA, 19 nt, Artificial Sequence
  Description of Artificial Sequence: Synthetic oligonucleotide
cguggauagccgcguccca

SEQ ID NO: 2805539 - RNA, 19 nt, Artificial Sequence
  Description of Artificial Sequence: Synthetic oligonucleotide
gccuggcuccagcaacagu

SEQ ID NO: 2805540 - RNA, 19 nt, Artificial Sequence
  Description of Artificial Sequence: Synthetic oligonucleotide
gcuggggcuccaguucgcu

SEQ ID NO: 2805541 - RNA, 19 nt, Artificial Sequence
  Description of Artificial Sequence: Synthetic oligonucleotide
cccaguggucguacucgua

SEQ ID NO: 2805542 - RNA, 19 nt, Artificial Sequence
  Description of Artificial Sequence: Synthetic oligonucleotide
gccgcgucccaguggucgu

SEQ ID NO: 2805543 - RNA, 19 nt, Artificial Sequence
  Description of Artificial Sequence: Synthetic oligonucleotide
cacugucaacauggggcuu

SEQ ID NO: 2805544 - RNA, 19 nt, Artificial Sequence
  Description of Artificial Sequence: Synthetic oligonucleotide
cgcgucccaguggucguac

SEQ ID NO: 2805545 - RNA, 19 nt, Artificial Sequence
  Description of Artificial Sequence: Synthetic oligonucleotide
gcgucccaguggucguacu

SEQ ID NO: 2805546 - RNA, 19 nt, Artificial Sequence
  Description of Artificial Sequence: Synthetic oligonucleotide
gggugugcaccagcuucau

SEQ ID NO: 2805547 - RNA, 19 nt, Artificial Sequence
  Description of Artificial Sequence: Synthetic oligonucleotide
ccaguucgcuggucagcgu

SEQ ID NO: 2805548 - RNA, 19 nt, Artificial Sequence
  Description of Artificial Sequence: Synthetic oligonucleotide
ggguuuggucagggccaaa

SEQ ID NO: 2805549 - RNA, 19 nt, Artificial Sequence
  Description of Artificial Sequence: Synthetic oligonucleotide
cccgagguuccaggucuaa

SEQ ID NO: 2805550 - RNA, 19 nt, Artificial Sequence
  Description of Artificial Sequence: Synthetic oligonucleotide
ggguggcucuccugaccuu

SEQ ID NO: 2805551 - RNA, 19 nt, Artificial Sequence
  Description of Artificial Sequence: Synthetic oligonucleotide
ccugggugugcaccagcuu

SEQ ID NO: 2805552 - RNA, 19 nt, Artificial Sequence
  Description of Artificial Sequence: Synthetic oligonucleotide
ccccgagguuccaggucua

SEQ ID NO: 2805553 - RNA, 19 nt, Artificial Sequence
  Description of Artificial Sequence: Synthetic oligonucleotide
ccuggacccgcugcaggau

SEQ ID NO: 2805554 - RNA, 19 nt, Artificial Sequence
  Description of Artificial Sequence: Synthetic oligonucleotide
ccgcagcuggggcuccagu

SEQ ID NO: 2805555 - RNA, 19 nt, Artificial Sequence
  Description of Artificial Sequence: Synthetic oligonucleotide
ccauccccucagggaggga

SEQ ID NO: 2805556 - RNA, 19 nt, Artificial Sequence
  Description of Artificial Sequence: Synthetic oligonucleotide
ccgcgucccaguggucgua

SEQ ID NO: 2805557 - RNA, 19 nt, Artificial Sequence
  Description of Artificial Sequence: Synthetic oligonucleotide
cggcgccgcagcuggggcu

SEQ ID NO: 2805558 - RNA, 19 nt, Artificial Sequence
  Description of Artificial Sequence: Synthetic oligonucleotide
aauaugaauuuucucaugc

SEQ ID NO: 2805559 - RNA, 19 nt, Artificial Sequence
  Description of Artificial Sequence: Synthetic oligonucleotide
uuugacuugccacugaagg

SEQ ID NO: 2805560 - RNA, 19 nt, Artificial Sequence
  Description of Artificial Sequence: Synthetic oligonucleotide
uagagaugaacucugagag

SEQ ID NO: 2805561 - RNA, 19 nt, Artificial Sequence
  Description of Artificial Sequence: Synthetic oligonucleotide
agacauugcauucauaagg

SEQ ID NO: 2805562 - RNA, 19 nt, Artificial Sequence
  Description of Artificial Sequence: Synthetic oligonucleotide
ugaaugaauucucacaugc

SEQ ID NO: 2805563 - RNA, 19 nt, Artificial Sequence
  Description of Artificial Sequence: Synthetic oligonucleotide
aauguuuugaugcuuuaug

SEQ ID NO: 2805564 - RNA, 19 nt, Artificial Sequence
  Description of Artificial Sequence: Synthetic oligonucleotide
aauuuucucaugcucagug

SEQ ID NO: 2805565 - RNA, 19 nt, Artificial Sequence
  Description of Artificial Sequence: Synthetic oligonucleotide
uguauucucaaaugcaggg

SEQ ID NO: 2805566 - RNA, 19 nt, Artificial Sequence
  Description of Artificial Sequence: Synthetic oligonucleotide
uguguauucucaaaugcag

SEQ ID NO: 2805567 - RNA, 19 nt, Artificial Sequence
  Description of Artificial Sequence: Synthetic oligonucleotide
auucauuacaaccguaggg

SEQ ID NO: 2805568 - RNA, 19 nt, Artificial Sequence
  Description of Artificial Sequence: Synthetic oligonucleotide
guuuugaugcuuuaugagg

SEQ ID NO: 2805569 - RNA, 19 nt, Artificial Sequence
  Description of Artificial Sequence: Synthetic oligonucleotide
auggguauggauuuucugg

SEQ ID NO: 2805570 - RNA, 19 nt, Artificial Sequence
  Description of Artificial Sequence: Synthetic oligonucleotide
uuuugaugcuuuaugaggu

SEQ ID NO: 2805571 - RNA, 19 nt, Artificial Sequence
  Description of Artificial Sequence: Synthetic oligonucleotide
uauucucaaaugcagggcc

SEQ ID NO: 2805572 - RNA, 19 nt, Artificial Sequence
  Description of Artificial Sequence: Synthetic oligonucleotide
aaggcuuaucaccugaaug

SEQ ID NO: 2805573 - RNA, 19 nt, Artificial Sequence
  Description of Artificial Sequence: Synthetic oligonucleotide
uuagagaugaacucugaga

SEQ ID NO: 2805574 - RNA, 19 nt, Artificial Sequence
  Description of Artificial Sequence: Synthetic oligonucleotide
acuccuuacauaugaaggg

SEQ ID NO: 2805575 - RNA, 19 nt, Artificial Sequence
  Description of Artificial Sequence: Synthetic oligonucleotide
uuuucugaccaaaagcugu

SEQ ID NO: 2805576 - RNA, 19 nt, Artificial Sequence
  Description of Artificial Sequence: Synthetic oligonucleotide
uguuuugaugcuuuaugag

SEQ ID NO: 2805577 - RNA, 19 nt, Artificial Sequence
  Description of Artificial Sequence: Synthetic oligonucleotide
ucucacaugcacaauaagu

SEQ ID NO: 2805578 - RNA, 19 nt, Artificial Sequence
  Description of Artificial Sequence: Synthetic oligonucleotide
cucacaugcacaauaagug

SEQ ID NO: 2805579 - RNA, 19 nt, Artificial Sequence
  Description of Artificial Sequence: Synthetic oligonucleotide
cugaagauaccccacagag

SEQ ID NO: 2805580 - RNA, 19 nt, Artificial Sequence
  Description of Artificial Sequence: Synthetic oligonucleotide
acagacauugcauucauaa

SEQ ID NO: 2805581 - RNA, 19 nt, Artificial Sequence
  Description of Artificial Sequence: Synthetic oligonucleotide
aauucucacaugcacaaua

SEQ ID NO: 2805582 - RNA, 19 nt, Artificial Sequence
  Description of Artificial Sequence: Synthetic oligonucleotide
aauaagugacguucgcuga

SEQ ID NO: 2805583 - RNA, 19 nt, Artificial Sequence
  Description of Artificial Sequence: Synthetic oligonucleotide
uuccccauacugaagauac

SEQ ID NO: 2805584 - RNA, 19 nt, Artificial Sequence
  Description of Artificial Sequence: Synthetic oligonucleotide
ugcacaauaagugacguuc

SEQ ID NO: 2805585 - RNA, 19 nt, Artificial Sequence
  Description of Artificial Sequence: Synthetic oligonucleotide
caauaagugacguucgcug

SEQ ID NO: 2805586 - RNA, 19 nt, Artificial Sequence
  Description of Artificial Sequence: Synthetic oligonucleotide
aauggguauggauuuucug

SEQ ID NO: 2805587 - RNA, 19 nt, Artificial Sequence
  Description of Artificial Sequence: Synthetic oligonucleotide
aggcuuaucaccugaauga

SEQ ID NO: 2805588 - RNA, 19 nt, Artificial Sequence
  Description of Artificial Sequence: Synthetic oligonucleotide
uuuuaauggguauggauuu

SEQ ID NO: 2805589 - RNA, 19 nt, Artificial Sequence
  Description of Artificial Sequence: Synthetic oligonucleotide
ucugaccaaaagcuguucc

SEQ ID NO: 2805590 - RNA, 19 nt, Artificial Sequence
  Description of Artificial Sequence: Synthetic oligonucleotide
gacauugcauucauaaggc

SEQ ID NO: 2805591 - RNA, 19 nt, Artificial Sequence
  Description of Artificial Sequence: Synthetic oligonucleotide
ucaccaauaugaauuuucu

SEQ ID NO: 2805592 - RNA, 19 nt, Artificial Sequence
  Description of Artificial Sequence: Synthetic oligonucleotide
cucacaugcacuguuagag

SEQ ID NO: 2805593 - RNA, 19 nt, Artificial Sequence
  Description of Artificial Sequence: Synthetic oligonucleotide
auguuuugaugcuuuauga

SEQ ID NO: 2805594 - RNA, 19 nt, Artificial Sequence
  Description of Artificial Sequence: Synthetic oligonucleotide
cauucauugcauucauagg

SEQ ID NO: 2805595 - RNA, 19 nt, Artificial Sequence
  Description of Artificial Sequence: Synthetic oligonucleotide
ugcuuuaugagguacuuuu

SEQ ID NO: 2805596 - RNA, 19 nt, Artificial Sequence
  Description of Artificial Sequence: Synthetic oligonucleotide
cauucauuacaaccguagg

SEQ ID NO: 2805597 - RNA, 19 nt, Artificial Sequence
  Description of Artificial Sequence: Synthetic oligonucleotide
auuacaaccguagggcuuc

SEQ ID NO: 2805598 - RNA, 19 nt, Artificial Sequence
  Description of Artificial Sequence: Synthetic oligonucleotide
cugaccaaaagcuguuccg

SEQ ID NO: 2805599 - RNA, 19 nt, Artificial Sequence
  Description of Artificial Sequence: Synthetic oligonucleotide
uacugaagauaccccacag

SEQ ID NO: 2805600 - RNA, 19 nt, Artificial Sequence
  Description of Artificial Sequence: Synthetic oligonucleotide
cucaccaauaugaauuuuc

SEQ ID NO: 2805601 - RNA, 19 nt, Artificial Sequence
  Description of Artificial Sequence: Synthetic oligonucleotide
guuagagaugaacucugag

SEQ ID NO: 2805602 - RNA, 19 nt, Artificial Sequence
  Description of Artificial Sequence: Synthetic oligonucleotide
uccagugugaauguuuuga

SEQ ID NO: 2805603 - RNA, 19 nt, Artificial Sequence
  Description of Artificial Sequence: Synthetic oligonucleotide
gaagauaccccacagaguu

SEQ ID NO: 2805604 - RNA, 19 nt, Artificial Sequence
  Description of Artificial Sequence: Synthetic oligonucleotide
auaagugacguucgcugag

SEQ ID NO: 2805605 - RNA, 19 nt, Artificial Sequence
  Description of Artificial Sequence: Synthetic oligonucleotide
acauucauuacaaccguag

SEQ ID NO: 2805606 - RNA, 19 nt, Artificial Sequence
  Description of Artificial Sequence: Synthetic oligonucleotide
accugaaugaauucucaca

SEQ ID NO: 2805607 - RNA, 19 nt, Artificial Sequence
  Description of Artificial Sequence: Synthetic oligonucleotide
aaagcuguuccgcauucau

SEQ ID NO: 2805608 - RNA, 19 nt, Artificial Sequence
  Description of Artificial Sequence: Synthetic oligonucleotide
ugcacuguuagagaugaac

SEQ ID NO: 2805609 - RNA, 19 nt, Artificial Sequence
  Description of Artificial Sequence: Synthetic oligonucleotide
acuguuagagaugaacucu

SEQ ID NO: 2805610 - RNA, 19 nt, Artificial Sequence
  Description of Artificial Sequence: Synthetic oligonucleotide
uggguauggauuuucuggu

SEQ ID NO: 2805611 - RNA, 19 nt, Artificial Sequence
  Description of Artificial Sequence: Synthetic oligonucleotide
gagaugaacucugagagaa

SEQ ID NO: 2805612 - RNA, 19 nt, Artificial Sequence
  Description of Artificial Sequence: Synthetic oligonucleotide
uucucacaugcacaauaag

SEQ ID NO: 2805613 - RNA, 19 nt, Artificial Sequence
  Description of Artificial Sequence: Synthetic oligonucleotide
cauacugaagauaccccac

SEQ ID NO: 2805614 - RNA, 19 nt, Artificial Sequence
  Description of Artificial Sequence: Synthetic oligonucleotide
ugaagauaccccacagagu

SEQ ID NO: 2805615 - RNA, 19 nt, Artificial Sequence
  Description of Artificial Sequence: Synthetic oligonucleotide
uuaccgguguguauucuca

SEQ ID NO: 2805616 - RNA, 19 nt, Artificial Sequence
  Description of Artificial Sequence: Synthetic oligonucleotide
ucaccugaaugaauucuca

SEQ ID NO: 2805617 - RNA, 19 nt, Artificial Sequence
  Description of Artificial Sequence: Synthetic oligonucleotide
uuacauaugaaggguuucu

SEQ ID NO: 2805618 - RNA, 19 nt, Artificial Sequence
  Description of Artificial Sequence: Synthetic oligonucleotide
ucauuacaaccguagggcu

SEQ ID NO: 2805619 - RNA, 19 nt, Artificial Sequence
  Description of Artificial Sequence: Synthetic oligonucleotide
uccucacaugcacuguuag

SEQ ID NO: 2805620 - RNA, 19 nt, Artificial Sequence
  Description of Artificial Sequence: Synthetic oligonucleotide
agcuguuccgcauucauua

SEQ ID NO: 2805621 - RNA, 19 nt, Artificial Sequence
  Description of Artificial Sequence: Synthetic oligonucleotide
aagugacguucgcugagag

SEQ ID NO: 2805622 - RNA, 19 nt, Artificial Sequence
  Description of Artificial Sequence: Synthetic oligonucleotide
uccgcauucauuacauuua

SEQ ID NO: 2805623 - RNA, 19 nt, Artificial Sequence
  Description of Artificial Sequence: Synthetic oligonucleotide
ugaugcuuuaugagguacu

SEQ ID NO: 2805624 - RNA, 19 nt, Artificial Sequence
  Description of Artificial Sequence: Synthetic oligonucleotide
cuguuagagaugaacucug

SEQ ID NO: 2805625 - RNA, 19 nt, Artificial Sequence
  Description of Artificial Sequence: Synthetic oligonucleotide
aaaugcagggccaggguug

SEQ ID NO: 2805626 - RNA, 19 nt, Artificial Sequence
  Description of Artificial Sequence: Synthetic oligonucleotide
uguuagagaugaacucuga

SEQ ID NO: 2805627 - RNA, 19 nt, Artificial Sequence
  Description of Artificial Sequence: Synthetic oligonucleotide
ugaccaaaagcuguuccgc

SEQ ID NO: 2805628 - RNA, 19 nt, Artificial Sequence
  Description of Artificial Sequence: Synthetic oligonucleotide
uuccgcauucauuacauuu

SEQ ID NO: 2805629 - RNA, 19 nt, Artificial Sequence
  Description of Artificial Sequence: Synthetic oligonucleotide
uugacuugccacugaaggu

SEQ ID NO: 2805630 - RNA, 19 nt, Artificial Sequence
  Description of Artificial Sequence: Synthetic oligonucleotide
uaauggguauggauuuucu

SEQ ID NO: 2805631 - RNA, 19 nt, Artificial Sequence
  Description of Artificial Sequence: Synthetic oligonucleotide
caauaugaauuuucucaug

SEQ ID NO: 2805632 - RNA, 19 nt, Artificial Sequence
  Description of Artificial Sequence: Synthetic oligonucleotide
uaucaccugaaugaauucu

SEQ ID NO: 2805633 - RNA, 19 nt, Artificial Sequence
  Description of Artificial Sequence: Synthetic oligonucleotide
guguauucucaaaugcagg

SEQ ID NO: 2805634 - RNA, 19 nt, Artificial Sequence
  Description of Artificial Sequence: Synthetic oligonucleotide
acaugcacaauaagugacg

SEQ ID NO: 2805635 - RNA, 19 nt, Artificial Sequence
  Description of Artificial Sequence: Synthetic oligonucleotide
gacguucgcugagagaagg

SEQ ID NO: 2805636 - RNA, 19 nt, Artificial Sequence
  Description of Artificial Sequence: Synthetic oligonucleotide
cagacauugcauucauaag

SEQ ID NO: 2805637 - RNA, 19 nt, Artificial Sequence
  Description of Artificial Sequence: Synthetic oligonucleotide
auuuucucaugcucaguga

SEQ ID NO: 2805638 - RNA, 19 nt, Artificial Sequence
  Description of Artificial Sequence: Synthetic oligonucleotide
cacuguuagagaugaacuc

SEQ ID NO: 2805639 - RNA, 19 nt, Artificial Sequence
  Description of Artificial Sequence: Synthetic oligonucleotide
ucaaaugcagggccagggu

SEQ ID NO: 2805640 - RNA, 19 nt, Artificial Sequence
  Description of Artificial Sequence: Synthetic oligonucleotide
aucaccugaaugaauucuc

SEQ ID NO: 2805641 - RNA, 19 nt, Artificial Sequence
  Description of Artificial Sequence: Synthetic oligonucleotide
auacugaagauaccccaca

SEQ ID NO: 2805642 - RNA, 19 nt, Artificial Sequence
  Description of Artificial Sequence: Synthetic oligonucleotide
cucaaaugcagggccaggg

SEQ ID NO: 2805643 - RNA, 19 nt, Artificial Sequence
  Description of Artificial Sequence: Synthetic oligonucleotide
acugaagauaccccacaga

SEQ ID NO: 2805644 - RNA, 19 nt, Artificial Sequence
  Description of Artificial Sequence: Synthetic oligonucleotide
uuuaccgguguguauucuc

SEQ ID NO: 2805645 - RNA, 19 nt, Artificial Sequence
  Description of Artificial Sequence: Synthetic oligonucleotide
uuaucaccugaaugaauuc

SEQ ID NO: 2805646 - RNA, 19 nt, Artificial Sequence
  Description of Artificial Sequence: Synthetic oligonucleotide
ucacaugcacuguuagaga

SEQ ID NO: 2805647 - RNA, 19 nt, Artificial Sequence
  Description of Artificial Sequence: Synthetic oligonucleotide
uuaauggguauggauuuuc

SEQ ID NO: 2805648 - RNA, 19 nt, Artificial Sequence
  Description of Artificial Sequence: Synthetic oligonucleotide
gugacguucgcugagagaa

SEQ ID NO: 2805649 - RNA, 19 nt, Artificial Sequence
  Description of Artificial Sequence: Synthetic oligonucleotide
guauucucaaaugcagggc

SEQ ID NO: 2805650 - RNA, 19 nt, Artificial Sequence
  Description of Artificial Sequence: Synthetic oligonucleotide
cacaauaagugacguucgc

SEQ ID NO: 2805651 - RNA, 19 nt, Artificial Sequence
  Description of Artificial Sequence: Synthetic oligonucleotide
acaauaagugacguucgcu

SEQ ID NO: 2805652 - RNA, 19 nt, Artificial Sequence
  Description of Artificial Sequence: Synthetic oligonucleotide
agagaugaacucugagaga

SEQ ID NO: 2805653 - RNA, 19 nt, Artificial Sequence
  Description of Artificial Sequence: Synthetic oligonucleotide
uugaugcuuuaugagguac

SEQ ID NO: 2805654 - RNA, 19 nt, Artificial Sequence
  Description of Artificial Sequence: Synthetic oligonucleotide
uuucugaccaaaagcuguu

SEQ ID NO: 2805655 - RNA, 19 nt, Artificial Sequence
  Description of Artificial Sequence: Synthetic oligonucleotide
uucucaaaugcagggccag

SEQ ID NO: 2805656 - RNA, 19 nt, Artificial Sequence
  Description of Artificial Sequence: Synthetic oligonucleotide
agggccaggguugagaacu

SEQ ID NO: 2805657 - RNA, 19 nt, Artificial Sequence
  Description of Artificial Sequence: Synthetic oligonucleotide
ugacuugccacugaagguu

SEQ ID NO: 2805658 - RNA, 19 nt, Artificial Sequence
  Description of Artificial Sequence: Synthetic oligonucleotide
uccuuacauaugaaggguu

SEQ ID NO: 2805659 - RNA, 19 nt, Artificial Sequence
  Description of Artificial Sequence: Synthetic oligonucleotide
uaaggcuuaucaccugaau

SEQ ID NO: 2805660 - RNA, 19 nt, Artificial Sequence
  Description of Artificial Sequence: Synthetic oligonucleotide
uucgcugagagaaggcuuu

SEQ ID NO: 2805661 - RNA, 19 nt, Artificial Sequence
  Description of Artificial Sequence: Synthetic oligonucleotide
cuuaucaccugaaugaauu

SEQ ID NO: 2805662 - RNA, 19 nt, Artificial Sequence
  Description of Artificial Sequence: Synthetic oligonucleotide
uuugaugcuuuaugaggua

SEQ ID NO: 2805663 - RNA, 19 nt, Artificial Sequence
  Description of Artificial Sequence: Synthetic oligonucleotide
cuuacauaugaaggguuuc

SEQ ID NO: 2805664 - RNA, 19 nt, Artificial Sequence
  Description of Artificial Sequence: Synthetic oligonucleotide
caugcacuguuagagauga

SEQ ID NO: 2805665 - RNA, 19 nt, Artificial Sequence
  Description of Artificial Sequence: Synthetic oligonucleotide
gaaugaauucucacaugca

SEQ ID NO: 2805666 - RNA, 19 nt, Artificial Sequence
  Description of Artificial Sequence: Synthetic oligonucleotide
uacauaugaaggguuucuc

SEQ ID NO: 2805667 - RNA, 19 nt, Artificial Sequence
  Description of Artificial Sequence: Synthetic oligonucleotide
caccaauaugaauuuucuc

SEQ ID NO: 2805668 - RNA, 19 nt, Artificial Sequence
  Description of Artificial Sequence: Synthetic oligonucleotide
ugaauguuuugaugcuuua

SEQ ID NO: 2805669 - RNA, 19 nt, Artificial Sequence
  Description of Artificial Sequence: Synthetic oligonucleotide
ucucaaaugcagggccagg

SEQ ID NO: 2805670 - RNA, 19 nt, Artificial Sequence
  Description of Artificial Sequence: Synthetic oligonucleotide
aggguugagaacugagaaa

SEQ ID NO: 2805671 - RNA, 19 nt, Artificial Sequence
  Description of Artificial Sequence: Synthetic oligonucleotide
gaccaaaagcuguuccgca

SEQ ID NO: 2805672 - RNA, 19 nt, Artificial Sequence
  Description of Artificial Sequence: Synthetic oligonucleotide
caccugaaugaauucucac

SEQ ID NO: 2805673 - RNA, 19 nt, Artificial Sequence
  Description of Artificial Sequence: Synthetic oligonucleotide
caaaagcuguuccgcauuc

SEQ ID NO: 2805674 - RNA, 19 nt, Artificial Sequence
  Description of Artificial Sequence: Synthetic oligonucleotide
aaaagcuguuccgcauuca

SEQ ID NO: 2805675 - RNA, 19 nt, Artificial Sequence
  Description of Artificial Sequence: Synthetic oligonucleotide
ugacguucgcugagagaag

SEQ ID NO: 2805676 - RNA, 19 nt, Artificial Sequence
  Description of Artificial Sequence: Synthetic oligonucleotide
guguguauucucaaaugca

SEQ ID NO: 2805677 - RNA, 19 nt, Artificial Sequence
  Description of Artificial Sequence: Synthetic oligonucleotide
aacucugagagaaggcuuu

SEQ ID NO: 2805678 - RNA, 19 nt, Artificial Sequence
  Description of Artificial Sequence: Synthetic oligonucleotide
ugugaauguuuugaugcuu

SEQ ID NO: 2805679 - RNA, 19 nt, Artificial Sequence
  Description of Artificial Sequence: Synthetic oligonucleotide
uucccacagacauugcauu

SEQ ID NO: 2805680 - RNA, 19 nt, Artificial Sequence
  Description of Artificial Sequence: Synthetic oligonucleotide
uaagugacguucgcugaga

SEQ ID NO: 2805681 - RNA, 19 nt, Artificial Sequence
  Description of Artificial Sequence: Synthetic oligonucleotide
caggguugagaacugagaa

SEQ ID NO: 2805682 - RNA, 19 nt, Artificial Sequence
  Description of Artificial Sequence: Synthetic oligonucleotide
ucccacagacauugcauuc

SEQ ID NO: 2805683 - RNA, 19 nt, Artificial Sequence
  Description of Artificial Sequence: Synthetic oligonucleotide
aaugcagggccaggguuga

SEQ ID NO: 2805684 - RNA, 19 nt, Artificial Sequence
  Description of Artificial Sequence: Synthetic oligonucleotide
ggguugagaacugagaaaa

SEQ ID NO: 2805685 - RNA, 19 nt, Artificial Sequence
  Description of Artificial Sequence: Synthetic oligonucleotide
agauaccccacagaguuuu

SEQ ID NO: 2805686 - RNA, 19 nt, Artificial Sequence
  Description of Artificial Sequence: Synthetic oligonucleotide
guuugacuugccacugaag

SEQ ID NO: 2805687 - RNA, 19 nt, Artificial Sequence
  Description of Artificial Sequence: Synthetic oligonucleotide
agugacguucgcugagaga

SEQ ID NO: 2805688 - RNA, 19 nt, Artificial Sequence
  Description of Artificial Sequence: Synthetic oligonucleotide
uccccauacugaagauacc

SEQ ID NO: 2805689 - RNA, 19 nt, Artificial Sequence
  Description of Artificial Sequence: Synthetic oligonucleotide
uuuaauggguauggauuuu

SEQ ID NO: 2805690 - RNA, 19 nt, Artificial Sequence
  Description of Artificial Sequence: Synthetic oligonucleotide
auucucacaugcacaauaa

SEQ ID NO: 2805691 - RNA, 19 nt, Artificial Sequence
  Description of Artificial Sequence: Synthetic oligonucleotide
gcacaauaagugacguucg

SEQ ID NO: 2805692 - RNA, 19 nt, Artificial Sequence
  Description of Artificial Sequence: Synthetic oligonucleotide
uuuuaccgguguguauucu

SEQ ID NO: 2805693 - RNA, 19 nt, Artificial Sequence
  Description of Artificial Sequence: Synthetic oligonucleotide
auucucaaaugcagggcca

SEQ ID NO: 2805694 - RNA, 19 nt, Artificial Sequence
  Description of Artificial Sequence: Synthetic oligonucleotide
cucugagagaaggcuuucc

SEQ ID NO: 2805695 - RNA, 19 nt, Artificial Sequence
  Description of Artificial Sequence: Synthetic oligonucleotide
acguucgcugagagaaggc

SEQ ID NO: 2805696 - RNA, 19 nt, Artificial Sequence
  Description of Artificial Sequence: Synthetic oligonucleotide
cccauacugaagauacccc

SEQ ID NO: 2805697 - RNA, 19 nt, Artificial Sequence
  Description of Artificial Sequence: Synthetic oligonucleotide
ccccauacugaagauaccc

SEQ ID NO: 2805698 - RNA, 19 nt, Artificial Sequence
  Description of Artificial Sequence: Synthetic oligonucleotide
ugcagggccaggguugaga

SEQ ID NO: 2805699 - RNA, 19 nt, Artificial Sequence
  Description of Artificial Sequence: Synthetic oligonucleotide
acaugcacuguuagagaug

SEQ ID NO: 2805700 - RNA, 19 nt, Artificial Sequence
  Description of Artificial Sequence: Synthetic oligonucleotide
aagcuuucccacacucacu

SEQ ID NO: 2805701 - RNA, 19 nt, Artificial Sequence
  Description of Artificial Sequence: Synthetic oligonucleotide
acuuccccauacugaagau

SEQ ID NO: 2805702 - RNA, 19 nt, Artificial Sequence
  Description of Artificial Sequence: Synthetic oligonucleotide
accgguguguauucucaaa

SEQ ID NO: 2805703 - RNA, 19 nt, Artificial Sequence
  Description of Artificial Sequence: Synthetic oligonucleotide
agguuugacuugccacuga

SEQ ID NO: 2805704 - RNA, 19 nt, Artificial Sequence
  Description of Artificial Sequence: Synthetic oligonucleotide
ccauacugaagauacccca

SEQ ID NO: 2805705 - RNA, 19 nt, Artificial Sequence
  Description of Artificial Sequence: Synthetic oligonucleotide
cuguuccgcauucauuaca

SEQ ID NO: 2805706 - RNA, 19 nt, Artificial Sequence
  Description of Artificial Sequence: Synthetic oligonucleotide
uucugaccaaaagcuguuc

SEQ ID NO: 2805707 - RNA, 19 nt, Artificial Sequence
  Description of Artificial Sequence: Synthetic oligonucleotide
ggguauggauuuucuggug

SEQ ID NO: 2805708 - RNA, 19 nt, Artificial Sequence
  Description of Artificial Sequence: Synthetic oligonucleotide
gaauguuuugaugcuuuau

SEQ ID NO: 2805709 - RNA, 19 nt, Artificial Sequence
  Description of Artificial Sequence: Synthetic oligonucleotide
cacaugcacuguuagagau

SEQ ID NO: 2805710 - RNA, 19 nt, Artificial Sequence
  Description of Artificial Sequence: Synthetic oligonucleotide
gugugaauguuuugaugcu

SEQ ID NO: 2805711 - RNA, 19 nt, Artificial Sequence
  Description of Artificial Sequence: Synthetic oligonucleotide
augcacaauaagugacguu

SEQ ID NO: 2805712 - RNA, 19 nt, Artificial Sequence
  Description of Artificial Sequence: Synthetic oligonucleotide
gguuugacuugccacugaa

SEQ ID NO: 2805713 - RNA, 19 nt, Artificial Sequence
  Description of Artificial Sequence: Synthetic oligonucleotide
auaaggcuuaucaccugaa

SEQ ID NO: 2805714 - RNA, 19 nt, Artificial Sequence
  Description of Artificial Sequence: Synthetic oligonucleotide
aagcuguuccgcauucauu

SEQ ID NO: 2805715 - RNA, 19 nt, Artificial Sequence
  Description of Artificial Sequence: Synthetic oligonucleotide
ucucaccaauaugaauuuu

SEQ ID NO: 2805716 - RNA, 19 nt, Artificial Sequence
  Description of Artificial Sequence: Synthetic oligonucleotide
gaugcuuuaugagguacuu

SEQ ID NO: 2805717 - RNA, 19 nt, Artificial Sequence
  Description of Artificial Sequence: Synthetic oligonucleotide
ccacacuccuuacauauga

SEQ ID NO: 2805718 - RNA, 19 nt, Artificial Sequence
  Description of Artificial Sequence: Synthetic oligonucleotide
cacauucauuacaaccgua

SEQ ID NO: 2805719 - RNA, 19 nt, Artificial Sequence
  Description of Artificial Sequence: Synthetic oligonucleotide
aagauaccccacagaguuu

SEQ ID NO: 2805720 - RNA, 19 nt, Artificial Sequence
  Description of Artificial Sequence: Synthetic oligonucleotide
caugcacaauaagugacgu

SEQ ID NO: 2805721 - RNA, 19 nt, Artificial Sequence
  Description of Artificial Sequence: Synthetic oligonucleotide
cuccuuacauaugaagggu

SEQ ID NO: 2805722 - RNA, 19 nt, Artificial Sequence
  Description of Artificial Sequence: Synthetic oligonucleotide
cauuacaaccguagggcuu

SEQ ID NO: 2805723 - RNA, 19 nt, Artificial Sequence
  Description of Artificial Sequence: Synthetic oligonucleotide
gcacuguuagagaugaacu

SEQ ID NO: 2805724 - RNA, 19 nt, Artificial Sequence
  Description of Artificial Sequence: Synthetic oligonucleotide
gccaggguugagaacugag

SEQ ID NO: 2805725 - RNA, 19 nt, Artificial Sequence
  Description of Artificial Sequence: Synthetic oligonucleotide
gcuguuccgcauucauuac

SEQ ID NO: 2805726 - RNA, 19 nt, Artificial Sequence
  Description of Artificial Sequence: Synthetic oligonucleotide
gugaauguuuugaugcuuu

SEQ ID NO: 2805727 - RNA, 19 nt, Artificial Sequence
  Description of Artificial Sequence: Synthetic oligonucleotide
cgguguguauucucaaaug

SEQ ID NO: 2805728 - RNA, 19 nt, Artificial Sequence
  Description of Artificial Sequence: Synthetic oligonucleotide
augcuuuaugagguacuuu

SEQ ID NO: 2805729 - RNA, 19 nt, Artificial Sequence
  Description of Artificial Sequence: Synthetic oligonucleotide
ccaggguugagaacugaga

SEQ ID NO: 2805730 - RNA, 19 nt, Artificial Sequence
  Description of Artificial Sequence: Synthetic oligonucleotide
caaaugcagggccaggguu

SEQ ID NO: 2805731 - RNA, 19 nt, Artificial Sequence
  Description of Artificial Sequence: Synthetic oligonucleotide
cuuccccauacugaagaua

SEQ ID NO: 2805732 - RNA, 19 nt, Artificial Sequence
  Description of Artificial Sequence: Synthetic oligonucleotide
uuacaaccguagggcuucu

SEQ ID NO: 2805733 - RNA, 19 nt, Artificial Sequence
  Description of Artificial Sequence: Synthetic oligonucleotide
cagggccaggguugagaac

SEQ ID NO: 2805734 - RNA, 19 nt, Artificial Sequence
  Description of Artificial Sequence: Synthetic oligonucleotide
ggcuuaucaccugaaugaa

SEQ ID NO: 2805735 - RNA, 19 nt, Artificial Sequence
  Description of Artificial Sequence: Synthetic oligonucleotide
cuccucacaugcacuguua

SEQ ID NO: 2805736 - RNA, 19 nt, Artificial Sequence
  Description of Artificial Sequence: Synthetic oligonucleotide
ucgcugagagaaggcuuuc

SEQ ID NO: 2805737 - RNA, 19 nt, Artificial Sequence
  Description of Artificial Sequence: Synthetic oligonucleotide
gaauucucacaugcacaau

SEQ ID NO: 2805738 - RNA, 19 nt, Artificial Sequence
  Description of Artificial Sequence: Synthetic oligonucleotide
uacaaccguagggcuucuc

SEQ ID NO: 2805739 - RNA, 19 nt, Artificial Sequence
  Description of Artificial Sequence: Synthetic oligonucleotide
ccucacaugcacuguuaga

SEQ ID NO: 2805740 - RNA, 19 nt, Artificial Sequence
  Description of Artificial Sequence: Synthetic oligonucleotide
guucgcugagagaaggcuu

SEQ ID NO: 2805741 - RNA, 19 nt, Artificial Sequence
  Description of Artificial Sequence: Synthetic oligonucleotide
cccacagacauugcauuca

SEQ ID NO: 2805742 - RNA, 19 nt, Artificial Sequence
  Description of Artificial Sequence: Synthetic oligonucleotide
ccgcauucauuacauuuaa

SEQ ID NO: 2805743 - RNA, 19 nt, Artificial Sequence
  Description of Artificial Sequence: Synthetic oligonucleotide
gacuugccacugaagguuu

SEQ ID NO: 2805744 - RNA, 19 nt, Artificial Sequence
  Description of Artificial Sequence: Synthetic oligonucleotide
ccacauucauuacaaccgu

SEQ ID NO: 2805745 - RNA, 19 nt, Artificial Sequence
  Description of Artificial Sequence: Synthetic oligonucleotide
acuugccacugaagguuuu

SEQ ID NO: 2805746 - RNA, 19 nt, Artificial Sequence
  Description of Artificial Sequence: Synthetic oligonucleotide
augcagggccaggguugag

SEQ ID NO: 2805747 - RNA, 19 nt, Artificial Sequence
  Description of Artificial Sequence: Synthetic oligonucleotide
guuccgcauucauuacauu

SEQ ID NO: 2805748 - RNA, 19 nt, Artificial Sequence
  Description of Artificial Sequence: Synthetic oligonucleotide
cgcugagagaaggcuuucc

SEQ ID NO: 2805749 - RNA, 19 nt, Artificial Sequence
  Description of Artificial Sequence: Synthetic oligonucleotide
ccgguguguauucucaaau

SEQ ID NO: 2805750 - RNA, 19 nt, Artificial Sequence
  Description of Artificial Sequence: Synthetic oligonucleotide
gcuuaucaccugaaugaau

SEQ ID NO: 2805751 - RNA, 19 nt, Artificial Sequence
  Description of Artificial Sequence: Synthetic oligonucleotide
gcuccucacaugcacuguu

SEQ ID NO: 2805752 - RNA, 19 nt, Artificial Sequence
  Description of Artificial Sequence: Synthetic oligonucleotide
gggccaggguugagaacug

SEQ ID NO: 2805753 - RNA, 19 nt, Artificial Sequence
  Description of Artificial Sequence: Synthetic oligonucleotide
ccaaaagcuguuccgcauu

SEQ ID NO: 2805754 - RNA, 19 nt, Artificial Sequence
  Description of Artificial Sequence: Synthetic oligonucleotide
cgguguggcuccucacaug

SEQ ID NO: 2805755 - RNA, 19 nt, Artificial Sequence
  Description of Artificial Sequence: Synthetic oligonucleotide
ggccaggguugagaacuga

SEQ ID NO: 2805756 - RNA, 19 nt, Artificial Sequence
  Description of Artificial Sequence: Synthetic oligonucleotide
cguucgcugagagaaggcu

SEQ ID NO: 2805757 - RNA, 19 nt, Artificial Sequence
  Description of Artificial Sequence: Synthetic oligonucleotide
ccgguguggcuccucacau

SEQ ID NO: 2805758 - RNA, 19 nt, Artificial Sequence
  Description of Artificial Sequence: Synthetic oligonucleotide
aaagccaacacccaacucc

SEQ ID NO: 2805759 - RNA, 19 nt, Artificial Sequence
  Description of Artificial Sequence: Synthetic oligonucleotide
aagauuugaguccagagag

SEQ ID NO: 2805760 - RNA, 19 nt, Artificial Sequence
  Description of Artificial Sequence: Synthetic oligonucleotide
uuuccuagaagccacagag

SEQ ID NO: 2805761 - RNA, 19 nt, Artificial Sequence
  Description of Artificial Sequence: Synthetic oligonucleotide
ugaguuaggggauauagcc

SEQ ID NO: 2805762 - RNA, 19 nt, Artificial Sequence
  Description of Artificial Sequence: Synthetic oligonucleotide
uucacaggugccaagaacc

SEQ ID NO: 2805763 - RNA, 19 nt, Artificial Sequence
  Description of Artificial Sequence: Synthetic oligonucleotide
ucuuccuugagaaggaacc

SEQ ID NO: 2805764 - RNA, 19 nt, Artificial Sequence
  Description of Artificial Sequence: Synthetic oligonucleotide
aacacccaacuccacaggc

SEQ ID NO: 2805765 - RNA, 19 nt, Artificial Sequence
  Description of Artificial Sequence: Synthetic oligonucleotide
uuugaguccagagagagca

SEQ ID NO: 2805766 - RNA, 19 nt, Artificial Sequence
  Description of Artificial Sequence: Synthetic oligonucleotide
aaaugauugugucuugaug

SEQ ID NO: 2805767 - RNA, 19 nt, Artificial Sequence
  Description of Artificial Sequence: Synthetic oligonucleotide
acgugaaaucaucaguucc

SEQ ID NO: 2805768 - RNA, 19 nt, Artificial Sequence
  Description of Artificial Sequence: Synthetic oligonucleotide
aaucaucaguuccagaaga

SEQ ID NO: 2805769 - RNA, 19 nt, Artificial Sequence
  Description of Artificial Sequence: Synthetic oligonucleotide
gaaaucaucaguuccagaa

SEQ ID NO: 2805770 - RNA, 19 nt, Artificial Sequence
  Description of Artificial Sequence: Synthetic oligonucleotide
aauuuacuugucuuccuug

SEQ ID NO: 2805771 - RNA, 19 nt, Artificial Sequence
  Description of Artificial Sequence: Synthetic oligonucleotide
agagagagcaauuuacuug

SEQ ID NO: 2805772 - RNA, 19 nt, Artificial Sequence
  Description of Artificial Sequence: Synthetic oligonucleotide
uccuagaagccacagagca

SEQ ID NO: 2805773 - RNA, 19 nt, Artificial Sequence
  Description of Artificial Sequence: Synthetic oligonucleotide
cuugucuuccuugagaagg

SEQ ID NO: 2805774 - RNA, 19 nt, Artificial Sequence
  Description of Artificial Sequence: Synthetic oligonucleotide
agugcaaccaguucacagg

SEQ ID NO: 2805775 - RNA, 19 nt, Artificial Sequence
  Description of Artificial Sequence: Synthetic oligonucleotide
caggagaaagccaacaccc

SEQ ID NO: 2805776 - RNA, 19 nt, Artificial Sequence
  Description of Artificial Sequence: Synthetic oligonucleotide
agcaauuuacuugucuucc

SEQ ID NO: 2805777 - RNA, 19 nt, Artificial Sequence
  Description of Artificial Sequence: Synthetic oligonucleotide
aaggaaccaggagaaagcc

SEQ ID NO: 2805778 - RNA, 19 nt, Artificial Sequence
  Description of Artificial Sequence: Synthetic oligonucleotide
gaccuaaggguucaugugg

SEQ ID NO: 2805779 - RNA, 19 nt, Artificial Sequence
  Description of Artificial Sequence: Synthetic oligonucleotide
uguccuaacucacaggcac

SEQ ID NO: 2805780 - RNA, 19 nt, Artificial Sequence
  Description of Artificial Sequence: Synthetic oligonucleotide
aauucuuuccuagaagcca

SEQ ID NO: 2805781 - RNA, 19 nt, Artificial Sequence
  Description of Artificial Sequence: Synthetic oligonucleotide
gauuugaguccagagagag

SEQ ID NO: 2805782 - RNA, 19 nt, Artificial Sequence
  Description of Artificial Sequence: Synthetic oligonucleotide
uguacuuggaguccacccc

SEQ ID NO: 2805783 - RNA, 19 nt, Artificial Sequence
  Description of Artificial Sequence: Synthetic oligonucleotide
uccuugagaaggaaccagg

SEQ ID NO: 2805784 - RNA, 19 nt, Artificial Sequence
  Description of Artificial Sequence: Synthetic oligonucleotide
uccagagagagcaauuuac

SEQ ID NO: 2805785 - RNA, 19 nt, Artificial Sequence
  Description of Artificial Sequence: Synthetic oligonucleotide
gaagauuugaguccagaga

SEQ ID NO: 2805786 - RNA, 19 nt, Artificial Sequence
  Description of Artificial Sequence: Synthetic oligonucleotide
aacucacaggcacagaaaa

SEQ ID NO: 2805787 - RNA, 19 nt, Artificial Sequence
  Description of Artificial Sequence: Synthetic oligonucleotide
ucaugugguacacagguua

SEQ ID NO: 2805788 - RNA, 19 nt, Artificial Sequence
  Description of Artificial Sequence: Synthetic oligonucleotide
aguuccagaagauuugagu

SEQ ID NO: 2805789 - RNA, 19 nt, Artificial Sequence
  Description of Artificial Sequence: Synthetic oligonucleotide
aguccaaugccuguaggcc

SEQ ID NO: 2805790 - RNA, 19 nt, Artificial Sequence
  Description of Artificial Sequence: Synthetic oligonucleotide
guuccagaagauuugaguc

SEQ ID NO: 2805791 - RNA, 19 nt, Artificial Sequence
  Description of Artificial Sequence: Synthetic oligonucleotide
uuacuugucuuccuugaga

SEQ ID NO: 2805792 - RNA, 19 nt, Artificial Sequence
  Description of Artificial Sequence: Synthetic oligonucleotide
cuugaguuaggggauauag

SEQ ID NO: 2805793 - RNA, 19 nt, Artificial Sequence
  Description of Artificial Sequence: Synthetic oligonucleotide
aaaaugauugugucuugau

SEQ ID NO: 2805794 - RNA, 19 nt, Artificial Sequence
  Description of Artificial Sequence: Synthetic oligonucleotide
uuuacuugucuuccuugag

SEQ ID NO: 2805795 - RNA, 19 nt, Artificial Sequence
  Description of Artificial Sequence: Synthetic oligonucleotide
uuccagaagauuugagucc

SEQ ID NO: 2805796 - RNA, 19 nt, Artificial Sequence
  Description of Artificial Sequence: Synthetic oligonucleotide
uugguguccuaacucacag

SEQ ID NO: 2805797 - RNA, 19 nt, Artificial Sequence
  Description of Artificial Sequence: Synthetic oligonucleotide
ugccccuugaguuagggga

SEQ ID NO: 2805798 - RNA, 19 nt, Artificial Sequence
  Description of Artificial Sequence: Synthetic oligonucleotide
uugucugcacuguacuugg

SEQ ID NO: 2805799 - RNA, 19 nt, Artificial Sequence
  Description of Artificial Sequence: Synthetic oligonucleotide
uugaccuaaggguucaugu

SEQ ID NO: 2805800 - RNA, 19 nt, Artificial Sequence
  Description of Artificial Sequence: Synthetic oligonucleotide
uuuuccuagagcccgccca

SEQ ID NO: 2805801 - RNA, 19 nt, Artificial Sequence
  Description of Artificial Sequence: Synthetic oligonucleotide
agaaggaaccaggagaaag

SEQ ID NO: 2805802 - RNA, 19 nt, Artificial Sequence
  Description of Artificial Sequence: Synthetic oligonucleotide
uccucuucaggacaucuug

SEQ ID NO: 2805803 - RNA, 19 nt, Artificial Sequence
  Description of Artificial Sequence: Synthetic oligonucleotide
uugaguuaggggauauagc

SEQ ID NO: 2805804 - RNA, 19 nt, Artificial Sequence
  Description of Artificial Sequence: Synthetic oligonucleotide
agagaugaccuuauucccc

SEQ ID NO: 2805805 - RNA, 19 nt, Artificial Sequence
  Description of Artificial Sequence: Synthetic oligonucleotide
caggcacagaaaaugauug

SEQ ID NO: 2805806 - RNA, 19 nt, Artificial Sequence
  Description of Artificial Sequence: Synthetic oligonucleotide
uccaccagaucgcugaugu

SEQ ID NO: 2805807 - RNA, 19 nt, Artificial Sequence
  Description of Artificial Sequence: Synthetic oligonucleotide
acagaaaaugauugugucu

SEQ ID NO: 2805808 - RNA, 19 nt, Artificial Sequence
  Description of Artificial Sequence: Synthetic oligonucleotide
ccagagaugaccuuauucc

SEQ ID NO: 2805809 - RNA, 19 nt, Artificial Sequence
  Description of Artificial Sequence: Synthetic oligonucleotide
aggcacaaaguucuggaag

SEQ ID NO: 2805810 - RNA, 19 nt, Artificial Sequence
  Description of Artificial Sequence: Synthetic oligonucleotide
uguaggcccagcugcaggg

SEQ ID NO: 2805811 - RNA, 19 nt, Artificial Sequence
  Description of Artificial Sequence: Synthetic oligonucleotide
accaggagaaagccaacac

SEQ ID NO: 2805812 - RNA, 19 nt, Artificial Sequence
  Description of Artificial Sequence: Synthetic oligonucleotide
auuuacuugucuuccuuga

SEQ ID NO: 2805813 - RNA, 19 nt, Artificial Sequence
  Description of Artificial Sequence: Synthetic oligonucleotide
ugguacacagguuagucuc

SEQ ID NO: 2805814 - RNA, 19 nt, Artificial Sequence
  Description of Artificial Sequence: Synthetic oligonucleotide
aagggguaggcugacaaug

SEQ ID NO: 2805815 - RNA, 19 nt, Artificial Sequence
  Description of Artificial Sequence: Synthetic oligonucleotide
ggcacaaaguucuggaagg

SEQ ID NO: 2805816 - RNA, 19 nt, Artificial Sequence
  Description of Artificial Sequence: Synthetic oligonucleotide
uacuugucuuccuugagaa

SEQ ID NO: 2805817 - RNA, 19 nt, Artificial Sequence
  Description of Artificial Sequence: Synthetic oligonucleotide
gagugcaaccaguucacag

SEQ ID NO: 2805818 - RNA, 19 nt, Artificial Sequence
  Description of Artificial Sequence: Synthetic oligonucleotide
ucuucaggacaucuuggug

SEQ ID NO: 2805819 - RNA, 19 nt, Artificial Sequence
  Description of Artificial Sequence: Synthetic oligonucleotide
aaaguucuggaagggguag

SEQ ID NO: 2805820 - RNA, 19 nt, Artificial Sequence
  Description of Artificial Sequence: Synthetic oligonucleotide
uaaggguucaugugguaca

SEQ ID NO: 2805821 - RNA, 19 nt, Artificial Sequence
  Description of Artificial Sequence: Synthetic oligonucleotide
gaaggaaccaggagaaagc

SEQ ID NO: 2805822 - RNA, 19 nt, Artificial Sequence
  Description of Artificial Sequence: Synthetic oligonucleotide
aaugccuguaggcccagcu

SEQ ID NO: 2805823 - RNA, 19 nt, Artificial Sequence
  Description of Artificial Sequence: Synthetic oligonucleotide
augggugccaccucuugac

SEQ ID NO: 2805824 - RNA, 19 nt, Artificial Sequence
  Description of Artificial Sequence: Synthetic oligonucleotide
gguguccuaacucacaggc

SEQ ID NO: 2805825 - RNA, 19 nt, Artificial Sequence
  Description of Artificial Sequence: Synthetic oligonucleotide
ucacaggcacagaaaauga

SEQ ID NO: 2805826 - RNA, 19 nt, Artificial Sequence
  Description of Artificial Sequence: Synthetic oligonucleotide
auucuuuccuagaagccac

SEQ ID NO: 2805827 - RNA, 19 nt, Artificial Sequence
  Description of Artificial Sequence: Synthetic oligonucleotide
agguuagucuccuugucug

SEQ ID NO: 2805828 - RNA, 19 nt, Artificial Sequence
  Description of Artificial Sequence: Synthetic oligonucleotide
agggcaaugccucacccag

SEQ ID NO: 2805829 - RNA, 19 nt, Artificial Sequence
  Description of Artificial Sequence: Synthetic oligonucleotide
cagagaugaccuuauuccc

SEQ ID NO: 2805830 - RNA, 19 nt, Artificial Sequence
  Description of Artificial Sequence: Synthetic oligonucleotide
gaguccaaugccuguaggc

SEQ ID NO: 2805831 - RNA, 19 nt, Artificial Sequence
  Description of Artificial Sequence: Synthetic oligonucleotide
cacagaaaaugauuguguc

SEQ ID NO: 2805832 - RNA, 19 nt, Artificial Sequence
  Description of Artificial Sequence: Synthetic oligonucleotide
ucugcacuguacuuggagu

SEQ ID NO: 2805833 - RNA, 19 nt, Artificial Sequence
  Description of Artificial Sequence: Synthetic oligonucleotide
ugaccuaaggguucaugug

SEQ ID NO: 2805834 - RNA, 19 nt, Artificial Sequence
  Description of Artificial Sequence: Synthetic oligonucleotide
cuugagaaggaaccaggag

SEQ ID NO: 2805835 - RNA, 19 nt, Artificial Sequence
  Description of Artificial Sequence: Synthetic oligonucleotide
ucuggaagggguaggcuga

SEQ ID NO: 2805836 - RNA, 19 nt, Artificial Sequence
  Description of Artificial Sequence: Synthetic oligonucleotide
caccagaucgcugaugugg

SEQ ID NO: 2805837 - RNA, 19 nt, Artificial Sequence
  Description of Artificial Sequence: Synthetic oligonucleotide
aguuaggggauauagccuu

SEQ ID NO: 2805838 - RNA, 19 nt, Artificial Sequence
  Description of Artificial Sequence: Synthetic oligonucleotide
uuuccuagagcccgcccag

SEQ ID NO: 2805839 - RNA, 19 nt, Artificial Sequence
  Description of Artificial Sequence: Synthetic oligonucleotide
agaaagccaacacccaacu

SEQ ID NO: 2805840 - RNA, 19 nt, Artificial Sequence
  Description of Artificial Sequence: Synthetic oligonucleotide
cuagaagccacagagcauc

SEQ ID NO: 2805841 - RNA, 19 nt, Artificial Sequence
  Description of Artificial Sequence: Synthetic oligonucleotide
aucuugguguccuaacuca

SEQ ID NO: 2805842 - RNA, 19 nt, Artificial Sequence
  Description of Artificial Sequence: Synthetic oligonucleotide
aaggguucaugugguacac

SEQ ID NO: 2805843 - RNA, 19 nt, Artificial Sequence
  Description of Artificial Sequence: Synthetic oligonucleotide
gagagagcaauuuacuugu

SEQ ID NO: 2805844 - RNA, 19 nt, Artificial Sequence
  Description of Artificial Sequence: Synthetic oligonucleotide
uugguugggagcugccacg

SEQ ID NO: 2805845 - RNA, 19 nt, Artificial Sequence
  Description of Artificial Sequence: Synthetic oligonucleotide
cuguacuuggaguccaccc

SEQ ID NO: 2805846 - RNA, 19 nt, Artificial Sequence
  Description of Artificial Sequence: Synthetic oligonucleotide
acacagguuagucuccuug

SEQ ID NO: 2805847 - RNA, 19 nt, Artificial Sequence
  Description of Artificial Sequence: Synthetic oligonucleotide
aagccacagagcaucugcc

SEQ ID NO: 2805848 - RNA, 19 nt, Artificial Sequence
  Description of Artificial Sequence: Synthetic oligonucleotide
acaggcacaaaguucugga

SEQ ID NO: 2805849 - RNA, 19 nt, Artificial Sequence
  Description of Artificial Sequence: Synthetic oligonucleotide
uccagaagauuugagucca

SEQ ID NO: 2805850 - RNA, 19 nt, Artificial Sequence
  Description of Artificial Sequence: Synthetic oligonucleotide
uuggaguccaccccagaga

SEQ ID NO: 2805851 - RNA, 19 nt, Artificial Sequence
  Description of Artificial Sequence: Synthetic oligonucleotide
acagguuagucuccuuguc

SEQ ID NO: 2805852 - RNA, 19 nt, Artificial Sequence
  Description of Artificial Sequence: Synthetic oligonucleotide
ucacaggugccaagaaccc

SEQ ID NO: 2805853 - RNA, 19 nt, Artificial Sequence
  Description of Artificial Sequence: Synthetic oligonucleotide
cuuggaguccaccccagag

SEQ ID NO: 2805854 - RNA, 19 nt, Artificial Sequence
  Description of Artificial Sequence: Synthetic oligonucleotide
cuagagcccgcccagggcc

SEQ ID NO: 2805855 - RNA, 19 nt, Artificial Sequence
  Description of Artificial Sequence: Synthetic oligonucleotide
ucacccagguguugguugg

SEQ ID NO: 2805856 - RNA, 19 nt, Artificial Sequence
  Description of Artificial Sequence: Synthetic oligonucleotide
uggaugggccagcugagug

SEQ ID NO: 2805857 - RNA, 19 nt, Artificial Sequence
  Description of Artificial Sequence: Synthetic oligonucleotide
uggaguccaccccagagau

SEQ ID NO: 2805858 - RNA, 19 nt, Artificial Sequence
  Description of Artificial Sequence: Synthetic oligonucleotide
agaaaaugauugugucuug

SEQ ID NO: 2805859 - RNA, 19 nt, Artificial Sequence
  Description of Artificial Sequence: Synthetic oligonucleotide
guucaugugguacacaggu

SEQ ID NO: 2805860 - RNA, 19 nt, Artificial Sequence
  Description of Artificial Sequence: Synthetic oligonucleotide
uccuugucugcacuguacu

SEQ ID NO: 2805861 - RNA, 19 nt, Artificial Sequence
  Description of Artificial Sequence: Synthetic oligonucleotide
agaguccaaugccuguagg

SEQ ID NO: 2805862 - RNA, 19 nt, Artificial Sequence
  Description of Artificial Sequence: Synthetic oligonucleotide
uugucuuccuugagaagga

SEQ ID NO: 2805863 - RNA, 19 nt, Artificial Sequence
  Description of Artificial Sequence: Synthetic oligonucleotide
uccuagagcccgcccaggg

SEQ ID NO: 2805864 - RNA, 19 nt, Artificial Sequence
  Description of Artificial Sequence: Synthetic oligonucleotide
uuccuagaagccacagagc

SEQ ID NO: 2805865 - RNA, 19 nt, Artificial Sequence
  Description of Artificial Sequence: Synthetic oligonucleotide
cuugucugcacuguacuug

SEQ ID NO: 2805866 - RNA, 19 nt, Artificial Sequence
  Description of Artificial Sequence: Synthetic oligonucleotide
acaaaguucuggaaggggu

SEQ ID NO: 2805867 - RNA, 19 nt, Artificial Sequence
  Description of Artificial Sequence: Synthetic oligonucleotide
acaucuugguguccuaacu

SEQ ID NO: 2805868 - RNA, 19 nt, Artificial Sequence
  Description of Artificial Sequence: Synthetic oligonucleotide
gaguccaccccagagauga

SEQ ID NO: 2805869 - RNA, 19 nt, Artificial Sequence
  Description of Artificial Sequence: Synthetic oligonucleotide
gaaaaugauugugucuuga

SEQ ID NO: 2805870 - RNA, 19 nt, Artificial Sequence
  Description of Artificial Sequence: Synthetic oligonucleotide
ugccacgugaaaucaucag

SEQ ID NO: 2805871 - RNA, 19 nt, Artificial Sequence
  Description of Artificial Sequence: Synthetic oligonucleotide
ucuugguguccuaacucac

SEQ ID NO: 2805872 - RNA, 19 nt, Artificial Sequence
  Description of Artificial Sequence: Synthetic oligonucleotide
uuccuugagaaggaaccag

SEQ ID NO: 2805873 - RNA, 19 nt, Artificial Sequence
  Description of Artificial Sequence: Synthetic oligonucleotide
ugugguacacagguuaguc

SEQ ID NO: 2805874 - RNA, 19 nt, Artificial Sequence
  Description of Artificial Sequence: Synthetic oligonucleotide
agcaucugccccuugaguu

SEQ ID NO: 2805875 - RNA, 19 nt, Artificial Sequence
  Description of Artificial Sequence: Synthetic oligonucleotide
uccaaugccuguaggccca

SEQ ID NO: 2805876 - RNA, 19 nt, Artificial Sequence
  Description of Artificial Sequence: Synthetic oligonucleotide
ggguucaugugguacacag

SEQ ID NO: 2805877 - RNA, 19 nt, Artificial Sequence
  Description of Artificial Sequence: Synthetic oligonucleotide
agagcaucugccccuugag

SEQ ID NO: 2805878 - RNA, 19 nt, Artificial Sequence
  Description of Artificial Sequence: Synthetic oligonucleotide
cuaacucacaggcacagaa

SEQ ID NO: 2805879 - RNA, 19 nt, Artificial Sequence
  Description of Artificial Sequence: Synthetic oligonucleotide
ugaaaucaucaguuccaga

SEQ ID NO: 2805880 - RNA, 19 nt, Artificial Sequence
  Description of Artificial Sequence: Synthetic oligonucleotide
cuaaggguucaugugguac

SEQ ID NO: 2805881 - RNA, 19 nt, Artificial Sequence
  Description of Artificial Sequence: Synthetic oligonucleotide
acuguacuuggaguccacc

SEQ ID NO: 2805882 - RNA, 19 nt, Artificial Sequence
  Description of Artificial Sequence: Synthetic oligonucleotide
uccuaacucacaggcacag

SEQ ID NO: 2805883 - RNA, 19 nt, Artificial Sequence
  Description of Artificial Sequence: Synthetic oligonucleotide
aaguucuggaagggguagg

SEQ ID NO: 2805884 - RNA, 19 nt, Artificial Sequence
  Description of Artificial Sequence: Synthetic oligonucleotide
gcaaccaguucacaggugc

SEQ ID NO: 2805885 - RNA, 19 nt, Artificial Sequence
  Description of Artificial Sequence: Synthetic oligonucleotide
uaggcugacaaugggugcc

SEQ ID NO: 2805886 - RNA, 19 nt, Artificial Sequence
  Description of Artificial Sequence: Synthetic oligonucleotide
accagaucgcugauguggc

SEQ ID NO: 2805887 - RNA, 19 nt, Artificial Sequence
  Description of Artificial Sequence: Synthetic oligonucleotide
auuugaguccagagagagc

SEQ ID NO: 2805888 - RNA, 19 nt, Artificial Sequence
  Description of Artificial Sequence: Synthetic oligonucleotide
uucaggacaucuugguguc

SEQ ID NO: 2805889 - RNA, 19 nt, Artificial Sequence
  Description of Artificial Sequence: Synthetic oligonucleotide
uaacucacaggcacagaaa

SEQ ID NO: 2805890 - RNA, 19 nt, Artificial Sequence
  Description of Artificial Sequence: Synthetic oligonucleotide
caacuccacaggcacaaag

SEQ ID NO: 2805891 - RNA, 19 nt, Artificial Sequence
  Description of Artificial Sequence: Synthetic oligonucleotide
ucaguuccagaagauuuga

SEQ ID NO: 2805892 - RNA, 19 nt, Artificial Sequence
  Description of Artificial Sequence: Synthetic oligonucleotide
cugagugcaaccaguucac

SEQ ID NO: 2805893 - RNA, 19 nt, Artificial Sequence
  Description of Artificial Sequence: Synthetic oligonucleotide
cacaaaguucuggaagggg

SEQ ID NO: 2805894 - RNA, 19 nt, Artificial Sequence
  Description of Artificial Sequence: Synthetic oligonucleotide
guguggaugggccagcuga

SEQ ID NO: 2805895 - RNA, 19 nt, Artificial Sequence
  Description of Artificial Sequence: Synthetic oligonucleotide
gacaucuugguguccuaac

SEQ ID NO: 2805896 - RNA, 19 nt, Artificial Sequence
  Description of Artificial Sequence: Synthetic oligonucleotide
caucuugguguccuaacuc

SEQ ID NO: 2805897 - RNA, 19 nt, Artificial Sequence
  Description of Artificial Sequence: Synthetic oligonucleotide
ugagguguggaugggccag

SEQ ID NO: 2805898 - RNA, 19 nt, Artificial Sequence
  Description of Artificial Sequence: Synthetic oligonucleotide
ugguguccuaacucacagg

SEQ ID NO: 2805899 - RNA, 19 nt, Artificial Sequence
  Description of Artificial Sequence: Synthetic oligonucleotide
guccaaugccuguaggccc

SEQ ID NO: 2805900 - RNA, 19 nt, Artificial Sequence
  Description of Artificial Sequence: Synthetic oligonucleotide
gcugagugcaaccaguuca

SEQ ID NO: 2805901 - RNA, 19 nt, Artificial Sequence
  Description of Artificial Sequence: Synthetic oligonucleotide
agcugagugcaaccaguuc

SEQ ID NO: 2805902 - RNA, 19 nt, Artificial Sequence
  Description of Artificial Sequence: Synthetic oligonucleotide
cuucaggacaucuuggugu

SEQ ID NO: 2805903 - RNA, 19 nt, Artificial Sequence
  Description of Artificial Sequence: Synthetic oligonucleotide
guucacaggugccaagaac

SEQ ID NO: 2805904 - RNA, 19 nt, Artificial Sequence
  Description of Artificial Sequence: Synthetic oligonucleotide
aagccaacacccaacucca

SEQ ID NO: 2805905 - RNA, 19 nt, Artificial Sequence
  Description of Artificial Sequence: Synthetic oligonucleotide
cugcacuguacuuggaguc

SEQ ID NO: 2805906 - RNA, 19 nt, Artificial Sequence
  Description of Artificial Sequence: Synthetic oligonucleotide
gugaaaucaucaguuccag

SEQ ID NO: 2805907 - RNA, 19 nt, Artificial Sequence
  Description of Artificial Sequence: Synthetic oligonucleotide
cagaucgcugauguggccg

SEQ ID NO: 2805908 - RNA, 19 nt, Artificial Sequence
  Description of Artificial Sequence: Synthetic oligonucleotide
ugcacuguacuuggagucc

SEQ ID NO: 2805909 - RNA, 19 nt, Artificial Sequence
  Description of Artificial Sequence: Synthetic oligonucleotide
acuugucuuccuugagaag

SEQ ID NO: 2805910 - RNA, 19 nt, Artificial Sequence
  Description of Artificial Sequence: Synthetic oligonucleotide
aucaguuccagaagauuug

SEQ ID NO: 2805911 - RNA, 19 nt, Artificial Sequence
  Description of Artificial Sequence: Synthetic oligonucleotide
aaccaguucacaggugcca

SEQ ID NO: 2805912 - RNA, 19 nt, Artificial Sequence
  Description of Artificial Sequence: Synthetic oligonucleotide
uuagucuccuugucugcac

SEQ ID NO: 2805913 - RNA, 19 nt, Artificial Sequence
  Description of Artificial Sequence: Synthetic oligonucleotide
guaggcugacaaugggugc

SEQ ID NO: 2805914 - RNA, 19 nt, Artificial Sequence
  Description of Artificial Sequence: Synthetic oligonucleotide
cucacccagguguugguug

SEQ ID NO: 2805915 - RNA, 19 nt, Artificial Sequence
  Description of Artificial Sequence: Synthetic oligonucleotide
cuccacaggcacaaaguuc

SEQ ID NO: 2805916 - RNA, 19 nt, Artificial Sequence
  Description of Artificial Sequence: Synthetic oligonucleotide
ggcacagaaaaugauugug

SEQ ID NO: 2805917 - RNA, 19 nt, Artificial Sequence
  Description of Artificial Sequence: Synthetic oligonucleotide
uacuuggaguccaccccag

SEQ ID NO: 2805918 - RNA, 19 nt, Artificial Sequence
  Description of Artificial Sequence: Synthetic oligonucleotide
gguaggcugacaaugggug

SEQ ID NO: 2805919 - RNA, 19 nt, Artificial Sequence
  Description of Artificial Sequence: Synthetic oligonucleotide
cacccaacuccacaggcac

SEQ ID NO: 2805920 - RNA, 19 nt, Artificial Sequence
  Description of Artificial Sequence: Synthetic oligonucleotide
ucugccccuugaguuaggg

SEQ ID NO: 2805921 - RNA, 19 nt, Artificial Sequence
  Description of Artificial Sequence: Synthetic oligonucleotide
cacgugaaaucaucaguuc

SEQ ID NO: 2805922 - RNA, 19 nt, Artificial Sequence
  Description of Artificial Sequence: Synthetic oligonucleotide
guugggagcugccacguga

SEQ ID NO: 2805923 - RNA, 19 nt, Artificial Sequence
  Description of Artificial Sequence: Synthetic oligonucleotide
cagguccagaguccaaugc

SEQ ID NO: 2805924 - RNA, 19 nt, Artificial Sequence
  Description of Artificial Sequence: Synthetic oligonucleotide
acagguccagaguccaaug

SEQ ID NO: 2805925 - RNA, 19 nt, Artificial Sequence
  Description of Artificial Sequence: Synthetic oligonucleotide
aggcacagaaaaugauugu

SEQ ID NO: 2805926 - RNA, 19 nt, Artificial Sequence
  Description of Artificial Sequence: Synthetic oligonucleotide
uagucuccuugucugcacu

SEQ ID NO: 2805927 - RNA, 19 nt, Artificial Sequence
  Description of Artificial Sequence: Synthetic oligonucleotide
ugccucacccagguguugg

SEQ ID NO: 2805928 - RNA, 19 nt, Artificial Sequence
  Description of Artificial Sequence: Synthetic oligonucleotide
ucgcugauguggccgaggu

SEQ ID NO: 2805929 - RNA, 19 nt, Artificial Sequence
  Description of Artificial Sequence: Synthetic oligonucleotide
ccaggagaaagccaacacc

SEQ ID NO: 2805930 - RNA, 19 nt, Artificial Sequence
  Description of Artificial Sequence: Synthetic oligonucleotide
uccagaguccaaugccugu

SEQ ID NO: 2805931 - RNA, 19 nt, Artificial Sequence
  Description of Artificial Sequence: Synthetic oligonucleotide
caguuccagaagauuugag

SEQ ID NO: 2805932 - RNA, 19 nt, Artificial Sequence
  Description of Artificial Sequence: Synthetic oligonucleotide
guacuuggaguccacccca

SEQ ID NO: 2805933 - RNA, 19 nt, Artificial Sequence
  Description of Artificial Sequence: Synthetic oligonucleotide
cacaggcacaaaguucugg

SEQ ID NO: 2805934 - RNA, 19 nt, Artificial Sequence
  Description of Artificial Sequence: Synthetic oligonucleotide
gagagcaauuuacuugucu

SEQ ID NO: 2805935 - RNA, 19 nt, Artificial Sequence
  Description of Artificial Sequence: Synthetic oligonucleotide
cuccuugucugcacuguac

SEQ ID NO: 2805936 - RNA, 19 nt, Artificial Sequence
  Description of Artificial Sequence: Synthetic oligonucleotide
caacacccaacuccacagg

SEQ ID NO: 2805937 - RNA, 19 nt, Artificial Sequence
  Description of Artificial Sequence: Synthetic oligonucleotide
ccaacacccaacuccacag

SEQ ID NO: 2805938 - RNA, 19 nt, Artificial Sequence
  Description of Artificial Sequence: Synthetic oligonucleotide
gcugauguggccgagguga

SEQ ID NO: 2805939 - RNA, 19 nt, Artificial Sequence
  Description of Artificial Sequence: Synthetic oligonucleotide
agucuccuugucugcacug

SEQ ID NO: 2805940 - RNA, 19 nt, Artificial Sequence
  Description of Artificial Sequence: Synthetic oligonucleotide
cuguaggcccagcugcagg

SEQ ID NO: 2805941 - RNA, 19 nt, Artificial Sequence
  Description of Artificial Sequence: Synthetic oligonucleotide
ugcaaccaguucacaggug

SEQ ID NO: 2805942 - RNA, 19 nt, Artificial Sequence
  Description of Artificial Sequence: Synthetic oligonucleotide
aggugagguguggaugggc

SEQ ID NO: 2805943 - RNA, 19 nt, Artificial Sequence
  Description of Artificial Sequence: Synthetic oligonucleotide
ucaucaguuccagaagauu

SEQ ID NO: 2805944 - RNA, 19 nt, Artificial Sequence
  Description of Artificial Sequence: Synthetic oligonucleotide
agggguaggcugacaaugg

SEQ ID NO: 2805945 - RNA, 19 nt, Artificial Sequence
  Description of Artificial Sequence: Synthetic oligonucleotide
gacaaugggugccaccucu

SEQ ID NO: 2805946 - RNA, 19 nt, Artificial Sequence
  Description of Artificial Sequence: Synthetic oligonucleotide
ugaguccagagagagcaau

SEQ ID NO: 2805947 - RNA, 19 nt, Artificial Sequence
  Description of Artificial Sequence: Synthetic oligonucleotide
uagaagccacagagcaucu

SEQ ID NO: 2805948 - RNA, 19 nt, Artificial Sequence
  Description of Artificial Sequence: Synthetic oligonucleotide
uguugguugggagcugcca

SEQ ID NO: 2805949 - RNA, 19 nt, Artificial Sequence
  Description of Artificial Sequence: Synthetic oligonucleotide
cagaguccaaugccuguag

SEQ ID NO: 2805950 - RNA, 19 nt, Artificial Sequence
  Description of Artificial Sequence: Synthetic oligonucleotide
ggagcugccacgugaaauc

SEQ ID NO: 2805951 - RNA, 19 nt, Artificial Sequence
  Description of Artificial Sequence: Synthetic oligonucleotide
cuugguguccuaacucaca

SEQ ID NO: 2805952 - RNA, 19 nt, Artificial Sequence
  Description of Artificial Sequence: Synthetic oligonucleotide
uacagguccagaguccaau

SEQ ID NO: 2805953 - RNA, 19 nt, Artificial Sequence
  Description of Artificial Sequence: Synthetic oligonucleotide
agaucgcugauguggccga

SEQ ID NO: 2805954 - RNA, 19 nt, Artificial Sequence
  Description of Artificial Sequence: Synthetic oligonucleotide
caaugccucacccaggugu

SEQ ID NO: 2805955 - RNA, 19 nt, Artificial Sequence
  Description of Artificial Sequence: Synthetic oligonucleotide
uucaugugguacacagguu

SEQ ID NO: 2805956 - RNA, 19 nt, Artificial Sequence
  Description of Artificial Sequence: Synthetic oligonucleotide
ggaaccaggagaaagccaa

SEQ ID NO: 2805957 - RNA, 19 nt, Artificial Sequence
  Description of Artificial Sequence: Synthetic oligonucleotide
caucaguuccagaagauuu

SEQ ID NO: 2805958 - RNA, 19 nt, Artificial Sequence
  Description of Artificial Sequence: Synthetic oligonucleotide
acaggcacagaaaaugauu

SEQ ID NO: 2805959 - RNA, 19 nt, Artificial Sequence
  Description of Artificial Sequence: Synthetic oligonucleotide
cuugaccuaaggguucaug

SEQ ID NO: 2805960 - RNA, 19 nt, Artificial Sequence
  Description of Artificial Sequence: Synthetic oligonucleotide
uguggccgaggugaggugu

SEQ ID NO: 2805961 - RNA, 19 nt, Artificial Sequence
  Description of Artificial Sequence: Synthetic oligonucleotide
caccucuugaccuaagggu

SEQ ID NO: 2805962 - RNA, 19 nt, Artificial Sequence
  Description of Artificial Sequence: Synthetic oligonucleotide
gaugggccagcugagugca

SEQ ID NO: 2805963 - RNA, 19 nt, Artificial Sequence
  Description of Artificial Sequence: Synthetic oligonucleotide
aguucacaggugccaagaa

SEQ ID NO: 2805964 - RNA, 19 nt, Artificial Sequence
  Description of Artificial Sequence: Synthetic oligonucleotide
ugauguggccgaggugagg

SEQ ID NO: 2805965 - RNA, 19 nt, Artificial Sequence
  Description of Artificial Sequence: Synthetic oligonucleotide
cagaaaaugauugugucuu

SEQ ID NO: 2805966 - RNA, 19 nt, Artificial Sequence
  Description of Artificial Sequence: Synthetic oligonucleotide
gguuagucuccuugucugc

SEQ ID NO: 2805967 - RNA, 19 nt, Artificial Sequence
  Description of Artificial Sequence: Synthetic oligonucleotide
ggaugggccagcugagugc

SEQ ID NO: 2805968 - RNA, 19 nt, Artificial Sequence
  Description of Artificial Sequence: Synthetic oligonucleotide
cccaauucuuuccuagaag

SEQ ID NO: 2805969 - RNA, 19 nt, Artificial Sequence
  Description of Artificial Sequence: Synthetic oligonucleotide
gauguggccgaggugaggu

SEQ ID NO: 2805970 - RNA, 19 nt, Artificial Sequence
  Description of Artificial Sequence: Synthetic oligonucleotide
guuagucuccuugucugca

SEQ ID NO: 2805971 - RNA, 19 nt, Artificial Sequence
  Description of Artificial Sequence: Synthetic oligonucleotide
caaaguucuggaaggggua

SEQ ID NO: 2805972 - RNA, 19 nt, Artificial Sequence
  Description of Artificial Sequence: Synthetic oligonucleotide
cuuuccuagaagccacaga

SEQ ID NO: 2805973 - RNA, 19 nt, Artificial Sequence
  Description of Artificial Sequence: Synthetic oligonucleotide
ccucuucaggacaucuugg

SEQ ID NO: 2805974 - RNA, 19 nt, Artificial Sequence
  Description of Artificial Sequence: Synthetic oligonucleotide
aguccagagagagcaauuu

SEQ ID NO: 2805975 - RNA, 19 nt, Artificial Sequence
  Description of Artificial Sequence: Synthetic oligonucleotide
agauuugaguccagagaga

SEQ ID NO: 2805976 - RNA, 19 nt, Artificial Sequence
  Description of Artificial Sequence: Synthetic oligonucleotide
cgaggugagguguggaugg

SEQ ID NO: 2805977 - RNA, 19 nt, Artificial Sequence
  Description of Artificial Sequence: Synthetic oligonucleotide
gggguaggcugacaauggg

SEQ ID NO: 2805978 - RNA, 19 nt, Artificial Sequence
  Description of Artificial Sequence: Synthetic oligonucleotide
ggugagguguggaugggcc

SEQ ID NO: 2805979 - RNA, 19 nt, Artificial Sequence
  Description of Artificial Sequence: Synthetic oligonucleotide
gccacagagcaucugcccc

SEQ ID NO: 2805980 - RNA, 19 nt, Artificial Sequence
  Description of Artificial Sequence: Synthetic oligonucleotide
ccagguguugguugggagc

SEQ ID NO: 2805981 - RNA, 19 nt, Artificial Sequence
  Description of Artificial Sequence: Synthetic oligonucleotide
caaugggugccaccucuug

SEQ ID NO: 2805982 - RNA, 19 nt, Artificial Sequence
  Description of Artificial Sequence: Synthetic oligonucleotide
accucuugaccuaaggguu

SEQ ID NO: 2805983 - RNA, 19 nt, Artificial Sequence
  Description of Artificial Sequence: Synthetic oligonucleotide
aaugccucacccagguguu

SEQ ID NO: 2805984 - RNA, 19 nt, Artificial Sequence
  Description of Artificial Sequence: Synthetic oligonucleotide
cugauguggccgaggugag

SEQ ID NO: 2805985 - RNA, 19 nt, Artificial Sequence
  Description of Artificial Sequence: Synthetic oligonucleotide
cugccccuugaguuagggg

SEQ ID NO: 2805986 - RNA, 19 nt, Artificial Sequence
  Description of Artificial Sequence: Synthetic oligonucleotide
agggccugccuuccucuuc

SEQ ID NO: 2805987 - RNA, 19 nt, Artificial Sequence
  Description of Artificial Sequence: Synthetic oligonucleotide
gguucaugugguacacagg

SEQ ID NO: 2805988 - RNA, 19 nt, Artificial Sequence
  Description of Artificial Sequence: Synthetic oligonucleotide
caucugccccuugaguuag

SEQ ID NO: 2805989 - RNA, 19 nt, Artificial Sequence
  Description of Artificial Sequence: Synthetic oligonucleotide
ugacaaugggugccaccuc

SEQ ID NO: 2805990 - RNA, 19 nt, Artificial Sequence
  Description of Artificial Sequence: Synthetic oligonucleotide
accuaaggguucauguggu

SEQ ID NO: 2805991 - RNA, 19 nt, Artificial Sequence
  Description of Artificial Sequence: Synthetic oligonucleotide
cacaggugccaagaacccc

SEQ ID NO: 2805992 - RNA, 19 nt, Artificial Sequence
  Description of Artificial Sequence: Synthetic oligonucleotide
uugaguccagagagagcaa

SEQ ID NO: 2805993 - RNA, 19 nt, Artificial Sequence
  Description of Artificial Sequence: Synthetic oligonucleotide
cccagagaugaccuuauuc

SEQ ID NO: 2805994 - RNA, 19 nt, Artificial Sequence
  Description of Artificial Sequence: Synthetic oligonucleotide
ggagaaagccaacacccaa

SEQ ID NO: 2805995 - RNA, 19 nt, Artificial Sequence
  Description of Artificial Sequence: Synthetic oligonucleotide
ggaagggguaggcugacaa

SEQ ID NO: 2805996 - RNA, 19 nt, Artificial Sequence
  Description of Artificial Sequence: Synthetic oligonucleotide
agagagcaauuuacuuguc

SEQ ID NO: 2805997 - RNA, 19 nt, Artificial Sequence
  Description of Artificial Sequence: Synthetic oligonucleotide
ugucugcacuguacuugga

SEQ ID NO: 2805998 - RNA, 19 nt, Artificial Sequence
  Description of Artificial Sequence: Synthetic oligonucleotide
aucaucaguuccagaagau

SEQ ID NO: 2805999 - RNA, 19 nt, Artificial Sequence
  Description of Artificial Sequence: Synthetic oligonucleotide
aucgcugauguggccgagg

SEQ ID NO: 2806000 - RNA, 19 nt, Artificial Sequence
  Description of Artificial Sequence: Synthetic oligonucleotide
uuccuagagcccgcccagg

SEQ ID NO: 2806001 - RNA, 19 nt, Artificial Sequence
  Description of Artificial Sequence: Synthetic oligonucleotide
ugagugcaaccaguucaca

SEQ ID NO: 2806002 - RNA, 19 nt, Artificial Sequence
  Description of Artificial Sequence: Synthetic oligonucleotide
gcacaaaguucuggaaggg

SEQ ID NO: 2806003 - RNA, 19 nt, Artificial Sequence
  Description of Artificial Sequence: Synthetic oligonucleotide
gccaccucuugaccuaagg

SEQ ID NO: 2806004 - RNA, 19 nt, Artificial Sequence
  Description of Artificial Sequence: Synthetic oligonucleotide
cgugaaaucaucaguucca

SEQ ID NO: 2806005 - RNA, 19 nt, Artificial Sequence
  Description of Artificial Sequence: Synthetic oligonucleotide
ugggccagcugagugcaac

SEQ ID NO: 2806006 - RNA, 19 nt, Artificial Sequence
  Description of Artificial Sequence: Synthetic oligonucleotide
gaguuaggggauauagccu

SEQ ID NO: 2806007 - RNA, 19 nt, Artificial Sequence
  Description of Artificial Sequence: Synthetic oligonucleotide
cuuccuugagaaggaacca

SEQ ID NO: 2806008 - RNA, 19 nt, Artificial Sequence
  Description of Artificial Sequence: Synthetic oligonucleotide
uuaggggauauagccuuuu

SEQ ID NO: 2806009 - RNA, 19 nt, Artificial Sequence
  Description of Artificial Sequence: Synthetic oligonucleotide
acuuggaguccaccccaga

SEQ ID NO: 2806010 - RNA, 19 nt, Artificial Sequence
  Description of Artificial Sequence: Synthetic oligonucleotide
cugccacgugaaaucauca

SEQ ID NO: 2806011 - RNA, 19 nt, Artificial Sequence
  Description of Artificial Sequence: Synthetic oligonucleotide
gguacacagguuagucucc

SEQ ID NO: 2806012 - RNA, 19 nt, Artificial Sequence
  Description of Artificial Sequence: Synthetic oligonucleotide
aggagaaagccaacaccca

SEQ ID NO: 2806013 - RNA, 19 nt, Artificial Sequence
  Description of Artificial Sequence: Synthetic oligonucleotide
ccagcugcagggcaaugcc

SEQ ID NO: 2806014 - RNA, 19 nt, Artificial Sequence
  Description of Artificial Sequence: Synthetic oligonucleotide
ugguugggagcugccacgu

SEQ ID NO: 2806015 - RNA, 19 nt, Artificial Sequence
  Description of Artificial Sequence: Synthetic oligonucleotide
gugguacacagguuagucu

SEQ ID NO: 2806016 - RNA, 19 nt, Artificial Sequence
  Description of Artificial Sequence: Synthetic oligonucleotide
gugcaaccaguucacaggu

SEQ ID NO: 2806017 - RNA, 19 nt, Artificial Sequence
  Description of Artificial Sequence: Synthetic oligonucleotide
ucaggacaucuuggugucc

SEQ ID NO: 2806018 - RNA, 19 nt, Artificial Sequence
  Description of Artificial Sequence: Synthetic oligonucleotide
uuccaccagaucgcugaug

SEQ ID NO: 2806019 - RNA, 19 nt, Artificial Sequence
  Description of Artificial Sequence: Synthetic oligonucleotide
gguguugguugggagcugc

SEQ ID NO: 2806020 - RNA, 19 nt, Artificial Sequence
  Description of Artificial Sequence: Synthetic oligonucleotide
cagagcaucugccccuuga

SEQ ID NO: 2806021 - RNA, 19 nt, Artificial Sequence
  Description of Artificial Sequence: Synthetic oligonucleotide
uagagcccgcccagggccu

SEQ ID NO: 2806022 - RNA, 19 nt, Artificial Sequence
  Description of Artificial Sequence: Synthetic oligonucleotide
cacuguacuuggaguccac

SEQ ID NO: 2806023 - RNA, 19 nt, Artificial Sequence
  Description of Artificial Sequence: Synthetic oligonucleotide
acacccaacuccacaggca

SEQ ID NO: 2806024 - RNA, 19 nt, Artificial Sequence
  Description of Artificial Sequence: Synthetic oligonucleotide
ugccaccucuugaccuaag

SEQ ID NO: 2806025 - RNA, 19 nt, Artificial Sequence
  Description of Artificial Sequence: Synthetic oligonucleotide
gugagguguggaugggcca

SEQ ID NO: 2806026 - RNA, 19 nt, Artificial Sequence
  Description of Artificial Sequence: Synthetic oligonucleotide
guccagagagagcaauuua

SEQ ID NO: 2806027 - RNA, 19 nt, Artificial Sequence
  Description of Artificial Sequence: Synthetic oligonucleotide
caguucacaggugccaaga

SEQ ID NO: 2806028 - RNA, 19 nt, Artificial Sequence
  Description of Artificial Sequence: Synthetic oligonucleotide
gcugacaaugggugccacc

SEQ ID NO: 2806029 - RNA, 19 nt, Artificial Sequence
  Description of Artificial Sequence: Synthetic oligonucleotide
cacagguuagucuccuugu

SEQ ID NO: 2806030 - RNA, 19 nt, Artificial Sequence
  Description of Artificial Sequence: Synthetic oligonucleotide
gagcugccacgugaaauca

SEQ ID NO: 2806031 - RNA, 19 nt, Artificial Sequence
  Description of Artificial Sequence: Synthetic oligonucleotide
acucacaggcacagaaaau

SEQ ID NO: 2806032 - RNA, 19 nt, Artificial Sequence
  Description of Artificial Sequence: Synthetic oligonucleotide
gccagcugagugcaaccag

SEQ ID NO: 2806033 - RNA, 19 nt, Artificial Sequence
  Description of Artificial Sequence: Synthetic oligonucleotide
cagguuagucuccuugucu

SEQ ID NO: 2806034 - RNA, 19 nt, Artificial Sequence
  Description of Artificial Sequence: Synthetic oligonucleotide
gccaacacccaacuccaca

SEQ ID NO: 2806035 - RNA, 19 nt, Artificial Sequence
  Description of Artificial Sequence: Synthetic oligonucleotide
cagagagagcaauuuacuu

SEQ ID NO: 2806036 - RNA, 19 nt, Artificial Sequence
  Description of Artificial Sequence: Synthetic oligonucleotide
uggccgaggugaggugugg

SEQ ID NO: 2806037 - RNA, 19 nt, Artificial Sequence
  Description of Artificial Sequence: Synthetic oligonucleotide
auguggccgaggugaggug

SEQ ID NO: 2806038 - RNA, 19 nt, Artificial Sequence
  Description of Artificial Sequence: Synthetic oligonucleotide
caggcacaaaguucuggaa

SEQ ID NO: 2806039 - RNA, 19 nt, Artificial Sequence
  Description of Artificial Sequence: Synthetic oligonucleotide
gcagggcaaugccucaccc

SEQ ID NO: 2806040 - RNA, 19 nt, Artificial Sequence
  Description of Artificial Sequence: Synthetic oligonucleotide
cagggcaaugccucaccca

SEQ ID NO: 2806041 - RNA, 19 nt, Artificial Sequence
  Description of Artificial Sequence: Synthetic oligonucleotide
caauuuacuugucuuccuu

SEQ ID NO: 2806042 - RNA, 19 nt, Artificial Sequence
  Description of Artificial Sequence: Synthetic oligonucleotide
gagcaucugccccuugagu

SEQ ID NO: 2806043 - RNA, 19 nt, Artificial Sequence
  Description of Artificial Sequence: Synthetic oligonucleotide
cccuacagguccagagucc

SEQ ID NO: 2806044 - RNA, 19 nt, Artificial Sequence
  Description of Artificial Sequence: Synthetic oligonucleotide
gagguguggaugggccagc

SEQ ID NO: 2806045 - RNA, 19 nt, Artificial Sequence
  Description of Artificial Sequence: Synthetic oligonucleotide
uacacagguuagucuccuu

SEQ ID NO: 2806046 - RNA, 19 nt, Artificial Sequence
  Description of Artificial Sequence: Synthetic oligonucleotide
gaucgcugauguggccgag

SEQ ID NO: 2806047 - RNA, 19 nt, Artificial Sequence
  Description of Artificial Sequence: Synthetic oligonucleotide
cucuugaccuaaggguuca

SEQ ID NO: 2806048 - RNA, 19 nt, Artificial Sequence
  Description of Artificial Sequence: Synthetic oligonucleotide
gaagggguaggcugacaau

SEQ ID NO: 2806049 - RNA, 19 nt, Artificial Sequence
  Description of Artificial Sequence: Synthetic oligonucleotide
gccacgugaaaucaucagu

SEQ ID NO: 2806050 - RNA, 19 nt, Artificial Sequence
  Description of Artificial Sequence: Synthetic oligonucleotide
ccucuugaccuaaggguuc

SEQ ID NO: 2806051 - RNA, 19 nt, Artificial Sequence
  Description of Artificial Sequence: Synthetic oligonucleotide
gcacagaaaaugauugugu

SEQ ID NO: 2806052 - RNA, 19 nt, Artificial Sequence
  Description of Artificial Sequence: Synthetic oligonucleotide
gcugccacgugaaaucauc

SEQ ID NO: 2806053 - RNA, 19 nt, Artificial Sequence
  Description of Artificial Sequence: Synthetic oligonucleotide
acagagcaucugccccuug

SEQ ID NO: 2806054 - RNA, 19 nt, Artificial Sequence
  Description of Artificial Sequence: Synthetic oligonucleotide
ccccuacagguccagaguc

SEQ ID NO: 2806055 - RNA, 19 nt, Artificial Sequence
  Description of Artificial Sequence: Synthetic oligonucleotide
uggaagggguaggcugaca

SEQ ID NO: 2806056 - RNA, 19 nt, Artificial Sequence
  Description of Artificial Sequence: Synthetic oligonucleotide
guguccuaacucacaggca

SEQ ID NO: 2806057 - RNA, 19 nt, Artificial Sequence
  Description of Artificial Sequence: Synthetic oligonucleotide
ggcaaugccucacccaggu

SEQ ID NO: 2806058 - RNA, 19 nt, Artificial Sequence
  Description of Artificial Sequence: Synthetic oligonucleotide
guccuaacucacaggcaca

SEQ ID NO: 2806059 - RNA, 19 nt, Artificial Sequence
  Description of Artificial Sequence: Synthetic oligonucleotide
agccaacacccaacuccac

SEQ ID NO: 2806060 - RNA, 19 nt, Artificial Sequence
  Description of Artificial Sequence: Synthetic oligonucleotide
gagaaggaaccaggagaaa

SEQ ID NO: 2806061 - RNA, 19 nt, Artificial Sequence
  Description of Artificial Sequence: Synthetic oligonucleotide
aggcugacaaugggugcca

SEQ ID NO: 2806062 - RNA, 19 nt, Artificial Sequence
  Description of Artificial Sequence: Synthetic oligonucleotide
gcaauuuacuugucuuccu

SEQ ID NO: 2806063 - RNA, 19 nt, Artificial Sequence
  Description of Artificial Sequence: Synthetic oligonucleotide
cccagguguugguugggag

SEQ ID NO: 2806064 - RNA, 19 nt, Artificial Sequence
  Description of Artificial Sequence: Synthetic oligonucleotide
ccuagagcccgcccagggc

SEQ ID NO: 2806065 - RNA, 19 nt, Artificial Sequence
  Description of Artificial Sequence: Synthetic oligonucleotide
gggccagcugagugcaacc

SEQ ID NO: 2806066 - RNA, 19 nt, Artificial Sequence
  Description of Artificial Sequence: Synthetic oligonucleotide
cagguguugguugggagcu

SEQ ID NO: 2806067 - RNA, 19 nt, Artificial Sequence
  Description of Artificial Sequence: Synthetic oligonucleotide
guguugguugggagcugcc

SEQ ID NO: 2806068 - RNA, 19 nt, Artificial Sequence
  Description of Artificial Sequence: Synthetic oligonucleotide
aggacaucuugguguccua

SEQ ID NO: 2806069 - RNA, 19 nt, Artificial Sequence
  Description of Artificial Sequence: Synthetic oligonucleotide
gguguggaugggccagcug

SEQ ID NO: 2806070 - RNA, 19 nt, Artificial Sequence
  Description of Artificial Sequence: Synthetic oligonucleotide
aggguucaugugguacaca

SEQ ID NO: 2806071 - RNA, 19 nt, Artificial Sequence
  Description of Artificial Sequence: Synthetic oligonucleotide
cugcagggcaaugccucac

SEQ ID NO: 2806072 - RNA, 19 nt, Artificial Sequence
  Description of Artificial Sequence: Synthetic oligonucleotide
cuggaagggguaggcugac

SEQ ID NO: 2806073 - RNA, 19 nt, Artificial Sequence
  Description of Artificial Sequence: Synthetic oligonucleotide
gccugccuuccucuucagg

SEQ ID NO: 2806074 - RNA, 19 nt, Artificial Sequence
  Description of Artificial Sequence: Synthetic oligonucleotide
cuuccucuucaggacaucu

SEQ ID NO: 2806075 - RNA, 19 nt, Artificial Sequence
  Description of Artificial Sequence: Synthetic oligonucleotide
ccagaucgcugauguggcc

SEQ ID NO: 2806076 - RNA, 19 nt, Artificial Sequence
  Description of Artificial Sequence: Synthetic oligonucleotide
ucuugaccuaaggguucau

SEQ ID NO: 2806077 - RNA, 19 nt, Artificial Sequence
  Description of Artificial Sequence: Synthetic oligonucleotide
acccagguguugguuggga

SEQ ID NO: 2806078 - RNA, 19 nt, Artificial Sequence
  Description of Artificial Sequence: Synthetic oligonucleotide
ccagaagauuugaguccag

SEQ ID NO: 2806079 - RNA, 19 nt, Artificial Sequence
  Description of Artificial Sequence: Synthetic oligonucleotide
cacccagguguugguuggg

SEQ ID NO: 2806080 - RNA, 19 nt, Artificial Sequence
  Description of Artificial Sequence: Synthetic oligonucleotide
ccagagagagcaauuuacu

SEQ ID NO: 2806081 - RNA, 19 nt, Artificial Sequence
  Description of Artificial Sequence: Synthetic oligonucleotide
guggccgaggugaggugug

SEQ ID NO: 2806082 - RNA, 19 nt, Artificial Sequence
  Description of Artificial Sequence: Synthetic oligonucleotide
agguguggaugggccagcu

SEQ ID NO: 2806083 - RNA, 19 nt, Artificial Sequence
  Description of Artificial Sequence: Synthetic oligonucleotide
gcaucugccccuugaguua

SEQ ID NO: 2806084 - RNA, 19 nt, Artificial Sequence
  Description of Artificial Sequence: Synthetic oligonucleotide
cccagcugcagggcaaugc

SEQ ID NO: 2806085 - RNA, 19 nt, Artificial Sequence
  Description of Artificial Sequence: Synthetic oligonucleotide
caggacaucuugguguccu

SEQ ID NO: 2806086 - RNA, 19 nt, Artificial Sequence
  Description of Artificial Sequence: Synthetic oligonucleotide
ggugccaccucuugaccua

SEQ ID NO: 2806087 - RNA, 19 nt, Artificial Sequence
  Description of Artificial Sequence: Synthetic oligonucleotide
guacacagguuagucuccu

SEQ ID NO: 2806088 - RNA, 19 nt, Artificial Sequence
  Description of Artificial Sequence: Synthetic oligonucleotide
ccacgugaaaucaucaguu

SEQ ID NO: 2806089 - RNA, 19 nt, Artificial Sequence
  Description of Artificial Sequence: Synthetic oligonucleotide
gagguuccaccagaucgcu

SEQ ID NO: 2806090 - RNA, 19 nt, Artificial Sequence
  Description of Artificial Sequence: Synthetic oligonucleotide
acaaugggugccaccucuu

SEQ ID NO: 2806091 - RNA, 19 nt, Artificial Sequence
  Description of Artificial Sequence: Synthetic oligonucleotide
agguuccaccagaucgcug

SEQ ID NO: 2806092 - RNA, 19 nt, Artificial Sequence
  Description of Artificial Sequence: Synthetic oligonucleotide
accccagagaugaccuuau

SEQ ID NO: 2806093 - RNA, 19 nt, Artificial Sequence
  Description of Artificial Sequence: Synthetic oligonucleotide
gggcaaugccucacccagg

SEQ ID NO: 2806094 - RNA, 19 nt, Artificial Sequence
  Description of Artificial Sequence: Synthetic oligonucleotide
cuacagguccagaguccaa

SEQ ID NO: 2806095 - RNA, 19 nt, Artificial Sequence
  Description of Artificial Sequence: Synthetic oligonucleotide
ccgaggugagguguggaug

SEQ ID NO: 2806096 - RNA, 19 nt, Artificial Sequence
  Description of Artificial Sequence: Synthetic oligonucleotide
caaugccuguaggcccagc

SEQ ID NO: 2806097 - RNA, 19 nt, Artificial Sequence
  Description of Artificial Sequence: Synthetic oligonucleotide
caccccagagaugaccuua

SEQ ID NO: 2806098 - RNA, 19 nt, Artificial Sequence
  Description of Artificial Sequence: Synthetic oligonucleotide
augccucacccagguguug

SEQ ID NO: 2806099 - RNA, 19 nt, Artificial Sequence
  Description of Artificial Sequence: Synthetic oligonucleotide
ccuacagguccagagucca

SEQ ID NO: 2806100 - RNA, 19 nt, Artificial Sequence
  Description of Artificial Sequence: Synthetic oligonucleotide
agcccgcccagggccugcc

SEQ ID NO: 2806101 - RNA, 19 nt, Artificial Sequence
  Description of Artificial Sequence: Synthetic oligonucleotide
acccaacuccacaggcaca

SEQ ID NO: 2806102 - RNA, 19 nt, Artificial Sequence
  Description of Artificial Sequence: Synthetic oligonucleotide
gcaaugccucacccaggug

SEQ ID NO: 2806103 - RNA, 19 nt, Artificial Sequence
  Description of Artificial Sequence: Synthetic oligonucleotide
gcacuguacuuggagucca

SEQ ID NO: 2806104 - RNA, 19 nt, Artificial Sequence
  Description of Artificial Sequence: Synthetic oligonucleotide
ccccaauucuuuccuagaa

SEQ ID NO: 2806105 - RNA, 19 nt, Artificial Sequence
  Description of Artificial Sequence: Synthetic oligonucleotide
gggugccaccucuugaccu

SEQ ID NO: 2806106 - RNA, 19 nt, Artificial Sequence
  Description of Artificial Sequence: Synthetic oligonucleotide
ggacaucuugguguccuaa

SEQ ID NO: 2806107 - RNA, 19 nt, Artificial Sequence
  Description of Artificial Sequence: Synthetic oligonucleotide
aucugccccuugaguuagg

SEQ ID NO: 2806108 - RNA, 19 nt, Artificial Sequence
  Description of Artificial Sequence: Synthetic oligonucleotide
gaguccagagagagcaauu

SEQ ID NO: 2806109 - RNA, 19 nt, Artificial Sequence
  Description of Artificial Sequence: Synthetic oligonucleotide
agcugccacgugaaaucau

SEQ ID NO: 2806110 - RNA, 19 nt, Artificial Sequence
  Description of Artificial Sequence: Synthetic oligonucleotide
ggaguccaccccagagaug

SEQ ID NO: 2806111 - RNA, 19 nt, Artificial Sequence
  Description of Artificial Sequence: Synthetic oligonucleotide
cagcugcagggcaaugccu

SEQ ID NO: 2806112 - RNA, 19 nt, Artificial Sequence
  Description of Artificial Sequence: Synthetic oligonucleotide
ccuguaggcccagcugcag

SEQ ID NO: 2806113 - RNA, 19 nt, Artificial Sequence
  Description of Artificial Sequence: Synthetic oligonucleotide
cccaacuccacaggcacaa

SEQ ID NO: 2806114 - RNA, 19 nt, Artificial Sequence
  Description of Artificial Sequence: Synthetic oligonucleotide
cagcugagugcaaccaguu

SEQ ID NO: 2806115 - RNA, 19 nt, Artificial Sequence
  Description of Artificial Sequence: Synthetic oligonucleotide
ccaccagaucgcugaugug

SEQ ID NO: 2806116 - RNA, 19 nt, Artificial Sequence
  Description of Artificial Sequence: Synthetic oligonucleotide
agagcccgcccagggccug

SEQ ID NO: 2806117 - RNA, 19 nt, Artificial Sequence
  Description of Artificial Sequence: Synthetic oligonucleotide
guuccaccagaucgcugau

SEQ ID NO: 2806118 - RNA, 19 nt, Artificial Sequence
  Description of Artificial Sequence: Synthetic oligonucleotide
gggagcugccacgugaaau

SEQ ID NO: 2806119 - RNA, 19 nt, Artificial Sequence
  Description of Artificial Sequence: Synthetic oligonucleotide
guuaggggauauagccuuu

SEQ ID NO: 2806120 - RNA, 19 nt, Artificial Sequence
  Description of Artificial Sequence: Synthetic oligonucleotide
ggccugccuuccucuucag

SEQ ID NO: 2806121 - RNA, 19 nt, Artificial Sequence
  Description of Artificial Sequence: Synthetic oligonucleotide
gugccaccucuugaccuaa

SEQ ID NO: 2806122 - RNA, 19 nt, Artificial Sequence
  Description of Artificial Sequence: Synthetic oligonucleotide
gagcccgcccagggccugc

SEQ ID NO: 2806123 - RNA, 19 nt, Artificial Sequence
  Description of Artificial Sequence: Synthetic oligonucleotide
cccagggccugccuuccuc

SEQ ID NO: 2806124 - RNA, 19 nt, Artificial Sequence
  Description of Artificial Sequence: Synthetic oligonucleotide
guggaugggccagcugagu

SEQ ID NO: 2806125 - RNA, 19 nt, Artificial Sequence
  Description of Artificial Sequence: Synthetic oligonucleotide
ggcugacaaugggugccac

SEQ ID NO: 2806126 - RNA, 19 nt, Artificial Sequence
  Description of Artificial Sequence: Synthetic oligonucleotide
ccuaaggguucauguggua

SEQ ID NO: 2806127 - RNA, 19 nt, Artificial Sequence
  Description of Artificial Sequence: Synthetic oligonucleotide
ccacagagcaucugccccu

SEQ ID NO: 2806128 - RNA, 19 nt, Artificial Sequence
  Description of Artificial Sequence: Synthetic oligonucleotide
ccuagaagccacagagcau

SEQ ID NO: 2806129 - RNA, 19 nt, Artificial Sequence
  Description of Artificial Sequence: Synthetic oligonucleotide
ccagaguccaaugccugua

SEQ ID NO: 2806130 - RNA, 19 nt, Artificial Sequence
  Description of Artificial Sequence: Synthetic oligonucleotide
ccgcccagggccugccuuc

SEQ ID NO: 2806131 - RNA, 19 nt, Artificial Sequence
  Description of Artificial Sequence: Synthetic oligonucleotide
ccuaacucacaggcacaga

SEQ ID NO: 2806132 - RNA, 19 nt, Artificial Sequence
  Description of Artificial Sequence: Synthetic oligonucleotide
gccgaggugagguguggau

SEQ ID NO: 2806133 - RNA, 19 nt, Artificial Sequence
  Description of Artificial Sequence: Synthetic oligonucleotide
ggccgaggugaggugugga

SEQ ID NO: 2806134 - RNA, 19 nt, Artificial Sequence
  Description of Artificial Sequence: Synthetic oligonucleotide
cgcugauguggccgaggug

SEQ ID NO: 2806135 - RNA, 19 nt, Artificial Sequence
  Description of Artificial Sequence: Synthetic oligonucleotide
ccuugucugcacuguacuu

SEQ ID NO: 2806136 - RNA, 19 nt, Artificial Sequence
  Description of Artificial Sequence: Synthetic oligonucleotide
ccagggccugccuuccucu

SEQ ID NO: 2806137 - RNA, 19 nt, Artificial Sequence
  Description of Artificial Sequence: Synthetic oligonucleotide
augggccagcugagugcaa

SEQ ID NO: 2806138 - RNA, 19 nt, Artificial Sequence
  Description of Artificial Sequence: Synthetic oligonucleotide
gccccuugaguuaggggau

SEQ ID NO: 2806139 - RNA, 19 nt, Artificial Sequence
  Description of Artificial Sequence: Synthetic oligonucleotide
cacagagcaucugccccuu

SEQ ID NO: 2806140 - RNA, 19 nt, Artificial Sequence
  Description of Artificial Sequence: Synthetic oligonucleotide
ccuugaguuaggggauaua

SEQ ID NO: 2806141 - RNA, 19 nt, Artificial Sequence
  Description of Artificial Sequence: Synthetic oligonucleotide
gccucacccagguguuggu

SEQ ID NO: 2806142 - RNA, 19 nt, Artificial Sequence
  Description of Artificial Sequence: Synthetic oligonucleotide
gcccagcugcagggcaaug

SEQ ID NO: 2806143 - RNA, 19 nt, Artificial Sequence
  Description of Artificial Sequence: Synthetic oligonucleotide
cagggccugccuuccucuu

SEQ ID NO: 2806144 - RNA, 19 nt, Artificial Sequence
  Description of Artificial Sequence: Synthetic oligonucleotide
cgcccagggccugccuucc

SEQ ID NO: 2806145 - RNA, 19 nt, Artificial Sequence
  Description of Artificial Sequence: Synthetic oligonucleotide
ccaacuccacaggcacaaa

SEQ ID NO: 2806146 - RNA, 19 nt, Artificial Sequence
  Description of Artificial Sequence: Synthetic oligonucleotide
ccccuugaguuaggggaua

SEQ ID NO: 2806147 - RNA, 19 nt, Artificial Sequence
  Description of Artificial Sequence: Synthetic oligonucleotide
cccuugaguuaggggauau

SEQ ID NO: 2806148 - RNA, 19 nt, Artificial Sequence
  Description of Artificial Sequence: Synthetic oligonucleotide
ggcccagcugcagggcaau

SEQ ID NO: 2806149 - RNA, 19 nt, Artificial Sequence
  Description of Artificial Sequence: Synthetic oligonucleotide
ccucacccagguguugguu

SEQ ID NO: 2806150 - RNA, 19 nt, Artificial Sequence
  Description of Artificial Sequence: Synthetic oligonucleotide
ccccagagaugaccuuauu

SEQ ID NO: 2806151 - RNA, 19 nt, Artificial Sequence
  Description of Artificial Sequence: Synthetic oligonucleotide
cccgcccagggccugccuu

SEQ ID NO: 2806152 - RNA, 19 nt, Artificial Sequence
  Description of Artificial Sequence: Synthetic oligonucleotide
gcccgcccagggccugccu

SEQ ID NO: 2806153 - RNA, 19 nt, Artificial Sequence
  Description of Artificial Sequence: Synthetic oligonucleotide
ucuauuuaacuccauaagg

SEQ ID NO: 2806154 - RNA, 19 nt, Artificial Sequence
  Description of Artificial Sequence: Synthetic oligonucleotide
ugugguaauauguagaaag

SEQ ID NO: 2806155 - RNA, 19 nt, Artificial Sequence
  Description of Artificial Sequence: Synthetic oligonucleotide
auguagaaagaccagaagc

SEQ ID NO: 2806156 - RNA, 19 nt, Artificial Sequence
  Description of Artificial Sequence: Synthetic oligonucleotide
uaaaauugcaaguugagaa

SEQ ID NO: 2806157 - RNA, 19 nt, Artificial Sequence
  Description of Artificial Sequence: Synthetic oligonucleotide
uguagaaagaccagaagcc

SEQ ID NO: 2806158 - RNA, 19 nt, Artificial Sequence
  Description of Artificial Sequence: Synthetic oligonucleotide
uauuuaacuccauaaggcg

SEQ ID NO: 2806159 - RNA, 19 nt, Artificial Sequence
  Description of Artificial Sequence: Synthetic oligonucleotide
uuuaguaauauuuauuuau

SEQ ID NO: 2806160 - RNA, 19 nt, Artificial Sequence
  Description of Artificial Sequence: Synthetic oligonucleotide
cuauuuaacuccauaaggc

SEQ ID NO: 2806161 - RNA, 19 nt, Artificial Sequence
  Description of Artificial Sequence: Synthetic oligonucleotide
acaaaagcgaucaugaaac

SEQ ID NO: 2806162 - RNA, 19 nt, Artificial Sequence
  Description of Artificial Sequence: Synthetic oligonucleotide
uugaagguaaaauugcaag

SEQ ID NO: 2806163 - RNA, 19 nt, Artificial Sequence
  Description of Artificial Sequence: Synthetic oligonucleotide
aauaucuuuguuauaaugu

SEQ ID NO: 2806164 - RNA, 19 nt, Artificial Sequence
  Description of Artificial Sequence: Synthetic oligonucleotide
ucugcuaacauuuuauaga

SEQ ID NO: 2806165 - RNA, 19 nt, Artificial Sequence
  Description of Artificial Sequence: Synthetic oligonucleotide
auaucuuuguuauaauguc

SEQ ID NO: 2806166 - RNA, 19 nt, Artificial Sequence
  Description of Artificial Sequence: Synthetic oligonucleotide
aaagcgaucaugaaaccac

SEQ ID NO: 2806167 - RNA, 19 nt, Artificial Sequence
  Description of Artificial Sequence: Synthetic oligonucleotide
uguuaaauauuuucuuuag

SEQ ID NO: 2806168 - RNA, 19 nt, Artificial Sequence
  Description of Artificial Sequence: Synthetic oligonucleotide
ucuuuagcagaucuucugg

SEQ ID NO: 2806169 - RNA, 19 nt, Artificial Sequence
  Description of Artificial Sequence: Synthetic oligonucleotide
aaguugagaaucuaaucug

SEQ ID NO: 2806170 - RNA, 19 nt, Artificial Sequence
  Description of Artificial Sequence: Synthetic oligonucleotide
aauguccucgacaaaagcg

SEQ ID NO: 2806171 - RNA, 19 nt, Artificial Sequence
  Description of Artificial Sequence: Synthetic oligonucleotide
uugaauuuaggaccucugg

SEQ ID NO: 2806172 - RNA, 19 nt, Artificial Sequence
  Description of Artificial Sequence: Synthetic oligonucleotide
uguuauaauguccucgaca

SEQ ID NO: 2806173 - RNA, 19 nt, Artificial Sequence
  Description of Artificial Sequence: Synthetic oligonucleotide
uugcacuuagaguugaagg

SEQ ID NO: 2806174 - RNA, 19 nt, Artificial Sequence
  Description of Artificial Sequence: Synthetic oligonucleotide
accagaagccuuuacacac

SEQ ID NO: 2806175 - RNA, 19 nt, Artificial Sequence
  Description of Artificial Sequence: Synthetic oligonucleotide
aaauugcaaguugagaauc

SEQ ID NO: 2806176 - RNA, 19 nt, Artificial Sequence
  Description of Artificial Sequence: Synthetic oligonucleotide
uggauguuaaauauuuucu

SEQ ID NO: 2806177 - RNA, 19 nt, Artificial Sequence
  Description of Artificial Sequence: Synthetic oligonucleotide
auaaggcgaaacuggaccc

SEQ ID NO: 2806178 - RNA, 19 nt, Artificial Sequence
  Description of Artificial Sequence: Synthetic oligonucleotide
ucgacaaaagcgaucauga

SEQ ID NO: 2806179 - RNA, 19 nt, Artificial Sequence
  Description of Artificial Sequence: Synthetic oligonucleotide
uugugcgccauucaugugg

SEQ ID NO: 2806180 - RNA, 19 nt, Artificial Sequence
  Description of Artificial Sequence: Synthetic oligonucleotide
uauuuucuuuagcagaucu

SEQ ID NO: 2806181 - RNA, 19 nt, Artificial Sequence
  Description of Artificial Sequence: Synthetic oligonucleotide
agaccagaagccuuuacac

SEQ ID NO: 2806182 - RNA, 19 nt, Artificial Sequence
  Description of Artificial Sequence: Synthetic oligonucleotide
uucuggaaaauauucaagu

SEQ ID NO: 2806183 - RNA, 19 nt, Artificial Sequence
  Description of Artificial Sequence: Synthetic oligonucleotide
aucuaaucuggcuaagaac

SEQ ID NO: 2806184 - RNA, 19 nt, Artificial Sequence
  Description of Artificial Sequence: Synthetic oligonucleotide
uuuguuauaauguccucga

SEQ ID NO: 2806185 - RNA, 19 nt, Artificial Sequence
  Description of Artificial Sequence: Synthetic oligonucleotide
uaucuuuguuauaaugucc

SEQ ID NO: 2806186 - RNA, 19 nt, Artificial Sequence
  Description of Artificial Sequence: Synthetic oligonucleotide
aagguaaaauugcaaguug

SEQ ID NO: 2806187 - RNA, 19 nt, Artificial Sequence
  Description of Artificial Sequence: Synthetic oligonucleotide
cauaaggcgaaacuggacc

SEQ ID NO: 2806188 - RNA, 19 nt, Artificial Sequence
  Description of Artificial Sequence: Synthetic oligonucleotide
aaaauugcaaguugagaau

SEQ ID NO: 2806189 - RNA, 19 nt, Artificial Sequence
  Description of Artificial Sequence: Synthetic oligonucleotide
caucacaucaauaucuuug

SEQ ID NO: 2806190 - RNA, 19 nt, Artificial Sequence
  Description of Artificial Sequence: Synthetic oligonucleotide
ugaauuuaggaccucugga

SEQ ID NO: 2806191 - RNA, 19 nt, Artificial Sequence
  Description of Artificial Sequence: Synthetic oligonucleotide
uaacauuuuauagaucugc

SEQ ID NO: 2806192 - RNA, 19 nt, Artificial Sequence
  Description of Artificial Sequence: Synthetic oligonucleotide
aauauguagaaagaccaga

SEQ ID NO: 2806193 - RNA, 19 nt, Artificial Sequence
  Description of Artificial Sequence: Synthetic oligonucleotide
uucugcuaacauuuuauag

SEQ ID NO: 2806194 - RNA, 19 nt, Artificial Sequence
  Description of Artificial Sequence: Synthetic oligonucleotide
uauguagaaagaccagaag

SEQ ID NO: 2806195 - RNA, 19 nt, Artificial Sequence
  Description of Artificial Sequence: Synthetic oligonucleotide
aaucuaaucuggcuaagaa

SEQ ID NO: 2806196 - RNA, 19 nt, Artificial Sequence
  Description of Artificial Sequence: Synthetic oligonucleotide
acaucaauaucuuuguuau

SEQ ID NO: 2806197 - RNA, 19 nt, Artificial Sequence
  Description of Artificial Sequence: Synthetic oligonucleotide
ugcuccauucaucacauca

SEQ ID NO: 2806198 - RNA, 19 nt, Artificial Sequence
  Description of Artificial Sequence: Synthetic oligonucleotide
uauaauguccucgacaaaa

SEQ ID NO: 2806199 - RNA, 19 nt, Artificial Sequence
  Description of Artificial Sequence: Synthetic oligonucleotide
uaauauguagaaagaccag

SEQ ID NO: 2806200 - RNA, 19 nt, Artificial Sequence
  Description of Artificial Sequence: Synthetic oligonucleotide
guaauauguagaaagacca

SEQ ID NO: 2806201 - RNA, 19 nt, Artificial Sequence
  Description of Artificial Sequence: Synthetic oligonucleotide
ugagaaucuaaucuggcua

SEQ ID NO: 2806202 - RNA, 19 nt, Artificial Sequence
  Description of Artificial Sequence: Synthetic oligonucleotide
ugaagguaaaauugcaagu

SEQ ID NO: 2806203 - RNA, 19 nt, Artificial Sequence
  Description of Artificial Sequence: Synthetic oligonucleotide
aagaccagaagccuuuaca

SEQ ID NO: 2806204 - RNA, 19 nt, Artificial Sequence
  Description of Artificial Sequence: Synthetic oligonucleotide
uaaucucugagccaccucu

SEQ ID NO: 2806205 - RNA, 19 nt, Artificial Sequence
  Description of Artificial Sequence: Synthetic oligonucleotide
cuuuguuauaauguccucg

SEQ ID NO: 2806206 - RNA, 19 nt, Artificial Sequence
  Description of Artificial Sequence: Synthetic oligonucleotide
agaacuggauguuaaauau

SEQ ID NO: 2806207 - RNA, 19 nt, Artificial Sequence
  Description of Artificial Sequence: Synthetic oligonucleotide
uuuaacuccauaaggcgaa

SEQ ID NO: 2806208 - RNA, 19 nt, Artificial Sequence
  Description of Artificial Sequence: Synthetic oligonucleotide
gacugcucuauuuaacucc

SEQ ID NO: 2806209 - RNA, 19 nt, Artificial Sequence
  Description of Artificial Sequence: Synthetic oligonucleotide
guauacaguguuuuguuug

SEQ ID NO: 2806210 - RNA, 19 nt, Artificial Sequence
  Description of Artificial Sequence: Synthetic oligonucleotide
aagaacuggauguuaaaua

SEQ ID NO: 2806211 - RNA, 19 nt, Artificial Sequence
  Description of Artificial Sequence: Synthetic oligonucleotide
aauauuuucuuuagcagau

SEQ ID NO: 2806212 - RNA, 19 nt, Artificial Sequence
  Description of Artificial Sequence: Synthetic oligonucleotide
aauuuaggaccucuggaaa

SEQ ID NO: 2806213 - RNA, 19 nt, Artificial Sequence
  Description of Artificial Sequence: Synthetic oligonucleotide
uauacaguguuuuguuugc

SEQ ID NO: 2806214 - RNA, 19 nt, Artificial Sequence
  Description of Artificial Sequence: Synthetic oligonucleotide
aacucggggcauuccaagc

SEQ ID NO: 2806215 - RNA, 19 nt, Artificial Sequence
  Description of Artificial Sequence: Synthetic oligonucleotide
aacuccauaaggcgaaacu

SEQ ID NO: 2806216 - RNA, 19 nt, Artificial Sequence
  Description of Artificial Sequence: Synthetic oligonucleotide
agaguugaagguaaaauug

SEQ ID NO: 2806217 - RNA, 19 nt, Artificial Sequence
  Description of Artificial Sequence: Synthetic oligonucleotide
auuccaagcagacugcucu

SEQ ID NO: 2806218 - RNA, 19 nt, Artificial Sequence
  Description of Artificial Sequence: Synthetic oligonucleotide
ugcacuuagaguugaaggu

SEQ ID NO: 2806219 - RNA, 19 nt, Artificial Sequence
  Description of Artificial Sequence: Synthetic oligonucleotide
caauaucuuuguuauaaug

SEQ ID NO: 2806220 - RNA, 19 nt, Artificial Sequence
  Description of Artificial Sequence: Synthetic oligonucleotide
uguugugcuccauucauca

SEQ ID NO: 2806221 - RNA, 19 nt, Artificial Sequence
  Description of Artificial Sequence: Synthetic oligonucleotide
ucuggcuaagaacuggaug

SEQ ID NO: 2806222 - RNA, 19 nt, Artificial Sequence
  Description of Artificial Sequence: Synthetic oligonucleotide
uauagaucugcuguugugc

SEQ ID NO: 2806223 - RNA, 19 nt, Artificial Sequence
  Description of Artificial Sequence: Synthetic oligonucleotide
uggggauugaauuuaggac

SEQ ID NO: 2806224 - RNA, 19 nt, Artificial Sequence
  Description of Artificial Sequence: Synthetic oligonucleotide
cuggauguuaaauauuuuc

SEQ ID NO: 2806225 - RNA, 19 nt, Artificial Sequence
  Description of Artificial Sequence: Synthetic oligonucleotide
uuuucuuuagcagaucuuc

SEQ ID NO: 2806226 - RNA, 19 nt, Artificial Sequence
  Description of Artificial Sequence: Synthetic oligonucleotide
aucaauaucuuuguuauaa

SEQ ID NO: 2806227 - RNA, 19 nt, Artificial Sequence
  Description of Artificial Sequence: Synthetic oligonucleotide
agaucugcuguugugcucc

SEQ ID NO: 2806228 - RNA, 19 nt, Artificial Sequence
  Description of Artificial Sequence: Synthetic oligonucleotide
aaagaccagaagccuuuac

SEQ ID NO: 2806229 - RNA, 19 nt, Artificial Sequence
  Description of Artificial Sequence: Synthetic oligonucleotide
gaagccuuuacacaccuca

SEQ ID NO: 2806230 - RNA, 19 nt, Artificial Sequence
  Description of Artificial Sequence: Synthetic oligonucleotide
uuuauagaucugcuguugu

SEQ ID NO: 2806231 - RNA, 19 nt, Artificial Sequence
  Description of Artificial Sequence: Synthetic oligonucleotide
cuccauaaggcgaaacugg

SEQ ID NO: 2806232 - RNA, 19 nt, Artificial Sequence
  Description of Artificial Sequence: Synthetic oligonucleotide
cucuauuuaacuccauaag

SEQ ID NO: 2806233 - RNA, 19 nt, Artificial Sequence
  Description of Artificial Sequence: Synthetic oligonucleotide
ggggauugaauuuaggacc

SEQ ID NO: 2806234 - RNA, 19 nt, Artificial Sequence
  Description of Artificial Sequence: Synthetic oligonucleotide
uuguuugccauguaugccu

SEQ ID NO: 2806235 - RNA, 19 nt, Artificial Sequence
  Description of Artificial Sequence: Synthetic oligonucleotide
auucaucacaucaauaucu

SEQ ID NO: 2806236 - RNA, 19 nt, Artificial Sequence
  Description of Artificial Sequence: Synthetic oligonucleotide
uguuuuguuugccauguau

SEQ ID NO: 2806237 - RNA, 19 nt, Artificial Sequence
  Description of Artificial Sequence: Synthetic oligonucleotide
uugugcuccauucaucaca

SEQ ID NO: 2806238 - RNA, 19 nt, Artificial Sequence
  Description of Artificial Sequence: Synthetic oligonucleotide
uagaguugaagguaaaauu

SEQ ID NO: 2806239 - RNA, 19 nt, Artificial Sequence
  Description of Artificial Sequence: Synthetic oligonucleotide
cuucuggaaaauauucaag

SEQ ID NO: 2806240 - RNA, 19 nt, Artificial Sequence
  Description of Artificial Sequence: Synthetic oligonucleotide
uuuuaguaauauuuauuua

SEQ ID NO: 2806241 - RNA, 19 nt, Artificial Sequence
  Description of Artificial Sequence: Synthetic oligonucleotide
acauuuuauagaucugcug

SEQ ID NO: 2806242 - RNA, 19 nt, Artificial Sequence
  Description of Artificial Sequence: Synthetic oligonucleotide
uucuuuagcagaucuucug

SEQ ID NO: 2806243 - RNA, 19 nt, Artificial Sequence
  Description of Artificial Sequence: Synthetic oligonucleotide
aaaagcgaucaugaaacca

SEQ ID NO: 2806244 - RNA, 19 nt, Artificial Sequence
  Description of Artificial Sequence: Synthetic oligonucleotide
gacaaaagcgaucaugaaa

SEQ ID NO: 2806245 - RNA, 19 nt, Artificial Sequence
  Description of Artificial Sequence: Synthetic oligonucleotide
uaaucuggcuaagaacugg

SEQ ID NO: 2806246 - RNA, 19 nt, Artificial Sequence
  Description of Artificial Sequence: Synthetic oligonucleotide
uuuuauagaucugcuguug

SEQ ID NO: 2806247 - RNA, 19 nt, Artificial Sequence
  Description of Artificial Sequence: Synthetic oligonucleotide
gaauuuaggaccucuggaa

SEQ ID NO: 2806248 - RNA, 19 nt, Artificial Sequence
  Description of Artificial Sequence: Synthetic oligonucleotide
uuagaguugaagguaaaau

SEQ ID NO: 2806249 - RNA, 19 nt, Artificial Sequence
  Description of Artificial Sequence: Synthetic oligonucleotide
auguuaaauauuuucuuua

SEQ ID NO: 2806250 - RNA, 19 nt, Artificial Sequence
  Description of Artificial Sequence: Synthetic oligonucleotide
gguaauauguagaaagacc

SEQ ID NO: 2806251 - RNA, 19 nt, Artificial Sequence
  Description of Artificial Sequence: Synthetic oligonucleotide
ugcaaguugagaaucuaau

SEQ ID NO: 2806252 - RNA, 19 nt, Artificial Sequence
  Description of Artificial Sequence: Synthetic oligonucleotide
aucacaucaauaucuuugu

SEQ ID NO: 2806253 - RNA, 19 nt, Artificial Sequence
  Description of Artificial Sequence: Synthetic oligonucleotide
uuauagaucugcuguugug

SEQ ID NO: 2806254 - RNA, 19 nt, Artificial Sequence
  Description of Artificial Sequence: Synthetic oligonucleotide
aaacucggggcauuccaag

SEQ ID NO: 2806255 - RNA, 19 nt, Artificial Sequence
  Description of Artificial Sequence: Synthetic oligonucleotide
uaauguccucgacaaaagc

SEQ ID NO: 2806256 - RNA, 19 nt, Artificial Sequence
  Description of Artificial Sequence: Synthetic oligonucleotide
aguugagaaucuaaucugg

SEQ ID NO: 2806257 - RNA, 19 nt, Artificial Sequence
  Description of Artificial Sequence: Synthetic oligonucleotide
uugagaaucuaaucuggcu

SEQ ID NO: 2806258 - RNA, 19 nt, Artificial Sequence
  Description of Artificial Sequence: Synthetic oligonucleotide
accucaguccuccaaggac

SEQ ID NO: 2806259 - RNA, 19 nt, Artificial Sequence
  Description of Artificial Sequence: Synthetic oligonucleotide
gaagagggcacccugaucu

SEQ ID NO: 2806260 - RNA, 19 nt, Artificial Sequence
  Description of Artificial Sequence: Synthetic oligonucleotide
ugaaacucggggcauucca

SEQ ID NO: 2806261 - RNA, 19 nt, Artificial Sequence
  Description of Artificial Sequence: Synthetic oligonucleotide
gaguugaagguaaaauugc

SEQ ID NO: 2806262 - RNA, 19 nt, Artificial Sequence
  Description of Artificial Sequence: Synthetic oligonucleotide
gaucuucuggaaaauauuc

SEQ ID NO: 2806263 - RNA, 19 nt, Artificial Sequence
  Description of Artificial Sequence: Synthetic oligonucleotide
aacauuuuauagaucugcu

SEQ ID NO: 2806264 - RNA, 19 nt, Artificial Sequence
  Description of Artificial Sequence: Synthetic oligonucleotide
agacugcucuauuuaacuc

SEQ ID NO: 2806265 - RNA, 19 nt, Artificial Sequence
  Description of Artificial Sequence: Synthetic oligonucleotide
uaguaauauuuauuuauuu

SEQ ID NO: 2806266 - RNA, 19 nt, Artificial Sequence
  Description of Artificial Sequence: Synthetic oligonucleotide
aucaugaaaccacgggauc

SEQ ID NO: 2806267 - RNA, 19 nt, Artificial Sequence
  Description of Artificial Sequence: Synthetic oligonucleotide
uggacccuugcacuuagag

SEQ ID NO: 2806268 - RNA, 19 nt, Artificial Sequence
  Description of Artificial Sequence: Synthetic oligonucleotide
uccauaaggcgaaacugga

SEQ ID NO: 2806269 - RNA, 19 nt, Artificial Sequence
  Description of Artificial Sequence: Synthetic oligonucleotide
ugguaauauguagaaagac

SEQ ID NO: 2806270 - RNA, 19 nt, Artificial Sequence
  Description of Artificial Sequence: Synthetic oligonucleotide
uccucgacaaaagcgauca

SEQ ID NO: 2806271 - RNA, 19 nt, Artificial Sequence
  Description of Artificial Sequence: Synthetic oligonucleotide
aacuggauguuaaauauuu

SEQ ID NO: 2806272 - RNA, 19 nt, Artificial Sequence
  Description of Artificial Sequence: Synthetic oligonucleotide
cauuuuauagaucugcugu

SEQ ID NO: 2806273 - RNA, 19 nt, Artificial Sequence
  Description of Artificial Sequence: Synthetic oligonucleotide
gcuaacauuuuauagaucu

SEQ ID NO: 2806274 - RNA, 19 nt, Artificial Sequence
  Description of Artificial Sequence: Synthetic oligonucleotide
cacccugaucucauuaugg

SEQ ID NO: 2806275 - RNA, 19 nt, Artificial Sequence
  Description of Artificial Sequence: Synthetic oligonucleotide
aucucugagccaccucucc

SEQ ID NO: 2806276 - RNA, 19 nt, Artificial Sequence
  Description of Artificial Sequence: Synthetic oligonucleotide
cucuuaaucucugagccac

SEQ ID NO: 2806277 - RNA, 19 nt, Artificial Sequence
  Description of Artificial Sequence: Synthetic oligonucleotide
uuuagcagaucuucuggaa

SEQ ID NO: 2806278 - RNA, 19 nt, Artificial Sequence
  Description of Artificial Sequence: Synthetic oligonucleotide
aaccacgggaucugaaacu

SEQ ID NO: 2806279 - RNA, 19 nt, Artificial Sequence
  Description of Artificial Sequence: Synthetic oligonucleotide
aaggacuucugcuaacauu

SEQ ID NO: 2806280 - RNA, 19 nt, Artificial Sequence
  Description of Artificial Sequence: Synthetic oligonucleotide
uacaguguuuuguuugcca

SEQ ID NO: 2806281 - RNA, 19 nt, Artificial Sequence
  Description of Artificial Sequence: Synthetic oligonucleotide
cuaacauuuuauagaucug

SEQ ID NO: 2806282 - RNA, 19 nt, Artificial Sequence
  Description of Artificial Sequence: Synthetic oligonucleotide
ucaugaaaccacgggaucu

SEQ ID NO: 2806283 - RNA, 19 nt, Artificial Sequence
  Description of Artificial Sequence: Synthetic oligonucleotide
cacgggaucugaaacucgg

SEQ ID NO: 2806284 - RNA, 19 nt, Artificial Sequence
  Description of Artificial Sequence: Synthetic oligonucleotide
auucaugugguugcugggg

SEQ ID NO: 2806285 - RNA, 19 nt, Artificial Sequence
  Description of Artificial Sequence: Synthetic oligonucleotide
uaagaacuggauguuaaau

SEQ ID NO: 2806286 - RNA, 19 nt, Artificial Sequence
  Description of Artificial Sequence: Synthetic oligonucleotide
auuuuauagaucugcuguu

SEQ ID NO: 2806287 - RNA, 19 nt, Artificial Sequence
  Description of Artificial Sequence: Synthetic oligonucleotide
auuuaacuccauaaggcga

SEQ ID NO: 2806288 - RNA, 19 nt, Artificial Sequence
  Description of Artificial Sequence: Synthetic oligonucleotide
auuuaggaccucuggaaaa

SEQ ID NO: 2806289 - RNA, 19 nt, Artificial Sequence
  Description of Artificial Sequence: Synthetic oligonucleotide
gagaaucuaaucuggcuaa

SEQ ID NO: 2806290 - RNA, 19 nt, Artificial Sequence
  Description of Artificial Sequence: Synthetic oligonucleotide
cauucaucacaucaauauc

SEQ ID NO: 2806291 - RNA, 19 nt, Artificial Sequence
  Description of Artificial Sequence: Synthetic oligonucleotide
aauugcaaguugagaaucu

SEQ ID NO: 2806292 - RNA, 19 nt, Artificial Sequence
  Description of Artificial Sequence: Synthetic oligonucleotide
ugccauguaugccugccug

SEQ ID NO: 2806293 - RNA, 19 nt, Artificial Sequence
  Description of Artificial Sequence: Synthetic oligonucleotide
gauguuaaauauuuucuuu

SEQ ID NO: 2806294 - RNA, 19 nt, Artificial Sequence
  Description of Artificial Sequence: Synthetic oligonucleotide
uagcagaucuucuggaaaa

SEQ ID NO: 2806295 - RNA, 19 nt, Artificial Sequence
  Description of Artificial Sequence: Synthetic oligonucleotide
uucaugugguugcugggga

SEQ ID NO: 2806296 - RNA, 19 nt, Artificial Sequence
  Description of Artificial Sequence: Synthetic oligonucleotide
acuccauaaggcgaaacug

SEQ ID NO: 2806297 - RNA, 19 nt, Artificial Sequence
  Description of Artificial Sequence: Synthetic oligonucleotide
acggugugguaauauguag

SEQ ID NO: 2806298 - RNA, 19 nt, Artificial Sequence
  Description of Artificial Sequence: Synthetic oligonucleotide
uucaucacaucaauaucuu

SEQ ID NO: 2806299 - RNA, 19 nt, Artificial Sequence
  Description of Artificial Sequence: Synthetic oligonucleotide
ugugcuccauucaucacau

SEQ ID NO: 2806300 - RNA, 19 nt, Artificial Sequence
  Description of Artificial Sequence: Synthetic oligonucleotide
gacccuugcacuuagaguu

SEQ ID NO: 2806301 - RNA, 19 nt, Artificial Sequence
  Description of Artificial Sequence: Synthetic oligonucleotide
uuacacaccucaguccucc

SEQ ID NO: 2806302 - RNA, 19 nt, Artificial Sequence
  Description of Artificial Sequence: Synthetic oligonucleotide
aagcgaucaugaaaccacg

SEQ ID NO: 2806303 - RNA, 19 nt, Artificial Sequence
  Description of Artificial Sequence: Synthetic oligonucleotide
uguuugccauguaugccug

SEQ ID NO: 2806304 - RNA, 19 nt, Artificial Sequence
  Description of Artificial Sequence: Synthetic oligonucleotide
ucaauaucuuuguuauaau

SEQ ID NO: 2806305 - RNA, 19 nt, Artificial Sequence
  Description of Artificial Sequence: Synthetic oligonucleotide
uugcaaguugagaaucuaa

SEQ ID NO: 2806306 - RNA, 19 nt, Artificial Sequence
  Description of Artificial Sequence: Synthetic oligonucleotide
uguauacaguguuuuguuu

SEQ ID NO: 2806307 - RNA, 19 nt, Artificial Sequence
  Description of Artificial Sequence: Synthetic oligonucleotide
cuggggauugaauuuagga

SEQ ID NO: 2806308 - RNA, 19 nt, Artificial Sequence
  Description of Artificial Sequence: Synthetic oligonucleotide
cauucaugugguugcuggg

SEQ ID NO: 2806309 - RNA, 19 nt, Artificial Sequence
  Description of Artificial Sequence: Synthetic oligonucleotide
uuugccauguaugccugcc

SEQ ID NO: 2806310 - RNA, 19 nt, Artificial Sequence
  Description of Artificial Sequence: Synthetic oligonucleotide
auguauacaguguuuuguu

SEQ ID NO: 2806311 - RNA, 19 nt, Artificial Sequence
  Description of Artificial Sequence: Synthetic oligonucleotide
auacaguguuuuguuugcc

SEQ ID NO: 2806312 - RNA, 19 nt, Artificial Sequence
  Description of Artificial Sequence: Synthetic oligonucleotide
guaaaauugcaaguugaga

SEQ ID NO: 2806313 - RNA, 19 nt, Artificial Sequence
  Description of Artificial Sequence: Synthetic oligonucleotide
uagaaagaccagaagccuu

SEQ ID NO: 2806314 - RNA, 19 nt, Artificial Sequence
  Description of Artificial Sequence: Synthetic oligonucleotide
caaaagcgaucaugaaacc

SEQ ID NO: 2806315 - RNA, 19 nt, Artificial Sequence
  Description of Artificial Sequence: Synthetic oligonucleotide
ugcucuauuuaacuccaua

SEQ ID NO: 2806316 - RNA, 19 nt, Artificial Sequence
  Description of Artificial Sequence: Synthetic oligonucleotide
gguaaaauugcaaguugag

SEQ ID NO: 2806317 - RNA, 19 nt, Artificial Sequence
  Description of Artificial Sequence: Synthetic oligonucleotide
cacaucaauaucuuuguua

SEQ ID NO: 2806318 - RNA, 19 nt, Artificial Sequence
  Description of Artificial Sequence: Synthetic oligonucleotide
ugguugugcgccauucaug

SEQ ID NO: 2806319 - RNA, 19 nt, Artificial Sequence
  Description of Artificial Sequence: Synthetic oligonucleotide
aagcagacugcucuauuua

SEQ ID NO: 2806320 - RNA, 19 nt, Artificial Sequence
  Description of Artificial Sequence: Synthetic oligonucleotide
ugcgccauucaugugguug

SEQ ID NO: 2806321 - RNA, 19 nt, Artificial Sequence
  Description of Artificial Sequence: Synthetic oligonucleotide
gaaacuggacccuugcacu

SEQ ID NO: 2806322 - RNA, 19 nt, Artificial Sequence
  Description of Artificial Sequence: Synthetic oligonucleotide
cucgacaaaagcgaucaug

SEQ ID NO: 2806323 - RNA, 19 nt, Artificial Sequence
  Description of Artificial Sequence: Synthetic oligonucleotide
aagagggcacccugaucuc

SEQ ID NO: 2806324 - RNA, 19 nt, Artificial Sequence
  Description of Artificial Sequence: Synthetic oligonucleotide
aaaacagccagugcucuua

SEQ ID NO: 2806325 - RNA, 19 nt, Artificial Sequence
  Description of Artificial Sequence: Synthetic oligonucleotide
cuggcuaagaacuggaugu

SEQ ID NO: 2806326 - RNA, 19 nt, Artificial Sequence
  Description of Artificial Sequence: Synthetic oligonucleotide
acaccucaguccuccaagg

SEQ ID NO: 2806327 - RNA, 19 nt, Artificial Sequence
  Description of Artificial Sequence: Synthetic oligonucleotide
agguaaaauugcaaguuga

SEQ ID NO: 2806328 - RNA, 19 nt, Artificial Sequence
  Description of Artificial Sequence: Synthetic oligonucleotide
aggacuucugcuaacauuu

SEQ ID NO: 2806329 - RNA, 19 nt, Artificial Sequence
  Description of Artificial Sequence: Synthetic oligonucleotide
auauguagaaagaccagaa

SEQ ID NO: 2806330 - RNA, 19 nt, Artificial Sequence
  Description of Artificial Sequence: Synthetic oligonucleotide
gaaaccacgggaucugaaa

SEQ ID NO: 2806331 - RNA, 19 nt, Artificial Sequence
  Description of Artificial Sequence: Synthetic oligonucleotide
guugagaaucuaaucuggc

SEQ ID NO: 2806332 - RNA, 19 nt, Artificial Sequence
  Description of Artificial Sequence: Synthetic oligonucleotide
uuguuauaauguccucgac

SEQ ID NO: 2806333 - RNA, 19 nt, Artificial Sequence
  Description of Artificial Sequence: Synthetic oligonucleotide
aaucuggcuaagaacugga

SEQ ID NO: 2806334 - RNA, 19 nt, Artificial Sequence
  Description of Artificial Sequence: Synthetic oligonucleotide
auauuuucuuuagcagauc

SEQ ID NO: 2806335 - RNA, 19 nt, Artificial Sequence
  Description of Artificial Sequence: Synthetic oligonucleotide
ucuuaaucucugagccacc

SEQ ID NO: 2806336 - RNA, 19 nt, Artificial Sequence
  Description of Artificial Sequence: Synthetic oligonucleotide
cuugcacuuagaguugaag

SEQ ID NO: 2806337 - RNA, 19 nt, Artificial Sequence
  Description of Artificial Sequence: Synthetic oligonucleotide
uccauucaucacaucaaua

SEQ ID NO: 2806338 - RNA, 19 nt, Artificial Sequence
  Description of Artificial Sequence: Synthetic oligonucleotide
auugaauuuaggaccucug

SEQ ID NO: 2806339 - RNA, 19 nt, Artificial Sequence
  Description of Artificial Sequence: Synthetic oligonucleotide
aguugaagguaaaauugca

SEQ ID NO: 2806340 - RNA, 19 nt, Artificial Sequence
  Description of Artificial Sequence: Synthetic oligonucleotide
ccauucaugugguugcugg

SEQ ID NO: 2806341 - RNA, 19 nt, Artificial Sequence
  Description of Artificial Sequence: Synthetic oligonucleotide
aaucucugagccaccucuc

SEQ ID NO: 2806342 - RNA, 19 nt, Artificial Sequence
  Description of Artificial Sequence: Synthetic oligonucleotide
accacgggaucugaaacuc

SEQ ID NO: 2806343 - RNA, 19 nt, Artificial Sequence
  Description of Artificial Sequence: Synthetic oligonucleotide
ugcuggggauugaauuuag

SEQ ID NO: 2806344 - RNA, 19 nt, Artificial Sequence
  Description of Artificial Sequence: Synthetic oligonucleotide
ucuuuguuauaauguccuc

SEQ ID NO: 2806345 - RNA, 19 nt, Artificial Sequence
  Description of Artificial Sequence: Synthetic oligonucleotide
gcgaucaugaaaccacggg

SEQ ID NO: 2806346 - RNA, 19 nt, Artificial Sequence
  Description of Artificial Sequence: Synthetic oligonucleotide
cacaccucaguccuccaag

SEQ ID NO: 2806347 - RNA, 19 nt, Artificial Sequence
  Description of Artificial Sequence: Synthetic oligonucleotide
gaccagaagccuuuacaca

SEQ ID NO: 2806348 - RNA, 19 nt, Artificial Sequence
  Description of Artificial Sequence: Synthetic oligonucleotide
ugcuguugugcuccauuca

SEQ ID NO: 2806349 - RNA, 19 nt, Artificial Sequence
  Description of Artificial Sequence: Synthetic oligonucleotide
aaacuggacccuugcacuu

SEQ ID NO: 2806350 - RNA, 19 nt, Artificial Sequence
  Description of Artificial Sequence: Synthetic oligonucleotide
acccugaucucauuaugga

SEQ ID NO: 2806351 - RNA, 19 nt, Artificial Sequence
  Description of Artificial Sequence: Synthetic oligonucleotide
ugugcgccauucauguggu

SEQ ID NO: 2806352 - RNA, 19 nt, Artificial Sequence
  Description of Artificial Sequence: Synthetic oligonucleotide
auguccucgacaaaagcga

SEQ ID NO: 2806353 - RNA, 19 nt, Artificial Sequence
  Description of Artificial Sequence: Synthetic oligonucleotide
cuuuacacaccucaguccu

SEQ ID NO: 2806354 - RNA, 19 nt, Artificial Sequence
  Description of Artificial Sequence: Synthetic oligonucleotide
uuaaucucugagccaccuc

SEQ ID NO: 2806355 - RNA, 19 nt, Artificial Sequence
  Description of Artificial Sequence: Synthetic oligonucleotide
ucugcuguugugcuccauu

SEQ ID NO: 2806356 - RNA, 19 nt, Artificial Sequence
  Description of Artificial Sequence: Synthetic oligonucleotide
ugcuaacauuuuauagauc

SEQ ID NO: 2806357 - RNA, 19 nt, Artificial Sequence
  Description of Artificial Sequence: Synthetic oligonucleotide
agccuuuacacaccucagu

SEQ ID NO: 2806358 - RNA, 19 nt, Artificial Sequence
  Description of Artificial Sequence: Synthetic oligonucleotide
aagccuuuacacaccucag

SEQ ID NO: 2806359 - RNA, 19 nt, Artificial Sequence
  Description of Artificial Sequence: Synthetic oligonucleotide
ugaaaccacgggaucugaa

SEQ ID NO: 2806360 - RNA, 19 nt, Artificial Sequence
  Description of Artificial Sequence: Synthetic oligonucleotide
acucggggcauuccaagca

SEQ ID NO: 2806361 - RNA, 19 nt, Artificial Sequence
  Description of Artificial Sequence: Synthetic oligonucleotide
agcagacugcucuauuuaa

SEQ ID NO: 2806362 - RNA, 19 nt, Artificial Sequence
  Description of Artificial Sequence: Synthetic oligonucleotide
gaaucuaaucuggcuaaga

SEQ ID NO: 2806363 - RNA, 19 nt, Artificial Sequence
  Description of Artificial Sequence: Synthetic oligonucleotide
augguugugcgccauucau

SEQ ID NO: 2806364 - RNA, 19 nt, Artificial Sequence
  Description of Artificial Sequence: Synthetic oligonucleotide
acuggacccuugcacuuag

SEQ ID NO: 2806365 - RNA, 19 nt, Artificial Sequence
  Description of Artificial Sequence: Synthetic oligonucleotide
accucuccagcccacggug

SEQ ID NO: 2806366 - RNA, 19 nt, Artificial Sequence
  Description of Artificial Sequence: Synthetic oligonucleotide
guugaagguaaaauugcaa

SEQ ID NO: 2806367 - RNA, 19 nt, Artificial Sequence
  Description of Artificial Sequence: Synthetic oligonucleotide
gcaaguugagaaucuaauc

SEQ ID NO: 2806368 - RNA, 19 nt, Artificial Sequence
  Description of Artificial Sequence: Synthetic oligonucleotide
caguguuuuguuugccaug

SEQ ID NO: 2806369 - RNA, 19 nt, Artificial Sequence
  Description of Artificial Sequence: Synthetic oligonucleotide
agaaucuaaucuggcuaag

SEQ ID NO: 2806370 - RNA, 19 nt, Artificial Sequence
  Description of Artificial Sequence: Synthetic oligonucleotide
gcucuauuuaacuccauaa

SEQ ID NO: 2806371 - RNA, 19 nt, Artificial Sequence
  Description of Artificial Sequence: Synthetic oligonucleotide
caugaaaccacgggaucug

SEQ ID NO: 2806372 - RNA, 19 nt, Artificial Sequence
  Description of Artificial Sequence: Synthetic oligonucleotide
uguccucgacaaaagcgau

SEQ ID NO: 2806373 - RNA, 19 nt, Artificial Sequence
  Description of Artificial Sequence: Synthetic oligonucleotide
ggugugguaauauguagaa

SEQ ID NO: 2806374 - RNA, 19 nt, Artificial Sequence
  Description of Artificial Sequence: Synthetic oligonucleotide
ccuuuacacaccucagucc

SEQ ID NO: 2806375 - RNA, 19 nt, Artificial Sequence
  Description of Artificial Sequence: Synthetic oligonucleotide
aaacagccagugcucuuaa

SEQ ID NO: 2806376 - RNA, 19 nt, Artificial Sequence
  Description of Artificial Sequence: Synthetic oligonucleotide
uuuacacaccucaguccuc

SEQ ID NO: 2806377 - RNA, 19 nt, Artificial Sequence
  Description of Artificial Sequence: Synthetic oligonucleotide
acugcucuauuuaacucca

SEQ ID NO: 2806378 - RNA, 19 nt, Artificial Sequence
  Description of Artificial Sequence: Synthetic oligonucleotide
ucaucacaucaauaucuuu

SEQ ID NO: 2806379 - RNA, 19 nt, Artificial Sequence
  Description of Artificial Sequence: Synthetic oligonucleotide
gaugguugugcgccauuca

SEQ ID NO: 2806380 - RNA, 19 nt, Artificial Sequence
  Description of Artificial Sequence: Synthetic oligonucleotide
gauugaauuuaggaccucu

SEQ ID NO: 2806381 - RNA, 19 nt, Artificial Sequence
  Description of Artificial Sequence: Synthetic oligonucleotide
ucacaucaauaucuuuguu

SEQ ID NO: 2806382 - RNA, 19 nt, Artificial Sequence
  Description of Artificial Sequence: Synthetic oligonucleotide
cacuuagaguugaagguaa

SEQ ID NO: 2806383 - RNA, 19 nt, Artificial Sequence
  Description of Artificial Sequence: Synthetic oligonucleotide
agcgaucaugaaaccacgg

SEQ ID NO: 2806384 - RNA, 19 nt, Artificial Sequence
  Description of Artificial Sequence: Synthetic oligonucleotide
gaucaugaaaccacgggau

SEQ ID NO: 2806385 - RNA, 19 nt, Artificial Sequence
  Description of Artificial Sequence: Synthetic oligonucleotide
cugcuguugugcuccauuc

SEQ ID NO: 2806386 - RNA, 19 nt, Artificial Sequence
  Description of Artificial Sequence: Synthetic oligonucleotide
cugcuaacauuuuauagau

SEQ ID NO: 2806387 - RNA, 19 nt, Artificial Sequence
  Description of Artificial Sequence: Synthetic oligonucleotide
uccaaggacuucugcuaac

SEQ ID NO: 2806388 - RNA, 19 nt, Artificial Sequence
  Description of Artificial Sequence: Synthetic oligonucleotide
cucggggcauuccaagcag

SEQ ID NO: 2806389 - RNA, 19 nt, Artificial Sequence
  Description of Artificial Sequence: Synthetic oligonucleotide
gccuuuacacaccucaguc

SEQ ID NO: 2806390 - RNA, 19 nt, Artificial Sequence
  Description of Artificial Sequence: Synthetic oligonucleotide
uaaggcgaaacuggacccu

SEQ ID NO: 2806391 - RNA, 19 nt, Artificial Sequence
  Description of Artificial Sequence: Synthetic oligonucleotide
agaaagaccagaagccuuu

SEQ ID NO: 2806392 - RNA, 19 nt, Artificial Sequence
  Description of Artificial Sequence: Synthetic oligonucleotide
cauuccaagcagacugcuc

SEQ ID NO: 2806393 - RNA, 19 nt, Artificial Sequence
  Description of Artificial Sequence: Synthetic oligonucleotide
agaucuucuggaaaauauu

SEQ ID NO: 2806394 - RNA, 19 nt, Artificial Sequence
  Description of Artificial Sequence: Synthetic oligonucleotide
cuguugugcuccauucauc

SEQ ID NO: 2806395 - RNA, 19 nt, Artificial Sequence
  Description of Artificial Sequence: Synthetic oligonucleotide
gacuucugcuaacauuuua

SEQ ID NO: 2806396 - RNA, 19 nt, Artificial Sequence
  Description of Artificial Sequence: Synthetic oligonucleotide
ucuccagcccacggugugg

SEQ ID NO: 2806397 - RNA, 19 nt, Artificial Sequence
  Description of Artificial Sequence: Synthetic oligonucleotide
uaacuccauaaggcgaaac

SEQ ID NO: 2806398 - RNA, 19 nt, Artificial Sequence
  Description of Artificial Sequence: Synthetic oligonucleotide
ucggggcauuccaagcaga

SEQ ID NO: 2806399 - RNA, 19 nt, Artificial Sequence
  Description of Artificial Sequence: Synthetic oligonucleotide
cagaucuucuggaaaauau

SEQ ID NO: 2806400 - RNA, 19 nt, Artificial Sequence
  Description of Artificial Sequence: Synthetic oligonucleotide
cuucugcuaacauuuuaua

SEQ ID NO: 2806401 - RNA, 19 nt, Artificial Sequence
  Description of Artificial Sequence: Synthetic oligonucleotide
cagacugcucuauuuaacu

SEQ ID NO: 2806402 - RNA, 19 nt, Artificial Sequence
  Description of Artificial Sequence: Synthetic oligonucleotide
cuuagaguugaagguaaaa

SEQ ID NO: 2806403 - RNA, 19 nt, Artificial Sequence
  Description of Artificial Sequence: Synthetic oligonucleotide
guagaaagaccagaagccu

SEQ ID NO: 2806404 - RNA, 19 nt, Artificial Sequence
  Description of Artificial Sequence: Synthetic oligonucleotide
guugugcuccauucaucac

SEQ ID NO: 2806405 - RNA, 19 nt, Artificial Sequence
  Description of Artificial Sequence: Synthetic oligonucleotide
gguugugcgccauucaugu

SEQ ID NO: 2806406 - RNA, 19 nt, Artificial Sequence
  Description of Artificial Sequence: Synthetic oligonucleotide
auugcaaguugagaaucua

SEQ ID NO: 2806407 - RNA, 19 nt, Artificial Sequence
  Description of Artificial Sequence: Synthetic oligonucleotide
uugcuggggauugaauuua

SEQ ID NO: 2806408 - RNA, 19 nt, Artificial Sequence
  Description of Artificial Sequence: Synthetic oligonucleotide
cgaaacuggacccuugcac

SEQ ID NO: 2806409 - RNA, 19 nt, Artificial Sequence
  Description of Artificial Sequence: Synthetic oligonucleotide
guuugccauguaugccugc

SEQ ID NO: 2806410 - RNA, 19 nt, Artificial Sequence
  Description of Artificial Sequence: Synthetic oligonucleotide
aacagccagugcucuuaau

SEQ ID NO: 2806411 - RNA, 19 nt, Artificial Sequence
  Description of Artificial Sequence: Synthetic oligonucleotide
ggauguuaaauauuuucuu

SEQ ID NO: 2806412 - RNA, 19 nt, Artificial Sequence
  Description of Artificial Sequence: Synthetic oligonucleotide
gaaacucggggcauuccaa

SEQ ID NO: 2806413 - RNA, 19 nt, Artificial Sequence
  Description of Artificial Sequence: Synthetic oligonucleotide
uuaacuccauaaggcgaaa

SEQ ID NO: 2806414 - RNA, 19 nt, Artificial Sequence
  Description of Artificial Sequence: Synthetic oligonucleotide
ggcgaaacuggacccuugc

SEQ ID NO: 2806415 - RNA, 19 nt, Artificial Sequence
  Description of Artificial Sequence: Synthetic oligonucleotide
guugcuggggauugaauuu

SEQ ID NO: 2806416 - RNA, 19 nt, Artificial Sequence
  Description of Artificial Sequence: Synthetic oligonucleotide
gcgccauucaugugguugc

SEQ ID NO: 2806417 - RNA, 19 nt, Artificial Sequence
  Description of Artificial Sequence: Synthetic oligonucleotide
cacggugugguaauaugua

SEQ ID NO: 2806418 - RNA, 19 nt, Artificial Sequence
  Description of Artificial Sequence: Synthetic oligonucleotide
uuccaagcagacugcucua

SEQ ID NO: 2806419 - RNA, 19 nt, Artificial Sequence
  Description of Artificial Sequence: Synthetic oligonucleotide
ccauucaucacaucaauau

SEQ ID NO: 2806420 - RNA, 19 nt, Artificial Sequence
  Description of Artificial Sequence: Synthetic oligonucleotide
cugaaacucggggcauucc

SEQ ID NO: 2806421 - RNA, 19 nt, Artificial Sequence
  Description of Artificial Sequence: Synthetic oligonucleotide
acgggaucugaaacucggg

SEQ ID NO: 2806422 - RNA, 19 nt, Artificial Sequence
  Description of Artificial Sequence: Synthetic oligonucleotide
aaggcgaaacuggacccuu

SEQ ID NO: 2806423 - RNA, 19 nt, Artificial Sequence
  Description of Artificial Sequence: Synthetic oligonucleotide
guugugcgccauucaugug

SEQ ID NO: 2806424 - RNA, 19 nt, Artificial Sequence
  Description of Artificial Sequence: Synthetic oligonucleotide
gcuaagaacuggauguuaa

SEQ ID NO: 2806425 - RNA, 19 nt, Artificial Sequence
  Description of Artificial Sequence: Synthetic oligonucleotide
uccaagcagacugcucuau

SEQ ID NO: 2806426 - RNA, 19 nt, Artificial Sequence
  Description of Artificial Sequence: Synthetic oligonucleotide
acacaccucaguccuccaa

SEQ ID NO: 2806427 - RNA, 19 nt, Artificial Sequence
  Description of Artificial Sequence: Synthetic oligonucleotide
agaagccuuuacacaccuc

SEQ ID NO: 2806428 - RNA, 19 nt, Artificial Sequence
  Description of Artificial Sequence: Synthetic oligonucleotide
agcagaucuucuggaaaau

SEQ ID NO: 2806429 - RNA, 19 nt, Artificial Sequence
  Description of Artificial Sequence: Synthetic oligonucleotide
ccauaaggcgaaacuggac

SEQ ID NO: 2806430 - RNA, 19 nt, Artificial Sequence
  Description of Artificial Sequence: Synthetic oligonucleotide
aacuggacccuugcacuua

SEQ ID NO: 2806431 - RNA, 19 nt, Artificial Sequence
  Description of Artificial Sequence: Synthetic oligonucleotide
gcacccugaucucauuaug

SEQ ID NO: 2806432 - RNA, 19 nt, Artificial Sequence
  Description of Artificial Sequence: Synthetic oligonucleotide
uacacaccucaguccucca

SEQ ID NO: 2806433 - RNA, 19 nt, Artificial Sequence
  Description of Artificial Sequence: Synthetic oligonucleotide
augaaaccacgggaucuga

SEQ ID NO: 2806434 - RNA, 19 nt, Artificial Sequence
  Description of Artificial Sequence: Synthetic oligonucleotide
acuggauguuaaauauuuu

SEQ ID NO: 2806435 - RNA, 19 nt, Artificial Sequence
  Description of Artificial Sequence: Synthetic oligonucleotide
gccauguaugccugccugc

SEQ ID NO: 2806436 - RNA, 19 nt, Artificial Sequence
  Description of Artificial Sequence: Synthetic oligonucleotide
agagggcacccugaucuca

SEQ ID NO: 2806437 - RNA, 19 nt, Artificial Sequence
  Description of Artificial Sequence: Synthetic oligonucleotide
cuccaaggacuucugcuaa

SEQ ID NO: 2806438 - RNA, 19 nt, Artificial Sequence
  Description of Artificial Sequence: Synthetic oligonucleotide
cgaucaugaaaccacggga

SEQ ID NO: 2806439 - RNA, 19 nt, Artificial Sequence
  Description of Artificial Sequence: Synthetic oligonucleotide
uggcuaagaacuggauguu

SEQ ID NO: 2806440 - RNA, 19 nt, Artificial Sequence
  Description of Artificial Sequence: Synthetic oligonucleotide
acuuagaguugaagguaaa

SEQ ID NO: 2806441 - RNA, 19 nt, Artificial Sequence
  Description of Artificial Sequence: Synthetic oligonucleotide
cuuaaucucugagccaccu

SEQ ID NO: 2806442 - RNA, 19 nt, Artificial Sequence
  Description of Artificial Sequence: Synthetic oligonucleotide
ggcauuccaagcagacugc

SEQ ID NO: 2806443 - RNA, 19 nt, Artificial Sequence
  Description of Artificial Sequence: Synthetic oligonucleotide
gcagacugcucuauuuaac

SEQ ID NO: 2806444 - RNA, 19 nt, Artificial Sequence
  Description of Artificial Sequence: Synthetic oligonucleotide
gcuggggauugaauuuagg

SEQ ID NO: 2806445 - RNA, 19 nt, Artificial Sequence
  Description of Artificial Sequence: Synthetic oligonucleotide
gguugcuggggauugaauu

SEQ ID NO: 2806446 - RNA, 19 nt, Artificial Sequence
  Description of Artificial Sequence: Synthetic oligonucleotide
caucaauaucuuuguuaua

SEQ ID NO: 2806447 - RNA, 19 nt, Artificial Sequence
  Description of Artificial Sequence: Synthetic oligonucleotide
gcucuuaaucucugagcca

SEQ ID NO: 2806448 - RNA, 19 nt, Artificial Sequence
  Description of Artificial Sequence: Synthetic oligonucleotide
caagcagacugcucuauuu

SEQ ID NO: 2806449 - RNA, 19 nt, Artificial Sequence
  Description of Artificial Sequence: Synthetic oligonucleotide
uggaugguugugcgccauu

SEQ ID NO: 2806450 - RNA, 19 nt, Artificial Sequence
  Description of Artificial Sequence: Synthetic oligonucleotide
acccuugcacuuagaguug

SEQ ID NO: 2806451 - RNA, 19 nt, Artificial Sequence
  Description of Artificial Sequence: Synthetic oligonucleotide
gaaagaccagaagccuuua

SEQ ID NO: 2806452 - RNA, 19 nt, Artificial Sequence
  Description of Artificial Sequence: Synthetic oligonucleotide
gaacuggauguuaaauauu

SEQ ID NO: 2806453 - RNA, 19 nt, Artificial Sequence
  Description of Artificial Sequence: Synthetic oligonucleotide
gugugguaauauguagaaa

SEQ ID NO: 2806454 - RNA, 19 nt, Artificial Sequence
  Description of Artificial Sequence: Synthetic oligonucleotide
ccacgggaucugaaacucg

SEQ ID NO: 2806455 - RNA, 19 nt, Artificial Sequence
  Description of Artificial Sequence: Synthetic oligonucleotide
aguccuccaaggacuucug

SEQ ID NO: 2806456 - RNA, 19 nt, Artificial Sequence
  Description of Artificial Sequence: Synthetic oligonucleotide
gaucugcuguugugcucca

SEQ ID NO: 2806457 - RNA, 19 nt, Artificial Sequence
  Description of Artificial Sequence: Synthetic oligonucleotide
cccacggugugguaauaug

SEQ ID NO: 2806458 - RNA, 19 nt, Artificial Sequence
  Description of Artificial Sequence: Synthetic oligonucleotide
ggaugguugugcgccauuc

SEQ ID NO: 2806459 - RNA, 19 nt, Artificial Sequence
  Description of Artificial Sequence: Synthetic oligonucleotide
caccucaguccuccaagga

SEQ ID NO: 2806460 - RNA, 19 nt, Artificial Sequence
  Description of Artificial Sequence: Synthetic oligonucleotide
cuccauucaucacaucaau

SEQ ID NO: 2806461 - RNA, 19 nt, Artificial Sequence
  Description of Artificial Sequence: Synthetic oligonucleotide
gcacuuagaguugaaggua

SEQ ID NO: 2806462 - RNA, 19 nt, Artificial Sequence
  Description of Artificial Sequence: Synthetic oligonucleotide
aucuggcuaagaacuggau

SEQ ID NO: 2806463 - RNA, 19 nt, Artificial Sequence
  Description of Artificial Sequence: Synthetic oligonucleotide
cagaagccuuuacacaccu

SEQ ID NO: 2806464 - RNA, 19 nt, Artificial Sequence
  Description of Artificial Sequence: Synthetic oligonucleotide
guccucgacaaaagcgauc

SEQ ID NO: 2806465 - RNA, 19 nt, Artificial Sequence
  Description of Artificial Sequence: Synthetic oligonucleotide
ggacccuugcacuuagagu

SEQ ID NO: 2806466 - RNA, 19 nt, Artificial Sequence
  Description of Artificial Sequence: Synthetic oligonucleotide
gcuccauucaucacaucaa

SEQ ID NO: 2806467 - RNA, 19 nt, Artificial Sequence
  Description of Artificial Sequence: Synthetic oligonucleotide
gcuguugugcuccauucau

SEQ ID NO: 2806468 - RNA, 19 nt, Artificial Sequence
  Description of Artificial Sequence: Synthetic oligonucleotide
aucugaaacucggggcauu

SEQ ID NO: 2806469 - RNA, 19 nt, Artificial Sequence
  Description of Artificial Sequence: Synthetic oligonucleotide
gaucugaaacucggggcau

SEQ ID NO: 2806470 - RNA, 19 nt, Artificial Sequence
  Description of Artificial Sequence: Synthetic oligonucleotide
aggcgaaacuggacccuug

SEQ ID NO: 2806471 - RNA, 19 nt, Artificial Sequence
  Description of Artificial Sequence: Synthetic oligonucleotide
gcgaaacuggacccuugca

SEQ ID NO: 2806472 - RNA, 19 nt, Artificial Sequence
  Description of Artificial Sequence: Synthetic oligonucleotide
ccucaguccuccaaggacu

SEQ ID NO: 2806473 - RNA, 19 nt, Artificial Sequence
  Description of Artificial Sequence: Synthetic oligonucleotide
ccuccaaggacuucugcua

SEQ ID NO: 2806474 - RNA, 19 nt, Artificial Sequence
  Description of Artificial Sequence: Synthetic oligonucleotide
cggugugguaauauguaga

SEQ ID NO: 2806475 - RNA, 19 nt, Artificial Sequence
  Description of Artificial Sequence: Synthetic oligonucleotide
ccaccucuccagcccacgg

SEQ ID NO: 2806476 - RNA, 19 nt, Artificial Sequence
  Description of Artificial Sequence: Synthetic oligonucleotide
agccaccucuccagcccac

SEQ ID NO: 2806477 - RNA, 19 nt, Artificial Sequence
  Description of Artificial Sequence: Synthetic oligonucleotide
ccaaggacuucugcuaaca

SEQ ID NO: 2806478 - RNA, 19 nt, Artificial Sequence
  Description of Artificial Sequence: Synthetic oligonucleotide
caaggacuucugcuaacau

SEQ ID NO: 2806479 - RNA, 19 nt, Artificial Sequence
  Description of Artificial Sequence: Synthetic oligonucleotide
guguuuuguuugccaugua

SEQ ID NO: 2806480 - RNA, 19 nt, Artificial Sequence
  Description of Artificial Sequence: Synthetic oligonucleotide
gccauucaugugguugcug

SEQ ID NO: 2806481 - RNA, 19 nt, Artificial Sequence
  Description of Artificial Sequence: Synthetic oligonucleotide
gcagaucuucuggaaaaua

SEQ ID NO: 2806482 - RNA, 19 nt, Artificial Sequence
  Description of Artificial Sequence: Synthetic oligonucleotide
ggauugaauuuaggaccuc

SEQ ID NO: 2806483 - RNA, 19 nt, Artificial Sequence
  Description of Artificial Sequence: Synthetic oligonucleotide
ccacggugugguaauaugu

SEQ ID NO: 2806484 - RNA, 19 nt, Artificial Sequence
  Description of Artificial Sequence: Synthetic oligonucleotide
ggcuaagaacuggauguua

SEQ ID NO: 2806485 - RNA, 19 nt, Artificial Sequence
  Description of Artificial Sequence: Synthetic oligonucleotide
cagaagagggcacccugau

SEQ ID NO: 2806486 - RNA, 19 nt, Artificial Sequence
  Description of Artificial Sequence: Synthetic oligonucleotide
cggggcauuccaagcagac

SEQ ID NO: 2806487 - RNA, 19 nt, Artificial Sequence
  Description of Artificial Sequence: Synthetic oligonucleotide
agggcacccugaucucauu

SEQ ID NO: 2806488 - RNA, 19 nt, Artificial Sequence
  Description of Artificial Sequence: Synthetic oligonucleotide
ggcacccugaucucauuau

SEQ ID NO: 2806489 - RNA, 19 nt, Artificial Sequence
  Description of Artificial Sequence: Synthetic oligonucleotide
gggcacccugaucucauua

SEQ ID NO: 2806490 - RNA, 19 nt, Artificial Sequence
  Description of Artificial Sequence: Synthetic oligonucleotide
gccaccucuccagcccacg

SEQ ID NO: 2806491 - RNA, 19 nt, Artificial Sequence
  Description of Artificial Sequence: Synthetic oligonucleotide
cucaguccuccaaggacuu

SEQ ID NO: 2806492 - RNA, 19 nt, Artificial Sequence
  Description of Artificial Sequence: Synthetic oligonucleotide
gugcuccauucaucacauc

SEQ ID NO: 2806493 - RNA, 19 nt, Artificial Sequence
  Description of Artificial Sequence: Synthetic oligonucleotide
cuggacccuugcacuuaga

SEQ ID NO: 2806494 - RNA, 19 nt, Artificial Sequence
  Description of Artificial Sequence: Synthetic oligonucleotide
uccagcccacgguguggua

SEQ ID NO: 2806495 - RNA, 19 nt, Artificial Sequence
  Description of Artificial Sequence: Synthetic oligonucleotide
gagggcacccugaucucau

SEQ ID NO: 2806496 - RNA, 19 nt, Artificial Sequence
  Description of Artificial Sequence: Synthetic oligonucleotide
aucugcuguugugcuccau

SEQ ID NO: 2806497 - RNA, 19 nt, Artificial Sequence
  Description of Artificial Sequence: Synthetic oligonucleotide
caccucuccagcccacggu

SEQ ID NO: 2806498 - RNA, 19 nt, Artificial Sequence
  Description of Artificial Sequence: Synthetic oligonucleotide
cgacaaaagcgaucaugaa

SEQ ID NO: 2806499 - RNA, 19 nt, Artificial Sequence
  Description of Artificial Sequence: Synthetic oligonucleotide
gcauuccaagcagacugcu

SEQ ID NO: 2806500 - RNA, 19 nt, Artificial Sequence
  Description of Artificial Sequence: Synthetic oligonucleotide
cagcccacggugugguaau

SEQ ID NO: 2806501 - RNA, 19 nt, Artificial Sequence
  Description of Artificial Sequence: Synthetic oligonucleotide
ggggcauuccaagcagacu

SEQ ID NO: 2806502 - RNA, 19 nt, Artificial Sequence
  Description of Artificial Sequence: Synthetic oligonucleotide
cugcucuauuuaacuccau

SEQ ID NO: 2806503 - RNA, 19 nt, Artificial Sequence
  Description of Artificial Sequence: Synthetic oligonucleotide
cuccagcccacgguguggu

SEQ ID NO: 2806504 - RNA, 19 nt, Artificial Sequence
  Description of Artificial Sequence: Synthetic oligonucleotide
ccuugcacuuagaguugaa

SEQ ID NO: 2806505 - RNA, 19 nt, Artificial Sequence
  Description of Artificial Sequence: Synthetic oligonucleotide
ccagcccacggugugguaa

SEQ ID NO: 2806506 - RNA, 19 nt, Artificial Sequence
  Description of Artificial Sequence: Synthetic oligonucleotide
agcccacggugugguaaua

SEQ ID NO: 2806507 - RNA, 19 nt, Artificial Sequence
  Description of Artificial Sequence: Synthetic oligonucleotide
ccaagcagacugcucuauu

SEQ ID NO: 2806508 - RNA, 19 nt, Artificial Sequence
  Description of Artificial Sequence: Synthetic oligonucleotide
ccucuccagcccacggugu

SEQ ID NO: 2806509 - RNA, 19 nt, Artificial Sequence
  Description of Artificial Sequence: Synthetic oligonucleotide
gcccacggugugguaauau

SEQ ID NO: 2806510 - RNA, 19 nt, Artificial Sequence
  Description of Artificial Sequence: Synthetic oligonucleotide
gugcgccauucaugugguu

SEQ ID NO: 2806511 - RNA, 19 nt, Artificial Sequence
  Description of Artificial Sequence: Synthetic oligonucleotide
ccucgacaaaagcgaucau

SEQ ID NO: 2806512 - RNA, 19 nt, Artificial Sequence
  Description of Artificial Sequence: Synthetic oligonucleotide
cgccauucaugugguugcu

SEQ ID NO: 2806513 - RNA, 19 nt, Artificial Sequence
  Description of Artificial Sequence: Synthetic oligonucleotide
acuacugugggguuuacgg

SEQ ID NO: 2806514 - RNA, 19 nt, Artificial Sequence
  Description of Artificial Sequence: Synthetic oligonucleotide
guuuacggcauucacacgg

SEQ ID NO: 2806515 - RNA, 19 nt, Artificial Sequence
  Description of Artificial Sequence: Synthetic oligonucleotide
ucuagggccaucaucuugg

SEQ ID NO: 2806516 - RNA, 19 nt, Artificial Sequence
  Description of Artificial Sequence: Synthetic oligonucleotide
gagacauucacaauggccc

SEQ ID NO: 2806517 - RNA, 19 nt, Artificial Sequence
  Description of Artificial Sequence: Synthetic oligonucleotide
acagauguuuauuggaggg

SEQ ID NO: 2806518 - RNA, 19 nt, Artificial Sequence
  Description of Artificial Sequence: Synthetic oligonucleotide
ugaaggacgugucacaggc

SEQ ID NO: 2806519 - RNA, 19 nt, Artificial Sequence
  Description of Artificial Sequence: Synthetic oligonucleotide
auucacacggaucuugugg

SEQ ID NO: 2806520 - RNA, 19 nt, Artificial Sequence
  Description of Artificial Sequence: Synthetic oligonucleotide
ugagacaccuggaugacag

SEQ ID NO: 2806521 - RNA, 19 nt, Artificial Sequence
  Description of Artificial Sequence: Synthetic oligonucleotide
augaccuuggccuuguggg

SEQ ID NO: 2806522 - RNA, 19 nt, Artificial Sequence
  Description of Artificial Sequence: Synthetic oligonucleotide
aaugucugagcguauggcu

SEQ ID NO: 2806523 - RNA, 19 nt, Artificial Sequence
  Description of Artificial Sequence: Synthetic oligonucleotide
uucacacggaucuuguggg

SEQ ID NO: 2806524 - RNA, 19 nt, Artificial Sequence
  Description of Artificial Sequence: Synthetic oligonucleotide
agggccaucaucuugguca

SEQ ID NO: 2806525 - RNA, 19 nt, Artificial Sequence
  Description of Artificial Sequence: Synthetic oligonucleotide
aagauucacguugaaggac

SEQ ID NO: 2806526 - RNA, 19 nt, Artificial Sequence
  Description of Artificial Sequence: Synthetic oligonucleotide
aaucugagacaccuggaug

SEQ ID NO: 2806527 - RNA, 19 nt, Artificial Sequence
  Description of Artificial Sequence: Synthetic oligonucleotide
ugggaugcgauccagcaug

SEQ ID NO: 2806528 - RNA, 19 nt, Artificial Sequence
  Description of Artificial Sequence: Synthetic oligonucleotide
aacucuagggccaucaucu

SEQ ID NO: 2806529 - RNA, 19 nt, Artificial Sequence
  Description of Artificial Sequence: Synthetic oligonucleotide
uugcucagcaggaagagga

SEQ ID NO: 2806530 - RNA, 19 nt, Artificial Sequence
  Description of Artificial Sequence: Synthetic oligonucleotide
agagucggcacacagguug

SEQ ID NO: 2806531 - RNA, 19 nt, Artificial Sequence
  Description of Artificial Sequence: Synthetic oligonucleotide
cacaaucugagacaccugg

SEQ ID NO: 2806532 - RNA, 19 nt, Artificial Sequence
  Description of Artificial Sequence: Synthetic oligonucleotide
cucagcaggaagaggaugg

SEQ ID NO: 2806533 - RNA, 19 nt, Artificial Sequence
  Description of Artificial Sequence: Synthetic oligonucleotide
gaugcgauccagcaugacc

SEQ ID NO: 2806534 - RNA, 19 nt, Artificial Sequence
  Description of Artificial Sequence: Synthetic oligonucleotide
aagaggauggcguccacca

SEQ ID NO: 2806535 - RNA, 19 nt, Artificial Sequence
  Description of Artificial Sequence: Synthetic oligonucleotide
auguuuauuggagggaugg

SEQ ID NO: 2806536 - RNA, 19 nt, Artificial Sequence
  Description of Artificial Sequence: Synthetic oligonucleotide
cgaagauucacguugaagg

SEQ ID NO: 2806537 - RNA, 19 nt, Artificial Sequence
  Description of Artificial Sequence: Synthetic oligonucleotide
acacagguugcacagaugu

SEQ ID NO: 2806538 - RNA, 19 nt, Artificial Sequence
  Description of Artificial Sequence: Synthetic oligonucleotide
aaggacgugucacaggccu

SEQ ID NO: 2806539 - RNA, 19 nt, Artificial Sequence
  Description of Artificial Sequence: Synthetic oligonucleotide
uggaacaguagacacugug

SEQ ID NO: 2806540 - RNA, 19 nt, Artificial Sequence
  Description of Artificial Sequence: Synthetic oligonucleotide
ucuguugcucagcaggaag

SEQ ID NO: 2806541 - RNA, 19 nt, Artificial Sequence
  Description of Artificial Sequence: Synthetic oligonucleotide
agacauucacaauggcccc

SEQ ID NO: 2806542 - RNA, 19 nt, Artificial Sequence
  Description of Artificial Sequence: Synthetic oligonucleotide
aucugagacaccuggauga

SEQ ID NO: 2806543 - RNA, 19 nt, Artificial Sequence
  Description of Artificial Sequence: Synthetic oligonucleotide
guuuauuggagggaugggg

SEQ ID NO: 2806544 - RNA, 19 nt, Artificial Sequence
  Description of Artificial Sequence: Synthetic oligonucleotide
aacuugccgagugggaugc

SEQ ID NO: 2806545 - RNA, 19 nt, Artificial Sequence
  Description of Artificial Sequence: Synthetic oligonucleotide
acggcauucacacggaucu

SEQ ID NO: 2806546 - RNA, 19 nt, Artificial Sequence
  Description of Artificial Sequence: Synthetic oligonucleotide
uccagagcacccuucgugg

SEQ ID NO: 2806547 - RNA, 19 nt, Artificial Sequence
  Description of Artificial Sequence: Synthetic oligonucleotide
uccaccucggcaaacuugc

SEQ ID NO: 2806548 - RNA, 19 nt, Artificial Sequence
  Description of Artificial Sequence: Synthetic oligonucleotide
cuggagacauucacaaugg

SEQ ID NO: 2806549 - RNA, 19 nt, Artificial Sequence
  Description of Artificial Sequence: Synthetic oligonucleotide
uuggucagcauguccagag

SEQ ID NO: 2806550 - RNA, 19 nt, Artificial Sequence
  Description of Artificial Sequence: Synthetic oligonucleotide
uugcacagauguuuauugg

SEQ ID NO: 2806551 - RNA, 19 nt, Artificial Sequence
  Description of Artificial Sequence: Synthetic oligonucleotide
gaugacagcccgaagauuc

SEQ ID NO: 2806552 - RNA, 19 nt, Artificial Sequence
  Description of Artificial Sequence: Synthetic oligonucleotide
gaggauggcguccaccacg

SEQ ID NO: 2806553 - RNA, 19 nt, Artificial Sequence
  Description of Artificial Sequence: Synthetic oligonucleotide
ugcacagauguuuauugga

SEQ ID NO: 2806554 - RNA, 19 nt, Artificial Sequence
  Description of Artificial Sequence: Synthetic oligonucleotide
auuggugucaucacuacug

SEQ ID NO: 2806555 - RNA, 19 nt, Artificial Sequence
  Description of Artificial Sequence: Synthetic oligonucleotide
uucacaauggccccuggaa

SEQ ID NO: 2806556 - RNA, 19 nt, Artificial Sequence
  Description of Artificial Sequence: Synthetic oligonucleotide
agacaccuggaugacagcc

SEQ ID NO: 2806557 - RNA, 19 nt, Artificial Sequence
  Description of Artificial Sequence: Synthetic oligonucleotide
agauucacguugaaggacg

SEQ ID NO: 2806558 - RNA, 19 nt, Artificial Sequence
  Description of Artificial Sequence: Synthetic oligonucleotide
aaacuugccgagugggaug

SEQ ID NO: 2806559 - RNA, 19 nt, Artificial Sequence
  Description of Artificial Sequence: Synthetic oligonucleotide
agcccgaagauucacguug

SEQ ID NO: 2806560 - RNA, 19 nt, Artificial Sequence
  Description of Artificial Sequence: Synthetic oligonucleotide
gcuucuguugcucagcagg

SEQ ID NO: 2806561 - RNA, 19 nt, Artificial Sequence
  Description of Artificial Sequence: Synthetic oligonucleotide
gaagauucacguugaagga

SEQ ID NO: 2806562 - RNA, 19 nt, Artificial Sequence
  Description of Artificial Sequence: Synthetic oligonucleotide
uucguggaacaguagacac

SEQ ID NO: 2806563 - RNA, 19 nt, Artificial Sequence
  Description of Artificial Sequence: Synthetic oligonucleotide
agcagaguaaugguguggg

SEQ ID NO: 2806564 - RNA, 19 nt, Artificial Sequence
  Description of Artificial Sequence: Synthetic oligonucleotide
ugugguuggucagugcacg

SEQ ID NO: 2806565 - RNA, 19 nt, Artificial Sequence
  Description of Artificial Sequence: Synthetic oligonucleotide
uacugugggguuuacggca

SEQ ID NO: 2806566 - RNA, 19 nt, Artificial Sequence
  Description of Artificial Sequence: Synthetic oligonucleotide
aacuccccgagcuaucaug

SEQ ID NO: 2806567 - RNA, 19 nt, Artificial Sequence
  Description of Artificial Sequence: Synthetic oligonucleotide
uucacguugaaggacgugu

SEQ ID NO: 2806568 - RNA, 19 nt, Artificial Sequence
  Description of Artificial Sequence: Synthetic oligonucleotide
gcuggagacauucacaaug

SEQ ID NO: 2806569 - RNA, 19 nt, Artificial Sequence
  Description of Artificial Sequence: Synthetic oligonucleotide
acugugguuggucagugca

SEQ ID NO: 2806570 - RNA, 19 nt, Artificial Sequence
  Description of Artificial Sequence: Synthetic oligonucleotide
acacggaucuuguggggcc

SEQ ID NO: 2806571 - RNA, 19 nt, Artificial Sequence
  Description of Artificial Sequence: Synthetic oligonucleotide
ucggcaaacuugccgagug

SEQ ID NO: 2806572 - RNA, 19 nt, Artificial Sequence
  Description of Artificial Sequence: Synthetic oligonucleotide
ucacaauggccccuggaac

SEQ ID NO: 2806573 - RNA, 19 nt, Artificial Sequence
  Description of Artificial Sequence: Synthetic oligonucleotide
acaccuggaugacagcccg

SEQ ID NO: 2806574 - RNA, 19 nt, Artificial Sequence
  Description of Artificial Sequence: Synthetic oligonucleotide
uagacacugugguugguca

SEQ ID NO: 2806575 - RNA, 19 nt, Artificial Sequence
  Description of Artificial Sequence: Synthetic oligonucleotide
uguuuauuggagggauggg

SEQ ID NO: 2806576 - RNA, 19 nt, Artificial Sequence
  Description of Artificial Sequence: Synthetic oligonucleotide
aagugcauccgguggucag

SEQ ID NO: 2806577 - RNA, 19 nt, Artificial Sequence
  Description of Artificial Sequence: Synthetic oligonucleotide
ggguuuacggcauucacac

SEQ ID NO: 2806578 - RNA, 19 nt, Artificial Sequence
  Description of Artificial Sequence: Synthetic oligonucleotide
caugaccuuggccuugugg

SEQ ID NO: 2806579 - RNA, 19 nt, Artificial Sequence
  Description of Artificial Sequence: Synthetic oligonucleotide
uuuacggcauucacacgga

SEQ ID NO: 2806580 - RNA, 19 nt, Artificial Sequence
  Description of Artificial Sequence: Synthetic oligonucleotide
auguccagagcacccuucg

SEQ ID NO: 2806581 - RNA, 19 nt, Artificial Sequence
  Description of Artificial Sequence: Synthetic oligonucleotide
agcuaucaugccccuggcc

SEQ ID NO: 2806582 - RNA, 19 nt, Artificial Sequence
  Description of Artificial Sequence: Synthetic oligonucleotide
gauggcguccaccacguuc

SEQ ID NO: 2806583 - RNA, 19 nt, Artificial Sequence
  Description of Artificial Sequence: Synthetic oligonucleotide
acguugaaggacgugucac

SEQ ID NO: 2806584 - RNA, 19 nt, Artificial Sequence
  Description of Artificial Sequence: Synthetic oligonucleotide
aguugguccggcccauugg

SEQ ID NO: 2806585 - RNA, 19 nt, Artificial Sequence
  Description of Artificial Sequence: Synthetic oligonucleotide
ggaacaguagacacugugg

SEQ ID NO: 2806586 - RNA, 19 nt, Artificial Sequence
  Description of Artificial Sequence: Synthetic oligonucleotide
uggaugacagcccgaagau

SEQ ID NO: 2806587 - RNA, 19 nt, Artificial Sequence
  Description of Artificial Sequence: Synthetic oligonucleotide
uggcuggagacauucacaa

SEQ ID NO: 2806588 - RNA, 19 nt, Artificial Sequence
  Description of Artificial Sequence: Synthetic oligonucleotide
accggcaaagugcauccgg

SEQ ID NO: 2806589 - RNA, 19 nt, Artificial Sequence
  Description of Artificial Sequence: Synthetic oligonucleotide
uccaccacguucuccaccu

SEQ ID NO: 2806590 - RNA, 19 nt, Artificial Sequence
  Description of Artificial Sequence: Synthetic oligonucleotide
ggcaaagugcauccggugg

SEQ ID NO: 2806591 - RNA, 19 nt, Artificial Sequence
  Description of Artificial Sequence: Synthetic oligonucleotide
ucuuggucagcauguccag

SEQ ID NO: 2806592 - RNA, 19 nt, Artificial Sequence
  Description of Artificial Sequence: Synthetic oligonucleotide
gaacaguagacacuguggu

SEQ ID NO: 2806593 - RNA, 19 nt, Artificial Sequence
  Description of Artificial Sequence: Synthetic oligonucleotide
uguugcucagcaggaagag

SEQ ID NO: 2806594 - RNA, 19 nt, Artificial Sequence
  Description of Artificial Sequence: Synthetic oligonucleotide
ucuuguggggccccaacuc

SEQ ID NO: 2806595 - RNA, 19 nt, Artificial Sequence
  Description of Artificial Sequence: Synthetic oligonucleotide
accccaguugguccggccc

SEQ ID NO: 2806596 - RNA, 19 nt, Artificial Sequence
  Description of Artificial Sequence: Synthetic oligonucleotide
cuacugugggguuuacggc

SEQ ID NO: 2806597 - RNA, 19 nt, Artificial Sequence
  Description of Artificial Sequence: Synthetic oligonucleotide
uggggccccaacucuaggg

SEQ ID NO: 2806598 - RNA, 19 nt, Artificial Sequence
  Description of Artificial Sequence: Synthetic oligonucleotide
ugucugagcguauggcuga

SEQ ID NO: 2806599 - RNA, 19 nt, Artificial Sequence
  Description of Artificial Sequence: Synthetic oligonucleotide
accucggcaaacuugccga

SEQ ID NO: 2806600 - RNA, 19 nt, Artificial Sequence
  Description of Artificial Sequence: Synthetic oligonucleotide
uccccgagcuaucaugccc

SEQ ID NO: 2806601 - RNA, 19 nt, Artificial Sequence
  Description of Artificial Sequence: Synthetic oligonucleotide
augcgauccagcaugaccu

SEQ ID NO: 2806602 - RNA, 19 nt, Artificial Sequence
  Description of Artificial Sequence: Synthetic oligonucleotide
acuccccgagcuaucaugc

SEQ ID NO: 2806603 - RNA, 19 nt, Artificial Sequence
  Description of Artificial Sequence: Synthetic oligonucleotide
uuggucagugcacgcuggg

SEQ ID NO: 2806604 - RNA, 19 nt, Artificial Sequence
  Description of Artificial Sequence: Synthetic oligonucleotide
acagcccgaagauucacgu

SEQ ID NO: 2806605 - RNA, 19 nt, Artificial Sequence
  Description of Artificial Sequence: Synthetic oligonucleotide
cuggaugacagcccgaaga

SEQ ID NO: 2806606 - RNA, 19 nt, Artificial Sequence
  Description of Artificial Sequence: Synthetic oligonucleotide
ugagcguauggcugagcag

SEQ ID NO: 2806607 - RNA, 19 nt, Artificial Sequence
  Description of Artificial Sequence: Synthetic oligonucleotide
aauggccccuggaacuccc

SEQ ID NO: 2806608 - RNA, 19 nt, Artificial Sequence
  Description of Artificial Sequence: Synthetic oligonucleotide
uggagacauucacaauggc

SEQ ID NO: 2806609 - RNA, 19 nt, Artificial Sequence
  Description of Artificial Sequence: Synthetic oligonucleotide
ucacacggaucuugugggg

SEQ ID NO: 2806610 - RNA, 19 nt, Artificial Sequence
  Description of Artificial Sequence: Synthetic oligonucleotide
ggagacauucacaauggcc

SEQ ID NO: 2806611 - RNA, 19 nt, Artificial Sequence
  Description of Artificial Sequence: Synthetic oligonucleotide
gagcguauggcugagcaga

SEQ ID NO: 2806612 - RNA, 19 nt, Artificial Sequence
  Description of Artificial Sequence: Synthetic oligonucleotide
ucguggaacaguagacacu

SEQ ID NO: 2806613 - RNA, 19 nt, Artificial Sequence
  Description of Artificial Sequence: Synthetic oligonucleotide
caguagacacugugguugg

SEQ ID NO: 2806614 - RNA, 19 nt, Artificial Sequence
  Description of Artificial Sequence: Synthetic oligonucleotide
agauguuuauuggagggau

SEQ ID NO: 2806615 - RNA, 19 nt, Artificial Sequence
  Description of Artificial Sequence: Synthetic oligonucleotide
caaugucugagcguauggc

SEQ ID NO: 2806616 - RNA, 19 nt, Artificial Sequence
  Description of Artificial Sequence: Synthetic oligonucleotide
ugggguuuacggcauucac

SEQ ID NO: 2806617 - RNA, 19 nt, Artificial Sequence
  Description of Artificial Sequence: Synthetic oligonucleotide
ccauccaccggcaaagugc

SEQ ID NO: 2806618 - RNA, 19 nt, Artificial Sequence
  Description of Artificial Sequence: Synthetic oligonucleotide
gauguuuauuggagggaug

SEQ ID NO: 2806619 - RNA, 19 nt, Artificial Sequence
  Description of Artificial Sequence: Synthetic oligonucleotide
guccagagcacccuucgug

SEQ ID NO: 2806620 - RNA, 19 nt, Artificial Sequence
  Description of Artificial Sequence: Synthetic oligonucleotide
uauggcugagcagaguaau

SEQ ID NO: 2806621 - RNA, 19 nt, Artificial Sequence
  Description of Artificial Sequence: Synthetic oligonucleotide
gagcagaguaauggugugg

SEQ ID NO: 2806622 - RNA, 19 nt, Artificial Sequence
  Description of Artificial Sequence: Synthetic oligonucleotide
uguggggccccaacucuag

SEQ ID NO: 2806623 - RNA, 19 nt, Artificial Sequence
  Description of Artificial Sequence: Synthetic oligonucleotide
cauccgguggucaggcugc

SEQ ID NO: 2806624 - RNA, 19 nt, Artificial Sequence
  Description of Artificial Sequence: Synthetic oligonucleotide
uacggcauucacacggauc

SEQ ID NO: 2806625 - RNA, 19 nt, Artificial Sequence
  Description of Artificial Sequence: Synthetic oligonucleotide
agagcacccuucguggaac

SEQ ID NO: 2806626 - RNA, 19 nt, Artificial Sequence
  Description of Artificial Sequence: Synthetic oligonucleotide
ucggcacacagguugcaca

SEQ ID NO: 2806627 - RNA, 19 nt, Artificial Sequence
  Description of Artificial Sequence: Synthetic oligonucleotide
ggcucagguagccaggaag

SEQ ID NO: 2806628 - RNA, 19 nt, Artificial Sequence
  Description of Artificial Sequence: Synthetic oligonucleotide
gcuaucaugccccuggcca

SEQ ID NO: 2806629 - RNA, 19 nt, Artificial Sequence
  Description of Artificial Sequence: Synthetic oligonucleotide
caccucggcaaacuugccg

SEQ ID NO: 2806630 - RNA, 19 nt, Artificial Sequence
  Description of Artificial Sequence: Synthetic oligonucleotide
ggucagugcacgcugggag

SEQ ID NO: 2806631 - RNA, 19 nt, Artificial Sequence
  Description of Artificial Sequence: Synthetic oligonucleotide
ucacguugaaggacguguc

SEQ ID NO: 2806632 - RNA, 19 nt, Artificial Sequence
  Description of Artificial Sequence: Synthetic oligonucleotide
gacagcccgaagauucacg

SEQ ID NO: 2806633 - RNA, 19 nt, Artificial Sequence
  Description of Artificial Sequence: Synthetic oligonucleotide
cuaucaugccccuggccac

SEQ ID NO: 2806634 - RNA, 19 nt, Artificial Sequence
  Description of Artificial Sequence: Synthetic oligonucleotide
agaggauggcguccaccac

SEQ ID NO: 2806635 - RNA, 19 nt, Artificial Sequence
  Description of Artificial Sequence: Synthetic oligonucleotide
agacacugugguuggucag

SEQ ID NO: 2806636 - RNA, 19 nt, Artificial Sequence
  Description of Artificial Sequence: Synthetic oligonucleotide
agcaggaagaggauggcgu

SEQ ID NO: 2806637 - RNA, 19 nt, Artificial Sequence
  Description of Artificial Sequence: Synthetic oligonucleotide
gaagaggauggcguccacc

SEQ ID NO: 2806638 - RNA, 19 nt, Artificial Sequence
  Description of Artificial Sequence: Synthetic oligonucleotide
caccacguucuccaccucg

SEQ ID NO: 2806639 - RNA, 19 nt, Artificial Sequence
  Description of Artificial Sequence: Synthetic oligonucleotide
gcaaugucugagcguaugg

SEQ ID NO: 2806640 - RNA, 19 nt, Artificial Sequence
  Description of Artificial Sequence: Synthetic oligonucleotide
gucaggcugcuucuguugc

SEQ ID NO: 2806641 - RNA, 19 nt, Artificial Sequence
  Description of Artificial Sequence: Synthetic oligonucleotide
auucacaauggccccugga

SEQ ID NO: 2806642 - RNA, 19 nt, Artificial Sequence
  Description of Artificial Sequence: Synthetic oligonucleotide
ugguccggcccauuggugu

SEQ ID NO: 2806643 - RNA, 19 nt, Artificial Sequence
  Description of Artificial Sequence: Synthetic oligonucleotide
uggucagcauguccagagc

SEQ ID NO: 2806644 - RNA, 19 nt, Artificial Sequence
  Description of Artificial Sequence: Synthetic oligonucleotide
acaauggccccuggaacuc

SEQ ID NO: 2806645 - RNA, 19 nt, Artificial Sequence
  Description of Artificial Sequence: Synthetic oligonucleotide
ggggagcaaugucugagcg

SEQ ID NO: 2806646 - RNA, 19 nt, Artificial Sequence
  Description of Artificial Sequence: Synthetic oligonucleotide
augucugagcguauggcug

SEQ ID NO: 2806647 - RNA, 19 nt, Artificial Sequence
  Description of Artificial Sequence: Synthetic oligonucleotide
ggcaaacuugccgaguggg

SEQ ID NO: 2806648 - RNA, 19 nt, Artificial Sequence
  Description of Artificial Sequence: Synthetic oligonucleotide
aucuuguggggccccaacu

SEQ ID NO: 2806649 - RNA, 19 nt, Artificial Sequence
  Description of Artificial Sequence: Synthetic oligonucleotide
ucagugcacgcugggaggc

SEQ ID NO: 2806650 - RNA, 19 nt, Artificial Sequence
  Description of Artificial Sequence: Synthetic oligonucleotide
agugcauccgguggucagg

SEQ ID NO: 2806651 - RNA, 19 nt, Artificial Sequence
  Description of Artificial Sequence: Synthetic oligonucleotide
gacaccuggaugacagccc

SEQ ID NO: 2806652 - RNA, 19 nt, Artificial Sequence
  Description of Artificial Sequence: Synthetic oligonucleotide
cucuagggccaucaucuug

SEQ ID NO: 2806653 - RNA, 19 nt, Artificial Sequence
  Description of Artificial Sequence: Synthetic oligonucleotide
caacucuagggccaucauc

SEQ ID NO: 2806654 - RNA, 19 nt, Artificial Sequence
  Description of Artificial Sequence: Synthetic oligonucleotide
agcaaugucugagcguaug

SEQ ID NO: 2806655 - RNA, 19 nt, Artificial Sequence
  Description of Artificial Sequence: Synthetic oligonucleotide
guugcucagcaggaagagg

SEQ ID NO: 2806656 - RNA, 19 nt, Artificial Sequence
  Description of Artificial Sequence: Synthetic oligonucleotide
aaagugcauccggugguca

SEQ ID NO: 2806657 - RNA, 19 nt, Artificial Sequence
  Description of Artificial Sequence: Synthetic oligonucleotide
cugagcguauggcugagca

SEQ ID NO: 2806658 - RNA, 19 nt, Artificial Sequence
  Description of Artificial Sequence: Synthetic oligonucleotide
gaucuuguggggccccaac

SEQ ID NO: 2806659 - RNA, 19 nt, Artificial Sequence
  Description of Artificial Sequence: Synthetic oligonucleotide
cauucacacggaucuugug

SEQ ID NO: 2806660 - RNA, 19 nt, Artificial Sequence
  Description of Artificial Sequence: Synthetic oligonucleotide
gcacagauguuuauuggag

SEQ ID NO: 2806661 - RNA, 19 nt, Artificial Sequence
  Description of Artificial Sequence: Synthetic oligonucleotide
uggccccuggaacuccccg

SEQ ID NO: 2806662 - RNA, 19 nt, Artificial Sequence
  Description of Artificial Sequence: Synthetic oligonucleotide
uggccacaaucugagacac

SEQ ID NO: 2806663 - RNA, 19 nt, Artificial Sequence
  Description of Artificial Sequence: Synthetic oligonucleotide
cuggccacaaucugagaca

SEQ ID NO: 2806664 - RNA, 19 nt, Artificial Sequence
  Description of Artificial Sequence: Synthetic oligonucleotide
uccaccggcaaagugcauc

SEQ ID NO: 2806665 - RNA, 19 nt, Artificial Sequence
  Description of Artificial Sequence: Synthetic oligonucleotide
cugagcagaguaauggugu

SEQ ID NO: 2806666 - RNA, 19 nt, Artificial Sequence
  Description of Artificial Sequence: Synthetic oligonucleotide
guuggucagugcacgcugg

SEQ ID NO: 2806667 - RNA, 19 nt, Artificial Sequence
  Description of Artificial Sequence: Synthetic oligonucleotide
gucaucacuacuguggggu

SEQ ID NO: 2806668 - RNA, 19 nt, Artificial Sequence
  Description of Artificial Sequence: Synthetic oligonucleotide
ugggaggccuggcuggaga

SEQ ID NO: 2806669 - RNA, 19 nt, Artificial Sequence
  Description of Artificial Sequence: Synthetic oligonucleotide
ugcuucuguugcucagcag

SEQ ID NO: 2806670 - RNA, 19 nt, Artificial Sequence
  Description of Artificial Sequence: Synthetic oligonucleotide
cauccaccggcaaagugca

SEQ ID NO: 2806671 - RNA, 19 nt, Artificial Sequence
  Description of Artificial Sequence: Synthetic oligonucleotide
cuucuguugcucagcagga

SEQ ID NO: 2806672 - RNA, 19 nt, Artificial Sequence
  Description of Artificial Sequence: Synthetic oligonucleotide
ccuggccacaaucugagac

SEQ ID NO: 2806673 - RNA, 19 nt, Artificial Sequence
  Description of Artificial Sequence: Synthetic oligonucleotide
auggcguccaccacguucu

SEQ ID NO: 2806674 - RNA, 19 nt, Artificial Sequence
  Description of Artificial Sequence: Synthetic oligonucleotide
cugugguuggucagugcac

SEQ ID NO: 2806675 - RNA, 19 nt, Artificial Sequence
  Description of Artificial Sequence: Synthetic oligonucleotide
cacacggaucuuguggggc

SEQ ID NO: 2806676 - RNA, 19 nt, Artificial Sequence
  Description of Artificial Sequence: Synthetic oligonucleotide
ucugagacaccuggaugac

SEQ ID NO: 2806677 - RNA, 19 nt, Artificial Sequence
  Description of Artificial Sequence: Synthetic oligonucleotide
acauucacaauggccccug

SEQ ID NO: 2806678 - RNA, 19 nt, Artificial Sequence
  Description of Artificial Sequence: Synthetic oligonucleotide
accacguucuccaccucgg

SEQ ID NO: 2806679 - RNA, 19 nt, Artificial Sequence
  Description of Artificial Sequence: Synthetic oligonucleotide
uugguccggcccauuggug

SEQ ID NO: 2806680 - RNA, 19 nt, Artificial Sequence
  Description of Artificial Sequence: Synthetic oligonucleotide
gguuggucagugcacgcug

SEQ ID NO: 2806681 - RNA, 19 nt, Artificial Sequence
  Description of Artificial Sequence: Synthetic oligonucleotide
cgagcuaucaugccccugg

SEQ ID NO: 2806682 - RNA, 19 nt, Artificial Sequence
  Description of Artificial Sequence: Synthetic oligonucleotide
ugccccuggccacaaucug

SEQ ID NO: 2806683 - RNA, 19 nt, Artificial Sequence
  Description of Artificial Sequence: Synthetic oligonucleotide
uguccagagcacccuucgu

SEQ ID NO: 2806684 - RNA, 19 nt, Artificial Sequence
  Description of Artificial Sequence: Synthetic oligonucleotide
cuggcuggagacauucaca

SEQ ID NO: 2806685 - RNA, 19 nt, Artificial Sequence
  Description of Artificial Sequence: Synthetic oligonucleotide
cauguccagagcacccuuc

SEQ ID NO: 2806686 - RNA, 19 nt, Artificial Sequence
  Description of Artificial Sequence: Synthetic oligonucleotide
ccuucguggaacaguagac

SEQ ID NO: 2806687 - RNA, 19 nt, Artificial Sequence
  Description of Artificial Sequence: Synthetic oligonucleotide
cucagguagccaggaagcc

SEQ ID NO: 2806688 - RNA, 19 nt, Artificial Sequence
  Description of Artificial Sequence: Synthetic oligonucleotide
cuucguggaacaguagaca

SEQ ID NO: 2806689 - RNA, 19 nt, Artificial Sequence
  Description of Artificial Sequence: Synthetic oligonucleotide
ggucagcauguccagagca

SEQ ID NO: 2806690 - RNA, 19 nt, Artificial Sequence
  Description of Artificial Sequence: Synthetic oligonucleotide
gagcuaucaugccccuggc

SEQ ID NO: 2806691 - RNA, 19 nt, Artificial Sequence
  Description of Artificial Sequence: Synthetic oligonucleotide
ggucaccccaguugguccg

SEQ ID NO: 2806692 - RNA, 19 nt, Artificial Sequence
  Description of Artificial Sequence: Synthetic oligonucleotide
gagacaccuggaugacagc

SEQ ID NO: 2806693 - RNA, 19 nt, Artificial Sequence
  Description of Artificial Sequence: Synthetic oligonucleotide
cagcaggaagaggauggcg

SEQ ID NO: 2806694 - RNA, 19 nt, Artificial Sequence
  Description of Artificial Sequence: Synthetic oligonucleotide
guagacacugugguugguc

SEQ ID NO: 2806695 - RNA, 19 nt, Artificial Sequence
  Description of Artificial Sequence: Synthetic oligonucleotide
cauucacaauggccccugg

SEQ ID NO: 2806696 - RNA, 19 nt, Artificial Sequence
  Description of Artificial Sequence: Synthetic oligonucleotide
ugguuggucagugcacgcu

SEQ ID NO: 2806697 - RNA, 19 nt, Artificial Sequence
  Description of Artificial Sequence: Synthetic oligonucleotide
uuacggcauucacacggau

SEQ ID NO: 2806698 - RNA, 19 nt, Artificial Sequence
  Description of Artificial Sequence: Synthetic oligonucleotide
gguuuacggcauucacacg

SEQ ID NO: 2806699 - RNA, 19 nt, Artificial Sequence
  Description of Artificial Sequence: Synthetic oligonucleotide
acaaucugagacaccugga

SEQ ID NO: 2806700 - RNA, 19 nt, Artificial Sequence
  Description of Artificial Sequence: Synthetic oligonucleotide
gcugagcagaguaauggug

SEQ ID NO: 2806701 - RNA, 19 nt, Artificial Sequence
  Description of Artificial Sequence: Synthetic oligonucleotide
uaucaugccccuggccaca

SEQ ID NO: 2806702 - RNA, 19 nt, Artificial Sequence
  Description of Artificial Sequence: Synthetic oligonucleotide
ugugggguuuacggcauuc

SEQ ID NO: 2806703 - RNA, 19 nt, Artificial Sequence
  Description of Artificial Sequence: Synthetic oligonucleotide
uugccgagugggaugcgau

SEQ ID NO: 2806704 - RNA, 19 nt, Artificial Sequence
  Description of Artificial Sequence: Synthetic oligonucleotide
gcucagguagccaggaagc

SEQ ID NO: 2806705 - RNA, 19 nt, Artificial Sequence
  Description of Artificial Sequence: Synthetic oligonucleotide
cacacagguugcacagaug

SEQ ID NO: 2806706 - RNA, 19 nt, Artificial Sequence
  Description of Artificial Sequence: Synthetic oligonucleotide
gucagcauguccagagcac

SEQ ID NO: 2806707 - RNA, 19 nt, Artificial Sequence
  Description of Artificial Sequence: Synthetic oligonucleotide
uuguggggccccaacucua

SEQ ID NO: 2806708 - RNA, 19 nt, Artificial Sequence
  Description of Artificial Sequence: Synthetic oligonucleotide
ggcauucacacggaucuug

SEQ ID NO: 2806709 - RNA, 19 nt, Artificial Sequence
  Description of Artificial Sequence: Synthetic oligonucleotide
gaaggacgugucacaggcc

SEQ ID NO: 2806710 - RNA, 19 nt, Artificial Sequence
  Description of Artificial Sequence: Synthetic oligonucleotide
ggucaggcugcuucuguug

SEQ ID NO: 2806711 - RNA, 19 nt, Artificial Sequence
  Description of Artificial Sequence: Synthetic oligonucleotide
gagucggcacacagguugc

SEQ ID NO: 2806712 - RNA, 19 nt, Artificial Sequence
  Description of Artificial Sequence: Synthetic oligonucleotide
gugguuggucagugcacgc

SEQ ID NO: 2806713 - RNA, 19 nt, Artificial Sequence
  Description of Artificial Sequence: Synthetic oligonucleotide
acgcugggaggccuggcug

SEQ ID NO: 2806714 - RNA, 19 nt, Artificial Sequence
  Description of Artificial Sequence: Synthetic oligonucleotide
gcauccgguggucaggcug

SEQ ID NO: 2806715 - RNA, 19 nt, Artificial Sequence
  Description of Artificial Sequence: Synthetic oligonucleotide
cacuacugugggguuuacg

SEQ ID NO: 2806716 - RNA, 19 nt, Artificial Sequence
  Description of Artificial Sequence: Synthetic oligonucleotide
ucaucacuacugugggguu

SEQ ID NO: 2806717 - RNA, 19 nt, Artificial Sequence
  Description of Artificial Sequence: Synthetic oligonucleotide
guccaccacguucuccacc

SEQ ID NO: 2806718 - RNA, 19 nt, Artificial Sequence
  Description of Artificial Sequence: Synthetic oligonucleotide
caguugguccggcccauug

SEQ ID NO: 2806719 - RNA, 19 nt, Artificial Sequence
  Description of Artificial Sequence: Synthetic oligonucleotide
cacugugguuggucagugc

SEQ ID NO: 2806720 - RNA, 19 nt, Artificial Sequence
  Description of Artificial Sequence: Synthetic oligonucleotide
acacugugguuggucagug

SEQ ID NO: 2806721 - RNA, 19 nt, Artificial Sequence
  Description of Artificial Sequence: Synthetic oligonucleotide
gagugggaugcgauccagc

SEQ ID NO: 2806722 - RNA, 19 nt, Artificial Sequence
  Description of Artificial Sequence: Synthetic oligonucleotide
ugacagcccgaagauucac

SEQ ID NO: 2806723 - RNA, 19 nt, Artificial Sequence
  Description of Artificial Sequence: Synthetic oligonucleotide
cagauguuuauuggaggga

SEQ ID NO: 2806724 - RNA, 19 nt, Artificial Sequence
  Description of Artificial Sequence: Synthetic oligonucleotide
uggaacuccccgagcuauc

SEQ ID NO: 2806725 - RNA, 19 nt, Artificial Sequence
  Description of Artificial Sequence: Synthetic oligonucleotide
auucacguugaaggacgug

SEQ ID NO: 2806726 - RNA, 19 nt, Artificial Sequence
  Description of Artificial Sequence: Synthetic oligonucleotide
caaagugcauccggugguc

SEQ ID NO: 2806727 - RNA, 19 nt, Artificial Sequence
  Description of Artificial Sequence: Synthetic oligonucleotide
ccaccggcaaagugcaucc

SEQ ID NO: 2806728 - RNA, 19 nt, Artificial Sequence
  Description of Artificial Sequence: Synthetic oligonucleotide
uggucaggcugcuucuguu

SEQ ID NO: 2806729 - RNA, 19 nt, Artificial Sequence
  Description of Artificial Sequence: Synthetic oligonucleotide
cacguugaaggacguguca

SEQ ID NO: 2806730 - RNA, 19 nt, Artificial Sequence
  Description of Artificial Sequence: Synthetic oligonucleotide
uggucagugcacgcuggga

SEQ ID NO: 2806731 - RNA, 19 nt, Artificial Sequence
  Description of Artificial Sequence: Synthetic oligonucleotide
auggcugagcagaguaaug

SEQ ID NO: 2806732 - RNA, 19 nt, Artificial Sequence
  Description of Artificial Sequence: Synthetic oligonucleotide
aucacuacugugggguuua

SEQ ID NO: 2806733 - RNA, 19 nt, Artificial Sequence
  Description of Artificial Sequence: Synthetic oligonucleotide
cgauccagcaugaccuugg

SEQ ID NO: 2806734 - RNA, 19 nt, Artificial Sequence
  Description of Artificial Sequence: Synthetic oligonucleotide
ugcacgcugggaggccugg

SEQ ID NO: 2806735 - RNA, 19 nt, Artificial Sequence
  Description of Artificial Sequence: Synthetic oligonucleotide
ccuggcuggagacauucac

SEQ ID NO: 2806736 - RNA, 19 nt, Artificial Sequence
  Description of Artificial Sequence: Synthetic oligonucleotide
cuccccgagcuaucaugcc

SEQ ID NO: 2806737 - RNA, 19 nt, Artificial Sequence
  Description of Artificial Sequence: Synthetic oligonucleotide
agguugcacagauguuuau

SEQ ID NO: 2806738 - RNA, 19 nt, Artificial Sequence
  Description of Artificial Sequence: Synthetic oligonucleotide
agcguauggcugagcagag

SEQ ID NO: 2806739 - RNA, 19 nt, Artificial Sequence
  Description of Artificial Sequence: Synthetic oligonucleotide
gggucaccccaguuggucc

SEQ ID NO: 2806740 - RNA, 19 nt, Artificial Sequence
  Description of Artificial Sequence: Synthetic oligonucleotide
ucugagcguauggcugagc

SEQ ID NO: 2806741 - RNA, 19 nt, Artificial Sequence
  Description of Artificial Sequence: Synthetic oligonucleotide
guugguccggcccauuggu

SEQ ID NO: 2806742 - RNA, 19 nt, Artificial Sequence
  Description of Artificial Sequence: Synthetic oligonucleotide
ugccgagugggaugcgauc

SEQ ID NO: 2806743 - RNA, 19 nt, Artificial Sequence
  Description of Artificial Sequence: Synthetic oligonucleotide
gggccaucaucuuggucag

SEQ ID NO: 2806744 - RNA, 19 nt, Artificial Sequence
  Description of Artificial Sequence: Synthetic oligonucleotide
ggggccccaacucuagggc

SEQ ID NO: 2806745 - RNA, 19 nt, Artificial Sequence
  Description of Artificial Sequence: Synthetic oligonucleotide
cagguugcacagauguuua

SEQ ID NO: 2806746 - RNA, 19 nt, Artificial Sequence
  Description of Artificial Sequence: Synthetic oligonucleotide
ccccgagcuaucaugcccc

SEQ ID NO: 2806747 - RNA, 19 nt, Artificial Sequence
  Description of Artificial Sequence: Synthetic oligonucleotide
ggacgugucacaggccucc

SEQ ID NO: 2806748 - RNA, 19 nt, Artificial Sequence
  Description of Artificial Sequence: Synthetic oligonucleotide
cacccuucguggaacagua

SEQ ID NO: 2806749 - RNA, 19 nt, Artificial Sequence
  Description of Artificial Sequence: Synthetic oligonucleotide
cugcuucuguugcucagca

SEQ ID NO: 2806750 - RNA, 19 nt, Artificial Sequence
  Description of Artificial Sequence: Synthetic oligonucleotide
aggauggcguccaccacgu

SEQ ID NO: 2806751 - RNA, 19 nt, Artificial Sequence
  Description of Artificial Sequence: Synthetic oligonucleotide
guggggccccaacucuagg

SEQ ID NO: 2806752 - RNA, 19 nt, Artificial Sequence
  Description of Artificial Sequence: Synthetic oligonucleotide
accuggaugacagcccgaa

SEQ ID NO: 2806753 - RNA, 19 nt, Artificial Sequence
  Description of Artificial Sequence: Synthetic oligonucleotide
ccgaagauucacguugaag

SEQ ID NO: 2806754 - RNA, 19 nt, Artificial Sequence
  Description of Artificial Sequence: Synthetic oligonucleotide
aggcugcuucuguugcuca

SEQ ID NO: 2806755 - RNA, 19 nt, Artificial Sequence
  Description of Artificial Sequence: Synthetic oligonucleotide
ccauuggugucaucacuac

SEQ ID NO: 2806756 - RNA, 19 nt, Artificial Sequence
  Description of Artificial Sequence: Synthetic oligonucleotide
gccgagugggaugcgaucc

SEQ ID NO: 2806757 - RNA, 19 nt, Artificial Sequence
  Description of Artificial Sequence: Synthetic oligonucleotide
gugcauccgguggucaggc

SEQ ID NO: 2806758 - RNA, 19 nt, Artificial Sequence
  Description of Artificial Sequence: Synthetic oligonucleotide
gggguuuacggcauucaca

SEQ ID NO: 2806759 - RNA, 19 nt, Artificial Sequence
  Description of Artificial Sequence: Synthetic oligonucleotide
augacagcccgaagauuca

SEQ ID NO: 2806760 - RNA, 19 nt, Artificial Sequence
  Description of Artificial Sequence: Synthetic oligonucleotide
gccacaaucugagacaccu

SEQ ID NO: 2806761 - RNA, 19 nt, Artificial Sequence
  Description of Artificial Sequence: Synthetic oligonucleotide
cacggaucuuguggggccc

SEQ ID NO: 2806762 - RNA, 19 nt, Artificial Sequence
  Description of Artificial Sequence: Synthetic oligonucleotide
ggcugcuucuguugcucag

SEQ ID NO: 2806763 - RNA, 19 nt, Artificial Sequence
  Description of Artificial Sequence: Synthetic oligonucleotide
agugcacgcugggaggccu

SEQ ID NO: 2806764 - RNA, 19 nt, Artificial Sequence
  Description of Artificial Sequence: Synthetic oligonucleotide
caauggccccuggaacucc

SEQ ID NO: 2806765 - RNA, 19 nt, Artificial Sequence
  Description of Artificial Sequence: Synthetic oligonucleotide
agcaugaccuuggccuugu

SEQ ID NO: 2806766 - RNA, 19 nt, Artificial Sequence
  Description of Artificial Sequence: Synthetic oligonucleotide
aggacgugucacaggccuc

SEQ ID NO: 2806767 - RNA, 19 nt, Artificial Sequence
  Description of Artificial Sequence: Synthetic oligonucleotide
gacacugugguuggucagu

SEQ ID NO: 2806768 - RNA, 19 nt, Artificial Sequence
  Description of Artificial Sequence: Synthetic oligonucleotide
ugcgauccagcaugaccuu

SEQ ID NO: 2806769 - RNA, 19 nt, Artificial Sequence
  Description of Artificial Sequence: Synthetic oligonucleotide
agcacccuucguggaacag

SEQ ID NO: 2806770 - RNA, 19 nt, Artificial Sequence
  Description of Artificial Sequence: Synthetic oligonucleotide
augccccuggccacaaucu

SEQ ID NO: 2806771 - RNA, 19 nt, Artificial Sequence
  Description of Artificial Sequence: Synthetic oligonucleotide
ccccuggccacaaucugag

SEQ ID NO: 2806772 - RNA, 19 nt, Artificial Sequence
  Description of Artificial Sequence: Synthetic oligonucleotide
cuuguggggccccaacucu

SEQ ID NO: 2806773 - RNA, 19 nt, Artificial Sequence
  Description of Artificial Sequence: Synthetic oligonucleotide
gggccccaacucuagggcc

SEQ ID NO: 2806774 - RNA, 19 nt, Artificial Sequence
  Description of Artificial Sequence: Synthetic oligonucleotide
acucuagggccaucaucuu

SEQ ID NO: 2806775 - RNA, 19 nt, Artificial Sequence
  Description of Artificial Sequence: Synthetic oligonucleotide
gagcacccuucguggaaca

SEQ ID NO: 2806776 - RNA, 19 nt, Artificial Sequence
  Description of Artificial Sequence: Synthetic oligonucleotide
guauggcugagcagaguaa

SEQ ID NO: 2806777 - RNA, 19 nt, Artificial Sequence
  Description of Artificial Sequence: Synthetic oligonucleotide
aguagacacugugguuggu

SEQ ID NO: 2806778 - RNA, 19 nt, Artificial Sequence
  Description of Artificial Sequence: Synthetic oligonucleotide
cauuggugucaucacuacu

SEQ ID NO: 2806779 - RNA, 19 nt, Artificial Sequence
  Description of Artificial Sequence: Synthetic oligonucleotide
gacauucacaauggccccu

SEQ ID NO: 2806780 - RNA, 19 nt, Artificial Sequence
  Description of Artificial Sequence: Synthetic oligonucleotide
gcugcuucuguugcucagc

SEQ ID NO: 2806781 - RNA, 19 nt, Artificial Sequence
  Description of Artificial Sequence: Synthetic oligonucleotide
acugugggguuuacggcau

SEQ ID NO: 2806782 - RNA, 19 nt, Artificial Sequence
  Description of Artificial Sequence: Synthetic oligonucleotide
caccccaguugguccggcc

SEQ ID NO: 2806783 - RNA, 19 nt, Artificial Sequence
  Description of Artificial Sequence: Synthetic oligonucleotide
caaacuugccgagugggau

SEQ ID NO: 2806784 - RNA, 19 nt, Artificial Sequence
  Description of Artificial Sequence: Synthetic oligonucleotide
gucugagcguauggcugag

SEQ ID NO: 2806785 - RNA, 19 nt, Artificial Sequence
  Description of Artificial Sequence: Synthetic oligonucleotide
auggccccuggaacucccc

SEQ ID NO: 2806786 - RNA, 19 nt, Artificial Sequence
  Description of Artificial Sequence: Synthetic oligonucleotide
gucggcacacagguugcac

SEQ ID NO: 2806787 - RNA, 19 nt, Artificial Sequence
  Description of Artificial Sequence: Synthetic oligonucleotide
gucaccccaguugguccgg

SEQ ID NO: 2806788 - RNA, 19 nt, Artificial Sequence
  Description of Artificial Sequence: Synthetic oligonucleotide
gauucacguugaaggacgu

SEQ ID NO: 2806789 - RNA, 19 nt, Artificial Sequence
  Description of Artificial Sequence: Synthetic oligonucleotide
cuuggucagcauguccaga

SEQ ID NO: 2806790 - RNA, 19 nt, Artificial Sequence
  Description of Artificial Sequence: Synthetic oligonucleotide
gugggguuuacggcauuca

SEQ ID NO: 2806791 - RNA, 19 nt, Artificial Sequence
  Description of Artificial Sequence: Synthetic oligonucleotide
cccuucguggaacaguaga

SEQ ID NO: 2806792 - RNA, 19 nt, Artificial Sequence
  Description of Artificial Sequence: Synthetic oligonucleotide
cuugccgagugggaugcga

SEQ ID NO: 2806793 - RNA, 19 nt, Artificial Sequence
  Description of Artificial Sequence: Synthetic oligonucleotide
ugcauccgguggucaggcu

SEQ ID NO: 2806794 - RNA, 19 nt, Artificial Sequence
  Description of Artificial Sequence: Synthetic oligonucleotide
gccccuggaacuccccgag

SEQ ID NO: 2806795 - RNA, 19 nt, Artificial Sequence
  Description of Artificial Sequence: Synthetic oligonucleotide
ccgguggucaggcugcuuc

SEQ ID NO: 2806796 - RNA, 19 nt, Artificial Sequence
  Description of Artificial Sequence: Synthetic oligonucleotide
ggcccauuggugucaucac

SEQ ID NO: 2806797 - RNA, 19 nt, Artificial Sequence
  Description of Artificial Sequence: Synthetic oligonucleotide
ggaacuccccgagcuauca

SEQ ID NO: 2806798 - RNA, 19 nt, Artificial Sequence
  Description of Artificial Sequence: Synthetic oligonucleotide
cccauuggugucaucacua

SEQ ID NO: 2806799 - RNA, 19 nt, Artificial Sequence
  Description of Artificial Sequence: Synthetic oligonucleotide
cagagcacccuucguggaa

SEQ ID NO: 2806800 - RNA, 19 nt, Artificial Sequence
  Description of Artificial Sequence: Synthetic oligonucleotide
cagcaugaccuuggccuug

SEQ ID NO: 2806801 - RNA, 19 nt, Artificial Sequence
  Description of Artificial Sequence: Synthetic oligonucleotide
caccggcaaagugcauccg

SEQ ID NO: 2806802 - RNA, 19 nt, Artificial Sequence
  Description of Artificial Sequence: Synthetic oligonucleotide
cggcacacagguugcacag

SEQ ID NO: 2806803 - RNA, 19 nt, Artificial Sequence
  Description of Artificial Sequence: Synthetic oligonucleotide
acuugccgagugggaugcg

SEQ ID NO: 2806804 - RNA, 19 nt, Artificial Sequence
  Description of Artificial Sequence: Synthetic oligonucleotide
ucaccccaguugguccggc

SEQ ID NO: 2806805 - RNA, 19 nt, Artificial Sequence
  Description of Artificial Sequence: Synthetic oligonucleotide
ucacuacugugggguuuac

SEQ ID NO: 2806806 - RNA, 19 nt, Artificial Sequence
  Description of Artificial Sequence: Synthetic oligonucleotide
cugagacaccuggaugaca

SEQ ID NO: 2806807 - RNA, 19 nt, Artificial Sequence
  Description of Artificial Sequence: Synthetic oligonucleotide
ggcugagcagaguaauggu

SEQ ID NO: 2806808 - RNA, 19 nt, Artificial Sequence
  Description of Artificial Sequence: Synthetic oligonucleotide
ccacaaucugagacaccug

SEQ ID NO: 2806809 - RNA, 19 nt, Artificial Sequence
  Description of Artificial Sequence: Synthetic oligonucleotide
gaggccuggcuggagacau

SEQ ID NO: 2806810 - RNA, 19 nt, Artificial Sequence
  Description of Artificial Sequence: Synthetic oligonucleotide
guucuccaccucggcaaac

SEQ ID NO: 2806811 - RNA, 19 nt, Artificial Sequence
  Description of Artificial Sequence: Synthetic oligonucleotide
cguauggcugagcagagua

SEQ ID NO: 2806812 - RNA, 19 nt, Artificial Sequence
  Description of Artificial Sequence: Synthetic oligonucleotide
guggucaggcugcuucugu

SEQ ID NO: 2806813 - RNA, 19 nt, Artificial Sequence
  Description of Artificial Sequence: Synthetic oligonucleotide
acccuucguggaacaguag

SEQ ID NO: 2806814 - RNA, 19 nt, Artificial Sequence
  Description of Artificial Sequence: Synthetic oligonucleotide
cagugcacgcugggaggcc

SEQ ID NO: 2806815 - RNA, 19 nt, Artificial Sequence
  Description of Artificial Sequence: Synthetic oligonucleotide
cccauccaccggcaaagug

SEQ ID NO: 2806816 - RNA, 19 nt, Artificial Sequence
  Description of Artificial Sequence: Synthetic oligonucleotide
gcaaacuugccgaguggga

SEQ ID NO: 2806817 - RNA, 19 nt, Artificial Sequence
  Description of Artificial Sequence: Synthetic oligonucleotide
gguccggcccauugguguc

SEQ ID NO: 2806818 - RNA, 19 nt, Artificial Sequence
  Description of Artificial Sequence: Synthetic oligonucleotide
ccucggcaaacuugccgag

SEQ ID NO: 2806819 - RNA, 19 nt, Artificial Sequence
  Description of Artificial Sequence: Synthetic oligonucleotide
ggccuggcuggagacauuc

SEQ ID NO: 2806820 - RNA, 19 nt, Artificial Sequence
  Description of Artificial Sequence: Synthetic oligonucleotide
ucaugccccuggccacaau

SEQ ID NO: 2806821 - RNA, 19 nt, Artificial Sequence
  Description of Artificial Sequence: Synthetic oligonucleotide
acgugucacaggccuccuu

SEQ ID NO: 2806822 - RNA, 19 nt, Artificial Sequence
  Description of Artificial Sequence: Synthetic oligonucleotide
ccuggaugacagcccgaag

SEQ ID NO: 2806823 - RNA, 19 nt, Artificial Sequence
  Description of Artificial Sequence: Synthetic oligonucleotide
ggggucaccccaguugguc

SEQ ID NO: 2806824 - RNA, 19 nt, Artificial Sequence
  Description of Artificial Sequence: Synthetic oligonucleotide
cguugaaggacgugucaca

SEQ ID NO: 2806825 - RNA, 19 nt, Artificial Sequence
  Description of Artificial Sequence: Synthetic oligonucleotide
gcacacagguugcacagau

SEQ ID NO: 2806826 - RNA, 19 nt, Artificial Sequence
  Description of Artificial Sequence: Synthetic oligonucleotide
gugggaugcgauccagcau

SEQ ID NO: 2806827 - RNA, 19 nt, Artificial Sequence
  Description of Artificial Sequence: Synthetic oligonucleotide
gggagcaaugucugagcgu

SEQ ID NO: 2806828 - RNA, 19 nt, Artificial Sequence
  Description of Artificial Sequence: Synthetic oligonucleotide
gcgauccagcaugaccuug

SEQ ID NO: 2806829 - RNA, 19 nt, Artificial Sequence
  Description of Artificial Sequence: Synthetic oligonucleotide
cuggaacuccccgagcuau

SEQ ID NO: 2806830 - RNA, 19 nt, Artificial Sequence
  Description of Artificial Sequence: Synthetic oligonucleotide
gaacuccccgagcuaucau

SEQ ID NO: 2806831 - RNA, 19 nt, Artificial Sequence
  Description of Artificial Sequence: Synthetic oligonucleotide
uggcguccaccacguucuc

SEQ ID NO: 2806832 - RNA, 19 nt, Artificial Sequence
  Description of Artificial Sequence: Synthetic oligonucleotide
cugggaggccuggcuggag

SEQ ID NO: 2806833 - RNA, 19 nt, Artificial Sequence
  Description of Artificial Sequence: Synthetic oligonucleotide
aucaugccccuggccacaa

SEQ ID NO: 2806834 - RNA, 19 nt, Artificial Sequence
  Description of Artificial Sequence: Synthetic oligonucleotide
gguugcacagauguuuauu

SEQ ID NO: 2806835 - RNA, 19 nt, Artificial Sequence
  Description of Artificial Sequence: Synthetic oligonucleotide
caccuggaugacagcccga

SEQ ID NO: 2806836 - RNA, 19 nt, Artificial Sequence
  Description of Artificial Sequence: Synthetic oligonucleotide
cggcaaacuugccgagugg

SEQ ID NO: 2806837 - RNA, 19 nt, Artificial Sequence
  Description of Artificial Sequence: Synthetic oligonucleotide
ggccccuggaacuccccga

SEQ ID NO: 2806838 - RNA, 19 nt, Artificial Sequence
  Description of Artificial Sequence: Synthetic oligonucleotide
ggccccaacucuagggcca

SEQ ID NO: 2806839 - RNA, 19 nt, Artificial Sequence
  Description of Artificial Sequence: Synthetic oligonucleotide
ggcguccaccacguucucc

SEQ ID NO: 2806840 - RNA, 19 nt, Artificial Sequence
  Description of Artificial Sequence: Synthetic oligonucleotide
cggcaaagugcauccggug

SEQ ID NO: 2806841 - RNA, 19 nt, Artificial Sequence
  Description of Artificial Sequence: Synthetic oligonucleotide
cccaacucuagggccauca

SEQ ID NO: 2806842 - RNA, 19 nt, Artificial Sequence
  Description of Artificial Sequence: Synthetic oligonucleotide
gcccauuggugucaucacu

SEQ ID NO: 2806843 - RNA, 19 nt, Artificial Sequence
  Description of Artificial Sequence: Synthetic oligonucleotide
uccggcccauuggugucau

SEQ ID NO: 2806844 - RNA, 19 nt, Artificial Sequence
  Description of Artificial Sequence: Synthetic oligonucleotide
ccaccucggcaaacuugcc

SEQ ID NO: 2806845 - RNA, 19 nt, Artificial Sequence
  Description of Artificial Sequence: Synthetic oligonucleotide
cacgcugggaggccuggcu

SEQ ID NO: 2806846 - RNA, 19 nt, Artificial Sequence
  Description of Artificial Sequence: Synthetic oligonucleotide
gcauucacacggaucuugu

SEQ ID NO: 2806847 - RNA, 19 nt, Artificial Sequence
  Description of Artificial Sequence: Synthetic oligonucleotide
cuagggccaucaucuuggu

SEQ ID NO: 2806848 - RNA, 19 nt, Artificial Sequence
  Description of Artificial Sequence: Synthetic oligonucleotide
gcccgaagauucacguuga

SEQ ID NO: 2806849 - RNA, 19 nt, Artificial Sequence
  Description of Artificial Sequence: Synthetic oligonucleotide
gugcacgcugggaggccug

SEQ ID NO: 2806850 - RNA, 19 nt, Artificial Sequence
  Description of Artificial Sequence: Synthetic oligonucleotide
ccagagcacccuucgugga

SEQ ID NO: 2806851 - RNA, 19 nt, Artificial Sequence
  Description of Artificial Sequence: Synthetic oligonucleotide
gggaugcgauccagcauga

SEQ ID NO: 2806852 - RNA, 19 nt, Artificial Sequence
  Description of Artificial Sequence: Synthetic oligonucleotide
cacagguugcacagauguu

SEQ ID NO: 2806853 - RNA, 19 nt, Artificial Sequence
  Description of Artificial Sequence: Synthetic oligonucleotide
gccccuggccacaaucuga

SEQ ID NO: 2806854 - RNA, 19 nt, Artificial Sequence
  Description of Artificial Sequence: Synthetic oligonucleotide
ggccacaaucugagacacc

SEQ ID NO: 2806855 - RNA, 19 nt, Artificial Sequence
  Description of Artificial Sequence: Synthetic oligonucleotide
guccggcccauugguguca

SEQ ID NO: 2806856 - RNA, 19 nt, Artificial Sequence
  Description of Artificial Sequence: Synthetic oligonucleotide
ggaugcgauccagcaugac

SEQ ID NO: 2806857 - RNA, 19 nt, Artificial Sequence
  Description of Artificial Sequence: Synthetic oligonucleotide
ggggcucagguagccagga

SEQ ID NO: 2806858 - RNA, 19 nt, Artificial Sequence
  Description of Artificial Sequence: Synthetic oligonucleotide
auccgguggucaggcugcu

SEQ ID NO: 2806859 - RNA, 19 nt, Artificial Sequence
  Description of Artificial Sequence: Synthetic oligonucleotide
cccuggaacuccccgagcu

SEQ ID NO: 2806860 - RNA, 19 nt, Artificial Sequence
  Description of Artificial Sequence: Synthetic oligonucleotide
cggcccauuggugucauca

SEQ ID NO: 2806861 - RNA, 19 nt, Artificial Sequence
  Description of Artificial Sequence: Synthetic oligonucleotide
cucggcaaacuugccgagu

SEQ ID NO: 2806862 - RNA, 19 nt, Artificial Sequence
  Description of Artificial Sequence: Synthetic oligonucleotide
caucacuacugugggguuu

SEQ ID NO: 2806863 - RNA, 19 nt, Artificial Sequence
  Description of Artificial Sequence: Synthetic oligonucleotide
gcaugaccuuggccuugug

SEQ ID NO: 2806864 - RNA, 19 nt, Artificial Sequence
  Description of Artificial Sequence: Synthetic oligonucleotide
ccggcaaagugcauccggu

SEQ ID NO: 2806865 - RNA, 19 nt, Artificial Sequence
  Description of Artificial Sequence: Synthetic oligonucleotide
ccccuggaacuccccgagc

SEQ ID NO: 2806866 - RNA, 19 nt, Artificial Sequence
  Description of Artificial Sequence: Synthetic oligonucleotide
gacgugucacaggccuccu

SEQ ID NO: 2806867 - RNA, 19 nt, Artificial Sequence
  Description of Artificial Sequence: Synthetic oligonucleotide
gcacccuucguggaacagu

SEQ ID NO: 2806868 - RNA, 19 nt, Artificial Sequence
  Description of Artificial Sequence: Synthetic oligonucleotide
uccgguggucaggcugcuu

SEQ ID NO: 2806869 - RNA, 19 nt, Artificial Sequence
  Description of Artificial Sequence: Synthetic oligonucleotide
ccccaguugguccggccca

SEQ ID NO: 2806870 - RNA, 19 nt, Artificial Sequence
  Description of Artificial Sequence: Synthetic oligonucleotide
gagcaaugucugagcguau

SEQ ID NO: 2806871 - RNA, 19 nt, Artificial Sequence
  Description of Artificial Sequence: Synthetic oligonucleotide
ccgagugggaugcgaucca

SEQ ID NO: 2806872 - RNA, 19 nt, Artificial Sequence
  Description of Artificial Sequence: Synthetic oligonucleotide
gagagucggcacacagguu

SEQ ID NO: 2806873 - RNA, 19 nt, Artificial Sequence
  Description of Artificial Sequence: Synthetic oligonucleotide
cagcccgaagauucacguu

SEQ ID NO: 2806874 - RNA, 19 nt, Artificial Sequence
  Description of Artificial Sequence: Synthetic oligonucleotide
ggccaucaucuuggucagc

SEQ ID NO: 2806875 - RNA, 19 nt, Artificial Sequence
  Description of Artificial Sequence: Synthetic oligonucleotide
ccuggaacuccccgagcua

SEQ ID NO: 2806876 - RNA, 19 nt, Artificial Sequence
  Description of Artificial Sequence: Synthetic oligonucleotide
gcauguccagagcacccuu

SEQ ID NO: 2806877 - RNA, 19 nt, Artificial Sequence
  Description of Artificial Sequence: Synthetic oligonucleotide
gcugggaggccuggcugga

SEQ ID NO: 2806878 - RNA, 19 nt, Artificial Sequence
  Description of Artificial Sequence: Synthetic oligonucleotide
gggcucagguagccaggaa

SEQ ID NO: 2806879 - RNA, 19 nt, Artificial Sequence
  Description of Artificial Sequence: Synthetic oligonucleotide
cguccaccacguucuccac

SEQ ID NO: 2806880 - RNA, 19 nt, Artificial Sequence
  Description of Artificial Sequence: Synthetic oligonucleotide
ggaugacagcccgaagauu

SEQ ID NO: 2806881 - RNA, 19 nt, Artificial Sequence
  Description of Artificial Sequence: Synthetic oligonucleotide
ccgagcuaucaugccccug

SEQ ID NO: 2806882 - RNA, 19 nt, Artificial Sequence
  Description of Artificial Sequence: Synthetic oligonucleotide
auccaccggcaaagugcau

SEQ ID NO: 2806883 - RNA, 19 nt, Artificial Sequence
  Description of Artificial Sequence: Synthetic oligonucleotide
gcacgcugggaggccuggc

SEQ ID NO: 2806884 - RNA, 19 nt, Artificial Sequence
  Description of Artificial Sequence: Synthetic oligonucleotide
cccgaagauucacguugaa

SEQ ID NO: 2806885 - RNA, 19 nt, Artificial Sequence
  Description of Artificial Sequence: Synthetic oligonucleotide
gccuggcuggagacauuca

SEQ ID NO: 2806886 - RNA, 19 nt, Artificial Sequence
  Description of Artificial Sequence: Synthetic oligonucleotide
ccagcaugaccuuggccuu

SEQ ID NO: 2806887 - RNA, 19 nt, Artificial Sequence
  Description of Artificial Sequence: Synthetic oligonucleotide
cguucuccaccucggcaaa

SEQ ID NO: 2806888 - RNA, 19 nt, Artificial Sequence
  Description of Artificial Sequence: Synthetic oligonucleotide
ccaccacguucuccaccuc

SEQ ID NO: 2806889 - RNA, 19 nt, Artificial Sequence
  Description of Artificial Sequence: Synthetic oligonucleotide
aggccuggcuggagacauu

SEQ ID NO: 2806890 - RNA, 19 nt, Artificial Sequence
  Description of Artificial Sequence: Synthetic oligonucleotide
ccaacucuagggccaucau

SEQ ID NO: 2806891 - RNA, 19 nt, Artificial Sequence
  Description of Artificial Sequence: Synthetic oligonucleotide
gcguauggcugagcagagu

SEQ ID NO: 2806892 - RNA, 19 nt, Artificial Sequence
  Description of Artificial Sequence: Synthetic oligonucleotide
cugugggguuuacggcauu

SEQ ID NO: 2806893 - RNA, 19 nt, Artificial Sequence
  Description of Artificial Sequence: Synthetic oligonucleotide
cccgagcuaucaugccccu

SEQ ID NO: 2806894 - RNA, 19 nt, Artificial Sequence
  Description of Artificial Sequence: Synthetic oligonucleotide
ccggcccauuggugucauc

SEQ ID NO: 2806895 - RNA, 19 nt, Artificial Sequence
  Description of Artificial Sequence: Synthetic oligonucleotide
ccccaacucuagggccauc

SEQ ID NO: 2806896 - RNA, 19 nt, Artificial Sequence
  Description of Artificial Sequence: Synthetic oligonucleotide
gccccaacucuagggccau

SEQ ID NO: 2806897 - RNA, 19 nt, Artificial Sequence
  Description of Artificial Sequence: Synthetic oligonucleotide
ggauggcguccaccacguu

SEQ ID NO: 2806898 - RNA, 19 nt, Artificial Sequence
  Description of Artificial Sequence: Synthetic oligonucleotide
cccaguugguccggcccau

SEQ ID NO: 2806899 - RNA, 19 nt, Artificial Sequence
  Description of Artificial Sequence: Synthetic oligonucleotide
ccccauccaccggcaaagu

SEQ ID NO: 2806900 - RNA, 19 nt, Artificial Sequence
  Description of Artificial Sequence: Synthetic oligonucleotide
ccaguugguccggcccauu

SEQ ID NO: 2806901 - RNA, 19 nt, Artificial Sequence
  Description of Artificial Sequence: Synthetic oligonucleotide
cggcauucacacggaucuu

SEQ ID NO: 2806902 - RNA, 19 nt, Artificial Sequence
  Description of Artificial Sequence: Synthetic oligonucleotide
aaaagaauuaaguacagca

SEQ ID NO: 2806903 - RNA, 19 nt, Artificial Sequence
  Description of Artificial Sequence: Synthetic oligonucleotide
caaauuaucacccaggggc

SEQ ID NO: 2806904 - RNA, 19 nt, Artificial Sequence
  Description of Artificial Sequence: Synthetic oligonucleotide
gacaagguuacauaaaacg

SEQ ID NO: 2806905 - RNA, 19 nt, Artificial Sequence
  Description of Artificial Sequence: Synthetic oligonucleotide
ugagauuauauacauagca

SEQ ID NO: 2806906 - RNA, 19 nt, Artificial Sequence
  Description of Artificial Sequence: Synthetic oligonucleotide
acauaaaacggcuauagag

SEQ ID NO: 2806907 - RNA, 19 nt, Artificial Sequence
  Description of Artificial Sequence: Synthetic oligonucleotide
aauaccuguucccagagug

SEQ ID NO: 2806908 - RNA, 19 nt, Artificial Sequence
  Description of Artificial Sequence: Synthetic oligonucleotide
acggcuauagaguuuaggc

SEQ ID NO: 2806909 - RNA, 19 nt, Artificial Sequence
  Description of Artificial Sequence: Synthetic oligonucleotide
uacauagcaaacauaacug

SEQ ID NO: 2806910 - RNA, 19 nt, Artificial Sequence
  Description of Artificial Sequence: Synthetic oligonucleotide
uagaguuuguuacagacug

SEQ ID NO: 2806911 - RNA, 19 nt, Artificial Sequence
  Description of Artificial Sequence: Synthetic oligonucleotide
auacauagcaaacauaacu

SEQ ID NO: 2806912 - RNA, 19 nt, Artificial Sequence
  Description of Artificial Sequence: Synthetic oligonucleotide
ugugcuuuauaaaauuugc

SEQ ID NO: 2806913 - RNA, 19 nt, Artificial Sequence
  Description of Artificial Sequence: Synthetic oligonucleotide
uuaaguacagcaagcauga

SEQ ID NO: 2806914 - RNA, 19 nt, Artificial Sequence
  Description of Artificial Sequence: Synthetic oligonucleotide
gaguacuuaacauaugccc

SEQ ID NO: 2806915 - RNA, 19 nt, Artificial Sequence
  Description of Artificial Sequence: Synthetic oligonucleotide
auaaaauuugcauagguuu

SEQ ID NO: 2806916 - RNA, 19 nt, Artificial Sequence
  Description of Artificial Sequence: Synthetic oligonucleotide
uaugaagccaguuaguccu

SEQ ID NO: 2806917 - RNA, 19 nt, Artificial Sequence
  Description of Artificial Sequence: Synthetic oligonucleotide
aauuucagcuucaagcugg

SEQ ID NO: 2806918 - RNA, 19 nt, Artificial Sequence
  Description of Artificial Sequence: Synthetic oligonucleotide
acauagcaaacauaacugc

SEQ ID NO: 2806919 - RNA, 19 nt, Artificial Sequence
  Description of Artificial Sequence: Synthetic oligonucleotide
uuaacauaugcccacguac

SEQ ID NO: 2806920 - RNA, 19 nt, Artificial Sequence
  Description of Artificial Sequence: Synthetic oligonucleotide
uuauaaaauuugcauaggu

SEQ ID NO: 2806921 - RNA, 19 nt, Artificial Sequence
  Description of Artificial Sequence: Synthetic oligonucleotide
gauagaguuuguuacagac

SEQ ID NO: 2806922 - RNA, 19 nt, Artificial Sequence
  Description of Artificial Sequence: Synthetic oligonucleotide
cuuugauagaguuuguuac

SEQ ID NO: 2806923 - RNA, 19 nt, Artificial Sequence
  Description of Artificial Sequence: Synthetic oligonucleotide
ucuuuaaucgggcaugaug

SEQ ID NO: 2806924 - RNA, 19 nt, Artificial Sequence
  Description of Artificial Sequence: Synthetic oligonucleotide
ucuacacacacacacacac

SEQ ID NO: 2806925 - RNA, 19 nt, Artificial Sequence
  Description of Artificial Sequence: Synthetic oligonucleotide
aucaaauuaucacccaggg

SEQ ID NO: 2806926 - RNA, 19 nt, Artificial Sequence
  Description of Artificial Sequence: Synthetic oligonucleotide
uuauauacauagcaaacau

SEQ ID NO: 2806927 - RNA, 19 nt, Artificial Sequence
  Description of Artificial Sequence: Synthetic oligonucleotide
ucaauuucagcuucaagcu

SEQ ID NO: 2806928 - RNA, 19 nt, Artificial Sequence
  Description of Artificial Sequence: Synthetic oligonucleotide
aaucugaucaaucauuguu

SEQ ID NO: 2806929 - RNA, 19 nt, Artificial Sequence
  Description of Artificial Sequence: Synthetic oligonucleotide
acugccuuauguuuccucc

SEQ ID NO: 2806930 - RNA, 19 nt, Artificial Sequence
  Description of Artificial Sequence: Synthetic oligonucleotide
caagguuacauaaaacggc

SEQ ID NO: 2806931 - RNA, 19 nt, Artificial Sequence
  Description of Artificial Sequence: Synthetic oligonucleotide
uaugcccacguacaaaggg

SEQ ID NO: 2806932 - RNA, 19 nt, Artificial Sequence
  Description of Artificial Sequence: Synthetic oligonucleotide
uuacauaaaacggcuauag

SEQ ID NO: 2806933 - RNA, 19 nt, Artificial Sequence
  Description of Artificial Sequence: Synthetic oligonucleotide
ugcuuuauaaaauuugcau

SEQ ID NO: 2806934 - RNA, 19 nt, Artificial Sequence
  Description of Artificial Sequence: Synthetic oligonucleotide
ucaaauuaucacccagggg

SEQ ID NO: 2806935 - RNA, 19 nt, Artificial Sequence
  Description of Artificial Sequence: Synthetic oligonucleotide
uaaaauuugcauagguuuc

SEQ ID NO: 2806936 - RNA, 19 nt, Artificial Sequence
  Description of Artificial Sequence: Synthetic oligonucleotide
agauuauauacauagcaaa

SEQ ID NO: 2806937 - RNA, 19 nt, Artificial Sequence
  Description of Artificial Sequence: Synthetic oligonucleotide
gucagucugucuuuaaucg

SEQ ID NO: 2806938 - RNA, 19 nt, Artificial Sequence
  Description of Artificial Sequence: Synthetic oligonucleotide
uugugcuuuauaaaauuug

SEQ ID NO: 2806939 - RNA, 19 nt, Artificial Sequence
  Description of Artificial Sequence: Synthetic oligonucleotide
uauaaaauuugcauagguu

SEQ ID NO: 2806940 - RNA, 19 nt, Artificial Sequence
  Description of Artificial Sequence: Synthetic oligonucleotide
cauaacugcaaacagugug

SEQ ID NO: 2806941 - RNA, 19 nt, Artificial Sequence
  Description of Artificial Sequence: Synthetic oligonucleotide
auuaaguacagcaagcaug

SEQ ID NO: 2806942 - RNA, 19 nt, Artificial Sequence
  Description of Artificial Sequence: Synthetic oligonucleotide
ccugagauuauauacauag

SEQ ID NO: 2806943 - RNA, 19 nt, Artificial Sequence
  Description of Artificial Sequence: Synthetic oligonucleotide
cuuuaaucgggcaugauga

SEQ ID NO: 2806944 - RNA, 19 nt, Artificial Sequence
  Description of Artificial Sequence: Synthetic oligonucleotide
auuugcauagguuucuuca

SEQ ID NO: 2806945 - RNA, 19 nt, Artificial Sequence
  Description of Artificial Sequence: Synthetic oligonucleotide
aauuugcauagguuucuuc

SEQ ID NO: 2806946 - RNA, 19 nt, Artificial Sequence
  Description of Artificial Sequence: Synthetic oligonucleotide
uacacacacacacacacac

SEQ ID NO: 2806947 - RNA, 19 nt, Artificial Sequence
  Description of Artificial Sequence: Synthetic oligonucleotide
uaaucgggcaugaugagac

SEQ ID NO: 2806948 - RNA, 19 nt, Artificial Sequence
  Description of Artificial Sequence: Synthetic oligonucleotide
ugaacugucagucugucuu

SEQ ID NO: 2806949 - RNA, 19 nt, Artificial Sequence
  Description of Artificial Sequence: Synthetic oligonucleotide
acaagguuacauaaaacgg

SEQ ID NO: 2806950 - RNA, 19 nt, Artificial Sequence
  Description of Artificial Sequence: Synthetic oligonucleotide
cagaguacuuaacauaugc

SEQ ID NO: 2806951 - RNA, 19 nt, Artificial Sequence
  Description of Artificial Sequence: Synthetic oligonucleotide
auauacauagcaaacauaa

SEQ ID NO: 2806952 - RNA, 19 nt, Artificial Sequence
  Description of Artificial Sequence: Synthetic oligonucleotide
caucaaauuaucacccagg

SEQ ID NO: 2806953 - RNA, 19 nt, Artificial Sequence
  Description of Artificial Sequence: Synthetic oligonucleotide
gauuauauacauagcaaac

SEQ ID NO: 2806954 - RNA, 19 nt, Artificial Sequence
  Description of Artificial Sequence: Synthetic oligonucleotide
aguuuaggccuaugaagcc

SEQ ID NO: 2806955 - RNA, 19 nt, Artificial Sequence
  Description of Artificial Sequence: Synthetic oligonucleotide
ucugaucaaucauuguucc

SEQ ID NO: 2806956 - RNA, 19 nt, Artificial Sequence
  Description of Artificial Sequence: Synthetic oligonucleotide
cauuguuccaauuucucug

SEQ ID NO: 2806957 - RNA, 19 nt, Artificial Sequence
  Description of Artificial Sequence: Synthetic oligonucleotide
aauuaaguacagcaagcau

SEQ ID NO: 2806958 - RNA, 19 nt, Artificial Sequence
  Description of Artificial Sequence: Synthetic oligonucleotide
caaacauaacugcaaacag

SEQ ID NO: 2806959 - RNA, 19 nt, Artificial Sequence
  Description of Artificial Sequence: Synthetic oligonucleotide
cauaugcccacguacaaag

SEQ ID NO: 2806960 - RNA, 19 nt, Artificial Sequence
  Description of Artificial Sequence: Synthetic oligonucleotide
uaguccugagauuauauac

SEQ ID NO: 2806961 - RNA, 19 nt, Artificial Sequence
  Description of Artificial Sequence: Synthetic oligonucleotide
uuugauagaguuuguuaca

SEQ ID NO: 2806962 - RNA, 19 nt, Artificial Sequence
  Description of Artificial Sequence: Synthetic oligonucleotide
uaacauaugcccacguaca

SEQ ID NO: 2806963 - RNA, 19 nt, Artificial Sequence
  Description of Artificial Sequence: Synthetic oligonucleotide
gaguuuaggccuaugaagc

SEQ ID NO: 2806964 - RNA, 19 nt, Artificial Sequence
  Description of Artificial Sequence: Synthetic oligonucleotide
uccaauuucucugaacucc

SEQ ID NO: 2806965 - RNA, 19 nt, Artificial Sequence
  Description of Artificial Sequence: Synthetic oligonucleotide
auuauauacauagcaaaca

SEQ ID NO: 2806966 - RNA, 19 nt, Artificial Sequence
  Description of Artificial Sequence: Synthetic oligonucleotide
gagaguggaguccaugagg

SEQ ID NO: 2806967 - RNA, 19 nt, Artificial Sequence
  Description of Artificial Sequence: Synthetic oligonucleotide
ucucuacacacacacacac

SEQ ID NO: 2806968 - RNA, 19 nt, Artificial Sequence
  Description of Artificial Sequence: Synthetic oligonucleotide
aacaguguggcagggguac

SEQ ID NO: 2806969 - RNA, 19 nt, Artificial Sequence
  Description of Artificial Sequence: Synthetic oligonucleotide
ucaaucauuguuccaauuu

SEQ ID NO: 2806970 - RNA, 19 nt, Artificial Sequence
  Description of Artificial Sequence: Synthetic oligonucleotide
agcaaacauaacugcaaac

SEQ ID NO: 2806971 - RNA, 19 nt, Artificial Sequence
  Description of Artificial Sequence: Synthetic oligonucleotide
uuuaggccuaugaagccag

SEQ ID NO: 2806972 - RNA, 19 nt, Artificial Sequence
  Description of Artificial Sequence: Synthetic oligonucleotide
uuauguuuccuccaucaaa

SEQ ID NO: 2806973 - RNA, 19 nt, Artificial Sequence
  Description of Artificial Sequence: Synthetic oligonucleotide
auaacugcaaacagugugg

SEQ ID NO: 2806974 - RNA, 19 nt, Artificial Sequence
  Description of Artificial Sequence: Synthetic oligonucleotide
gagaugaacugucagucug

SEQ ID NO: 2806975 - RNA, 19 nt, Artificial Sequence
  Description of Artificial Sequence: Synthetic oligonucleotide
ugaugagacaccuggucag

SEQ ID NO: 2806976 - RNA, 19 nt, Artificial Sequence
  Description of Artificial Sequence: Synthetic oligonucleotide
uccuccaucaaauuaucac

SEQ ID NO: 2806977 - RNA, 19 nt, Artificial Sequence
  Description of Artificial Sequence: Synthetic oligonucleotide
aaguacagcaagcaugaaa

SEQ ID NO: 2806978 - RNA, 19 nt, Artificial Sequence
  Description of Artificial Sequence: Synthetic oligonucleotide
aaaauuugcauagguuucu

SEQ ID NO: 2806979 - RNA, 19 nt, Artificial Sequence
  Description of Artificial Sequence: Synthetic oligonucleotide
ugaggagaugaacugucag

SEQ ID NO: 2806980 - RNA, 19 nt, Artificial Sequence
  Description of Artificial Sequence: Synthetic oligonucleotide
ggcaugaugagacaccugg

SEQ ID NO: 2806981 - RNA, 19 nt, Artificial Sequence
  Description of Artificial Sequence: Synthetic oligonucleotide
agaguacuuaacauaugcc

SEQ ID NO: 2806982 - RNA, 19 nt, Artificial Sequence
  Description of Artificial Sequence: Synthetic oligonucleotide
aaagaauuaaguacagcaa

SEQ ID NO: 2806983 - RNA, 19 nt, Artificial Sequence
  Description of Artificial Sequence: Synthetic oligonucleotide
aucguugugcuuuauaaaa

SEQ ID NO: 2806984 - RNA, 19 nt, Artificial Sequence
  Description of Artificial Sequence: Synthetic oligonucleotide
uugauagaguuuguuacag

SEQ ID NO: 2806985 - RNA, 19 nt, Artificial Sequence
  Description of Artificial Sequence: Synthetic oligonucleotide
ugaucaaucauuguuccaa

SEQ ID NO: 2806986 - RNA, 19 nt, Artificial Sequence
  Description of Artificial Sequence: Synthetic oligonucleotide
aggagaugaacugucaguc

SEQ ID NO: 2806987 - RNA, 19 nt, Artificial Sequence
  Description of Artificial Sequence: Synthetic oligonucleotide
ucagucugucuuuaaucgg

SEQ ID NO: 2806988 - RNA, 19 nt, Artificial Sequence
  Description of Artificial Sequence: Synthetic oligonucleotide
aaagggacgucagugcuag

SEQ ID NO: 2806989 - RNA, 19 nt, Artificial Sequence
  Description of Artificial Sequence: Synthetic oligonucleotide
cagucugucuuuaaucggg

SEQ ID NO: 2806990 - RNA, 19 nt, Artificial Sequence
  Description of Artificial Sequence: Synthetic oligonucleotide
auagaguuuaggccuauga

SEQ ID NO: 2806991 - RNA, 19 nt, Artificial Sequence
  Description of Artificial Sequence: Synthetic oligonucleotide
cuaugaagccaguuagucc

SEQ ID NO: 2806992 - RNA, 19 nt, Artificial Sequence
  Description of Artificial Sequence: Synthetic oligonucleotide
ucaauaccuguucccagag

SEQ ID NO: 2806993 - RNA, 19 nt, Artificial Sequence
  Description of Artificial Sequence: Synthetic oligonucleotide
uguggcagggguacgagca

SEQ ID NO: 2806994 - RNA, 19 nt, Artificial Sequence
  Description of Artificial Sequence: Synthetic oligonucleotide
ucauuguuccaauuucucu

SEQ ID NO: 2806995 - RNA, 19 nt, Artificial Sequence
  Description of Artificial Sequence: Synthetic oligonucleotide
aagguuacauaaaacggcu

SEQ ID NO: 2806996 - RNA, 19 nt, Artificial Sequence
  Description of Artificial Sequence: Synthetic oligonucleotide
aucugaucaaucauuguuc

SEQ ID NO: 2806997 - RNA, 19 nt, Artificial Sequence
  Description of Artificial Sequence: Synthetic oligonucleotide
cacacacacacacacgacg

SEQ ID NO: 2806998 - RNA, 19 nt, Artificial Sequence
  Description of Artificial Sequence: Synthetic oligonucleotide
augacaagguuacauaaaa

SEQ ID NO: 2806999 - RNA, 19 nt, Artificial Sequence
  Description of Artificial Sequence: Synthetic oligonucleotide
uccaugaggagaugaacug

SEQ ID NO: 2807000 - RNA, 19 nt, Artificial Sequence
  Description of Artificial Sequence: Synthetic oligonucleotide
uauacauagcaaacauaac

SEQ ID NO: 2807001 - RNA, 19 nt, Artificial Sequence
  Description of Artificial Sequence: Synthetic oligonucleotide
uagguuucuucaauuucag

SEQ ID NO: 2807002 - RNA, 19 nt, Artificial Sequence
  Description of Artificial Sequence: Synthetic oligonucleotide
uacaaagggacgucagugc

SEQ ID NO: 2807003 - RNA, 19 nt, Artificial Sequence
  Description of Artificial Sequence: Synthetic oligonucleotide
auaaaacggcuauagaguu

SEQ ID NO: 2807004 - RNA, 19 nt, Artificial Sequence
  Description of Artificial Sequence: Synthetic oligonucleotide
uucucugaacuccccagag

SEQ ID NO: 2807005 - RNA, 19 nt, Artificial Sequence
  Description of Artificial Sequence: Synthetic oligonucleotide
aaaacggcuauagaguuua

SEQ ID NO: 2807006 - RNA, 19 nt, Artificial Sequence
  Description of Artificial Sequence: Synthetic oligonucleotide
guacgagcagcauagaaga

SEQ ID NO: 2807007 - RNA, 19 nt, Artificial Sequence
  Description of Artificial Sequence: Synthetic oligonucleotide
aaucauuguuccaauuucu

SEQ ID NO: 2807008 - RNA, 19 nt, Artificial Sequence
  Description of Artificial Sequence: Synthetic oligonucleotide
uacauaaaacggcuauaga

SEQ ID NO: 2807009 - RNA, 19 nt, Artificial Sequence
  Description of Artificial Sequence: Synthetic oligonucleotide
cacacacacacacacacac

SEQ ID NO: 2807010 - RNA, 19 nt, Artificial Sequence
  Description of Artificial Sequence: Synthetic oligonucleotide
uguuuccuccaucaaauua

SEQ ID NO: 2807011 - RNA, 19 nt, Artificial Sequence
  Description of Artificial Sequence: Synthetic oligonucleotide
augaugagacaccugguca

SEQ ID NO: 2807012 - RNA, 19 nt, Artificial Sequence
  Description of Artificial Sequence: Synthetic oligonucleotide
uuuaaucgggcaugaugag

SEQ ID NO: 2807013 - RNA, 19 nt, Artificial Sequence
  Description of Artificial Sequence: Synthetic oligonucleotide
caaucauuguuccaauuuc

SEQ ID NO: 2807014 - RNA, 19 nt, Artificial Sequence
  Description of Artificial Sequence: Synthetic oligonucleotide
ugucagucugucuuuaauc

SEQ ID NO: 2807015 - RNA, 19 nt, Artificial Sequence
  Description of Artificial Sequence: Synthetic oligonucleotide
ugacaagguuacauaaaac

SEQ ID NO: 2807016 - RNA, 19 nt, Artificial Sequence
  Description of Artificial Sequence: Synthetic oligonucleotide
ucugucuuuaaucgggcau

SEQ ID NO: 2807017 - RNA, 19 nt, Artificial Sequence
  Description of Artificial Sequence: Synthetic oligonucleotide
gaguguuucagcaaucuga

SEQ ID NO: 2807018 - RNA, 19 nt, Artificial Sequence
  Description of Artificial Sequence: Synthetic oligonucleotide
agggacgucagugcuagcc

SEQ ID NO: 2807019 - RNA, 19 nt, Artificial Sequence
  Description of Artificial Sequence: Synthetic oligonucleotide
aacggcuauagaguuuagg

SEQ ID NO: 2807020 - RNA, 19 nt, Artificial Sequence
  Description of Artificial Sequence: Synthetic oligonucleotide
aguacuuaacauaugccca

SEQ ID NO: 2807021 - RNA, 19 nt, Artificial Sequence
  Description of Artificial Sequence: Synthetic oligonucleotide
auuguuccaauuucucuga

SEQ ID NO: 2807022 - RNA, 19 nt, Artificial Sequence
  Description of Artificial Sequence: Synthetic oligonucleotide
cugagauuauauacauagc

SEQ ID NO: 2807023 - RNA, 19 nt, Artificial Sequence
  Description of Artificial Sequence: Synthetic oligonucleotide
uuugcauagguuucuucaa

SEQ ID NO: 2807024 - RNA, 19 nt, Artificial Sequence
  Description of Artificial Sequence: Synthetic oligonucleotide
cauagcaaacauaacugca

SEQ ID NO: 2807025 - RNA, 19 nt, Artificial Sequence
  Description of Artificial Sequence: Synthetic oligonucleotide
cauaaaacggcuauagagu

SEQ ID NO: 2807026 - RNA, 19 nt, Artificial Sequence
  Description of Artificial Sequence: Synthetic oligonucleotide
uucccagaguguuucagca

SEQ ID NO: 2807027 - RNA, 19 nt, Artificial Sequence
  Description of Artificial Sequence: Synthetic oligonucleotide
gagauuauauacauagcaa

SEQ ID NO: 2807028 - RNA, 19 nt, Artificial Sequence
  Description of Artificial Sequence: Synthetic oligonucleotide
aaauuaucacccaggggcu

SEQ ID NO: 2807029 - RNA, 19 nt, Artificial Sequence
  Description of Artificial Sequence: Synthetic oligonucleotide
guuccaauuucucugaacu

SEQ ID NO: 2807030 - RNA, 19 nt, Artificial Sequence
  Description of Artificial Sequence: Synthetic oligonucleotide
aacauaugcccacguacaa

SEQ ID NO: 2807031 - RNA, 19 nt, Artificial Sequence
  Description of Artificial Sequence: Synthetic oligonucleotide
uagcaaacauaacugcaaa

SEQ ID NO: 2807032 - RNA, 19 nt, Artificial Sequence
  Description of Artificial Sequence: Synthetic oligonucleotide
guacuuaacauaugcccac

SEQ ID NO: 2807033 - RNA, 19 nt, Artificial Sequence
  Description of Artificial Sequence: Synthetic oligonucleotide
agccaguuaguccugagau

SEQ ID NO: 2807034 - RNA, 19 nt, Artificial Sequence
  Description of Artificial Sequence: Synthetic oligonucleotide
acaaagggacgucagugcu

SEQ ID NO: 2807035 - RNA, 19 nt, Artificial Sequence
  Description of Artificial Sequence: Synthetic oligonucleotide
uuucucugaacuccccaga

SEQ ID NO: 2807036 - RNA, 19 nt, Artificial Sequence
  Description of Artificial Sequence: Synthetic oligonucleotide
gagacaccuggucagucag

SEQ ID NO: 2807037 - RNA, 19 nt, Artificial Sequence
  Description of Artificial Sequence: Synthetic oligonucleotide
aaagggagaguggagucca

SEQ ID NO: 2807038 - RNA, 19 nt, Artificial Sequence
  Description of Artificial Sequence: Synthetic oligonucleotide
uacuuaacauaugcccacg

SEQ ID NO: 2807039 - RNA, 19 nt, Artificial Sequence
  Description of Artificial Sequence: Synthetic oligonucleotide
caugaugagacaccugguc

SEQ ID NO: 2807040 - RNA, 19 nt, Artificial Sequence
  Description of Artificial Sequence: Synthetic oligonucleotide
guacaaagggacgucagug

SEQ ID NO: 2807041 - RNA, 19 nt, Artificial Sequence
  Description of Artificial Sequence: Synthetic oligonucleotide
aagccaguuaguccugaga

SEQ ID NO: 2807042 - RNA, 19 nt, Artificial Sequence
  Description of Artificial Sequence: Synthetic oligonucleotide
aguccaugaggagaugaac

SEQ ID NO: 2807043 - RNA, 19 nt, Artificial Sequence
  Description of Artificial Sequence: Synthetic oligonucleotide
aucauuguuccaauuucuc

SEQ ID NO: 2807044 - RNA, 19 nt, Artificial Sequence
  Description of Artificial Sequence: Synthetic oligonucleotide
ccuccaucaaauuaucacc

SEQ ID NO: 2807045 - RNA, 19 nt, Artificial Sequence
  Description of Artificial Sequence: Synthetic oligonucleotide
uguuccaauuucucugaac

SEQ ID NO: 2807046 - RNA, 19 nt, Artificial Sequence
  Description of Artificial Sequence: Synthetic oligonucleotide
cuucaauaccuguucccag

SEQ ID NO: 2807047 - RNA, 19 nt, Artificial Sequence
  Description of Artificial Sequence: Synthetic oligonucleotide
agcagcauagaagauauuu

SEQ ID NO: 2807048 - RNA, 19 nt, Artificial Sequence
  Description of Artificial Sequence: Synthetic oligonucleotide
agugcuagccccaugacaa

SEQ ID NO: 2807049 - RNA, 19 nt, Artificial Sequence
  Description of Artificial Sequence: Synthetic oligonucleotide
gguacgagcagcauagaag

SEQ ID NO: 2807050 - RNA, 19 nt, Artificial Sequence
  Description of Artificial Sequence: Synthetic oligonucleotide
uuaguccugagauuauaua

SEQ ID NO: 2807051 - RNA, 19 nt, Artificial Sequence
  Description of Artificial Sequence: Synthetic oligonucleotide
ugauagaguuuguuacaga

SEQ ID NO: 2807052 - RNA, 19 nt, Artificial Sequence
  Description of Artificial Sequence: Synthetic oligonucleotide
uuaaucgggcaugaugaga

SEQ ID NO: 2807053 - RNA, 19 nt, Artificial Sequence
  Description of Artificial Sequence: Synthetic oligonucleotide
acacacacacacacgacgg

SEQ ID NO: 2807054 - RNA, 19 nt, Artificial Sequence
  Description of Artificial Sequence: Synthetic oligonucleotide
ucguugugcuuuauaaaau

SEQ ID NO: 2807055 - RNA, 19 nt, Artificial Sequence
  Description of Artificial Sequence: Synthetic oligonucleotide
uccaucaaauuaucaccca

SEQ ID NO: 2807056 - RNA, 19 nt, Artificial Sequence
  Description of Artificial Sequence: Synthetic oligonucleotide
uuacagacugccuuauguu

SEQ ID NO: 2807057 - RNA, 19 nt, Artificial Sequence
  Description of Artificial Sequence: Synthetic oligonucleotide
guuacagacugccuuaugu

SEQ ID NO: 2807058 - RNA, 19 nt, Artificial Sequence
  Description of Artificial Sequence: Synthetic oligonucleotide
ugagacaccuggucaguca

SEQ ID NO: 2807059 - RNA, 19 nt, Artificial Sequence
  Description of Artificial Sequence: Synthetic oligonucleotide
agaguguuucagcaaucug

SEQ ID NO: 2807060 - RNA, 19 nt, Artificial Sequence
  Description of Artificial Sequence: Synthetic oligonucleotide
agggguacgagcagcauag

SEQ ID NO: 2807061 - RNA, 19 nt, Artificial Sequence
  Description of Artificial Sequence: Synthetic oligonucleotide
uuuccuccaucaaauuauc

SEQ ID NO: 2807062 - RNA, 19 nt, Artificial Sequence
  Description of Artificial Sequence: Synthetic oligonucleotide
agccccaugacaagguuac

SEQ ID NO: 2807063 - RNA, 19 nt, Artificial Sequence
  Description of Artificial Sequence: Synthetic oligonucleotide
cacacacacacacacacga

SEQ ID NO: 2807064 - RNA, 19 nt, Artificial Sequence
  Description of Artificial Sequence: Synthetic oligonucleotide
ggccuaugaagccaguuag

SEQ ID NO: 2807065 - RNA, 19 nt, Artificial Sequence
  Description of Artificial Sequence: Synthetic oligonucleotide
aucgggcaugaugagacac

SEQ ID NO: 2807066 - RNA, 19 nt, Artificial Sequence
  Description of Artificial Sequence: Synthetic oligonucleotide
aguccugagauuauauaca

SEQ ID NO: 2807067 - RNA, 19 nt, Artificial Sequence
  Description of Artificial Sequence: Synthetic oligonucleotide
agucugucuuuaaucgggc

SEQ ID NO: 2807068 - RNA, 19 nt, Artificial Sequence
  Description of Artificial Sequence: Synthetic oligonucleotide
caauuucagcuucaagcug

SEQ ID NO: 2807069 - RNA, 19 nt, Artificial Sequence
  Description of Artificial Sequence: Synthetic oligonucleotide
auagcaaacauaacugcaa

SEQ ID NO: 2807070 - RNA, 19 nt, Artificial Sequence
  Description of Artificial Sequence: Synthetic oligonucleotide
gcaaacauaacugcaaaca

SEQ ID NO: 2807071 - RNA, 19 nt, Artificial Sequence
  Description of Artificial Sequence: Synthetic oligonucleotide
ccugcuuugauagaguuug

SEQ ID NO: 2807072 - RNA, 19 nt, Artificial Sequence
  Description of Artificial Sequence: Synthetic oligonucleotide
ucgggcaugaugagacacc

SEQ ID NO: 2807073 - RNA, 19 nt, Artificial Sequence
  Description of Artificial Sequence: Synthetic oligonucleotide
agaguuuguuacagacugc

SEQ ID NO: 2807074 - RNA, 19 nt, Artificial Sequence
  Description of Artificial Sequence: Synthetic oligonucleotide
agaguggaguccaugagga

SEQ ID NO: 2807075 - RNA, 19 nt, Artificial Sequence
  Description of Artificial Sequence: Synthetic oligonucleotide
ucacccaggggcuucaaua

SEQ ID NO: 2807076 - RNA, 19 nt, Artificial Sequence
  Description of Artificial Sequence: Synthetic oligonucleotide
uugcauagguuucuucaau

SEQ ID NO: 2807077 - RNA, 19 nt, Artificial Sequence
  Description of Artificial Sequence: Synthetic oligonucleotide
ugcuagccccaugacaagg

SEQ ID NO: 2807078 - RNA, 19 nt, Artificial Sequence
  Description of Artificial Sequence: Synthetic oligonucleotide
ugcauagguuucuucaauu

SEQ ID NO: 2807079 - RNA, 19 nt, Artificial Sequence
  Description of Artificial Sequence: Synthetic oligonucleotide
uguuacagacugccuuaug

SEQ ID NO: 2807080 - RNA, 19 nt, Artificial Sequence
  Description of Artificial Sequence: Synthetic oligonucleotide
acuuaacauaugcccacgu

SEQ ID NO: 2807081 - RNA, 19 nt, Artificial Sequence
  Description of Artificial Sequence: Synthetic oligonucleotide
gacaccuggucagucaggc

SEQ ID NO: 2807082 - RNA, 19 nt, Artificial Sequence
  Description of Artificial Sequence: Synthetic oligonucleotide
auuaucacccaggggcuuc

SEQ ID NO: 2807083 - RNA, 19 nt, Artificial Sequence
  Description of Artificial Sequence: Synthetic oligonucleotide
uuccaauuucucugaacuc

SEQ ID NO: 2807084 - RNA, 19 nt, Artificial Sequence
  Description of Artificial Sequence: Synthetic oligonucleotide
ugcccacguacaaagggac

SEQ ID NO: 2807085 - RNA, 19 nt, Artificial Sequence
  Description of Artificial Sequence: Synthetic oligonucleotide
guucccagaguguuucagc

SEQ ID NO: 2807086 - RNA, 19 nt, Artificial Sequence
  Description of Artificial Sequence: Synthetic oligonucleotide
uguucccagaguguuucag

SEQ ID NO: 2807087 - RNA, 19 nt, Artificial Sequence
  Description of Artificial Sequence: Synthetic oligonucleotide
uuccuccaucaaauuauca

SEQ ID NO: 2807088 - RNA, 19 nt, Artificial Sequence
  Description of Artificial Sequence: Synthetic oligonucleotide
ucucugaacuccccagagu

SEQ ID NO: 2807089 - RNA, 19 nt, Artificial Sequence
  Description of Artificial Sequence: Synthetic oligonucleotide
uaaaacggcuauagaguuu

SEQ ID NO: 2807090 - RNA, 19 nt, Artificial Sequence
  Description of Artificial Sequence: Synthetic oligonucleotide
gucagugcuagccccauga

SEQ ID NO: 2807091 - RNA, 19 nt, Artificial Sequence
  Description of Artificial Sequence: Synthetic oligonucleotide
cugucuuuaaucgggcaug

SEQ ID NO: 2807092 - RNA, 19 nt, Artificial Sequence
  Description of Artificial Sequence: Synthetic oligonucleotide
auagaguuuguuacagacu

SEQ ID NO: 2807093 - RNA, 19 nt, Artificial Sequence
  Description of Artificial Sequence: Synthetic oligonucleotide
aguguuucagcaaucugau

SEQ ID NO: 2807094 - RNA, 19 nt, Artificial Sequence
  Description of Artificial Sequence: Synthetic oligonucleotide
gaagccaguuaguccugag

SEQ ID NO: 2807095 - RNA, 19 nt, Artificial Sequence
  Description of Artificial Sequence: Synthetic oligonucleotide
aacuccccagaguacuuaa

SEQ ID NO: 2807096 - RNA, 19 nt, Artificial Sequence
  Description of Artificial Sequence: Synthetic oligonucleotide
ugucuuuaaucgggcauga

SEQ ID NO: 2807097 - RNA, 19 nt, Artificial Sequence
  Description of Artificial Sequence: Synthetic oligonucleotide
ggcuauagaguuuaggccu

SEQ ID NO: 2807098 - RNA, 19 nt, Artificial Sequence
  Description of Artificial Sequence: Synthetic oligonucleotide
acaccuggucagucaggcc

SEQ ID NO: 2807099 - RNA, 19 nt, Artificial Sequence
  Description of Artificial Sequence: Synthetic oligonucleotide
aaucgggcaugaugagaca

SEQ ID NO: 2807100 - RNA, 19 nt, Artificial Sequence
  Description of Artificial Sequence: Synthetic oligonucleotide
cacacacacacacgacggg

SEQ ID NO: 2807101 - RNA, 19 nt, Artificial Sequence
  Description of Artificial Sequence: Synthetic oligonucleotide
cacccaggggcuucaauac

SEQ ID NO: 2807102 - RNA, 19 nt, Artificial Sequence
  Description of Artificial Sequence: Synthetic oligonucleotide
gaggagaugaacugucagu

SEQ ID NO: 2807103 - RNA, 19 nt, Artificial Sequence
  Description of Artificial Sequence: Synthetic oligonucleotide
agcaaucugaucaaucauu

SEQ ID NO: 2807104 - RNA, 19 nt, Artificial Sequence
  Description of Artificial Sequence: Synthetic oligonucleotide
aaauuugcauagguuucuu

SEQ ID NO: 2807105 - RNA, 19 nt, Artificial Sequence
  Description of Artificial Sequence: Synthetic oligonucleotide
guuuguuacagacugccuu

SEQ ID NO: 2807106 - RNA, 19 nt, Artificial Sequence
  Description of Artificial Sequence: Synthetic oligonucleotide
ugccuuauguuuccuccau

SEQ ID NO: 2807107 - RNA, 19 nt, Artificial Sequence
  Description of Artificial Sequence: Synthetic oligonucleotide
caugacaagguuacauaaa

SEQ ID NO: 2807108 - RNA, 19 nt, Artificial Sequence
  Description of Artificial Sequence: Synthetic oligonucleotide
caggccugcuuugauagag

SEQ ID NO: 2807109 - RNA, 19 nt, Artificial Sequence
  Description of Artificial Sequence: Synthetic oligonucleotide
uauagaguuuaggccuaug

SEQ ID NO: 2807110 - RNA, 19 nt, Artificial Sequence
  Description of Artificial Sequence: Synthetic oligonucleotide
ucagugcuagccccaugac

SEQ ID NO: 2807111 - RNA, 19 nt, Artificial Sequence
  Description of Artificial Sequence: Synthetic oligonucleotide
gugcuuuauaaaauuugca

SEQ ID NO: 2807112 - RNA, 19 nt, Artificial Sequence
  Description of Artificial Sequence: Synthetic oligonucleotide
aucaaucauuguuccaauu

SEQ ID NO: 2807113 - RNA, 19 nt, Artificial Sequence
  Description of Artificial Sequence: Synthetic oligonucleotide
uccugagauuauauacaua

SEQ ID NO: 2807114 - RNA, 19 nt, Artificial Sequence
  Description of Artificial Sequence: Synthetic oligonucleotide
guuuaggccuaugaagcca

SEQ ID NO: 2807115 - RNA, 19 nt, Artificial Sequence
  Description of Artificial Sequence: Synthetic oligonucleotide
gaguggaguccaugaggag

SEQ ID NO: 2807116 - RNA, 19 nt, Artificial Sequence
  Description of Artificial Sequence: Synthetic oligonucleotide
gaugaacugucagucuguc

SEQ ID NO: 2807117 - RNA, 19 nt, Artificial Sequence
  Description of Artificial Sequence: Synthetic oligonucleotide
aggccuaugaagccaguua

SEQ ID NO: 2807118 - RNA, 19 nt, Artificial Sequence
  Description of Artificial Sequence: Synthetic oligonucleotide
ggagaguggaguccaugag

SEQ ID NO: 2807119 - RNA, 19 nt, Artificial Sequence
  Description of Artificial Sequence: Synthetic oligonucleotide
acacacacacacacacacg

SEQ ID NO: 2807120 - RNA, 19 nt, Artificial Sequence
  Description of Artificial Sequence: Synthetic oligonucleotide
acacacacacacacacgac

SEQ ID NO: 2807121 - RNA, 19 nt, Artificial Sequence
  Description of Artificial Sequence: Synthetic oligonucleotide
aagggacgucagugcuagc

SEQ ID NO: 2807122 - RNA, 19 nt, Artificial Sequence
  Description of Artificial Sequence: Synthetic oligonucleotide
augaacugucagucugucu

SEQ ID NO: 2807123 - RNA, 19 nt, Artificial Sequence
  Description of Artificial Sequence: Synthetic oligonucleotide
guuuccuccaucaaauuau

SEQ ID NO: 2807124 - RNA, 19 nt, Artificial Sequence
  Description of Artificial Sequence: Synthetic oligonucleotide
uuguuccaauuucucugaa

SEQ ID NO: 2807125 - RNA, 19 nt, Artificial Sequence
  Description of Artificial Sequence: Synthetic oligonucleotide
auaugcccacguacaaagg

SEQ ID NO: 2807126 - RNA, 19 nt, Artificial Sequence
  Description of Artificial Sequence: Synthetic oligonucleotide
acacacacacacgacggga

SEQ ID NO: 2807127 - RNA, 19 nt, Artificial Sequence
  Description of Artificial Sequence: Synthetic oligonucleotide
uagccccaugacaagguua

SEQ ID NO: 2807128 - RNA, 19 nt, Artificial Sequence
  Description of Artificial Sequence: Synthetic oligonucleotide
cuuaacauaugcccacgua

SEQ ID NO: 2807129 - RNA, 19 nt, Artificial Sequence
  Description of Artificial Sequence: Synthetic oligonucleotide
gcuuugauagaguuuguua

SEQ ID NO: 2807130 - RNA, 19 nt, Artificial Sequence
  Description of Artificial Sequence: Synthetic oligonucleotide
caucguugugcuuuauaaa

SEQ ID NO: 2807131 - RNA, 19 nt, Artificial Sequence
  Description of Artificial Sequence: Synthetic oligonucleotide
gucagucaggccugcuuug

SEQ ID NO: 2807132 - RNA, 19 nt, Artificial Sequence
  Description of Artificial Sequence: Synthetic oligonucleotide
aauuaucacccaggggcuu

SEQ ID NO: 2807133 - RNA, 19 nt, Artificial Sequence
  Description of Artificial Sequence: Synthetic oligonucleotide
gacugccuuauguuuccuc

SEQ ID NO: 2807134 - RNA, 19 nt, Artificial Sequence
  Description of Artificial Sequence: Synthetic oligonucleotide
caaacaguguggcaggggu

SEQ ID NO: 2807135 - RNA, 19 nt, Artificial Sequence
  Description of Artificial Sequence: Synthetic oligonucleotide
agaugaacugucagucugu

SEQ ID NO: 2807136 - RNA, 19 nt, Artificial Sequence
  Description of Artificial Sequence: Synthetic oligonucleotide
gguuacauaaaacggcuau

SEQ ID NO: 2807137 - RNA, 19 nt, Artificial Sequence
  Description of Artificial Sequence: Synthetic oligonucleotide
acgagcagcauagaagaua

SEQ ID NO: 2807138 - RNA, 19 nt, Artificial Sequence
  Description of Artificial Sequence: Synthetic oligonucleotide
guuacauaaaacggcuaua

SEQ ID NO: 2807139 - RNA, 19 nt, Artificial Sequence
  Description of Artificial Sequence: Synthetic oligonucleotide
uggucagucaggccugcuu

SEQ ID NO: 2807140 - RNA, 19 nt, Artificial Sequence
  Description of Artificial Sequence: Synthetic oligonucleotide
agucaggccugcuuugaua

SEQ ID NO: 2807141 - RNA, 19 nt, Artificial Sequence
  Description of Artificial Sequence: Synthetic oligonucleotide
uacgagcagcauagaagau

SEQ ID NO: 2807142 - RNA, 19 nt, Artificial Sequence
  Description of Artificial Sequence: Synthetic oligonucleotide
cuuauguuuccuccaucaa

SEQ ID NO: 2807143 - RNA, 19 nt, Artificial Sequence
  Description of Artificial Sequence: Synthetic oligonucleotide
acguacaaagggacgucag

SEQ ID NO: 2807144 - RNA, 19 nt, Artificial Sequence
  Description of Artificial Sequence: Synthetic oligonucleotide
gaucaaucauuguuccaau

SEQ ID NO: 2807145 - RNA, 19 nt, Artificial Sequence
  Description of Artificial Sequence: Synthetic oligonucleotide
cugaucaaucauuguucca

SEQ ID NO: 2807146 - RNA, 19 nt, Artificial Sequence
  Description of Artificial Sequence: Synthetic oligonucleotide
ugaagccaguuaguccuga

SEQ ID NO: 2807147 - RNA, 19 nt, Artificial Sequence
  Description of Artificial Sequence: Synthetic oligonucleotide
cuacacacacacacacaca

SEQ ID NO: 2807148 - RNA, 19 nt, Artificial Sequence
  Description of Artificial Sequence: Synthetic oligonucleotide
ccuaugaagccaguuaguc

SEQ ID NO: 2807149 - RNA, 19 nt, Artificial Sequence
  Description of Artificial Sequence: Synthetic oligonucleotide
aguguggcagggguacgag

SEQ ID NO: 2807150 - RNA, 19 nt, Artificial Sequence
  Description of Artificial Sequence: Synthetic oligonucleotide
acauaugcccacguacaaa

SEQ ID NO: 2807151 - RNA, 19 nt, Artificial Sequence
  Description of Artificial Sequence: Synthetic oligonucleotide
cggcuauagaguuuaggcc

SEQ ID NO: 2807152 - RNA, 19 nt, Artificial Sequence
  Description of Artificial Sequence: Synthetic oligonucleotide
aguuuguuacagacugccu

SEQ ID NO: 2807153 - RNA, 19 nt, Artificial Sequence
  Description of Artificial Sequence: Synthetic oligonucleotide
gggagaguggaguccauga

SEQ ID NO: 2807154 - RNA, 19 nt, Artificial Sequence
  Description of Artificial Sequence: Synthetic oligonucleotide
cucuacacacacacacaca

SEQ ID NO: 2807155 - RNA, 19 nt, Artificial Sequence
  Description of Artificial Sequence: Synthetic oligonucleotide
ggggcuucaauaccuguuc

SEQ ID NO: 2807156 - RNA, 19 nt, Artificial Sequence
  Description of Artificial Sequence: Synthetic oligonucleotide
uuaucacccaggggcuuca

SEQ ID NO: 2807157 - RNA, 19 nt, Artificial Sequence
  Description of Artificial Sequence: Synthetic oligonucleotide
aguuaguccugagauuaua

SEQ ID NO: 2807158 - RNA, 19 nt, Artificial Sequence
  Description of Artificial Sequence: Synthetic oligonucleotide
uuucagcaaucugaucaau

SEQ ID NO: 2807159 - RNA, 19 nt, Artificial Sequence
  Description of Artificial Sequence: Synthetic oligonucleotide
uuaggccuaugaagccagu

SEQ ID NO: 2807160 - RNA, 19 nt, Artificial Sequence
  Description of Artificial Sequence: Synthetic oligonucleotide
uaccuguucccagaguguu

SEQ ID NO: 2807161 - RNA, 19 nt, Artificial Sequence
  Description of Artificial Sequence: Synthetic oligonucleotide
uuguuacagacugccuuau

SEQ ID NO: 2807162 - RNA, 19 nt, Artificial Sequence
  Description of Artificial Sequence: Synthetic oligonucleotide
ggacgucagugcuagcccc

SEQ ID NO: 2807163 - RNA, 19 nt, Artificial Sequence
  Description of Artificial Sequence: Synthetic oligonucleotide
gggacgucagugcuagccc

SEQ ID NO: 2807164 - RNA, 19 nt, Artificial Sequence
  Description of Artificial Sequence: Synthetic oligonucleotide
acauaacugcaaacagugu

SEQ ID NO: 2807165 - RNA, 19 nt, Artificial Sequence
  Description of Artificial Sequence: Synthetic oligonucleotide
gucugucuuuaaucgggca

SEQ ID NO: 2807166 - RNA, 19 nt, Artificial Sequence
  Description of Artificial Sequence: Synthetic oligonucleotide
acugucagucugucuuuaa

SEQ ID NO: 2807167 - RNA, 19 nt, Artificial Sequence
  Description of Artificial Sequence: Synthetic oligonucleotide
aacugucagucugucuuua

SEQ ID NO: 2807168 - RNA, 19 nt, Artificial Sequence
  Description of Artificial Sequence: Synthetic oligonucleotide
ucaggccugcuuugauaga

SEQ ID NO: 2807169 - RNA, 19 nt, Artificial Sequence
  Description of Artificial Sequence: Synthetic oligonucleotide
guccaugaggagaugaacu

SEQ ID NO: 2807170 - RNA, 19 nt, Artificial Sequence
  Description of Artificial Sequence: Synthetic oligonucleotide
guccugagauuauauacau

SEQ ID NO: 2807171 - RNA, 19 nt, Artificial Sequence
  Description of Artificial Sequence: Synthetic oligonucleotide
ccaucguugugcuuuauaa

SEQ ID NO: 2807172 - RNA, 19 nt, Artificial Sequence
  Description of Artificial Sequence: Synthetic oligonucleotide
auguuuccuccaucaaauu

SEQ ID NO: 2807173 - RNA, 19 nt, Artificial Sequence
  Description of Artificial Sequence: Synthetic oligonucleotide
augaggagaugaacuguca

SEQ ID NO: 2807174 - RNA, 19 nt, Artificial Sequence
  Description of Artificial Sequence: Synthetic oligonucleotide
caccuggucagucaggccu

SEQ ID NO: 2807175 - RNA, 19 nt, Artificial Sequence
  Description of Artificial Sequence: Synthetic oligonucleotide
aaacggcuauagaguuuag

SEQ ID NO: 2807176 - RNA, 19 nt, Artificial Sequence
  Description of Artificial Sequence: Synthetic oligonucleotide
gggcuucaauaccuguucc

SEQ ID NO: 2807177 - RNA, 19 nt, Artificial Sequence
  Description of Artificial Sequence: Synthetic oligonucleotide
cagugcuagccccaugaca

SEQ ID NO: 2807178 - RNA, 19 nt, Artificial Sequence
  Description of Artificial Sequence: Synthetic oligonucleotide
uggcagggguacgagcagc

SEQ ID NO: 2807179 - RNA, 19 nt, Artificial Sequence
  Description of Artificial Sequence: Synthetic oligonucleotide
guguggcagggguacgagc

SEQ ID NO: 2807180 - RNA, 19 nt, Artificial Sequence
  Description of Artificial Sequence: Synthetic oligonucleotide
guggcagggguacgagcag

SEQ ID NO: 2807181 - RNA, 19 nt, Artificial Sequence
  Description of Artificial Sequence: Synthetic oligonucleotide
aaacaguguggcaggggua

SEQ ID NO: 2807182 - RNA, 19 nt, Artificial Sequence
  Description of Artificial Sequence: Synthetic oligonucleotide
acacacacacgacgggaua

SEQ ID NO: 2807183 - RNA, 19 nt, Artificial Sequence
  Description of Artificial Sequence: Synthetic oligonucleotide
cugccuuauguuuccucca

SEQ ID NO: 2807184 - RNA, 19 nt, Artificial Sequence
  Description of Artificial Sequence: Synthetic oligonucleotide
ccaugacaagguuacauaa

SEQ ID NO: 2807185 - RNA, 19 nt, Artificial Sequence
  Description of Artificial Sequence: Synthetic oligonucleotide
gaguccaugaggagaugaa

SEQ ID NO: 2807186 - RNA, 19 nt, Artificial Sequence
  Description of Artificial Sequence: Synthetic oligonucleotide
gugcuagccccaugacaag

SEQ ID NO: 2807187 - RNA, 19 nt, Artificial Sequence
  Description of Artificial Sequence: Synthetic oligonucleotide
auuucagcuucaagcuggu

SEQ ID NO: 2807188 - RNA, 19 nt, Artificial Sequence
  Description of Artificial Sequence: Synthetic oligonucleotide
agggagaguggaguccaug

SEQ ID NO: 2807189 - RNA, 19 nt, Artificial Sequence
  Description of Artificial Sequence: Synthetic oligonucleotide
agacaccuggucagucagg

SEQ ID NO: 2807190 - RNA, 19 nt, Artificial Sequence
  Description of Artificial Sequence: Synthetic oligonucleotide
guuaguccugagauuauau

SEQ ID NO: 2807191 - RNA, 19 nt, Artificial Sequence
  Description of Artificial Sequence: Synthetic oligonucleotide
guugugcuuuauaaaauuu

SEQ ID NO: 2807192 - RNA, 19 nt, Artificial Sequence
  Description of Artificial Sequence: Synthetic oligonucleotide
guguuucagcaaucugauc

SEQ ID NO: 2807193 - RNA, 19 nt, Artificial Sequence
  Description of Artificial Sequence: Synthetic oligonucleotide
gcaaacaguguggcagggg

SEQ ID NO: 2807194 - RNA, 19 nt, Artificial Sequence
  Description of Artificial Sequence: Synthetic oligonucleotide
acacacacacacacacaca

SEQ ID NO: 2807195 - RNA, 19 nt, Artificial Sequence
  Description of Artificial Sequence: Synthetic oligonucleotide
uaggccuaugaagccaguu

SEQ ID NO: 2807196 - RNA, 19 nt, Artificial Sequence
  Description of Artificial Sequence: Synthetic oligonucleotide
cacguacaaagggacguca

SEQ ID NO: 2807197 - RNA, 19 nt, Artificial Sequence
  Description of Artificial Sequence: Synthetic oligonucleotide
caaucugaucaaucauugu

SEQ ID NO: 2807198 - RNA, 19 nt, Artificial Sequence
  Description of Artificial Sequence: Synthetic oligonucleotide
uaaguacagcaagcaugaa

SEQ ID NO: 2807199 - RNA, 19 nt, Artificial Sequence
  Description of Artificial Sequence: Synthetic oligonucleotide
ggaguccaugaggagauga

SEQ ID NO: 2807200 - RNA, 19 nt, Artificial Sequence
  Description of Artificial Sequence: Synthetic oligonucleotide
aucacccaggggcuucaau

SEQ ID NO: 2807201 - RNA, 19 nt, Artificial Sequence
  Description of Artificial Sequence: Synthetic oligonucleotide
ccagaguacuuaacauaug

SEQ ID NO: 2807202 - RNA, 19 nt, Artificial Sequence
  Description of Artificial Sequence: Synthetic oligonucleotide
caaagggacgucagugcua

SEQ ID NO: 2807203 - RNA, 19 nt, Artificial Sequence
  Description of Artificial Sequence: Synthetic oligonucleotide
gacgucagugcuagcccca

SEQ ID NO: 2807204 - RNA, 19 nt, Artificial Sequence
  Description of Artificial Sequence: Synthetic oligonucleotide
cugaacuccccagaguacu

SEQ ID NO: 2807205 - RNA, 19 nt, Artificial Sequence
  Description of Artificial Sequence: Synthetic oligonucleotide
uugccaucguugugcuuua

SEQ ID NO: 2807206 - RNA, 19 nt, Artificial Sequence
  Description of Artificial Sequence: Synthetic oligonucleotide
ccuguucccagaguguuuc

SEQ ID NO: 2807207 - RNA, 19 nt, Artificial Sequence
  Description of Artificial Sequence: Synthetic oligonucleotide
aggggcuucaauaccuguu

SEQ ID NO: 2807208 - RNA, 19 nt, Artificial Sequence
  Description of Artificial Sequence: Synthetic oligonucleotide
augaagccaguuaguccug

SEQ ID NO: 2807209 - RNA, 19 nt, Artificial Sequence
  Description of Artificial Sequence: Synthetic oligonucleotide
ggguacgagcagcauagaa

SEQ ID NO: 2807210 - RNA, 19 nt, Artificial Sequence
  Description of Artificial Sequence: Synthetic oligonucleotide
cacacacacgacgggauaa

SEQ ID NO: 2807211 - RNA, 19 nt, Artificial Sequence
  Description of Artificial Sequence: Synthetic oligonucleotide
uuuugccaucguugugcuu

SEQ ID NO: 2807212 - RNA, 19 nt, Artificial Sequence
  Description of Artificial Sequence: Synthetic oligonucleotide
acacacacgacgggauaaa

SEQ ID NO: 2807213 - RNA, 19 nt, Artificial Sequence
  Description of Artificial Sequence: Synthetic oligonucleotide
gaacugucagucugucuuu

SEQ ID NO: 2807214 - RNA, 19 nt, Artificial Sequence
  Description of Artificial Sequence: Synthetic oligonucleotide
cccagaguacuuaacauau

SEQ ID NO: 2807215 - RNA, 19 nt, Artificial Sequence
  Description of Artificial Sequence: Synthetic oligonucleotide
agguuacauaaaacggcua

SEQ ID NO: 2807216 - RNA, 19 nt, Artificial Sequence
  Description of Artificial Sequence: Synthetic oligonucleotide
cuucaagcugguccugaua

SEQ ID NO: 2807217 - RNA, 19 nt, Artificial Sequence
  Description of Artificial Sequence: Synthetic oligonucleotide
uggaguccaugaggagaug

SEQ ID NO: 2807218 - RNA, 19 nt, Artificial Sequence
  Description of Artificial Sequence: Synthetic oligonucleotide
ggagaugaacugucagucu

SEQ ID NO: 2807219 - RNA, 19 nt, Artificial Sequence
  Description of Artificial Sequence: Synthetic oligonucleotide
guggaguccaugaggagau

SEQ ID NO: 2807220 - RNA, 19 nt, Artificial Sequence
  Description of Artificial Sequence: Synthetic oligonucleotide
cagaguguuucagcaaucu

SEQ ID NO: 2807221 - RNA, 19 nt, Artificial Sequence
  Description of Artificial Sequence: Synthetic oligonucleotide
cagggguacgagcagcaua

SEQ ID NO: 2807222 - RNA, 19 nt, Artificial Sequence
  Description of Artificial Sequence: Synthetic oligonucleotide
ccagaguguuucagcaauc

SEQ ID NO: 2807223 - RNA, 19 nt, Artificial Sequence
  Description of Artificial Sequence: Synthetic oligonucleotide
gcccacguacaaagggacg

SEQ ID NO: 2807224 - RNA, 19 nt, Artificial Sequence
  Description of Artificial Sequence: Synthetic oligonucleotide
cugucagucugucuuuaau

SEQ ID NO: 2807225 - RNA, 19 nt, Artificial Sequence
  Description of Artificial Sequence: Synthetic oligonucleotide
gcauagguuucuucaauuu

SEQ ID NO: 2807226 - RNA, 19 nt, Artificial Sequence
  Description of Artificial Sequence: Synthetic oligonucleotide
cagcaaucugaucaaucau

SEQ ID NO: 2807227 - RNA, 19 nt, Artificial Sequence
  Description of Artificial Sequence: Synthetic oligonucleotide
cacacacacacgacgggau

SEQ ID NO: 2807228 - RNA, 19 nt, Artificial Sequence
  Description of Artificial Sequence: Synthetic oligonucleotide
cccaugacaagguuacaua

SEQ ID NO: 2807229 - RNA, 19 nt, Artificial Sequence
  Description of Artificial Sequence: Synthetic oligonucleotide
gccuuauguuuccuccauc

SEQ ID NO: 2807230 - RNA, 19 nt, Artificial Sequence
  Description of Artificial Sequence: Synthetic oligonucleotide
aggccugcuuugauagagu

SEQ ID NO: 2807231 - RNA, 19 nt, Artificial Sequence
  Description of Artificial Sequence: Synthetic oligonucleotide
agacugccuuauguuuccu

SEQ ID NO: 2807232 - RNA, 19 nt, Artificial Sequence
  Description of Artificial Sequence: Synthetic oligonucleotide
ccaggggcuucaauaccug

SEQ ID NO: 2807233 - RNA, 19 nt, Artificial Sequence
  Description of Artificial Sequence: Synthetic oligonucleotide
cuguucccagaguguuuca

SEQ ID NO: 2807234 - RNA, 19 nt, Artificial Sequence
  Description of Artificial Sequence: Synthetic oligonucleotide
aagggagaguggaguccau

SEQ ID NO: 2807235 - RNA, 19 nt, Artificial Sequence
  Description of Artificial Sequence: Synthetic oligonucleotide
caguguggcagggguacga

SEQ ID NO: 2807236 - RNA, 19 nt, Artificial Sequence
  Description of Artificial Sequence: Synthetic oligonucleotide
ggucagucaggccugcuuu

SEQ ID NO: 2807237 - RNA, 19 nt, Artificial Sequence
  Description of Artificial Sequence: Synthetic oligonucleotide
ccccagaguacuuaacaua

SEQ ID NO: 2807238 - RNA, 19 nt, Artificial Sequence
  Description of Artificial Sequence: Synthetic oligonucleotide
gcuauagaguuuaggccua

SEQ ID NO: 2807239 - RNA, 19 nt, Artificial Sequence
  Description of Artificial Sequence: Synthetic oligonucleotide
cacacacgacgggauaaaa

SEQ ID NO: 2807240 - RNA, 19 nt, Artificial Sequence
  Description of Artificial Sequence: Synthetic oligonucleotide
caauaccuguucccagagu

SEQ ID NO: 2807241 - RNA, 19 nt, Artificial Sequence
  Description of Artificial Sequence: Synthetic oligonucleotide
gcagcauagaagauauuuu

SEQ ID NO: 2807242 - RNA, 19 nt, Artificial Sequence
  Description of Artificial Sequence: Synthetic oligonucleotide
cgagcagcauagaagauau

SEQ ID NO: 2807243 - RNA, 19 nt, Artificial Sequence
  Description of Artificial Sequence: Synthetic oligonucleotide
uaucacccaggggcuucaa

SEQ ID NO: 2807244 - RNA, 19 nt, Artificial Sequence
  Description of Artificial Sequence: Synthetic oligonucleotide
acgucagugcuagccccau

SEQ ID NO: 2807245 - RNA, 19 nt, Artificial Sequence
  Description of Artificial Sequence: Synthetic oligonucleotide
gccaucguugugcuuuaua

SEQ ID NO: 2807246 - RNA, 19 nt, Artificial Sequence
  Description of Artificial Sequence: Synthetic oligonucleotide
ggcagggguacgagcagca

SEQ ID NO: 2807247 - RNA, 19 nt, Artificial Sequence
  Description of Artificial Sequence: Synthetic oligonucleotide
accuguucccagaguguuu

SEQ ID NO: 2807248 - RNA, 19 nt, Artificial Sequence
  Description of Artificial Sequence: Synthetic oligonucleotide
caggggcuucaauaccugu

SEQ ID NO: 2807249 - RNA, 19 nt, Artificial Sequence
  Description of Artificial Sequence: Synthetic oligonucleotide
caguuaguccugagauuau

SEQ ID NO: 2807250 - RNA, 19 nt, Artificial Sequence
  Description of Artificial Sequence: Synthetic oligonucleotide
cugcuuugauagaguuugu

SEQ ID NO: 2807251 - RNA, 19 nt, Artificial Sequence
  Description of Artificial Sequence: Synthetic oligonucleotide
cccagaguguuucagcaau

SEQ ID NO: 2807252 - RNA, 19 nt, Artificial Sequence
  Description of Artificial Sequence: Synthetic oligonucleotide
gggcaugaugagacaccug

SEQ ID NO: 2807253 - RNA, 19 nt, Artificial Sequence
  Description of Artificial Sequence: Synthetic oligonucleotide
ccacguacaaagggacguc

SEQ ID NO: 2807254 - RNA, 19 nt, Artificial Sequence
  Description of Artificial Sequence: Synthetic oligonucleotide
cguugugcuuuauaaaauu

SEQ ID NO: 2807255 - RNA, 19 nt, Artificial Sequence
  Description of Artificial Sequence: Synthetic oligonucleotide
cuagccccaugacaagguu

SEQ ID NO: 2807256 - RNA, 19 nt, Artificial Sequence
  Description of Artificial Sequence: Synthetic oligonucleotide
ggccugcuuugauagaguu

SEQ ID NO: 2807257 - RNA, 19 nt, Artificial Sequence
  Description of Artificial Sequence: Synthetic oligonucleotide
ugccaucguugugcuuuau

SEQ ID NO: 2807258 - RNA, 19 nt, Artificial Sequence
  Description of Artificial Sequence: Synthetic oligonucleotide
gcuagccccaugacaaggu

SEQ ID NO: 2807259 - RNA, 19 nt, Artificial Sequence
  Description of Artificial Sequence: Synthetic oligonucleotide
cuauagaguuuaggccuau

SEQ ID NO: 2807260 - RNA, 19 nt, Artificial Sequence
  Description of Artificial Sequence: Synthetic oligonucleotide
cccacguacaaagggacgu

SEQ ID NO: 2807261 - RNA, 19 nt, Artificial Sequence
  Description of Artificial Sequence: Synthetic oligonucleotide
gcaugaugagacaccuggu

SEQ ID NO: 2807262 - RNA, 19 nt, Artificial Sequence
  Description of Artificial Sequence: Synthetic oligonucleotide
gccaguuaguccugagauu

SEQ ID NO: 2807263 - RNA, 19 nt, Artificial Sequence
  Description of Artificial Sequence: Synthetic oligonucleotide
gccuaugaagccaguuagu

SEQ ID NO: 2807264 - RNA, 19 nt, Artificial Sequence
  Description of Artificial Sequence: Synthetic oligonucleotide
gucuuuaaucgggcaugau

SEQ ID NO: 2807265 - RNA, 19 nt, Artificial Sequence
  Description of Artificial Sequence: Synthetic oligonucleotide
ccuggucagucaggccugc

SEQ ID NO: 2807266 - RNA, 19 nt, Artificial Sequence
  Description of Artificial Sequence: Synthetic oligonucleotide
cguacaaagggacgucagu

SEQ ID NO: 2807267 - RNA, 19 nt, Artificial Sequence
  Description of Artificial Sequence: Synthetic oligonucleotide
cagucaggccugcuuugau

SEQ ID NO: 2807268 - RNA, 19 nt, Artificial Sequence
  Description of Artificial Sequence: Synthetic oligonucleotide
gggguacgagcagcauaga

SEQ ID NO: 2807269 - RNA, 19 nt, Artificial Sequence
  Description of Artificial Sequence: Synthetic oligonucleotide
gagcagcauagaagauauu

SEQ ID NO: 2807270 - RNA, 19 nt, Artificial Sequence
  Description of Artificial Sequence: Synthetic oligonucleotide
cgucagugcuagccccaug

SEQ ID NO: 2807271 - RNA, 19 nt, Artificial Sequence
  Description of Artificial Sequence: Synthetic oligonucleotide
gccugcuuugauagaguuu

SEQ ID NO: 2807272 - RNA, 19 nt, Artificial Sequence
  Description of Artificial Sequence: Synthetic oligonucleotide
gccccaugacaagguuaca

SEQ ID NO: 2807273 - RNA, 19 nt, Artificial Sequence
  Description of Artificial Sequence: Synthetic oligonucleotide
cuggucagucaggccugcu

SEQ ID NO: 2807274 - RNA, 19 nt, Artificial Sequence
  Description of Artificial Sequence: Synthetic oligonucleotide
cgggcaugaugagacaccu

SEQ ID NO: 2807275 - RNA, 19 nt, Artificial Sequence
  Description of Artificial Sequence: Synthetic oligonucleotide
gcagggguacgagcagcau

SEQ ID NO: 2807276 - RNA, 19 nt, Artificial Sequence
  Description of Artificial Sequence: Synthetic oligonucleotide
ugagccaaggaccagaaac

SEQ ID NO: 2807277 - RNA, 19 nt, Artificial Sequence
  Description of Artificial Sequence: Synthetic oligonucleotide
uauucuccugaacacaggg

SEQ ID NO: 2807278 - RNA, 19 nt, Artificial Sequence
  Description of Artificial Sequence: Synthetic oligonucleotide
acugauauucuccugaaca

SEQ ID NO: 2807279 - RNA, 19 nt, Artificial Sequence
  Description of Artificial Sequence: Synthetic oligonucleotide
ucaaacaugcccaggaggc

SEQ ID NO: 2807280 - RNA, 19 nt, Artificial Sequence
  Description of Artificial Sequence: Synthetic oligonucleotide
agauacacaucucccagcc

SEQ ID NO: 2807281 - RNA, 19 nt, Artificial Sequence
  Description of Artificial Sequence: Synthetic oligonucleotide
caugauguagcuuuccucc

SEQ ID NO: 2807282 - RNA, 19 nt, Artificial Sequence
  Description of Artificial Sequence: Synthetic oligonucleotide
accaguuugccacacacac

SEQ ID NO: 2807283 - RNA, 19 nt, Artificial Sequence
  Description of Artificial Sequence: Synthetic oligonucleotide
acacacaccaguuugccac

SEQ ID NO: 2807284 - RNA, 19 nt, Artificial Sequence
  Description of Artificial Sequence: Synthetic oligonucleotide
auacacaucucccagccgg

SEQ ID NO: 2807285 - RNA, 19 nt, Artificial Sequence
  Description of Artificial Sequence: Synthetic oligonucleotide
aguagaacaggcugcaguc

SEQ ID NO: 2807286 - RNA, 19 nt, Artificial Sequence
  Description of Artificial Sequence: Synthetic oligonucleotide
ugagggaaagcacugauau

SEQ ID NO: 2807287 - RNA, 19 nt, Artificial Sequence
  Description of Artificial Sequence: Synthetic oligonucleotide
aaagcacugauauucuccu

SEQ ID NO: 2807288 - RNA, 19 nt, Artificial Sequence
  Description of Artificial Sequence: Synthetic oligonucleotide
acacaggggaggcagaccc

SEQ ID NO: 2807289 - RNA, 19 nt, Artificial Sequence
  Description of Artificial Sequence: Synthetic oligonucleotide
acacacugcaccgugagcc

SEQ ID NO: 2807290 - RNA, 19 nt, Artificial Sequence
  Description of Artificial Sequence: Synthetic oligonucleotide
gagaacaacagcaugggug

SEQ ID NO: 2807291 - RNA, 19 nt, Artificial Sequence
  Description of Artificial Sequence: Synthetic oligonucleotide
ugucaaggcacagagcugg

SEQ ID NO: 2807292 - RNA, 19 nt, Artificial Sequence
  Description of Artificial Sequence: Synthetic oligonucleotide
uacuccacaguucagggga

SEQ ID NO: 2807293 - RNA, 19 nt, Artificial Sequence
  Description of Artificial Sequence: Synthetic oligonucleotide
agaacaacagcaugggugu

SEQ ID NO: 2807294 - RNA, 19 nt, Artificial Sequence
  Description of Artificial Sequence: Synthetic oligonucleotide
gauauucuccugaacacag

SEQ ID NO: 2807295 - RNA, 19 nt, Artificial Sequence
  Description of Artificial Sequence: Synthetic oligonucleotide
aggccagauacacaucucc

SEQ ID NO: 2807296 - RNA, 19 nt, Artificial Sequence
  Description of Artificial Sequence: Synthetic oligonucleotide
aacagcaugggugucuggg

SEQ ID NO: 2807297 - RNA, 19 nt, Artificial Sequence
  Description of Artificial Sequence: Synthetic oligonucleotide
uucaggggaggccagauac

SEQ ID NO: 2807298 - RNA, 19 nt, Artificial Sequence
  Description of Artificial Sequence: Synthetic oligonucleotide
agagcuggcacucaaacau

SEQ ID NO: 2807299 - RNA, 19 nt, Artificial Sequence
  Description of Artificial Sequence: Synthetic oligonucleotide
uuuccugagggaaagcacu

SEQ ID NO: 2807300 - RNA, 19 nt, Artificial Sequence
  Description of Artificial Sequence: Synthetic oligonucleotide
uaaggagcugucaaggcac

SEQ ID NO: 2807301 - RNA, 19 nt, Artificial Sequence
  Description of Artificial Sequence: Synthetic oligonucleotide
cuuggaguagaacaggcug

SEQ ID NO: 2807302 - RNA, 19 nt, Artificial Sequence
  Description of Artificial Sequence: Synthetic oligonucleotide
gaaagcacugauauucucc

SEQ ID NO: 2807303 - RNA, 19 nt, Artificial Sequence
  Description of Artificial Sequence: Synthetic oligonucleotide
acaccaguuugccacacac

SEQ ID NO: 2807304 - RNA, 19 nt, Artificial Sequence
  Description of Artificial Sequence: Synthetic oligonucleotide
agaaaccuggcuuugucug

SEQ ID NO: 2807305 - RNA, 19 nt, Artificial Sequence
  Description of Artificial Sequence: Synthetic oligonucleotide
uuggaguagaacaggcugc

SEQ ID NO: 2807306 - RNA, 19 nt, Artificial Sequence
  Description of Artificial Sequence: Synthetic oligonucleotide
caguuugccacacacacug

SEQ ID NO: 2807307 - RNA, 19 nt, Artificial Sequence
  Description of Artificial Sequence: Synthetic oligonucleotide
acaggcugcaguccgggcc

SEQ ID NO: 2807308 - RNA, 19 nt, Artificial Sequence
  Description of Artificial Sequence: Synthetic oligonucleotide
uggagcugcagcuggaucc

SEQ ID NO: 2807309 - RNA, 19 nt, Artificial Sequence
  Description of Artificial Sequence: Synthetic oligonucleotide
aaacaugcccaggaggcgg

SEQ ID NO: 2807310 - RNA, 19 nt, Artificial Sequence
  Description of Artificial Sequence: Synthetic oligonucleotide
ugcaccgugagccaaggac

SEQ ID NO: 2807311 - RNA, 19 nt, Artificial Sequence
  Description of Artificial Sequence: Synthetic oligonucleotide
gauguagcuuuccuccagg

SEQ ID NO: 2807312 - RNA, 19 nt, Artificial Sequence
  Description of Artificial Sequence: Synthetic oligonucleotide
cucaaacaugcccaggagg

SEQ ID NO: 2807313 - RNA, 19 nt, Artificial Sequence
  Description of Artificial Sequence: Synthetic oligonucleotide
uccuucaugauguagcuuu

SEQ ID NO: 2807314 - RNA, 19 nt, Artificial Sequence
  Description of Artificial Sequence: Synthetic oligonucleotide
aagggauccuucaugaugu

SEQ ID NO: 2807315 - RNA, 19 nt, Artificial Sequence
  Description of Artificial Sequence: Synthetic oligonucleotide
cuuugucugaggagaaggg

SEQ ID NO: 2807316 - RNA, 19 nt, Artificial Sequence
  Description of Artificial Sequence: Synthetic oligonucleotide
uguagcuuuccuccaggag

SEQ ID NO: 2807317 - RNA, 19 nt, Artificial Sequence
  Description of Artificial Sequence: Synthetic oligonucleotide
cugauauucuccugaacac

SEQ ID NO: 2807318 - RNA, 19 nt, Artificial Sequence
  Description of Artificial Sequence: Synthetic oligonucleotide
guagcuuuccuccaggaga

SEQ ID NO: 2807319 - RNA, 19 nt, Artificial Sequence
  Description of Artificial Sequence: Synthetic oligonucleotide
uucaugauguagcuuuccu

SEQ ID NO: 2807320 - RNA, 19 nt, Artificial Sequence
  Description of Artificial Sequence: Synthetic oligonucleotide
uguaaggagcugucaaggc

SEQ ID NO: 2807321 - RNA, 19 nt, Artificial Sequence
  Description of Artificial Sequence: Synthetic oligonucleotide
uggcacucaaacaugccca

SEQ ID NO: 2807322 - RNA, 19 nt, Artificial Sequence
  Description of Artificial Sequence: Synthetic oligonucleotide
ugauguagcuuuccuccag

SEQ ID NO: 2807323 - RNA, 19 nt, Artificial Sequence
  Description of Artificial Sequence: Synthetic oligonucleotide
acccucuuggaguagaaca

SEQ ID NO: 2807324 - RNA, 19 nt, Artificial Sequence
  Description of Artificial Sequence: Synthetic oligonucleotide
gagaagggauccuucauga

SEQ ID NO: 2807325 - RNA, 19 nt, Artificial Sequence
  Description of Artificial Sequence: Synthetic oligonucleotide
uugucugaggagaagggau

SEQ ID NO: 2807326 - RNA, 19 nt, Artificial Sequence
  Description of Artificial Sequence: Synthetic oligonucleotide
uucugucccacguagcugu

SEQ ID NO: 2807327 - RNA, 19 nt, Artificial Sequence
  Description of Artificial Sequence: Synthetic oligonucleotide
ccaaggaccagaaaccugg

SEQ ID NO: 2807328 - RNA, 19 nt, Artificial Sequence
  Description of Artificial Sequence: Synthetic oligonucleotide
ugagucagcccaacgcugc

SEQ ID NO: 2807329 - RNA, 19 nt, Artificial Sequence
  Description of Artificial Sequence: Synthetic oligonucleotide
ugucccacguagcuguaag

SEQ ID NO: 2807330 - RNA, 19 nt, Artificial Sequence
  Description of Artificial Sequence: Synthetic oligonucleotide
cuggcacucaaacaugccc

SEQ ID NO: 2807331 - RNA, 19 nt, Artificial Sequence
  Description of Artificial Sequence: Synthetic oligonucleotide
ugauauucuccugaacaca

SEQ ID NO: 2807332 - RNA, 19 nt, Artificial Sequence
  Description of Artificial Sequence: Synthetic oligonucleotide
cuguaaggagcugucaagg

SEQ ID NO: 2807333 - RNA, 19 nt, Artificial Sequence
  Description of Artificial Sequence: Synthetic oligonucleotide
cucuuggaguagaacaggc

SEQ ID NO: 2807334 - RNA, 19 nt, Artificial Sequence
  Description of Artificial Sequence: Synthetic oligonucleotide
aguccgggcccacacacac

SEQ ID NO: 2807335 - RNA, 19 nt, Artificial Sequence
  Description of Artificial Sequence: Synthetic oligonucleotide
ucuccugaacacaggggag

SEQ ID NO: 2807336 - RNA, 19 nt, Artificial Sequence
  Description of Artificial Sequence: Synthetic oligonucleotide
cugcuguauuuccugaggg

SEQ ID NO: 2807337 - RNA, 19 nt, Artificial Sequence
  Description of Artificial Sequence: Synthetic oligonucleotide
ucaugauguagcuuuccuc

SEQ ID NO: 2807338 - RNA, 19 nt, Artificial Sequence
  Description of Artificial Sequence: Synthetic oligonucleotide
ucuuggaguagaacaggcu

SEQ ID NO: 2807339 - RNA, 19 nt, Artificial Sequence
  Description of Artificial Sequence: Synthetic oligonucleotide
ugccacacacacugcaccg

SEQ ID NO: 2807340 - RNA, 19 nt, Artificial Sequence
  Description of Artificial Sequence: Synthetic oligonucleotide
ucuuggaggccccuuuucu

SEQ ID NO: 2807341 - RNA, 19 nt, Artificial Sequence
  Description of Artificial Sequence: Synthetic oligonucleotide
gauacacaucucccagccg

SEQ ID NO: 2807342 - RNA, 19 nt, Artificial Sequence
  Description of Artificial Sequence: Synthetic oligonucleotide
aacacaggggaggcagacc

SEQ ID NO: 2807343 - RNA, 19 nt, Artificial Sequence
  Description of Artificial Sequence: Synthetic oligonucleotide
auuuccugagggaaagcac

SEQ ID NO: 2807344 - RNA, 19 nt, Artificial Sequence
  Description of Artificial Sequence: Synthetic oligonucleotide
aggagaacaacagcauggg

SEQ ID NO: 2807345 - RNA, 19 nt, Artificial Sequence
  Description of Artificial Sequence: Synthetic oligonucleotide
uuggccagcuccuugguuc

SEQ ID NO: 2807346 - RNA, 19 nt, Artificial Sequence
  Description of Artificial Sequence: Synthetic oligonucleotide
gaggcagacccucuuggag

SEQ ID NO: 2807347 - RNA, 19 nt, Artificial Sequence
  Description of Artificial Sequence: Synthetic oligonucleotide
gucagggauggcuggaggg

SEQ ID NO: 2807348 - RNA, 19 nt, Artificial Sequence
  Description of Artificial Sequence: Synthetic oligonucleotide
uuugucugaggagaaggga

SEQ ID NO: 2807349 - RNA, 19 nt, Artificial Sequence
  Description of Artificial Sequence: Synthetic oligonucleotide
gguacuccacaguucaggg

SEQ ID NO: 2807350 - RNA, 19 nt, Artificial Sequence
  Description of Artificial Sequence: Synthetic oligonucleotide
cuggagggcuucuuggagg

SEQ ID NO: 2807351 - RNA, 19 nt, Artificial Sequence
  Description of Artificial Sequence: Synthetic oligonucleotide
acucaaacaugcccaggag

SEQ ID NO: 2807352 - RNA, 19 nt, Artificial Sequence
  Description of Artificial Sequence: Synthetic oligonucleotide
cuccaggagaacaacagca

SEQ ID NO: 2807353 - RNA, 19 nt, Artificial Sequence
  Description of Artificial Sequence: Synthetic oligonucleotide
agguacuccacaguucagg

SEQ ID NO: 2807354 - RNA, 19 nt, Artificial Sequence
  Description of Artificial Sequence: Synthetic oligonucleotide
gagccaaggaccagaaacc

SEQ ID NO: 2807355 - RNA, 19 nt, Artificial Sequence
  Description of Artificial Sequence: Synthetic oligonucleotide
acagcaugggugucugggg

SEQ ID NO: 2807356 - RNA, 19 nt, Artificial Sequence
  Description of Artificial Sequence: Synthetic oligonucleotide
aacaacagcaugggugucu

SEQ ID NO: 2807357 - RNA, 19 nt, Artificial Sequence
  Description of Artificial Sequence: Synthetic oligonucleotide
aaaccuggcuuugucugag

SEQ ID NO: 2807358 - RNA, 19 nt, Artificial Sequence
  Description of Artificial Sequence: Synthetic oligonucleotide
guaaggagcugucaaggca

SEQ ID NO: 2807359 - RNA, 19 nt, Artificial Sequence
  Description of Artificial Sequence: Synthetic oligonucleotide
uagcuuuccuccaggagaa

SEQ ID NO: 2807360 - RNA, 19 nt, Artificial Sequence
  Description of Artificial Sequence: Synthetic oligonucleotide
ugcuguauuuccugaggga

SEQ ID NO: 2807361 - RNA, 19 nt, Artificial Sequence
  Description of Artificial Sequence: Synthetic oligonucleotide
uccgggcccacacacacca

SEQ ID NO: 2807362 - RNA, 19 nt, Artificial Sequence
  Description of Artificial Sequence: Synthetic oligonucleotide
ugucugaggagaagggauc

SEQ ID NO: 2807363 - RNA, 19 nt, Artificial Sequence
  Description of Artificial Sequence: Synthetic oligonucleotide
cugaacacaggggaggcag

SEQ ID NO: 2807364 - RNA, 19 nt, Artificial Sequence
  Description of Artificial Sequence: Synthetic oligonucleotide
agcuggcacucaaacaugc

SEQ ID NO: 2807365 - RNA, 19 nt, Artificial Sequence
  Description of Artificial Sequence: Synthetic oligonucleotide
acacacacugcaccgugag

SEQ ID NO: 2807366 - RNA, 19 nt, Artificial Sequence
  Description of Artificial Sequence: Synthetic oligonucleotide
uuccugagggaaagcacug

SEQ ID NO: 2807367 - RNA, 19 nt, Artificial Sequence
  Description of Artificial Sequence: Synthetic oligonucleotide
uggcuggagggcuucuugg

SEQ ID NO: 2807368 - RNA, 19 nt, Artificial Sequence
  Description of Artificial Sequence: Synthetic oligonucleotide
uuggaggccccuuuucucu

SEQ ID NO: 2807369 - RNA, 19 nt, Artificial Sequence
  Description of Artificial Sequence: Synthetic oligonucleotide
aaggaccagaaaccuggcu

SEQ ID NO: 2807370 - RNA, 19 nt, Artificial Sequence
  Description of Artificial Sequence: Synthetic oligonucleotide
uccaggagaacaacagcau

SEQ ID NO: 2807371 - RNA, 19 nt, Artificial Sequence
  Description of Artificial Sequence: Synthetic oligonucleotide
aacgcugcacaggaggcug

SEQ ID NO: 2807372 - RNA, 19 nt, Artificial Sequence
  Description of Artificial Sequence: Synthetic oligonucleotide
ugaggagaagggauccuuc

SEQ ID NO: 2807373 - RNA, 19 nt, Artificial Sequence
  Description of Artificial Sequence: Synthetic oligonucleotide
agucagggauggcuggagg

SEQ ID NO: 2807374 - RNA, 19 nt, Artificial Sequence
  Description of Artificial Sequence: Synthetic oligonucleotide
ggauccuucaugauguagc

SEQ ID NO: 2807375 - RNA, 19 nt, Artificial Sequence
  Description of Artificial Sequence: Synthetic oligonucleotide
uuccuccaggagaacaaca

SEQ ID NO: 2807376 - RNA, 19 nt, Artificial Sequence
  Description of Artificial Sequence: Synthetic oligonucleotide
ugcacaggaggcugugugc

SEQ ID NO: 2807377 - RNA, 19 nt, Artificial Sequence
  Description of Artificial Sequence: Synthetic oligonucleotide
ucccacguagcuguaagga

SEQ ID NO: 2807378 - RNA, 19 nt, Artificial Sequence
  Description of Artificial Sequence: Synthetic oligonucleotide
uccugcuguauuuccugag

SEQ ID NO: 2807379 - RNA, 19 nt, Artificial Sequence
  Description of Artificial Sequence: Synthetic oligonucleotide
cacauccugcuguauuucc

SEQ ID NO: 2807380 - RNA, 19 nt, Artificial Sequence
  Description of Artificial Sequence: Synthetic oligonucleotide
cucaggcuuggccagcucc

SEQ ID NO: 2807381 - RNA, 19 nt, Artificial Sequence
  Description of Artificial Sequence: Synthetic oligonucleotide
cauccugcuguauuuccug

SEQ ID NO: 2807382 - RNA, 19 nt, Artificial Sequence
  Description of Artificial Sequence: Synthetic oligonucleotide
agcuguaaggagcugucaa

SEQ ID NO: 2807383 - RNA, 19 nt, Artificial Sequence
  Description of Artificial Sequence: Synthetic oligonucleotide
ggggcucugccucagaugc

SEQ ID NO: 2807384 - RNA, 19 nt, Artificial Sequence
  Description of Artificial Sequence: Synthetic oligonucleotide
uguccucaggcuuggccag

SEQ ID NO: 2807385 - RNA, 19 nt, Artificial Sequence
  Description of Artificial Sequence: Synthetic oligonucleotide
aagcacugauauucuccug

SEQ ID NO: 2807386 - RNA, 19 nt, Artificial Sequence
  Description of Artificial Sequence: Synthetic oligonucleotide
cugugugccugccagucag

SEQ ID NO: 2807387 - RNA, 19 nt, Artificial Sequence
  Description of Artificial Sequence: Synthetic oligonucleotide
ggagaagggauccuucaug

SEQ ID NO: 2807388 - RNA, 19 nt, Artificial Sequence
  Description of Artificial Sequence: Synthetic oligonucleotide
aggcagacccucuuggagu

SEQ ID NO: 2807389 - RNA, 19 nt, Artificial Sequence
  Description of Artificial Sequence: Synthetic oligonucleotide
gaggagaagggauccuuca

SEQ ID NO: 2807390 - RNA, 19 nt, Artificial Sequence
  Description of Artificial Sequence: Synthetic oligonucleotide
uuuuccacauccugcugua

SEQ ID NO: 2807391 - RNA, 19 nt, Artificial Sequence
  Description of Artificial Sequence: Synthetic oligonucleotide
uccacauccugcuguauuu

SEQ ID NO: 2807392 - RNA, 19 nt, Artificial Sequence
  Description of Artificial Sequence: Synthetic oligonucleotide
aaccuggcuuugucugagg

SEQ ID NO: 2807393 - RNA, 19 nt, Artificial Sequence
  Description of Artificial Sequence: Synthetic oligonucleotide
ucagggauggcuggagggc

SEQ ID NO: 2807394 - RNA, 19 nt, Artificial Sequence
  Description of Artificial Sequence: Synthetic oligonucleotide
uggaguagaacaggcugca

SEQ ID NO: 2807395 - RNA, 19 nt, Artificial Sequence
  Description of Artificial Sequence: Synthetic oligonucleotide
auucuccugaacacagggg

SEQ ID NO: 2807396 - RNA, 19 nt, Artificial Sequence
  Description of Artificial Sequence: Synthetic oligonucleotide
agcccaacgcugcacagga

SEQ ID NO: 2807397 - RNA, 19 nt, Artificial Sequence
  Description of Artificial Sequence: Synthetic oligonucleotide
gaguagaacaggcugcagu

SEQ ID NO: 2807398 - RNA, 19 nt, Artificial Sequence
  Description of Artificial Sequence: Synthetic oligonucleotide
cacucaaacaugcccagga

SEQ ID NO: 2807399 - RNA, 19 nt, Artificial Sequence
  Description of Artificial Sequence: Synthetic oligonucleotide
gaaaccuggcuuugucuga

SEQ ID NO: 2807400 - RNA, 19 nt, Artificial Sequence
  Description of Artificial Sequence: Synthetic oligonucleotide
uucccagggcugcagguac

SEQ ID NO: 2807401 - RNA, 19 nt, Artificial Sequence
  Description of Artificial Sequence: Synthetic oligonucleotide
ugcagguacuccacaguuc

SEQ ID NO: 2807402 - RNA, 19 nt, Artificial Sequence
  Description of Artificial Sequence: Synthetic oligonucleotide
augauguagcuuuccucca

SEQ ID NO: 2807403 - RNA, 19 nt, Artificial Sequence
  Description of Artificial Sequence: Synthetic oligonucleotide
ugugugccugccagucagg

SEQ ID NO: 2807404 - RNA, 19 nt, Artificial Sequence
  Description of Artificial Sequence: Synthetic oligonucleotide
uacacaucucccagccgga

SEQ ID NO: 2807405 - RNA, 19 nt, Artificial Sequence
  Description of Artificial Sequence: Synthetic oligonucleotide
gcuguaaggagcugucaag

SEQ ID NO: 2807406 - RNA, 19 nt, Artificial Sequence
  Description of Artificial Sequence: Synthetic oligonucleotide
uuccacauccugcuguauu

SEQ ID NO: 2807407 - RNA, 19 nt, Artificial Sequence
  Description of Artificial Sequence: Synthetic oligonucleotide
cugagucagcccaacgcug

SEQ ID NO: 2807408 - RNA, 19 nt, Artificial Sequence
  Description of Artificial Sequence: Synthetic oligonucleotide
ccacguagcuguaaggagc

SEQ ID NO: 2807409 - RNA, 19 nt, Artificial Sequence
  Description of Artificial Sequence: Synthetic oligonucleotide
cuucaugauguagcuuucc

SEQ ID NO: 2807410 - RNA, 19 nt, Artificial Sequence
  Description of Artificial Sequence: Synthetic oligonucleotide
auauucuccugaacacagg

SEQ ID NO: 2807411 - RNA, 19 nt, Artificial Sequence
  Description of Artificial Sequence: Synthetic oligonucleotide
cuuggaggccccuuuucuc

SEQ ID NO: 2807412 - RNA, 19 nt, Artificial Sequence
  Description of Artificial Sequence: Synthetic oligonucleotide
aacaugcccaggaggcggg

SEQ ID NO: 2807413 - RNA, 19 nt, Artificial Sequence
  Description of Artificial Sequence: Synthetic oligonucleotide
uggcugagucagcccaacg

SEQ ID NO: 2807414 - RNA, 19 nt, Artificial Sequence
  Description of Artificial Sequence: Synthetic oligonucleotide
ugaacacaggggaggcaga

SEQ ID NO: 2807415 - RNA, 19 nt, Artificial Sequence
  Description of Artificial Sequence: Synthetic oligonucleotide
uccuugguucccagggcug

SEQ ID NO: 2807416 - RNA, 19 nt, Artificial Sequence
  Description of Artificial Sequence: Synthetic oligonucleotide
cuggcuuugucugaggaga

SEQ ID NO: 2807417 - RNA, 19 nt, Artificial Sequence
  Description of Artificial Sequence: Synthetic oligonucleotide
ucaggggaggccagauaca

SEQ ID NO: 2807418 - RNA, 19 nt, Artificial Sequence
  Description of Artificial Sequence: Synthetic oligonucleotide
caaacaugcccaggaggcg

SEQ ID NO: 2807419 - RNA, 19 nt, Artificial Sequence
  Description of Artificial Sequence: Synthetic oligonucleotide
gauccuucaugauguagcu

SEQ ID NO: 2807420 - RNA, 19 nt, Artificial Sequence
  Description of Artificial Sequence: Synthetic oligonucleotide
ggcugagucagcccaacgc

SEQ ID NO: 2807421 - RNA, 19 nt, Artificial Sequence
  Description of Artificial Sequence: Synthetic oligonucleotide
cuguccucaggcuuggcca

SEQ ID NO: 2807422 - RNA, 19 nt, Artificial Sequence
  Description of Artificial Sequence: Synthetic oligonucleotide
uccacaguucaggggaggc

SEQ ID NO: 2807423 - RNA, 19 nt, Artificial Sequence
  Description of Artificial Sequence: Synthetic oligonucleotide
uccugaacacaggggaggc

SEQ ID NO: 2807424 - RNA, 19 nt, Artificial Sequence
  Description of Artificial Sequence: Synthetic oligonucleotide
ucagcccaacgcugcacag

SEQ ID NO: 2807425 - RNA, 19 nt, Artificial Sequence
  Description of Artificial Sequence: Synthetic oligonucleotide
ccagauacacaucucccag

SEQ ID NO: 2807426 - RNA, 19 nt, Artificial Sequence
  Description of Artificial Sequence: Synthetic oligonucleotide
gcagguacuccacaguuca

SEQ ID NO: 2807427 - RNA, 19 nt, Artificial Sequence
  Description of Artificial Sequence: Synthetic oligonucleotide
auguagcuuuccuccagga

SEQ ID NO: 2807428 - RNA, 19 nt, Artificial Sequence
  Description of Artificial Sequence: Synthetic oligonucleotide
accuggcuuugucugagga

SEQ ID NO: 2807429 - RNA, 19 nt, Artificial Sequence
  Description of Artificial Sequence: Synthetic oligonucleotide
gucccacguagcuguaagg

SEQ ID NO: 2807430 - RNA, 19 nt, Artificial Sequence
  Description of Artificial Sequence: Synthetic oligonucleotide
acaacagcaugggugucug

SEQ ID NO: 2807431 - RNA, 19 nt, Artificial Sequence
  Description of Artificial Sequence: Synthetic oligonucleotide
guagaacaggcugcagucc

SEQ ID NO: 2807432 - RNA, 19 nt, Artificial Sequence
  Description of Artificial Sequence: Synthetic oligonucleotide
caaggaccagaaaccuggc

SEQ ID NO: 2807433 - RNA, 19 nt, Artificial Sequence
  Description of Artificial Sequence: Synthetic oligonucleotide
uuuccuccaggagaacaac

SEQ ID NO: 2807434 - RNA, 19 nt, Artificial Sequence
  Description of Artificial Sequence: Synthetic oligonucleotide
ugucuguccucaggcuugg

SEQ ID NO: 2807435 - RNA, 19 nt, Artificial Sequence
  Description of Artificial Sequence: Synthetic oligonucleotide
cccaacgcugcacaggagg

SEQ ID NO: 2807436 - RNA, 19 nt, Artificial Sequence
  Description of Artificial Sequence: Synthetic oligonucleotide
aguuugccacacacacugc

SEQ ID NO: 2807437 - RNA, 19 nt, Artificial Sequence
  Description of Artificial Sequence: Synthetic oligonucleotide
gggaggcagacccucuugg

SEQ ID NO: 2807438 - RNA, 19 nt, Artificial Sequence
  Description of Artificial Sequence: Synthetic oligonucleotide
aggagaagggauccuucau

SEQ ID NO: 2807439 - RNA, 19 nt, Artificial Sequence
  Description of Artificial Sequence: Synthetic oligonucleotide
ccugcuguauuuccugagg

SEQ ID NO: 2807440 - RNA, 19 nt, Artificial Sequence
  Description of Artificial Sequence: Synthetic oligonucleotide
gaacacaggggaggcagac

SEQ ID NO: 2807441 - RNA, 19 nt, Artificial Sequence
  Description of Artificial Sequence: Synthetic oligonucleotide
uggccagcuccuugguucc

SEQ ID NO: 2807442 - RNA, 19 nt, Artificial Sequence
  Description of Artificial Sequence: Synthetic oligonucleotide
cugucaaggcacagagcug

SEQ ID NO: 2807443 - RNA, 19 nt, Artificial Sequence
  Description of Artificial Sequence: Synthetic oligonucleotide
cacugauauucuccugaac

SEQ ID NO: 2807444 - RNA, 19 nt, Artificial Sequence
  Description of Artificial Sequence: Synthetic oligonucleotide
agcugucaaggcacagagc

SEQ ID NO: 2807445 - RNA, 19 nt, Artificial Sequence
  Description of Artificial Sequence: Synthetic oligonucleotide
ugugccugccagucaggga

SEQ ID NO: 2807446 - RNA, 19 nt, Artificial Sequence
  Description of Artificial Sequence: Synthetic oligonucleotide
acccuggcugagucagccc

SEQ ID NO: 2807447 - RNA, 19 nt, Artificial Sequence
  Description of Artificial Sequence: Synthetic oligonucleotide
cccucuuggaguagaacag

SEQ ID NO: 2807448 - RNA, 19 nt, Artificial Sequence
  Description of Artificial Sequence: Synthetic oligonucleotide
agaagggauccuucaugau

SEQ ID NO: 2807449 - RNA, 19 nt, Artificial Sequence
  Description of Artificial Sequence: Synthetic oligonucleotide
cuuuuccacauccugcugu

SEQ ID NO: 2807450 - RNA, 19 nt, Artificial Sequence
  Description of Artificial Sequence: Synthetic oligonucleotide
ucaaggcacagagcuggca

SEQ ID NO: 2807451 - RNA, 19 nt, Artificial Sequence
  Description of Artificial Sequence: Synthetic oligonucleotide
agaacaggcugcaguccgg

SEQ ID NO: 2807452 - RNA, 19 nt, Artificial Sequence
  Description of Artificial Sequence: Synthetic oligonucleotide
agucagcccaacgcugcac

SEQ ID NO: 2807453 - RNA, 19 nt, Artificial Sequence
  Description of Artificial Sequence: Synthetic oligonucleotide
agccaaggaccagaaaccu

SEQ ID NO: 2807454 - RNA, 19 nt, Artificial Sequence
  Description of Artificial Sequence: Synthetic oligonucleotide
ggcacucaaacaugcccag

SEQ ID NO: 2807455 - RNA, 19 nt, Artificial Sequence
  Description of Artificial Sequence: Synthetic oligonucleotide
uggcuuugucugaggagaa

SEQ ID NO: 2807456 - RNA, 19 nt, Artificial Sequence
  Description of Artificial Sequence: Synthetic oligonucleotide
guagcuguaaggagcuguc

SEQ ID NO: 2807457 - RNA, 19 nt, Artificial Sequence
  Description of Artificial Sequence: Synthetic oligonucleotide
caggggaggccagauacac

SEQ ID NO: 2807458 - RNA, 19 nt, Artificial Sequence
  Description of Artificial Sequence: Synthetic oligonucleotide
cacaguucaggggaggcca

SEQ ID NO: 2807459 - RNA, 19 nt, Artificial Sequence
  Description of Artificial Sequence: Synthetic oligonucleotide
agggcugcagguacuccac

SEQ ID NO: 2807460 - RNA, 19 nt, Artificial Sequence
  Description of Artificial Sequence: Synthetic oligonucleotide
acugcaccgugagccaagg

SEQ ID NO: 2807461 - RNA, 19 nt, Artificial Sequence
  Description of Artificial Sequence: Synthetic oligonucleotide
gcccacacacaccaguuug

SEQ ID NO: 2807462 - RNA, 19 nt, Artificial Sequence
  Description of Artificial Sequence: Synthetic oligonucleotide
gugugccugccagucaggg

SEQ ID NO: 2807463 - RNA, 19 nt, Artificial Sequence
  Description of Artificial Sequence: Synthetic oligonucleotide
ugcaguccgggcccacaca

SEQ ID NO: 2807464 - RNA, 19 nt, Artificial Sequence
  Description of Artificial Sequence: Synthetic oligonucleotide
cuucugucccacguagcug

SEQ ID NO: 2807465 - RNA, 19 nt, Artificial Sequence
  Description of Artificial Sequence: Synthetic oligonucleotide
acacaccaguuugccacac

SEQ ID NO: 2807466 - RNA, 19 nt, Artificial Sequence
  Description of Artificial Sequence: Synthetic oligonucleotide
ggaaagcacugauauucuc

SEQ ID NO: 2807467 - RNA, 19 nt, Artificial Sequence
  Description of Artificial Sequence: Synthetic oligonucleotide
cacacacugcaccgugagc

SEQ ID NO: 2807468 - RNA, 19 nt, Artificial Sequence
  Description of Artificial Sequence: Synthetic oligonucleotide
uccugagggaaagcacuga

SEQ ID NO: 2807469 - RNA, 19 nt, Artificial Sequence
  Description of Artificial Sequence: Synthetic oligonucleotide
gagcuggcacucaaacaug

SEQ ID NO: 2807470 - RNA, 19 nt, Artificial Sequence
  Description of Artificial Sequence: Synthetic oligonucleotide
acaggaggcugugugccug

SEQ ID NO: 2807471 - RNA, 19 nt, Artificial Sequence
  Description of Artificial Sequence: Synthetic oligonucleotide
gucagcccaacgcugcaca

SEQ ID NO: 2807472 - RNA, 19 nt, Artificial Sequence
  Description of Artificial Sequence: Synthetic oligonucleotide
acauccugcuguauuuccu

SEQ ID NO: 2807473 - RNA, 19 nt, Artificial Sequence
  Description of Artificial Sequence: Synthetic oligonucleotide
gcuggagggcuucuuggag

SEQ ID NO: 2807474 - RNA, 19 nt, Artificial Sequence
  Description of Artificial Sequence: Synthetic oligonucleotide
uagcuguaaggagcuguca

SEQ ID NO: 2807475 - RNA, 19 nt, Artificial Sequence
  Description of Artificial Sequence: Synthetic oligonucleotide
gcaccgugagccaaggacc

SEQ ID NO: 2807476 - RNA, 19 nt, Artificial Sequence
  Description of Artificial Sequence: Synthetic oligonucleotide
gccagauacacaucuccca

SEQ ID NO: 2807477 - RNA, 19 nt, Artificial Sequence
  Description of Artificial Sequence: Synthetic oligonucleotide
gaccagaaaccuggcuuug

SEQ ID NO: 2807478 - RNA, 19 nt, Artificial Sequence
  Description of Artificial Sequence: Synthetic oligonucleotide
cacugcaccgugagccaag

SEQ ID NO: 2807479 - RNA, 19 nt, Artificial Sequence
  Description of Artificial Sequence: Synthetic oligonucleotide
agggcuucuuggaggcccc

SEQ ID NO: 2807480 - RNA, 19 nt, Artificial Sequence
  Description of Artificial Sequence: Synthetic oligonucleotide
ccaggagaacaacagcaug

SEQ ID NO: 2807481 - RNA, 19 nt, Artificial Sequence
  Description of Artificial Sequence: Synthetic oligonucleotide
ccaacgcugcacaggaggc

SEQ ID NO: 2807482 - RNA, 19 nt, Artificial Sequence
  Description of Artificial Sequence: Synthetic oligonucleotide
ggaggccagauacacaucu

SEQ ID NO: 2807483 - RNA, 19 nt, Artificial Sequence
  Description of Artificial Sequence: Synthetic oligonucleotide
ccccuuuucucuuuuccac

SEQ ID NO: 2807484 - RNA, 19 nt, Artificial Sequence
  Description of Artificial Sequence: Synthetic oligonucleotide
aaggagcugucaaggcaca

SEQ ID NO: 2807485 - RNA, 19 nt, Artificial Sequence
  Description of Artificial Sequence: Synthetic oligonucleotide
auccacuccugcugucugu

SEQ ID NO: 2807486 - RNA, 19 nt, Artificial Sequence
  Description of Artificial Sequence: Synthetic oligonucleotide
cagguacuccacaguucag

SEQ ID NO: 2807487 - RNA, 19 nt, Artificial Sequence
  Description of Artificial Sequence: Synthetic oligonucleotide
ccagccggaacccuggcug

SEQ ID NO: 2807488 - RNA, 19 nt, Artificial Sequence
  Description of Artificial Sequence: Synthetic oligonucleotide
caggaggcggggcucugcc

SEQ ID NO: 2807489 - RNA, 19 nt, Artificial Sequence
  Description of Artificial Sequence: Synthetic oligonucleotide
cagggcugcagguacucca

SEQ ID NO: 2807490 - RNA, 19 nt, Artificial Sequence
  Description of Artificial Sequence: Synthetic oligonucleotide
cccacguagcuguaaggag

SEQ ID NO: 2807491 - RNA, 19 nt, Artificial Sequence
  Description of Artificial Sequence: Synthetic oligonucleotide
ggccagauacacaucuccc

SEQ ID NO: 2807492 - RNA, 19 nt, Artificial Sequence
  Description of Artificial Sequence: Synthetic oligonucleotide
cagcuggauccacuccugc

SEQ ID NO: 2807493 - RNA, 19 nt, Artificial Sequence
  Description of Artificial Sequence: Synthetic oligonucleotide
uccacuccugcugucuguc

SEQ ID NO: 2807494 - RNA, 19 nt, Artificial Sequence
  Description of Artificial Sequence: Synthetic oligonucleotide
gccagucagggauggcugg

SEQ ID NO: 2807495 - RNA, 19 nt, Artificial Sequence
  Description of Artificial Sequence: Synthetic oligonucleotide
ccuccaggagaacaacagc

SEQ ID NO: 2807496 - RNA, 19 nt, Artificial Sequence
  Description of Artificial Sequence: Synthetic oligonucleotide
caacagcaugggugucugg

SEQ ID NO: 2807497 - RNA, 19 nt, Artificial Sequence
  Description of Artificial Sequence: Synthetic oligonucleotide
cagcccaacgcugcacagg

SEQ ID NO: 2807498 - RNA, 19 nt, Artificial Sequence
  Description of Artificial Sequence: Synthetic oligonucleotide
cacacacaccaguuugcca

SEQ ID NO: 2807499 - RNA, 19 nt, Artificial Sequence
  Description of Artificial Sequence: Synthetic oligonucleotide
cuccacaguucaggggagg

SEQ ID NO: 2807500 - RNA, 19 nt, Artificial Sequence
  Description of Artificial Sequence: Synthetic oligonucleotide
caccgugagccaaggacca

SEQ ID NO: 2807501 - RNA, 19 nt, Artificial Sequence
  Description of Artificial Sequence: Synthetic oligonucleotide
ccuggcuuugucugaggag

SEQ ID NO: 2807502 - RNA, 19 nt, Artificial Sequence
  Description of Artificial Sequence: Synthetic oligonucleotide
aggccccuuuucucuuuuc

SEQ ID NO: 2807503 - RNA, 19 nt, Artificial Sequence
  Description of Artificial Sequence: Synthetic oligonucleotide
gacccucuuggaguagaac

SEQ ID NO: 2807504 - RNA, 19 nt, Artificial Sequence
  Description of Artificial Sequence: Synthetic oligonucleotide
cccacacacaccaguuugc

SEQ ID NO: 2807505 - RNA, 19 nt, Artificial Sequence
  Description of Artificial Sequence: Synthetic oligonucleotide
aggaggcugugugccugcc

SEQ ID NO: 2807506 - RNA, 19 nt, Artificial Sequence
  Description of Artificial Sequence: Synthetic oligonucleotide
gggauccuucaugauguag

SEQ ID NO: 2807507 - RNA, 19 nt, Artificial Sequence
  Description of Artificial Sequence: Synthetic oligonucleotide
ccucuuggaguagaacagg

SEQ ID NO: 2807508 - RNA, 19 nt, Artificial Sequence
  Description of Artificial Sequence: Synthetic oligonucleotide
cugagggaaagcacugaua

SEQ ID NO: 2807509 - RNA, 19 nt, Artificial Sequence
  Description of Artificial Sequence: Synthetic oligonucleotide
aguucaggggaggccagau

SEQ ID NO: 2807510 - RNA, 19 nt, Artificial Sequence
  Description of Artificial Sequence: Synthetic oligonucleotide
cagaaaccuggcuuugucu

SEQ ID NO: 2807511 - RNA, 19 nt, Artificial Sequence
  Description of Artificial Sequence: Synthetic oligonucleotide
accagaaaccuggcuuugu

SEQ ID NO: 2807512 - RNA, 19 nt, Artificial Sequence
  Description of Artificial Sequence: Synthetic oligonucleotide
caccaguuugccacacaca

SEQ ID NO: 2807513 - RNA, 19 nt, Artificial Sequence
  Description of Artificial Sequence: Synthetic oligonucleotide
cagcuccuugguucccagg

SEQ ID NO: 2807514 - RNA, 19 nt, Artificial Sequence
  Description of Artificial Sequence: Synthetic oligonucleotide
caucucccagccggaaccc

SEQ ID NO: 2807515 - RNA, 19 nt, Artificial Sequence
  Description of Artificial Sequence: Synthetic oligonucleotide
gagucagcccaacgcugca

SEQ ID NO: 2807516 - RNA, 19 nt, Artificial Sequence
  Description of Artificial Sequence: Synthetic oligonucleotide
cugcaguccgggcccacac

SEQ ID NO: 2807517 - RNA, 19 nt, Artificial Sequence
  Description of Artificial Sequence: Synthetic oligonucleotide
uccugcugucuguccucag

SEQ ID NO: 2807518 - RNA, 19 nt, Artificial Sequence
  Description of Artificial Sequence: Synthetic oligonucleotide
cagucagggauggcuggag

SEQ ID NO: 2807519 - RNA, 19 nt, Artificial Sequence
  Description of Artificial Sequence: Synthetic oligonucleotide
gcaguccgggcccacacac

SEQ ID NO: 2807520 - RNA, 19 nt, Artificial Sequence
  Description of Artificial Sequence: Synthetic oligonucleotide
ggggaggccagauacacau

SEQ ID NO: 2807521 - RNA, 19 nt, Artificial Sequence
  Description of Artificial Sequence: Synthetic oligonucleotide
ucccagggcugcagguacu

SEQ ID NO: 2807522 - RNA, 19 nt, Artificial Sequence
  Description of Artificial Sequence: Synthetic oligonucleotide
aggagcugucaaggcacag

SEQ ID NO: 2807523 - RNA, 19 nt, Artificial Sequence
  Description of Artificial Sequence: Synthetic oligonucleotide
acaguucaggggaggccag

SEQ ID NO: 2807524 - RNA, 19 nt, Artificial Sequence
  Description of Artificial Sequence: Synthetic oligonucleotide
ccagaaaccuggcuuuguc

SEQ ID NO: 2807525 - RNA, 19 nt, Artificial Sequence
  Description of Artificial Sequence: Synthetic oligonucleotide
cacacaccaguuugccaca

SEQ ID NO: 2807526 - RNA, 19 nt, Artificial Sequence
  Description of Artificial Sequence: Synthetic oligonucleotide
cacacugcaccgugagcca

SEQ ID NO: 2807527 - RNA, 19 nt, Artificial Sequence
  Description of Artificial Sequence: Synthetic oligonucleotide
uccucaggcuuggccagcu

SEQ ID NO: 2807528 - RNA, 19 nt, Artificial Sequence
  Description of Artificial Sequence: Synthetic oligonucleotide
gcugagucagcccaacgcu

SEQ ID NO: 2807529 - RNA, 19 nt, Artificial Sequence
  Description of Artificial Sequence: Synthetic oligonucleotide
cacacacacugcaccguga

SEQ ID NO: 2807530 - RNA, 19 nt, Artificial Sequence
  Description of Artificial Sequence: Synthetic oligonucleotide
agcuuuccuccaggagaac

SEQ ID NO: 2807531 - RNA, 19 nt, Artificial Sequence
  Description of Artificial Sequence: Synthetic oligonucleotide
gaacaacagcauggguguc

SEQ ID NO: 2807532 - RNA, 19 nt, Artificial Sequence
  Description of Artificial Sequence: Synthetic oligonucleotide
ucccagccggaacccuggc

SEQ ID NO: 2807533 - RNA, 19 nt, Artificial Sequence
  Description of Artificial Sequence: Synthetic oligonucleotide
gcuuuccuccaggagaaca

SEQ ID NO: 2807534 - RNA, 19 nt, Artificial Sequence
  Description of Artificial Sequence: Synthetic oligonucleotide
uggaggccccuuuucucuu

SEQ ID NO: 2807535 - RNA, 19 nt, Artificial Sequence
  Description of Artificial Sequence: Synthetic oligonucleotide
ggaggcggggcucugccuc

SEQ ID NO: 2807536 - RNA, 19 nt, Artificial Sequence
  Description of Artificial Sequence: Synthetic oligonucleotide
ucugucccacguagcugua

SEQ ID NO: 2807537 - RNA, 19 nt, Artificial Sequence
  Description of Artificial Sequence: Synthetic oligonucleotide
gccccuuuucucuuuucca

SEQ ID NO: 2807538 - RNA, 19 nt, Artificial Sequence
  Description of Artificial Sequence: Synthetic oligonucleotide
ccacacacaccaguuugcc

SEQ ID NO: 2807539 - RNA, 19 nt, Artificial Sequence
  Description of Artificial Sequence: Synthetic oligonucleotide
ggcuuugucugaggagaag

SEQ ID NO: 2807540 - RNA, 19 nt, Artificial Sequence
  Description of Artificial Sequence: Synthetic oligonucleotide
gucaaggcacagagcuggc

SEQ ID NO: 2807541 - RNA, 19 nt, Artificial Sequence
  Description of Artificial Sequence: Synthetic oligonucleotide
gaggccaguccuggagcug

SEQ ID NO: 2807542 - RNA, 19 nt, Artificial Sequence
  Description of Artificial Sequence: Synthetic oligonucleotide
ccuucaugauguagcuuuc

SEQ ID NO: 2807543 - RNA, 19 nt, Artificial Sequence
  Description of Artificial Sequence: Synthetic oligonucleotide
ggagcugucaaggcacaga

SEQ ID NO: 2807544 - RNA, 19 nt, Artificial Sequence
  Description of Artificial Sequence: Synthetic oligonucleotide
cuccuugguucccagggcu

SEQ ID NO: 2807545 - RNA, 19 nt, Artificial Sequence
  Description of Artificial Sequence: Synthetic oligonucleotide
ggggaggcagacccucuug

SEQ ID NO: 2807546 - RNA, 19 nt, Artificial Sequence
  Description of Artificial Sequence: Synthetic oligonucleotide
cuggcugagucagcccaac

SEQ ID NO: 2807547 - RNA, 19 nt, Artificial Sequence
  Description of Artificial Sequence: Synthetic oligonucleotide
acaugcccaggaggcgggg

SEQ ID NO: 2807548 - RNA, 19 nt, Artificial Sequence
  Description of Artificial Sequence: Synthetic oligonucleotide
ggaguagaacaggcugcag

SEQ ID NO: 2807549 - RNA, 19 nt, Artificial Sequence
  Description of Artificial Sequence: Synthetic oligonucleotide
aggggaggcagacccucuu

SEQ ID NO: 2807550 - RNA, 19 nt, Artificial Sequence
  Description of Artificial Sequence: Synthetic oligonucleotide
aggcugugugccugccagu

SEQ ID NO: 2807551 - RNA, 19 nt, Artificial Sequence
  Description of Artificial Sequence: Synthetic oligonucleotide
gcacugauauucuccugaa

SEQ ID NO: 2807552 - RNA, 19 nt, Artificial Sequence
  Description of Artificial Sequence: Synthetic oligonucleotide
ggcucugccucagaugcca

SEQ ID NO: 2807553 - RNA, 19 nt, Artificial Sequence
  Description of Artificial Sequence: Synthetic oligonucleotide
gagggaaagcacugauauu

SEQ ID NO: 2807554 - RNA, 19 nt, Artificial Sequence
  Description of Artificial Sequence: Synthetic oligonucleotide
gccaaggaccagaaaccug

SEQ ID NO: 2807555 - RNA, 19 nt, Artificial Sequence
  Description of Artificial Sequence: Synthetic oligonucleotide
accgugagccaaggaccag

SEQ ID NO: 2807556 - RNA, 19 nt, Artificial Sequence
  Description of Artificial Sequence: Synthetic oligonucleotide
auccuucaugauguagcuu

SEQ ID NO: 2807557 - RNA, 19 nt, Artificial Sequence
  Description of Artificial Sequence: Synthetic oligonucleotide
gcuggcacucaaacaugcc

SEQ ID NO: 2807558 - RNA, 19 nt, Artificial Sequence
  Description of Artificial Sequence: Synthetic oligonucleotide
cugcagguacuccacaguu

SEQ ID NO: 2807559 - RNA, 19 nt, Artificial Sequence
  Description of Artificial Sequence: Synthetic oligonucleotide
agccggaacccuggcugag

SEQ ID NO: 2807560 - RNA, 19 nt, Artificial Sequence
  Description of Artificial Sequence: Synthetic oligonucleotide
guucaggggaggccagaua

SEQ ID NO: 2807561 - RNA, 19 nt, Artificial Sequence
  Description of Artificial Sequence: Synthetic oligonucleotide
ggcagacccucuuggagua

SEQ ID NO: 2807562 - RNA, 19 nt, Artificial Sequence
  Description of Artificial Sequence: Synthetic oligonucleotide
agggauccuucaugaugua

SEQ ID NO: 2807563 - RNA, 19 nt, Artificial Sequence
  Description of Artificial Sequence: Synthetic oligonucleotide
ccuugguucccagggcugc

SEQ ID NO: 2807564 - RNA, 19 nt, Artificial Sequence
  Description of Artificial Sequence: Synthetic oligonucleotide
ggaccagaaaccuggcuuu

SEQ ID NO: 2807565 - RNA, 19 nt, Artificial Sequence
  Description of Artificial Sequence: Synthetic oligonucleotide
ggcugugugccugccaguc

SEQ ID NO: 2807566 - RNA, 19 nt, Artificial Sequence
  Description of Artificial Sequence: Synthetic oligonucleotide
cacaccaguuugccacaca

SEQ ID NO: 2807567 - RNA, 19 nt, Artificial Sequence
  Description of Artificial Sequence: Synthetic oligonucleotide
acacugcaccgugagccaa

SEQ ID NO: 2807568 - RNA, 19 nt, Artificial Sequence
  Description of Artificial Sequence: Synthetic oligonucleotide
cacuccugcugucuguccu

SEQ ID NO: 2807569 - RNA, 19 nt, Artificial Sequence
  Description of Artificial Sequence: Synthetic oligonucleotide
ggagaacaacagcaugggu

SEQ ID NO: 2807570 - RNA, 19 nt, Artificial Sequence
  Description of Artificial Sequence: Synthetic oligonucleotide
cugccagucagggauggcu

SEQ ID NO: 2807571 - RNA, 19 nt, Artificial Sequence
  Description of Artificial Sequence: Synthetic oligonucleotide
ccacaguucaggggaggcc

SEQ ID NO: 2807572 - RNA, 19 nt, Artificial Sequence
  Description of Artificial Sequence: Synthetic oligonucleotide
aggggaggccagauacaca

SEQ ID NO: 2807573 - RNA, 19 nt, Artificial Sequence
  Description of Artificial Sequence: Synthetic oligonucleotide
cagccggaacccuggcuga

SEQ ID NO: 2807574 - RNA, 19 nt, Artificial Sequence
  Description of Artificial Sequence: Synthetic oligonucleotide
cuugguucccagggcugca

SEQ ID NO: 2807575 - RNA, 19 nt, Artificial Sequence
  Description of Artificial Sequence: Synthetic oligonucleotide
gugagccaaggaccagaaa

SEQ ID NO: 2807576 - RNA, 19 nt, Artificial Sequence
  Description of Artificial Sequence: Synthetic oligonucleotide
guucccagggcugcaggua

SEQ ID NO: 2807577 - RNA, 19 nt, Artificial Sequence
  Description of Artificial Sequence: Synthetic oligonucleotide
acguagcuguaaggagcug

SEQ ID NO: 2807578 - RNA, 19 nt, Artificial Sequence
  Description of Artificial Sequence: Synthetic oligonucleotide
aucucccagccggaacccu

SEQ ID NO: 2807579 - RNA, 19 nt, Artificial Sequence
  Description of Artificial Sequence: Synthetic oligonucleotide
agacccucuuggaguagaa

SEQ ID NO: 2807580 - RNA, 19 nt, Artificial Sequence
  Description of Artificial Sequence: Synthetic oligonucleotide
ccagcuccuugguucccag

SEQ ID NO: 2807581 - RNA, 19 nt, Artificial Sequence
  Description of Artificial Sequence: Synthetic oligonucleotide
cccuggcugagucagccca

SEQ ID NO: 2807582 - RNA, 19 nt, Artificial Sequence
  Description of Artificial Sequence: Synthetic oligonucleotide
gggaaagcacugauauucu

SEQ ID NO: 2807583 - RNA, 19 nt, Artificial Sequence
  Description of Artificial Sequence: Synthetic oligonucleotide
guccucaggcuuggccagc

SEQ ID NO: 2807584 - RNA, 19 nt, Artificial Sequence
  Description of Artificial Sequence: Synthetic oligonucleotide
ccggaacccuggcugaguc

SEQ ID NO: 2807585 - RNA, 19 nt, Artificial Sequence
  Description of Artificial Sequence: Synthetic oligonucleotide
gcugugugccugccaguca

SEQ ID NO: 2807586 - RNA, 19 nt, Artificial Sequence
  Description of Artificial Sequence: Synthetic oligonucleotide
gcugcagguacuccacagu

SEQ ID NO: 2807587 - RNA, 19 nt, Artificial Sequence
  Description of Artificial Sequence: Synthetic oligonucleotide
caguccgggcccacacaca

SEQ ID NO: 2807588 - RNA, 19 nt, Artificial Sequence
  Description of Artificial Sequence: Synthetic oligonucleotide
ccacuccugcugucugucc

SEQ ID NO: 2807589 - RNA, 19 nt, Artificial Sequence
  Description of Artificial Sequence: Synthetic oligonucleotide
gagcugcagcuggauccac

SEQ ID NO: 2807590 - RNA, 19 nt, Artificial Sequence
  Description of Artificial Sequence: Synthetic oligonucleotide
ccacauccugcuguauuuc

SEQ ID NO: 2807591 - RNA, 19 nt, Artificial Sequence
  Description of Artificial Sequence: Synthetic oligonucleotide
cuucuuggaggccccuuuu

SEQ ID NO: 2807592 - RNA, 19 nt, Artificial Sequence
  Description of Artificial Sequence: Synthetic oligonucleotide
ggggcuucugucccacgua

SEQ ID NO: 2807593 - RNA, 19 nt, Artificial Sequence
  Description of Artificial Sequence: Synthetic oligonucleotide
caguucaggggaggccaga

SEQ ID NO: 2807594 - RNA, 19 nt, Artificial Sequence
  Description of Artificial Sequence: Synthetic oligonucleotide
agggauggcuggagggcuu

SEQ ID NO: 2807595 - RNA, 19 nt, Artificial Sequence
  Description of Artificial Sequence: Synthetic oligonucleotide
acgcugcacaggaggcugu

SEQ ID NO: 2807596 - RNA, 19 nt, Artificial Sequence
  Description of Artificial Sequence: Synthetic oligonucleotide
gaggccccuuuucucuuuu

SEQ ID NO: 2807597 - RNA, 19 nt, Artificial Sequence
  Description of Artificial Sequence: Synthetic oligonucleotide
gucuguccucaggcuuggc

SEQ ID NO: 2807598 - RNA, 19 nt, Artificial Sequence
  Description of Artificial Sequence: Synthetic oligonucleotide
gcagacccucuuggaguag

SEQ ID NO: 2807599 - RNA, 19 nt, Artificial Sequence
  Description of Artificial Sequence: Synthetic oligonucleotide
ggagggcuucuuggaggcc

SEQ ID NO: 2807600 - RNA, 19 nt, Artificial Sequence
  Description of Artificial Sequence: Synthetic oligonucleotide
aggcggggcucugccucag

SEQ ID NO: 2807601 - RNA, 19 nt, Artificial Sequence
  Description of Artificial Sequence: Synthetic oligonucleotide
cugcaccgugagccaagga

SEQ ID NO: 2807602 - RNA, 19 nt, Artificial Sequence
  Description of Artificial Sequence: Synthetic oligonucleotide
gggcugcagguacuccaca

SEQ ID NO: 2807603 - RNA, 19 nt, Artificial Sequence
  Description of Artificial Sequence: Synthetic oligonucleotide
caacgcugcacaggaggcu

SEQ ID NO: 2807604 - RNA, 19 nt, Artificial Sequence
  Description of Artificial Sequence: Synthetic oligonucleotide
ccugagggaaagcacugau

SEQ ID NO: 2807605 - RNA, 19 nt, Artificial Sequence
  Description of Artificial Sequence: Synthetic oligonucleotide
ccagggcugcagguacucc

SEQ ID NO: 2807606 - RNA, 19 nt, Artificial Sequence
  Description of Artificial Sequence: Synthetic oligonucleotide
cugucccacguagcuguaa

SEQ ID NO: 2807607 - RNA, 19 nt, Artificial Sequence
  Description of Artificial Sequence: Synthetic oligonucleotide
ccaguuugccacacacacu

SEQ ID NO: 2807608 - RNA, 19 nt, Artificial Sequence
  Description of Artificial Sequence: Synthetic oligonucleotide
ccgugagccaaggaccaga

SEQ ID NO: 2807609 - RNA, 19 nt, Artificial Sequence
  Description of Artificial Sequence: Synthetic oligonucleotide
gggcucugccucagaugcc

SEQ ID NO: 2807610 - RNA, 19 nt, Artificial Sequence
  Description of Artificial Sequence: Synthetic oligonucleotide
cgugagccaaggaccagaa

SEQ ID NO: 2807611 - RNA, 19 nt, Artificial Sequence
  Description of Artificial Sequence: Synthetic oligonucleotide
gggaggccagauacacauc

SEQ ID NO: 2807612 - RNA, 19 nt, Artificial Sequence
  Description of Artificial Sequence: Synthetic oligonucleotide
gccagcuccuugguuccca

SEQ ID NO: 2807613 - RNA, 19 nt, Artificial Sequence
  Description of Artificial Sequence: Synthetic oligonucleotide
caggggaggcagacccucu

SEQ ID NO: 2807614 - RNA, 19 nt, Artificial Sequence
  Description of Artificial Sequence: Synthetic oligonucleotide
cguagcuguaaggagcugu

SEQ ID NO: 2807615 - RNA, 19 nt, Artificial Sequence
  Description of Artificial Sequence: Synthetic oligonucleotide
ccaggaggcggggcucugc

SEQ ID NO: 2807616 - RNA, 19 nt, Artificial Sequence
  Description of Artificial Sequence: Synthetic oligonucleotide
aggcugcaguccgggccca

SEQ ID NO: 2807617 - RNA, 19 nt, Artificial Sequence
  Description of Artificial Sequence: Synthetic oligonucleotide
ccagucagggauggcugga

SEQ ID NO: 2807618 - RNA, 19 nt, Artificial Sequence
  Description of Artificial Sequence: Synthetic oligonucleotide
gcugcaguccgggcccaca

SEQ ID NO: 2807619 - RNA, 19 nt, Artificial Sequence
  Description of Artificial Sequence: Synthetic oligonucleotide
ccuggcugagucagcccaa

SEQ ID NO: 2807620 - RNA, 19 nt, Artificial Sequence
  Description of Artificial Sequence: Synthetic oligonucleotide
ccugaacacaggggaggca

SEQ ID NO: 2807621 - RNA, 19 nt, Artificial Sequence
  Description of Artificial Sequence: Synthetic oligonucleotide
gcccaacgcugcacaggag

SEQ ID NO: 2807622 - RNA, 19 nt, Artificial Sequence
  Description of Artificial Sequence: Synthetic oligonucleotide
ggccagcuccuugguuccc

SEQ ID NO: 2807623 - RNA, 19 nt, Artificial Sequence
  Description of Artificial Sequence: Synthetic oligonucleotide
ggcccacacacaccaguuu

SEQ ID NO: 2807624 - RNA, 19 nt, Artificial Sequence
  Description of Artificial Sequence: Synthetic oligonucleotide
ccgggcccacacacaccag

SEQ ID NO: 2807625 - RNA, 19 nt, Artificial Sequence
  Description of Artificial Sequence: Synthetic oligonucleotide
gcggggcucugccucagau

SEQ ID NO: 2807626 - RNA, 19 nt, Artificial Sequence
  Description of Artificial Sequence: Synthetic oligonucleotide
ggaggccccuuuucucuuu

SEQ ID NO: 2807627 - RNA, 19 nt, Artificial Sequence
  Description of Artificial Sequence: Synthetic oligonucleotide
cggaacccuggcugaguca

SEQ ID NO: 2807628 - RNA, 19 nt, Artificial Sequence
  Description of Artificial Sequence: Synthetic oligonucleotide
ggcggggcucugccucaga

SEQ ID NO: 2807629 - RNA, 19 nt, Artificial Sequence
  Description of Artificial Sequence: Synthetic oligonucleotide
cgcugcacaggaggcugug

SEQ ID NO: 2807630 - RNA, 19 nt, Artificial Sequence
  Description of Artificial Sequence: Synthetic oligonucleotide
ggcugcaguccgggcccac

SEQ ID NO: 2807631 - RNA, 19 nt, Artificial Sequence
  Description of Artificial Sequence: Synthetic oligonucleotide
gccggaacccuggcugagu

SEQ ID NO: 2807632 - RNA, 19 nt, Artificial Sequence
  Description of Artificial Sequence: Synthetic oligonucleotide
cccagccggaacccuggcu

SEQ ID NO: 2807633 - RNA, 19 nt, Artificial Sequence
  Description of Artificial Sequence: Synthetic oligonucleotide
gcccaggaggcggggcucu

SEQ ID NO: 2807634 - RNA, 19 nt, Artificial Sequence
  Description of Artificial Sequence: Synthetic oligonucleotide
gcucugccucagaugccau

SEQ ID NO: 2807635 - RNA, 19 nt, Artificial Sequence
  Description of Artificial Sequence: Synthetic oligonucleotide
gggcuucuuggaggccccu

SEQ ID NO: 2807636 - RNA, 19 nt, Artificial Sequence
  Description of Artificial Sequence: Synthetic oligonucleotide
ugcucuuugaaguaggagg

SEQ ID NO: 2807637 - RNA, 19 nt, Artificial Sequence
  Description of Artificial Sequence: Synthetic oligonucleotide
ggaaacuagauuuucaugg

SEQ ID NO: 2807638 - RNA, 19 nt, Artificial Sequence
  Description of Artificial Sequence: Synthetic oligonucleotide
aacagacacguuuuggugg

SEQ ID NO: 2807639 - RNA, 19 nt, Artificial Sequence
  Description of Artificial Sequence: Synthetic oligonucleotide
uuuguuacaggucugugac

SEQ ID NO: 2807640 - RNA, 19 nt, Artificial Sequence
  Description of Artificial Sequence: Synthetic oligonucleotide
guuagcacaacagaggacg

SEQ ID NO: 2807641 - RNA, 19 nt, Artificial Sequence
  Description of Artificial Sequence: Synthetic oligonucleotide
acagaggacgacuucaugg

SEQ ID NO: 2807642 - RNA, 19 nt, Artificial Sequence
  Description of Artificial Sequence: Synthetic oligonucleotide
ucugugagggcucugaaca

SEQ ID NO: 2807643 - RNA, 19 nt, Artificial Sequence
  Description of Artificial Sequence: Synthetic oligonucleotide
aacuagauuuucauggugg

SEQ ID NO: 2807644 - RNA, 19 nt, Artificial Sequence
  Description of Artificial Sequence: Synthetic oligonucleotide
uguuacugggaacagacac

SEQ ID NO: 2807645 - RNA, 19 nt, Artificial Sequence
  Description of Artificial Sequence: Synthetic oligonucleotide
aaaaggaaacuagauuuuc

SEQ ID NO: 2807646 - RNA, 19 nt, Artificial Sequence
  Description of Artificial Sequence: Synthetic oligonucleotide
aauuccgaggguuacacau

SEQ ID NO: 2807647 - RNA, 19 nt, Artificial Sequence
  Description of Artificial Sequence: Synthetic oligonucleotide
gucgcuguaauuccgaggg

SEQ ID NO: 2807648 - RNA, 19 nt, Artificial Sequence
  Description of Artificial Sequence: Synthetic oligonucleotide
uaggguuagcacaacagag

SEQ ID NO: 2807649 - RNA, 19 nt, Artificial Sequence
  Description of Artificial Sequence: Synthetic oligonucleotide
ugaaguaggaggcgugucg

SEQ ID NO: 2807650 - RNA, 19 nt, Artificial Sequence
  Description of Artificial Sequence: Synthetic oligonucleotide
agagcuuuguuacaggucu

SEQ ID NO: 2807651 - RNA, 19 nt, Artificial Sequence
  Description of Artificial Sequence: Synthetic oligonucleotide
aaacuagauuuucauggug

SEQ ID NO: 2807652 - RNA, 19 nt, Artificial Sequence
  Description of Artificial Sequence: Synthetic oligonucleotide
aaggaaacuagauuuucau

SEQ ID NO: 2807653 - RNA, 19 nt, Artificial Sequence
  Description of Artificial Sequence: Synthetic oligonucleotide
acaucgcuagcacagagag

SEQ ID NO: 2807654 - RNA, 19 nt, Artificial Sequence
  Description of Artificial Sequence: Synthetic oligonucleotide
uucauggugggacaacucc

SEQ ID NO: 2807655 - RNA, 19 nt, Artificial Sequence
  Description of Artificial Sequence: Synthetic oligonucleotide
aagggaugggcucaugcag

SEQ ID NO: 2807656 - RNA, 19 nt, Artificial Sequence
  Description of Artificial Sequence: Synthetic oligonucleotide
ugaaugaggcacuugcuca

SEQ ID NO: 2807657 - RNA, 19 nt, Artificial Sequence
  Description of Artificial Sequence: Synthetic oligonucleotide
acagucgcagcacucgucc

SEQ ID NO: 2807658 - RNA, 19 nt, Artificial Sequence
  Description of Artificial Sequence: Synthetic oligonucleotide
acuagauuuucaugguggg

SEQ ID NO: 2807659 - RNA, 19 nt, Artificial Sequence
  Description of Artificial Sequence: Synthetic oligonucleotide
aucgcuagcacagagagcu

SEQ ID NO: 2807660 - RNA, 19 nt, Artificial Sequence
  Description of Artificial Sequence: Synthetic oligonucleotide
uagauuuucauggugggac

SEQ ID NO: 2807661 - RNA, 19 nt, Artificial Sequence
  Description of Artificial Sequence: Synthetic oligonucleotide
uggguaaccgccaggaagc

SEQ ID NO: 2807662 - RNA, 19 nt, Artificial Sequence
  Description of Artificial Sequence: Synthetic oligonucleotide
ucuucgaaggaaccccugg

SEQ ID NO: 2807663 - RNA, 19 nt, Artificial Sequence
  Description of Artificial Sequence: Synthetic oligonucleotide
cuucaugguucuucgaagg

SEQ ID NO: 2807664 - RNA, 19 nt, Artificial Sequence
  Description of Artificial Sequence: Synthetic oligonucleotide
aaggagacgauguuccagu

SEQ ID NO: 2807665 - RNA, 19 nt, Artificial Sequence
  Description of Artificial Sequence: Synthetic oligonucleotide
gagacgauguuccaguuca

SEQ ID NO: 2807666 - RNA, 19 nt, Artificial Sequence
  Description of Artificial Sequence: Synthetic oligonucleotide
ucaugcagcuccuccaccg

SEQ ID NO: 2807667 - RNA, 19 nt, Artificial Sequence
  Description of Artificial Sequence: Synthetic oligonucleotide
gaugggcucaugcagcucc

SEQ ID NO: 2807668 - RNA, 19 nt, Artificial Sequence
  Description of Artificial Sequence: Synthetic oligonucleotide
uguuacaggucugugaccu

SEQ ID NO: 2807669 - RNA, 19 nt, Artificial Sequence
  Description of Artificial Sequence: Synthetic oligonucleotide
uacacaucccgacacaguc

SEQ ID NO: 2807670 - RNA, 19 nt, Artificial Sequence
  Description of Artificial Sequence: Synthetic oligonucleotide
acuucaugguucuucgaag

SEQ ID NO: 2807671 - RNA, 19 nt, Artificial Sequence
  Description of Artificial Sequence: Synthetic oligonucleotide
gaacagacacguuuuggug

SEQ ID NO: 2807672 - RNA, 19 nt, Artificial Sequence
  Description of Artificial Sequence: Synthetic oligonucleotide
acgacuucaugguucuucg

SEQ ID NO: 2807673 - RNA, 19 nt, Artificial Sequence
  Description of Artificial Sequence: Synthetic oligonucleotide
uccucugccacagggaagg

SEQ ID NO: 2807674 - RNA, 19 nt, Artificial Sequence
  Description of Artificial Sequence: Synthetic oligonucleotide
cagagcuccugaaugaggc

SEQ ID NO: 2807675 - RNA, 19 nt, Artificial Sequence
  Description of Artificial Sequence: Synthetic oligonucleotide
aaaggaaacuagauuuuca

SEQ ID NO: 2807676 - RNA, 19 nt, Artificial Sequence
  Description of Artificial Sequence: Synthetic oligonucleotide
aggaaacuagauuuucaug

SEQ ID NO: 2807677 - RNA, 19 nt, Artificial Sequence
  Description of Artificial Sequence: Synthetic oligonucleotide
uuccgaggguuacacaucc

SEQ ID NO: 2807678 - RNA, 19 nt, Artificial Sequence
  Description of Artificial Sequence: Synthetic oligonucleotide
uuacaggucugugaccugg

SEQ ID NO: 2807679 - RNA, 19 nt, Artificial Sequence
  Description of Artificial Sequence: Synthetic oligonucleotide
aucaggaacaccagggagg

SEQ ID NO: 2807680 - RNA, 19 nt, Artificial Sequence
  Description of Artificial Sequence: Synthetic oligonucleotide
caugguucuucgaaggaac

SEQ ID NO: 2807681 - RNA, 19 nt, Artificial Sequence
  Description of Artificial Sequence: Synthetic oligonucleotide
uccaccgugcucuuugaag

SEQ ID NO: 2807682 - RNA, 19 nt, Artificial Sequence
  Description of Artificial Sequence: Synthetic oligonucleotide
aacaccagggaggcuaggg

SEQ ID NO: 2807683 - RNA, 19 nt, Artificial Sequence
  Description of Artificial Sequence: Synthetic oligonucleotide
guuuuggugguguggcugg

SEQ ID NO: 2807684 - RNA, 19 nt, Artificial Sequence
  Description of Artificial Sequence: Synthetic oligonucleotide
ugucgcuguaauuccgagg

SEQ ID NO: 2807685 - RNA, 19 nt, Artificial Sequence
  Description of Artificial Sequence: Synthetic oligonucleotide
augcacuccuuacagcagg

SEQ ID NO: 2807686 - RNA, 19 nt, Artificial Sequence
  Description of Artificial Sequence: Synthetic oligonucleotide
cuggguaaccgccaggaag

SEQ ID NO: 2807687 - RNA, 19 nt, Artificial Sequence
  Description of Artificial Sequence: Synthetic oligonucleotide
guuacugggaacagacacg

SEQ ID NO: 2807688 - RNA, 19 nt, Artificial Sequence
  Description of Artificial Sequence: Synthetic oligonucleotide
uuccaguucagcugggugu

SEQ ID NO: 2807689 - RNA, 19 nt, Artificial Sequence
  Description of Artificial Sequence: Synthetic oligonucleotide
acugggaacagacacguuu

SEQ ID NO: 2807690 - RNA, 19 nt, Artificial Sequence
  Description of Artificial Sequence: Synthetic oligonucleotide
agcaugcacuccuuacagc

SEQ ID NO: 2807691 - RNA, 19 nt, Artificial Sequence
  Description of Artificial Sequence: Synthetic oligonucleotide
agagagcuuuguuacaggu

SEQ ID NO: 2807692 - RNA, 19 nt, Artificial Sequence
  Description of Artificial Sequence: Synthetic oligonucleotide
ucacaucgcuagcacagag

SEQ ID NO: 2807693 - RNA, 19 nt, Artificial Sequence
  Description of Artificial Sequence: Synthetic oligonucleotide
acagagagcuuuguuacag

SEQ ID NO: 2807694 - RNA, 19 nt, Artificial Sequence
  Description of Artificial Sequence: Synthetic oligonucleotide
cugaacagggaagggaugg

SEQ ID NO: 2807695 - RNA, 19 nt, Artificial Sequence
  Description of Artificial Sequence: Synthetic oligonucleotide
acgauguuccaguucagcu

SEQ ID NO: 2807696 - RNA, 19 nt, Artificial Sequence
  Description of Artificial Sequence: Synthetic oligonucleotide
uuacugggaacagacacgu

SEQ ID NO: 2807697 - RNA, 19 nt, Artificial Sequence
  Description of Artificial Sequence: Synthetic oligonucleotide
agcaggggcagcuuccuuc

SEQ ID NO: 2807698 - RNA, 19 nt, Artificial Sequence
  Description of Artificial Sequence: Synthetic oligonucleotide
aacagaggacgacuucaug

SEQ ID NO: 2807699 - RNA, 19 nt, Artificial Sequence
  Description of Artificial Sequence: Synthetic oligonucleotide
uucaugguucuucgaagga

SEQ ID NO: 2807700 - RNA, 19 nt, Artificial Sequence
  Description of Artificial Sequence: Synthetic oligonucleotide
agcacagagagcuuuguua

SEQ ID NO: 2807701 - RNA, 19 nt, Artificial Sequence
  Description of Artificial Sequence: Synthetic oligonucleotide
acagggaagggaugggcuc

SEQ ID NO: 2807702 - RNA, 19 nt, Artificial Sequence
  Description of Artificial Sequence: Synthetic oligonucleotide
ucauggugggacaacuccu

SEQ ID NO: 2807703 - RNA, 19 nt, Artificial Sequence
  Description of Artificial Sequence: Synthetic oligonucleotide
gacacagucgcagcacucg

SEQ ID NO: 2807704 - RNA, 19 nt, Artificial Sequence
  Description of Artificial Sequence: Synthetic oligonucleotide
uuuucauggugggacaacu

SEQ ID NO: 2807705 - RNA, 19 nt, Artificial Sequence
  Description of Artificial Sequence: Synthetic oligonucleotide
cuucgaaggaaccccuggg

SEQ ID NO: 2807706 - RNA, 19 nt, Artificial Sequence
  Description of Artificial Sequence: Synthetic oligonucleotide
ugugagggcucugaacagg

SEQ ID NO: 2807707 - RNA, 19 nt, Artificial Sequence
  Description of Artificial Sequence: Synthetic oligonucleotide
uucgaaggaaccccugggu

SEQ ID NO: 2807708 - RNA, 19 nt, Artificial Sequence
  Description of Artificial Sequence: Synthetic oligonucleotide
ugcacuccuuacagcaggg

SEQ ID NO: 2807709 - RNA, 19 nt, Artificial Sequence
  Description of Artificial Sequence: Synthetic oligonucleotide
aggcgugucgcuguaauuc

SEQ ID NO: 2807710 - RNA, 19 nt, Artificial Sequence
  Description of Artificial Sequence: Synthetic oligonucleotide
gaggguuacacaucccgac

SEQ ID NO: 2807711 - RNA, 19 nt, Artificial Sequence
  Description of Artificial Sequence: Synthetic oligonucleotide
gaaggagacgauguuccag

SEQ ID NO: 2807712 - RNA, 19 nt, Artificial Sequence
  Description of Artificial Sequence: Synthetic oligonucleotide
ucuuugaaguaggaggcgu

SEQ ID NO: 2807713 - RNA, 19 nt, Artificial Sequence
  Description of Artificial Sequence: Synthetic oligonucleotide
cugaaugaggcacuugcuc

SEQ ID NO: 2807714 - RNA, 19 nt, Artificial Sequence
  Description of Artificial Sequence: Synthetic oligonucleotide
cacaucccgacacagucgc

SEQ ID NO: 2807715 - RNA, 19 nt, Artificial Sequence
  Description of Artificial Sequence: Synthetic oligonucleotide
ucugaacagggaagggaug

SEQ ID NO: 2807716 - RNA, 19 nt, Artificial Sequence
  Description of Artificial Sequence: Synthetic oligonucleotide
acuugcucacaucgcuagc

SEQ ID NO: 2807717 - RNA, 19 nt, Artificial Sequence
  Description of Artificial Sequence: Synthetic oligonucleotide
acagcaugcacuccuuaca

SEQ ID NO: 2807718 - RNA, 19 nt, Artificial Sequence
  Description of Artificial Sequence: Synthetic oligonucleotide
guaaccgccaggaagcgug

SEQ ID NO: 2807719 - RNA, 19 nt, Artificial Sequence
  Description of Artificial Sequence: Synthetic oligonucleotide
cagcacucgucccacaggg

SEQ ID NO: 2807720 - RNA, 19 nt, Artificial Sequence
  Description of Artificial Sequence: Synthetic oligonucleotide
acaacagaggacgacuuca

SEQ ID NO: 2807721 - RNA, 19 nt, Artificial Sequence
  Description of Artificial Sequence: Synthetic oligonucleotide
aguucagcugggugucccc

SEQ ID NO: 2807722 - RNA, 19 nt, Artificial Sequence
  Description of Artificial Sequence: Synthetic oligonucleotide
agcuuccuucuccaggccg

SEQ ID NO: 2807723 - RNA, 19 nt, Artificial Sequence
  Description of Artificial Sequence: Synthetic oligonucleotide
gacuucaugguucuucgaa

SEQ ID NO: 2807724 - RNA, 19 nt, Artificial Sequence
  Description of Artificial Sequence: Synthetic oligonucleotide
cuggcagagcuccugaaug

SEQ ID NO: 2807725 - RNA, 19 nt, Artificial Sequence
  Description of Artificial Sequence: Synthetic oligonucleotide
caacuccucugccacaggg

SEQ ID NO: 2807726 - RNA, 19 nt, Artificial Sequence
  Description of Artificial Sequence: Synthetic oligonucleotide
guuacacaucccgacacag

SEQ ID NO: 2807727 - RNA, 19 nt, Artificial Sequence
  Description of Artificial Sequence: Synthetic oligonucleotide
cuuugaaguaggaggcgug

SEQ ID NO: 2807728 - RNA, 19 nt, Artificial Sequence
  Description of Artificial Sequence: Synthetic oligonucleotide
aggaagcguggccacggcc

SEQ ID NO: 2807729 - RNA, 19 nt, Artificial Sequence
  Description of Artificial Sequence: Synthetic oligonucleotide
cacuccuuacagcaggggc

SEQ ID NO: 2807730 - RNA, 19 nt, Artificial Sequence
  Description of Artificial Sequence: Synthetic oligonucleotide
uccuccaccgugcucuuug

SEQ ID NO: 2807731 - RNA, 19 nt, Artificial Sequence
  Description of Artificial Sequence: Synthetic oligonucleotide
gaaguaggaggcgugucgc

SEQ ID NO: 2807732 - RNA, 19 nt, Artificial Sequence
  Description of Artificial Sequence: Synthetic oligonucleotide
uuagcacaacagaggacga

SEQ ID NO: 2807733 - RNA, 19 nt, Artificial Sequence
  Description of Artificial Sequence: Synthetic oligonucleotide
agauuuucauggugggaca

SEQ ID NO: 2807734 - RNA, 19 nt, Artificial Sequence
  Description of Artificial Sequence: Synthetic oligonucleotide
auuuucauggugggacaac

SEQ ID NO: 2807735 - RNA, 19 nt, Artificial Sequence
  Description of Artificial Sequence: Synthetic oligonucleotide
gaagggaugggcucaugca

SEQ ID NO: 2807736 - RNA, 19 nt, Artificial Sequence
  Description of Artificial Sequence: Synthetic oligonucleotide
gacaacuccucugccacag

SEQ ID NO: 2807737 - RNA, 19 nt, Artificial Sequence
  Description of Artificial Sequence: Synthetic oligonucleotide
cacuugcucacaucgcuag

SEQ ID NO: 2807738 - RNA, 19 nt, Artificial Sequence
  Description of Artificial Sequence: Synthetic oligonucleotide
ugguguggcugguucacag

SEQ ID NO: 2807739 - RNA, 19 nt, Artificial Sequence
  Description of Artificial Sequence: Synthetic oligonucleotide
acagacacguuuugguggu

SEQ ID NO: 2807740 - RNA, 19 nt, Artificial Sequence
  Description of Artificial Sequence: Synthetic oligonucleotide
gaaacuagauuuucauggu

SEQ ID NO: 2807741 - RNA, 19 nt, Artificial Sequence
  Description of Artificial Sequence: Synthetic oligonucleotide
uuugaaguaggaggcgugu

SEQ ID NO: 2807742 - RNA, 19 nt, Artificial Sequence
  Description of Artificial Sequence: Synthetic oligonucleotide
agggaaggagacgauguuc

SEQ ID NO: 2807743 - RNA, 19 nt, Artificial Sequence
  Description of Artificial Sequence: Synthetic oligonucleotide
acaucaggaacaccaggga

SEQ ID NO: 2807744 - RNA, 19 nt, Artificial Sequence
  Description of Artificial Sequence: Synthetic oligonucleotide
uacaggucugugaccuggg

SEQ ID NO: 2807745 - RNA, 19 nt, Artificial Sequence
  Description of Artificial Sequence: Synthetic oligonucleotide
accgccaggaagcguggcc

SEQ ID NO: 2807746 - RNA, 19 nt, Artificial Sequence
  Description of Artificial Sequence: Synthetic oligonucleotide
ugaacagggaagggauggg

SEQ ID NO: 2807747 - RNA, 19 nt, Artificial Sequence
  Description of Artificial Sequence: Synthetic oligonucleotide
uuacacaucccgacacagu

SEQ ID NO: 2807748 - RNA, 19 nt, Artificial Sequence
  Description of Artificial Sequence: Synthetic oligonucleotide
guaauuccgaggguuacac

SEQ ID NO: 2807749 - RNA, 19 nt, Artificial Sequence
  Description of Artificial Sequence: Synthetic oligonucleotide
aucccgacacagucgcagc

SEQ ID NO: 2807750 - RNA, 19 nt, Artificial Sequence
  Description of Artificial Sequence: Synthetic oligonucleotide
uguaauuccgaggguuaca

SEQ ID NO: 2807751 - RNA, 19 nt, Artificial Sequence
  Description of Artificial Sequence: Synthetic oligonucleotide
cagcaugcacuccuuacag

SEQ ID NO: 2807752 - RNA, 19 nt, Artificial Sequence
  Description of Artificial Sequence: Synthetic oligonucleotide
ucgaaggaaccccugggua

SEQ ID NO: 2807753 - RNA, 19 nt, Artificial Sequence
  Description of Artificial Sequence: Synthetic oligonucleotide
aacagggaagggaugggcu

SEQ ID NO: 2807754 - RNA, 19 nt, Artificial Sequence
  Description of Artificial Sequence: Synthetic oligonucleotide
ugggacaacuccucugcca

SEQ ID NO: 2807755 - RNA, 19 nt, Artificial Sequence
  Description of Artificial Sequence: Synthetic oligonucleotide
uuguuacugggaacagaca

SEQ ID NO: 2807756 - RNA, 19 nt, Artificial Sequence
  Description of Artificial Sequence: Synthetic oligonucleotide
uuucauggugggacaacuc

SEQ ID NO: 2807757 - RNA, 19 nt, Artificial Sequence
  Description of Artificial Sequence: Synthetic oligonucleotide
cuaggguuagcacaacaga

SEQ ID NO: 2807758 - RNA, 19 nt, Artificial Sequence
  Description of Artificial Sequence: Synthetic oligonucleotide
ugguucuucgaaggaaccc

SEQ ID NO: 2807759 - RNA, 19 nt, Artificial Sequence
  Description of Artificial Sequence: Synthetic oligonucleotide
ucaugguucuucgaaggaa

SEQ ID NO: 2807760 - RNA, 19 nt, Artificial Sequence
  Description of Artificial Sequence: Synthetic oligonucleotide
ugggaacagacacguuuug

SEQ ID NO: 2807761 - RNA, 19 nt, Artificial Sequence
  Description of Artificial Sequence: Synthetic oligonucleotide
aaggaaccccuggguaacc

SEQ ID NO: 2807762 - RNA, 19 nt, Artificial Sequence
  Description of Artificial Sequence: Synthetic oligonucleotide
agcacaacagaggacgacu

SEQ ID NO: 2807763 - RNA, 19 nt, Artificial Sequence
  Description of Artificial Sequence: Synthetic oligonucleotide
cacagcaugcacuccuuac

SEQ ID NO: 2807764 - RNA, 19 nt, Artificial Sequence
  Description of Artificial Sequence: Synthetic oligonucleotide
uuguuacaggucugugacc

SEQ ID NO: 2807765 - RNA, 19 nt, Artificial Sequence
  Description of Artificial Sequence: Synthetic oligonucleotide
cagagagcuuuguuacagg

SEQ ID NO: 2807766 - RNA, 19 nt, Artificial Sequence
  Description of Artificial Sequence: Synthetic oligonucleotide
uuggugguguggcugguuc

SEQ ID NO: 2807767 - RNA, 19 nt, Artificial Sequence
  Description of Artificial Sequence: Synthetic oligonucleotide
gacgauguuccaguucagc

SEQ ID NO: 2807768 - RNA, 19 nt, Artificial Sequence
  Description of Artificial Sequence: Synthetic oligonucleotide
gacgacuucaugguucuuc

SEQ ID NO: 2807769 - RNA, 19 nt, Artificial Sequence
  Description of Artificial Sequence: Synthetic oligonucleotide
uggcagagcuccugaauga

SEQ ID NO: 2807770 - RNA, 19 nt, Artificial Sequence
  Description of Artificial Sequence: Synthetic oligonucleotide
aggacgacuucaugguucu

SEQ ID NO: 2807771 - RNA, 19 nt, Artificial Sequence
  Description of Artificial Sequence: Synthetic oligonucleotide
gaacagggaagggaugggc

SEQ ID NO: 2807772 - RNA, 19 nt, Artificial Sequence
  Description of Artificial Sequence: Synthetic oligonucleotide
gcacagagagcuuuguuac

SEQ ID NO: 2807773 - RNA, 19 nt, Artificial Sequence
  Description of Artificial Sequence: Synthetic oligonucleotide
caugcacuccuuacagcag

SEQ ID NO: 2807774 - RNA, 19 nt, Artificial Sequence
  Description of Artificial Sequence: Synthetic oligonucleotide
aggguuacacaucccgaca

SEQ ID NO: 2807775 - RNA, 19 nt, Artificial Sequence
  Description of Artificial Sequence: Synthetic oligonucleotide
gguucuucgaaggaacccc

SEQ ID NO: 2807776 - RNA, 19 nt, Artificial Sequence
  Description of Artificial Sequence: Synthetic oligonucleotide
aaguaggaggcgugucgcu

SEQ ID NO: 2807777 - RNA, 19 nt, Artificial Sequence
  Description of Artificial Sequence: Synthetic oligonucleotide
gacacguuuugguggugug

SEQ ID NO: 2807778 - RNA, 19 nt, Artificial Sequence
  Description of Artificial Sequence: Synthetic oligonucleotide
uccuucuccaggccggcac

SEQ ID NO: 2807779 - RNA, 19 nt, Artificial Sequence
  Description of Artificial Sequence: Synthetic oligonucleotide
uugcucacaucgcuagcac

SEQ ID NO: 2807780 - RNA, 19 nt, Artificial Sequence
  Description of Artificial Sequence: Synthetic oligonucleotide
agcuccuccaccgugcucu

SEQ ID NO: 2807781 - RNA, 19 nt, Artificial Sequence
  Description of Artificial Sequence: Synthetic oligonucleotide
ugcucacaucgcuagcaca

SEQ ID NO: 2807782 - RNA, 19 nt, Artificial Sequence
  Description of Artificial Sequence: Synthetic oligonucleotide
uuacagcaggggcagcuuc

SEQ ID NO: 2807783 - RNA, 19 nt, Artificial Sequence
  Description of Artificial Sequence: Synthetic oligonucleotide
cauggugggacaacuccuc

SEQ ID NO: 2807784 - RNA, 19 nt, Artificial Sequence
  Description of Artificial Sequence: Synthetic oligonucleotide
uaaccgccaggaagcgugg

SEQ ID NO: 2807785 - RNA, 19 nt, Artificial Sequence
  Description of Artificial Sequence: Synthetic oligonucleotide
acacguuuugguggugugg

SEQ ID NO: 2807786 - RNA, 19 nt, Artificial Sequence
  Description of Artificial Sequence: Synthetic oligonucleotide
gaggacgacuucaugguuc

SEQ ID NO: 2807787 - RNA, 19 nt, Artificial Sequence
  Description of Artificial Sequence: Synthetic oligonucleotide
aggcacagcaugcacuccu

SEQ ID NO: 2807788 - RNA, 19 nt, Artificial Sequence
  Description of Artificial Sequence: Synthetic oligonucleotide
acuccuuacagcaggggca

SEQ ID NO: 2807789 - RNA, 19 nt, Artificial Sequence
  Description of Artificial Sequence: Synthetic oligonucleotide
cucuuugaaguaggaggcg

SEQ ID NO: 2807790 - RNA, 19 nt, Artificial Sequence
  Description of Artificial Sequence: Synthetic oligonucleotide
gggaaggagacgauguucc

SEQ ID NO: 2807791 - RNA, 19 nt, Artificial Sequence
  Description of Artificial Sequence: Synthetic oligonucleotide
ggaagggaugggcucaugc

SEQ ID NO: 2807792 - RNA, 19 nt, Artificial Sequence
  Description of Artificial Sequence: Synthetic oligonucleotide
gcaugcacuccuuacagca

SEQ ID NO: 2807793 - RNA, 19 nt, Artificial Sequence
  Description of Artificial Sequence: Synthetic oligonucleotide
gcagcuuccuucuccaggc

SEQ ID NO: 2807794 - RNA, 19 nt, Artificial Sequence
  Description of Artificial Sequence: Synthetic oligonucleotide
uaauuccgaggguuacaca

SEQ ID NO: 2807795 - RNA, 19 nt, Artificial Sequence
  Description of Artificial Sequence: Synthetic oligonucleotide
gugagggcucugaacaggg

SEQ ID NO: 2807796 - RNA, 19 nt, Artificial Sequence
  Description of Artificial Sequence: Synthetic oligonucleotide
ggcagcuuccuucuccagg

SEQ ID NO: 2807797 - RNA, 19 nt, Artificial Sequence
  Description of Artificial Sequence: Synthetic oligonucleotide
ggggacacacaucaggaac

SEQ ID NO: 2807798 - RNA, 19 nt, Artificial Sequence
  Description of Artificial Sequence: Synthetic oligonucleotide
aaugaggcacuugcucaca

SEQ ID NO: 2807799 - RNA, 19 nt, Artificial Sequence
  Description of Artificial Sequence: Synthetic oligonucleotide
caucccgacacagucgcag

SEQ ID NO: 2807800 - RNA, 19 nt, Artificial Sequence
  Description of Artificial Sequence: Synthetic oligonucleotide
gaaggaaccccuggguaac

SEQ ID NO: 2807801 - RNA, 19 nt, Artificial Sequence
  Description of Artificial Sequence: Synthetic oligonucleotide
ggaggcuaggguuagcaca

SEQ ID NO: 2807802 - RNA, 19 nt, Artificial Sequence
  Description of Artificial Sequence: Synthetic oligonucleotide
gagcuccugaaugaggcac

SEQ ID NO: 2807803 - RNA, 19 nt, Artificial Sequence
  Description of Artificial Sequence: Synthetic oligonucleotide
cuggggacacacaucagga

SEQ ID NO: 2807804 - RNA, 19 nt, Artificial Sequence
  Description of Artificial Sequence: Synthetic oligonucleotide
cucugugagggcucugaac

SEQ ID NO: 2807805 - RNA, 19 nt, Artificial Sequence
  Description of Artificial Sequence: Synthetic oligonucleotide
ggguuagcacaacagagga

SEQ ID NO: 2807806 - RNA, 19 nt, Artificial Sequence
  Description of Artificial Sequence: Synthetic oligonucleotide
ccuggggacacacaucagg

SEQ ID NO: 2807807 - RNA, 19 nt, Artificial Sequence
  Description of Artificial Sequence: Synthetic oligonucleotide
gaaccccuggguaaccgcc

SEQ ID NO: 2807808 - RNA, 19 nt, Artificial Sequence
  Description of Artificial Sequence: Synthetic oligonucleotide
gcuaggguuagcacaacag

SEQ ID NO: 2807809 - RNA, 19 nt, Artificial Sequence
  Description of Artificial Sequence: Synthetic oligonucleotide
acggccuccucccggcggc

SEQ ID NO: 2807810 - RNA, 19 nt, Artificial Sequence
  Description of Artificial Sequence: Synthetic oligonucleotide
agucgcagcacucguccca

SEQ ID NO: 2807811 - RNA, 19 nt, Artificial Sequence
  Description of Artificial Sequence: Synthetic oligonucleotide
aguaggaggcgugucgcug

SEQ ID NO: 2807812 - RNA, 19 nt, Artificial Sequence
  Description of Artificial Sequence: Synthetic oligonucleotide
auuccgaggguuacacauc

SEQ ID NO: 2807813 - RNA, 19 nt, Artificial Sequence
  Description of Artificial Sequence: Synthetic oligonucleotide
acaccagggaggcuagggu

SEQ ID NO: 2807814 - RNA, 19 nt, Artificial Sequence
  Description of Artificial Sequence: Synthetic oligonucleotide
acacaucccgacacagucg

SEQ ID NO: 2807815 - RNA, 19 nt, Artificial Sequence
  Description of Artificial Sequence: Synthetic oligonucleotide
gcucacaucgcuagcacag

SEQ ID NO: 2807816 - RNA, 19 nt, Artificial Sequence
  Description of Artificial Sequence: Synthetic oligonucleotide
ucccgacacagucgcagca

SEQ ID NO: 2807817 - RNA, 19 nt, Artificial Sequence
  Description of Artificial Sequence: Synthetic oligonucleotide
cugugagggcucugaacag

SEQ ID NO: 2807818 - RNA, 19 nt, Artificial Sequence
  Description of Artificial Sequence: Synthetic oligonucleotide
ugugaccuggggacacaca

SEQ ID NO: 2807819 - RNA, 19 nt, Artificial Sequence
  Description of Artificial Sequence: Synthetic oligonucleotide
gggacaacuccucugccac

SEQ ID NO: 2807820 - RNA, 19 nt, Artificial Sequence
  Description of Artificial Sequence: Synthetic oligonucleotide
cuccuuacagcaggggcag

SEQ ID NO: 2807821 - RNA, 19 nt, Artificial Sequence
  Description of Artificial Sequence: Synthetic oligonucleotide
cuugcucacaucgcuagca

SEQ ID NO: 2807822 - RNA, 19 nt, Artificial Sequence
  Description of Artificial Sequence: Synthetic oligonucleotide
gggaacagacacguuuugg

SEQ ID NO: 2807823 - RNA, 19 nt, Artificial Sequence
  Description of Artificial Sequence: Synthetic oligonucleotide
ccgaggguuacacaucccg

SEQ ID NO: 2807824 - RNA, 19 nt, Artificial Sequence
  Description of Artificial Sequence: Synthetic oligonucleotide
gugucgcuguaauuccgag

SEQ ID NO: 2807825 - RNA, 19 nt, Artificial Sequence
  Description of Artificial Sequence: Synthetic oligonucleotide
caucgcuagcacagagagc

SEQ ID NO: 2807826 - RNA, 19 nt, Artificial Sequence
  Description of Artificial Sequence: Synthetic oligonucleotide
agcuuuguuacaggucugu

SEQ ID NO: 2807827 - RNA, 19 nt, Artificial Sequence
  Description of Artificial Sequence: Synthetic oligonucleotide
acaacuccucugccacagg

SEQ ID NO: 2807828 - RNA, 19 nt, Artificial Sequence
  Description of Artificial Sequence: Synthetic oligonucleotide
agagcuccugaaugaggca

SEQ ID NO: 2807829 - RNA, 19 nt, Artificial Sequence
  Description of Artificial Sequence: Synthetic oligonucleotide
aacuccucugccacaggga

SEQ ID NO: 2807830 - RNA, 19 nt, Artificial Sequence
  Description of Artificial Sequence: Synthetic oligonucleotide
guggccacggccuccuccc

SEQ ID NO: 2807831 - RNA, 19 nt, Artificial Sequence
  Description of Artificial Sequence: Synthetic oligonucleotide
gauuuucauggugggacaa

SEQ ID NO: 2807832 - RNA, 19 nt, Artificial Sequence
  Description of Artificial Sequence: Synthetic oligonucleotide
ugaccuggggacacacauc

SEQ ID NO: 2807833 - RNA, 19 nt, Artificial Sequence
  Description of Artificial Sequence: Synthetic oligonucleotide
accgugcucuuugaaguag

SEQ ID NO: 2807834 - RNA, 19 nt, Artificial Sequence
  Description of Artificial Sequence: Synthetic oligonucleotide
gaggcuaggguuagcacaa

SEQ ID NO: 2807835 - RNA, 19 nt, Artificial Sequence
  Description of Artificial Sequence: Synthetic oligonucleotide
cuguaauuccgaggguuac

SEQ ID NO: 2807836 - RNA, 19 nt, Artificial Sequence
  Description of Artificial Sequence: Synthetic oligonucleotide
ggaacagacacguuuuggu

SEQ ID NO: 2807837 - RNA, 19 nt, Artificial Sequence
  Description of Artificial Sequence: Synthetic oligonucleotide
aaccgccaggaagcguggc

SEQ ID NO: 2807838 - RNA, 19 nt, Artificial Sequence
  Description of Artificial Sequence: Synthetic oligonucleotide
uggggacacacaucaggaa

SEQ ID NO: 2807839 - RNA, 19 nt, Artificial Sequence
  Description of Artificial Sequence: Synthetic oligonucleotide
gugcucuuugaaguaggag

SEQ ID NO: 2807840 - RNA, 19 nt, Artificial Sequence
  Description of Artificial Sequence: Synthetic oligonucleotide
ggguuacacaucccgacac

SEQ ID NO: 2807841 - RNA, 19 nt, Artificial Sequence
  Description of Artificial Sequence: Synthetic oligonucleotide
cugguucacaguuucuaaa

SEQ ID NO: 2807842 - RNA, 19 nt, Artificial Sequence
  Description of Artificial Sequence: Synthetic oligonucleotide
aagcguggccacggccucc

SEQ ID NO: 2807843 - RNA, 19 nt, Artificial Sequence
  Description of Artificial Sequence: Synthetic oligonucleotide
auggugggacaacuccucu

SEQ ID NO: 2807844 - RNA, 19 nt, Artificial Sequence
  Description of Artificial Sequence: Synthetic oligonucleotide
cacaacagaggacgacuuc

SEQ ID NO: 2807845 - RNA, 19 nt, Artificial Sequence
  Description of Artificial Sequence: Synthetic oligonucleotide
ugagggcucugaacaggga

SEQ ID NO: 2807846 - RNA, 19 nt, Artificial Sequence
  Description of Artificial Sequence: Synthetic oligonucleotide
uggugguguggcugguuca

SEQ ID NO: 2807847 - RNA, 19 nt, Artificial Sequence
  Description of Artificial Sequence: Synthetic oligonucleotide
uguggcugguucacaguuu

SEQ ID NO: 2807848 - RNA, 19 nt, Artificial Sequence
  Description of Artificial Sequence: Synthetic oligonucleotide
cgagcuuccgagcagcucc

SEQ ID NO: 2807849 - RNA, 19 nt, Artificial Sequence
  Description of Artificial Sequence: Synthetic oligonucleotide
uugaaguaggaggcguguc

SEQ ID NO: 2807850 - RNA, 19 nt, Artificial Sequence
  Description of Artificial Sequence: Synthetic oligonucleotide
aggaaccccuggguaaccg

SEQ ID NO: 2807851 - RNA, 19 nt, Artificial Sequence
  Description of Artificial Sequence: Synthetic oligonucleotide
acacagucgcagcacucgu

SEQ ID NO: 2807852 - RNA, 19 nt, Artificial Sequence
  Description of Artificial Sequence: Synthetic oligonucleotide
uagcacagagagcuuuguu

SEQ ID NO: 2807853 - RNA, 19 nt, Artificial Sequence
  Description of Artificial Sequence: Synthetic oligonucleotide
uccgaggguuacacauccc

SEQ ID NO: 2807854 - RNA, 19 nt, Artificial Sequence
  Description of Artificial Sequence: Synthetic oligonucleotide
aggcacuugcucacaucgc

SEQ ID NO: 2807855 - RNA, 19 nt, Artificial Sequence
  Description of Artificial Sequence: Synthetic oligonucleotide
agacacguuuugguggugu

SEQ ID NO: 2807856 - RNA, 19 nt, Artificial Sequence
  Description of Artificial Sequence: Synthetic oligonucleotide
guuacaggucugugaccug

SEQ ID NO: 2807857 - RNA, 19 nt, Artificial Sequence
  Description of Artificial Sequence: Synthetic oligonucleotide
ggcgugucgcuguaauucc

SEQ ID NO: 2807858 - RNA, 19 nt, Artificial Sequence
  Description of Artificial Sequence: Synthetic oligonucleotide
uucuccaggccggcacugg

SEQ ID NO: 2807859 - RNA, 19 nt, Artificial Sequence
  Description of Artificial Sequence: Synthetic oligonucleotide
uagcacaacagaggacgac

SEQ ID NO: 2807860 - RNA, 19 nt, Artificial Sequence
  Description of Artificial Sequence: Synthetic oligonucleotide
uguuccaguucagcugggu

SEQ ID NO: 2807861 - RNA, 19 nt, Artificial Sequence
  Description of Artificial Sequence: Synthetic oligonucleotide
cacaucgcuagcacagaga

SEQ ID NO: 2807862 - RNA, 19 nt, Artificial Sequence
  Description of Artificial Sequence: Synthetic oligonucleotide
cugccacagggaaggagac

SEQ ID NO: 2807863 - RNA, 19 nt, Artificial Sequence
  Description of Artificial Sequence: Synthetic oligonucleotide
cuagauuuucaugguggga

SEQ ID NO: 2807864 - RNA, 19 nt, Artificial Sequence
  Description of Artificial Sequence: Synthetic oligonucleotide
cucugaacagggaagggau

SEQ ID NO: 2807865 - RNA, 19 nt, Artificial Sequence
  Description of Artificial Sequence: Synthetic oligonucleotide
agaggacgacuucaugguu

SEQ ID NO: 2807866 - RNA, 19 nt, Artificial Sequence
  Description of Artificial Sequence: Synthetic oligonucleotide
cuccucugccacagggaag

SEQ ID NO: 2807867 - RNA, 19 nt, Artificial Sequence
  Description of Artificial Sequence: Synthetic oligonucleotide
gggcucugaacagggaagg

SEQ ID NO: 2807868 - RNA, 19 nt, Artificial Sequence
  Description of Artificial Sequence: Synthetic oligonucleotide
augaggcacuugcucacau

SEQ ID NO: 2807869 - RNA, 19 nt, Artificial Sequence
  Description of Artificial Sequence: Synthetic oligonucleotide
gcuuccuucuccaggccgg

SEQ ID NO: 2807870 - RNA, 19 nt, Artificial Sequence
  Description of Artificial Sequence: Synthetic oligonucleotide
gugggacaacuccucugcc

SEQ ID NO: 2807871 - RNA, 19 nt, Artificial Sequence
  Description of Artificial Sequence: Synthetic oligonucleotide
ucgcuguaauuccgagggu

SEQ ID NO: 2807872 - RNA, 19 nt, Artificial Sequence
  Description of Artificial Sequence: Synthetic oligonucleotide
acaggguccccaggcacag

SEQ ID NO: 2807873 - RNA, 19 nt, Artificial Sequence
  Description of Artificial Sequence: Synthetic oligonucleotide
cacagucgcagcacucguc

SEQ ID NO: 2807874 - RNA, 19 nt, Artificial Sequence
  Description of Artificial Sequence: Synthetic oligonucleotide
caggucugugaccugggga

SEQ ID NO: 2807875 - RNA, 19 nt, Artificial Sequence
  Description of Artificial Sequence: Synthetic oligonucleotide
gagcuuuguuacaggucug

SEQ ID NO: 2807876 - RNA, 19 nt, Artificial Sequence
  Description of Artificial Sequence: Synthetic oligonucleotide
gaagcguggccacggccuc

SEQ ID NO: 2807877 - RNA, 19 nt, Artificial Sequence
  Description of Artificial Sequence: Synthetic oligonucleotide
cagaggacgacuucauggu

SEQ ID NO: 2807878 - RNA, 19 nt, Artificial Sequence
  Description of Artificial Sequence: Synthetic oligonucleotide
acguuuuggugguguggcu

SEQ ID NO: 2807879 - RNA, 19 nt, Artificial Sequence
  Description of Artificial Sequence: Synthetic oligonucleotide
caggccggcacuggcagag

SEQ ID NO: 2807880 - RNA, 19 nt, Artificial Sequence
  Description of Artificial Sequence: Synthetic oligonucleotide
uggcugguucacaguuucu

SEQ ID NO: 2807881 - RNA, 19 nt, Artificial Sequence
  Description of Artificial Sequence: Synthetic oligonucleotide
gugaccuggggacacacau

SEQ ID NO: 2807882 - RNA, 19 nt, Artificial Sequence
  Description of Artificial Sequence: Synthetic oligonucleotide
cacagagagcuuuguuaca

SEQ ID NO: 2807883 - RNA, 19 nt, Artificial Sequence
  Description of Artificial Sequence: Synthetic oligonucleotide
gggacacacaucaggaaca

SEQ ID NO: 2807884 - RNA, 19 nt, Artificial Sequence
  Description of Artificial Sequence: Synthetic oligonucleotide
accccuggguaaccgccag

SEQ ID NO: 2807885 - RNA, 19 nt, Artificial Sequence
  Description of Artificial Sequence: Synthetic oligonucleotide
gguuacacaucccgacaca

SEQ ID NO: 2807886 - RNA, 19 nt, Artificial Sequence
  Description of Artificial Sequence: Synthetic oligonucleotide
ggagacgauguuccaguuc

SEQ ID NO: 2807887 - RNA, 19 nt, Artificial Sequence
  Description of Artificial Sequence: Synthetic oligonucleotide
gcagagcuccugaaugagg

SEQ ID NO: 2807888 - RNA, 19 nt, Artificial Sequence
  Description of Artificial Sequence: Synthetic oligonucleotide
cagucgcagcacucguccc

SEQ ID NO: 2807889 - RNA, 19 nt, Artificial Sequence
  Description of Artificial Sequence: Synthetic oligonucleotide
ucugugaccuggggacaca

SEQ ID NO: 2807890 - RNA, 19 nt, Artificial Sequence
  Description of Artificial Sequence: Synthetic oligonucleotide
ggaaccccuggguaaccgc

SEQ ID NO: 2807891 - RNA, 19 nt, Artificial Sequence
  Description of Artificial Sequence: Synthetic oligonucleotide
ggcagagcuccugaaugag

SEQ ID NO: 2807892 - RNA, 19 nt, Artificial Sequence
  Description of Artificial Sequence: Synthetic oligonucleotide
gaacaccagggaggcuagg

SEQ ID NO: 2807893 - RNA, 19 nt, Artificial Sequence
  Description of Artificial Sequence: Synthetic oligonucleotide
aggagacgauguuccaguu

SEQ ID NO: 2807894 - RNA, 19 nt, Artificial Sequence
  Description of Artificial Sequence: Synthetic oligonucleotide
aaccccuggguaaccgcca

SEQ ID NO: 2807895 - RNA, 19 nt, Artificial Sequence
  Description of Artificial Sequence: Synthetic oligonucleotide
uuuuggugguguggcuggu

SEQ ID NO: 2807896 - RNA, 19 nt, Artificial Sequence
  Description of Artificial Sequence: Synthetic oligonucleotide
ccgugcucuuugaaguagg

SEQ ID NO: 2807897 - RNA, 19 nt, Artificial Sequence
  Description of Artificial Sequence: Synthetic oligonucleotide
gggcucaugcagcuccucc

SEQ ID NO: 2807898 - RNA, 19 nt, Artificial Sequence
  Description of Artificial Sequence: Synthetic oligonucleotide
cacaggguccccaggcaca

SEQ ID NO: 2807899 - RNA, 19 nt, Artificial Sequence
  Description of Artificial Sequence: Synthetic oligonucleotide
cuuccuucuccaggccggc

SEQ ID NO: 2807900 - RNA, 19 nt, Artificial Sequence
  Description of Artificial Sequence: Synthetic oligonucleotide
ggcucaugcagcuccucca

SEQ ID NO: 2807901 - RNA, 19 nt, Artificial Sequence
  Description of Artificial Sequence: Synthetic oligonucleotide
gcugguucacaguuucuaa

SEQ ID NO: 2807902 - RNA, 19 nt, Artificial Sequence
  Description of Artificial Sequence: Synthetic oligonucleotide
cacggccuccucccggcgg

SEQ ID NO: 2807903 - RNA, 19 nt, Artificial Sequence
  Description of Artificial Sequence: Synthetic oligonucleotide
gucccacaggguccccagg

SEQ ID NO: 2807904 - RNA, 19 nt, Artificial Sequence
  Description of Artificial Sequence: Synthetic oligonucleotide
uggccacggccuccucccg

SEQ ID NO: 2807905 - RNA, 19 nt, Artificial Sequence
  Description of Artificial Sequence: Synthetic oligonucleotide
gguuagcacaacagaggac

SEQ ID NO: 2807906 - RNA, 19 nt, Artificial Sequence
  Description of Artificial Sequence: Synthetic oligonucleotide
agcuccugaaugaggcacu

SEQ ID NO: 2807907 - RNA, 19 nt, Artificial Sequence
  Description of Artificial Sequence: Synthetic oligonucleotide
gucugugaccuggggacac

SEQ ID NO: 2807908 - RNA, 19 nt, Artificial Sequence
  Description of Artificial Sequence: Synthetic oligonucleotide
cugugaccuggggacacac

SEQ ID NO: 2807909 - RNA, 19 nt, Artificial Sequence
  Description of Artificial Sequence: Synthetic oligonucleotide
gcucugaacagggaaggga

SEQ ID NO: 2807910 - RNA, 19 nt, Artificial Sequence
  Description of Artificial Sequence: Synthetic oligonucleotide
ggcucugaacagggaaggg

SEQ ID NO: 2807911 - RNA, 19 nt, Artificial Sequence
  Description of Artificial Sequence: Synthetic oligonucleotide
ggcuaggguuagcacaaca

SEQ ID NO: 2807912 - RNA, 19 nt, Artificial Sequence
  Description of Artificial Sequence: Synthetic oligonucleotide
gcuuuguuacaggucugug

SEQ ID NO: 2807913 - RNA, 19 nt, Artificial Sequence
  Description of Artificial Sequence: Synthetic oligonucleotide
cucccggcggccgagcuuc

SEQ ID NO: 2807914 - RNA, 19 nt, Artificial Sequence
  Description of Artificial Sequence: Synthetic oligonucleotide
agacgauguuccaguucag

SEQ ID NO: 2807915 - RNA, 19 nt, Artificial Sequence
  Description of Artificial Sequence: Synthetic oligonucleotide
caggaagcguggccacggc

SEQ ID NO: 2807916 - RNA, 19 nt, Artificial Sequence
  Description of Artificial Sequence: Synthetic oligonucleotide
guaggaggcgugucgcugu

SEQ ID NO: 2807917 - RNA, 19 nt, Artificial Sequence
  Description of Artificial Sequence: Synthetic oligonucleotide
ggcacuugcucacaucgcu

SEQ ID NO: 2807918 - RNA, 19 nt, Artificial Sequence
  Description of Artificial Sequence: Synthetic oligonucleotide
ggacacacaucaggaacac

SEQ ID NO: 2807919 - RNA, 19 nt, Artificial Sequence
  Description of Artificial Sequence: Synthetic oligonucleotide
ggaacaccagggaggcuag

SEQ ID NO: 2807920 - RNA, 19 nt, Artificial Sequence
  Description of Artificial Sequence: Synthetic oligonucleotide
ggaaggagacgauguucca

SEQ ID NO: 2807921 - RNA, 19 nt, Artificial Sequence
  Description of Artificial Sequence: Synthetic oligonucleotide
uaggaggcgugucgcugua

SEQ ID NO: 2807922 - RNA, 19 nt, Artificial Sequence
  Description of Artificial Sequence: Synthetic oligonucleotide
cugggaacagacacguuuu

SEQ ID NO: 2807923 - RNA, 19 nt, Artificial Sequence
  Description of Artificial Sequence: Synthetic oligonucleotide
uuuggugguguggcugguu

SEQ ID NO: 2807924 - RNA, 19 nt, Artificial Sequence
  Description of Artificial Sequence: Synthetic oligonucleotide
ccaggaagcguggccacgg

SEQ ID NO: 2807925 - RNA, 19 nt, Artificial Sequence
  Description of Artificial Sequence: Synthetic oligonucleotide
auguuccaguucagcuggg

SEQ ID NO: 2807926 - RNA, 19 nt, Artificial Sequence
  Description of Artificial Sequence: Synthetic oligonucleotide
aggcuaggguuagcacaac

SEQ ID NO: 2807927 - RNA, 19 nt, Artificial Sequence
  Description of Artificial Sequence: Synthetic oligonucleotide
cuucuccaggccggcacug

SEQ ID NO: 2807928 - RNA, 19 nt, Artificial Sequence
  Description of Artificial Sequence: Synthetic oligonucleotide
ggugguguggcugguucac

SEQ ID NO: 2807929 - RNA, 19 nt, Artificial Sequence
  Description of Artificial Sequence: Synthetic oligonucleotide
gucgcagcacucgucccac

SEQ ID NO: 2807930 - RNA, 19 nt, Artificial Sequence
  Description of Artificial Sequence: Synthetic oligonucleotide
ucgucccacagggucccca

SEQ ID NO: 2807931 - RNA, 19 nt, Artificial Sequence
  Description of Artificial Sequence: Synthetic oligonucleotide
uacugggaacagacacguu

SEQ ID NO: 2807932 - RNA, 19 nt, Artificial Sequence
  Description of Artificial Sequence: Synthetic oligonucleotide
gggaggcuaggguuagcac

SEQ ID NO: 2807933 - RNA, 19 nt, Artificial Sequence
  Description of Artificial Sequence: Synthetic oligonucleotide
uccucccggcggccgagcu

SEQ ID NO: 2807934 - RNA, 19 nt, Artificial Sequence
  Description of Artificial Sequence: Synthetic oligonucleotide
cagggaagggaugggcuca

SEQ ID NO: 2807935 - RNA, 19 nt, Artificial Sequence
  Description of Artificial Sequence: Synthetic oligonucleotide
guguggcugguucacaguu

SEQ ID NO: 2807936 - RNA, 19 nt, Artificial Sequence
  Description of Artificial Sequence: Synthetic oligonucleotide
ccggcacuggcagagcucc

SEQ ID NO: 2807937 - RNA, 19 nt, Artificial Sequence
  Description of Artificial Sequence: Synthetic oligonucleotide
cuccugaaugaggcacuug

SEQ ID NO: 2807938 - RNA, 19 nt, Artificial Sequence
  Description of Artificial Sequence: Synthetic oligonucleotide
cuccaggccggcacuggca

SEQ ID NO: 2807939 - RNA, 19 nt, Artificial Sequence
  Description of Artificial Sequence: Synthetic oligonucleotide
ggguaaccgccaggaagcg

SEQ ID NO: 2807940 - RNA, 19 nt, Artificial Sequence
  Description of Artificial Sequence: Synthetic oligonucleotide
uuccuucuccaggccggca

SEQ ID NO: 2807941 - RNA, 19 nt, Artificial Sequence
  Description of Artificial Sequence: Synthetic oligonucleotide
gcgugucgcuguaauuccg

SEQ ID NO: 2807942 - RNA, 19 nt, Artificial Sequence
  Description of Artificial Sequence: Synthetic oligonucleotide
guucuucgaaggaaccccu

SEQ ID NO: 2807943 - RNA, 19 nt, Artificial Sequence
  Description of Artificial Sequence: Synthetic oligonucleotide
ggcacuggcagagcuccug

SEQ ID NO: 2807944 - RNA, 19 nt, Artificial Sequence
  Description of Artificial Sequence: Synthetic oligonucleotide
gcacuccuuacagcagggg

SEQ ID NO: 2807945 - RNA, 19 nt, Artificial Sequence
  Description of Artificial Sequence: Synthetic oligonucleotide
cucacaucgcuagcacaga

SEQ ID NO: 2807946 - RNA, 19 nt, Artificial Sequence
  Description of Artificial Sequence: Synthetic oligonucleotide
uccuuacagcaggggcagc

SEQ ID NO: 2807947 - RNA, 19 nt, Artificial Sequence
  Description of Artificial Sequence: Synthetic oligonucleotide
cguuuuggugguguggcug

SEQ ID NO: 2807948 - RNA, 19 nt, Artificial Sequence
  Description of Artificial Sequence: Synthetic oligonucleotide
caacagaggacgacuucau

SEQ ID NO: 2807949 - RNA, 19 nt, Artificial Sequence
  Description of Artificial Sequence: Synthetic oligonucleotide
gcuguaauuccgaggguua

SEQ ID NO: 2807950 - RNA, 19 nt, Artificial Sequence
  Description of Artificial Sequence: Synthetic oligonucleotide
aggccggcacuggcagagc

SEQ ID NO: 2807951 - RNA, 19 nt, Artificial Sequence
  Description of Artificial Sequence: Synthetic oligonucleotide
ggcugguucacaguuucua

SEQ ID NO: 2807952 - RNA, 19 nt, Artificial Sequence
  Description of Artificial Sequence: Synthetic oligonucleotide
ucgcuagcacagagagcuu

SEQ ID NO: 2807953 - RNA, 19 nt, Artificial Sequence
  Description of Artificial Sequence: Synthetic oligonucleotide
ucgcagcacucgucccaca

SEQ ID NO: 2807954 - RNA, 19 nt, Artificial Sequence
  Description of Artificial Sequence: Synthetic oligonucleotide
ggaagcguggccacggccu

SEQ ID NO: 2807955 - RNA, 19 nt, Artificial Sequence
  Description of Artificial Sequence: Synthetic oligonucleotide
caccgugcucuuugaagua

SEQ ID NO: 2807956 - RNA, 19 nt, Artificial Sequence
  Description of Artificial Sequence: Synthetic oligonucleotide
accuggggacacacaucag

SEQ ID NO: 2807957 - RNA, 19 nt, Artificial Sequence
  Description of Artificial Sequence: Synthetic oligonucleotide
ggacaacuccucugccaca

SEQ ID NO: 2807958 - RNA, 19 nt, Artificial Sequence
  Description of Artificial Sequence: Synthetic oligonucleotide
ggccgagcuuccgagcagc

SEQ ID NO: 2807959 - RNA, 19 nt, Artificial Sequence
  Description of Artificial Sequence: Synthetic oligonucleotide
gcggccgagcuuccgagca

SEQ ID NO: 2807960 - RNA, 19 nt, Artificial Sequence
  Description of Artificial Sequence: Synthetic oligonucleotide
agcacucgucccacagggu

SEQ ID NO: 2807961 - RNA, 19 nt, Artificial Sequence
  Description of Artificial Sequence: Synthetic oligonucleotide
caccagggaggcuaggguu

SEQ ID NO: 2807962 - RNA, 19 nt, Artificial Sequence
  Description of Artificial Sequence: Synthetic oligonucleotide
augggcucaugcagcuccu

SEQ ID NO: 2807963 - RNA, 19 nt, Artificial Sequence
  Description of Artificial Sequence: Synthetic oligonucleotide
gccaggaagcguggccacg

SEQ ID NO: 2807964 - RNA, 19 nt, Artificial Sequence
  Description of Artificial Sequence: Synthetic oligonucleotide
cacuggcagagcuccugaa

SEQ ID NO: 2807965 - RNA, 19 nt, Artificial Sequence
  Description of Artificial Sequence: Synthetic oligonucleotide
ugggcucaugcagcuccuc

SEQ ID NO: 2807966 - RNA, 19 nt, Artificial Sequence
  Description of Artificial Sequence: Synthetic oligonucleotide
cuagcacagagagcuuugu

SEQ ID NO: 2807967 - RNA, 19 nt, Artificial Sequence
  Description of Artificial Sequence: Synthetic oligonucleotide
cagacacguuuugguggug

SEQ ID NO: 2807968 - RNA, 19 nt, Artificial Sequence
  Description of Artificial Sequence: Synthetic oligonucleotide
agggaagggaugggcucau

SEQ ID NO: 2807969 - RNA, 19 nt, Artificial Sequence
  Description of Artificial Sequence: Synthetic oligonucleotide
gggcagcuuccuucuccag

SEQ ID NO: 2807970 - RNA, 19 nt, Artificial Sequence
  Description of Artificial Sequence: Synthetic oligonucleotide
gaggcgugucgcuguaauu

SEQ ID NO: 2807971 - RNA, 19 nt, Artificial Sequence
  Description of Artificial Sequence: Synthetic oligonucleotide
caugcagcuccuccaccgu

SEQ ID NO: 2807972 - RNA, 19 nt, Artificial Sequence
  Description of Artificial Sequence: Synthetic oligonucleotide
ggcggccgagcuuccgagc

SEQ ID NO: 2807973 - RNA, 19 nt, Artificial Sequence
  Description of Artificial Sequence: Synthetic oligonucleotide
gugguguggcugguucaca

SEQ ID NO: 2807974 - RNA, 19 nt, Artificial Sequence
  Description of Artificial Sequence: Synthetic oligonucleotide
cgaggguuacacaucccga

SEQ ID NO: 2807975 - RNA, 19 nt, Artificial Sequence
  Description of Artificial Sequence: Synthetic oligonucleotide
gguguggcugguucacagu

SEQ ID NO: 2807976 - RNA, 19 nt, Artificial Sequence
  Description of Artificial Sequence: Synthetic oligonucleotide
ggaggcgugucgcuguaau

SEQ ID NO: 2807977 - RNA, 19 nt, Artificial Sequence
  Description of Artificial Sequence: Synthetic oligonucleotide
ccagggaggcuaggguuag

SEQ ID NO: 2807978 - RNA, 19 nt, Artificial Sequence
  Description of Artificial Sequence: Synthetic oligonucleotide
cguggccacggccuccucc

SEQ ID NO: 2807979 - RNA, 19 nt, Artificial Sequence
  Description of Artificial Sequence: Synthetic oligonucleotide
ggucugugaccuggggaca

SEQ ID NO: 2807980 - RNA, 19 nt, Artificial Sequence
  Description of Artificial Sequence: Synthetic oligonucleotide
ccugaaugaggcacuugcu

SEQ ID NO: 2807981 - RNA, 19 nt, Artificial Sequence
  Description of Artificial Sequence: Synthetic oligonucleotide
cuccaccgugcucuuugaa

SEQ ID NO: 2807982 - RNA, 19 nt, Artificial Sequence
  Description of Artificial Sequence: Synthetic oligonucleotide
cccgacacagucgcagcac

SEQ ID NO: 2807983 - RNA, 19 nt, Artificial Sequence
  Description of Artificial Sequence: Synthetic oligonucleotide
cgugucgcuguaauuccga

SEQ ID NO: 2807984 - RNA, 19 nt, Artificial Sequence
  Description of Artificial Sequence: Synthetic oligonucleotide
acaucccgacacagucgca

SEQ ID NO: 2807985 - RNA, 19 nt, Artificial Sequence
  Description of Artificial Sequence: Synthetic oligonucleotide
cccuggguaaccgccagga

SEQ ID NO: 2807986 - RNA, 19 nt, Artificial Sequence
  Description of Artificial Sequence: Synthetic oligonucleotide
ucccggcggccgagcuucc

SEQ ID NO: 2807987 - RNA, 19 nt, Artificial Sequence
  Description of Artificial Sequence: Synthetic oligonucleotide
cgucccacaggguccccag

SEQ ID NO: 2807988 - RNA, 19 nt, Artificial Sequence
  Description of Artificial Sequence: Synthetic oligonucleotide
cgugcucuuugaaguagga

SEQ ID NO: 2807989 - RNA, 19 nt, Artificial Sequence
  Description of Artificial Sequence: Synthetic oligonucleotide
ccccaggcacagcaugcac

SEQ ID NO: 2807990 - RNA, 19 nt, Artificial Sequence
  Description of Artificial Sequence: Synthetic oligonucleotide
cagggaaggagacgauguu

SEQ ID NO: 2807991 - RNA, 19 nt, Artificial Sequence
  Description of Artificial Sequence: Synthetic oligonucleotide
cgacacagucgcagcacuc

SEQ ID NO: 2807992 - RNA, 19 nt, Artificial Sequence
  Description of Artificial Sequence: Synthetic oligonucleotide
ccccuggguaaccgccagg

SEQ ID NO: 2807993 - RNA, 19 nt, Artificial Sequence
  Description of Artificial Sequence: Synthetic oligonucleotide
aggaggcgugucgcuguaa

SEQ ID NO: 2807994 - RNA, 19 nt, Artificial Sequence
  Description of Artificial Sequence: Synthetic oligonucleotide
gcacuugcucacaucgcua

SEQ ID NO: 2807995 - RNA, 19 nt, Artificial Sequence
  Description of Artificial Sequence: Synthetic oligonucleotide
caggguccccaggcacagc

SEQ ID NO: 2807996 - RNA, 19 nt, Artificial Sequence
  Description of Artificial Sequence: Synthetic oligonucleotide
cuuacagcaggggcagcuu

SEQ ID NO: 2807997 - RNA, 19 nt, Artificial Sequence
  Description of Artificial Sequence: Synthetic oligonucleotide
cuccucccggcggccgagc

SEQ ID NO: 2807998 - RNA, 19 nt, Artificial Sequence
  Description of Artificial Sequence: Synthetic oligonucleotide
ccuuacagcaggggcagcu

SEQ ID NO: 2807999 - RNA, 19 nt, Artificial Sequence
  Description of Artificial Sequence: Synthetic oligonucleotide
ccgccaggaagcguggcca

SEQ ID NO: 2808000 - RNA, 19 nt, Artificial Sequence
  Description of Artificial Sequence: Synthetic oligonucleotide
gguaaccgccaggaagcgu

SEQ ID NO: 2808001 - RNA, 19 nt, Artificial Sequence
  Description of Artificial Sequence: Synthetic oligonucleotide
ggccuccucccggcggccg

SEQ ID NO: 2808002 - RNA, 19 nt, Artificial Sequence
  Description of Artificial Sequence: Synthetic oligonucleotide
ggccggcacuggcagagcu

SEQ ID NO: 2808003 - RNA, 19 nt, Artificial Sequence
  Description of Artificial Sequence: Synthetic oligonucleotide
ccacggccuccucccggcg

SEQ ID NO: 2808004 - RNA, 19 nt, Artificial Sequence
  Description of Artificial Sequence: Synthetic oligonucleotide
ccuccaccgugcucuuuga

SEQ ID NO: 2808005 - RNA, 19 nt, Artificial Sequence
  Description of Artificial Sequence: Synthetic oligonucleotide
cggcggccgagcuuccgag

SEQ ID NO: 2808006 - RNA, 19 nt, Artificial Sequence
  Description of Artificial Sequence: Synthetic oligonucleotide
gccggcacuggcagagcuc

SEQ ID NO: 2808007 - RNA, 19 nt, Artificial Sequence
  Description of Artificial Sequence: Synthetic oligonucleotide
ccgagcuuccgagcagcuc

SEQ ID NO: 2808008 - RNA, 19 nt, Artificial Sequence
  Description of Artificial Sequence: Synthetic oligonucleotide
cgccaggaagcguggccac

SEQ ID NO: 2808009 - RNA, 19 nt, Artificial Sequence
  Description of Artificial Sequence: Synthetic oligonucleotide
cgacuucaugguucuucga

SEQ ID NO: 2808010 - RNA, 19 nt, Artificial Sequence
  Description of Artificial Sequence: Synthetic oligonucleotide
ccuggguaaccgccaggaa

SEQ ID NO: 2808011 - RNA, 19 nt, Artificial Sequence
  Description of Artificial Sequence: Synthetic oligonucleotide
ccgacacagucgcagcacu

SEQ ID NO: 2808012 - RNA, 19 nt, Artificial Sequence
  Description of Artificial Sequence: Synthetic oligonucleotide
ccuucuccaggccggcacu

SEQ ID NO: 2808013 - RNA, 19 nt, Artificial Sequence
  Description of Artificial Sequence: Synthetic oligonucleotide
gccuccucccggcggccga

SEQ ID NO: 2808014 - RNA, 19 nt, Artificial Sequence
  Description of Artificial Sequence: Synthetic oligonucleotide
cggccgagcuuccgagcag

SEQ ID NO: 2808015 - RNA, 19 nt, Artificial Sequence
  Description of Artificial Sequence: Synthetic oligonucleotide
ccggcggccgagcuuccga

SEQ ID NO: 2808016 - RNA, 19 nt, Artificial Sequence
  Description of Artificial Sequence: Synthetic oligonucleotide
ccuccucccggcggccgag

SEQ ID NO: 2808017 - RNA, 19 nt, Artificial Sequence
  Description of Artificial Sequence: Synthetic oligonucleotide
cgcuguaauuccgaggguu

SEQ ID NO: 2808018 - RNA, 19 nt, Artificial Sequence
  Description of Artificial Sequence: Synthetic oligonucleotide
ggcacagcaugcacuccuu

SEQ ID NO: 2808019 - RNA, 19 nt, Artificial Sequence
  Description of Artificial Sequence: Synthetic oligonucleotide
gcuccugaaugaggcacuu

SEQ ID NO: 2808020 - RNA, 19 nt, Artificial Sequence
  Description of Artificial Sequence: Synthetic oligonucleotide
ccaggccggcacuggcaga

SEQ ID NO: 2808021 - RNA, 19 nt, Artificial Sequence
  Description of Artificial Sequence: Synthetic oligonucleotide
gccgagcuuccgagcagcu

SEQ ID NO: 2808022 - RNA, 19 nt, Artificial Sequence
  Description of Artificial Sequence: Synthetic oligonucleotide
cgcuagcacagagagcuuu

SEQ ID NO: 2808023 - RNA, 19 nt, Artificial Sequence
  Description of Artificial Sequence: Synthetic oligonucleotide
ccucugccacagggaagga

SEQ ID NO: 2808024 - RNA, 19 nt, Artificial Sequence
  Description of Artificial Sequence: Synthetic oligonucleotide
ccccucugugagggcucug

SEQ ID NO: 2808025 - RNA, 19 nt, Artificial Sequence
  Description of Artificial Sequence: Synthetic oligonucleotide
ggguccccaggcacagcau

SEQ ID NO: 2808026 - RNA, 19 nt, Artificial Sequence
  Description of Artificial Sequence: Synthetic oligonucleotide
gcguggccacggccuccuc

SEQ ID NO: 2808027 - RNA, 19 nt, Artificial Sequence
  Description of Artificial Sequence: Synthetic oligonucleotide
ggacgacuucaugguucuu

SEQ ID NO: 2808028 - RNA, 19 nt, Artificial Sequence
  Description of Artificial Sequence: Synthetic oligonucleotide
cuccuccaccgugcucuuu

SEQ ID NO: 2808029 - RNA, 19 nt, Artificial Sequence
  Description of Artificial Sequence: Synthetic oligonucleotide
cggccuccucccggcggcc

SEQ ID NO: 2808030 - RNA, 19 nt, Artificial Sequence
  Description of Artificial Sequence: Synthetic oligonucleotide
ccucccggcggccgagcuu

SEQ ID NO: 2808031 - RNA, 19 nt, Artificial Sequence
  Description of Artificial Sequence: Synthetic oligonucleotide
cggcacuggcagagcuccu

SEQ ID NO: 2808032 - RNA, 19 nt, Artificial Sequence
  Description of Artificial Sequence: Synthetic oligonucleotide
aaggauaccacagagaggg

SEQ ID NO: 2808033 - RNA, 19 nt, Artificial Sequence
  Description of Artificial Sequence: Synthetic oligonucleotide
gaaaggauaccacagagag

SEQ ID NO: 2808034 - RNA, 19 nt, Artificial Sequence
  Description of Artificial Sequence: Synthetic oligonucleotide
uguacuuguccccacagcg

SEQ ID NO: 2808035 - RNA, 19 nt, Artificial Sequence
  Description of Artificial Sequence: Synthetic oligonucleotide
uuugacaucccuaggaaag

SEQ ID NO: 2808036 - RNA, 19 nt, Artificial Sequence
  Description of Artificial Sequence: Synthetic oligonucleotide
augaauuuauuguagucac

SEQ ID NO: 2808037 - RNA, 19 nt, Artificial Sequence
  Description of Artificial Sequence: Synthetic oligonucleotide
aaagacggagcacuagagc

SEQ ID NO: 2808038 - RNA, 19 nt, Artificial Sequence
  Description of Artificial Sequence: Synthetic oligonucleotide
uuuauuguagucacacucc

SEQ ID NO: 2808039 - RNA, 19 nt, Artificial Sequence
  Description of Artificial Sequence: Synthetic oligonucleotide
auuguagucacacucccgg

SEQ ID NO: 2808040 - RNA, 19 nt, Artificial Sequence
  Description of Artificial Sequence: Synthetic oligonucleotide
acuacuuugacaucccuag

SEQ ID NO: 2808041 - RNA, 19 nt, Artificial Sequence
  Description of Artificial Sequence: Synthetic oligonucleotide
aacacucaugaauuuauug

SEQ ID NO: 2808042 - RNA, 19 nt, Artificial Sequence
  Description of Artificial Sequence: Synthetic oligonucleotide
aagacggagcacuagagca

SEQ ID NO: 2808043 - RNA, 19 nt, Artificial Sequence
  Description of Artificial Sequence: Synthetic oligonucleotide
acagaucuuguacuugucc

SEQ ID NO: 2808044 - RNA, 19 nt, Artificial Sequence
  Description of Artificial Sequence: Synthetic oligonucleotide
uguggcuacacacucagga

SEQ ID NO: 2808045 - RNA, 19 nt, Artificial Sequence
  Description of Artificial Sequence: Synthetic oligonucleotide
aaagcuucuacugugcaug

SEQ ID NO: 2808046 - RNA, 19 nt, Artificial Sequence
  Description of Artificial Sequence: Synthetic oligonucleotide
acccuucuggaucagaggc

SEQ ID NO: 2808047 - RNA, 19 nt, Artificial Sequence
  Description of Artificial Sequence: Synthetic oligonucleotide
agaucuuguacuugucccc

SEQ ID NO: 2808048 - RNA, 19 nt, Artificial Sequence
  Description of Artificial Sequence: Synthetic oligonucleotide
uggcaguagagacagaggc

SEQ ID NO: 2808049 - RNA, 19 nt, Artificial Sequence
  Description of Artificial Sequence: Synthetic oligonucleotide
aauggcauacccuucugga

SEQ ID NO: 2808050 - RNA, 19 nt, Artificial Sequence
  Description of Artificial Sequence: Synthetic oligonucleotide
gaauuuauuguagucacac

SEQ ID NO: 2808051 - RNA, 19 nt, Artificial Sequence
  Description of Artificial Sequence: Synthetic oligonucleotide
uuauuguagucacacuccc

SEQ ID NO: 2808052 - RNA, 19 nt, Artificial Sequence
  Description of Artificial Sequence: Synthetic oligonucleotide
acacucaugaauuuauugu

SEQ ID NO: 2808053 - RNA, 19 nt, Artificial Sequence
  Description of Artificial Sequence: Synthetic oligonucleotide
uacuuugacaucccuagga

SEQ ID NO: 2808054 - RNA, 19 nt, Artificial Sequence
  Description of Artificial Sequence: Synthetic oligonucleotide
uggaucagaggcuacuggg

SEQ ID NO: 2808055 - RNA, 19 nt, Artificial Sequence
  Description of Artificial Sequence: Synthetic oligonucleotide
ucuacugugcaugaguagc

SEQ ID NO: 2808056 - RNA, 19 nt, Artificial Sequence
  Description of Artificial Sequence: Synthetic oligonucleotide
uuugaaguacucguggcag

SEQ ID NO: 2808057 - RNA, 19 nt, Artificial Sequence
  Description of Artificial Sequence: Synthetic oligonucleotide
acuagagcagacccugacc

SEQ ID NO: 2808058 - RNA, 19 nt, Artificial Sequence
  Description of Artificial Sequence: Synthetic oligonucleotide
cuuguugguauccagaaca

SEQ ID NO: 2808059 - RNA, 19 nt, Artificial Sequence
  Description of Artificial Sequence: Synthetic oligonucleotide
aauuuauuguagucacacu

SEQ ID NO: 2808060 - RNA, 19 nt, Artificial Sequence
  Description of Artificial Sequence: Synthetic oligonucleotide
guauccagaacacucauga

SEQ ID NO: 2808061 - RNA, 19 nt, Artificial Sequence
  Description of Artificial Sequence: Synthetic oligonucleotide
uauuguagucacacucccg

SEQ ID NO: 2808062 - RNA, 19 nt, Artificial Sequence
  Description of Artificial Sequence: Synthetic oligonucleotide
ugaaaggauaccacagaga

SEQ ID NO: 2808063 - RNA, 19 nt, Artificial Sequence
  Description of Artificial Sequence: Synthetic oligonucleotide
uccagaacacucaugaauu

SEQ ID NO: 2808064 - RNA, 19 nt, Artificial Sequence
  Description of Artificial Sequence: Synthetic oligonucleotide
cagaucuuguacuuguccc

SEQ ID NO: 2808065 - RNA, 19 nt, Artificial Sequence
  Description of Artificial Sequence: Synthetic oligonucleotide
uaggaaagcuucuacugug

SEQ ID NO: 2808066 - RNA, 19 nt, Artificial Sequence
  Description of Artificial Sequence: Synthetic oligonucleotide
cugaaaggauaccacagag

SEQ ID NO: 2808067 - RNA, 19 nt, Artificial Sequence
  Description of Artificial Sequence: Synthetic oligonucleotide
ugaccuuccagaauggcau

SEQ ID NO: 2808068 - RNA, 19 nt, Artificial Sequence
  Description of Artificial Sequence: Synthetic oligonucleotide
ucagggacaaagacggagc

SEQ ID NO: 2808069 - RNA, 19 nt, Artificial Sequence
  Description of Artificial Sequence: Synthetic oligonucleotide
ucuuugaaguacucguggc

SEQ ID NO: 2808070 - RNA, 19 nt, Artificial Sequence
  Description of Artificial Sequence: Synthetic oligonucleotide
ucaugaauuuauuguaguc

SEQ ID NO: 2808071 - RNA, 19 nt, Artificial Sequence
  Description of Artificial Sequence: Synthetic oligonucleotide
ucacucgggguccaagugg

SEQ ID NO: 2808072 - RNA, 19 nt, Artificial Sequence
  Description of Artificial Sequence: Synthetic oligonucleotide
gaauggcauacccuucugg

SEQ ID NO: 2808073 - RNA, 19 nt, Artificial Sequence
  Description of Artificial Sequence: Synthetic oligonucleotide
uguuccaccccucacuacu

SEQ ID NO: 2808074 - RNA, 19 nt, Artificial Sequence
  Description of Artificial Sequence: Synthetic oligonucleotide
cacagagaggguaggaagg

SEQ ID NO: 2808075 - RNA, 19 nt, Artificial Sequence
  Description of Artificial Sequence: Synthetic oligonucleotide
cacgauggcagcuacugcc

SEQ ID NO: 2808076 - RNA, 19 nt, Artificial Sequence
  Description of Artificial Sequence: Synthetic oligonucleotide
cauacuccugguaagggug

SEQ ID NO: 2808077 - RNA, 19 nt, Artificial Sequence
  Description of Artificial Sequence: Synthetic oligonucleotide
guaagggugcacacgaugg

SEQ ID NO: 2808078 - RNA, 19 nt, Artificial Sequence
  Description of Artificial Sequence: Synthetic oligonucleotide
gauaccacagagaggguag

SEQ ID NO: 2808079 - RNA, 19 nt, Artificial Sequence
  Description of Artificial Sequence: Synthetic oligonucleotide
uacuuguccccacagcgcc

SEQ ID NO: 2808080 - RNA, 19 nt, Artificial Sequence
  Description of Artificial Sequence: Synthetic oligonucleotide
gacugaaaggauaccacag

SEQ ID NO: 2808081 - RNA, 19 nt, Artificial Sequence
  Description of Artificial Sequence: Synthetic oligonucleotide
uugguauccagaacacuca

SEQ ID NO: 2808082 - RNA, 19 nt, Artificial Sequence
  Description of Artificial Sequence: Synthetic oligonucleotide
gaaggguguggcuacacac

SEQ ID NO: 2808083 - RNA, 19 nt, Artificial Sequence
  Description of Artificial Sequence: Synthetic oligonucleotide
ugacagaucuuguacuugu

SEQ ID NO: 2808084 - RNA, 19 nt, Artificial Sequence
  Description of Artificial Sequence: Synthetic oligonucleotide
uagcacaucagggaccugg

SEQ ID NO: 2808085 - RNA, 19 nt, Artificial Sequence
  Description of Artificial Sequence: Synthetic oligonucleotide
auccagaacacucaugaau

SEQ ID NO: 2808086 - RNA, 19 nt, Artificial Sequence
  Description of Artificial Sequence: Synthetic oligonucleotide
ugaauuuauuguagucaca

SEQ ID NO: 2808087 - RNA, 19 nt, Artificial Sequence
  Description of Artificial Sequence: Synthetic oligonucleotide
aaguccaccucgcaguccu

SEQ ID NO: 2808088 - RNA, 19 nt, Artificial Sequence
  Description of Artificial Sequence: Synthetic oligonucleotide
ugugcaugaguagccaggg

SEQ ID NO: 2808089 - RNA, 19 nt, Artificial Sequence
  Description of Artificial Sequence: Synthetic oligonucleotide
ugcaugaguagccaggguu

SEQ ID NO: 2808090 - RNA, 19 nt, Artificial Sequence
  Description of Artificial Sequence: Synthetic oligonucleotide
acucccggaacucacucgg

SEQ ID NO: 2808091 - RNA, 19 nt, Artificial Sequence
  Description of Artificial Sequence: Synthetic oligonucleotide
acaaagacggagcacuaga

SEQ ID NO: 2808092 - RNA, 19 nt, Artificial Sequence
  Description of Artificial Sequence: Synthetic oligonucleotide
caugaauuuauuguaguca

SEQ ID NO: 2808093 - RNA, 19 nt, Artificial Sequence
  Description of Artificial Sequence: Synthetic oligonucleotide
aaaggauaccacagagagg

SEQ ID NO: 2808094 - RNA, 19 nt, Artificial Sequence
  Description of Artificial Sequence: Synthetic oligonucleotide
uccagaauggcauacccuu

SEQ ID NO: 2808095 - RNA, 19 nt, Artificial Sequence
  Description of Artificial Sequence: Synthetic oligonucleotide
ugaguagccaggguuagca

SEQ ID NO: 2808096 - RNA, 19 nt, Artificial Sequence
  Description of Artificial Sequence: Synthetic oligonucleotide
acccugaccuuccagaaug

SEQ ID NO: 2808097 - RNA, 19 nt, Artificial Sequence
  Description of Artificial Sequence: Synthetic oligonucleotide
acaucagggaccuggcaag

SEQ ID NO: 2808098 - RNA, 19 nt, Artificial Sequence
  Description of Artificial Sequence: Synthetic oligonucleotide
acugaaaggauaccacaga

SEQ ID NO: 2808099 - RNA, 19 nt, Artificial Sequence
  Description of Artificial Sequence: Synthetic oligonucleotide
cuugagcuccgacugacag

SEQ ID NO: 2808100 - RNA, 19 nt, Artificial Sequence
  Description of Artificial Sequence: Synthetic oligonucleotide
guugguauccagaacacuc

SEQ ID NO: 2808101 - RNA, 19 nt, Artificial Sequence
  Description of Artificial Sequence: Synthetic oligonucleotide
ucaccucagggacaaagac

SEQ ID NO: 2808102 - RNA, 19 nt, Artificial Sequence
  Description of Artificial Sequence: Synthetic oligonucleotide
agcuccgacugacagaucu

SEQ ID NO: 2808103 - RNA, 19 nt, Artificial Sequence
  Description of Artificial Sequence: Synthetic oligonucleotide
aaguacucguggcaguaga

SEQ ID NO: 2808104 - RNA, 19 nt, Artificial Sequence
  Description of Artificial Sequence: Synthetic oligonucleotide
uacucguggcaguagagac

SEQ ID NO: 2808105 - RNA, 19 nt, Artificial Sequence
  Description of Artificial Sequence: Synthetic oligonucleotide
caccucagggacaaagacg

SEQ ID NO: 2808106 - RNA, 19 nt, Artificial Sequence
  Description of Artificial Sequence: Synthetic oligonucleotide
aguagagacagaggcuggc

SEQ ID NO: 2808107 - RNA, 19 nt, Artificial Sequence
  Description of Artificial Sequence: Synthetic oligonucleotide
caaagacggagcacuagag

SEQ ID NO: 2808108 - RNA, 19 nt, Artificial Sequence
  Description of Artificial Sequence: Synthetic oligonucleotide
agagacagaggcuggcaag

SEQ ID NO: 2808109 - RNA, 19 nt, Artificial Sequence
  Description of Artificial Sequence: Synthetic oligonucleotide
gaucaccucagggacaaag

SEQ ID NO: 2808110 - RNA, 19 nt, Artificial Sequence
  Description of Artificial Sequence: Synthetic oligonucleotide
uguagucacacucccggaa

SEQ ID NO: 2808111 - RNA, 19 nt, Artificial Sequence
  Description of Artificial Sequence: Synthetic oligonucleotide
aggguuagcacaucaggga

SEQ ID NO: 2808112 - RNA, 19 nt, Artificial Sequence
  Description of Artificial Sequence: Synthetic oligonucleotide
cugugcaugaguagccagg

SEQ ID NO: 2808113 - RNA, 19 nt, Artificial Sequence
  Description of Artificial Sequence: Synthetic oligonucleotide
aguagccaggguuagcaca

SEQ ID NO: 2808114 - RNA, 19 nt, Artificial Sequence
  Description of Artificial Sequence: Synthetic oligonucleotide
uggcauacccuucuggauc

SEQ ID NO: 2808115 - RNA, 19 nt, Artificial Sequence
  Description of Artificial Sequence: Synthetic oligonucleotide
acucaugaauuuauuguag

SEQ ID NO: 2808116 - RNA, 19 nt, Artificial Sequence
  Description of Artificial Sequence: Synthetic oligonucleotide
cacguacuccccaaagucc

SEQ ID NO: 2808117 - RNA, 19 nt, Artificial Sequence
  Description of Artificial Sequence: Synthetic oligonucleotide
cuacugugcaugaguagcc

SEQ ID NO: 2808118 - RNA, 19 nt, Artificial Sequence
  Description of Artificial Sequence: Synthetic oligonucleotide
uucuacugugcaugaguag

SEQ ID NO: 2808119 - RNA, 19 nt, Artificial Sequence
  Description of Artificial Sequence: Synthetic oligonucleotide
uaagggugcacacgauggc

SEQ ID NO: 2808120 - RNA, 19 nt, Artificial Sequence
  Description of Artificial Sequence: Synthetic oligonucleotide
aaaguccaccucgcagucc

SEQ ID NO: 2808121 - RNA, 19 nt, Artificial Sequence
  Description of Artificial Sequence: Synthetic oligonucleotide
uggcuacacacucaggauc

SEQ ID NO: 2808122 - RNA, 19 nt, Artificial Sequence
  Description of Artificial Sequence: Synthetic oligonucleotide
ugagcuccgacugacagau

SEQ ID NO: 2808123 - RNA, 19 nt, Artificial Sequence
  Description of Artificial Sequence: Synthetic oligonucleotide
uccuuguugguauccagaa

SEQ ID NO: 2808124 - RNA, 19 nt, Artificial Sequence
  Description of Artificial Sequence: Synthetic oligonucleotide
acuuugacaucccuaggaa

SEQ ID NO: 2808125 - RNA, 19 nt, Artificial Sequence
  Description of Artificial Sequence: Synthetic oligonucleotide
uacccuucuggaucagagg

SEQ ID NO: 2808126 - RNA, 19 nt, Artificial Sequence
  Description of Artificial Sequence: Synthetic oligonucleotide
ggagcacuagagcagaccc

SEQ ID NO: 2808127 - RNA, 19 nt, Artificial Sequence
  Description of Artificial Sequence: Synthetic oligonucleotide
aggaaagcuucuacugugc

SEQ ID NO: 2808128 - RNA, 19 nt, Artificial Sequence
  Description of Artificial Sequence: Synthetic oligonucleotide
cucaggaucaccucaggga

SEQ ID NO: 2808129 - RNA, 19 nt, Artificial Sequence
  Description of Artificial Sequence: Synthetic oligonucleotide
acacgauggcagcuacugc

SEQ ID NO: 2808130 - RNA, 19 nt, Artificial Sequence
  Description of Artificial Sequence: Synthetic oligonucleotide
cucguggcaguagagacag

SEQ ID NO: 2808131 - RNA, 19 nt, Artificial Sequence
  Description of Artificial Sequence: Synthetic oligonucleotide
acagaggcuggcaagcgcg

SEQ ID NO: 2808132 - RNA, 19 nt, Artificial Sequence
  Description of Artificial Sequence: Synthetic oligonucleotide
acaucccuaggaaagcuuc

SEQ ID NO: 2808133 - RNA, 19 nt, Artificial Sequence
  Description of Artificial Sequence: Synthetic oligonucleotide
acugugcaugaguagccag

SEQ ID NO: 2808134 - RNA, 19 nt, Artificial Sequence
  Description of Artificial Sequence: Synthetic oligonucleotide
uacugccugcuccaggggc

SEQ ID NO: 2808135 - RNA, 19 nt, Artificial Sequence
  Description of Artificial Sequence: Synthetic oligonucleotide
cucagggacaaagacggag

SEQ ID NO: 2808136 - RNA, 19 nt, Artificial Sequence
  Description of Artificial Sequence: Synthetic oligonucleotide
gcuacugccugcuccaggg

SEQ ID NO: 2808137 - RNA, 19 nt, Artificial Sequence
  Description of Artificial Sequence: Synthetic oligonucleotide
cacucgggguccaaguggg

SEQ ID NO: 2808138 - RNA, 19 nt, Artificial Sequence
  Description of Artificial Sequence: Synthetic oligonucleotide
agcgcgcgcacguacuccc

SEQ ID NO: 2808139 - RNA, 19 nt, Artificial Sequence
  Description of Artificial Sequence: Synthetic oligonucleotide
acagcgcccagcauacucc

SEQ ID NO: 2808140 - RNA, 19 nt, Artificial Sequence
  Description of Artificial Sequence: Synthetic oligonucleotide
accucgcaguccuuguugg

SEQ ID NO: 2808141 - RNA, 19 nt, Artificial Sequence
  Description of Artificial Sequence: Synthetic oligonucleotide
cucacuacuuugacauccc

SEQ ID NO: 2808142 - RNA, 19 nt, Artificial Sequence
  Description of Artificial Sequence: Synthetic oligonucleotide
uagagacagaggcuggcaa

SEQ ID NO: 2808143 - RNA, 19 nt, Artificial Sequence
  Description of Artificial Sequence: Synthetic oligonucleotide
aguccuuguugguauccag

SEQ ID NO: 2808144 - RNA, 19 nt, Artificial Sequence
  Description of Artificial Sequence: Synthetic oligonucleotide
agcuccuugagcuccgacu

SEQ ID NO: 2808145 - RNA, 19 nt, Artificial Sequence
  Description of Artificial Sequence: Synthetic oligonucleotide
uugacaucccuaggaaagc

SEQ ID NO: 2808146 - RNA, 19 nt, Artificial Sequence
  Description of Artificial Sequence: Synthetic oligonucleotide
agaacacucaugaauuuau

SEQ ID NO: 2808147 - RNA, 19 nt, Artificial Sequence
  Description of Artificial Sequence: Synthetic oligonucleotide
acacucccggaacucacuc

SEQ ID NO: 2808148 - RNA, 19 nt, Artificial Sequence
  Description of Artificial Sequence: Synthetic oligonucleotide
agcauacuccugguaaggg

SEQ ID NO: 2808149 - RNA, 19 nt, Artificial Sequence
  Description of Artificial Sequence: Synthetic oligonucleotide
ccuaggaaagcuucuacug

SEQ ID NO: 2808150 - RNA, 19 nt, Artificial Sequence
  Description of Artificial Sequence: Synthetic oligonucleotide
auacccuucuggaucagag

SEQ ID NO: 2808151 - RNA, 19 nt, Artificial Sequence
  Description of Artificial Sequence: Synthetic oligonucleotide
cuacuuugacaucccuagg

SEQ ID NO: 2808152 - RNA, 19 nt, Artificial Sequence
  Description of Artificial Sequence: Synthetic oligonucleotide
gacaaagacggagcacuag

SEQ ID NO: 2808153 - RNA, 19 nt, Artificial Sequence
  Description of Artificial Sequence: Synthetic oligonucleotide
gguguggcuacacacucag

SEQ ID NO: 2808154 - RNA, 19 nt, Artificial Sequence
  Description of Artificial Sequence: Synthetic oligonucleotide
acugacagaucuuguacuu

SEQ ID NO: 2808155 - RNA, 19 nt, Artificial Sequence
  Description of Artificial Sequence: Synthetic oligonucleotide
gaggguaggaagggugugg

SEQ ID NO: 2808156 - RNA, 19 nt, Artificial Sequence
  Description of Artificial Sequence: Synthetic oligonucleotide
auacuccugguaagggugc

SEQ ID NO: 2808157 - RNA, 19 nt, Artificial Sequence
  Description of Artificial Sequence: Synthetic oligonucleotide
aagcuucuacugugcauga

SEQ ID NO: 2808158 - RNA, 19 nt, Artificial Sequence
  Description of Artificial Sequence: Synthetic oligonucleotide
cuuugaaguacucguggca

SEQ ID NO: 2808159 - RNA, 19 nt, Artificial Sequence
  Description of Artificial Sequence: Synthetic oligonucleotide
ucccuaggaaagcuucuac

SEQ ID NO: 2808160 - RNA, 19 nt, Artificial Sequence
  Description of Artificial Sequence: Synthetic oligonucleotide
acacacucaggaucaccuc

SEQ ID NO: 2808161 - RNA, 19 nt, Artificial Sequence
  Description of Artificial Sequence: Synthetic oligonucleotide
guagucacacucccggaac

SEQ ID NO: 2808162 - RNA, 19 nt, Artificial Sequence
  Description of Artificial Sequence: Synthetic oligonucleotide
ucuggaucagaggcuacug

SEQ ID NO: 2808163 - RNA, 19 nt, Artificial Sequence
  Description of Artificial Sequence: Synthetic oligonucleotide
aagugggcagcuccuucug

SEQ ID NO: 2808164 - RNA, 19 nt, Artificial Sequence
  Description of Artificial Sequence: Synthetic oligonucleotide
uagucacacucccggaacu

SEQ ID NO: 2808165 - RNA, 19 nt, Artificial Sequence
  Description of Artificial Sequence: Synthetic oligonucleotide
uugaaguacucguggcagu

SEQ ID NO: 2808166 - RNA, 19 nt, Artificial Sequence
  Description of Artificial Sequence: Synthetic oligonucleotide
gacagaggcuggcaagcgc

SEQ ID NO: 2808167 - RNA, 19 nt, Artificial Sequence
  Description of Artificial Sequence: Synthetic oligonucleotide
agagaggguaggaagggug

SEQ ID NO: 2808168 - RNA, 19 nt, Artificial Sequence
  Description of Artificial Sequence: Synthetic oligonucleotide
cacucaugaauuuauugua

SEQ ID NO: 2808169 - RNA, 19 nt, Artificial Sequence
  Description of Artificial Sequence: Synthetic oligonucleotide
ucgggguccaagugggcag

SEQ ID NO: 2808170 - RNA, 19 nt, Artificial Sequence
  Description of Artificial Sequence: Synthetic oligonucleotide
cacacgauggcagcuacug

SEQ ID NO: 2808171 - RNA, 19 nt, Artificial Sequence
  Description of Artificial Sequence: Synthetic oligonucleotide
agaauggcauacccuucug

SEQ ID NO: 2808172 - RNA, 19 nt, Artificial Sequence
  Description of Artificial Sequence: Synthetic oligonucleotide
gguaagggugcacacgaug

SEQ ID NO: 2808173 - RNA, 19 nt, Artificial Sequence
  Description of Artificial Sequence: Synthetic oligonucleotide
guaggaaggguguggcuac

SEQ ID NO: 2808174 - RNA, 19 nt, Artificial Sequence
  Description of Artificial Sequence: Synthetic oligonucleotide
aagcgcgcgcacguacucc

SEQ ID NO: 2808175 - RNA, 19 nt, Artificial Sequence
  Description of Artificial Sequence: Synthetic oligonucleotide
acugccugcuccaggggcc

SEQ ID NO: 2808176 - RNA, 19 nt, Artificial Sequence
  Description of Artificial Sequence: Synthetic oligonucleotide
ugguauccagaacacucau

SEQ ID NO: 2808177 - RNA, 19 nt, Artificial Sequence
  Description of Artificial Sequence: Synthetic oligonucleotide
ucacuacuuugacaucccu

SEQ ID NO: 2808178 - RNA, 19 nt, Artificial Sequence
  Description of Artificial Sequence: Synthetic oligonucleotide
cugguaagggugcacacga

SEQ ID NO: 2808179 - RNA, 19 nt, Artificial Sequence
  Description of Artificial Sequence: Synthetic oligonucleotide
ugcuccaggggccggguca

SEQ ID NO: 2808180 - RNA, 19 nt, Artificial Sequence
  Description of Artificial Sequence: Synthetic oligonucleotide
uugagcuccgacugacaga

SEQ ID NO: 2808181 - RNA, 19 nt, Artificial Sequence
  Description of Artificial Sequence: Synthetic oligonucleotide
aaggguguggcuacacacu

SEQ ID NO: 2808182 - RNA, 19 nt, Artificial Sequence
  Description of Artificial Sequence: Synthetic oligonucleotide
cugaccuuccagaauggca

SEQ ID NO: 2808183 - RNA, 19 nt, Artificial Sequence
  Description of Artificial Sequence: Synthetic oligonucleotide
uccccaaaguccaccucgc

SEQ ID NO: 2808184 - RNA, 19 nt, Artificial Sequence
  Description of Artificial Sequence: Synthetic oligonucleotide
agucuuugaaguacucgug

SEQ ID NO: 2808185 - RNA, 19 nt, Artificial Sequence
  Description of Artificial Sequence: Synthetic oligonucleotide
aucagggaccuggcaagcc

SEQ ID NO: 2808186 - RNA, 19 nt, Artificial Sequence
  Description of Artificial Sequence: Synthetic oligonucleotide
gacugacagaucuuguacu

SEQ ID NO: 2808187 - RNA, 19 nt, Artificial Sequence
  Description of Artificial Sequence: Synthetic oligonucleotide
ucacacucccggaacucac

SEQ ID NO: 2808188 - RNA, 19 nt, Artificial Sequence
  Description of Artificial Sequence: Synthetic oligonucleotide
gaucuuguacuugucccca

SEQ ID NO: 2808189 - RNA, 19 nt, Artificial Sequence
  Description of Artificial Sequence: Synthetic oligonucleotide
agcacaucagggaccuggc

SEQ ID NO: 2808190 - RNA, 19 nt, Artificial Sequence
  Description of Artificial Sequence: Synthetic oligonucleotide
ugcacacgauggcagcuac

SEQ ID NO: 2808191 - RNA, 19 nt, Artificial Sequence
  Description of Artificial Sequence: Synthetic oligonucleotide
gaaguacucguggcaguag

SEQ ID NO: 2808192 - RNA, 19 nt, Artificial Sequence
  Description of Artificial Sequence: Synthetic oligonucleotide
uguugguauccagaacacu

SEQ ID NO: 2808193 - RNA, 19 nt, Artificial Sequence
  Description of Artificial Sequence: Synthetic oligonucleotide
cuagagcagacccugaccu

SEQ ID NO: 2808194 - RNA, 19 nt, Artificial Sequence
  Description of Artificial Sequence: Synthetic oligonucleotide
uccaccccucacuacuuug

SEQ ID NO: 2808195 - RNA, 19 nt, Artificial Sequence
  Description of Artificial Sequence: Synthetic oligonucleotide
uacuccccaaaguccaccu

SEQ ID NO: 2808196 - RNA, 19 nt, Artificial Sequence
  Description of Artificial Sequence: Synthetic oligonucleotide
agggacaaagacggagcac

SEQ ID NO: 2808197 - RNA, 19 nt, Artificial Sequence
  Description of Artificial Sequence: Synthetic oligonucleotide
ugacaucccuaggaaagcu

SEQ ID NO: 2808198 - RNA, 19 nt, Artificial Sequence
  Description of Artificial Sequence: Synthetic oligonucleotide
acucacucgggguccaagu

SEQ ID NO: 2808199 - RNA, 19 nt, Artificial Sequence
  Description of Artificial Sequence: Synthetic oligonucleotide
aacucacucgggguccaag

SEQ ID NO: 2808200 - RNA, 19 nt, Artificial Sequence
  Description of Artificial Sequence: Synthetic oligonucleotide
uccgacugacagaucuugu

SEQ ID NO: 2808201 - RNA, 19 nt, Artificial Sequence
  Description of Artificial Sequence: Synthetic oligonucleotide
uucuggaucagaggcuacu

SEQ ID NO: 2808202 - RNA, 19 nt, Artificial Sequence
  Description of Artificial Sequence: Synthetic oligonucleotide
ugaaguacucguggcagua

SEQ ID NO: 2808203 - RNA, 19 nt, Artificial Sequence
  Description of Artificial Sequence: Synthetic oligonucleotide
augaguagccaggguuagc

SEQ ID NO: 2808204 - RNA, 19 nt, Artificial Sequence
  Description of Artificial Sequence: Synthetic oligonucleotide
cagcauacuccugguaagg

SEQ ID NO: 2808205 - RNA, 19 nt, Artificial Sequence
  Description of Artificial Sequence: Synthetic oligonucleotide
gcagucuuugaaguacucg

SEQ ID NO: 2808206 - RNA, 19 nt, Artificial Sequence
  Description of Artificial Sequence: Synthetic oligonucleotide
ggaucagaggcuacugggg

SEQ ID NO: 2808207 - RNA, 19 nt, Artificial Sequence
  Description of Artificial Sequence: Synthetic oligonucleotide
cagucuuugaaguacucgu

SEQ ID NO: 2808208 - RNA, 19 nt, Artificial Sequence
  Description of Artificial Sequence: Synthetic oligonucleotide
cacuagagcagacccugac

SEQ ID NO: 2808209 - RNA, 19 nt, Artificial Sequence
  Description of Artificial Sequence: Synthetic oligonucleotide
cuuugacaucccuaggaaa

SEQ ID NO: 2808210 - RNA, 19 nt, Artificial Sequence
  Description of Artificial Sequence: Synthetic oligonucleotide
gcuccuugagcuccgacug

SEQ ID NO: 2808211 - RNA, 19 nt, Artificial Sequence
  Description of Artificial Sequence: Synthetic oligonucleotide
agucacacucccggaacuc

SEQ ID NO: 2808212 - RNA, 19 nt, Artificial Sequence
  Description of Artificial Sequence: Synthetic oligonucleotide
cacacucaggaucaccuca

SEQ ID NO: 2808213 - RNA, 19 nt, Artificial Sequence
  Description of Artificial Sequence: Synthetic oligonucleotide
aguacucguggcaguagag

SEQ ID NO: 2808214 - RNA, 19 nt, Artificial Sequence
  Description of Artificial Sequence: Synthetic oligonucleotide
guggcaguagagacagagg

SEQ ID NO: 2808215 - RNA, 19 nt, Artificial Sequence
  Description of Artificial Sequence: Synthetic oligonucleotide
uacugugcaugaguagcca

SEQ ID NO: 2808216 - RNA, 19 nt, Artificial Sequence
  Description of Artificial Sequence: Synthetic oligonucleotide
ccucacuacuuugacaucc

SEQ ID NO: 2808217 - RNA, 19 nt, Artificial Sequence
  Description of Artificial Sequence: Synthetic oligonucleotide
caugaguagccaggguuag

SEQ ID NO: 2808218 - RNA, 19 nt, Artificial Sequence
  Description of Artificial Sequence: Synthetic oligonucleotide
ggguuagcacaucagggac

SEQ ID NO: 2808219 - RNA, 19 nt, Artificial Sequence
  Description of Artificial Sequence: Synthetic oligonucleotide
cacucccggaacucacucg

SEQ ID NO: 2808220 - RNA, 19 nt, Artificial Sequence
  Description of Artificial Sequence: Synthetic oligonucleotide
auaccacagagaggguagg

SEQ ID NO: 2808221 - RNA, 19 nt, Artificial Sequence
  Description of Artificial Sequence: Synthetic oligonucleotide
cucaugaauuuauuguagu

SEQ ID NO: 2808222 - RNA, 19 nt, Artificial Sequence
  Description of Artificial Sequence: Synthetic oligonucleotide
ucgcaguccuuguugguau

SEQ ID NO: 2808223 - RNA, 19 nt, Artificial Sequence
  Description of Artificial Sequence: Synthetic oligonucleotide
cacaucagggaccuggcaa

SEQ ID NO: 2808224 - RNA, 19 nt, Artificial Sequence
  Description of Artificial Sequence: Synthetic oligonucleotide
agacagaggcuggcaagcg

SEQ ID NO: 2808225 - RNA, 19 nt, Artificial Sequence
  Description of Artificial Sequence: Synthetic oligonucleotide
ggcagcuacugccugcucc

SEQ ID NO: 2808226 - RNA, 19 nt, Artificial Sequence
  Description of Artificial Sequence: Synthetic oligonucleotide
guacuuguccccacagcgc

SEQ ID NO: 2808227 - RNA, 19 nt, Artificial Sequence
  Description of Artificial Sequence: Synthetic oligonucleotide
agacggagcacuagagcag

SEQ ID NO: 2808228 - RNA, 19 nt, Artificial Sequence
  Description of Artificial Sequence: Synthetic oligonucleotide
uccuugagcuccgacugac

SEQ ID NO: 2808229 - RNA, 19 nt, Artificial Sequence
  Description of Artificial Sequence: Synthetic oligonucleotide
acuccccaaaguccaccuc

SEQ ID NO: 2808230 - RNA, 19 nt, Artificial Sequence
  Description of Artificial Sequence: Synthetic oligonucleotide
uccugguaagggugcacac

SEQ ID NO: 2808231 - RNA, 19 nt, Artificial Sequence
  Description of Artificial Sequence: Synthetic oligonucleotide
cucacucgggguccaagug

SEQ ID NO: 2808232 - RNA, 19 nt, Artificial Sequence
  Description of Artificial Sequence: Synthetic oligonucleotide
caagccccgacugaaagga

SEQ ID NO: 2808233 - RNA, 19 nt, Artificial Sequence
  Description of Artificial Sequence: Synthetic oligonucleotide
cagacccugaccuuccaga

SEQ ID NO: 2808234 - RNA, 19 nt, Artificial Sequence
  Description of Artificial Sequence: Synthetic oligonucleotide
gaggcuggcaagcgcgcgc

SEQ ID NO: 2808235 - RNA, 19 nt, Artificial Sequence
  Description of Artificial Sequence: Synthetic oligonucleotide
ggcaagccccgacugaaag

SEQ ID NO: 2808236 - RNA, 19 nt, Artificial Sequence
  Description of Artificial Sequence: Synthetic oligonucleotide
agacccugaccuuccagaa

SEQ ID NO: 2808237 - RNA, 19 nt, Artificial Sequence
  Description of Artificial Sequence: Synthetic oligonucleotide
cugacagaucuuguacuug

SEQ ID NO: 2808238 - RNA, 19 nt, Artificial Sequence
  Description of Artificial Sequence: Synthetic oligonucleotide
agccaggguuagcacauca

SEQ ID NO: 2808239 - RNA, 19 nt, Artificial Sequence
  Description of Artificial Sequence: Synthetic oligonucleotide
acguacuccccaaagucca

SEQ ID NO: 2808240 - RNA, 19 nt, Artificial Sequence
  Description of Artificial Sequence: Synthetic oligonucleotide
gcacguacuccccaaaguc

SEQ ID NO: 2808241 - RNA, 19 nt, Artificial Sequence
  Description of Artificial Sequence: Synthetic oligonucleotide
cacagcgcccagcauacuc

SEQ ID NO: 2808242 - RNA, 19 nt, Artificial Sequence
  Description of Artificial Sequence: Synthetic oligonucleotide
cuaggaaagcuucuacugu

SEQ ID NO: 2808243 - RNA, 19 nt, Artificial Sequence
  Description of Artificial Sequence: Synthetic oligonucleotide
caccucgcaguccuuguug

SEQ ID NO: 2808244 - RNA, 19 nt, Artificial Sequence
  Description of Artificial Sequence: Synthetic oligonucleotide
gaguagccaggguuagcac

SEQ ID NO: 2808245 - RNA, 19 nt, Artificial Sequence
  Description of Artificial Sequence: Synthetic oligonucleotide
accuggcaagccccgacug

SEQ ID NO: 2808246 - RNA, 19 nt, Artificial Sequence
  Description of Artificial Sequence: Synthetic oligonucleotide
gaaagcuucuacugugcau

SEQ ID NO: 2808247 - RNA, 19 nt, Artificial Sequence
  Description of Artificial Sequence: Synthetic oligonucleotide
gcaagccccgacugaaagg

SEQ ID NO: 2808248 - RNA, 19 nt, Artificial Sequence
  Description of Artificial Sequence: Synthetic oligonucleotide
aggaaggguguggcuacac

SEQ ID NO: 2808249 - RNA, 19 nt, Artificial Sequence
  Description of Artificial Sequence: Synthetic oligonucleotide
cuccgacugacagaucuug

SEQ ID NO: 2808250 - RNA, 19 nt, Artificial Sequence
  Description of Artificial Sequence: Synthetic oligonucleotide
cuacuguuccaccccucac

SEQ ID NO: 2808251 - RNA, 19 nt, Artificial Sequence
  Description of Artificial Sequence: Synthetic oligonucleotide
agggugcacacgauggcag

SEQ ID NO: 2808252 - RNA, 19 nt, Artificial Sequence
  Description of Artificial Sequence: Synthetic oligonucleotide
accccucacuacuuugaca

SEQ ID NO: 2808253 - RNA, 19 nt, Artificial Sequence
  Description of Artificial Sequence: Synthetic oligonucleotide
acuuguccccacagcgccc

SEQ ID NO: 2808254 - RNA, 19 nt, Artificial Sequence
  Description of Artificial Sequence: Synthetic oligonucleotide
aucaccucagggacaaaga

SEQ ID NO: 2808255 - RNA, 19 nt, Artificial Sequence
  Description of Artificial Sequence: Synthetic oligonucleotide
gguuagcacaucagggacc

SEQ ID NO: 2808256 - RNA, 19 nt, Artificial Sequence
  Description of Artificial Sequence: Synthetic oligonucleotide
aggaucaccucagggacaa

SEQ ID NO: 2808257 - RNA, 19 nt, Artificial Sequence
  Description of Artificial Sequence: Synthetic oligonucleotide
gcgcccagcauacuccugg

SEQ ID NO: 2808258 - RNA, 19 nt, Artificial Sequence
  Description of Artificial Sequence: Synthetic oligonucleotide
ccagcauacuccugguaag

SEQ ID NO: 2808259 - RNA, 19 nt, Artificial Sequence
  Description of Artificial Sequence: Synthetic oligonucleotide
cccaaaguccaccucgcag

SEQ ID NO: 2808260 - RNA, 19 nt, Artificial Sequence
  Description of Artificial Sequence: Synthetic oligonucleotide
gacggagcacuagagcaga

SEQ ID NO: 2808261 - RNA, 19 nt, Artificial Sequence
  Description of Artificial Sequence: Synthetic oligonucleotide
acuccugguaagggugcac

SEQ ID NO: 2808262 - RNA, 19 nt, Artificial Sequence
  Description of Artificial Sequence: Synthetic oligonucleotide
uccaccucgcaguccuugu

SEQ ID NO: 2808263 - RNA, 19 nt, Artificial Sequence
  Description of Artificial Sequence: Synthetic oligonucleotide
guuagcacaucagggaccu

SEQ ID NO: 2808264 - RNA, 19 nt, Artificial Sequence
  Description of Artificial Sequence: Synthetic oligonucleotide
uaccacagagaggguagga

SEQ ID NO: 2808265 - RNA, 19 nt, Artificial Sequence
  Description of Artificial Sequence: Synthetic oligonucleotide
agaggguaggaagggugug

SEQ ID NO: 2808266 - RNA, 19 nt, Artificial Sequence
  Description of Artificial Sequence: Synthetic oligonucleotide
ggaaagcuucuacugugca

SEQ ID NO: 2808267 - RNA, 19 nt, Artificial Sequence
  Description of Artificial Sequence: Synthetic oligonucleotide
cuacugccugcuccagggg

SEQ ID NO: 2808268 - RNA, 19 nt, Artificial Sequence
  Description of Artificial Sequence: Synthetic oligonucleotide
gacagaucuuguacuuguc

SEQ ID NO: 2808269 - RNA, 19 nt, Artificial Sequence
  Description of Artificial Sequence: Synthetic oligonucleotide
ccgacugaaaggauaccac

SEQ ID NO: 2808270 - RNA, 19 nt, Artificial Sequence
  Description of Artificial Sequence: Synthetic oligonucleotide
cacuacuuugacaucccua

SEQ ID NO: 2808271 - RNA, 19 nt, Artificial Sequence
  Description of Artificial Sequence: Synthetic oligonucleotide
guacuccccaaaguccacc

SEQ ID NO: 2808272 - RNA, 19 nt, Artificial Sequence
  Description of Artificial Sequence: Synthetic oligonucleotide
guacucguggcaguagaga

SEQ ID NO: 2808273 - RNA, 19 nt, Artificial Sequence
  Description of Artificial Sequence: Synthetic oligonucleotide
agaggcuggcaagcgcgcg

SEQ ID NO: 2808274 - RNA, 19 nt, Artificial Sequence
  Description of Artificial Sequence: Synthetic oligonucleotide
cuucuggaucagaggcuac

SEQ ID NO: 2808275 - RNA, 19 nt, Artificial Sequence
  Description of Artificial Sequence: Synthetic oligonucleotide
cagggacaaagacggagca

SEQ ID NO: 2808276 - RNA, 19 nt, Artificial Sequence
  Description of Artificial Sequence: Synthetic oligonucleotide
cagaggcuggcaagcgcgc

SEQ ID NO: 2808277 - RNA, 19 nt, Artificial Sequence
  Description of Artificial Sequence: Synthetic oligonucleotide
cucccggaacucacucggg

SEQ ID NO: 2808278 - RNA, 19 nt, Artificial Sequence
  Description of Artificial Sequence: Synthetic oligonucleotide
guagagacagaggcuggca

SEQ ID NO: 2808279 - RNA, 19 nt, Artificial Sequence
  Description of Artificial Sequence: Synthetic oligonucleotide
caucagggaccuggcaagc

SEQ ID NO: 2808280 - RNA, 19 nt, Artificial Sequence
  Description of Artificial Sequence: Synthetic oligonucleotide
ggggcagucuuugaaguac

SEQ ID NO: 2808281 - RNA, 19 nt, Artificial Sequence
  Description of Artificial Sequence: Synthetic oligonucleotide
ugguaagggugcacacgau

SEQ ID NO: 2808282 - RNA, 19 nt, Artificial Sequence
  Description of Artificial Sequence: Synthetic oligonucleotide
guccuuguugguauccaga

SEQ ID NO: 2808283 - RNA, 19 nt, Artificial Sequence
  Description of Artificial Sequence: Synthetic oligonucleotide
acucguggcaguagagaca

SEQ ID NO: 2808284 - RNA, 19 nt, Artificial Sequence
  Description of Artificial Sequence: Synthetic oligonucleotide
agcuucuacugugcaugag

SEQ ID NO: 2808285 - RNA, 19 nt, Artificial Sequence
  Description of Artificial Sequence: Synthetic oligonucleotide
gguauccagaacacucaug

SEQ ID NO: 2808286 - RNA, 19 nt, Artificial Sequence
  Description of Artificial Sequence: Synthetic oligonucleotide
gagcagacccugaccuucc

SEQ ID NO: 2808287 - RNA, 19 nt, Artificial Sequence
  Description of Artificial Sequence: Synthetic oligonucleotide
caccccucacuacuuugac

SEQ ID NO: 2808288 - RNA, 19 nt, Artificial Sequence
  Description of Artificial Sequence: Synthetic oligonucleotide
cguggcaguagagacagag

SEQ ID NO: 2808289 - RNA, 19 nt, Artificial Sequence
  Description of Artificial Sequence: Synthetic oligonucleotide
cagaauggcauacccuucu

SEQ ID NO: 2808290 - RNA, 19 nt, Artificial Sequence
  Description of Artificial Sequence: Synthetic oligonucleotide
uagagcagacccugaccuu

SEQ ID NO: 2808291 - RNA, 19 nt, Artificial Sequence
  Description of Artificial Sequence: Synthetic oligonucleotide
ccugguaagggugcacacg

SEQ ID NO: 2808292 - RNA, 19 nt, Artificial Sequence
  Description of Artificial Sequence: Synthetic oligonucleotide
cgacugacagaucuuguac

SEQ ID NO: 2808293 - RNA, 19 nt, Artificial Sequence
  Description of Artificial Sequence: Synthetic oligonucleotide
gcuucuacugugcaugagu

SEQ ID NO: 2808294 - RNA, 19 nt, Artificial Sequence
  Description of Artificial Sequence: Synthetic oligonucleotide
acgauggcagcuacugccu

SEQ ID NO: 2808295 - RNA, 19 nt, Artificial Sequence
  Description of Artificial Sequence: Synthetic oligonucleotide
uacuccugguaagggugca

SEQ ID NO: 2808296 - RNA, 19 nt, Artificial Sequence
  Description of Artificial Sequence: Synthetic oligonucleotide
gcuacuguuccaccccuca

SEQ ID NO: 2808297 - RNA, 19 nt, Artificial Sequence
  Description of Artificial Sequence: Synthetic oligonucleotide
gguaggaaggguguggcua

SEQ ID NO: 2808298 - RNA, 19 nt, Artificial Sequence
  Description of Artificial Sequence: Synthetic oligonucleotide
guccccacagcgcccagca

SEQ ID NO: 2808299 - RNA, 19 nt, Artificial Sequence
  Description of Artificial Sequence: Synthetic oligonucleotide
cagaacacucaugaauuua

SEQ ID NO: 2808300 - RNA, 19 nt, Artificial Sequence
  Description of Artificial Sequence: Synthetic oligonucleotide
gcagcuacugccugcucca

SEQ ID NO: 2808301 - RNA, 19 nt, Artificial Sequence
  Description of Artificial Sequence: Synthetic oligonucleotide
gagaggguaggaagggugu

SEQ ID NO: 2808302 - RNA, 19 nt, Artificial Sequence
  Description of Artificial Sequence: Synthetic oligonucleotide
uggcaagccccgacugaaa

SEQ ID NO: 2808303 - RNA, 19 nt, Artificial Sequence
  Description of Artificial Sequence: Synthetic oligonucleotide
uuccaccccucacuacuuu

SEQ ID NO: 2808304 - RNA, 19 nt, Artificial Sequence
  Description of Artificial Sequence: Synthetic oligonucleotide
gucacacucccggaacuca

SEQ ID NO: 2808305 - RNA, 19 nt, Artificial Sequence
  Description of Artificial Sequence: Synthetic oligonucleotide
caggaucaccucagggaca

SEQ ID NO: 2808306 - RNA, 19 nt, Artificial Sequence
  Description of Artificial Sequence: Synthetic oligonucleotide
caagugggcagcuccuucu

SEQ ID NO: 2808307 - RNA, 19 nt, Artificial Sequence
  Description of Artificial Sequence: Synthetic oligonucleotide
ggaaggguguggcuacaca

SEQ ID NO: 2808308 - RNA, 19 nt, Artificial Sequence
  Description of Artificial Sequence: Synthetic oligonucleotide
uaggaaggguguggcuaca

SEQ ID NO: 2808309 - RNA, 19 nt, Artificial Sequence
  Description of Artificial Sequence: Synthetic oligonucleotide
cuccugguaagggugcaca

SEQ ID NO: 2808310 - RNA, 19 nt, Artificial Sequence
  Description of Artificial Sequence: Synthetic oligonucleotide
caagcgcgcgcacguacuc

SEQ ID NO: 2808311 - RNA, 19 nt, Artificial Sequence
  Description of Artificial Sequence: Synthetic oligonucleotide
cccacagcgcccagcauac

SEQ ID NO: 2808312 - RNA, 19 nt, Artificial Sequence
  Description of Artificial Sequence: Synthetic oligonucleotide
ccuuguugguauccagaac

SEQ ID NO: 2808313 - RNA, 19 nt, Artificial Sequence
  Description of Artificial Sequence: Synthetic oligonucleotide
uguccccacagcgcccagc

SEQ ID NO: 2808314 - RNA, 19 nt, Artificial Sequence
  Description of Artificial Sequence: Synthetic oligonucleotide
aucccuaggaaagcuucua

SEQ ID NO: 2808315 - RNA, 19 nt, Artificial Sequence
  Description of Artificial Sequence: Synthetic oligonucleotide
gcagacccugaccuuccag

SEQ ID NO: 2808316 - RNA, 19 nt, Artificial Sequence
  Description of Artificial Sequence: Synthetic oligonucleotide
acggagcacuagagcagac

SEQ ID NO: 2808317 - RNA, 19 nt, Artificial Sequence
  Description of Artificial Sequence: Synthetic oligonucleotide
acucgggguccaagugggc

SEQ ID NO: 2808318 - RNA, 19 nt, Artificial Sequence
  Description of Artificial Sequence: Synthetic oligonucleotide
agcagacccugaccuucca

SEQ ID NO: 2808319 - RNA, 19 nt, Artificial Sequence
  Description of Artificial Sequence: Synthetic oligonucleotide
guccaccucgcaguccuug

SEQ ID NO: 2808320 - RNA, 19 nt, Artificial Sequence
  Description of Artificial Sequence: Synthetic oligonucleotide
gggugcacacgauggcagc

SEQ ID NO: 2808321 - RNA, 19 nt, Artificial Sequence
  Description of Artificial Sequence: Synthetic oligonucleotide
guguggcuacacacucagg

SEQ ID NO: 2808322 - RNA, 19 nt, Artificial Sequence
  Description of Artificial Sequence: Synthetic oligonucleotide
cccagcauacuccugguaa

SEQ ID NO: 2808323 - RNA, 19 nt, Artificial Sequence
  Description of Artificial Sequence: Synthetic oligonucleotide
ccagaauggcauacccuuc

SEQ ID NO: 2808324 - RNA, 19 nt, Artificial Sequence
  Description of Artificial Sequence: Synthetic oligonucleotide
cucgggguccaagugggca

SEQ ID NO: 2808325 - RNA, 19 nt, Artificial Sequence
  Description of Artificial Sequence: Synthetic oligonucleotide
ggauaccacagagagggua

SEQ ID NO: 2808326 - RNA, 19 nt, Artificial Sequence
  Description of Artificial Sequence: Synthetic oligonucleotide
gcgcacguacuccccaaag

SEQ ID NO: 2808327 - RNA, 19 nt, Artificial Sequence
  Description of Artificial Sequence: Synthetic oligonucleotide
gcaguccuuguugguaucc

SEQ ID NO: 2808328 - RNA, 19 nt, Artificial Sequence
  Description of Artificial Sequence: Synthetic oligonucleotide
ccaaaguccaccucgcagu

SEQ ID NO: 2808329 - RNA, 19 nt, Artificial Sequence
  Description of Artificial Sequence: Synthetic oligonucleotide
ggcaagcgcgcgcacguac

SEQ ID NO: 2808330 - RNA, 19 nt, Artificial Sequence
  Description of Artificial Sequence: Synthetic oligonucleotide
cuuguccccacagcgccca

SEQ ID NO: 2808331 - RNA, 19 nt, Artificial Sequence
  Description of Artificial Sequence: Synthetic oligonucleotide
ccuuccagaauggcauacc

SEQ ID NO: 2808332 - RNA, 19 nt, Artificial Sequence
  Description of Artificial Sequence: Synthetic oligonucleotide
cugccugcuccaggggccg

SEQ ID NO: 2808333 - RNA, 19 nt, Artificial Sequence
  Description of Artificial Sequence: Synthetic oligonucleotide
gcuggcaagcgcgcgcacg

SEQ ID NO: 2808334 - RNA, 19 nt, Artificial Sequence
  Description of Artificial Sequence: Synthetic oligonucleotide
gccaggguuagcacaucag

SEQ ID NO: 2808335 - RNA, 19 nt, Artificial Sequence
  Description of Artificial Sequence: Synthetic oligonucleotide
guagccaggguuagcacau

SEQ ID NO: 2808336 - RNA, 19 nt, Artificial Sequence
  Description of Artificial Sequence: Synthetic oligonucleotide
uuguccccacagcgcccag

SEQ ID NO: 2808337 - RNA, 19 nt, Artificial Sequence
  Description of Artificial Sequence: Synthetic oligonucleotide
gaccuggcaagccccgacu

SEQ ID NO: 2808338 - RNA, 19 nt, Artificial Sequence
  Description of Artificial Sequence: Synthetic oligonucleotide
cuggcaagccccgacugaa

SEQ ID NO: 2808339 - RNA, 19 nt, Artificial Sequence
  Description of Artificial Sequence: Synthetic oligonucleotide
cccugaccuuccagaaugg

SEQ ID NO: 2808340 - RNA, 19 nt, Artificial Sequence
  Description of Artificial Sequence: Synthetic oligonucleotide
uccaagugggcagcuccuu

SEQ ID NO: 2808341 - RNA, 19 nt, Artificial Sequence
  Description of Artificial Sequence: Synthetic oligonucleotide
gcauacuccugguaagggu

SEQ ID NO: 2808342 - RNA, 19 nt, Artificial Sequence
  Description of Artificial Sequence: Synthetic oligonucleotide
cgacugaaaggauaccaca

SEQ ID NO: 2808343 - RNA, 19 nt, Artificial Sequence
  Description of Artificial Sequence: Synthetic oligonucleotide
uuagcacaucagggaccug

SEQ ID NO: 2808344 - RNA, 19 nt, Artificial Sequence
  Description of Artificial Sequence: Synthetic oligonucleotide
gaacacucaugaauuuauu

SEQ ID NO: 2808345 - RNA, 19 nt, Artificial Sequence
  Description of Artificial Sequence: Synthetic oligonucleotide
cucgcaguccuuguuggua

SEQ ID NO: 2808346 - RNA, 19 nt, Artificial Sequence
  Description of Artificial Sequence: Synthetic oligonucleotide
cauacccuucuggaucaga

SEQ ID NO: 2808347 - RNA, 19 nt, Artificial Sequence
  Description of Artificial Sequence: Synthetic oligonucleotide
ccggaacucacucgggguc

SEQ ID NO: 2808348 - RNA, 19 nt, Artificial Sequence
  Description of Artificial Sequence: Synthetic oligonucleotide
ggaccuggcaagccccgac

SEQ ID NO: 2808349 - RNA, 19 nt, Artificial Sequence
  Description of Artificial Sequence: Synthetic oligonucleotide
ccccucacuacuuugacau

SEQ ID NO: 2808350 - RNA, 19 nt, Artificial Sequence
  Description of Artificial Sequence: Synthetic oligonucleotide
aggcuggcaagcgcgcgca

SEQ ID NO: 2808351 - RNA, 19 nt, Artificial Sequence
  Description of Artificial Sequence: Synthetic oligonucleotide
gccccgacugaaaggauac

SEQ ID NO: 2808352 - RNA, 19 nt, Artificial Sequence
  Description of Artificial Sequence: Synthetic oligonucleotide
agccccgacugaaaggaua

SEQ ID NO: 2808353 - RNA, 19 nt, Artificial Sequence
  Description of Artificial Sequence: Synthetic oligonucleotide
gcaugaguagccaggguua

SEQ ID NO: 2808354 - RNA, 19 nt, Artificial Sequence
  Description of Artificial Sequence: Synthetic oligonucleotide
caggggccgggucauccuc

SEQ ID NO: 2808355 - RNA, 19 nt, Artificial Sequence
  Description of Artificial Sequence: Synthetic oligonucleotide
cccgacugaaaggauacca

SEQ ID NO: 2808356 - RNA, 19 nt, Artificial Sequence
  Description of Artificial Sequence: Synthetic oligonucleotide
caguccuuguugguaucca

SEQ ID NO: 2808357 - RNA, 19 nt, Artificial Sequence
  Description of Artificial Sequence: Synthetic oligonucleotide
ccugaccuuccagaauggc

SEQ ID NO: 2808358 - RNA, 19 nt, Artificial Sequence
  Description of Artificial Sequence: Synthetic oligonucleotide
gagcacuagagcagacccu

SEQ ID NO: 2808359 - RNA, 19 nt, Artificial Sequence
  Description of Artificial Sequence: Synthetic oligonucleotide
ccaagugggcagcuccuuc

SEQ ID NO: 2808360 - RNA, 19 nt, Artificial Sequence
  Description of Artificial Sequence: Synthetic oligonucleotide
ucguggcaguagagacaga

SEQ ID NO: 2808361 - RNA, 19 nt, Artificial Sequence
  Description of Artificial Sequence: Synthetic oligonucleotide
gacccugaccuuccagaau

SEQ ID NO: 2808362 - RNA, 19 nt, Artificial Sequence
  Description of Artificial Sequence: Synthetic oligonucleotide
gacaucccuaggaaagcuu

SEQ ID NO: 2808363 - RNA, 19 nt, Artificial Sequence
  Description of Artificial Sequence: Synthetic oligonucleotide
uggcagcuacugccugcuc

SEQ ID NO: 2808364 - RNA, 19 nt, Artificial Sequence
  Description of Artificial Sequence: Synthetic oligonucleotide
aagccccgacugaaaggau

SEQ ID NO: 2808365 - RNA, 19 nt, Artificial Sequence
  Description of Artificial Sequence: Synthetic oligonucleotide
cuggcaagcgcgcgcacgu

SEQ ID NO: 2808366 - RNA, 19 nt, Artificial Sequence
  Description of Artificial Sequence: Synthetic oligonucleotide
ugccugcuccaggggccgg

SEQ ID NO: 2808367 - RNA, 19 nt, Artificial Sequence
  Description of Artificial Sequence: Synthetic oligonucleotide
ggcaguagagacagaggcu

SEQ ID NO: 2808368 - RNA, 19 nt, Artificial Sequence
  Description of Artificial Sequence: Synthetic oligonucleotide
cagcuacugccugcuccag

SEQ ID NO: 2808369 - RNA, 19 nt, Artificial Sequence
  Description of Artificial Sequence: Synthetic oligonucleotide
aggauaccacagagagggu

SEQ ID NO: 2808370 - RNA, 19 nt, Artificial Sequence
  Description of Artificial Sequence: Synthetic oligonucleotide
ccgacugacagaucuugua

SEQ ID NO: 2808371 - RNA, 19 nt, Artificial Sequence
  Description of Artificial Sequence: Synthetic oligonucleotide
cacacucccggaacucacu

SEQ ID NO: 2808372 - RNA, 19 nt, Artificial Sequence
  Description of Artificial Sequence: Synthetic oligonucleotide
cccuaggaaagcuucuacu

SEQ ID NO: 2808373 - RNA, 19 nt, Artificial Sequence
  Description of Artificial Sequence: Synthetic oligonucleotide
uccccacagcgcccagcau

SEQ ID NO: 2808374 - RNA, 19 nt, Artificial Sequence
  Description of Artificial Sequence: Synthetic oligonucleotide
ccaccccucacuacuuuga

SEQ ID NO: 2808375 - RNA, 19 nt, Artificial Sequence
  Description of Artificial Sequence: Synthetic oligonucleotide
gcacaucagggaccuggca

SEQ ID NO: 2808376 - RNA, 19 nt, Artificial Sequence
  Description of Artificial Sequence: Synthetic oligonucleotide
uagccaggguuagcacauc

SEQ ID NO: 2808377 - RNA, 19 nt, Artificial Sequence
  Description of Artificial Sequence: Synthetic oligonucleotide
aggggccgggucauccuca

SEQ ID NO: 2808378 - RNA, 19 nt, Artificial Sequence
  Description of Artificial Sequence: Synthetic oligonucleotide
gugcaugaguagccagggu

SEQ ID NO: 2808379 - RNA, 19 nt, Artificial Sequence
  Description of Artificial Sequence: Synthetic oligonucleotide
cggagcacuagagcagacc

SEQ ID NO: 2808380 - RNA, 19 nt, Artificial Sequence
  Description of Artificial Sequence: Synthetic oligonucleotide
ccuucuggaucagaggcua

SEQ ID NO: 2808381 - RNA, 19 nt, Artificial Sequence
  Description of Artificial Sequence: Synthetic oligonucleotide
gugcacacgauggcagcua

SEQ ID NO: 2808382 - RNA, 19 nt, Artificial Sequence
  Description of Artificial Sequence: Synthetic oligonucleotide
cggaacucacucggggucc

SEQ ID NO: 2808383 - RNA, 19 nt, Artificial Sequence
  Description of Artificial Sequence: Synthetic oligonucleotide
cguacuccccaaaguccac

SEQ ID NO: 2808384 - RNA, 19 nt, Artificial Sequence
  Description of Artificial Sequence: Synthetic oligonucleotide
ggaacucacucggggucca

SEQ ID NO: 2808385 - RNA, 19 nt, Artificial Sequence
  Description of Artificial Sequence: Synthetic oligonucleotide
gcuacacacucaggaucac

SEQ ID NO: 2808386 - RNA, 19 nt, Artificial Sequence
  Description of Artificial Sequence: Synthetic oligonucleotide
guccaagugggcagcuccu

SEQ ID NO: 2808387 - RNA, 19 nt, Artificial Sequence
  Description of Artificial Sequence: Synthetic oligonucleotide
ggguguggcuacacacuca

SEQ ID NO: 2808388 - RNA, 19 nt, Artificial Sequence
  Description of Artificial Sequence: Synthetic oligonucleotide
ggugcacacgauggcagcu

SEQ ID NO: 2808389 - RNA, 19 nt, Artificial Sequence
  Description of Artificial Sequence: Synthetic oligonucleotide
cccucacuacuuugacauc

SEQ ID NO: 2808390 - RNA, 19 nt, Artificial Sequence
  Description of Artificial Sequence: Synthetic oligonucleotide
gaacucacucgggguccaa

SEQ ID NO: 2808391 - RNA, 19 nt, Artificial Sequence
  Description of Artificial Sequence: Synthetic oligonucleotide
ggggccgggucauccucac

SEQ ID NO: 2808392 - RNA, 19 nt, Artificial Sequence
  Description of Artificial Sequence: Synthetic oligonucleotide
uggcaagcgcgcgcacgua

SEQ ID NO: 2808393 - RNA, 19 nt, Artificial Sequence
  Description of Artificial Sequence: Synthetic oligonucleotide
ccuggcaagccccgacuga

SEQ ID NO: 2808394 - RNA, 19 nt, Artificial Sequence
  Description of Artificial Sequence: Synthetic oligonucleotide
ccuugagcuccgacugaca

SEQ ID NO: 2808395 - RNA, 19 nt, Artificial Sequence
  Description of Artificial Sequence: Synthetic oligonucleotide
ccccacagcgcccagcaua

SEQ ID NO: 2808396 - RNA, 19 nt, Artificial Sequence
  Description of Artificial Sequence: Synthetic oligonucleotide
gcauacccuucuggaucag

SEQ ID NO: 2808397 - RNA, 19 nt, Artificial Sequence
  Description of Artificial Sequence: Synthetic oligonucleotide
ggguaggaaggguguggcu

SEQ ID NO: 2808398 - RNA, 19 nt, Artificial Sequence
  Description of Artificial Sequence: Synthetic oligonucleotide
gggcagucuuugaaguacu

SEQ ID NO: 2808399 - RNA, 19 nt, Artificial Sequence
  Description of Artificial Sequence: Synthetic oligonucleotide
ccccgacugaaaggauacc

SEQ ID NO: 2808400 - RNA, 19 nt, Artificial Sequence
  Description of Artificial Sequence: Synthetic oligonucleotide
ccagaacacucaugaauuu

SEQ ID NO: 2808401 - RNA, 19 nt, Artificial Sequence
  Description of Artificial Sequence: Synthetic oligonucleotide
gagcuccgacugacagauc

SEQ ID NO: 2808402 - RNA, 19 nt, Artificial Sequence
  Description of Artificial Sequence: Synthetic oligonucleotide
cgcaguccuuguugguauc

SEQ ID NO: 2808403 - RNA, 19 nt, Artificial Sequence
  Description of Artificial Sequence: Synthetic oligonucleotide
cccggaacucacucggggu

SEQ ID NO: 2808404 - RNA, 19 nt, Artificial Sequence
  Description of Artificial Sequence: Synthetic oligonucleotide
ggcuggcaagcgcgcgcac

SEQ ID NO: 2808405 - RNA, 19 nt, Artificial Sequence
  Description of Artificial Sequence: Synthetic oligonucleotide
ccucagggacaaagacgga

SEQ ID NO: 2808406 - RNA, 19 nt, Artificial Sequence
  Description of Artificial Sequence: Synthetic oligonucleotide
ccccaaaguccaccucgca

SEQ ID NO: 2808407 - RNA, 19 nt, Artificial Sequence
  Description of Artificial Sequence: Synthetic oligonucleotide
gcaagcgcgcgcacguacu

SEQ ID NO: 2808408 - RNA, 19 nt, Artificial Sequence
  Description of Artificial Sequence: Synthetic oligonucleotide
gcccagcauacuccuggua

SEQ ID NO: 2808409 - RNA, 19 nt, Artificial Sequence
  Description of Artificial Sequence: Synthetic oligonucleotide
cgggguccaagugggcagc

SEQ ID NO: 2808410 - RNA, 19 nt, Artificial Sequence
  Description of Artificial Sequence: Synthetic oligonucleotide
cgcacguacuccccaaagu

SEQ ID NO: 2808411 - RNA, 19 nt, Artificial Sequence
  Description of Artificial Sequence: Synthetic oligonucleotide
gcgcgcacguacuccccaa

SEQ ID NO: 2808412 - RNA, 19 nt, Artificial Sequence
  Description of Artificial Sequence: Synthetic oligonucleotide
gggaccuggcaagccccga

SEQ ID NO: 2808413 - RNA, 19 nt, Artificial Sequence
  Description of Artificial Sequence: Synthetic oligonucleotide
aguccaccucgcaguccuu

SEQ ID NO: 2808414 - RNA, 19 nt, Artificial Sequence
  Description of Artificial Sequence: Synthetic oligonucleotide
cuccaggggccgggucauc

SEQ ID NO: 2808415 - RNA, 19 nt, Artificial Sequence
  Description of Artificial Sequence: Synthetic oligonucleotide
gcgcgcgcacguacucccc

SEQ ID NO: 2808416 - RNA, 19 nt, Artificial Sequence
  Description of Artificial Sequence: Synthetic oligonucleotide
gcacacgauggcagcuacu

SEQ ID NO: 2808417 - RNA, 19 nt, Artificial Sequence
  Description of Artificial Sequence: Synthetic oligonucleotide
ccucgcaguccuuguuggu

SEQ ID NO: 2808418 - RNA, 19 nt, Artificial Sequence
  Description of Artificial Sequence: Synthetic oligonucleotide
gcuccgacugacagaucuu

SEQ ID NO: 2808419 - RNA, 19 nt, Artificial Sequence
  Description of Artificial Sequence: Synthetic oligonucleotide
cgcgcgcacguacucccca

SEQ ID NO: 2808420 - RNA, 19 nt, Artificial Sequence
  Description of Artificial Sequence: Synthetic oligonucleotide
ggaucaccucagggacaaa

SEQ ID NO: 2808421 - RNA, 19 nt, Artificial Sequence
  Description of Artificial Sequence: Synthetic oligonucleotide
gggguccaagugggcagcu

SEQ ID NO: 2808422 - RNA, 19 nt, Artificial Sequence
  Description of Artificial Sequence: Synthetic oligonucleotide
ccaggggccgggucauccu

SEQ ID NO: 2808423 - RNA, 19 nt, Artificial Sequence
  Description of Artificial Sequence: Synthetic oligonucleotide
gcuccaggggccgggucau

SEQ ID NO: 2808424 - RNA, 19 nt, Artificial Sequence
  Description of Artificial Sequence: Synthetic oligonucleotide
cgcgcacguacuccccaaa

SEQ ID NO: 2808425 - RNA, 19 nt, Artificial Sequence
  Description of Artificial Sequence: Synthetic oligonucleotide
ccaccucgcaguccuuguu

SEQ ID NO: 2808426 - RNA, 19 nt, Artificial Sequence
  Description of Artificial Sequence: Synthetic oligonucleotide
ccacagcgcccagcauacu

SEQ ID NO: 2808427 - RNA, 19 nt, Artificial Sequence
  Description of Artificial Sequence: Synthetic oligonucleotide
uuacauaaaaguauucugc

SEQ ID NO: 2808428 - RNA, 19 nt, Artificial Sequence
  Description of Artificial Sequence: Synthetic oligonucleotide
ugaaugaggaguuugguag

SEQ ID NO: 2808429 - RNA, 19 nt, Artificial Sequence
  Description of Artificial Sequence: Synthetic oligonucleotide
auacauuugaggcaggcac

SEQ ID NO: 2808430 - RNA, 19 nt, Artificial Sequence
  Description of Artificial Sequence: Synthetic oligonucleotide
aaaaguauucugcagugcu

SEQ ID NO: 2808431 - RNA, 19 nt, Artificial Sequence
  Description of Artificial Sequence: Synthetic oligonucleotide
acuugcugcacucauaggg

SEQ ID NO: 2808432 - RNA, 19 nt, Artificial Sequence
  Description of Artificial Sequence: Synthetic oligonucleotide
uauucugcagugcugagcc

SEQ ID NO: 2808433 - RNA, 19 nt, Artificial Sequence
  Description of Artificial Sequence: Synthetic oligonucleotide
uaucuuuacauaaaaguau

SEQ ID NO: 2808434 - RNA, 19 nt, Artificial Sequence
  Description of Artificial Sequence: Synthetic oligonucleotide
aguauuuaucuuuacauaa

SEQ ID NO: 2808435 - RNA, 19 nt, Artificial Sequence
  Description of Artificial Sequence: Synthetic oligonucleotide
ggauaugcagguuugaccg

SEQ ID NO: 2808436 - RNA, 19 nt, Artificial Sequence
  Description of Artificial Sequence: Synthetic oligonucleotide
ugaugaaugaggaguuugg

SEQ ID NO: 2808437 - RNA, 19 nt, Artificial Sequence
  Description of Artificial Sequence: Synthetic oligonucleotide
uacauaaaaguauucugca

SEQ ID NO: 2808438 - RNA, 19 nt, Artificial Sequence
  Description of Artificial Sequence: Synthetic oligonucleotide
auugguagggcuucucccc

SEQ ID NO: 2808439 - RNA, 19 nt, Artificial Sequence
  Description of Artificial Sequence: Synthetic oligonucleotide
auaaaaguauucugcagug

SEQ ID NO: 2808440 - RNA, 19 nt, Artificial Sequence
  Description of Artificial Sequence: Synthetic oligonucleotide
uauuuaucuuuacauaaaa

SEQ ID NO: 2808441 - RNA, 19 nt, Artificial Sequence
  Description of Artificial Sequence: Synthetic oligonucleotide
ucagugaagguccuucccg

SEQ ID NO: 2808442 - RNA, 19 nt, Artificial Sequence
  Description of Artificial Sequence: Synthetic oligonucleotide
cuuuauacauuugaggcag

SEQ ID NO: 2808443 - RNA, 19 nt, Artificial Sequence
  Description of Artificial Sequence: Synthetic oligonucleotide
ggcuuuauacauuugaggc

SEQ ID NO: 2808444 - RNA, 19 nt, Artificial Sequence
  Description of Artificial Sequence: Synthetic oligonucleotide
ucuaccacuggccugugcc

SEQ ID NO: 2808445 - RNA, 19 nt, Artificial Sequence
  Description of Artificial Sequence: Synthetic oligonucleotide
acacucacagcauugguag

SEQ ID NO: 2808446 - RNA, 19 nt, Artificial Sequence
  Description of Artificial Sequence: Synthetic oligonucleotide
cugacugaagcucaugccg

SEQ ID NO: 2808447 - RNA, 19 nt, Artificial Sequence
  Description of Artificial Sequence: Synthetic oligonucleotide
aaguauuuaucuuuacaua

SEQ ID NO: 2808448 - RNA, 19 nt, Artificial Sequence
  Description of Artificial Sequence: Synthetic oligonucleotide
acauaaaaguauucugcag

SEQ ID NO: 2808449 - RNA, 19 nt, Artificial Sequence
  Description of Artificial Sequence: Synthetic oligonucleotide
gauacagcgguggaugugg

SEQ ID NO: 2808450 - RNA, 19 nt, Artificial Sequence
  Description of Artificial Sequence: Synthetic oligonucleotide
ucagccaugaaaaguauuu

SEQ ID NO: 2808451 - RNA, 19 nt, Artificial Sequence
  Description of Artificial Sequence: Synthetic oligonucleotide
uggauaugcagguuugacc

SEQ ID NO: 2808452 - RNA, 19 nt, Artificial Sequence
  Description of Artificial Sequence: Synthetic oligonucleotide
acacuugcugcacucauag

SEQ ID NO: 2808453 - RNA, 19 nt, Artificial Sequence
  Description of Artificial Sequence: Synthetic oligonucleotide
ucccacacuugccacaggg

SEQ ID NO: 2808454 - RNA, 19 nt, Artificial Sequence
  Description of Artificial Sequence: Synthetic oligonucleotide
aagguccuucccgugaacc

SEQ ID NO: 2808455 - RNA, 19 nt, Artificial Sequence
  Description of Artificial Sequence: Synthetic oligonucleotide
agggguagggcuucucucc

SEQ ID NO: 2808456 - RNA, 19 nt, Artificial Sequence
  Description of Artificial Sequence: Synthetic oligonucleotide
uuugaccgcugacugaagc

SEQ ID NO: 2808457 - RNA, 19 nt, Artificial Sequence
  Description of Artificial Sequence: Synthetic oligonucleotide
aagcccuuuccgcacuccc

SEQ ID NO: 2808458 - RNA, 19 nt, Artificial Sequence
  Description of Artificial Sequence: Synthetic oligonucleotide
aaugaggaguuugguaguc

SEQ ID NO: 2808459 - RNA, 19 nt, Artificial Sequence
  Description of Artificial Sequence: Synthetic oligonucleotide
ugacugaagcucaugccgc

SEQ ID NO: 2808460 - RNA, 19 nt, Artificial Sequence
  Description of Artificial Sequence: Synthetic oligonucleotide
ucuuuacauaaaaguauuc

SEQ ID NO: 2808461 - RNA, 19 nt, Artificial Sequence
  Description of Artificial Sequence: Synthetic oligonucleotide
aaguauucugcagugcuga

SEQ ID NO: 2808462 - RNA, 19 nt, Artificial Sequence
  Description of Artificial Sequence: Synthetic oligonucleotide
ugccgcauuccucacaccc

SEQ ID NO: 2808463 - RNA, 19 nt, Artificial Sequence
  Description of Artificial Sequence: Synthetic oligonucleotide
uuuauacauuugaggcagg

SEQ ID NO: 2808464 - RNA, 19 nt, Artificial Sequence
  Description of Artificial Sequence: Synthetic oligonucleotide
gaaaaguauuuaucuuuac

SEQ ID NO: 2808465 - RNA, 19 nt, Artificial Sequence
  Description of Artificial Sequence: Synthetic oligonucleotide
uggagguuggaacucuggc

SEQ ID NO: 2808466 - RNA, 19 nt, Artificial Sequence
  Description of Artificial Sequence: Synthetic oligonucleotide
uccagugugcacccugagg

SEQ ID NO: 2808467 - RNA, 19 nt, Artificial Sequence
  Description of Artificial Sequence: Synthetic oligonucleotide
cagccaaugucagugaagg

SEQ ID NO: 2808468 - RNA, 19 nt, Artificial Sequence
  Description of Artificial Sequence: Synthetic oligonucleotide
uuauacauuugaggcaggc

SEQ ID NO: 2808469 - RNA, 19 nt, Artificial Sequence
  Description of Artificial Sequence: Synthetic oligonucleotide
uggauguggagguuggaac

SEQ ID NO: 2808470 - RNA, 19 nt, Artificial Sequence
  Description of Artificial Sequence: Synthetic oligonucleotide
guuugguagucucuggcug

SEQ ID NO: 2808471 - RNA, 19 nt, Artificial Sequence
  Description of Artificial Sequence: Synthetic oligonucleotide
cuucccgugaacccgcugg

SEQ ID NO: 2808472 - RNA, 19 nt, Artificial Sequence
  Description of Artificial Sequence: Synthetic oligonucleotide
cauugguagggcuucuccc

SEQ ID NO: 2808473 - RNA, 19 nt, Artificial Sequence
  Description of Artificial Sequence: Synthetic oligonucleotide
agguccuucccgugaaccc

SEQ ID NO: 2808474 - RNA, 19 nt, Artificial Sequence
  Description of Artificial Sequence: Synthetic oligonucleotide
uacauuugaggcaggcacu

SEQ ID NO: 2808475 - RNA, 19 nt, Artificial Sequence
  Description of Artificial Sequence: Synthetic oligonucleotide
acucacagcauugguaggg

SEQ ID NO: 2808476 - RNA, 19 nt, Artificial Sequence
  Description of Artificial Sequence: Synthetic oligonucleotide
acuccccacacuuguaggg

SEQ ID NO: 2808477 - RNA, 19 nt, Artificial Sequence
  Description of Artificial Sequence: Synthetic oligonucleotide
uaaaaguauucugcagugc

SEQ ID NO: 2808478 - RNA, 19 nt, Artificial Sequence
  Description of Artificial Sequence: Synthetic oligonucleotide
ugugcccucagccaugaaa

SEQ ID NO: 2808479 - RNA, 19 nt, Artificial Sequence
  Description of Artificial Sequence: Synthetic oligonucleotide
gggcuuuauacauuugagg

SEQ ID NO: 2808480 - RNA, 19 nt, Artificial Sequence
  Description of Artificial Sequence: Synthetic oligonucleotide
uggauguggagguucgagc

SEQ ID NO: 2808481 - RNA, 19 nt, Artificial Sequence
  Description of Artificial Sequence: Synthetic oligonucleotide
acagcgguggauguggagg

SEQ ID NO: 2808482 - RNA, 19 nt, Artificial Sequence
  Description of Artificial Sequence: Synthetic oligonucleotide
uucgagcucuggcugaagc

SEQ ID NO: 2808483 - RNA, 19 nt, Artificial Sequence
  Description of Artificial Sequence: Synthetic oligonucleotide
aaaguauucugcagugcug

SEQ ID NO: 2808484 - RNA, 19 nt, Artificial Sequence
  Description of Artificial Sequence: Synthetic oligonucleotide
cauaaaaguauucugcagu

SEQ ID NO: 2808485 - RNA, 19 nt, Artificial Sequence
  Description of Artificial Sequence: Synthetic oligonucleotide
aguuugguagucucuggcu

SEQ ID NO: 2808486 - RNA, 19 nt, Artificial Sequence
  Description of Artificial Sequence: Synthetic oligonucleotide
ccaaugucagugaaggucc

SEQ ID NO: 2808487 - RNA, 19 nt, Artificial Sequence
  Description of Artificial Sequence: Synthetic oligonucleotide
aagcucaugccgcauuccu

SEQ ID NO: 2808488 - RNA, 19 nt, Artificial Sequence
  Description of Artificial Sequence: Synthetic oligonucleotide
agccaugaaaaguauuuau

SEQ ID NO: 2808489 - RNA, 19 nt, Artificial Sequence
  Description of Artificial Sequence: Synthetic oligonucleotide
uuugaggcaggcacucuac

SEQ ID NO: 2808490 - RNA, 19 nt, Artificial Sequence
  Description of Artificial Sequence: Synthetic oligonucleotide
uggagguucgagcucuggc

SEQ ID NO: 2808491 - RNA, 19 nt, Artificial Sequence
  Description of Artificial Sequence: Synthetic oligonucleotide
guagucucuggcugaagcc

SEQ ID NO: 2808492 - RNA, 19 nt, Artificial Sequence
  Description of Artificial Sequence: Synthetic oligonucleotide
ugguggauguggagguugg

SEQ ID NO: 2808493 - RNA, 19 nt, Artificial Sequence
  Description of Artificial Sequence: Synthetic oligonucleotide
ugguggauaugcagguuug

SEQ ID NO: 2808494 - RNA, 19 nt, Artificial Sequence
  Description of Artificial Sequence: Synthetic oligonucleotide
augucagugaagguccuuc

SEQ ID NO: 2808495 - RNA, 19 nt, Artificial Sequence
  Description of Artificial Sequence: Synthetic oligonucleotide
ugcacucucugaugaauga

SEQ ID NO: 2808496 - RNA, 19 nt, Artificial Sequence
  Description of Artificial Sequence: Synthetic oligonucleotide
ugaggcaggcacucuacca

SEQ ID NO: 2808497 - RNA, 19 nt, Artificial Sequence
  Description of Artificial Sequence: Synthetic oligonucleotide
gagccagccaaugucagug

SEQ ID NO: 2808498 - RNA, 19 nt, Artificial Sequence
  Description of Artificial Sequence: Synthetic oligonucleotide
ugucagugaagguccuucc

SEQ ID NO: 2808499 - RNA, 19 nt, Artificial Sequence
  Description of Artificial Sequence: Synthetic oligonucleotide
augaaugaggaguuuggua

SEQ ID NO: 2808500 - RNA, 19 nt, Artificial Sequence
  Description of Artificial Sequence: Synthetic oligonucleotide
uagucucuggcugaagccc

SEQ ID NO: 2808501 - RNA, 19 nt, Artificial Sequence
  Description of Artificial Sequence: Synthetic oligonucleotide
ugaggaguuugguagucuc

SEQ ID NO: 2808502 - RNA, 19 nt, Artificial Sequence
  Description of Artificial Sequence: Synthetic oligonucleotide
gauaugcagguuugaccgc

SEQ ID NO: 2808503 - RNA, 19 nt, Artificial Sequence
  Description of Artificial Sequence: Synthetic oligonucleotide
gaggcaggcacucuaccac

SEQ ID NO: 2808504 - RNA, 19 nt, Artificial Sequence
  Description of Artificial Sequence: Synthetic oligonucleotide
acagcauugguagggcuuc

SEQ ID NO: 2808505 - RNA, 19 nt, Artificial Sequence
  Description of Artificial Sequence: Synthetic oligonucleotide
gagguucgagcucuggcug

SEQ ID NO: 2808506 - RNA, 19 nt, Artificial Sequence
  Description of Artificial Sequence: Synthetic oligonucleotide
gguagucucuggcugaagc

SEQ ID NO: 2808507 - RNA, 19 nt, Artificial Sequence
  Description of Artificial Sequence: Synthetic oligonucleotide
caugccgcauuccucacac

SEQ ID NO: 2808508 - RNA, 19 nt, Artificial Sequence
  Description of Artificial Sequence: Synthetic oligonucleotide
cugaugaaugaggaguuug

SEQ ID NO: 2808509 - RNA, 19 nt, Artificial Sequence
  Description of Artificial Sequence: Synthetic oligonucleotide
agggcuuuauacauuugag

SEQ ID NO: 2808510 - RNA, 19 nt, Artificial Sequence
  Description of Artificial Sequence: Synthetic oligonucleotide
cagguuugaccgcugacug

SEQ ID NO: 2808511 - RNA, 19 nt, Artificial Sequence
  Description of Artificial Sequence: Synthetic oligonucleotide
guggauacagcgguggaug

SEQ ID NO: 2808512 - RNA, 19 nt, Artificial Sequence
  Description of Artificial Sequence: Synthetic oligonucleotide
uugaggcaggcacucuacc

SEQ ID NO: 2808513 - RNA, 19 nt, Artificial Sequence
  Description of Artificial Sequence: Synthetic oligonucleotide
aguauucugcagugcugag

SEQ ID NO: 2808514 - RNA, 19 nt, Artificial Sequence
  Description of Artificial Sequence: Synthetic oligonucleotide
acacuugccacagggguag

SEQ ID NO: 2808515 - RNA, 19 nt, Artificial Sequence
  Description of Artificial Sequence: Synthetic oligonucleotide
ugaagguccuucccgugaa

SEQ ID NO: 2808516 - RNA, 19 nt, Artificial Sequence
  Description of Artificial Sequence: Synthetic oligonucleotide
aucuuuacauaaaaguauu

SEQ ID NO: 2808517 - RNA, 19 nt, Artificial Sequence
  Description of Artificial Sequence: Synthetic oligonucleotide
ugcacccugagguggauuc

SEQ ID NO: 2808518 - RNA, 19 nt, Artificial Sequence
  Description of Artificial Sequence: Synthetic oligonucleotide
aggaguuugguagucucug

SEQ ID NO: 2808519 - RNA, 19 nt, Artificial Sequence
  Description of Artificial Sequence: Synthetic oligonucleotide
gcuuuauacauuugaggca

SEQ ID NO: 2808520 - RNA, 19 nt, Artificial Sequence
  Description of Artificial Sequence: Synthetic oligonucleotide
gucagugaagguccuuccc

SEQ ID NO: 2808521 - RNA, 19 nt, Artificial Sequence
  Description of Artificial Sequence: Synthetic oligonucleotide
auuugaggcaggcacucua

SEQ ID NO: 2808522 - RNA, 19 nt, Artificial Sequence
  Description of Artificial Sequence: Synthetic oligonucleotide
auucgcaggucugagcucu

SEQ ID NO: 2808523 - RNA, 19 nt, Artificial Sequence
  Description of Artificial Sequence: Synthetic oligonucleotide
aacccgcugguggaugugg

SEQ ID NO: 2808524 - RNA, 19 nt, Artificial Sequence
  Description of Artificial Sequence: Synthetic oligonucleotide
aggcacucuaccacuggcc

SEQ ID NO: 2808525 - RNA, 19 nt, Artificial Sequence
  Description of Artificial Sequence: Synthetic oligonucleotide
cuugccacagggguagggc

SEQ ID NO: 2808526 - RNA, 19 nt, Artificial Sequence
  Description of Artificial Sequence: Synthetic oligonucleotide
guauuuaucuuuacauaaa

SEQ ID NO: 2808527 - RNA, 19 nt, Artificial Sequence
  Description of Artificial Sequence: Synthetic oligonucleotide
uggauucgcaggucugagc

SEQ ID NO: 2808528 - RNA, 19 nt, Artificial Sequence
  Description of Artificial Sequence: Synthetic oligonucleotide
agugaagguccuucccgug

SEQ ID NO: 2808529 - RNA, 19 nt, Artificial Sequence
  Description of Artificial Sequence: Synthetic oligonucleotide
uaugcagguuugaccgcug

SEQ ID NO: 2808530 - RNA, 19 nt, Artificial Sequence
  Description of Artificial Sequence: Synthetic oligonucleotide
uccccacacuuguagggcc

SEQ ID NO: 2808531 - RNA, 19 nt, Artificial Sequence
  Description of Artificial Sequence: Synthetic oligonucleotide
guauucugcagugcugagc

SEQ ID NO: 2808532 - RNA, 19 nt, Artificial Sequence
  Description of Artificial Sequence: Synthetic oligonucleotide
cacuccccacacuuguagg

SEQ ID NO: 2808533 - RNA, 19 nt, Artificial Sequence
  Description of Artificial Sequence: Synthetic oligonucleotide
auaugcagguuugaccgcu

SEQ ID NO: 2808534 - RNA, 19 nt, Artificial Sequence
  Description of Artificial Sequence: Synthetic oligonucleotide
ugugcacucucugaugaau

SEQ ID NO: 2808535 - RNA, 19 nt, Artificial Sequence
  Description of Artificial Sequence: Synthetic oligonucleotide
ccugagguggauucgcagg

SEQ ID NO: 2808536 - RNA, 19 nt, Artificial Sequence
  Description of Artificial Sequence: Synthetic oligonucleotide
cuaccacuggccugugccc

SEQ ID NO: 2808537 - RNA, 19 nt, Artificial Sequence
  Description of Artificial Sequence: Synthetic oligonucleotide
ugcagguuugaccgcugac

SEQ ID NO: 2808538 - RNA, 19 nt, Artificial Sequence
  Description of Artificial Sequence: Synthetic oligonucleotide
uggauacagcgguggaugu

SEQ ID NO: 2808539 - RNA, 19 nt, Artificial Sequence
  Description of Artificial Sequence: Synthetic oligonucleotide
agugcugagccagccaaug

SEQ ID NO: 2808540 - RNA, 19 nt, Artificial Sequence
  Description of Artificial Sequence: Synthetic oligonucleotide
uugccacagggguagggcu

SEQ ID NO: 2808541 - RNA, 19 nt, Artificial Sequence
  Description of Artificial Sequence: Synthetic oligonucleotide
uacagcgguggauguggag

SEQ ID NO: 2808542 - RNA, 19 nt, Artificial Sequence
  Description of Artificial Sequence: Synthetic oligonucleotide
ucaugccgcauuccucaca

SEQ ID NO: 2808543 - RNA, 19 nt, Artificial Sequence
  Description of Artificial Sequence: Synthetic oligonucleotide
gauguggagguuggaacuc

SEQ ID NO: 2808544 - RNA, 19 nt, Artificial Sequence
  Description of Artificial Sequence: Synthetic oligonucleotide
caggcacucuaccacuggc

SEQ ID NO: 2808545 - RNA, 19 nt, Artificial Sequence
  Description of Artificial Sequence: Synthetic oligonucleotide
guggauguggagguucgag

SEQ ID NO: 2808546 - RNA, 19 nt, Artificial Sequence
  Description of Artificial Sequence: Synthetic oligonucleotide
gccaaugucagugaagguc

SEQ ID NO: 2808547 - RNA, 19 nt, Artificial Sequence
  Description of Artificial Sequence: Synthetic oligonucleotide
ugcagugcugagccagcca

SEQ ID NO: 2808548 - RNA, 19 nt, Artificial Sequence
  Description of Artificial Sequence: Synthetic oligonucleotide
cuucccacacuugccacag

SEQ ID NO: 2808549 - RNA, 19 nt, Artificial Sequence
  Description of Artificial Sequence: Synthetic oligonucleotide
cacucacagcauugguagg

SEQ ID NO: 2808550 - RNA, 19 nt, Artificial Sequence
  Description of Artificial Sequence: Synthetic oligonucleotide
ucacagcauugguagggcu

SEQ ID NO: 2808551 - RNA, 19 nt, Artificial Sequence
  Description of Artificial Sequence: Synthetic oligonucleotide
ugaacccgcugguggaugu

SEQ ID NO: 2808552 - RNA, 19 nt, Artificial Sequence
  Description of Artificial Sequence: Synthetic oligonucleotide
uguggauacagcgguggau

SEQ ID NO: 2808553 - RNA, 19 nt, Artificial Sequence
  Description of Artificial Sequence: Synthetic oligonucleotide
ugcccucagccaugaaaag

SEQ ID NO: 2808554 - RNA, 19 nt, Artificial Sequence
  Description of Artificial Sequence: Synthetic oligonucleotide
cucucucccguguggacac

SEQ ID NO: 2808555 - RNA, 19 nt, Artificial Sequence
  Description of Artificial Sequence: Synthetic oligonucleotide
ugaccgcugacugaagcuc

SEQ ID NO: 2808556 - RNA, 19 nt, Artificial Sequence
  Description of Artificial Sequence: Synthetic oligonucleotide
ugagccagccaaugucagu

SEQ ID NO: 2808557 - RNA, 19 nt, Artificial Sequence
  Description of Artificial Sequence: Synthetic oligonucleotide
auguggagguucgagcucu

SEQ ID NO: 2808558 - RNA, 19 nt, Artificial Sequence
  Description of Artificial Sequence: Synthetic oligonucleotide
guggauaugcagguuugac

SEQ ID NO: 2808559 - RNA, 19 nt, Artificial Sequence
  Description of Artificial Sequence: Synthetic oligonucleotide
ccaugaaaaguauuuaucu

SEQ ID NO: 2808560 - RNA, 19 nt, Artificial Sequence
  Description of Artificial Sequence: Synthetic oligonucleotide
gaaugaggaguuugguagu

SEQ ID NO: 2808561 - RNA, 19 nt, Artificial Sequence
  Description of Artificial Sequence: Synthetic oligonucleotide
cucacagcauugguagggc

SEQ ID NO: 2808562 - RNA, 19 nt, Artificial Sequence
  Description of Artificial Sequence: Synthetic oligonucleotide
caugaaaaguauuuaucuu

SEQ ID NO: 2808563 - RNA, 19 nt, Artificial Sequence
  Description of Artificial Sequence: Synthetic oligonucleotide
agcccuuuccgcacucccc

SEQ ID NO: 2808564 - RNA, 19 nt, Artificial Sequence
  Description of Artificial Sequence: Synthetic oligonucleotide
guggagguuggaacucugg

SEQ ID NO: 2808565 - RNA, 19 nt, Artificial Sequence
  Description of Artificial Sequence: Synthetic oligonucleotide
uggccugugcccucagcca

SEQ ID NO: 2808566 - RNA, 19 nt, Artificial Sequence
  Description of Artificial Sequence: Synthetic oligonucleotide
gaugaaugaggaguuuggu

SEQ ID NO: 2808567 - RNA, 19 nt, Artificial Sequence
  Description of Artificial Sequence: Synthetic oligonucleotide
gcauugguagggcuucucc

SEQ ID NO: 2808568 - RNA, 19 nt, Artificial Sequence
  Description of Artificial Sequence: Synthetic oligonucleotide
gccaugaaaaguauuuauc

SEQ ID NO: 2808569 - RNA, 19 nt, Artificial Sequence
  Description of Artificial Sequence: Synthetic oligonucleotide
gugaagguccuucccguga

SEQ ID NO: 2808570 - RNA, 19 nt, Artificial Sequence
  Description of Artificial Sequence: Synthetic oligonucleotide
uucccgugaacccgcuggu

SEQ ID NO: 2808571 - RNA, 19 nt, Artificial Sequence
  Description of Artificial Sequence: Synthetic oligonucleotide
agguuggaacucuggcuga

SEQ ID NO: 2808572 - RNA, 19 nt, Artificial Sequence
  Description of Artificial Sequence: Synthetic oligonucleotide
agguuugaccgcugacuga

SEQ ID NO: 2808573 - RNA, 19 nt, Artificial Sequence
  Description of Artificial Sequence: Synthetic oligonucleotide
cacuugcugcacucauagg

SEQ ID NO: 2808574 - RNA, 19 nt, Artificial Sequence
  Description of Artificial Sequence: Synthetic oligonucleotide
gauucgcaggucugagcuc

SEQ ID NO: 2808575 - RNA, 19 nt, Artificial Sequence
  Description of Artificial Sequence: Synthetic oligonucleotide
aggcaggcacucuaccacu

SEQ ID NO: 2808576 - RNA, 19 nt, Artificial Sequence
  Description of Artificial Sequence: Synthetic oligonucleotide
gguccuucccgugaacccg

SEQ ID NO: 2808577 - RNA, 19 nt, Artificial Sequence
  Description of Artificial Sequence: Synthetic oligonucleotide
cucuccagugugcacccug

SEQ ID NO: 2808578 - RNA, 19 nt, Artificial Sequence
  Description of Artificial Sequence: Synthetic oligonucleotide
gugcacucucugaugaaug

SEQ ID NO: 2808579 - RNA, 19 nt, Artificial Sequence
  Description of Artificial Sequence: Synthetic oligonucleotide
gcucaugccgcauuccuca

SEQ ID NO: 2808580 - RNA, 19 nt, Artificial Sequence
  Description of Artificial Sequence: Synthetic oligonucleotide
gcccuucccacacucacag

SEQ ID NO: 2808581 - RNA, 19 nt, Artificial Sequence
  Description of Artificial Sequence: Synthetic oligonucleotide
agcucaugccgcauuccuc

SEQ ID NO: 2808582 - RNA, 19 nt, Artificial Sequence
  Description of Artificial Sequence: Synthetic oligonucleotide
augccgcauuccucacacc

SEQ ID NO: 2808583 - RNA, 19 nt, Artificial Sequence
  Description of Artificial Sequence: Synthetic oligonucleotide
cuccccacacuuguagggc

SEQ ID NO: 2808584 - RNA, 19 nt, Artificial Sequence
  Description of Artificial Sequence: Synthetic oligonucleotide
cagggguagggcuucucuc

SEQ ID NO: 2808585 - RNA, 19 nt, Artificial Sequence
  Description of Artificial Sequence: Synthetic oligonucleotide
agguucgagcucuggcuga

SEQ ID NO: 2808586 - RNA, 19 nt, Artificial Sequence
  Description of Artificial Sequence: Synthetic oligonucleotide
guggauucgcaggucugag

SEQ ID NO: 2808587 - RNA, 19 nt, Artificial Sequence
  Description of Artificial Sequence: Synthetic oligonucleotide
uguggagguucgagcucug

SEQ ID NO: 2808588 - RNA, 19 nt, Artificial Sequence
  Description of Artificial Sequence: Synthetic oligonucleotide
uucccacacuugccacagg

SEQ ID NO: 2808589 - RNA, 19 nt, Artificial Sequence
  Description of Artificial Sequence: Synthetic oligonucleotide
gugcccucagccaugaaaa

SEQ ID NO: 2808590 - RNA, 19 nt, Artificial Sequence
  Description of Artificial Sequence: Synthetic oligonucleotide
guuggaacucuggcugaag

SEQ ID NO: 2808591 - RNA, 19 nt, Artificial Sequence
  Description of Artificial Sequence: Synthetic oligonucleotide
aaugucagugaagguccuu

SEQ ID NO: 2808592 - RNA, 19 nt, Artificial Sequence
  Description of Artificial Sequence: Synthetic oligonucleotide
ucugaugaaugaggaguuu

SEQ ID NO: 2808593 - RNA, 19 nt, Artificial Sequence
  Description of Artificial Sequence: Synthetic oligonucleotide
gagguggauucgcaggucu

SEQ ID NO: 2808594 - RNA, 19 nt, Artificial Sequence
  Description of Artificial Sequence: Synthetic oligonucleotide
accacuggccugugcccuc

SEQ ID NO: 2808595 - RNA, 19 nt, Artificial Sequence
  Description of Artificial Sequence: Synthetic oligonucleotide
gaagguccuucccgugaac

SEQ ID NO: 2808596 - RNA, 19 nt, Artificial Sequence
  Description of Artificial Sequence: Synthetic oligonucleotide
uggacacgcugguggauau

SEQ ID NO: 2808597 - RNA, 19 nt, Artificial Sequence
  Description of Artificial Sequence: Synthetic oligonucleotide
augaggaguuugguagucu

SEQ ID NO: 2808598 - RNA, 19 nt, Artificial Sequence
  Description of Artificial Sequence: Synthetic oligonucleotide
agccaaugucagugaaggu

SEQ ID NO: 2808599 - RNA, 19 nt, Artificial Sequence
  Description of Artificial Sequence: Synthetic oligonucleotide
augcagguuugaccgcuga

SEQ ID NO: 2808600 - RNA, 19 nt, Artificial Sequence
  Description of Artificial Sequence: Synthetic oligonucleotide
cccgugaacccgcuggugg

SEQ ID NO: 2808601 - RNA, 19 nt, Artificial Sequence
  Description of Artificial Sequence: Synthetic oligonucleotide
uaccacuggccugugcccu

SEQ ID NO: 2808602 - RNA, 19 nt, Artificial Sequence
  Description of Artificial Sequence: Synthetic oligonucleotide
ucucccguguggacacgcu

SEQ ID NO: 2808603 - RNA, 19 nt, Artificial Sequence
  Description of Artificial Sequence: Synthetic oligonucleotide
ugccacagggguagggcuu

SEQ ID NO: 2808604 - RNA, 19 nt, Artificial Sequence
  Description of Artificial Sequence: Synthetic oligonucleotide
gguuugaccgcugacugaa

SEQ ID NO: 2808605 - RNA, 19 nt, Artificial Sequence
  Description of Artificial Sequence: Synthetic oligonucleotide
uugguagucucuggcugaa

SEQ ID NO: 2808606 - RNA, 19 nt, Artificial Sequence
  Description of Artificial Sequence: Synthetic oligonucleotide
cacccugagguggauucgc

SEQ ID NO: 2808607 - RNA, 19 nt, Artificial Sequence
  Description of Artificial Sequence: Synthetic oligonucleotide
ggauguggagguuggaacu

SEQ ID NO: 2808608 - RNA, 19 nt, Artificial Sequence
  Description of Artificial Sequence: Synthetic oligonucleotide
ccagccaaugucagugaag

SEQ ID NO: 2808609 - RNA, 19 nt, Artificial Sequence
  Description of Artificial Sequence: Synthetic oligonucleotide
auguggagguuggaacucu

SEQ ID NO: 2808610 - RNA, 19 nt, Artificial Sequence
  Description of Artificial Sequence: Synthetic oligonucleotide
cucccguguggacacgcug

SEQ ID NO: 2808611 - RNA, 19 nt, Artificial Sequence
  Description of Artificial Sequence: Synthetic oligonucleotide
agucucuggcugaagcccu

SEQ ID NO: 2808612 - RNA, 19 nt, Artificial Sequence
  Description of Artificial Sequence: Synthetic oligonucleotide
agccagccaaugucaguga

SEQ ID NO: 2808613 - RNA, 19 nt, Artificial Sequence
  Description of Artificial Sequence: Synthetic oligonucleotide
gcaggcacucuaccacugg

SEQ ID NO: 2808614 - RNA, 19 nt, Artificial Sequence
  Description of Artificial Sequence: Synthetic oligonucleotide
auucugcagugcugagcca

SEQ ID NO: 2808615 - RNA, 19 nt, Artificial Sequence
  Description of Artificial Sequence: Synthetic oligonucleotide
uucgcaggucugagcucug

SEQ ID NO: 2808616 - RNA, 19 nt, Artificial Sequence
  Description of Artificial Sequence: Synthetic oligonucleotide
ugagguggauucgcagguc

SEQ ID NO: 2808617 - RNA, 19 nt, Artificial Sequence
  Description of Artificial Sequence: Synthetic oligonucleotide
guggauguggagguuggaa

SEQ ID NO: 2808618 - RNA, 19 nt, Artificial Sequence
  Description of Artificial Sequence: Synthetic oligonucleotide
cucaugccgcauuccucac

SEQ ID NO: 2808619 - RNA, 19 nt, Artificial Sequence
  Description of Artificial Sequence: Synthetic oligonucleotide
ggagguucgagcucuggcu

SEQ ID NO: 2808620 - RNA, 19 nt, Artificial Sequence
  Description of Artificial Sequence: Synthetic oligonucleotide
gcacucucugaugaaugag

SEQ ID NO: 2808621 - RNA, 19 nt, Artificial Sequence
  Description of Artificial Sequence: Synthetic oligonucleotide
cgcugacugaagcucaugc

SEQ ID NO: 2808622 - RNA, 19 nt, Artificial Sequence
  Description of Artificial Sequence: Synthetic oligonucleotide
gaccgcugacugaagcuca

SEQ ID NO: 2808623 - RNA, 19 nt, Artificial Sequence
  Description of Artificial Sequence: Synthetic oligonucleotide
guggagguucgagcucugg

SEQ ID NO: 2808624 - RNA, 19 nt, Artificial Sequence
  Description of Artificial Sequence: Synthetic oligonucleotide
guguggauacagcggugga

SEQ ID NO: 2808625 - RNA, 19 nt, Artificial Sequence
  Description of Artificial Sequence: Synthetic oligonucleotide
cacacuugccacaggggua

SEQ ID NO: 2808626 - RNA, 19 nt, Artificial Sequence
  Description of Artificial Sequence: Synthetic oligonucleotide
ugguagucucuggcugaag

SEQ ID NO: 2808627 - RNA, 19 nt, Artificial Sequence
  Description of Artificial Sequence: Synthetic oligonucleotide
gcagugcugagccagccaa

SEQ ID NO: 2808628 - RNA, 19 nt, Artificial Sequence
  Description of Artificial Sequence: Synthetic oligonucleotide
cugagguggauucgcaggu

SEQ ID NO: 2808629 - RNA, 19 nt, Artificial Sequence
  Description of Artificial Sequence: Synthetic oligonucleotide
cucucccguguggacacgc

SEQ ID NO: 2808630 - RNA, 19 nt, Artificial Sequence
  Description of Artificial Sequence: Synthetic oligonucleotide
cugcagugcugagccagcc

SEQ ID NO: 2808631 - RNA, 19 nt, Artificial Sequence
  Description of Artificial Sequence: Synthetic oligonucleotide
cucuaccacuggccugugc

SEQ ID NO: 2808632 - RNA, 19 nt, Artificial Sequence
  Description of Artificial Sequence: Synthetic oligonucleotide
ccagugugcacccugaggu

SEQ ID NO: 2808633 - RNA, 19 nt, Artificial Sequence
  Description of Artificial Sequence: Synthetic oligonucleotide
cucugaugaaugaggaguu

SEQ ID NO: 2808634 - RNA, 19 nt, Artificial Sequence
  Description of Artificial Sequence: Synthetic oligonucleotide
ccccguguggauacagcgg

SEQ ID NO: 2808635 - RNA, 19 nt, Artificial Sequence
  Description of Artificial Sequence: Synthetic oligonucleotide
guuugaccgcugacugaag

SEQ ID NO: 2808636 - RNA, 19 nt, Artificial Sequence
  Description of Artificial Sequence: Synthetic oligonucleotide
gcccuucccacacuugcug

SEQ ID NO: 2808637 - RNA, 19 nt, Artificial Sequence
  Description of Artificial Sequence: Synthetic oligonucleotide
agguggauucgcaggucug

SEQ ID NO: 2808638 - RNA, 19 nt, Artificial Sequence
  Description of Artificial Sequence: Synthetic oligonucleotide
gcugagccagccaauguca

SEQ ID NO: 2808639 - RNA, 19 nt, Artificial Sequence
  Description of Artificial Sequence: Synthetic oligonucleotide
cccucagccaugaaaagua

SEQ ID NO: 2808640 - RNA, 19 nt, Artificial Sequence
  Description of Artificial Sequence: Synthetic oligonucleotide
guccuucccgugaacccgc

SEQ ID NO: 2808641 - RNA, 19 nt, Artificial Sequence
  Description of Artificial Sequence: Synthetic oligonucleotide
gaggaguuugguagucucu

SEQ ID NO: 2808642 - RNA, 19 nt, Artificial Sequence
  Description of Artificial Sequence: Synthetic oligonucleotide
ggauacagcgguggaugug

SEQ ID NO: 2808643 - RNA, 19 nt, Artificial Sequence
  Description of Artificial Sequence: Synthetic oligonucleotide
ucccgugaacccgcuggug

SEQ ID NO: 2808644 - RNA, 19 nt, Artificial Sequence
  Description of Artificial Sequence: Synthetic oligonucleotide
gugaacccgcugguggaug

SEQ ID NO: 2808645 - RNA, 19 nt, Artificial Sequence
  Description of Artificial Sequence: Synthetic oligonucleotide
cagugaagguccuucccgu

SEQ ID NO: 2808646 - RNA, 19 nt, Artificial Sequence
  Description of Artificial Sequence: Synthetic oligonucleotide
cugguggauaugcagguuu

SEQ ID NO: 2808647 - RNA, 19 nt, Artificial Sequence
  Description of Artificial Sequence: Synthetic oligonucleotide
gguggauucgcaggucuga

SEQ ID NO: 2808648 - RNA, 19 nt, Artificial Sequence
  Description of Artificial Sequence: Synthetic oligonucleotide
gaacccgcugguggaugug

SEQ ID NO: 2808649 - RNA, 19 nt, Artificial Sequence
  Description of Artificial Sequence: Synthetic oligonucleotide
gcacucuaccacuggccug

SEQ ID NO: 2808650 - RNA, 19 nt, Artificial Sequence
  Description of Artificial Sequence: Synthetic oligonucleotide
uccuucccgugaacccgcu

SEQ ID NO: 2808651 - RNA, 19 nt, Artificial Sequence
  Description of Artificial Sequence: Synthetic oligonucleotide
cacacuugcugcacucaua

SEQ ID NO: 2808652 - RNA, 19 nt, Artificial Sequence
  Description of Artificial Sequence: Synthetic oligonucleotide
ggcacucuaccacuggccu

SEQ ID NO: 2808653 - RNA, 19 nt, Artificial Sequence
  Description of Artificial Sequence: Synthetic oligonucleotide
cacucuaccacuggccugu

SEQ ID NO: 2808654 - RNA, 19 nt, Artificial Sequence
  Description of Artificial Sequence: Synthetic oligonucleotide
cccugagguggauucgcag

SEQ ID NO: 2808655 - RNA, 19 nt, Artificial Sequence
  Description of Artificial Sequence: Synthetic oligonucleotide
cagccaugaaaaguauuua

SEQ ID NO: 2808656 - RNA, 19 nt, Artificial Sequence
  Description of Artificial Sequence: Synthetic oligonucleotide
cacagcauugguagggcuu

SEQ ID NO: 2808657 - RNA, 19 nt, Artificial Sequence
  Description of Artificial Sequence: Synthetic oligonucleotide
gcccuuuccgcacucccca

SEQ ID NO: 2808658 - RNA, 19 nt, Artificial Sequence
  Description of Artificial Sequence: Synthetic oligonucleotide
guucgagcucuggcugaag

SEQ ID NO: 2808659 - RNA, 19 nt, Artificial Sequence
  Description of Artificial Sequence: Synthetic oligonucleotide
gcccuucccacacuugcca

SEQ ID NO: 2808660 - RNA, 19 nt, Artificial Sequence
  Description of Artificial Sequence: Synthetic oligonucleotide
gguggauaugcagguuuga

SEQ ID NO: 2808661 - RNA, 19 nt, Artificial Sequence
  Description of Artificial Sequence: Synthetic oligonucleotide
auacagcgguggaugugga

SEQ ID NO: 2808662 - RNA, 19 nt, Artificial Sequence
  Description of Artificial Sequence: Synthetic oligonucleotide
guggacacgcugguggaua

SEQ ID NO: 2808663 - RNA, 19 nt, Artificial Sequence
  Description of Artificial Sequence: Synthetic oligonucleotide
gcagguuugaccgcugacu

SEQ ID NO: 2808664 - RNA, 19 nt, Artificial Sequence
  Description of Artificial Sequence: Synthetic oligonucleotide
cgguggauguggagguucg

SEQ ID NO: 2808665 - RNA, 19 nt, Artificial Sequence
  Description of Artificial Sequence: Synthetic oligonucleotide
cucagccaugaaaaguauu

SEQ ID NO: 2808666 - RNA, 19 nt, Artificial Sequence
  Description of Artificial Sequence: Synthetic oligonucleotide
ugugcacccugagguggau

SEQ ID NO: 2808667 - RNA, 19 nt, Artificial Sequence
  Description of Artificial Sequence: Synthetic oligonucleotide
acacgcugguggauaugca

SEQ ID NO: 2808668 - RNA, 19 nt, Artificial Sequence
  Description of Artificial Sequence: Synthetic oligonucleotide
ggcaggcacucuaccacug

SEQ ID NO: 2808669 - RNA, 19 nt, Artificial Sequence
  Description of Artificial Sequence: Synthetic oligonucleotide
gcacccugagguggauucg

SEQ ID NO: 2808670 - RNA, 19 nt, Artificial Sequence
  Description of Artificial Sequence: Synthetic oligonucleotide
cagcgguggauguggaggu

SEQ ID NO: 2808671 - RNA, 19 nt, Artificial Sequence
  Description of Artificial Sequence: Synthetic oligonucleotide
acccugagguggauucgca

SEQ ID NO: 2808672 - RNA, 19 nt, Artificial Sequence
  Description of Artificial Sequence: Synthetic oligonucleotide
gugcugagccagccaaugu

SEQ ID NO: 2808673 - RNA, 19 nt, Artificial Sequence
  Description of Artificial Sequence: Synthetic oligonucleotide
gugugcacccugaggugga

SEQ ID NO: 2808674 - RNA, 19 nt, Artificial Sequence
  Description of Artificial Sequence: Synthetic oligonucleotide
ccagggcuuuauacauuug

SEQ ID NO: 2808675 - RNA, 19 nt, Artificial Sequence
  Description of Artificial Sequence: Synthetic oligonucleotide
cacuugccacagggguagg

SEQ ID NO: 2808676 - RNA, 19 nt, Artificial Sequence
  Description of Artificial Sequence: Synthetic oligonucleotide
ccacacuugccacaggggu

SEQ ID NO: 2808677 - RNA, 19 nt, Artificial Sequence
  Description of Artificial Sequence: Synthetic oligonucleotide
gccagccaaugucagugaa

SEQ ID NO: 2808678 - RNA, 19 nt, Artificial Sequence
  Description of Artificial Sequence: Synthetic oligonucleotide
cccgcugguggauguggag

SEQ ID NO: 2808679 - RNA, 19 nt, Artificial Sequence
  Description of Artificial Sequence: Synthetic oligonucleotide
ccuucccacacuugccaca

SEQ ID NO: 2808680 - RNA, 19 nt, Artificial Sequence
  Description of Artificial Sequence: Synthetic oligonucleotide
gcgguggauguggagguuc

SEQ ID NO: 2808681 - RNA, 19 nt, Artificial Sequence
  Description of Artificial Sequence: Synthetic oligonucleotide
accgcugacugaagcucau

SEQ ID NO: 2808682 - RNA, 19 nt, Artificial Sequence
  Description of Artificial Sequence: Synthetic oligonucleotide
gguuggaacucuggcugaa

SEQ ID NO: 2808683 - RNA, 19 nt, Artificial Sequence
  Description of Artificial Sequence: Synthetic oligonucleotide
acucuaccacuggccugug

SEQ ID NO: 2808684 - RNA, 19 nt, Artificial Sequence
  Description of Artificial Sequence: Synthetic oligonucleotide
acccgcugguggaugugga

SEQ ID NO: 2808685 - RNA, 19 nt, Artificial Sequence
  Description of Artificial Sequence: Synthetic oligonucleotide
acccagggcuuuauacauu

SEQ ID NO: 2808686 - RNA, 19 nt, Artificial Sequence
  Description of Artificial Sequence: Synthetic oligonucleotide
ccguguggauacagcggug

SEQ ID NO: 2808687 - RNA, 19 nt, Artificial Sequence
  Description of Artificial Sequence: Synthetic oligonucleotide
cccguguggauacagcggu

SEQ ID NO: 2808688 - RNA, 19 nt, Artificial Sequence
  Description of Artificial Sequence: Synthetic oligonucleotide
gccgcauuccucacaccca

SEQ ID NO: 2808689 - RNA, 19 nt, Artificial Sequence
  Description of Artificial Sequence: Synthetic oligonucleotide
ggacacgcugguggauaug

SEQ ID NO: 2808690 - RNA, 19 nt, Artificial Sequence
  Description of Artificial Sequence: Synthetic oligonucleotide
ccgugaacccgcuggugga

SEQ ID NO: 2808691 - RNA, 19 nt, Artificial Sequence
  Description of Artificial Sequence: Synthetic oligonucleotide
cauuugaggcaggcacucu

SEQ ID NO: 2808692 - RNA, 19 nt, Artificial Sequence
  Description of Artificial Sequence: Synthetic oligonucleotide
gguggauguggagguugga

SEQ ID NO: 2808693 - RNA, 19 nt, Artificial Sequence
  Description of Artificial Sequence: Synthetic oligonucleotide
gguucgagcucuggcugaa

SEQ ID NO: 2808694 - RNA, 19 nt, Artificial Sequence
  Description of Artificial Sequence: Synthetic oligonucleotide
ccucucucccguguggaca

SEQ ID NO: 2808695 - RNA, 19 nt, Artificial Sequence
  Description of Artificial Sequence: Synthetic oligonucleotide
gcccucagccaugaaaagu

SEQ ID NO: 2808696 - RNA, 19 nt, Artificial Sequence
  Description of Artificial Sequence: Synthetic oligonucleotide
gccacagggguagggcuuc

SEQ ID NO: 2808697 - RNA, 19 nt, Artificial Sequence
  Description of Artificial Sequence: Synthetic oligonucleotide
gguggauguggagguucga

SEQ ID NO: 2808698 - RNA, 19 nt, Artificial Sequence
  Description of Artificial Sequence: Synthetic oligonucleotide
cccuuuccgcacuccccac

SEQ ID NO: 2808699 - RNA, 19 nt, Artificial Sequence
  Description of Artificial Sequence: Synthetic oligonucleotide
cccagggcuuuauacauuu

SEQ ID NO: 2808700 - RNA, 19 nt, Artificial Sequence
  Description of Artificial Sequence: Synthetic oligonucleotide
ggccugugcccucagccau

SEQ ID NO: 2808701 - RNA, 19 nt, Artificial Sequence
  Description of Artificial Sequence: Synthetic oligonucleotide
cagugcugagccagccaau

SEQ ID NO: 2808702 - RNA, 19 nt, Artificial Sequence
  Description of Artificial Sequence: Synthetic oligonucleotide
ccuucccgugaacccgcug

SEQ ID NO: 2808703 - RNA, 19 nt, Artificial Sequence
  Description of Artificial Sequence: Synthetic oligonucleotide
ccucagccaugaaaaguau

SEQ ID NO: 2808704 - RNA, 19 nt, Artificial Sequence
  Description of Artificial Sequence: Synthetic oligonucleotide
ccgcugacugaagcucaug

SEQ ID NO: 2808705 - RNA, 19 nt, Artificial Sequence
  Description of Artificial Sequence: Synthetic oligonucleotide
cgcugguggauaugcaggu

SEQ ID NO: 2808706 - RNA, 19 nt, Artificial Sequence
  Description of Artificial Sequence: Synthetic oligonucleotide
ccgcauuccucacacccau

SEQ ID NO: 2808707 - RNA, 19 nt, Artificial Sequence
  Description of Artificial Sequence: Synthetic oligonucleotide
ccgcacuccccacacuugu

SEQ ID NO: 2808708 - RNA, 19 nt, Artificial Sequence
  Description of Artificial Sequence: Synthetic oligonucleotide
cagcauugguagggcuucu

SEQ ID NO: 2808709 - RNA, 19 nt, Artificial Sequence
  Description of Artificial Sequence: Synthetic oligonucleotide
ccccacacuuguagggccu

SEQ ID NO: 2808710 - RNA, 19 nt, Artificial Sequence
  Description of Artificial Sequence: Synthetic oligonucleotide
gucucuggcugaagcccuu

SEQ ID NO: 2808711 - RNA, 19 nt, Artificial Sequence
  Description of Artificial Sequence: Synthetic oligonucleotide
cugugcccucagccaugaa

SEQ ID NO: 2808712 - RNA, 19 nt, Artificial Sequence
  Description of Artificial Sequence: Synthetic oligonucleotide
gcugguggauaugcagguu

SEQ ID NO: 2808713 - RNA, 19 nt, Artificial Sequence
  Description of Artificial Sequence: Synthetic oligonucleotide
gugcacccugagguggauu

SEQ ID NO: 2808714 - RNA, 19 nt, Artificial Sequence
  Description of Artificial Sequence: Synthetic oligonucleotide
ccacuggccugugcccuca

SEQ ID NO: 2808715 - RNA, 19 nt, Artificial Sequence
  Description of Artificial Sequence: Synthetic oligonucleotide
ccacagggguagggcuucu

SEQ ID NO: 2808716 - RNA, 19 nt, Artificial Sequence
  Description of Artificial Sequence: Synthetic oligonucleotide
aacuucaaaagucagaaac

SEQ ID NO: 2808717 - RNA, 19 nt, Artificial Sequence
  Description of Artificial Sequence: Synthetic oligonucleotide
uuaauaauggacuucacga

SEQ ID NO: 2808718 - RNA, 19 nt, Artificial Sequence
  Description of Artificial Sequence: Synthetic oligonucleotide
ucaaaagucagaaacuccc

SEQ ID NO: 2808719 - RNA, 19 nt, Artificial Sequence
  Description of Artificial Sequence: Synthetic oligonucleotide
aauaauggacuucacgaag

SEQ ID NO: 2808720 - RNA, 19 nt, Artificial Sequence
  Description of Artificial Sequence: Synthetic oligonucleotide
auuaauaauggacuucacg

SEQ ID NO: 2808721 - RNA, 19 nt, Artificial Sequence
  Description of Artificial Sequence: Synthetic oligonucleotide
uggucauucacucuuagcc

SEQ ID NO: 2808722 - RNA, 19 nt, Artificial Sequence
  Description of Artificial Sequence: Synthetic oligonucleotide
uuaaguggaacuucaaaag

SEQ ID NO: 2808723 - RNA, 19 nt, Artificial Sequence
  Description of Artificial Sequence: Synthetic oligonucleotide
auuaaguggaacuucaaaa

SEQ ID NO: 2808724 - RNA, 19 nt, Artificial Sequence
  Description of Artificial Sequence: Synthetic oligonucleotide
agggguaagaacaaugucc

SEQ ID NO: 2808725 - RNA, 19 nt, Artificial Sequence
  Description of Artificial Sequence: Synthetic oligonucleotide
auucacagcuaucagcugg

SEQ ID NO: 2808726 - RNA, 19 nt, Artificial Sequence
  Description of Artificial Sequence: Synthetic oligonucleotide
aagucagaaacuccccugg

SEQ ID NO: 2808727 - RNA, 19 nt, Artificial Sequence
  Description of Artificial Sequence: Synthetic oligonucleotide
uuuggaaucugcaucuggc

SEQ ID NO: 2808728 - RNA, 19 nt, Artificial Sequence
  Description of Artificial Sequence: Synthetic oligonucleotide
uccccuuugacacugacac

SEQ ID NO: 2808729 - RNA, 19 nt, Artificial Sequence
  Description of Artificial Sequence: Synthetic oligonucleotide
uuugacacugacaccaagc

SEQ ID NO: 2808730 - RNA, 19 nt, Artificial Sequence
  Description of Artificial Sequence: Synthetic oligonucleotide
uccaacucuguucaauggg

SEQ ID NO: 2808731 - RNA, 19 nt, Artificial Sequence
  Description of Artificial Sequence: Synthetic oligonucleotide
gauucccaaaucugcaugg

SEQ ID NO: 2808732 - RNA, 19 nt, Artificial Sequence
  Description of Artificial Sequence: Synthetic oligonucleotide
aaagucagaaacuccccug

SEQ ID NO: 2808733 - RNA, 19 nt, Artificial Sequence
  Description of Artificial Sequence: Synthetic oligonucleotide
uuuuggaaucugcaucugg

SEQ ID NO: 2808734 - RNA, 19 nt, Artificial Sequence
  Description of Artificial Sequence: Synthetic oligonucleotide
gacacugacaccaagcccc

SEQ ID NO: 2808735 - RNA, 19 nt, Artificial Sequence
  Description of Artificial Sequence: Synthetic oligonucleotide
aaaagucagaaacuccccu

SEQ ID NO: 2808736 - RNA, 19 nt, Artificial Sequence
  Description of Artificial Sequence: Synthetic oligonucleotide
aaguggaacuucaaaaguc

SEQ ID NO: 2808737 - RNA, 19 nt, Artificial Sequence
  Description of Artificial Sequence: Synthetic oligonucleotide
agugcagcauuccuggugg

SEQ ID NO: 2808738 - RNA, 19 nt, Artificial Sequence
  Description of Artificial Sequence: Synthetic oligonucleotide
uucaaaagucagaaacucc

SEQ ID NO: 2808739 - RNA, 19 nt, Artificial Sequence
  Description of Artificial Sequence: Synthetic oligonucleotide
ucaaucccgcuguagaggg

SEQ ID NO: 2808740 - RNA, 19 nt, Artificial Sequence
  Description of Artificial Sequence: Synthetic oligonucleotide
uaaguggaacuucaaaagu

SEQ ID NO: 2808741 - RNA, 19 nt, Artificial Sequence
  Description of Artificial Sequence: Synthetic oligonucleotide
uugacacugacaccaagcc

SEQ ID NO: 2808742 - RNA, 19 nt, Artificial Sequence
  Description of Artificial Sequence: Synthetic oligonucleotide
uucuuuuggaaucugcauc

SEQ ID NO: 2808743 - RNA, 19 nt, Artificial Sequence
  Description of Artificial Sequence: Synthetic oligonucleotide
ucagcuuucguuucuuuug

SEQ ID NO: 2808744 - RNA, 19 nt, Artificial Sequence
  Description of Artificial Sequence: Synthetic oligonucleotide
acugacaccaagccccugc

SEQ ID NO: 2808745 - RNA, 19 nt, Artificial Sequence
  Description of Artificial Sequence: Synthetic oligonucleotide
gaucaugccacgguggacg

SEQ ID NO: 2808746 - RNA, 19 nt, Artificial Sequence
  Description of Artificial Sequence: Synthetic oligonucleotide
uucacgaagauucccaaau

SEQ ID NO: 2808747 - RNA, 19 nt, Artificial Sequence
  Description of Artificial Sequence: Synthetic oligonucleotide
caucuuuggaugcagcucc

SEQ ID NO: 2808748 - RNA, 19 nt, Artificial Sequence
  Description of Artificial Sequence: Synthetic oligonucleotide
uguucaaugggcagcucag

SEQ ID NO: 2808749 - RNA, 19 nt, Artificial Sequence
  Description of Artificial Sequence: Synthetic oligonucleotide
auugcugauccuccuggcc

SEQ ID NO: 2808750 - RNA, 19 nt, Artificial Sequence
  Description of Artificial Sequence: Synthetic oligonucleotide
uccauucacagcuaucagc

SEQ ID NO: 2808751 - RNA, 19 nt, Artificial Sequence
  Description of Artificial Sequence: Synthetic oligonucleotide
uuucguuucuuuuggaauc

SEQ ID NO: 2808752 - RNA, 19 nt, Artificial Sequence
  Description of Artificial Sequence: Synthetic oligonucleotide
agagacucuccauucacag

SEQ ID NO: 2808753 - RNA, 19 nt, Artificial Sequence
  Description of Artificial Sequence: Synthetic oligonucleotide
ucagggguaagaacaaugu

SEQ ID NO: 2808754 - RNA, 19 nt, Artificial Sequence
  Description of Artificial Sequence: Synthetic oligonucleotide
aacucuguucaaugggcag

SEQ ID NO: 2808755 - RNA, 19 nt, Artificial Sequence
  Description of Artificial Sequence: Synthetic oligonucleotide
uuggcuuugcccagcagag

SEQ ID NO: 2808756 - RNA, 19 nt, Artificial Sequence
  Description of Artificial Sequence: Synthetic oligonucleotide
auugcauugcugauccucc

SEQ ID NO: 2808757 - RNA, 19 nt, Artificial Sequence
  Description of Artificial Sequence: Synthetic oligonucleotide
cugagugcagcauuccugg

SEQ ID NO: 2808758 - RNA, 19 nt, Artificial Sequence
  Description of Artificial Sequence: Synthetic oligonucleotide
uuuggaacgguccccuuug

SEQ ID NO: 2808759 - RNA, 19 nt, Artificial Sequence
  Description of Artificial Sequence: Synthetic oligonucleotide
ucuccauucacagcuauca

SEQ ID NO: 2808760 - RNA, 19 nt, Artificial Sequence
  Description of Artificial Sequence: Synthetic oligonucleotide
aucagcuggucauucacuc

SEQ ID NO: 2808761 - RNA, 19 nt, Artificial Sequence
  Description of Artificial Sequence: Synthetic oligonucleotide
uuagccuuccaucuuugga

SEQ ID NO: 2808762 - RNA, 19 nt, Artificial Sequence
  Description of Artificial Sequence: Synthetic oligonucleotide
uaauaauggacuucacgaa

SEQ ID NO: 2808763 - RNA, 19 nt, Artificial Sequence
  Description of Artificial Sequence: Synthetic oligonucleotide
uucucuuuggaacgguccc

SEQ ID NO: 2808764 - RNA, 19 nt, Artificial Sequence
  Description of Artificial Sequence: Synthetic oligonucleotide
caaugggcagcucaggugc

SEQ ID NO: 2808765 - RNA, 19 nt, Artificial Sequence
  Description of Artificial Sequence: Synthetic oligonucleotide
uguagagggagugugagau

SEQ ID NO: 2808766 - RNA, 19 nt, Artificial Sequence
  Description of Artificial Sequence: Synthetic oligonucleotide
uggaaucugcaucuggcug

SEQ ID NO: 2808767 - RNA, 19 nt, Artificial Sequence
  Description of Artificial Sequence: Synthetic oligonucleotide
ucugcaugguucucuuugg

SEQ ID NO: 2808768 - RNA, 19 nt, Artificial Sequence
  Description of Artificial Sequence: Synthetic oligonucleotide
gaacgguccccuuugacac

SEQ ID NO: 2808769 - RNA, 19 nt, Artificial Sequence
  Description of Artificial Sequence: Synthetic oligonucleotide
uagagggagugugagaucc

SEQ ID NO: 2808770 - RNA, 19 nt, Artificial Sequence
  Description of Artificial Sequence: Synthetic oligonucleotide
uggaacuucaaaagucaga

SEQ ID NO: 2808771 - RNA, 19 nt, Artificial Sequence
  Description of Artificial Sequence: Synthetic oligonucleotide
agauccugcgcucucgguc

SEQ ID NO: 2808772 - RNA, 19 nt, Artificial Sequence
  Description of Artificial Sequence: Synthetic oligonucleotide
caaaagucagaaacucccc

SEQ ID NO: 2808773 - RNA, 19 nt, Artificial Sequence
  Description of Artificial Sequence: Synthetic oligonucleotide
uucaaugggcagcucaggu

SEQ ID NO: 2808774 - RNA, 19 nt, Artificial Sequence
  Description of Artificial Sequence: Synthetic oligonucleotide
agauucccaaaucugcaug

SEQ ID NO: 2808775 - RNA, 19 nt, Artificial Sequence
  Description of Artificial Sequence: Synthetic oligonucleotide
ggaaucugcaucuggcugg

SEQ ID NO: 2808776 - RNA, 19 nt, Artificial Sequence
  Description of Artificial Sequence: Synthetic oligonucleotide
acucuguucaaugggcagc

SEQ ID NO: 2808777 - RNA, 19 nt, Artificial Sequence
  Description of Artificial Sequence: Synthetic oligonucleotide
uccugguuggcuuugccca

SEQ ID NO: 2808778 - RNA, 19 nt, Artificial Sequence
  Description of Artificial Sequence: Synthetic oligonucleotide
auccaacucuguucaaugg

SEQ ID NO: 2808779 - RNA, 19 nt, Artificial Sequence
  Description of Artificial Sequence: Synthetic oligonucleotide
cuucaaaagucagaaacuc

SEQ ID NO: 2808780 - RNA, 19 nt, Artificial Sequence
  Description of Artificial Sequence: Synthetic oligonucleotide
uauucugcugagugcagca

SEQ ID NO: 2808781 - RNA, 19 nt, Artificial Sequence
  Description of Artificial Sequence: Synthetic oligonucleotide
uuucuuuuggaaucugcau

SEQ ID NO: 2808782 - RNA, 19 nt, Artificial Sequence
  Description of Artificial Sequence: Synthetic oligonucleotide
aaucccgcuguagagggag

SEQ ID NO: 2808783 - RNA, 19 nt, Artificial Sequence
  Description of Artificial Sequence: Synthetic oligonucleotide
agucauuaaguggaacuuc

SEQ ID NO: 2808784 - RNA, 19 nt, Artificial Sequence
  Description of Artificial Sequence: Synthetic oligonucleotide
aagauucccaaaucugcau

SEQ ID NO: 2808785 - RNA, 19 nt, Artificial Sequence
  Description of Artificial Sequence: Synthetic oligonucleotide
ucaaugggcagcucaggug

SEQ ID NO: 2808786 - RNA, 19 nt, Artificial Sequence
  Description of Artificial Sequence: Synthetic oligonucleotide
accauuaauaauggacuuc

SEQ ID NO: 2808787 - RNA, 19 nt, Artificial Sequence
  Description of Artificial Sequence: Synthetic oligonucleotide
ugacacugacaccaagccc

SEQ ID NO: 2808788 - RNA, 19 nt, Artificial Sequence
  Description of Artificial Sequence: Synthetic oligonucleotide
uggugggagacucuuccag

SEQ ID NO: 2808789 - RNA, 19 nt, Artificial Sequence
  Description of Artificial Sequence: Synthetic oligonucleotide
augagcuggaucaugccac

SEQ ID NO: 2808790 - RNA, 19 nt, Artificial Sequence
  Description of Artificial Sequence: Synthetic oligonucleotide
acgaugagcuggaucaugc

SEQ ID NO: 2808791 - RNA, 19 nt, Artificial Sequence
  Description of Artificial Sequence: Synthetic oligonucleotide
uuccaggcccucaaucccg

SEQ ID NO: 2808792 - RNA, 19 nt, Artificial Sequence
  Description of Artificial Sequence: Synthetic oligonucleotide
uagccuuccaucuuuggau

SEQ ID NO: 2808793 - RNA, 19 nt, Artificial Sequence
  Description of Artificial Sequence: Synthetic oligonucleotide
ugagauccugcgcucucgg

SEQ ID NO: 2808794 - RNA, 19 nt, Artificial Sequence
  Description of Artificial Sequence: Synthetic oligonucleotide
uggacgauggaccuccgaa

SEQ ID NO: 2808795 - RNA, 19 nt, Artificial Sequence
  Description of Artificial Sequence: Synthetic oligonucleotide
cauccaacucuguucaaug

SEQ ID NO: 2808796 - RNA, 19 nt, Artificial Sequence
  Description of Artificial Sequence: Synthetic oligonucleotide
aagagucuccauggcuucc

SEQ ID NO: 2808797 - RNA, 19 nt, Artificial Sequence
  Description of Artificial Sequence: Synthetic oligonucleotide
uccaucuuuggaugcagcu

SEQ ID NO: 2808798 - RNA, 19 nt, Artificial Sequence
  Description of Artificial Sequence: Synthetic oligonucleotide
aggagaccgaagcucauug

SEQ ID NO: 2808799 - RNA, 19 nt, Artificial Sequence
  Description of Artificial Sequence: Synthetic oligonucleotide
acuucaaaagucagaaacu

SEQ ID NO: 2808800 - RNA, 19 nt, Artificial Sequence
  Description of Artificial Sequence: Synthetic oligonucleotide
ugagcuggaucaugccacg

SEQ ID NO: 2808801 - RNA, 19 nt, Artificial Sequence
  Description of Artificial Sequence: Synthetic oligonucleotide
ucacucuuagccuuccauc

SEQ ID NO: 2808802 - RNA, 19 nt, Artificial Sequence
  Description of Artificial Sequence: Synthetic oligonucleotide
ugcagcagggcucccagga

SEQ ID NO: 2808803 - RNA, 19 nt, Artificial Sequence
  Description of Artificial Sequence: Synthetic oligonucleotide
ucugcugagugcagcauuc

SEQ ID NO: 2808804 - RNA, 19 nt, Artificial Sequence
  Description of Artificial Sequence: Synthetic oligonucleotide
agugugagauccugcgcuc

SEQ ID NO: 2808805 - RNA, 19 nt, Artificial Sequence
  Description of Artificial Sequence: Synthetic oligonucleotide
gagaccgaagcucauugca

SEQ ID NO: 2808806 - RNA, 19 nt, Artificial Sequence
  Description of Artificial Sequence: Synthetic oligonucleotide
uucacucuuagccuuccau

SEQ ID NO: 2808807 - RNA, 19 nt, Artificial Sequence
  Description of Artificial Sequence: Synthetic oligonucleotide
aguggaacuucaaaaguca

SEQ ID NO: 2808808 - RNA, 19 nt, Artificial Sequence
  Description of Artificial Sequence: Synthetic oligonucleotide
cucccaccauuaauaaugg

SEQ ID NO: 2808809 - RNA, 19 nt, Artificial Sequence
  Description of Artificial Sequence: Synthetic oligonucleotide
ucucggucauccaacucug

SEQ ID NO: 2808810 - RNA, 19 nt, Artificial Sequence
  Description of Artificial Sequence: Synthetic oligonucleotide
agaacaauguccucaucuu

SEQ ID NO: 2808811 - RNA, 19 nt, Artificial Sequence
  Description of Artificial Sequence: Synthetic oligonucleotide
uggacuucacgaagauucc

SEQ ID NO: 2808812 - RNA, 19 nt, Artificial Sequence
  Description of Artificial Sequence: Synthetic oligonucleotide
cauuauucugcugagugca

SEQ ID NO: 2808813 - RNA, 19 nt, Artificial Sequence
  Description of Artificial Sequence: Synthetic oligonucleotide
cuaucagcuggucauucac

SEQ ID NO: 2808814 - RNA, 19 nt, Artificial Sequence
  Description of Artificial Sequence: Synthetic oligonucleotide
aaaucugcaugguucucuu

SEQ ID NO: 2808815 - RNA, 19 nt, Artificial Sequence
  Description of Artificial Sequence: Synthetic oligonucleotide
guuggcuuugcccagcaga

SEQ ID NO: 2808816 - RNA, 19 nt, Artificial Sequence
  Description of Artificial Sequence: Synthetic oligonucleotide
gaagauucccaaaucugca

SEQ ID NO: 2808817 - RNA, 19 nt, Artificial Sequence
  Description of Artificial Sequence: Synthetic oligonucleotide
uggaucaugccacggugga

SEQ ID NO: 2808818 - RNA, 19 nt, Artificial Sequence
  Description of Artificial Sequence: Synthetic oligonucleotide
uaucagcuggucauucacu

SEQ ID NO: 2808819 - RNA, 19 nt, Artificial Sequence
  Description of Artificial Sequence: Synthetic oligonucleotide
cuggaucaugccacggugg

SEQ ID NO: 2808820 - RNA, 19 nt, Artificial Sequence
  Description of Artificial Sequence: Synthetic oligonucleotide
cagcuuucguuucuuuugg

SEQ ID NO: 2808821 - RNA, 19 nt, Artificial Sequence
  Description of Artificial Sequence: Synthetic oligonucleotide
auaauggacuucacgaaga

SEQ ID NO: 2808822 - RNA, 19 nt, Artificial Sequence
  Description of Artificial Sequence: Synthetic oligonucleotide
gacaccaagccccugcaga

SEQ ID NO: 2808823 - RNA, 19 nt, Artificial Sequence
  Description of Artificial Sequence: Synthetic oligonucleotide
uuccugguuggcuuugccc

SEQ ID NO: 2808824 - RNA, 19 nt, Artificial Sequence
  Description of Artificial Sequence: Synthetic oligonucleotide
ucuuagccuuccaucuuug

SEQ ID NO: 2808825 - RNA, 19 nt, Artificial Sequence
  Description of Artificial Sequence: Synthetic oligonucleotide
gcucccaccauuaauaaug

SEQ ID NO: 2808826 - RNA, 19 nt, Artificial Sequence
  Description of Artificial Sequence: Synthetic oligonucleotide
gagugcagcauuccuggug

SEQ ID NO: 2808827 - RNA, 19 nt, Artificial Sequence
  Description of Artificial Sequence: Synthetic oligonucleotide
uuauucugcugagugcagc

SEQ ID NO: 2808828 - RNA, 19 nt, Artificial Sequence
  Description of Artificial Sequence: Synthetic oligonucleotide
ugcauugcugauccuccug

SEQ ID NO: 2808829 - RNA, 19 nt, Artificial Sequence
  Description of Artificial Sequence: Synthetic oligonucleotide
uaauggacuucacgaagau

SEQ ID NO: 2808830 - RNA, 19 nt, Artificial Sequence
  Description of Artificial Sequence: Synthetic oligonucleotide
ucauuaaguggaacuucaa

SEQ ID NO: 2808831 - RNA, 19 nt, Artificial Sequence
  Description of Artificial Sequence: Synthetic oligonucleotide
cucaaucccgcuguagagg

SEQ ID NO: 2808832 - RNA, 19 nt, Artificial Sequence
  Description of Artificial Sequence: Synthetic oligonucleotide
gggagugugagauccugcg

SEQ ID NO: 2808833 - RNA, 19 nt, Artificial Sequence
  Description of Artificial Sequence: Synthetic oligonucleotide
ucacgaagauucccaaauc

SEQ ID NO: 2808834 - RNA, 19 nt, Artificial Sequence
  Description of Artificial Sequence: Synthetic oligonucleotide
agaaacuccccuggucccc

SEQ ID NO: 2808835 - RNA, 19 nt, Artificial Sequence
  Description of Artificial Sequence: Synthetic oligonucleotide
gacgauggaccuccgaaga

SEQ ID NO: 2808836 - RNA, 19 nt, Artificial Sequence
  Description of Artificial Sequence: Synthetic oligonucleotide
cuuagccuuccaucuuugg

SEQ ID NO: 2808837 - RNA, 19 nt, Artificial Sequence
  Description of Artificial Sequence: Synthetic oligonucleotide
ugcaugguucucuuuggaa

SEQ ID NO: 2808838 - RNA, 19 nt, Artificial Sequence
  Description of Artificial Sequence: Synthetic oligonucleotide
gagacucuccauucacagc

SEQ ID NO: 2808839 - RNA, 19 nt, Artificial Sequence
  Description of Artificial Sequence: Synthetic oligonucleotide
gccacgaugagcuggauca

SEQ ID NO: 2808840 - RNA, 19 nt, Artificial Sequence
  Description of Artificial Sequence: Synthetic oligonucleotide
cuuccaggcccucaauccc

SEQ ID NO: 2808841 - RNA, 19 nt, Artificial Sequence
  Description of Artificial Sequence: Synthetic oligonucleotide
ggaacuucaaaagucagaa

SEQ ID NO: 2808842 - RNA, 19 nt, Artificial Sequence
  Description of Artificial Sequence: Synthetic oligonucleotide
cauuaauaauggacuucac

SEQ ID NO: 2808843 - RNA, 19 nt, Artificial Sequence
  Description of Artificial Sequence: Synthetic oligonucleotide
agucuccauggcuuccugg

SEQ ID NO: 2808844 - RNA, 19 nt, Artificial Sequence
  Description of Artificial Sequence: Synthetic oligonucleotide
gaaucugcaucuggcuggg

SEQ ID NO: 2808845 - RNA, 19 nt, Artificial Sequence
  Description of Artificial Sequence: Synthetic oligonucleotide
cagaucccgagucauuaag

SEQ ID NO: 2808846 - RNA, 19 nt, Artificial Sequence
  Description of Artificial Sequence: Synthetic oligonucleotide
aucagggguaagaacaaug

SEQ ID NO: 2808847 - RNA, 19 nt, Artificial Sequence
  Description of Artificial Sequence: Synthetic oligonucleotide
acgaagauucccaaaucug

SEQ ID NO: 2808848 - RNA, 19 nt, Artificial Sequence
  Description of Artificial Sequence: Synthetic oligonucleotide
gauccugcgcucucgguca

SEQ ID NO: 2808849 - RNA, 19 nt, Artificial Sequence
  Description of Artificial Sequence: Synthetic oligonucleotide
uccgaagagucuccauggc

SEQ ID NO: 2808850 - RNA, 19 nt, Artificial Sequence
  Description of Artificial Sequence: Synthetic oligonucleotide
accgaagcucauugcauug

SEQ ID NO: 2808851 - RNA, 19 nt, Artificial Sequence
  Description of Artificial Sequence: Synthetic oligonucleotide
gucauuaaguggaacuuca

SEQ ID NO: 2808852 - RNA, 19 nt, Artificial Sequence
  Description of Artificial Sequence: Synthetic oligonucleotide
uuccaucuuuggaugcagc

SEQ ID NO: 2808853 - RNA, 19 nt, Artificial Sequence
  Description of Artificial Sequence: Synthetic oligonucleotide
guucucuuuggaacggucc

SEQ ID NO: 2808854 - RNA, 19 nt, Artificial Sequence
  Description of Artificial Sequence: Synthetic oligonucleotide
gugggagacucuuccaggc

SEQ ID NO: 2808855 - RNA, 19 nt, Artificial Sequence
  Description of Artificial Sequence: Synthetic oligonucleotide
uucguuucuuuuggaaucu

SEQ ID NO: 2808856 - RNA, 19 nt, Artificial Sequence
  Description of Artificial Sequence: Synthetic oligonucleotide
gauccuccuggccacgaug

SEQ ID NO: 2808857 - RNA, 19 nt, Artificial Sequence
  Description of Artificial Sequence: Synthetic oligonucleotide
cauuaaguggaacuucaaa

SEQ ID NO: 2808858 - RNA, 19 nt, Artificial Sequence
  Description of Artificial Sequence: Synthetic oligonucleotide
agccuuccaucuuuggaug

SEQ ID NO: 2808859 - RNA, 19 nt, Artificial Sequence
  Description of Artificial Sequence: Synthetic oligonucleotide
gaagagucuccauggcuuc

SEQ ID NO: 2808860 - RNA, 19 nt, Artificial Sequence
  Description of Artificial Sequence: Synthetic oligonucleotide
ugggagacucuuccaggcc

SEQ ID NO: 2808861 - RNA, 19 nt, Artificial Sequence
  Description of Artificial Sequence: Synthetic oligonucleotide
cuuugacacugacaccaag

SEQ ID NO: 2808862 - RNA, 19 nt, Artificial Sequence
  Description of Artificial Sequence: Synthetic oligonucleotide
gagugugagauccugcgcu

SEQ ID NO: 2808863 - RNA, 19 nt, Artificial Sequence
  Description of Artificial Sequence: Synthetic oligonucleotide
gcauugcugauccuccugg

SEQ ID NO: 2808864 - RNA, 19 nt, Artificial Sequence
  Description of Artificial Sequence: Synthetic oligonucleotide
cccauuauucugcugagug

SEQ ID NO: 2808865 - RNA, 19 nt, Artificial Sequence
  Description of Artificial Sequence: Synthetic oligonucleotide
ugcugagugcagcauuccu

SEQ ID NO: 2808866 - RNA, 19 nt, Artificial Sequence
  Description of Artificial Sequence: Synthetic oligonucleotide
gacuucacgaagauuccca

SEQ ID NO: 2808867 - RNA, 19 nt, Artificial Sequence
  Description of Artificial Sequence: Synthetic oligonucleotide
agcauuccuggugggagac

SEQ ID NO: 2808868 - RNA, 19 nt, Artificial Sequence
  Description of Artificial Sequence: Synthetic oligonucleotide
ucauucacucuuagccuuc

SEQ ID NO: 2808869 - RNA, 19 nt, Artificial Sequence
  Description of Artificial Sequence: Synthetic oligonucleotide
acgauggaccuccgaagag

SEQ ID NO: 2808870 - RNA, 19 nt, Artificial Sequence
  Description of Artificial Sequence: Synthetic oligonucleotide
ccaacucuguucaaugggc

SEQ ID NO: 2808871 - RNA, 19 nt, Artificial Sequence
  Description of Artificial Sequence: Synthetic oligonucleotide
ggucauccaacucuguuca

SEQ ID NO: 2808872 - RNA, 19 nt, Artificial Sequence
  Description of Artificial Sequence: Synthetic oligonucleotide
ggugggagacucuuccagg

SEQ ID NO: 2808873 - RNA, 19 nt, Artificial Sequence
  Description of Artificial Sequence: Synthetic oligonucleotide
ugcagcucccaccauuaau

SEQ ID NO: 2808874 - RNA, 19 nt, Artificial Sequence
  Description of Artificial Sequence: Synthetic oligonucleotide
ucaggugcagcagggcucc

SEQ ID NO: 2808875 - RNA, 19 nt, Artificial Sequence
  Description of Artificial Sequence: Synthetic oligonucleotide
ucucuuuggaacggucccc

SEQ ID NO: 2808876 - RNA, 19 nt, Artificial Sequence
  Description of Artificial Sequence: Synthetic oligonucleotide
ucauccaacucuguucaau

SEQ ID NO: 2808877 - RNA, 19 nt, Artificial Sequence
  Description of Artificial Sequence: Synthetic oligonucleotide
acuucacgaagauucccaa

SEQ ID NO: 2808878 - RNA, 19 nt, Artificial Sequence
  Description of Artificial Sequence: Synthetic oligonucleotide
cuuugcccagcagagacuc

SEQ ID NO: 2808879 - RNA, 19 nt, Artificial Sequence
  Description of Artificial Sequence: Synthetic oligonucleotide
agcagagacucuccauuca

SEQ ID NO: 2808880 - RNA, 19 nt, Artificial Sequence
  Description of Artificial Sequence: Synthetic oligonucleotide
gauggaccuccgaagaguc

SEQ ID NO: 2808881 - RNA, 19 nt, Artificial Sequence
  Description of Artificial Sequence: Synthetic oligonucleotide
uggaccuccgaagagucuc

SEQ ID NO: 2808882 - RNA, 19 nt, Artificial Sequence
  Description of Artificial Sequence: Synthetic oligonucleotide
ucggucauccaacucuguu

SEQ ID NO: 2808883 - RNA, 19 nt, Artificial Sequence
  Description of Artificial Sequence: Synthetic oligonucleotide
agcuaucagcuggucauuc

SEQ ID NO: 2808884 - RNA, 19 nt, Artificial Sequence
  Description of Artificial Sequence: Synthetic oligonucleotide
uaagaacaauguccucauc

SEQ ID NO: 2808885 - RNA, 19 nt, Artificial Sequence
  Description of Artificial Sequence: Synthetic oligonucleotide
ugcagaucccgagucauua

SEQ ID NO: 2808886 - RNA, 19 nt, Artificial Sequence
  Description of Artificial Sequence: Synthetic oligonucleotide
gucagaaacuccccugguc

SEQ ID NO: 2808887 - RNA, 19 nt, Artificial Sequence
  Description of Artificial Sequence: Synthetic oligonucleotide
ugugagauccugcgcucuc

SEQ ID NO: 2808888 - RNA, 19 nt, Artificial Sequence
  Description of Artificial Sequence: Synthetic oligonucleotide
ggcuuugcccagcagagac

SEQ ID NO: 2808889 - RNA, 19 nt, Artificial Sequence
  Description of Artificial Sequence: Synthetic oligonucleotide
uucugcugagugcagcauu

SEQ ID NO: 2808890 - RNA, 19 nt, Artificial Sequence
  Description of Artificial Sequence: Synthetic oligonucleotide
uggaacgguccccuuugac

SEQ ID NO: 2808891 - RNA, 19 nt, Artificial Sequence
  Description of Artificial Sequence: Synthetic oligonucleotide
cuguucaaugggcagcuca

SEQ ID NO: 2808892 - RNA, 19 nt, Artificial Sequence
  Description of Artificial Sequence: Synthetic oligonucleotide
cagggcucccaggagaccg

SEQ ID NO: 2808893 - RNA, 19 nt, Artificial Sequence
  Description of Artificial Sequence: Synthetic oligonucleotide
ggaacgguccccuuugaca

SEQ ID NO: 2808894 - RNA, 19 nt, Artificial Sequence
  Description of Artificial Sequence: Synthetic oligonucleotide
cucaggugcagcagggcuc

SEQ ID NO: 2808895 - RNA, 19 nt, Artificial Sequence
  Description of Artificial Sequence: Synthetic oligonucleotide
agucagaaacuccccuggu

SEQ ID NO: 2808896 - RNA, 19 nt, Artificial Sequence
  Description of Artificial Sequence: Synthetic oligonucleotide
cuccauucacagcuaucag

SEQ ID NO: 2808897 - RNA, 19 nt, Artificial Sequence
  Description of Artificial Sequence: Synthetic oligonucleotide
aauggacuucacgaagauu

SEQ ID NO: 2808898 - RNA, 19 nt, Artificial Sequence
  Description of Artificial Sequence: Synthetic oligonucleotide
guucaaugggcagcucagg

SEQ ID NO: 2808899 - RNA, 19 nt, Artificial Sequence
  Description of Artificial Sequence: Synthetic oligonucleotide
gaacuucaaaagucagaaa

SEQ ID NO: 2808900 - RNA, 19 nt, Artificial Sequence
  Description of Artificial Sequence: Synthetic oligonucleotide
acaccaagccccugcagau

SEQ ID NO: 2808901 - RNA, 19 nt, Artificial Sequence
  Description of Artificial Sequence: Synthetic oligonucleotide
gcucccaggagaccgaagc

SEQ ID NO: 2808902 - RNA, 19 nt, Artificial Sequence
  Description of Artificial Sequence: Synthetic oligonucleotide
gggagacucuuccaggccc

SEQ ID NO: 2808903 - RNA, 19 nt, Artificial Sequence
  Description of Artificial Sequence: Synthetic oligonucleotide
ggacgauggaccuccgaag

SEQ ID NO: 2808904 - RNA, 19 nt, Artificial Sequence
  Description of Artificial Sequence: Synthetic oligonucleotide
cauuccuggugggagacuc

SEQ ID NO: 2808905 - RNA, 19 nt, Artificial Sequence
  Description of Artificial Sequence: Synthetic oligonucleotide
auuauucugcugagugcag

SEQ ID NO: 2808906 - RNA, 19 nt, Artificial Sequence
  Description of Artificial Sequence: Synthetic oligonucleotide
cuuucguuucuuuuggaau

SEQ ID NO: 2808907 - RNA, 19 nt, Artificial Sequence
  Description of Artificial Sequence: Synthetic oligonucleotide
cagcucaggugcagcaggg

SEQ ID NO: 2808908 - RNA, 19 nt, Artificial Sequence
  Description of Artificial Sequence: Synthetic oligonucleotide
caacucuguucaaugggca

SEQ ID NO: 2808909 - RNA, 19 nt, Artificial Sequence
  Description of Artificial Sequence: Synthetic oligonucleotide
cagcagagacucuccauuc

SEQ ID NO: 2808910 - RNA, 19 nt, Artificial Sequence
  Description of Artificial Sequence: Synthetic oligonucleotide
guaagaacaauguccucau

SEQ ID NO: 2808911 - RNA, 19 nt, Artificial Sequence
  Description of Artificial Sequence: Synthetic oligonucleotide
ugcccagcagagacucucc

SEQ ID NO: 2808912 - RNA, 19 nt, Artificial Sequence
  Description of Artificial Sequence: Synthetic oligonucleotide
acuccccugguccccauca

SEQ ID NO: 2808913 - RNA, 19 nt, Artificial Sequence
  Description of Artificial Sequence: Synthetic oligonucleotide
aggcccucaaucccgcugu

SEQ ID NO: 2808914 - RNA, 19 nt, Artificial Sequence
  Description of Artificial Sequence: Synthetic oligonucleotide
cacgaagauucccaaaucu

SEQ ID NO: 2808915 - RNA, 19 nt, Artificial Sequence
  Description of Artificial Sequence: Synthetic oligonucleotide
aacgguccccuuugacacu

SEQ ID NO: 2808916 - RNA, 19 nt, Artificial Sequence
  Description of Artificial Sequence: Synthetic oligonucleotide
gagggagugugagauccug

SEQ ID NO: 2808917 - RNA, 19 nt, Artificial Sequence
  Description of Artificial Sequence: Synthetic oligonucleotide
uugcauugcugauccuccu

SEQ ID NO: 2808918 - RNA, 19 nt, Artificial Sequence
  Description of Artificial Sequence: Synthetic oligonucleotide
gcuggaucaugccacggug

SEQ ID NO: 2808919 - RNA, 19 nt, Artificial Sequence
  Description of Artificial Sequence: Synthetic oligonucleotide
ccauuaauaauggacuuca

SEQ ID NO: 2808920 - RNA, 19 nt, Artificial Sequence
  Description of Artificial Sequence: Synthetic oligonucleotide
cuuccugguuggcuuugcc

SEQ ID NO: 2808921 - RNA, 19 nt, Artificial Sequence
  Description of Artificial Sequence: Synthetic oligonucleotide
uccaggcccucaaucccgc

SEQ ID NO: 2808922 - RNA, 19 nt, Artificial Sequence
  Description of Artificial Sequence: Synthetic oligonucleotide
ccuggugggagacucuucc

SEQ ID NO: 2808923 - RNA, 19 nt, Artificial Sequence
  Description of Artificial Sequence: Synthetic oligonucleotide
aaucugcaugguucucuuu

SEQ ID NO: 2808924 - RNA, 19 nt, Artificial Sequence
  Description of Artificial Sequence: Synthetic oligonucleotide
gugagauccugcgcucucg

SEQ ID NO: 2808925 - RNA, 19 nt, Artificial Sequence
  Description of Artificial Sequence: Synthetic oligonucleotide
ucccaggagaccgaagcuc

SEQ ID NO: 2808926 - RNA, 19 nt, Artificial Sequence
  Description of Artificial Sequence: Synthetic oligonucleotide
agaucccgagucauuaagu

SEQ ID NO: 2808927 - RNA, 19 nt, Artificial Sequence
  Description of Artificial Sequence: Synthetic oligonucleotide
agcucaggugcagcagggc

SEQ ID NO: 2808928 - RNA, 19 nt, Artificial Sequence
  Description of Artificial Sequence: Synthetic oligonucleotide
cucucggucauccaacucu

SEQ ID NO: 2808929 - RNA, 19 nt, Artificial Sequence
  Description of Artificial Sequence: Synthetic oligonucleotide
cauucacucuuagccuucc

SEQ ID NO: 2808930 - RNA, 19 nt, Artificial Sequence
  Description of Artificial Sequence: Synthetic oligonucleotide
caucuggcuggguucagca

SEQ ID NO: 2808931 - RNA, 19 nt, Artificial Sequence
  Description of Artificial Sequence: Synthetic oligonucleotide
cacucuuagccuuccaucu

SEQ ID NO: 2808932 - RNA, 19 nt, Artificial Sequence
  Description of Artificial Sequence: Synthetic oligonucleotide
agccccugcagaucccgag

SEQ ID NO: 2808933 - RNA, 19 nt, Artificial Sequence
  Description of Artificial Sequence: Synthetic oligonucleotide
agcuuucguuucuuuugga

SEQ ID NO: 2808934 - RNA, 19 nt, Artificial Sequence
  Description of Artificial Sequence: Synthetic oligonucleotide
uuggaacgguccccuuuga

SEQ ID NO: 2808935 - RNA, 19 nt, Artificial Sequence
  Description of Artificial Sequence: Synthetic oligonucleotide
uugcccagcagagacucuc

SEQ ID NO: 2808936 - RNA, 19 nt, Artificial Sequence
  Description of Artificial Sequence: Synthetic oligonucleotide
acucuccauucacagcuau

SEQ ID NO: 2808937 - RNA, 19 nt, Artificial Sequence
  Description of Artificial Sequence: Synthetic oligonucleotide
ucccaccauuaauaaugga

SEQ ID NO: 2808938 - RNA, 19 nt, Artificial Sequence
  Description of Artificial Sequence: Synthetic oligonucleotide
ugcagcauuccugguggga

SEQ ID NO: 2808939 - RNA, 19 nt, Artificial Sequence
  Description of Artificial Sequence: Synthetic oligonucleotide
cucuccauucacagcuauc

SEQ ID NO: 2808940 - RNA, 19 nt, Artificial Sequence
  Description of Artificial Sequence: Synthetic oligonucleotide
uccuccuggccacgaugag

SEQ ID NO: 2808941 - RNA, 19 nt, Artificial Sequence
  Description of Artificial Sequence: Synthetic oligonucleotide
gaugcagcucccaccauua

SEQ ID NO: 2808942 - RNA, 19 nt, Artificial Sequence
  Description of Artificial Sequence: Synthetic oligonucleotide
cagagacucuccauucaca

SEQ ID NO: 2808943 - RNA, 19 nt, Artificial Sequence
  Description of Artificial Sequence: Synthetic oligonucleotide
ggagugugagauccugcgc

SEQ ID NO: 2808944 - RNA, 19 nt, Artificial Sequence
  Description of Artificial Sequence: Synthetic oligonucleotide
cuuuuggaaucugcaucug

SEQ ID NO: 2808945 - RNA, 19 nt, Artificial Sequence
  Description of Artificial Sequence: Synthetic oligonucleotide
gcagagacucuccauucac

SEQ ID NO: 2808946 - RNA, 19 nt, Artificial Sequence
  Description of Artificial Sequence: Synthetic oligonucleotide
uccccaucagggguaagaa

SEQ ID NO: 2808947 - RNA, 19 nt, Artificial Sequence
  Description of Artificial Sequence: Synthetic oligonucleotide
aucaugccacgguggacga

SEQ ID NO: 2808948 - RNA, 19 nt, Artificial Sequence
  Description of Artificial Sequence: Synthetic oligonucleotide
caagccccugcagaucccg

SEQ ID NO: 2808949 - RNA, 19 nt, Artificial Sequence
  Description of Artificial Sequence: Synthetic oligonucleotide
gcagcauuccuggugggag

SEQ ID NO: 2808950 - RNA, 19 nt, Artificial Sequence
  Description of Artificial Sequence: Synthetic oligonucleotide
ucguuucuuuuggaaucug

SEQ ID NO: 2808951 - RNA, 19 nt, Artificial Sequence
  Description of Artificial Sequence: Synthetic oligonucleotide
acucuuagccuuccaucuu

SEQ ID NO: 2808952 - RNA, 19 nt, Artificial Sequence
  Description of Artificial Sequence: Synthetic oligonucleotide
agcucccaccauuaauaau

SEQ ID NO: 2808953 - RNA, 19 nt, Artificial Sequence
  Description of Artificial Sequence: Synthetic oligonucleotide
ucuccauggcuuccugguu

SEQ ID NO: 2808954 - RNA, 19 nt, Artificial Sequence
  Description of Artificial Sequence: Synthetic oligonucleotide
auguccucaucuucagcuu

SEQ ID NO: 2808955 - RNA, 19 nt, Artificial Sequence
  Description of Artificial Sequence: Synthetic oligonucleotide
ggagaccgaagcucauugc

SEQ ID NO: 2808956 - RNA, 19 nt, Artificial Sequence
  Description of Artificial Sequence: Synthetic oligonucleotide
cguuucuuuuggaaucugc

SEQ ID NO: 2808957 - RNA, 19 nt, Artificial Sequence
  Description of Artificial Sequence: Synthetic oligonucleotide
ccaccauuaauaauggacu

SEQ ID NO: 2808958 - RNA, 19 nt, Artificial Sequence
  Description of Artificial Sequence: Synthetic oligonucleotide
ccucaaucccgcuguagag

SEQ ID NO: 2808959 - RNA, 19 nt, Artificial Sequence
  Description of Artificial Sequence: Synthetic oligonucleotide
ccauucacagcuaucagcu

SEQ ID NO: 2808960 - RNA, 19 nt, Artificial Sequence
  Description of Artificial Sequence: Synthetic oligonucleotide
agagucuccauggcuuccu

SEQ ID NO: 2808961 - RNA, 19 nt, Artificial Sequence
  Description of Artificial Sequence: Synthetic oligonucleotide
ccuccgaagagucuccaug

SEQ ID NO: 2808962 - RNA, 19 nt, Artificial Sequence
  Description of Artificial Sequence: Synthetic oligonucleotide
gcuuucguuucuuuuggaa

SEQ ID NO: 2808963 - RNA, 19 nt, Artificial Sequence
  Description of Artificial Sequence: Synthetic oligonucleotide
ucccgcuguagagggagug

SEQ ID NO: 2808964 - RNA, 19 nt, Artificial Sequence
  Description of Artificial Sequence: Synthetic oligonucleotide
ccccugguccccaucaggg

SEQ ID NO: 2808965 - RNA, 19 nt, Artificial Sequence
  Description of Artificial Sequence: Synthetic oligonucleotide
cuucacgaagauucccaaa

SEQ ID NO: 2808966 - RNA, 19 nt, Artificial Sequence
  Description of Artificial Sequence: Synthetic oligonucleotide
gucauucacucuuagccuu

SEQ ID NO: 2808967 - RNA, 19 nt, Artificial Sequence
  Description of Artificial Sequence: Synthetic oligonucleotide
auccuccuggccacgauga

SEQ ID NO: 2808968 - RNA, 19 nt, Artificial Sequence
  Description of Artificial Sequence: Synthetic oligonucleotide
cacgaugagcuggaucaug

SEQ ID NO: 2808969 - RNA, 19 nt, Artificial Sequence
  Description of Artificial Sequence: Synthetic oligonucleotide
guagagggagugugagauc

SEQ ID NO: 2808970 - RNA, 19 nt, Artificial Sequence
  Description of Artificial Sequence: Synthetic oligonucleotide
gagucauuaaguggaacuu

SEQ ID NO: 2808971 - RNA, 19 nt, Artificial Sequence
  Description of Artificial Sequence: Synthetic oligonucleotide
aaugggcagcucaggugca

SEQ ID NO: 2808972 - RNA, 19 nt, Artificial Sequence
  Description of Artificial Sequence: Synthetic oligonucleotide
ggucauucacucuuagccu

SEQ ID NO: 2808973 - RNA, 19 nt, Artificial Sequence
  Description of Artificial Sequence: Synthetic oligonucleotide
agaccgaagcucauugcau

SEQ ID NO: 2808974 - RNA, 19 nt, Artificial Sequence
  Description of Artificial Sequence: Synthetic oligonucleotide
caggcccucaaucccgcug

SEQ ID NO: 2808975 - RNA, 19 nt, Artificial Sequence
  Description of Artificial Sequence: Synthetic oligonucleotide
ugauccuccuggccacgau

SEQ ID NO: 2808976 - RNA, 19 nt, Artificial Sequence
  Description of Artificial Sequence: Synthetic oligonucleotide
ucauugcauugcugauccu

SEQ ID NO: 2808977 - RNA, 19 nt, Artificial Sequence
  Description of Artificial Sequence: Synthetic oligonucleotide
acgguccccuuugacacug

SEQ ID NO: 2808978 - RNA, 19 nt, Artificial Sequence
  Description of Artificial Sequence: Synthetic oligonucleotide
gggguaagaacaauguccu

SEQ ID NO: 2808979 - RNA, 19 nt, Artificial Sequence
  Description of Artificial Sequence: Synthetic oligonucleotide
ggacuucacgaagauuccc

SEQ ID NO: 2808980 - RNA, 19 nt, Artificial Sequence
  Description of Artificial Sequence: Synthetic oligonucleotide
gugcagcauuccugguggg

SEQ ID NO: 2808981 - RNA, 19 nt, Artificial Sequence
  Description of Artificial Sequence: Synthetic oligonucleotide
ugguucucuuuggaacggu

SEQ ID NO: 2808982 - RNA, 19 nt, Artificial Sequence
  Description of Artificial Sequence: Synthetic oligonucleotide
caaaucugcaugguucucu

SEQ ID NO: 2808983 - RNA, 19 nt, Artificial Sequence
  Description of Artificial Sequence: Synthetic oligonucleotide
gaaacuccccuggucccca

SEQ ID NO: 2808984 - RNA, 19 nt, Artificial Sequence
  Description of Artificial Sequence: Synthetic oligonucleotide
gaccgaagcucauugcauu

SEQ ID NO: 2808985 - RNA, 19 nt, Artificial Sequence
  Description of Artificial Sequence: Synthetic oligonucleotide
cuggccacgaugagcugga

SEQ ID NO: 2808986 - RNA, 19 nt, Artificial Sequence
  Description of Artificial Sequence: Synthetic oligonucleotide
cugcugagugcagcauucc

SEQ ID NO: 2808987 - RNA, 19 nt, Artificial Sequence
  Description of Artificial Sequence: Synthetic oligonucleotide
guccccaucagggguaaga

SEQ ID NO: 2808988 - RNA, 19 nt, Artificial Sequence
  Description of Artificial Sequence: Synthetic oligonucleotide
cugcaugguucucuuugga

SEQ ID NO: 2808989 - RNA, 19 nt, Artificial Sequence
  Description of Artificial Sequence: Synthetic oligonucleotide
cugacaccaagccccugca

SEQ ID NO: 2808990 - RNA, 19 nt, Artificial Sequence
  Description of Artificial Sequence: Synthetic oligonucleotide
ccuggccacgaugagcugg

SEQ ID NO: 2808991 - RNA, 19 nt, Artificial Sequence
  Description of Artificial Sequence: Synthetic oligonucleotide
cugguuggcuuugcccagc

SEQ ID NO: 2808992 - RNA, 19 nt, Artificial Sequence
  Description of Artificial Sequence: Synthetic oligonucleotide
augccacgguggacgaugg

SEQ ID NO: 2808993 - RNA, 19 nt, Artificial Sequence
  Description of Artificial Sequence: Synthetic oligonucleotide
gccuuccaucuuuggaugc

SEQ ID NO: 2808994 - RNA, 19 nt, Artificial Sequence
  Description of Artificial Sequence: Synthetic oligonucleotide
gcagcucccaccauuaaua

SEQ ID NO: 2808995 - RNA, 19 nt, Artificial Sequence
  Description of Artificial Sequence: Synthetic oligonucleotide
ucuuuggaacgguccccuu

SEQ ID NO: 2808996 - RNA, 19 nt, Artificial Sequence
  Description of Artificial Sequence: Synthetic oligonucleotide
auucugcugagugcagcau

SEQ ID NO: 2808997 - RNA, 19 nt, Artificial Sequence
  Description of Artificial Sequence: Synthetic oligonucleotide
cagcagggcucccaggaga

SEQ ID NO: 2808998 - RNA, 19 nt, Artificial Sequence
  Description of Artificial Sequence: Synthetic oligonucleotide
acucuuccaggcccucaau

SEQ ID NO: 2808999 - RNA, 19 nt, Artificial Sequence
  Description of Artificial Sequence: Synthetic oligonucleotide
caccauuaauaauggacuu

SEQ ID NO: 2809000 - RNA, 19 nt, Artificial Sequence
  Description of Artificial Sequence: Synthetic oligonucleotide
uggcuuugcccagcagaga

SEQ ID NO: 2809001 - RNA, 19 nt, Artificial Sequence
  Description of Artificial Sequence: Synthetic oligonucleotide
guccucaucuucagcuuuc

SEQ ID NO: 2809002 - RNA, 19 nt, Artificial Sequence
  Description of Artificial Sequence: Synthetic oligonucleotide
gcucauugcauugcugauc

SEQ ID NO: 2809003 - RNA, 19 nt, Artificial Sequence
  Description of Artificial Sequence: Synthetic oligonucleotide
acgguggacgauggaccuc

SEQ ID NO: 2809004 - RNA, 19 nt, Artificial Sequence
  Description of Artificial Sequence: Synthetic oligonucleotide
gccacgguggacgauggac

SEQ ID NO: 2809005 - RNA, 19 nt, Artificial Sequence
  Description of Artificial Sequence: Synthetic oligonucleotide
aaacuccccugguccccau

SEQ ID NO: 2809006 - RNA, 19 nt, Artificial Sequence
  Description of Artificial Sequence: Synthetic oligonucleotide
cuggugggagacucuucca

SEQ ID NO: 2809007 - RNA, 19 nt, Artificial Sequence
  Description of Artificial Sequence: Synthetic oligonucleotide
cagcucccaccauuaauaa

SEQ ID NO: 2809008 - RNA, 19 nt, Artificial Sequence
  Description of Artificial Sequence: Synthetic oligonucleotide
cggucauccaacucuguuc

SEQ ID NO: 2809009 - RNA, 19 nt, Artificial Sequence
  Description of Artificial Sequence: Synthetic oligonucleotide
accuccgaagagucuccau

SEQ ID NO: 2809010 - RNA, 19 nt, Artificial Sequence
  Description of Artificial Sequence: Synthetic oligonucleotide
ccaucuuuggaugcagcuc

SEQ ID NO: 2809011 - RNA, 19 nt, Artificial Sequence
  Description of Artificial Sequence: Synthetic oligonucleotide
ugccacgguggacgaugga

SEQ ID NO: 2809012 - RNA, 19 nt, Artificial Sequence
  Description of Artificial Sequence: Synthetic oligonucleotide
guccccuuugacacugaca

SEQ ID NO: 2809013 - RNA, 19 nt, Artificial Sequence
  Description of Artificial Sequence: Synthetic oligonucleotide
ucuguucaaugggcagcuc

SEQ ID NO: 2809014 - RNA, 19 nt, Artificial Sequence
  Description of Artificial Sequence: Synthetic oligonucleotide
gguucucuuuggaacgguc

SEQ ID NO: 2809015 - RNA, 19 nt, Artificial Sequence
  Description of Artificial Sequence: Synthetic oligonucleotide
ccugguuggcuuugcccag

SEQ ID NO: 2809016 - RNA, 19 nt, Artificial Sequence
  Description of Artificial Sequence: Synthetic oligonucleotide
gcagcagggcucccaggag

SEQ ID NO: 2809017 - RNA, 19 nt, Artificial Sequence
  Description of Artificial Sequence: Synthetic oligonucleotide
cuccccugguccccaucag

SEQ ID NO: 2809018 - RNA, 19 nt, Artificial Sequence
  Description of Artificial Sequence: Synthetic oligonucleotide
acacugacaccaagccccu

SEQ ID NO: 2809019 - RNA, 19 nt, Artificial Sequence
  Description of Artificial Sequence: Synthetic oligonucleotide
cgagucauuaaguggaacu

SEQ ID NO: 2809020 - RNA, 19 nt, Artificial Sequence
  Description of Artificial Sequence: Synthetic oligonucleotide
cccaggagaccgaagcuca

SEQ ID NO: 2809021 - RNA, 19 nt, Artificial Sequence
  Description of Artificial Sequence: Synthetic oligonucleotide
uccuggccacgaugagcug

SEQ ID NO: 2809022 - RNA, 19 nt, Artificial Sequence
  Description of Artificial Sequence: Synthetic oligonucleotide
ggguaagaacaauguccuc

SEQ ID NO: 2809023 - RNA, 19 nt, Artificial Sequence
  Description of Artificial Sequence: Synthetic oligonucleotide
cucuguucaaugggcagcu

SEQ ID NO: 2809024 - RNA, 19 nt, Artificial Sequence
  Description of Artificial Sequence: Synthetic oligonucleotide
ccugcgcucucggucaucc

SEQ ID NO: 2809025 - RNA, 19 nt, Artificial Sequence
  Description of Artificial Sequence: Synthetic oligonucleotide
ccgaagcucauugcauugc

SEQ ID NO: 2809026 - RNA, 19 nt, Artificial Sequence
  Description of Artificial Sequence: Synthetic oligonucleotide
augcagcucccaccauuaa

SEQ ID NO: 2809027 - RNA, 19 nt, Artificial Sequence
  Description of Artificial Sequence: Synthetic oligonucleotide
cucuuagccuuccaucuuu

SEQ ID NO: 2809028 - RNA, 19 nt, Artificial Sequence
  Description of Artificial Sequence: Synthetic oligonucleotide
agagggagugugagauccu

SEQ ID NO: 2809029 - RNA, 19 nt, Artificial Sequence
  Description of Artificial Sequence: Synthetic oligonucleotide
guggacgauggaccuccga

SEQ ID NO: 2809030 - RNA, 19 nt, Artificial Sequence
  Description of Artificial Sequence: Synthetic oligonucleotide
gguccccuuugacacugac

SEQ ID NO: 2809031 - RNA, 19 nt, Artificial Sequence
  Description of Artificial Sequence: Synthetic oligonucleotide
cgaugagcuggaucaugcc

SEQ ID NO: 2809032 - RNA, 19 nt, Artificial Sequence
  Description of Artificial Sequence: Synthetic oligonucleotide
cugcaucuggcuggguuca

SEQ ID NO: 2809033 - RNA, 19 nt, Artificial Sequence
  Description of Artificial Sequence: Synthetic oligonucleotide
cuuuggaacgguccccuuu

SEQ ID NO: 2809034 - RNA, 19 nt, Artificial Sequence
  Description of Artificial Sequence: Synthetic oligonucleotide
cacgguggacgauggaccu

SEQ ID NO: 2809035 - RNA, 19 nt, Artificial Sequence
  Description of Artificial Sequence: Synthetic oligonucleotide
ggccacgaugagcuggauc

SEQ ID NO: 2809036 - RNA, 19 nt, Artificial Sequence
  Description of Artificial Sequence: Synthetic oligonucleotide
auggaccuccgaagagucu

SEQ ID NO: 2809037 - RNA, 19 nt, Artificial Sequence
  Description of Artificial Sequence: Synthetic oligonucleotide
gaccuccgaagagucucca

SEQ ID NO: 2809038 - RNA, 19 nt, Artificial Sequence
  Description of Artificial Sequence: Synthetic oligonucleotide
cugguccccaucaggggua

SEQ ID NO: 2809039 - RNA, 19 nt, Artificial Sequence
  Description of Artificial Sequence: Synthetic oligonucleotide
aggugcagcagggcuccca

SEQ ID NO: 2809040 - RNA, 19 nt, Artificial Sequence
  Description of Artificial Sequence: Synthetic oligonucleotide
gagauccugcgcucucggu

SEQ ID NO: 2809041 - RNA, 19 nt, Artificial Sequence
  Description of Artificial Sequence: Synthetic oligonucleotide
aagccccugcagaucccga

SEQ ID NO: 2809042 - RNA, 19 nt, Artificial Sequence
  Description of Artificial Sequence: Synthetic oligonucleotide
ccccaucagggguaagaac

SEQ ID NO: 2809043 - RNA, 19 nt, Artificial Sequence
  Description of Artificial Sequence: Synthetic oligonucleotide
gucauccaacucuguucaa

SEQ ID NO: 2809044 - RNA, 19 nt, Artificial Sequence
  Description of Artificial Sequence: Synthetic oligonucleotide
ggaccuccgaagagucucc

SEQ ID NO: 2809045 - RNA, 19 nt, Artificial Sequence
  Description of Artificial Sequence: Synthetic oligonucleotide
cucuuuggaacgguccccu

SEQ ID NO: 2809046 - RNA, 19 nt, Artificial Sequence
  Description of Artificial Sequence: Synthetic oligonucleotide
caaucccgcuguagaggga

SEQ ID NO: 2809047 - RNA, 19 nt, Artificial Sequence
  Description of Artificial Sequence: Synthetic oligonucleotide
ggaucaugccacgguggac

SEQ ID NO: 2809048 - RNA, 19 nt, Artificial Sequence
  Description of Artificial Sequence: Synthetic oligonucleotide
gcucaggugcagcagggcu

SEQ ID NO: 2809049 - RNA, 19 nt, Artificial Sequence
  Description of Artificial Sequence: Synthetic oligonucleotide
ccccuuugacacugacacc

SEQ ID NO: 2809050 - RNA, 19 nt, Artificial Sequence
  Description of Artificial Sequence: Synthetic oligonucleotide
cgguggacgauggaccucc

SEQ ID NO: 2809051 - RNA, 19 nt, Artificial Sequence
  Description of Artificial Sequence: Synthetic oligonucleotide
gacucuccauucacagcua

SEQ ID NO: 2809052 - RNA, 19 nt, Artificial Sequence
  Description of Artificial Sequence: Synthetic oligonucleotide
ccaucagggguaagaacaa

SEQ ID NO: 2809053 - RNA, 19 nt, Artificial Sequence
  Description of Artificial Sequence: Synthetic oligonucleotide
ugguccccaucagggguaa

SEQ ID NO: 2809054 - RNA, 19 nt, Artificial Sequence
  Description of Artificial Sequence: Synthetic oligonucleotide
gcaucuggcuggguucagc

SEQ ID NO: 2809055 - RNA, 19 nt, Artificial Sequence
  Description of Artificial Sequence: Synthetic oligonucleotide
cccaaaucugcaugguucu

SEQ ID NO: 2809056 - RNA, 19 nt, Artificial Sequence
  Description of Artificial Sequence: Synthetic oligonucleotide
gcagaucccgagucauuaa

SEQ ID NO: 2809057 - RNA, 19 nt, Artificial Sequence
  Description of Artificial Sequence: Synthetic oligonucleotide
ucaugccacgguggacgau

SEQ ID NO: 2809058 - RNA, 19 nt, Artificial Sequence
  Description of Artificial Sequence: Synthetic oligonucleotide
cucccaggagaccgaagcu

SEQ ID NO: 2809059 - RNA, 19 nt, Artificial Sequence
  Description of Artificial Sequence: Synthetic oligonucleotide
agcuggucauucacucuua

SEQ ID NO: 2809060 - RNA, 19 nt, Artificial Sequence
  Description of Artificial Sequence: Synthetic oligonucleotide
ccgcuguagagggagugug

SEQ ID NO: 2809061 - RNA, 19 nt, Artificial Sequence
  Description of Artificial Sequence: Synthetic oligonucleotide
gcucucggucauccaacuc

SEQ ID NO: 2809062 - RNA, 19 nt, Artificial Sequence
  Description of Artificial Sequence: Synthetic oligonucleotide
ccgagucauuaaguggaac

SEQ ID NO: 2809063 - RNA, 19 nt, Artificial Sequence
  Description of Artificial Sequence: Synthetic oligonucleotide
ggaugcagcucccaccauu

SEQ ID NO: 2809064 - RNA, 19 nt, Artificial Sequence
  Description of Artificial Sequence: Synthetic oligonucleotide
auccugcgcucucggucau

SEQ ID NO: 2809065 - RNA, 19 nt, Artificial Sequence
  Description of Artificial Sequence: Synthetic oligonucleotide
ccccugcagaucccgaguc

SEQ ID NO: 2809066 - RNA, 19 nt, Artificial Sequence
  Description of Artificial Sequence: Synthetic oligonucleotide
gguggacgauggaccuccg

SEQ ID NO: 2809067 - RNA, 19 nt, Artificial Sequence
  Description of Artificial Sequence: Synthetic oligonucleotide
ccaagccccugcagauccc

SEQ ID NO: 2809068 - RNA, 19 nt, Artificial Sequence
  Description of Artificial Sequence: Synthetic oligonucleotide
gcccucaaucccgcuguag

SEQ ID NO: 2809069 - RNA, 19 nt, Artificial Sequence
  Description of Artificial Sequence: Synthetic oligonucleotide
ccaaaucugcaugguucuc

SEQ ID NO: 2809070 - RNA, 19 nt, Artificial Sequence
  Description of Artificial Sequence: Synthetic oligonucleotide
ccuuccaucuuuggaugca

SEQ ID NO: 2809071 - RNA, 19 nt, Artificial Sequence
  Description of Artificial Sequence: Synthetic oligonucleotide
gcuuccugguuggcuuugc

SEQ ID NO: 2809072 - RNA, 19 nt, Artificial Sequence
  Description of Artificial Sequence: Synthetic oligonucleotide
gugugagauccugcgcucu

SEQ ID NO: 2809073 - RNA, 19 nt, Artificial Sequence
  Description of Artificial Sequence: Synthetic oligonucleotide
gcgcucucggucauccaac

SEQ ID NO: 2809074 - RNA, 19 nt, Artificial Sequence
  Description of Artificial Sequence: Synthetic oligonucleotide
cgaagagucuccauggcuu

SEQ ID NO: 2809075 - RNA, 19 nt, Artificial Sequence
  Description of Artificial Sequence: Synthetic oligonucleotide
gcccagcagagacucucca

SEQ ID NO: 2809076 - RNA, 19 nt, Artificial Sequence
  Description of Artificial Sequence: Synthetic oligonucleotide
cacugacaccaagccccug

SEQ ID NO: 2809077 - RNA, 19 nt, Artificial Sequence
  Description of Artificial Sequence: Synthetic oligonucleotide
ccagcagagacucuccauu

SEQ ID NO: 2809078 - RNA, 19 nt, Artificial Sequence
  Description of Artificial Sequence: Synthetic oligonucleotide
aucccgcuguagagggagu

SEQ ID NO: 2809079 - RNA, 19 nt, Artificial Sequence
  Description of Artificial Sequence: Synthetic oligonucleotide
ccgaagagucuccauggcu

SEQ ID NO: 2809080 - RNA, 19 nt, Artificial Sequence
  Description of Artificial Sequence: Synthetic oligonucleotide
ccuuugacacugacaccaa

SEQ ID NO: 2809081 - RNA, 19 nt, Artificial Sequence
  Description of Artificial Sequence: Synthetic oligonucleotide
cucggucauccaacucugu

SEQ ID NO: 2809082 - RNA, 19 nt, Artificial Sequence
  Description of Artificial Sequence: Synthetic oligonucleotide
ccugguccccaucaggggu

SEQ ID NO: 2809083 - RNA, 19 nt, Artificial Sequence
  Description of Artificial Sequence: Synthetic oligonucleotide
uccugcgcucucggucauc

SEQ ID NO: 2809084 - RNA, 19 nt, Artificial Sequence
  Description of Artificial Sequence: Synthetic oligonucleotide
ggagacucuuccaggcccu

SEQ ID NO: 2809085 - RNA, 19 nt, Artificial Sequence
  Description of Artificial Sequence: Synthetic oligonucleotide
ggcucccaggagaccgaag

SEQ ID NO: 2809086 - RNA, 19 nt, Artificial Sequence
  Description of Artificial Sequence: Synthetic oligonucleotide
caucagggguaagaacaau

SEQ ID NO: 2809087 - RNA, 19 nt, Artificial Sequence
  Description of Artificial Sequence: Synthetic oligonucleotide
cugcgcucucggucaucca

SEQ ID NO: 2809088 - RNA, 19 nt, Artificial Sequence
  Description of Artificial Sequence: Synthetic oligonucleotide
cccugcagaucccgaguca

SEQ ID NO: 2809089 - RNA, 19 nt, Artificial Sequence
  Description of Artificial Sequence: Synthetic oligonucleotide
cgcuguagagggaguguga

SEQ ID NO: 2809090 - RNA, 19 nt, Artificial Sequence
  Description of Artificial Sequence: Synthetic oligonucleotide
gcagggcucccaggagacc

SEQ ID NO: 2809091 - RNA, 19 nt, Artificial Sequence
  Description of Artificial Sequence: Synthetic oligonucleotide
cccgagucauuaaguggaa

SEQ ID NO: 2809092 - RNA, 19 nt, Artificial Sequence
  Description of Artificial Sequence: Synthetic oligonucleotide
uggccacgaugagcuggau

SEQ ID NO: 2809093 - RNA, 19 nt, Artificial Sequence
  Description of Artificial Sequence: Synthetic oligonucleotide
cugcagaucccgagucauu

SEQ ID NO: 2809094 - RNA, 19 nt, Artificial Sequence
  Description of Artificial Sequence: Synthetic oligonucleotide
caggugcagcagggcuccc

SEQ ID NO: 2809095 - RNA, 19 nt, Artificial Sequence
  Description of Artificial Sequence: Synthetic oligonucleotide
gcuuugcccagcagagacu

SEQ ID NO: 2809096 - RNA, 19 nt, Artificial Sequence
  Description of Artificial Sequence: Synthetic oligonucleotide
gccccugcagaucccgagu

SEQ ID NO: 2809097 - RNA, 19 nt, Artificial Sequence
  Description of Artificial Sequence: Synthetic oligonucleotide
caggagaccgaagcucauu

SEQ ID NO: 2809098 - RNA, 19 nt, Artificial Sequence
  Description of Artificial Sequence: Synthetic oligonucleotide
gguccccaucagggguaag

SEQ ID NO: 2809099 - RNA, 19 nt, Artificial Sequence
  Description of Artificial Sequence: Synthetic oligonucleotide
ccugcagaucccgagucau

SEQ ID NO: 2809100 - RNA, 19 nt, Artificial Sequence
  Description of Artificial Sequence: Synthetic oligonucleotide
cgauggaccuccgaagagu

SEQ ID NO: 2809101 - RNA, 19 nt, Artificial Sequence
  Description of Artificial Sequence: Synthetic oligonucleotide
ggcccucaaucccgcugua

SEQ ID NO: 2809102 - RNA, 19 nt, Artificial Sequence
  Description of Artificial Sequence: Synthetic oligonucleotide
cgcucucggucauccaacu

SEQ ID NO: 2809103 - RNA, 19 nt, Artificial Sequence
  Description of Artificial Sequence: Synthetic oligonucleotide
ccaggagaccgaagcucau

SEQ ID NO: 2809104 - RNA, 19 nt, Artificial Sequence
  Description of Artificial Sequence: Synthetic oligonucleotide
cccgcuguagagggagugu

SEQ ID NO: 2809105 - RNA, 19 nt, Artificial Sequence
  Description of Artificial Sequence: Synthetic oligonucleotide
ccaggcccucaaucccgcu

SEQ ID NO: 2809106 - RNA, 19 nt, Artificial Sequence
  Description of Artificial Sequence: Synthetic oligonucleotide
ccacgaugagcuggaucau

SEQ ID NO: 2809107 - RNA, 19 nt, Artificial Sequence
  Description of Artificial Sequence: Synthetic oligonucleotide
cgguccccuuugacacuga

SEQ ID NO: 2809108 - RNA, 19 nt, Artificial Sequence
  Description of Artificial Sequence: Synthetic oligonucleotide
aucaaaagagcauaaagac

SEQ ID NO: 2809109 - RNA, 19 nt, Artificial Sequence
  Description of Artificial Sequence: Synthetic oligonucleotide
agagcauaaagacugauag

SEQ ID NO: 2809110 - RNA, 19 nt, Artificial Sequence
  Description of Artificial Sequence: Synthetic oligonucleotide
uaaagacugauagagaggg

SEQ ID NO: 2809111 - RNA, 19 nt, Artificial Sequence
  Description of Artificial Sequence: Synthetic oligonucleotide
cauaaagacugauagagag

SEQ ID NO: 2809112 - RNA, 19 nt, Artificial Sequence
  Description of Artificial Sequence: Synthetic oligonucleotide
uguauuuccggguaaagca

SEQ ID NO: 2809113 - RNA, 19 nt, Artificial Sequence
  Description of Artificial Sequence: Synthetic oligonucleotide
agcauaaagacugauagag

SEQ ID NO: 2809114 - RNA, 19 nt, Artificial Sequence
  Description of Artificial Sequence: Synthetic oligonucleotide
aagugguugacguccaggg

SEQ ID NO: 2809115 - RNA, 19 nt, Artificial Sequence
  Description of Artificial Sequence: Synthetic oligonucleotide
ucaaaagagcauaaagacu

SEQ ID NO: 2809116 - RNA, 19 nt, Artificial Sequence
  Description of Artificial Sequence: Synthetic oligonucleotide
uccaacuuuuauuugagaa

SEQ ID NO: 2809117 - RNA, 19 nt, Artificial Sequence
  Description of Artificial Sequence: Synthetic oligonucleotide
ucgaaagugaccggaaugg

SEQ ID NO: 2809118 - RNA, 19 nt, Artificial Sequence
  Description of Artificial Sequence: Synthetic oligonucleotide
cuuucuucgugcuugccgg

SEQ ID NO: 2809119 - RNA, 19 nt, Artificial Sequence
  Description of Artificial Sequence: Synthetic oligonucleotide
acguguauguaucaaaaga

SEQ ID NO: 2809120 - RNA, 19 nt, Artificial Sequence
  Description of Artificial Sequence: Synthetic oligonucleotide
agcgaagugguugacgucc

SEQ ID NO: 2809121 - RNA, 19 nt, Artificial Sequence
  Description of Artificial Sequence: Synthetic oligonucleotide
aagacugauagagaggggu

SEQ ID NO: 2809122 - RNA, 19 nt, Artificial Sequence
  Description of Artificial Sequence: Synthetic oligonucleotide
aaagugaccggaaugguga

SEQ ID NO: 2809123 - RNA, 19 nt, Artificial Sequence
  Description of Artificial Sequence: Synthetic oligonucleotide
aucuccgagacuccgcugc

SEQ ID NO: 2809124 - RNA, 19 nt, Artificial Sequence
  Description of Artificial Sequence: Synthetic oligonucleotide
uuggucuugaccgugagcu

SEQ ID NO: 2809125 - RNA, 19 nt, Artificial Sequence
  Description of Artificial Sequence: Synthetic oligonucleotide
uaagugugcccucagggga

SEQ ID NO: 2809126 - RNA, 19 nt, Artificial Sequence
  Description of Artificial Sequence: Synthetic oligonucleotide
agcaccgggagauguagcc

SEQ ID NO: 2809127 - RNA, 19 nt, Artificial Sequence
  Description of Artificial Sequence: Synthetic oligonucleotide
uugaccgugagcuccuccg

SEQ ID NO: 2809128 - RNA, 19 nt, Artificial Sequence
  Description of Artificial Sequence: Synthetic oligonucleotide
guaagugugcccucagggg

SEQ ID NO: 2809129 - RNA, 19 nt, Artificial Sequence
  Description of Artificial Sequence: Synthetic oligonucleotide
uauuuccggguaaagcacc

SEQ ID NO: 2809130 - RNA, 19 nt, Artificial Sequence
  Description of Artificial Sequence: Synthetic oligonucleotide
gguaagugugcccucaggg

SEQ ID NO: 2809131 - RNA, 19 nt, Artificial Sequence
  Description of Artificial Sequence: Synthetic oligonucleotide
gacuguuccgacuucccag

SEQ ID NO: 2809132 - RNA, 19 nt, Artificial Sequence
  Description of Artificial Sequence: Synthetic oligonucleotide
uacguguauguaucaaaag

SEQ ID NO: 2809133 - RNA, 19 nt, Artificial Sequence
  Description of Artificial Sequence: Synthetic oligonucleotide
uuccggguaaagcaccggg

SEQ ID NO: 2809134 - RNA, 19 nt, Artificial Sequence
  Description of Artificial Sequence: Synthetic oligonucleotide
auaaagacugauagagagg

SEQ ID NO: 2809135 - RNA, 19 nt, Artificial Sequence
  Description of Artificial Sequence: Synthetic oligonucleotide
uucguccugccuuucuucg

SEQ ID NO: 2809136 - RNA, 19 nt, Artificial Sequence
  Description of Artificial Sequence: Synthetic oligonucleotide
uuggggaugcagcaggcug

SEQ ID NO: 2809137 - RNA, 19 nt, Artificial Sequence
  Description of Artificial Sequence: Synthetic oligonucleotide
aaagcaccgggagauguag

SEQ ID NO: 2809138 - RNA, 19 nt, Artificial Sequence
  Description of Artificial Sequence: Synthetic oligonucleotide
auuguguggcuguuuuggg

SEQ ID NO: 2809139 - RNA, 19 nt, Artificial Sequence
  Description of Artificial Sequence: Synthetic oligonucleotide
uguuuugggcagcggagcc

SEQ ID NO: 2809140 - RNA, 19 nt, Artificial Sequence
  Description of Artificial Sequence: Synthetic oligonucleotide
uucuacuuggcuccagacu

SEQ ID NO: 2809141 - RNA, 19 nt, Artificial Sequence
  Description of Artificial Sequence: Synthetic oligonucleotide
uccaccacgccuuccuugg

SEQ ID NO: 2809142 - RNA, 19 nt, Artificial Sequence
  Description of Artificial Sequence: Synthetic oligonucleotide
ggaauggugaucuccgcgg

SEQ ID NO: 2809143 - RNA, 19 nt, Artificial Sequence
  Description of Artificial Sequence: Synthetic oligonucleotide
gauagagagggguggcgag

SEQ ID NO: 2809144 - RNA, 19 nt, Artificial Sequence
  Description of Artificial Sequence: Synthetic oligonucleotide
guguauguaucaaaagagc

SEQ ID NO: 2809145 - RNA, 19 nt, Artificial Sequence
  Description of Artificial Sequence: Synthetic oligonucleotide
gacuccgcugcucagcugc

SEQ ID NO: 2809146 - RNA, 19 nt, Artificial Sequence
  Description of Artificial Sequence: Synthetic oligonucleotide
acugauagagagggguggc

SEQ ID NO: 2809147 - RNA, 19 nt, Artificial Sequence
  Description of Artificial Sequence: Synthetic oligonucleotide
gugguugacguccagggac

SEQ ID NO: 2809148 - RNA, 19 nt, Artificial Sequence
  Description of Artificial Sequence: Synthetic oligonucleotide
gaaagugaccggaauggug

SEQ ID NO: 2809149 - RNA, 19 nt, Artificial Sequence
  Description of Artificial Sequence: Synthetic oligonucleotide
gaagugguugacguccagg

SEQ ID NO: 2809150 - RNA, 19 nt, Artificial Sequence
  Description of Artificial Sequence: Synthetic oligonucleotide
cagggugggguccacaccg

SEQ ID NO: 2809151 - RNA, 19 nt, Artificial Sequence
  Description of Artificial Sequence: Synthetic oligonucleotide
uuguguggcuguuuugggc

SEQ ID NO: 2809152 - RNA, 19 nt, Artificial Sequence
  Description of Artificial Sequence: Synthetic oligonucleotide
gcugauggcuucuacuugg

SEQ ID NO: 2809153 - RNA, 19 nt, Artificial Sequence
  Description of Artificial Sequence: Synthetic oligonucleotide
uugccggugaucuccacca

SEQ ID NO: 2809154 - RNA, 19 nt, Artificial Sequence
  Description of Artificial Sequence: Synthetic oligonucleotide
ucugccggaucuccgagac

SEQ ID NO: 2809155 - RNA, 19 nt, Artificial Sequence
  Description of Artificial Sequence: Synthetic oligonucleotide
cucgaaagugaccggaaug

SEQ ID NO: 2809156 - RNA, 19 nt, Artificial Sequence
  Description of Artificial Sequence: Synthetic oligonucleotide
uguaucaaaagagcauaaa

SEQ ID NO: 2809157 - RNA, 19 nt, Artificial Sequence
  Description of Artificial Sequence: Synthetic oligonucleotide
uugagcgcacgguggaagg

SEQ ID NO: 2809158 - RNA, 19 nt, Artificial Sequence
  Description of Artificial Sequence: Synthetic oligonucleotide
cuguuggggaugcagcagg

SEQ ID NO: 2809159 - RNA, 19 nt, Artificial Sequence
  Description of Artificial Sequence: Synthetic oligonucleotide
aucuccgcggauugugugg

SEQ ID NO: 2809160 - RNA, 19 nt, Artificial Sequence
  Description of Artificial Sequence: Synthetic oligonucleotide
agauguagccauguucguc

SEQ ID NO: 2809161 - RNA, 19 nt, Artificial Sequence
  Description of Artificial Sequence: Synthetic oligonucleotide
uccacgguaagugugcccu

SEQ ID NO: 2809162 - RNA, 19 nt, Artificial Sequence
  Description of Artificial Sequence: Synthetic oligonucleotide
cagggaagaggacaccagg

SEQ ID NO: 2809163 - RNA, 19 nt, Artificial Sequence
  Description of Artificial Sequence: Synthetic oligonucleotide
aaagacugauagagagggg

SEQ ID NO: 2809164 - RNA, 19 nt, Artificial Sequence
  Description of Artificial Sequence: Synthetic oligonucleotide
agcagguacguguauguau

SEQ ID NO: 2809165 - RNA, 19 nt, Artificial Sequence
  Description of Artificial Sequence: Synthetic oligonucleotide
ugauagagagggguggcga

SEQ ID NO: 2809166 - RNA, 19 nt, Artificial Sequence
  Description of Artificial Sequence: Synthetic oligonucleotide
uccgagacuccgcugcuca

SEQ ID NO: 2809167 - RNA, 19 nt, Artificial Sequence
  Description of Artificial Sequence: Synthetic oligonucleotide
ugaccgugagcuccuccgg

SEQ ID NO: 2809168 - RNA, 19 nt, Artificial Sequence
  Description of Artificial Sequence: Synthetic oligonucleotide
ugguugacguccagggaca

SEQ ID NO: 2809169 - RNA, 19 nt, Artificial Sequence
  Description of Artificial Sequence: Synthetic oligonucleotide
uggggaugcagcaggcuga

SEQ ID NO: 2809170 - RNA, 19 nt, Artificial Sequence
  Description of Artificial Sequence: Synthetic oligonucleotide
uggcuguuggggaugcagc

SEQ ID NO: 2809171 - RNA, 19 nt, Artificial Sequence
  Description of Artificial Sequence: Synthetic oligonucleotide
gagcauaaagacugauaga

SEQ ID NO: 2809172 - RNA, 19 nt, Artificial Sequence
  Description of Artificial Sequence: Synthetic oligonucleotide
guagccauguucguccugc

SEQ ID NO: 2809173 - RNA, 19 nt, Artificial Sequence
  Description of Artificial Sequence: Synthetic oligonucleotide
gaggcagcguguauuuccg

SEQ ID NO: 2809174 - RNA, 19 nt, Artificial Sequence
  Description of Artificial Sequence: Synthetic oligonucleotide
uuggcuccagacuguuccg

SEQ ID NO: 2809175 - RNA, 19 nt, Artificial Sequence
  Description of Artificial Sequence: Synthetic oligonucleotide
accggaauggugaucuccg

SEQ ID NO: 2809176 - RNA, 19 nt, Artificial Sequence
  Description of Artificial Sequence: Synthetic oligonucleotide
uggugaucuccgcggauug

SEQ ID NO: 2809177 - RNA, 19 nt, Artificial Sequence
  Description of Artificial Sequence: Synthetic oligonucleotide
cuucuacuuggcuccagac

SEQ ID NO: 2809178 - RNA, 19 nt, Artificial Sequence
  Description of Artificial Sequence: Synthetic oligonucleotide
aagagcauaaagacugaua

SEQ ID NO: 2809179 - RNA, 19 nt, Artificial Sequence
  Description of Artificial Sequence: Synthetic oligonucleotide
uuccaacuuuuauuugaga

SEQ ID NO: 2809180 - RNA, 19 nt, Artificial Sequence
  Description of Artificial Sequence: Synthetic oligonucleotide
ucuucgugcuugccgguga

SEQ ID NO: 2809181 - RNA, 19 nt, Artificial Sequence
  Description of Artificial Sequence: Synthetic oligonucleotide
uccggguaaagcaccggga

SEQ ID NO: 2809182 - RNA, 19 nt, Artificial Sequence
  Description of Artificial Sequence: Synthetic oligonucleotide
cuugccggugaucuccacc

SEQ ID NO: 2809183 - RNA, 19 nt, Artificial Sequence
  Description of Artificial Sequence: Synthetic oligonucleotide
aauuugggcgcgggccucg

SEQ ID NO: 2809184 - RNA, 19 nt, Artificial Sequence
  Description of Artificial Sequence: Synthetic oligonucleotide
aauggugaucuccgcggau

SEQ ID NO: 2809185 - RNA, 19 nt, Artificial Sequence
  Description of Artificial Sequence: Synthetic oligonucleotide
ggaggcagcguguauuucc

SEQ ID NO: 2809186 - RNA, 19 nt, Artificial Sequence
  Description of Artificial Sequence: Synthetic oligonucleotide
ugccggaucuccgagacuc

SEQ ID NO: 2809187 - RNA, 19 nt, Artificial Sequence
  Description of Artificial Sequence: Synthetic oligonucleotide
gaucuccgcggauugugug

SEQ ID NO: 2809188 - RNA, 19 nt, Artificial Sequence
  Description of Artificial Sequence: Synthetic oligonucleotide
ucggccgucugccggaucu

SEQ ID NO: 2809189 - RNA, 19 nt, Artificial Sequence
  Description of Artificial Sequence: Synthetic oligonucleotide
guauuuccggguaaagcac

SEQ ID NO: 2809190 - RNA, 19 nt, Artificial Sequence
  Description of Artificial Sequence: Synthetic oligonucleotide
uccuccggagcgaaguggu

SEQ ID NO: 2809191 - RNA, 19 nt, Artificial Sequence
  Description of Artificial Sequence: Synthetic oligonucleotide
ucgugcuugccggugaucu

SEQ ID NO: 2809192 - RNA, 19 nt, Artificial Sequence
  Description of Artificial Sequence: Synthetic oligonucleotide
auuuccggguaaagcaccg

SEQ ID NO: 2809193 - RNA, 19 nt, Artificial Sequence
  Description of Artificial Sequence: Synthetic oligonucleotide
uccggagcgaagugguuga

SEQ ID NO: 2809194 - RNA, 19 nt, Artificial Sequence
  Description of Artificial Sequence: Synthetic oligonucleotide
ugaucuccgcggauugugu

SEQ ID NO: 2809195 - RNA, 19 nt, Artificial Sequence
  Description of Artificial Sequence: Synthetic oligonucleotide
ggcagcguguauuuccggg

SEQ ID NO: 2809196 - RNA, 19 nt, Artificial Sequence
  Description of Artificial Sequence: Synthetic oligonucleotide
aagcaccgggagauguagc

SEQ ID NO: 2809197 - RNA, 19 nt, Artificial Sequence
  Description of Artificial Sequence: Synthetic oligonucleotide
agacuguuccgacuuccca

SEQ ID NO: 2809198 - RNA, 19 nt, Artificial Sequence
  Description of Artificial Sequence: Synthetic oligonucleotide
gaccggaauggugaucucc

SEQ ID NO: 2809199 - RNA, 19 nt, Artificial Sequence
  Description of Artificial Sequence: Synthetic oligonucleotide
cuuggucuugaccgugagc

SEQ ID NO: 2809200 - RNA, 19 nt, Artificial Sequence
  Description of Artificial Sequence: Synthetic oligonucleotide
uaaagcaccgggagaugua

SEQ ID NO: 2809201 - RNA, 19 nt, Artificial Sequence
  Description of Artificial Sequence: Synthetic oligonucleotide
gagugauggcuguugggga

SEQ ID NO: 2809202 - RNA, 19 nt, Artificial Sequence
  Description of Artificial Sequence: Synthetic oligonucleotide
gacagggaagaggacacca

SEQ ID NO: 2809203 - RNA, 19 nt, Artificial Sequence
  Description of Artificial Sequence: Synthetic oligonucleotide
acguccagggacacgcgcc

SEQ ID NO: 2809204 - RNA, 19 nt, Artificial Sequence
  Description of Artificial Sequence: Synthetic oligonucleotide
uguucguccugccuuucuu

SEQ ID NO: 2809205 - RNA, 19 nt, Artificial Sequence
  Description of Artificial Sequence: Synthetic oligonucleotide
auggcuguuggggaugcag

SEQ ID NO: 2809206 - RNA, 19 nt, Artificial Sequence
  Description of Artificial Sequence: Synthetic oligonucleotide
cugauggcuucuacuuggc

SEQ ID NO: 2809207 - RNA, 19 nt, Artificial Sequence
  Description of Artificial Sequence: Synthetic oligonucleotide
cagacuguuccgacuuccc

SEQ ID NO: 2809208 - RNA, 19 nt, Artificial Sequence
  Description of Artificial Sequence: Synthetic oligonucleotide
accgugagcuccuccggag

SEQ ID NO: 2809209 - RNA, 19 nt, Artificial Sequence
  Description of Artificial Sequence: Synthetic oligonucleotide
uagagagggguggcgagug

SEQ ID NO: 2809210 - RNA, 19 nt, Artificial Sequence
  Description of Artificial Sequence: Synthetic oligonucleotide
agugguugacguccaggga

SEQ ID NO: 2809211 - RNA, 19 nt, Artificial Sequence
  Description of Artificial Sequence: Synthetic oligonucleotide
cacaccgggaggcagcgug

SEQ ID NO: 2809212 - RNA, 19 nt, Artificial Sequence
  Description of Artificial Sequence: Synthetic oligonucleotide
guugagcgcacgguggaag

SEQ ID NO: 2809213 - RNA, 19 nt, Artificial Sequence
  Description of Artificial Sequence: Synthetic oligonucleotide
gagcgcacgguggaaggcg

SEQ ID NO: 2809214 - RNA, 19 nt, Artificial Sequence
  Description of Artificial Sequence: Synthetic oligonucleotide
gucuuccaacuuuuauuug

SEQ ID NO: 2809215 - RNA, 19 nt, Artificial Sequence
  Description of Artificial Sequence: Synthetic oligonucleotide
guacguguauguaucaaaa

SEQ ID NO: 2809216 - RNA, 19 nt, Artificial Sequence
  Description of Artificial Sequence: Synthetic oligonucleotide
gacguccagggacacgcgc

SEQ ID NO: 2809217 - RNA, 19 nt, Artificial Sequence
  Description of Artificial Sequence: Synthetic oligonucleotide
uuuccggguaaagcaccgg

SEQ ID NO: 2809218 - RNA, 19 nt, Artificial Sequence
  Description of Artificial Sequence: Synthetic oligonucleotide
gaauggugaucuccgcgga

SEQ ID NO: 2809219 - RNA, 19 nt, Artificial Sequence
  Description of Artificial Sequence: Synthetic oligonucleotide
accacgccuuccuuggucu

SEQ ID NO: 2809220 - RNA, 19 nt, Artificial Sequence
  Description of Artificial Sequence: Synthetic oligonucleotide
ugggcgcgggccucgaaag

SEQ ID NO: 2809221 - RNA, 19 nt, Artificial Sequence
  Description of Artificial Sequence: Synthetic oligonucleotide
agggacacgcgccagcgau

SEQ ID NO: 2809222 - RNA, 19 nt, Artificial Sequence
  Description of Artificial Sequence: Synthetic oligonucleotide
uguagccauguucguccug

SEQ ID NO: 2809223 - RNA, 19 nt, Artificial Sequence
  Description of Artificial Sequence: Synthetic oligonucleotide
agacugauagagaggggug

SEQ ID NO: 2809224 - RNA, 19 nt, Artificial Sequence
  Description of Artificial Sequence: Synthetic oligonucleotide
aagugaccggaauggugau

SEQ ID NO: 2809225 - RNA, 19 nt, Artificial Sequence
  Description of Artificial Sequence: Synthetic oligonucleotide
ugggguccacaccgggagg

SEQ ID NO: 2809226 - RNA, 19 nt, Artificial Sequence
  Description of Artificial Sequence: Synthetic oligonucleotide
ugacguccagggacacgcg

SEQ ID NO: 2809227 - RNA, 19 nt, Artificial Sequence
  Description of Artificial Sequence: Synthetic oligonucleotide
uccacaccgggaggcagcg

SEQ ID NO: 2809228 - RNA, 19 nt, Artificial Sequence
  Description of Artificial Sequence: Synthetic oligonucleotide
ucuccgcggauuguguggc

SEQ ID NO: 2809229 - RNA, 19 nt, Artificial Sequence
  Description of Artificial Sequence: Synthetic oligonucleotide
ggucuugaccgugagcucc

SEQ ID NO: 2809230 - RNA, 19 nt, Artificial Sequence
  Description of Artificial Sequence: Synthetic oligonucleotide
aaggcgggcgcggccaggg

SEQ ID NO: 2809231 - RNA, 19 nt, Artificial Sequence
  Description of Artificial Sequence: Synthetic oligonucleotide
gguacguguauguaucaaa

SEQ ID NO: 2809232 - RNA, 19 nt, Artificial Sequence
  Description of Artificial Sequence: Synthetic oligonucleotide
gugcuugccggugaucucc

SEQ ID NO: 2809233 - RNA, 19 nt, Artificial Sequence
  Description of Artificial Sequence: Synthetic oligonucleotide
cuugaccgugagcuccucc

SEQ ID NO: 2809234 - RNA, 19 nt, Artificial Sequence
  Description of Artificial Sequence: Synthetic oligonucleotide
gugaucuccgcggauugug

SEQ ID NO: 2809235 - RNA, 19 nt, Artificial Sequence
  Description of Artificial Sequence: Synthetic oligonucleotide
acagggaagaggacaccag

SEQ ID NO: 2809236 - RNA, 19 nt, Artificial Sequence
  Description of Artificial Sequence: Synthetic oligonucleotide
ugauggcuguuggggaugc

SEQ ID NO: 2809237 - RNA, 19 nt, Artificial Sequence
  Description of Artificial Sequence: Synthetic oligonucleotide
guucguccugccuuucuuc

SEQ ID NO: 2809238 - RNA, 19 nt, Artificial Sequence
  Description of Artificial Sequence: Synthetic oligonucleotide
agugaccggaauggugauc

SEQ ID NO: 2809239 - RNA, 19 nt, Artificial Sequence
  Description of Artificial Sequence: Synthetic oligonucleotide
ggcgagugauggcuguugg

SEQ ID NO: 2809240 - RNA, 19 nt, Artificial Sequence
  Description of Artificial Sequence: Synthetic oligonucleotide
acgguaagugugcccucag

SEQ ID NO: 2809241 - RNA, 19 nt, Artificial Sequence
  Description of Artificial Sequence: Synthetic oligonucleotide
gaucuccgagacuccgcug

SEQ ID NO: 2809242 - RNA, 19 nt, Artificial Sequence
  Description of Artificial Sequence: Synthetic oligonucleotide
uuucuucgugcuugccggu

SEQ ID NO: 2809243 - RNA, 19 nt, Artificial Sequence
  Description of Artificial Sequence: Synthetic oligonucleotide
uucuucgugcuugccggug

SEQ ID NO: 2809244 - RNA, 19 nt, Artificial Sequence
  Description of Artificial Sequence: Synthetic oligonucleotide
uguuccgacuucccagcuu

SEQ ID NO: 2809245 - RNA, 19 nt, Artificial Sequence
  Description of Artificial Sequence: Synthetic oligonucleotide
guggcuguuuugggcagcg

SEQ ID NO: 2809246 - RNA, 19 nt, Artificial Sequence
  Description of Artificial Sequence: Synthetic oligonucleotide
cuccggagcgaagugguug

SEQ ID NO: 2809247 - RNA, 19 nt, Artificial Sequence
  Description of Artificial Sequence: Synthetic oligonucleotide
ucuccgagacuccgcugcu

SEQ ID NO: 2809248 - RNA, 19 nt, Artificial Sequence
  Description of Artificial Sequence: Synthetic oligonucleotide
aggcagcguguauuuccgg

SEQ ID NO: 2809249 - RNA, 19 nt, Artificial Sequence
  Description of Artificial Sequence: Synthetic oligonucleotide
ugagcgcacgguggaaggc

SEQ ID NO: 2809250 - RNA, 19 nt, Artificial Sequence
  Description of Artificial Sequence: Synthetic oligonucleotide
auagagagggguggcgagu

SEQ ID NO: 2809251 - RNA, 19 nt, Artificial Sequence
  Description of Artificial Sequence: Synthetic oligonucleotide
cacgguggaaggcgggcgc

SEQ ID NO: 2809252 - RNA, 19 nt, Artificial Sequence
  Description of Artificial Sequence: Synthetic oligonucleotide
auguucguccugccuuucu

SEQ ID NO: 2809253 - RNA, 19 nt, Artificial Sequence
  Description of Artificial Sequence: Synthetic oligonucleotide
ccggugaucuccaccacgc

SEQ ID NO: 2809254 - RNA, 19 nt, Artificial Sequence
  Description of Artificial Sequence: Synthetic oligonucleotide
cgagugauggcuguugggg

SEQ ID NO: 2809255 - RNA, 19 nt, Artificial Sequence
  Description of Artificial Sequence: Synthetic oligonucleotide
uccgcggauuguguggcug

SEQ ID NO: 2809256 - RNA, 19 nt, Artificial Sequence
  Description of Artificial Sequence: Synthetic oligonucleotide
guugacguccagggacacg

SEQ ID NO: 2809257 - RNA, 19 nt, Artificial Sequence
  Description of Artificial Sequence: Synthetic oligonucleotide
gugaccggaauggugaucu

SEQ ID NO: 2809258 - RNA, 19 nt, Artificial Sequence
  Description of Artificial Sequence: Synthetic oligonucleotide
uuccgacuucccagcuucc

SEQ ID NO: 2809259 - RNA, 19 nt, Artificial Sequence
  Description of Artificial Sequence: Synthetic oligonucleotide
agcgaucggccgucugccg

SEQ ID NO: 2809260 - RNA, 19 nt, Artificial Sequence
  Description of Artificial Sequence: Synthetic oligonucleotide
uggcgagugauggcuguug

SEQ ID NO: 2809261 - RNA, 19 nt, Artificial Sequence
  Description of Artificial Sequence: Synthetic oligonucleotide
agcguguauuuccggguaa

SEQ ID NO: 2809262 - RNA, 19 nt, Artificial Sequence
  Description of Artificial Sequence: Synthetic oligonucleotide
cuccacgguaagugugccc

SEQ ID NO: 2809263 - RNA, 19 nt, Artificial Sequence
  Description of Artificial Sequence: Synthetic oligonucleotide
ggacacgcgccagcgaucg

SEQ ID NO: 2809264 - RNA, 19 nt, Artificial Sequence
  Description of Artificial Sequence: Synthetic oligonucleotide
uccagacuguuccgacuuc

SEQ ID NO: 2809265 - RNA, 19 nt, Artificial Sequence
  Description of Artificial Sequence: Synthetic oligonucleotide
gaggacaccaggguggggu

SEQ ID NO: 2809266 - RNA, 19 nt, Artificial Sequence
  Description of Artificial Sequence: Synthetic oligonucleotide
ggagcgaagugguugacgu

SEQ ID NO: 2809267 - RNA, 19 nt, Artificial Sequence
  Description of Artificial Sequence: Synthetic oligonucleotide
ggcuguuuugggcagcgga

SEQ ID NO: 2809268 - RNA, 19 nt, Artificial Sequence
  Description of Artificial Sequence: Synthetic oligonucleotide
uagccauguucguccugcc

SEQ ID NO: 2809269 - RNA, 19 nt, Artificial Sequence
  Description of Artificial Sequence: Synthetic oligonucleotide
gcagguacguguauguauc

SEQ ID NO: 2809270 - RNA, 19 nt, Artificial Sequence
  Description of Artificial Sequence: Synthetic oligonucleotide
gccggugaucuccaccacg

SEQ ID NO: 2809271 - RNA, 19 nt, Artificial Sequence
  Description of Artificial Sequence: Synthetic oligonucleotide
cacgcgccagcgaucggcc

SEQ ID NO: 2809272 - RNA, 19 nt, Artificial Sequence
  Description of Artificial Sequence: Synthetic oligonucleotide
ggcugauggcuucuacuug

SEQ ID NO: 2809273 - RNA, 19 nt, Artificial Sequence
  Description of Artificial Sequence: Synthetic oligonucleotide
ucguccugccuuucuucgu

SEQ ID NO: 2809274 - RNA, 19 nt, Artificial Sequence
  Description of Artificial Sequence: Synthetic oligonucleotide
ggauuguguggcuguuuug

SEQ ID NO: 2809275 - RNA, 19 nt, Artificial Sequence
  Description of Artificial Sequence: Synthetic oligonucleotide
cugccgguugagcgcacgg

SEQ ID NO: 2809276 - RNA, 19 nt, Artificial Sequence
  Description of Artificial Sequence: Synthetic oligonucleotide
ccggguaaagcaccgggag

SEQ ID NO: 2809277 - RNA, 19 nt, Artificial Sequence
  Description of Artificial Sequence: Synthetic oligonucleotide
uuugggcagcggagccucc

SEQ ID NO: 2809278 - RNA, 19 nt, Artificial Sequence
  Description of Artificial Sequence: Synthetic oligonucleotide
gaccgugagcuccuccgga

SEQ ID NO: 2809279 - RNA, 19 nt, Artificial Sequence
  Description of Artificial Sequence: Synthetic oligonucleotide
guaaagcaccgggagaugu

SEQ ID NO: 2809280 - RNA, 19 nt, Artificial Sequence
  Description of Artificial Sequence: Synthetic oligonucleotide
gcgagugauggcuguuggg

SEQ ID NO: 2809281 - RNA, 19 nt, Artificial Sequence
  Description of Artificial Sequence: Synthetic oligonucleotide
cgacuucccagcuuccugg

SEQ ID NO: 2809282 - RNA, 19 nt, Artificial Sequence
  Description of Artificial Sequence: Synthetic oligonucleotide
gagcgaagugguugacguc

SEQ ID NO: 2809283 - RNA, 19 nt, Artificial Sequence
  Description of Artificial Sequence: Synthetic oligonucleotide
cagcgaucggccgucugcc

SEQ ID NO: 2809284 - RNA, 19 nt, Artificial Sequence
  Description of Artificial Sequence: Synthetic oligonucleotide
gagacuccgcugcucagcu

SEQ ID NO: 2809285 - RNA, 19 nt, Artificial Sequence
  Description of Artificial Sequence: Synthetic oligonucleotide
uggucuugaccgugagcuc

SEQ ID NO: 2809286 - RNA, 19 nt, Artificial Sequence
  Description of Artificial Sequence: Synthetic oligonucleotide
cgggccucgaaagugaccg

SEQ ID NO: 2809287 - RNA, 19 nt, Artificial Sequence
  Description of Artificial Sequence: Synthetic oligonucleotide
auggugaucuccgcggauu

SEQ ID NO: 2809288 - RNA, 19 nt, Artificial Sequence
  Description of Artificial Sequence: Synthetic oligonucleotide
uccgacuucccagcuuccu

SEQ ID NO: 2809289 - RNA, 19 nt, Artificial Sequence
  Description of Artificial Sequence: Synthetic oligonucleotide
agguacguguauguaucaa

SEQ ID NO: 2809290 - RNA, 19 nt, Artificial Sequence
  Description of Artificial Sequence: Synthetic oligonucleotide
ccgguugagcgcacggugg

SEQ ID NO: 2809291 - RNA, 19 nt, Artificial Sequence
  Description of Artificial Sequence: Synthetic oligonucleotide
agcgcacgguggaaggcgg

SEQ ID NO: 2809292 - RNA, 19 nt, Artificial Sequence
  Description of Artificial Sequence: Synthetic oligonucleotide
gcgaucggccgucugccgg

SEQ ID NO: 2809293 - RNA, 19 nt, Artificial Sequence
  Description of Artificial Sequence: Synthetic oligonucleotide
ugagcuccuccggagcgaa

SEQ ID NO: 2809294 - RNA, 19 nt, Artificial Sequence
  Description of Artificial Sequence: Synthetic oligonucleotide
cagguacguguauguauca

SEQ ID NO: 2809295 - RNA, 19 nt, Artificial Sequence
  Description of Artificial Sequence: Synthetic oligonucleotide
gagauguagccauguucgu

SEQ ID NO: 2809296 - RNA, 19 nt, Artificial Sequence
  Description of Artificial Sequence: Synthetic oligonucleotide
cggaauggugaucuccgcg

SEQ ID NO: 2809297 - RNA, 19 nt, Artificial Sequence
  Description of Artificial Sequence: Synthetic oligonucleotide
caccacgccuuccuugguc

SEQ ID NO: 2809298 - RNA, 19 nt, Artificial Sequence
  Description of Artificial Sequence: Synthetic oligonucleotide
gcauaaagacugauagaga

SEQ ID NO: 2809299 - RNA, 19 nt, Artificial Sequence
  Description of Artificial Sequence: Synthetic oligonucleotide
uggcuccagacuguuccga

SEQ ID NO: 2809300 - RNA, 19 nt, Artificial Sequence
  Description of Artificial Sequence: Synthetic oligonucleotide
acgguggaaggcgggcgcg

SEQ ID NO: 2809301 - RNA, 19 nt, Artificial Sequence
  Description of Artificial Sequence: Synthetic oligonucleotide
ccagcgaucggccgucugc

SEQ ID NO: 2809302 - RNA, 19 nt, Artificial Sequence
  Description of Artificial Sequence: Synthetic oligonucleotide
gccgguugagcgcacggug

SEQ ID NO: 2809303 - RNA, 19 nt, Artificial Sequence
  Description of Artificial Sequence: Synthetic oligonucleotide
agagggguggcgagugaug

SEQ ID NO: 2809304 - RNA, 19 nt, Artificial Sequence
  Description of Artificial Sequence: Synthetic oligonucleotide
acuccgcugcucagcugcc

SEQ ID NO: 2809305 - RNA, 19 nt, Artificial Sequence
  Description of Artificial Sequence: Synthetic oligonucleotide
uggcuguuuugggcagcgg

SEQ ID NO: 2809306 - RNA, 19 nt, Artificial Sequence
  Description of Artificial Sequence: Synthetic oligonucleotide
gacaccaggguggggucca

SEQ ID NO: 2809307 - RNA, 19 nt, Artificial Sequence
  Description of Artificial Sequence: Synthetic oligonucleotide
ccagacuguuccgacuucc

SEQ ID NO: 2809308 - RNA, 19 nt, Artificial Sequence
  Description of Artificial Sequence: Synthetic oligonucleotide
ugccggugaucuccaccac

SEQ ID NO: 2809309 - RNA, 19 nt, Artificial Sequence
  Description of Artificial Sequence: Synthetic oligonucleotide
gccuuccuuggucuugacc

SEQ ID NO: 2809310 - RNA, 19 nt, Artificial Sequence
  Description of Artificial Sequence: Synthetic oligonucleotide
guggaaggcgggcgcggcc

SEQ ID NO: 2809311 - RNA, 19 nt, Artificial Sequence
  Description of Artificial Sequence: Synthetic oligonucleotide
ugccgguugagcgcacggu

SEQ ID NO: 2809312 - RNA, 19 nt, Artificial Sequence
  Description of Artificial Sequence: Synthetic oligonucleotide
gacacgcgccagcgaucgg

SEQ ID NO: 2809313 - RNA, 19 nt, Artificial Sequence
  Description of Artificial Sequence: Synthetic oligonucleotide
agacuccgcugcucagcug

SEQ ID NO: 2809314 - RNA, 19 nt, Artificial Sequence
  Description of Artificial Sequence: Synthetic oligonucleotide
cgugagcuccuccggagcg

SEQ ID NO: 2809315 - RNA, 19 nt, Artificial Sequence
  Description of Artificial Sequence: Synthetic oligonucleotide
gguaaagcaccgggagaug

SEQ ID NO: 2809316 - RNA, 19 nt, Artificial Sequence
  Description of Artificial Sequence: Synthetic oligonucleotide
cacgccuuccuuggucuug

SEQ ID NO: 2809317 - RNA, 19 nt, Artificial Sequence
  Description of Artificial Sequence: Synthetic oligonucleotide
acgcgccagcgaucggccg

SEQ ID NO: 2809318 - RNA, 19 nt, Artificial Sequence
  Description of Artificial Sequence: Synthetic oligonucleotide
ggcuccagacuguuccgac

SEQ ID NO: 2809319 - RNA, 19 nt, Artificial Sequence
  Description of Artificial Sequence: Synthetic oligonucleotide
gggaagaggacaccagggu

SEQ ID NO: 2809320 - RNA, 19 nt, Artificial Sequence
  Description of Artificial Sequence: Synthetic oligonucleotide
agaggacaccagggugggg

SEQ ID NO: 2809321 - RNA, 19 nt, Artificial Sequence
  Description of Artificial Sequence: Synthetic oligonucleotide
agcggagccuccacgguaa

SEQ ID NO: 2809322 - RNA, 19 nt, Artificial Sequence
  Description of Artificial Sequence: Synthetic oligonucleotide
ugaccggaauggugaucuc

SEQ ID NO: 2809323 - RNA, 19 nt, Artificial Sequence
  Description of Artificial Sequence: Synthetic oligonucleotide
gucugccggaucuccgaga

SEQ ID NO: 2809324 - RNA, 19 nt, Artificial Sequence
  Description of Artificial Sequence: Synthetic oligonucleotide
gaaggcgggcgcggccagg

SEQ ID NO: 2809325 - RNA, 19 nt, Artificial Sequence
  Description of Artificial Sequence: Synthetic oligonucleotide
acgccuuccuuggucuuga

SEQ ID NO: 2809326 - RNA, 19 nt, Artificial Sequence
  Description of Artificial Sequence: Synthetic oligonucleotide
gggcagcggagccuccacg

SEQ ID NO: 2809327 - RNA, 19 nt, Artificial Sequence
  Description of Artificial Sequence: Synthetic oligonucleotide
cacgguaagugugcccuca

SEQ ID NO: 2809328 - RNA, 19 nt, Artificial Sequence
  Description of Artificial Sequence: Synthetic oligonucleotide
caauuugggcgcgggccuc

SEQ ID NO: 2809329 - RNA, 19 nt, Artificial Sequence
  Description of Artificial Sequence: Synthetic oligonucleotide
uuugggcgcgggccucgaa

SEQ ID NO: 2809330 - RNA, 19 nt, Artificial Sequence
  Description of Artificial Sequence: Synthetic oligonucleotide
gagccuccacgguaagugu

SEQ ID NO: 2809331 - RNA, 19 nt, Artificial Sequence
  Description of Artificial Sequence: Synthetic oligonucleotide
ccagggacacgcgccagcg

SEQ ID NO: 2809332 - RNA, 19 nt, Artificial Sequence
  Description of Artificial Sequence: Synthetic oligonucleotide
ggaucuccgagacuccgcu

SEQ ID NO: 2809333 - RNA, 19 nt, Artificial Sequence
  Description of Artificial Sequence: Synthetic oligonucleotide
agggugggguccacaccgg

SEQ ID NO: 2809334 - RNA, 19 nt, Artificial Sequence
  Description of Artificial Sequence: Synthetic oligonucleotide
ggguaaagcaccgggagau

SEQ ID NO: 2809335 - RNA, 19 nt, Artificial Sequence
  Description of Artificial Sequence: Synthetic oligonucleotide
gccuccacgguaagugugc

SEQ ID NO: 2809336 - RNA, 19 nt, Artificial Sequence
  Description of Artificial Sequence: Synthetic oligonucleotide
aucggccgucugccggauc

SEQ ID NO: 2809337 - RNA, 19 nt, Artificial Sequence
  Description of Artificial Sequence: Synthetic oligonucleotide
ggcgcgggccucgaaagug

SEQ ID NO: 2809338 - RNA, 19 nt, Artificial Sequence
  Description of Artificial Sequence: Synthetic oligonucleotide
uucgugcuugccggugauc

SEQ ID NO: 2809339 - RNA, 19 nt, Artificial Sequence
  Description of Artificial Sequence: Synthetic oligonucleotide
cagcguguauuuccgggua

SEQ ID NO: 2809340 - RNA, 19 nt, Artificial Sequence
  Description of Artificial Sequence: Synthetic oligonucleotide
gugaucuccaccacgccuu

SEQ ID NO: 2809341 - RNA, 19 nt, Artificial Sequence
  Description of Artificial Sequence: Synthetic oligonucleotide
cauguucguccugccuuuc

SEQ ID NO: 2809342 - RNA, 19 nt, Artificial Sequence
  Description of Artificial Sequence: Synthetic oligonucleotide
cuccagacuguuccgacuu

SEQ ID NO: 2809343 - RNA, 19 nt, Artificial Sequence
  Description of Artificial Sequence: Synthetic oligonucleotide
gggccucgaaagugaccgg

SEQ ID NO: 2809344 - RNA, 19 nt, Artificial Sequence
  Description of Artificial Sequence: Synthetic oligonucleotide
ccggaauggugaucuccgc

SEQ ID NO: 2809345 - RNA, 19 nt, Artificial Sequence
  Description of Artificial Sequence: Synthetic oligonucleotide
ggccucgaaagugaccgga

SEQ ID NO: 2809346 - RNA, 19 nt, Artificial Sequence
  Description of Artificial Sequence: Synthetic oligonucleotide
caccgggagauguagccau

SEQ ID NO: 2809347 - RNA, 19 nt, Artificial Sequence
  Description of Artificial Sequence: Synthetic oligonucleotide
accgggagauguagccaug

SEQ ID NO: 2809348 - RNA, 19 nt, Artificial Sequence
  Description of Artificial Sequence: Synthetic oligonucleotide
ccggaucuccgagacuccg

SEQ ID NO: 2809349 - RNA, 19 nt, Artificial Sequence
  Description of Artificial Sequence: Synthetic oligonucleotide
accgggaggcagcguguau

SEQ ID NO: 2809350 - RNA, 19 nt, Artificial Sequence
  Description of Artificial Sequence: Synthetic oligonucleotide
ucuugaccgugagcuccuc

SEQ ID NO: 2809351 - RNA, 19 nt, Artificial Sequence
  Description of Artificial Sequence: Synthetic oligonucleotide
gcagcguguauuuccgggu

SEQ ID NO: 2809352 - RNA, 19 nt, Artificial Sequence
  Description of Artificial Sequence: Synthetic oligonucleotide
gccauguucguccugccuu

SEQ ID NO: 2809353 - RNA, 19 nt, Artificial Sequence
  Description of Artificial Sequence: Synthetic oligonucleotide
guccagggacacgcgccag

SEQ ID NO: 2809354 - RNA, 19 nt, Artificial Sequence
  Description of Artificial Sequence: Synthetic oligonucleotide
cgguaagugugcccucagg

SEQ ID NO: 2809355 - RNA, 19 nt, Artificial Sequence
  Description of Artificial Sequence: Synthetic oligonucleotide
acaccgggaggcagcgugu

SEQ ID NO: 2809356 - RNA, 19 nt, Artificial Sequence
  Description of Artificial Sequence: Synthetic oligonucleotide
ccgugagcuccuccggagc

SEQ ID NO: 2809357 - RNA, 19 nt, Artificial Sequence
  Description of Artificial Sequence: Synthetic oligonucleotide
gguggaaggcgggcgcggc

SEQ ID NO: 2809358 - RNA, 19 nt, Artificial Sequence
  Description of Artificial Sequence: Synthetic oligonucleotide
ggaaggcgggcgcggccag

SEQ ID NO: 2809359 - RNA, 19 nt, Artificial Sequence
  Description of Artificial Sequence: Synthetic oligonucleotide
gauggcuguuggggaugca

SEQ ID NO: 2809360 - RNA, 19 nt, Artificial Sequence
  Description of Artificial Sequence: Synthetic oligonucleotide
gccgucugccggaucuccg

SEQ ID NO: 2809361 - RNA, 19 nt, Artificial Sequence
  Description of Artificial Sequence: Synthetic oligonucleotide
gagcuccuccggagcgaag

SEQ ID NO: 2809362 - RNA, 19 nt, Artificial Sequence
  Description of Artificial Sequence: Synthetic oligonucleotide
cagcggagccuccacggua

SEQ ID NO: 2809363 - RNA, 19 nt, Artificial Sequence
  Description of Artificial Sequence: Synthetic oligonucleotide
gcugccgguugagcgcacg

SEQ ID NO: 2809364 - RNA, 19 nt, Artificial Sequence
  Description of Artificial Sequence: Synthetic oligonucleotide
gguugacguccagggacac

SEQ ID NO: 2809365 - RNA, 19 nt, Artificial Sequence
  Description of Artificial Sequence: Synthetic oligonucleotide
cagcugccgguugagcgca

SEQ ID NO: 2809366 - RNA, 19 nt, Artificial Sequence
  Description of Artificial Sequence: Synthetic oligonucleotide
auuugggcgcgggccucga

SEQ ID NO: 2809367 - RNA, 19 nt, Artificial Sequence
  Description of Artificial Sequence: Synthetic oligonucleotide
cggaucuccgagacuccgc

SEQ ID NO: 2809368 - RNA, 19 nt, Artificial Sequence
  Description of Artificial Sequence: Synthetic oligonucleotide
ggcuucuacuuggcuccag

SEQ ID NO: 2809369 - RNA, 19 nt, Artificial Sequence
  Description of Artificial Sequence: Synthetic oligonucleotide
gggguggcgagugauggcu

SEQ ID NO: 2809370 - RNA, 19 nt, Artificial Sequence
  Description of Artificial Sequence: Synthetic oligonucleotide
cgagacuccgcugcucagc

SEQ ID NO: 2809371 - RNA, 19 nt, Artificial Sequence
  Description of Artificial Sequence: Synthetic oligonucleotide
cggagcgaagugguugacg

SEQ ID NO: 2809372 - RNA, 19 nt, Artificial Sequence
  Description of Artificial Sequence: Synthetic oligonucleotide
ccuccacgguaagugugcc

SEQ ID NO: 2809373 - RNA, 19 nt, Artificial Sequence
  Description of Artificial Sequence: Synthetic oligonucleotide
ggccgucugccggaucucc

SEQ ID NO: 2809374 - RNA, 19 nt, Artificial Sequence
  Description of Artificial Sequence: Synthetic oligonucleotide
gcuccagacuguuccgacu

SEQ ID NO: 2809375 - RNA, 19 nt, Artificial Sequence
  Description of Artificial Sequence: Synthetic oligonucleotide
ccgagacuccgcugcucag

SEQ ID NO: 2809376 - RNA, 19 nt, Artificial Sequence
  Description of Artificial Sequence: Synthetic oligonucleotide
gcaccgggagauguagcca

SEQ ID NO: 2809377 - RNA, 19 nt, Artificial Sequence
  Description of Artificial Sequence: Synthetic oligonucleotide
ggguggcgagugauggcug

SEQ ID NO: 2809378 - RNA, 19 nt, Artificial Sequence
  Description of Artificial Sequence: Synthetic oligonucleotide
gcucagcugccgguugagc

SEQ ID NO: 2809379 - RNA, 19 nt, Artificial Sequence
  Description of Artificial Sequence: Synthetic oligonucleotide
gcguguauuuccggguaaa

SEQ ID NO: 2809380 - RNA, 19 nt, Artificial Sequence
  Description of Artificial Sequence: Synthetic oligonucleotide
cagggacacgcgccagcga

SEQ ID NO: 2809381 - RNA, 19 nt, Artificial Sequence
  Description of Artificial Sequence: Synthetic oligonucleotide
cagcagguacguguaugua

SEQ ID NO: 2809382 - RNA, 19 nt, Artificial Sequence
  Description of Artificial Sequence: Synthetic oligonucleotide
cgaagugguugacguccag

SEQ ID NO: 2809383 - RNA, 19 nt, Artificial Sequence
  Description of Artificial Sequence: Synthetic oligonucleotide
cuguuccgacuucccagcu

SEQ ID NO: 2809384 - RNA, 19 nt, Artificial Sequence
  Description of Artificial Sequence: Synthetic oligonucleotide
cgucugccggaucuccgag

SEQ ID NO: 2809385 - RNA, 19 nt, Artificial Sequence
  Description of Artificial Sequence: Synthetic oligonucleotide
agcugccgguugagcgcac

SEQ ID NO: 2809386 - RNA, 19 nt, Artificial Sequence
  Description of Artificial Sequence: Synthetic oligonucleotide
cuucgugcuugccggugau

SEQ ID NO: 2809387 - RNA, 19 nt, Artificial Sequence
  Description of Artificial Sequence: Synthetic oligonucleotide
gccagcgaucggccgucug

SEQ ID NO: 2809388 - RNA, 19 nt, Artificial Sequence
  Description of Artificial Sequence: Synthetic oligonucleotide
gcggagccuccacgguaag

SEQ ID NO: 2809389 - RNA, 19 nt, Artificial Sequence
  Description of Artificial Sequence: Synthetic oligonucleotide
ccgucugccggaucuccga

SEQ ID NO: 2809390 - RNA, 19 nt, Artificial Sequence
  Description of Artificial Sequence: Synthetic oligonucleotide
ccacgguaagugugcccuc

SEQ ID NO: 2809391 - RNA, 19 nt, Artificial Sequence
  Description of Artificial Sequence: Synthetic oligonucleotide
gguugagcgcacgguggaa

SEQ ID NO: 2809392 - RNA, 19 nt, Artificial Sequence
  Description of Artificial Sequence: Synthetic oligonucleotide
cggguaaagcaccgggaga

SEQ ID NO: 2809393 - RNA, 19 nt, Artificial Sequence
  Description of Artificial Sequence: Synthetic oligonucleotide
gccucgaaagugaccggaa

SEQ ID NO: 2809394 - RNA, 19 nt, Artificial Sequence
  Description of Artificial Sequence: Synthetic oligonucleotide
gccggaucuccgagacucc

SEQ ID NO: 2809395 - RNA, 19 nt, Artificial Sequence
  Description of Artificial Sequence: Synthetic oligonucleotide
gcgggccucgaaagugacc

SEQ ID NO: 2809396 - RNA, 19 nt, Artificial Sequence
  Description of Artificial Sequence: Synthetic oligonucleotide
gcgcacgguggaaggcggg

SEQ ID NO: 2809397 - RNA, 19 nt, Artificial Sequence
  Description of Artificial Sequence: Synthetic oligonucleotide
gcuugccggugaucuccac

SEQ ID NO: 2809398 - RNA, 19 nt, Artificial Sequence
  Description of Artificial Sequence: Synthetic oligonucleotide
gggaggcagcguguauuuc

SEQ ID NO: 2809399 - RNA, 19 nt, Artificial Sequence
  Description of Artificial Sequence: Synthetic oligonucleotide
gggacacgcgccagcgauc

SEQ ID NO: 2809400 - RNA, 19 nt, Artificial Sequence
  Description of Artificial Sequence: Synthetic oligonucleotide
cgugcuugccggugaucuc

SEQ ID NO: 2809401 - RNA, 19 nt, Artificial Sequence
  Description of Artificial Sequence: Synthetic oligonucleotide
cgcacgguggaaggcgggc

SEQ ID NO: 2809402 - RNA, 19 nt, Artificial Sequence
  Description of Artificial Sequence: Synthetic oligonucleotide
ggugaucuccgcggauugu

SEQ ID NO: 2809403 - RNA, 19 nt, Artificial Sequence
  Description of Artificial Sequence: Synthetic oligonucleotide
cguccagggacacgcgcca

SEQ ID NO: 2809404 - RNA, 19 nt, Artificial Sequence
  Description of Artificial Sequence: Synthetic oligonucleotide
ccucgaaagugaccggaau

SEQ ID NO: 2809405 - RNA, 19 nt, Artificial Sequence
  Description of Artificial Sequence: Synthetic oligonucleotide
cgguugagcgcacggugga

SEQ ID NO: 2809406 - RNA, 19 nt, Artificial Sequence
  Description of Artificial Sequence: Synthetic oligonucleotide
cgaucggccgucugccgga

SEQ ID NO: 2809407 - RNA, 19 nt, Artificial Sequence
  Description of Artificial Sequence: Synthetic oligonucleotide
ccauguucguccugccuuu

SEQ ID NO: 2809408 - RNA, 19 nt, Artificial Sequence
  Description of Artificial Sequence: Synthetic oligonucleotide
caccgggaggcagcgugua

SEQ ID NO: 2809409 - RNA, 19 nt, Artificial Sequence
  Description of Artificial Sequence: Synthetic oligonucleotide
gaucggccgucugccggau

SEQ ID NO: 2809410 - RNA, 19 nt, Artificial Sequence
  Description of Artificial Sequence: Synthetic oligonucleotide
cgguggaaggcgggcgcgg

SEQ ID NO: 2809411 - RNA, 19 nt, Artificial Sequence
  Description of Artificial Sequence: Synthetic oligonucleotide
cugccggaucuccgagacu

SEQ ID NO: 2809412 - RNA, 19 nt, Artificial Sequence
  Description of Artificial Sequence: Synthetic oligonucleotide
cuccgcggauuguguggcu

SEQ ID NO: 2809413 - RNA, 19 nt, Artificial Sequence
  Description of Artificial Sequence: Synthetic oligonucleotide
cggauuguguggcuguuuu

SEQ ID NO: 2809414 - RNA, 19 nt, Artificial Sequence
  Description of Artificial Sequence: Synthetic oligonucleotide
gcgccagcgaucggccguc

SEQ ID NO: 2809415 - RNA, 19 nt, Artificial Sequence
  Description of Artificial Sequence: Synthetic oligonucleotide
ccggagcgaagugguugac

SEQ ID NO: 2809416 - RNA, 19 nt, Artificial Sequence
  Description of Artificial Sequence: Synthetic oligonucleotide
guggcgagugauggcuguu

SEQ ID NO: 2809417 - RNA, 19 nt, Artificial Sequence
  Description of Artificial Sequence: Synthetic oligonucleotide
cgaaagugaccggaauggu

SEQ ID NO: 2809418 - RNA, 19 nt, Artificial Sequence
  Description of Artificial Sequence: Synthetic oligonucleotide
ccgcggauuguguggcugu

SEQ ID NO: 2809419 - RNA, 19 nt, Artificial Sequence
  Description of Artificial Sequence: Synthetic oligonucleotide
gggcgcgggccucgaaagu

SEQ ID NO: 2809420 - RNA, 19 nt, Artificial Sequence
  Description of Artificial Sequence: Synthetic oligonucleotide
ccgggagauguagccaugu

SEQ ID NO: 2809421 - RNA, 19 nt, Artificial Sequence
  Description of Artificial Sequence: Synthetic oligonucleotide
cgccuuccuuggucuugac

SEQ ID NO: 2809422 - RNA, 19 nt, Artificial Sequence
  Description of Artificial Sequence: Synthetic oligonucleotide
gcggauuguguggcuguuu

SEQ ID NO: 2809423 - RNA, 19 nt, Artificial Sequence
  Description of Artificial Sequence: Synthetic oligonucleotide
ccgggaggcagcguguauu

SEQ ID NO: 2809424 - RNA, 19 nt, Artificial Sequence
  Description of Artificial Sequence: Synthetic oligonucleotide
cgggaggcagcguguauuu

SEQ ID NO: 2809425 - RNA, 19 nt, Artificial Sequence
  Description of Artificial Sequence: Synthetic oligonucleotide
cgcgccagcgaucggccgu

SEQ ID NO: 2809426 - RNA, 19 nt, Artificial Sequence
  Description of Artificial Sequence: Synthetic oligonucleotide
ccaccacgccuuccuuggu

SEQ ID NO: 2809427 - RNA, 19 nt, Artificial Sequence
  Description of Artificial Sequence: Synthetic oligonucleotide
ccuccggagcgaagugguu

SEQ ID NO: 2809428 - RNA, 19 nt, Artificial Sequence
  Description of Artificial Sequence: Synthetic oligonucleotide
cgggagauguagccauguu

SEQ ID NO: 2809429 - RNA, 19 nt, Artificial Sequence
  Description of Artificial Sequence: Synthetic oligonucleotide
cggccgucugccggaucuc

SEQ ID NO: 2809430 - RNA, 19 nt, Artificial Sequence
  Description of Artificial Sequence: Synthetic oligonucleotide
ccacgccuuccuuggucuu

SEQ ID NO: 2809431 - RNA, 19 nt, Artificial Sequence
  Description of Artificial Sequence: Synthetic oligonucleotide
cggagccuccacgguaagu

SEQ ID NO: 2809432 - RNA, 19 nt, Artificial Sequence
  Description of Artificial Sequence: Synthetic oligonucleotide
cgcggauuguguggcuguu

SEQ ID NO: 2809433 - RNA, 19 nt, Artificial Sequence
  Description of Artificial Sequence: Synthetic oligonucleotide
ccacaccgggaggcagcgu

SEQ ID NO: 2809434 - RNA, 19 nt, Artificial Sequence
  Description of Artificial Sequence: Synthetic oligonucleotide
cgccagcgaucggccgucu

SEQ ID NO: 2809435 - RNA, 19 nt, Artificial Sequence
  Description of Artificial Sequence: Synthetic oligonucleotide
uuuauuaccagucacaaaa

SEQ ID NO: 2809436 - RNA, 19 nt, Artificial Sequence
  Description of Artificial Sequence: Synthetic oligonucleotide
aauuuguuccuucacgucg

SEQ ID NO: 2809437 - RNA, 19 nt, Artificial Sequence
  Description of Artificial Sequence: Synthetic oligonucleotide
aauuuaugccacuagagca

SEQ ID NO: 2809438 - RNA, 19 nt, Artificial Sequence
  Description of Artificial Sequence: Synthetic oligonucleotide
cauauuuccaauugggugg

SEQ ID NO: 2809439 - RNA, 19 nt, Artificial Sequence
  Description of Artificial Sequence: Synthetic oligonucleotide
gaacuuagcauccuuaucc

SEQ ID NO: 2809440 - RNA, 19 nt, Artificial Sequence
  Description of Artificial Sequence: Synthetic oligonucleotide
auaguaacgagccagccgg

SEQ ID NO: 2809441 - RNA, 19 nt, Artificial Sequence
  Description of Artificial Sequence: Synthetic oligonucleotide
uacacaagagaauuuaugc

SEQ ID NO: 2809442 - RNA, 19 nt, Artificial Sequence
  Description of Artificial Sequence: Synthetic oligonucleotide
uuucuuaaucaaaugguag

SEQ ID NO: 2809443 - RNA, 19 nt, Artificial Sequence
  Description of Artificial Sequence: Synthetic oligonucleotide
uuuuguguacacaagagaa

SEQ ID NO: 2809444 - RNA, 19 nt, Artificial Sequence
  Description of Artificial Sequence: Synthetic oligonucleotide
acacaagagaauuuaugcc

SEQ ID NO: 2809445 - RNA, 19 nt, Artificial Sequence
  Description of Artificial Sequence: Synthetic oligonucleotide
uuaaggauucuuaagauuu

SEQ ID NO: 2809446 - RNA, 19 nt, Artificial Sequence
  Description of Artificial Sequence: Synthetic oligonucleotide
uaagauuuuauuaccaguc

SEQ ID NO: 2809447 - RNA, 19 nt, Artificial Sequence
  Description of Artificial Sequence: Synthetic oligonucleotide
agucuuauaguaacgagcc

SEQ ID NO: 2809448 - RNA, 19 nt, Artificial Sequence
  Description of Artificial Sequence: Synthetic oligonucleotide
ucauauuuccaauugggug

SEQ ID NO: 2809449 - RNA, 19 nt, Artificial Sequence
  Description of Artificial Sequence: Synthetic oligonucleotide
ucagacgucagcuucagcc

SEQ ID NO: 2809450 - RNA, 19 nt, Artificial Sequence
  Description of Artificial Sequence: Synthetic oligonucleotide
guaaauuuguuccuucacg

SEQ ID NO: 2809451 - RNA, 19 nt, Artificial Sequence
  Description of Artificial Sequence: Synthetic oligonucleotide
gaucacaccuaucugagag

SEQ ID NO: 2809452 - RNA, 19 nt, Artificial Sequence
  Description of Artificial Sequence: Synthetic oligonucleotide
agauuuuauuaccagucac

SEQ ID NO: 2809453 - RNA, 19 nt, Artificial Sequence
  Description of Artificial Sequence: Synthetic oligonucleotide
uauaguaacgagccagccg

SEQ ID NO: 2809454 - RNA, 19 nt, Artificial Sequence
  Description of Artificial Sequence: Synthetic oligonucleotide
gaauuuaugccacuagagc

SEQ ID NO: 2809455 - RNA, 19 nt, Artificial Sequence
  Description of Artificial Sequence: Synthetic oligonucleotide
uuaaucaaaugguagagau

SEQ ID NO: 2809456 - RNA, 19 nt, Artificial Sequence
  Description of Artificial Sequence: Synthetic oligonucleotide
ucuuauaguaacgagccag

SEQ ID NO: 2809457 - RNA, 19 nt, Artificial Sequence
  Description of Artificial Sequence: Synthetic oligonucleotide
uagucuuauaguaacgagc

SEQ ID NO: 2809458 - RNA, 19 nt, Artificial Sequence
  Description of Artificial Sequence: Synthetic oligonucleotide
augguagagauccucaggg

SEQ ID NO: 2809459 - RNA, 19 nt, Artificial Sequence
  Description of Artificial Sequence: Synthetic oligonucleotide
aaauuuguuccuucacguc

SEQ ID NO: 2809460 - RNA, 19 nt, Artificial Sequence
  Description of Artificial Sequence: Synthetic oligonucleotide
ucuuaagauuuuauuacca

SEQ ID NO: 2809461 - RNA, 19 nt, Artificial Sequence
  Description of Artificial Sequence: Synthetic oligonucleotide
gauucuuaagauuuuauua

SEQ ID NO: 2809462 - RNA, 19 nt, Artificial Sequence
  Description of Artificial Sequence: Synthetic oligonucleotide
uuaccagucacaaaacgga

SEQ ID NO: 2809463 - RNA, 19 nt, Artificial Sequence
  Description of Artificial Sequence: Synthetic oligonucleotide
uaaauuuguuccuucacgu

SEQ ID NO: 2809464 - RNA, 19 nt, Artificial Sequence
  Description of Artificial Sequence: Synthetic oligonucleotide
gaugcuuucggacagcaac

SEQ ID NO: 2809465 - RNA, 19 nt, Artificial Sequence
  Description of Artificial Sequence: Synthetic oligonucleotide
uucuuaaucaaaugguaga

SEQ ID NO: 2809466 - RNA, 19 nt, Artificial Sequence
  Description of Artificial Sequence: Synthetic oligonucleotide
uuaagauuuuauuaccagu

SEQ ID NO: 2809467 - RNA, 19 nt, Artificial Sequence
  Description of Artificial Sequence: Synthetic oligonucleotide
cuuaagauuuuauuaccag

SEQ ID NO: 2809468 - RNA, 19 nt, Artificial Sequence
  Description of Artificial Sequence: Synthetic oligonucleotide
uucuuaagauuuuauuacc

SEQ ID NO: 2809469 - RNA, 19 nt, Artificial Sequence
  Description of Artificial Sequence: Synthetic oligonucleotide
aaggcccuuagacuuaagg

SEQ ID NO: 2809470 - RNA, 19 nt, Artificial Sequence
  Description of Artificial Sequence: Synthetic oligonucleotide
ucuuaaucaaaugguagag

SEQ ID NO: 2809471 - RNA, 19 nt, Artificial Sequence
  Description of Artificial Sequence: Synthetic oligonucleotide
gacuuaaggauucuuaaga

SEQ ID NO: 2809472 - RNA, 19 nt, Artificial Sequence
  Description of Artificial Sequence: Synthetic oligonucleotide
aagauuuuauuaccaguca

SEQ ID NO: 2809473 - RNA, 19 nt, Artificial Sequence
  Description of Artificial Sequence: Synthetic oligonucleotide
uuagucuuauaguaacgag

SEQ ID NO: 2809474 - RNA, 19 nt, Artificial Sequence
  Description of Artificial Sequence: Synthetic oligonucleotide
aaaugguagagauccucag

SEQ ID NO: 2809475 - RNA, 19 nt, Artificial Sequence
  Description of Artificial Sequence: Synthetic oligonucleotide
cacaaaacggaccugggcc

SEQ ID NO: 2809476 - RNA, 19 nt, Artificial Sequence
  Description of Artificial Sequence: Synthetic oligonucleotide
cucuaucagaaucaggcgg

SEQ ID NO: 2809477 - RNA, 19 nt, Artificial Sequence
  Description of Artificial Sequence: Synthetic oligonucleotide
aaucaggcggaacuuagca

SEQ ID NO: 2809478 - RNA, 19 nt, Artificial Sequence
  Description of Artificial Sequence: Synthetic oligonucleotide
ucugcucucuaucagaauc

SEQ ID NO: 2809479 - RNA, 19 nt, Artificial Sequence
  Description of Artificial Sequence: Synthetic oligonucleotide
ucaagaugcuuucggacag

SEQ ID NO: 2809480 - RNA, 19 nt, Artificial Sequence
  Description of Artificial Sequence: Synthetic oligonucleotide
aauucugcucucuaucaga

SEQ ID NO: 2809481 - RNA, 19 nt, Artificial Sequence
  Description of Artificial Sequence: Synthetic oligonucleotide
auuaccagucacaaaacgg

SEQ ID NO: 2809482 - RNA, 19 nt, Artificial Sequence
  Description of Artificial Sequence: Synthetic oligonucleotide
ucuaucagaaucaggcgga

SEQ ID NO: 2809483 - RNA, 19 nt, Artificial Sequence
  Description of Artificial Sequence: Synthetic oligonucleotide
caaagagaaaacgagggag

SEQ ID NO: 2809484 - RNA, 19 nt, Artificial Sequence
  Description of Artificial Sequence: Synthetic oligonucleotide
uguaaauuuguuccuucac

SEQ ID NO: 2809485 - RNA, 19 nt, Artificial Sequence
  Description of Artificial Sequence: Synthetic oligonucleotide
aucagaaucaggcggaacu

SEQ ID NO: 2809486 - RNA, 19 nt, Artificial Sequence
  Description of Artificial Sequence: Synthetic oligonucleotide
uccuuauccuuucuguucc

SEQ ID NO: 2809487 - RNA, 19 nt, Artificial Sequence
  Description of Artificial Sequence: Synthetic oligonucleotide
augccacuagagcagaggc

SEQ ID NO: 2809488 - RNA, 19 nt, Artificial Sequence
  Description of Artificial Sequence: Synthetic oligonucleotide
uguuccuucacgucgucag

SEQ ID NO: 2809489 - RNA, 19 nt, Artificial Sequence
  Description of Artificial Sequence: Synthetic oligonucleotide
uuuccaauugggugggagg

SEQ ID NO: 2809490 - RNA, 19 nt, Artificial Sequence
  Description of Artificial Sequence: Synthetic oligonucleotide
ugugagucccuuaggauca

SEQ ID NO: 2809491 - RNA, 19 nt, Artificial Sequence
  Description of Artificial Sequence: Synthetic oligonucleotide
uucuguuccucucaagaug

SEQ ID NO: 2809492 - RNA, 19 nt, Artificial Sequence
  Description of Artificial Sequence: Synthetic oligonucleotide
ugcaugcgacccaugaugg

SEQ ID NO: 2809493 - RNA, 19 nt, Artificial Sequence
  Description of Artificial Sequence: Synthetic oligonucleotide
cuuauaguaacgagccagc

SEQ ID NO: 2809494 - RNA, 19 nt, Artificial Sequence
  Description of Artificial Sequence: Synthetic oligonucleotide
uuagacuuaaggauucuua

SEQ ID NO: 2809495 - RNA, 19 nt, Artificial Sequence
  Description of Artificial Sequence: Synthetic oligonucleotide
aggggcaaggcccuuagac

SEQ ID NO: 2809496 - RNA, 19 nt, Artificial Sequence
  Description of Artificial Sequence: Synthetic oligonucleotide
ugaauucugcucucuauca

SEQ ID NO: 2809497 - RNA, 19 nt, Artificial Sequence
  Description of Artificial Sequence: Synthetic oligonucleotide
ucuggcagcaaagagaaaa

SEQ ID NO: 2809498 - RNA, 19 nt, Artificial Sequence
  Description of Artificial Sequence: Synthetic oligonucleotide
uaggaucacaccuaucuga

SEQ ID NO: 2809499 - RNA, 19 nt, Artificial Sequence
  Description of Artificial Sequence: Synthetic oligonucleotide
acucauauuuccaauuggg

SEQ ID NO: 2809500 - RNA, 19 nt, Artificial Sequence
  Description of Artificial Sequence: Synthetic oligonucleotide
agagaauuuaugccacuag

SEQ ID NO: 2809501 - RNA, 19 nt, Artificial Sequence
  Description of Artificial Sequence: Synthetic oligonucleotide
agaauuuaugccacuagag

SEQ ID NO: 2809502 - RNA, 19 nt, Artificial Sequence
  Description of Artificial Sequence: Synthetic oligonucleotide
agacuuaaggauucuuaag

SEQ ID NO: 2809503 - RNA, 19 nt, Artificial Sequence
  Description of Artificial Sequence: Synthetic oligonucleotide
ucacaccuaucugagaggg

SEQ ID NO: 2809504 - RNA, 19 nt, Artificial Sequence
  Description of Artificial Sequence: Synthetic oligonucleotide
aacuuagcauccuuauccu

SEQ ID NO: 2809505 - RNA, 19 nt, Artificial Sequence
  Description of Artificial Sequence: Synthetic oligonucleotide
cacaagagaauuuaugcca

SEQ ID NO: 2809506 - RNA, 19 nt, Artificial Sequence
  Description of Artificial Sequence: Synthetic oligonucleotide
uagacuuaaggauucuuaa

SEQ ID NO: 2809507 - RNA, 19 nt, Artificial Sequence
  Description of Artificial Sequence: Synthetic oligonucleotide
gagaauuuaugccacuaga

SEQ ID NO: 2809508 - RNA, 19 nt, Artificial Sequence
  Description of Artificial Sequence: Synthetic oligonucleotide
agucacaaaacggaccugg

SEQ ID NO: 2809509 - RNA, 19 nt, Artificial Sequence
  Description of Artificial Sequence: Synthetic oligonucleotide
uuaggaucacaccuaucug

SEQ ID NO: 2809510 - RNA, 19 nt, Artificial Sequence
  Description of Artificial Sequence: Synthetic oligonucleotide
agucccuuaggaucacacc

SEQ ID NO: 2809511 - RNA, 19 nt, Artificial Sequence
  Description of Artificial Sequence: Synthetic oligonucleotide
gauuuuauuaccagucaca

SEQ ID NO: 2809512 - RNA, 19 nt, Artificial Sequence
  Description of Artificial Sequence: Synthetic oligonucleotide
acagcaacagcuuucuuaa

SEQ ID NO: 2809513 - RNA, 19 nt, Artificial Sequence
  Description of Artificial Sequence: Synthetic oligonucleotide
uuguaaauuuguuccuuca

SEQ ID NO: 2809514 - RNA, 19 nt, Artificial Sequence
  Description of Artificial Sequence: Synthetic oligonucleotide
uuauuaccagucacaaaac

SEQ ID NO: 2809515 - RNA, 19 nt, Artificial Sequence
  Description of Artificial Sequence: Synthetic oligonucleotide
acaagagaauuuaugccac

SEQ ID NO: 2809516 - RNA, 19 nt, Artificial Sequence
  Description of Artificial Sequence: Synthetic oligonucleotide
gaauucugcucucuaucag

SEQ ID NO: 2809517 - RNA, 19 nt, Artificial Sequence
  Description of Artificial Sequence: Synthetic oligonucleotide
acuuaaggauucuuaagau

SEQ ID NO: 2809518 - RNA, 19 nt, Artificial Sequence
  Description of Artificial Sequence: Synthetic oligonucleotide
ucacaaaacggaccugggc

SEQ ID NO: 2809519 - RNA, 19 nt, Artificial Sequence
  Description of Artificial Sequence: Synthetic oligonucleotide
gagaucaggggcaaggccc

SEQ ID NO: 2809520 - RNA, 19 nt, Artificial Sequence
  Description of Artificial Sequence: Synthetic oligonucleotide
ucucaagaugcuuucggac

SEQ ID NO: 2809521 - RNA, 19 nt, Artificial Sequence
  Description of Artificial Sequence: Synthetic oligonucleotide
auuuaugccacuagagcag

SEQ ID NO: 2809522 - RNA, 19 nt, Artificial Sequence
  Description of Artificial Sequence: Synthetic oligonucleotide
aucugagagggagucaggc

SEQ ID NO: 2809523 - RNA, 19 nt, Artificial Sequence
  Description of Artificial Sequence: Synthetic oligonucleotide
acaccuaucugagagggag

SEQ ID NO: 2809524 - RNA, 19 nt, Artificial Sequence
  Description of Artificial Sequence: Synthetic oligonucleotide
uaaucaaaugguagagauc

SEQ ID NO: 2809525 - RNA, 19 nt, Artificial Sequence
  Description of Artificial Sequence: Synthetic oligonucleotide
gauggcggaggucuggcag

SEQ ID NO: 2809526 - RNA, 19 nt, Artificial Sequence
  Description of Artificial Sequence: Synthetic oligonucleotide
gacccgcuuagucuuauag

SEQ ID NO: 2809527 - RNA, 19 nt, Artificial Sequence
  Description of Artificial Sequence: Synthetic oligonucleotide
uguacacaagagaauuuau

SEQ ID NO: 2809528 - RNA, 19 nt, Artificial Sequence
  Description of Artificial Sequence: Synthetic oligonucleotide
uggaugacucauauuucca

SEQ ID NO: 2809529 - RNA, 19 nt, Artificial Sequence
  Description of Artificial Sequence: Synthetic oligonucleotide
cuuaggaucacaccuaucu

SEQ ID NO: 2809530 - RNA, 19 nt, Artificial Sequence
  Description of Artificial Sequence: Synthetic oligonucleotide
aagagaaaacgagggagga

SEQ ID NO: 2809531 - RNA, 19 nt, Artificial Sequence
  Description of Artificial Sequence: Synthetic oligonucleotide
gguagagauccucagggag

SEQ ID NO: 2809532 - RNA, 19 nt, Artificial Sequence
  Description of Artificial Sequence: Synthetic oligonucleotide
uuauccuuucuguuccucu

SEQ ID NO: 2809533 - RNA, 19 nt, Artificial Sequence
  Description of Artificial Sequence: Synthetic oligonucleotide
cuuucuguuccucucaaga

SEQ ID NO: 2809534 - RNA, 19 nt, Artificial Sequence
  Description of Artificial Sequence: Synthetic oligonucleotide
acggcgguagggcagcgcc

SEQ ID NO: 2809535 - RNA, 19 nt, Artificial Sequence
  Description of Artificial Sequence: Synthetic oligonucleotide
auauuuccaauuggguggg

SEQ ID NO: 2809536 - RNA, 19 nt, Artificial Sequence
  Description of Artificial Sequence: Synthetic oligonucleotide
gacagcaacagcuuucuua

SEQ ID NO: 2809537 - RNA, 19 nt, Artificial Sequence
  Description of Artificial Sequence: Synthetic oligonucleotide
caugcgacccaugauggcg

SEQ ID NO: 2809538 - RNA, 19 nt, Artificial Sequence
  Description of Artificial Sequence: Synthetic oligonucleotide
gagaaaacgagggaggaaa

SEQ ID NO: 2809539 - RNA, 19 nt, Artificial Sequence
  Description of Artificial Sequence: Synthetic oligonucleotide
aggcccuuagacuuaagga

SEQ ID NO: 2809540 - RNA, 19 nt, Artificial Sequence
  Description of Artificial Sequence: Synthetic oligonucleotide
uuauaguaacgagccagcc

SEQ ID NO: 2809541 - RNA, 19 nt, Artificial Sequence
  Description of Artificial Sequence: Synthetic oligonucleotide
uguggaugacucauauuuc

SEQ ID NO: 2809542 - RNA, 19 nt, Artificial Sequence
  Description of Artificial Sequence: Synthetic oligonucleotide
gugcaugcgacccaugaug

SEQ ID NO: 2809543 - RNA, 19 nt, Artificial Sequence
  Description of Artificial Sequence: Synthetic oligonucleotide
uggcagcaaagagaaaacg

SEQ ID NO: 2809544 - RNA, 19 nt, Artificial Sequence
  Description of Artificial Sequence: Synthetic oligonucleotide
guacacaagagaauuuaug

SEQ ID NO: 2809545 - RNA, 19 nt, Artificial Sequence
  Description of Artificial Sequence: Synthetic oligonucleotide
ucaaaugguagagauccuc

SEQ ID NO: 2809546 - RNA, 19 nt, Artificial Sequence
  Description of Artificial Sequence: Synthetic oligonucleotide
agacgucagcuucagccac

SEQ ID NO: 2809547 - RNA, 19 nt, Artificial Sequence
  Description of Artificial Sequence: Synthetic oligonucleotide
acaaaacggaccugggcca

SEQ ID NO: 2809548 - RNA, 19 nt, Artificial Sequence
  Description of Artificial Sequence: Synthetic oligonucleotide
gaggucuggcagcaaagag

SEQ ID NO: 2809549 - RNA, 19 nt, Artificial Sequence
  Description of Artificial Sequence: Synthetic oligonucleotide
cuuucggacagcaacagcu

SEQ ID NO: 2809550 - RNA, 19 nt, Artificial Sequence
  Description of Artificial Sequence: Synthetic oligonucleotide
cucaagaugcuuucggaca

SEQ ID NO: 2809551 - RNA, 19 nt, Artificial Sequence
  Description of Artificial Sequence: Synthetic oligonucleotide
uaucugagagggagucagg

SEQ ID NO: 2809552 - RNA, 19 nt, Artificial Sequence
  Description of Artificial Sequence: Synthetic oligonucleotide
uuagcauccuuauccuuuc

SEQ ID NO: 2809553 - RNA, 19 nt, Artificial Sequence
  Description of Artificial Sequence: Synthetic oligonucleotide
agagcagaggcuguggaug

SEQ ID NO: 2809554 - RNA, 19 nt, Artificial Sequence
  Description of Artificial Sequence: Synthetic oligonucleotide
uaccagucacaaaacggac

SEQ ID NO: 2809555 - RNA, 19 nt, Artificial Sequence
  Description of Artificial Sequence: Synthetic oligonucleotide
gugaauucugcucucuauc

SEQ ID NO: 2809556 - RNA, 19 nt, Artificial Sequence
  Description of Artificial Sequence: Synthetic oligonucleotide
cuuagucuuauaguaacga

SEQ ID NO: 2809557 - RNA, 19 nt, Artificial Sequence
  Description of Artificial Sequence: Synthetic oligonucleotide
uuccaauugggugggagga

SEQ ID NO: 2809558 - RNA, 19 nt, Artificial Sequence
  Description of Artificial Sequence: Synthetic oligonucleotide
gcagcaaagagaaaacgag

SEQ ID NO: 2809559 - RNA, 19 nt, Artificial Sequence
  Description of Artificial Sequence: Synthetic oligonucleotide
caaaugguagagauccuca

SEQ ID NO: 2809560 - RNA, 19 nt, Artificial Sequence
  Description of Artificial Sequence: Synthetic oligonucleotide
uucacgucgucagacguca

SEQ ID NO: 2809561 - RNA, 19 nt, Artificial Sequence
  Description of Artificial Sequence: Synthetic oligonucleotide
uguguacacaagagaauuu

SEQ ID NO: 2809562 - RNA, 19 nt, Artificial Sequence
  Description of Artificial Sequence: Synthetic oligonucleotide
auuuccaauugggugggag

SEQ ID NO: 2809563 - RNA, 19 nt, Artificial Sequence
  Description of Artificial Sequence: Synthetic oligonucleotide
aauugggugggaggacccg

SEQ ID NO: 2809564 - RNA, 19 nt, Artificial Sequence
  Description of Artificial Sequence: Synthetic oligonucleotide
accuaucugagagggaguc

SEQ ID NO: 2809565 - RNA, 19 nt, Artificial Sequence
  Description of Artificial Sequence: Synthetic oligonucleotide
aagagaauuuaugccacua

SEQ ID NO: 2809566 - RNA, 19 nt, Artificial Sequence
  Description of Artificial Sequence: Synthetic oligonucleotide
agaaaacgagggaggaaac

SEQ ID NO: 2809567 - RNA, 19 nt, Artificial Sequence
  Description of Artificial Sequence: Synthetic oligonucleotide
agggagaucaggggcaagg

SEQ ID NO: 2809568 - RNA, 19 nt, Artificial Sequence
  Description of Artificial Sequence: Synthetic oligonucleotide
accaugugagucccuuagg

SEQ ID NO: 2809569 - RNA, 19 nt, Artificial Sequence
  Description of Artificial Sequence: Synthetic oligonucleotide
uuuaugccacuagagcaga

SEQ ID NO: 2809570 - RNA, 19 nt, Artificial Sequence
  Description of Artificial Sequence: Synthetic oligonucleotide
caccaugugagucccuuag

SEQ ID NO: 2809571 - RNA, 19 nt, Artificial Sequence
  Description of Artificial Sequence: Synthetic oligonucleotide
uaaggauucuuaagauuuu

SEQ ID NO: 2809572 - RNA, 19 nt, Artificial Sequence
  Description of Artificial Sequence: Synthetic oligonucleotide
aaacggaccugggccacac

SEQ ID NO: 2809573 - RNA, 19 nt, Artificial Sequence
  Description of Artificial Sequence: Synthetic oligonucleotide
uuuccgggagcgugcaugc

SEQ ID NO: 2809574 - RNA, 19 nt, Artificial Sequence
  Description of Artificial Sequence: Synthetic oligonucleotide
agaaucaggcggaacuuag

SEQ ID NO: 2809575 - RNA, 19 nt, Artificial Sequence
  Description of Artificial Sequence: Synthetic oligonucleotide
auugggugggaggacccgc

SEQ ID NO: 2809576 - RNA, 19 nt, Artificial Sequence
  Description of Artificial Sequence: Synthetic oligonucleotide
uuaugccacuagagcagag

SEQ ID NO: 2809577 - RNA, 19 nt, Artificial Sequence
  Description of Artificial Sequence: Synthetic oligonucleotide
agccggugaauucugcucu

SEQ ID NO: 2809578 - RNA, 19 nt, Artificial Sequence
  Description of Artificial Sequence: Synthetic oligonucleotide
ucaggggcaaggcccuuag

SEQ ID NO: 2809579 - RNA, 19 nt, Artificial Sequence
  Description of Artificial Sequence: Synthetic oligonucleotide
aagaugcuuucggacagca

SEQ ID NO: 2809580 - RNA, 19 nt, Artificial Sequence
  Description of Artificial Sequence: Synthetic oligonucleotide
aaggauucuuaagauuuua

SEQ ID NO: 2809581 - RNA, 19 nt, Artificial Sequence
  Description of Artificial Sequence: Synthetic oligonucleotide
ucggacagcaacagcuuuc

SEQ ID NO: 2809582 - RNA, 19 nt, Artificial Sequence
  Description of Artificial Sequence: Synthetic oligonucleotide
gacgcuacggcgguagggc

SEQ ID NO: 2809583 - RNA, 19 nt, Artificial Sequence
  Description of Artificial Sequence: Synthetic oligonucleotide
caauugggugggaggaccc

SEQ ID NO: 2809584 - RNA, 19 nt, Artificial Sequence
  Description of Artificial Sequence: Synthetic oligonucleotide
uaacgagccagccggugaa

SEQ ID NO: 2809585 - RNA, 19 nt, Artificial Sequence
  Description of Artificial Sequence: Synthetic oligonucleotide
ugcucucuaucagaaucag

SEQ ID NO: 2809586 - RNA, 19 nt, Artificial Sequence
  Description of Artificial Sequence: Synthetic oligonucleotide
ucgucagacgucagcuuca

SEQ ID NO: 2809587 - RNA, 19 nt, Artificial Sequence
  Description of Artificial Sequence: Synthetic oligonucleotide
augauggcggaggucuggc

SEQ ID NO: 2809588 - RNA, 19 nt, Artificial Sequence
  Description of Artificial Sequence: Synthetic oligonucleotide
cuguggaugacucauauuu

SEQ ID NO: 2809589 - RNA, 19 nt, Artificial Sequence
  Description of Artificial Sequence: Synthetic oligonucleotide
cuuaaucaaaugguagaga

SEQ ID NO: 2809590 - RNA, 19 nt, Artificial Sequence
  Description of Artificial Sequence: Synthetic oligonucleotide
ugcuuucggacagcaacag

SEQ ID NO: 2809591 - RNA, 19 nt, Artificial Sequence
  Description of Artificial Sequence: Synthetic oligonucleotide
caggcggaacuuagcaucc

SEQ ID NO: 2809592 - RNA, 19 nt, Artificial Sequence
  Description of Artificial Sequence: Synthetic oligonucleotide
aacggaccugggccacacc

SEQ ID NO: 2809593 - RNA, 19 nt, Artificial Sequence
  Description of Artificial Sequence: Synthetic oligonucleotide
uccgggagcgugcaugcga

SEQ ID NO: 2809594 - RNA, 19 nt, Artificial Sequence
  Description of Artificial Sequence: Synthetic oligonucleotide
uccucucaagaugcuuucg

SEQ ID NO: 2809595 - RNA, 19 nt, Artificial Sequence
  Description of Artificial Sequence: Synthetic oligonucleotide
ugccacuagagcagaggcu

SEQ ID NO: 2809596 - RNA, 19 nt, Artificial Sequence
  Description of Artificial Sequence: Synthetic oligonucleotide
gucgucagacgucagcuuc

SEQ ID NO: 2809597 - RNA, 19 nt, Artificial Sequence
  Description of Artificial Sequence: Synthetic oligonucleotide
agcgccgacugggacaggc

SEQ ID NO: 2809598 - RNA, 19 nt, Artificial Sequence
  Description of Artificial Sequence: Synthetic oligonucleotide
acggaccugggccacacca

SEQ ID NO: 2809599 - RNA, 19 nt, Artificial Sequence
  Description of Artificial Sequence: Synthetic oligonucleotide
uuucggacagcaacagcuu

SEQ ID NO: 2809600 - RNA, 19 nt, Artificial Sequence
  Description of Artificial Sequence: Synthetic oligonucleotide
gaaucaggcggaacuuagc

SEQ ID NO: 2809601 - RNA, 19 nt, Artificial Sequence
  Description of Artificial Sequence: Synthetic oligonucleotide
cuuuccgggagcgugcaug

SEQ ID NO: 2809602 - RNA, 19 nt, Artificial Sequence
  Description of Artificial Sequence: Synthetic oligonucleotide
ugggaggacccgcuuaguc

SEQ ID NO: 2809603 - RNA, 19 nt, Artificial Sequence
  Description of Artificial Sequence: Synthetic oligonucleotide
auuuguuccuucacgucgu

SEQ ID NO: 2809604 - RNA, 19 nt, Artificial Sequence
  Description of Artificial Sequence: Synthetic oligonucleotide
acccgcuuagucuuauagu

SEQ ID NO: 2809605 - RNA, 19 nt, Artificial Sequence
  Description of Artificial Sequence: Synthetic oligonucleotide
gucccuuaggaucacaccu

SEQ ID NO: 2809606 - RNA, 19 nt, Artificial Sequence
  Description of Artificial Sequence: Synthetic oligonucleotide
ucccuuaggaucacaccua

SEQ ID NO: 2809607 - RNA, 19 nt, Artificial Sequence
  Description of Artificial Sequence: Synthetic oligonucleotide
uccuuucuguuccucucaa

SEQ ID NO: 2809608 - RNA, 19 nt, Artificial Sequence
  Description of Artificial Sequence: Synthetic oligonucleotide
gucacaaaacggaccuggg

SEQ ID NO: 2809609 - RNA, 19 nt, Artificial Sequence
  Description of Artificial Sequence: Synthetic oligonucleotide
gcuuagucuuauaguaacg

SEQ ID NO: 2809610 - RNA, 19 nt, Artificial Sequence
  Description of Artificial Sequence: Synthetic oligonucleotide
cucucaagaugcuuucgga

SEQ ID NO: 2809611 - RNA, 19 nt, Artificial Sequence
  Description of Artificial Sequence: Synthetic oligonucleotide
aucaggcggaacuuagcau

SEQ ID NO: 2809612 - RNA, 19 nt, Artificial Sequence
  Description of Artificial Sequence: Synthetic oligonucleotide
cucauauuuccaauugggu

SEQ ID NO: 2809613 - RNA, 19 nt, Artificial Sequence
  Description of Artificial Sequence: Synthetic oligonucleotide
cugggacaggcccuuuccg

SEQ ID NO: 2809614 - RNA, 19 nt, Artificial Sequence
  Description of Artificial Sequence: Synthetic oligonucleotide
cucagggagaucaggggca

SEQ ID NO: 2809615 - RNA, 19 nt, Artificial Sequence
  Description of Artificial Sequence: Synthetic oligonucleotide
caugauggcggaggucugg

SEQ ID NO: 2809616 - RNA, 19 nt, Artificial Sequence
  Description of Artificial Sequence: Synthetic oligonucleotide
gccacuagagcagaggcug

SEQ ID NO: 2809617 - RNA, 19 nt, Artificial Sequence
  Description of Artificial Sequence: Synthetic oligonucleotide
gagucccuuaggaucacac

SEQ ID NO: 2809618 - RNA, 19 nt, Artificial Sequence
  Description of Artificial Sequence: Synthetic oligonucleotide
guaacgagccagccgguga

SEQ ID NO: 2809619 - RNA, 19 nt, Artificial Sequence
  Description of Artificial Sequence: Synthetic oligonucleotide
gacgucagcuucagccacg

SEQ ID NO: 2809620 - RNA, 19 nt, Artificial Sequence
  Description of Artificial Sequence: Synthetic oligonucleotide
cugcucucuaucagaauca

SEQ ID NO: 2809621 - RNA, 19 nt, Artificial Sequence
  Description of Artificial Sequence: Synthetic oligonucleotide
ucagaaucaggcggaacuu

SEQ ID NO: 2809622 - RNA, 19 nt, Artificial Sequence
  Description of Artificial Sequence: Synthetic oligonucleotide
uagagcagaggcuguggau

SEQ ID NO: 2809623 - RNA, 19 nt, Artificial Sequence
  Description of Artificial Sequence: Synthetic oligonucleotide
cacgucgucagacgucagc

SEQ ID NO: 2809624 - RNA, 19 nt, Artificial Sequence
  Description of Artificial Sequence: Synthetic oligonucleotide
cuucacgucgucagacguc

SEQ ID NO: 2809625 - RNA, 19 nt, Artificial Sequence
  Description of Artificial Sequence: Synthetic oligonucleotide
acgucgucagacgucagcu

SEQ ID NO: 2809626 - RNA, 19 nt, Artificial Sequence
  Description of Artificial Sequence: Synthetic oligonucleotide
ggagaucaggggcaaggcc

SEQ ID NO: 2809627 - RNA, 19 nt, Artificial Sequence
  Description of Artificial Sequence: Synthetic oligonucleotide
ggugggaggacccgcuuag

SEQ ID NO: 2809628 - RNA, 19 nt, Artificial Sequence
  Description of Artificial Sequence: Synthetic oligonucleotide
guguacacaagagaauuua

SEQ ID NO: 2809629 - RNA, 19 nt, Artificial Sequence
  Description of Artificial Sequence: Synthetic oligonucleotide
gguagggcagcgccgacug

SEQ ID NO: 2809630 - RNA, 19 nt, Artificial Sequence
  Description of Artificial Sequence: Synthetic oligonucleotide
gcaaagagaaaacgaggga

SEQ ID NO: 2809631 - RNA, 19 nt, Artificial Sequence
  Description of Artificial Sequence: Synthetic oligonucleotide
cuuaaggauucuuaagauu

SEQ ID NO: 2809632 - RNA, 19 nt, Artificial Sequence
  Description of Artificial Sequence: Synthetic oligonucleotide
augcgacccaugauggcgg

SEQ ID NO: 2809633 - RNA, 19 nt, Artificial Sequence
  Description of Artificial Sequence: Synthetic oligonucleotide
cugagagggagucaggccu

SEQ ID NO: 2809634 - RNA, 19 nt, Artificial Sequence
  Description of Artificial Sequence: Synthetic oligonucleotide
cacguggggacgcuacggc

SEQ ID NO: 2809635 - RNA, 19 nt, Artificial Sequence
  Description of Artificial Sequence: Synthetic oligonucleotide
uuuguuccuucacgucguc

SEQ ID NO: 2809636 - RNA, 19 nt, Artificial Sequence
  Description of Artificial Sequence: Synthetic oligonucleotide
cagacgucagcuucagcca

SEQ ID NO: 2809637 - RNA, 19 nt, Artificial Sequence
  Description of Artificial Sequence: Synthetic oligonucleotide
ugggccacaccaugugagu

SEQ ID NO: 2809638 - RNA, 19 nt, Artificial Sequence
  Description of Artificial Sequence: Synthetic oligonucleotide
ggaacuuagcauccuuauc

SEQ ID NO: 2809639 - RNA, 19 nt, Artificial Sequence
  Description of Artificial Sequence: Synthetic oligonucleotide
ugagagggagucaggccuu

SEQ ID NO: 2809640 - RNA, 19 nt, Artificial Sequence
  Description of Artificial Sequence: Synthetic oligonucleotide
aguaacgagccagccggug

SEQ ID NO: 2809641 - RNA, 19 nt, Artificial Sequence
  Description of Artificial Sequence: Synthetic oligonucleotide
augcuuucggacagcaaca

SEQ ID NO: 2809642 - RNA, 19 nt, Artificial Sequence
  Description of Artificial Sequence: Synthetic oligonucleotide
cuagagcagaggcugugga

SEQ ID NO: 2809643 - RNA, 19 nt, Artificial Sequence
  Description of Artificial Sequence: Synthetic oligonucleotide
ggaugacucauauuuccaa

SEQ ID NO: 2809644 - RNA, 19 nt, Artificial Sequence
  Description of Artificial Sequence: Synthetic oligonucleotide
agcuucagccacgugggga

SEQ ID NO: 2809645 - RNA, 19 nt, Artificial Sequence
  Description of Artificial Sequence: Synthetic oligonucleotide
cuuauccuuucuguuccuc

SEQ ID NO: 2809646 - RNA, 19 nt, Artificial Sequence
  Description of Artificial Sequence: Synthetic oligonucleotide
agagaaaacgagggaggaa

SEQ ID NO: 2809647 - RNA, 19 nt, Artificial Sequence
  Description of Artificial Sequence: Synthetic oligonucleotide
gucuuauaguaacgagcca

SEQ ID NO: 2809648 - RNA, 19 nt, Artificial Sequence
  Description of Artificial Sequence: Synthetic oligonucleotide
uguuccucucaagaugcuu

SEQ ID NO: 2809649 - RNA, 19 nt, Artificial Sequence
  Description of Artificial Sequence: Synthetic oligonucleotide
ggucuggcagcaaagagaa

SEQ ID NO: 2809650 - RNA, 19 nt, Artificial Sequence
  Description of Artificial Sequence: Synthetic oligonucleotide
uaguaacgagccagccggu

SEQ ID NO: 2809651 - RNA, 19 nt, Artificial Sequence
  Description of Artificial Sequence: Synthetic oligonucleotide
gcuuucuuaaucaaauggu

SEQ ID NO: 2809652 - RNA, 19 nt, Artificial Sequence
  Description of Artificial Sequence: Synthetic oligonucleotide
cgcuuagucuuauaguaac

SEQ ID NO: 2809653 - RNA, 19 nt, Artificial Sequence
  Description of Artificial Sequence: Synthetic oligonucleotide
uccaauugggugggaggac

SEQ ID NO: 2809654 - RNA, 19 nt, Artificial Sequence
  Description of Artificial Sequence: Synthetic oligonucleotide
ugauggcggaggucuggca

SEQ ID NO: 2809655 - RNA, 19 nt, Artificial Sequence
  Description of Artificial Sequence: Synthetic oligonucleotide
aaaacggaccugggccaca

SEQ ID NO: 2809656 - RNA, 19 nt, Artificial Sequence
  Description of Artificial Sequence: Synthetic oligonucleotide
uucagccacguggggacgc

SEQ ID NO: 2809657 - RNA, 19 nt, Artificial Sequence
  Description of Artificial Sequence: Synthetic oligonucleotide
caagaugcuuucggacagc

SEQ ID NO: 2809658 - RNA, 19 nt, Artificial Sequence
  Description of Artificial Sequence: Synthetic oligonucleotide
agggagucaggccuuucuu

SEQ ID NO: 2809659 - RNA, 19 nt, Artificial Sequence
  Description of Artificial Sequence: Synthetic oligonucleotide
ggauucuuaagauuuuauu

SEQ ID NO: 2809660 - RNA, 19 nt, Artificial Sequence
  Description of Artificial Sequence: Synthetic oligonucleotide
uucugcucucuaucagaau

SEQ ID NO: 2809661 - RNA, 19 nt, Artificial Sequence
  Description of Artificial Sequence: Synthetic oligonucleotide
gacugggacaggcccuuuc

SEQ ID NO: 2809662 - RNA, 19 nt, Artificial Sequence
  Description of Artificial Sequence: Synthetic oligonucleotide
agccacguggggacgcuac

SEQ ID NO: 2809663 - RNA, 19 nt, Artificial Sequence
  Description of Artificial Sequence: Synthetic oligonucleotide
caaaacggaccugggccac

SEQ ID NO: 2809664 - RNA, 19 nt, Artificial Sequence
  Description of Artificial Sequence: Synthetic oligonucleotide
agaucaggggcaaggcccu

SEQ ID NO: 2809665 - RNA, 19 nt, Artificial Sequence
  Description of Artificial Sequence: Synthetic oligonucleotide
ccaauugggugggaggacc

SEQ ID NO: 2809666 - RNA, 19 nt, Artificial Sequence
  Description of Artificial Sequence: Synthetic oligonucleotide
ucacgucgucagacgucag

SEQ ID NO: 2809667 - RNA, 19 nt, Artificial Sequence
  Description of Artificial Sequence: Synthetic oligonucleotide
ucagggagaucaggggcaa

SEQ ID NO: 2809668 - RNA, 19 nt, Artificial Sequence
  Description of Artificial Sequence: Synthetic oligonucleotide
gagggagucaggccuuucu

SEQ ID NO: 2809669 - RNA, 19 nt, Artificial Sequence
  Description of Artificial Sequence: Synthetic oligonucleotide
guuccuucacgucgucaga

SEQ ID NO: 2809670 - RNA, 19 nt, Artificial Sequence
  Description of Artificial Sequence: Synthetic oligonucleotide
ggaccugggccacaccaug

SEQ ID NO: 2809671 - RNA, 19 nt, Artificial Sequence
  Description of Artificial Sequence: Synthetic oligonucleotide
cccgcuuagucuuauagua

SEQ ID NO: 2809672 - RNA, 19 nt, Artificial Sequence
  Description of Artificial Sequence: Synthetic oligonucleotide
gcauccuuauccuuucugu

SEQ ID NO: 2809673 - RNA, 19 nt, Artificial Sequence
  Description of Artificial Sequence: Synthetic oligonucleotide
gcucucuaucagaaucagg

SEQ ID NO: 2809674 - RNA, 19 nt, Artificial Sequence
  Description of Artificial Sequence: Synthetic oligonucleotide
caggcccuuuccgggagcg

SEQ ID NO: 2809675 - RNA, 19 nt, Artificial Sequence
  Description of Artificial Sequence: Synthetic oligonucleotide
ugagucccuuaggaucaca

SEQ ID NO: 2809676 - RNA, 19 nt, Artificial Sequence
  Description of Artificial Sequence: Synthetic oligonucleotide
gcuuucggacagcaacagc

SEQ ID NO: 2809677 - RNA, 19 nt, Artificial Sequence
  Description of Artificial Sequence: Synthetic oligonucleotide
ugcgacccaugauggcgga

SEQ ID NO: 2809678 - RNA, 19 nt, Artificial Sequence
  Description of Artificial Sequence: Synthetic oligonucleotide
gggagcgugcaugcgaccc

SEQ ID NO: 2809679 - RNA, 19 nt, Artificial Sequence
  Description of Artificial Sequence: Synthetic oligonucleotide
cuucagccacguggggacg

SEQ ID NO: 2809680 - RNA, 19 nt, Artificial Sequence
  Description of Artificial Sequence: Synthetic oligonucleotide
uauuuccaauuggguggga

SEQ ID NO: 2809681 - RNA, 19 nt, Artificial Sequence
  Description of Artificial Sequence: Synthetic oligonucleotide
agagggagucaggccuuuc

SEQ ID NO: 2809682 - RNA, 19 nt, Artificial Sequence
  Description of Artificial Sequence: Synthetic oligonucleotide
ggacgcuacggcgguaggg

SEQ ID NO: 2809683 - RNA, 19 nt, Artificial Sequence
  Description of Artificial Sequence: Synthetic oligonucleotide
acccaugauggcggagguc

SEQ ID NO: 2809684 - RNA, 19 nt, Artificial Sequence
  Description of Artificial Sequence: Synthetic oligonucleotide
uuccgggagcgugcaugcg

SEQ ID NO: 2809685 - RNA, 19 nt, Artificial Sequence
  Description of Artificial Sequence: Synthetic oligonucleotide
caagagaauuuaugccacu

SEQ ID NO: 2809686 - RNA, 19 nt, Artificial Sequence
  Description of Artificial Sequence: Synthetic oligonucleotide
acgcuacggcgguagggca

SEQ ID NO: 2809687 - RNA, 19 nt, Artificial Sequence
  Description of Artificial Sequence: Synthetic oligonucleotide
gucagacgucagcuucagc

SEQ ID NO: 2809688 - RNA, 19 nt, Artificial Sequence
  Description of Artificial Sequence: Synthetic oligonucleotide
ggugaauucugcucucuau

SEQ ID NO: 2809689 - RNA, 19 nt, Artificial Sequence
  Description of Artificial Sequence: Synthetic oligonucleotide
acaccaugugagucccuua

SEQ ID NO: 2809690 - RNA, 19 nt, Artificial Sequence
  Description of Artificial Sequence: Synthetic oligonucleotide
gggagaucaggggcaaggc

SEQ ID NO: 2809691 - RNA, 19 nt, Artificial Sequence
  Description of Artificial Sequence: Synthetic oligonucleotide
agagauccucagggagauc

SEQ ID NO: 2809692 - RNA, 19 nt, Artificial Sequence
  Description of Artificial Sequence: Synthetic oligonucleotide
ccuuucuguuccucucaag

SEQ ID NO: 2809693 - RNA, 19 nt, Artificial Sequence
  Description of Artificial Sequence: Synthetic oligonucleotide
uggcggaggucuggcagca

SEQ ID NO: 2809694 - RNA, 19 nt, Artificial Sequence
  Description of Artificial Sequence: Synthetic oligonucleotide
ccagucacaaaacggaccu

SEQ ID NO: 2809695 - RNA, 19 nt, Artificial Sequence
  Description of Artificial Sequence: Synthetic oligonucleotide
cauccuuauccuuucuguu

SEQ ID NO: 2809696 - RNA, 19 nt, Artificial Sequence
  Description of Artificial Sequence: Synthetic oligonucleotide
gagccagccggugaauucu

SEQ ID NO: 2809697 - RNA, 19 nt, Artificial Sequence
  Description of Artificial Sequence: Synthetic oligonucleotide
caaggcccuuagacuuaag

SEQ ID NO: 2809698 - RNA, 19 nt, Artificial Sequence
  Description of Artificial Sequence: Synthetic oligonucleotide
aacgagccagccggugaau

SEQ ID NO: 2809699 - RNA, 19 nt, Artificial Sequence
  Description of Artificial Sequence: Synthetic oligonucleotide
cagucacaaaacggaccug

SEQ ID NO: 2809700 - RNA, 19 nt, Artificial Sequence
  Description of Artificial Sequence: Synthetic oligonucleotide
gggaggacccgcuuagucu

SEQ ID NO: 2809701 - RNA, 19 nt, Artificial Sequence
  Description of Artificial Sequence: Synthetic oligonucleotide
ggaucacaccuaucugaga

SEQ ID NO: 2809702 - RNA, 19 nt, Artificial Sequence
  Description of Artificial Sequence: Synthetic oligonucleotide
gccacaccaugugaguccc

SEQ ID NO: 2809703 - RNA, 19 nt, Artificial Sequence
  Description of Artificial Sequence: Synthetic oligonucleotide
ucagccacguggggacgcu

SEQ ID NO: 2809704 - RNA, 19 nt, Artificial Sequence
  Description of Artificial Sequence: Synthetic oligonucleotide
gcaugcgacccaugauggc

SEQ ID NO: 2809705 - RNA, 19 nt, Artificial Sequence
  Description of Artificial Sequence: Synthetic oligonucleotide
cacaccuaucugagaggga

SEQ ID NO: 2809706 - RNA, 19 nt, Artificial Sequence
  Description of Artificial Sequence: Synthetic oligonucleotide
gccacguggggacgcuacg

SEQ ID NO: 2809707 - RNA, 19 nt, Artificial Sequence
  Description of Artificial Sequence: Synthetic oligonucleotide
gacccaugauggcggaggu

SEQ ID NO: 2809708 - RNA, 19 nt, Artificial Sequence
  Description of Artificial Sequence: Synthetic oligonucleotide
gcgugcaugcgacccauga

SEQ ID NO: 2809709 - RNA, 19 nt, Artificial Sequence
  Description of Artificial Sequence: Synthetic oligonucleotide
ggggacgcuacggcgguag

SEQ ID NO: 2809710 - RNA, 19 nt, Artificial Sequence
  Description of Artificial Sequence: Synthetic oligonucleotide
uacggcgguagggcagcgc

SEQ ID NO: 2809711 - RNA, 19 nt, Artificial Sequence
  Description of Artificial Sequence: Synthetic oligonucleotide
cgacccaugauggcggagg

SEQ ID NO: 2809712 - RNA, 19 nt, Artificial Sequence
  Description of Artificial Sequence: Synthetic oligonucleotide
cuaucagaaucaggcggaa

SEQ ID NO: 2809713 - RNA, 19 nt, Artificial Sequence
  Description of Artificial Sequence: Synthetic oligonucleotide
ggcccuuuccgggagcgug

SEQ ID NO: 2809714 - RNA, 19 nt, Artificial Sequence
  Description of Artificial Sequence: Synthetic oligonucleotide
ugggugggaggacccgcuu

SEQ ID NO: 2809715 - RNA, 19 nt, Artificial Sequence
  Description of Artificial Sequence: Synthetic oligonucleotide
cagaaucaggcggaacuua

SEQ ID NO: 2809716 - RNA, 19 nt, Artificial Sequence
  Description of Artificial Sequence: Synthetic oligonucleotide
aggccuuucuuggccaguu

SEQ ID NO: 2809717 - RNA, 19 nt, Artificial Sequence
  Description of Artificial Sequence: Synthetic oligonucleotide
gcuacggcgguagggcagc

SEQ ID NO: 2809718 - RNA, 19 nt, Artificial Sequence
  Description of Artificial Sequence: Synthetic oligonucleotide
agaugcuuucggacagcaa

SEQ ID NO: 2809719 - RNA, 19 nt, Artificial Sequence
  Description of Artificial Sequence: Synthetic oligonucleotide
ccgggagcgugcaugcgac

SEQ ID NO: 2809720 - RNA, 19 nt, Artificial Sequence
  Description of Artificial Sequence: Synthetic oligonucleotide
ccacguggggacgcuacgg

SEQ ID NO: 2809721 - RNA, 19 nt, Artificial Sequence
  Description of Artificial Sequence: Synthetic oligonucleotide
ggagcgugcaugcgaccca

SEQ ID NO: 2809722 - RNA, 19 nt, Artificial Sequence
  Description of Artificial Sequence: Synthetic oligonucleotide
ccuuaggaucacaccuauc

SEQ ID NO: 2809723 - RNA, 19 nt, Artificial Sequence
  Description of Artificial Sequence: Synthetic oligonucleotide
gggacgcuacggcgguagg

SEQ ID NO: 2809724 - RNA, 19 nt, Artificial Sequence
  Description of Artificial Sequence: Synthetic oligonucleotide
agccagccggugaauucug

SEQ ID NO: 2809725 - RNA, 19 nt, Artificial Sequence
  Description of Artificial Sequence: Synthetic oligonucleotide
ggcuguggaugacucauau

SEQ ID NO: 2809726 - RNA, 19 nt, Artificial Sequence
  Description of Artificial Sequence: Synthetic oligonucleotide
acgagccagccggugaauu

SEQ ID NO: 2809727 - RNA, 19 nt, Artificial Sequence
  Description of Artificial Sequence: Synthetic oligonucleotide
aggcggaacuuagcauccu

SEQ ID NO: 2809728 - RNA, 19 nt, Artificial Sequence
  Description of Artificial Sequence: Synthetic oligonucleotide
cagggagaucaggggcaag

SEQ ID NO: 2809729 - RNA, 19 nt, Artificial Sequence
  Description of Artificial Sequence: Synthetic oligonucleotide
cuacggcgguagggcagcg

SEQ ID NO: 2809730 - RNA, 19 nt, Artificial Sequence
  Description of Artificial Sequence: Synthetic oligonucleotide
ccgcuuagucuuauaguaa

SEQ ID NO: 2809731 - RNA, 19 nt, Artificial Sequence
  Description of Artificial Sequence: Synthetic oligonucleotide
aggacccgcuuagucuuau

SEQ ID NO: 2809732 - RNA, 19 nt, Artificial Sequence
  Description of Artificial Sequence: Synthetic oligonucleotide
caccuaucugagagggagu

SEQ ID NO: 2809733 - RNA, 19 nt, Artificial Sequence
  Description of Artificial Sequence: Synthetic oligonucleotide
gcggaggucuggcagcaaa

SEQ ID NO: 2809734 - RNA, 19 nt, Artificial Sequence
  Description of Artificial Sequence: Synthetic oligonucleotide
gugagucccuuaggaucac

SEQ ID NO: 2809735 - RNA, 19 nt, Artificial Sequence
  Description of Artificial Sequence: Synthetic oligonucleotide
cgccgacugggacaggccc

SEQ ID NO: 2809736 - RNA, 19 nt, Artificial Sequence
  Description of Artificial Sequence: Synthetic oligonucleotide
cgagccagccggugaauuc

SEQ ID NO: 2809737 - RNA, 19 nt, Artificial Sequence
  Description of Artificial Sequence: Synthetic oligonucleotide
gccggugaauucugcucuc

SEQ ID NO: 2809738 - RNA, 19 nt, Artificial Sequence
  Description of Artificial Sequence: Synthetic oligonucleotide
cgcuacggcgguagggcag

SEQ ID NO: 2809739 - RNA, 19 nt, Artificial Sequence
  Description of Artificial Sequence: Synthetic oligonucleotide
ggcgguagggcagcgccga

SEQ ID NO: 2809740 - RNA, 19 nt, Artificial Sequence
  Description of Artificial Sequence: Synthetic oligonucleotide
gcggaacuuagcauccuua

SEQ ID NO: 2809741 - RNA, 19 nt, Artificial Sequence
  Description of Artificial Sequence: Synthetic oligonucleotide
guggggacgcuacggcggu

SEQ ID NO: 2809742 - RNA, 19 nt, Artificial Sequence
  Description of Artificial Sequence: Synthetic oligonucleotide
cuguuccucucaagaugcu

SEQ ID NO: 2809743 - RNA, 19 nt, Artificial Sequence
  Description of Artificial Sequence: Synthetic oligonucleotide
gcccuuuccgggagcgugc

SEQ ID NO: 2809744 - RNA, 19 nt, Artificial Sequence
  Description of Artificial Sequence: Synthetic oligonucleotide
gccaguuuguaaauuuguu

SEQ ID NO: 2809745 - RNA, 19 nt, Artificial Sequence
  Description of Artificial Sequence: Synthetic oligonucleotide
gcccuuagacuuaaggauu

SEQ ID NO: 2809746 - RNA, 19 nt, Artificial Sequence
  Description of Artificial Sequence: Synthetic oligonucleotide
ccuucacgucgucagacgu

SEQ ID NO: 2809747 - RNA, 19 nt, Artificial Sequence
  Description of Artificial Sequence: Synthetic oligonucleotide
cacaccaugugagucccuu

SEQ ID NO: 2809748 - RNA, 19 nt, Artificial Sequence
  Description of Artificial Sequence: Synthetic oligonucleotide
agcgugcaugcgacccaug

SEQ ID NO: 2809749 - RNA, 19 nt, Artificial Sequence
  Description of Artificial Sequence: Synthetic oligonucleotide
gggugggaggacccgcuua

SEQ ID NO: 2809750 - RNA, 19 nt, Artificial Sequence
  Description of Artificial Sequence: Synthetic oligonucleotide
gagcgugcaugcgacccau

SEQ ID NO: 2809751 - RNA, 19 nt, Artificial Sequence
  Description of Artificial Sequence: Synthetic oligonucleotide
aggcuguggaugacucaua

SEQ ID NO: 2809752 - RNA, 19 nt, Artificial Sequence
  Description of Artificial Sequence: Synthetic oligonucleotide
gccagccggugaauucugc

SEQ ID NO: 2809753 - RNA, 19 nt, Artificial Sequence
  Description of Artificial Sequence: Synthetic oligonucleotide
gaggacccgcuuagucuua

SEQ ID NO: 2809754 - RNA, 19 nt, Artificial Sequence
  Description of Artificial Sequence: Synthetic oligonucleotide
cgucagacgucagcuucag

SEQ ID NO: 2809755 - RNA, 19 nt, Artificial Sequence
  Description of Artificial Sequence: Synthetic oligonucleotide
aggcccuuuccgggagcgu

SEQ ID NO: 2809756 - RNA, 19 nt, Artificial Sequence
  Description of Artificial Sequence: Synthetic oligonucleotide
ggcggaacuuagcauccuu

SEQ ID NO: 2809757 - RNA, 19 nt, Artificial Sequence
  Description of Artificial Sequence: Synthetic oligonucleotide
ggcaaggcccuuagacuua

SEQ ID NO: 2809758 - RNA, 19 nt, Artificial Sequence
  Description of Artificial Sequence: Synthetic oligonucleotide
gcuguggaugacucauauu

SEQ ID NO: 2809759 - RNA, 19 nt, Artificial Sequence
  Description of Artificial Sequence: Synthetic oligonucleotide
gcgacccaugauggcggag

SEQ ID NO: 2809760 - RNA, 19 nt, Artificial Sequence
  Description of Artificial Sequence: Synthetic oligonucleotide
ccagccggugaauucugcu

SEQ ID NO: 2809761 - RNA, 19 nt, Artificial Sequence
  Description of Artificial Sequence: Synthetic oligonucleotide
cggaacuuagcauccuuau

SEQ ID NO: 2809762 - RNA, 19 nt, Artificial Sequence
  Description of Artificial Sequence: Synthetic oligonucleotide
cggcgguagggcagcgccg

SEQ ID NO: 2809763 - RNA, 19 nt, Artificial Sequence
  Description of Artificial Sequence: Synthetic oligonucleotide
gcgccgacugggacaggcc

SEQ ID NO: 2809764 - RNA, 19 nt, Artificial Sequence
  Description of Artificial Sequence: Synthetic oligonucleotide
gucuggcagcaaagagaaa

SEQ ID NO: 2809765 - RNA, 19 nt, Artificial Sequence
  Description of Artificial Sequence: Synthetic oligonucleotide
uggggacgcuacggcggua

SEQ ID NO: 2809766 - RNA, 19 nt, Artificial Sequence
  Description of Artificial Sequence: Synthetic oligonucleotide
gagagggagucaggccuuu

SEQ ID NO: 2809767 - RNA, 19 nt, Artificial Sequence
  Description of Artificial Sequence: Synthetic oligonucleotide
cccuuaggaucacaccuau

SEQ ID NO: 2809768 - RNA, 19 nt, Artificial Sequence
  Description of Artificial Sequence: Synthetic oligonucleotide
ggacccgcuuagucuuaua

SEQ ID NO: 2809769 - RNA, 19 nt, Artificial Sequence
  Description of Artificial Sequence: Synthetic oligonucleotide
ccuuauccuuucuguuccu

SEQ ID NO: 2809770 - RNA, 19 nt, Artificial Sequence
  Description of Artificial Sequence: Synthetic oligonucleotide
gugggaggacccgcuuagu

SEQ ID NO: 2809771 - RNA, 19 nt, Artificial Sequence
  Description of Artificial Sequence: Synthetic oligonucleotide
cgggagcgugcaugcgacc

SEQ ID NO: 2809772 - RNA, 19 nt, Artificial Sequence
  Description of Artificial Sequence: Synthetic oligonucleotide
ccuuagacuuaaggauucu

SEQ ID NO: 2809773 - RNA, 19 nt, Artificial Sequence
  Description of Artificial Sequence: Synthetic oligonucleotide
gcgguagggcagcgccgac

SEQ ID NO: 2809774 - RNA, 19 nt, Artificial Sequence
  Description of Artificial Sequence: Synthetic oligonucleotide
caggccuuucuuggccagu

SEQ ID NO: 2809775 - RNA, 19 nt, Artificial Sequence
  Description of Artificial Sequence: Synthetic oligonucleotide
gccgacugggacaggcccu

SEQ ID NO: 2809776 - RNA, 19 nt, Artificial Sequence
  Description of Artificial Sequence: Synthetic oligonucleotide
cagcgccgacugggacagg

SEQ ID NO: 2809777 - RNA, 19 nt, Artificial Sequence
  Description of Artificial Sequence: Synthetic oligonucleotide
cccuuuccgggagcgugca

SEQ ID NO: 2809778 - RNA, 19 nt, Artificial Sequence
  Description of Artificial Sequence: Synthetic oligonucleotide
ggacagcaacagcuuucuu

SEQ ID NO: 2809779 - RNA, 19 nt, Artificial Sequence
  Description of Artificial Sequence: Synthetic oligonucleotide
cgugcaugcgacccaugau

SEQ ID NO: 2809780 - RNA, 19 nt, Artificial Sequence
  Description of Artificial Sequence: Synthetic oligonucleotide
cagccacguggggacgcua

SEQ ID NO: 2809781 - RNA, 19 nt, Artificial Sequence
  Description of Artificial Sequence: Synthetic oligonucleotide
ccggugaauucugcucucu

SEQ ID NO: 2809782 - RNA, 19 nt, Artificial Sequence
  Description of Artificial Sequence: Synthetic oligonucleotide
ggcggaggucuggcagcaa

SEQ ID NO: 2809783 - RNA, 19 nt, Artificial Sequence
  Description of Artificial Sequence: Synthetic oligonucleotide
cggaccugggccacaccau

SEQ ID NO: 2809784 - RNA, 19 nt, Artificial Sequence
  Description of Artificial Sequence: Synthetic oligonucleotide
cgucgucagacgucagcuu

SEQ ID NO: 2809785 - RNA, 19 nt, Artificial Sequence
  Description of Artificial Sequence: Synthetic oligonucleotide
ccuuuccgggagcgugcau

SEQ ID NO: 2809786 - RNA, 19 nt, Artificial Sequence
  Description of Artificial Sequence: Synthetic oligonucleotide
cgacugggacaggcccuuu

SEQ ID NO: 2809787 - RNA, 19 nt, Artificial Sequence
  Description of Artificial Sequence: Synthetic oligonucleotide
uucggaaucguccacaggu

SEQ ID NO: 2809788 - RNA, 19 nt, Artificial Sequence
  Description of Artificial Sequence: Synthetic oligonucleotide
cagacgaugaagaagcccg

SEQ ID NO: 2809789 - RNA, 19 nt, Artificial Sequence
  Description of Artificial Sequence: Synthetic oligonucleotide
aaaccugagagacgccgcc

SEQ ID NO: 2809790 - RNA, 19 nt, Artificial Sequence
  Description of Artificial Sequence: Synthetic oligonucleotide
ucguccacagguaagcagg

SEQ ID NO: 2809791 - RNA, 19 nt, Artificial Sequence
  Description of Artificial Sequence: Synthetic oligonucleotide
gucgaagugacccauguag

SEQ ID NO: 2809792 - RNA, 19 nt, Artificial Sequence
  Description of Artificial Sequence: Synthetic oligonucleotide
aacuucuaucuguguaggc

SEQ ID NO: 2809793 - RNA, 19 nt, Artificial Sequence
  Description of Artificial Sequence: Synthetic oligonucleotide
acuucuaucuguguaggcg

SEQ ID NO: 2809794 - RNA, 19 nt, Artificial Sequence
  Description of Artificial Sequence: Synthetic oligonucleotide
ucgaagugacccauguagg

SEQ ID NO: 2809795 - RNA, 19 nt, Artificial Sequence
  Description of Artificial Sequence: Synthetic oligonucleotide
agccauucccacuuggugg

SEQ ID NO: 2809796 - RNA, 19 nt, Artificial Sequence
  Description of Artificial Sequence: Synthetic oligonucleotide
ucaaaccugagagacgccg

SEQ ID NO: 2809797 - RNA, 19 nt, Artificial Sequence
  Description of Artificial Sequence: Synthetic oligonucleotide
cuucuaucuguguaggcgc

SEQ ID NO: 2809798 - RNA, 19 nt, Artificial Sequence
  Description of Artificial Sequence: Synthetic oligonucleotide
ucucucggugacuuguucg

SEQ ID NO: 2809799 - RNA, 19 nt, Artificial Sequence
  Description of Artificial Sequence: Synthetic oligonucleotide
acgaugaagaagcccgagc

SEQ ID NO: 2809800 - RNA, 19 nt, Artificial Sequence
  Description of Artificial Sequence: Synthetic oligonucleotide
guucaaaccugagagacgc

SEQ ID NO: 2809801 - RNA, 19 nt, Artificial Sequence
  Description of Artificial Sequence: Synthetic oligonucleotide
cuugcucucguucucggcg

SEQ ID NO: 2809802 - RNA, 19 nt, Artificial Sequence
  Description of Artificial Sequence: Synthetic oligonucleotide
uccacagguaagcaggcca

SEQ ID NO: 2809803 - RNA, 19 nt, Artificial Sequence
  Description of Artificial Sequence: Synthetic oligonucleotide
aagccauucccacuuggug

SEQ ID NO: 2809804 - RNA, 19 nt, Artificial Sequence
  Description of Artificial Sequence: Synthetic oligonucleotide
cuaggcuuccagaucaggc

SEQ ID NO: 2809805 - RNA, 19 nt, Artificial Sequence
  Description of Artificial Sequence: Synthetic oligonucleotide
guacuuggacugcagaugc

SEQ ID NO: 2809806 - RNA, 19 nt, Artificial Sequence
  Description of Artificial Sequence: Synthetic oligonucleotide
uucuaucuguguaggcgcg

SEQ ID NO: 2809807 - RNA, 19 nt, Artificial Sequence
  Description of Artificial Sequence: Synthetic oligonucleotide
aagaagcccgagcaaggag

SEQ ID NO: 2809808 - RNA, 19 nt, Artificial Sequence
  Description of Artificial Sequence: Synthetic oligonucleotide
acagacgaugaagaagccc

SEQ ID NO: 2809809 - RNA, 19 nt, Artificial Sequence
  Description of Artificial Sequence: Synthetic oligonucleotide
gaggaggucgaagugaccc

SEQ ID NO: 2809810 - RNA, 19 nt, Artificial Sequence
  Description of Artificial Sequence: Synthetic oligonucleotide
uaccgauguacuuggacug

SEQ ID NO: 2809811 - RNA, 19 nt, Artificial Sequence
  Description of Artificial Sequence: Synthetic oligonucleotide
uaguugaggaggucgaagu

SEQ ID NO: 2809812 - RNA, 19 nt, Artificial Sequence
  Description of Artificial Sequence: Synthetic oligonucleotide
uccaucagguugaagcgca

SEQ ID NO: 2809813 - RNA, 19 nt, Artificial Sequence
  Description of Artificial Sequence: Synthetic oligonucleotide
gaacuucuaucuguguagg

SEQ ID NO: 2809814 - RNA, 19 nt, Artificial Sequence
  Description of Artificial Sequence: Synthetic oligonucleotide
gacuuguucggaaucgucc

SEQ ID NO: 2809815 - RNA, 19 nt, Artificial Sequence
  Description of Artificial Sequence: Synthetic oligonucleotide
ucggcgauggcgaaguagu

SEQ ID NO: 2809816 - RNA, 19 nt, Artificial Sequence
  Description of Artificial Sequence: Synthetic oligonucleotide
gauggcgaaguaguugagg

SEQ ID NO: 2809817 - RNA, 19 nt, Artificial Sequence
  Description of Artificial Sequence: Synthetic oligonucleotide
agaagcccgagcaaggagg

SEQ ID NO: 2809818 - RNA, 19 nt, Artificial Sequence
  Description of Artificial Sequence: Synthetic oligonucleotide
uggaugguguaccgguccg

SEQ ID NO: 2809819 - RNA, 19 nt, Artificial Sequence
  Description of Artificial Sequence: Synthetic oligonucleotide
uguucggaaucguccacag

SEQ ID NO: 2809820 - RNA, 19 nt, Artificial Sequence
  Description of Artificial Sequence: Synthetic oligonucleotide
acuuguucggaaucgucca

SEQ ID NO: 2809821 - RNA, 19 nt, Artificial Sequence
  Description of Artificial Sequence: Synthetic oligonucleotide
guaccgguccgucaucucg

SEQ ID NO: 2809822 - RNA, 19 nt, Artificial Sequence
  Description of Artificial Sequence: Synthetic oligonucleotide
agcccgagcaaggaggacc

SEQ ID NO: 2809823 - RNA, 19 nt, Artificial Sequence
  Description of Artificial Sequence: Synthetic oligonucleotide
acagguaagcaggccaggc

SEQ ID NO: 2809824 - RNA, 19 nt, Artificial Sequence
  Description of Artificial Sequence: Synthetic oligonucleotide
agguaagcaggccaggcgu

SEQ ID NO: 2809825 - RNA, 19 nt, Artificial Sequence
  Description of Artificial Sequence: Synthetic oligonucleotide
aaggaggaccggcccaccg

SEQ ID NO: 2809826 - RNA, 19 nt, Artificial Sequence
  Description of Artificial Sequence: Synthetic oligonucleotide
uccgcguucaaaccugaga

SEQ ID NO: 2809827 - RNA, 19 nt, Artificial Sequence
  Description of Artificial Sequence: Synthetic oligonucleotide
uuccagaucaggccgcaga

SEQ ID NO: 2809828 - RNA, 19 nt, Artificial Sequence
  Description of Artificial Sequence: Synthetic oligonucleotide
cucgccucaguucuccucg

SEQ ID NO: 2809829 - RNA, 19 nt, Artificial Sequence
  Description of Artificial Sequence: Synthetic oligonucleotide
acacggaacuucuaucugu

SEQ ID NO: 2809830 - RNA, 19 nt, Artificial Sequence
  Description of Artificial Sequence: Synthetic oligonucleotide
ggcgaaguaguugaggagg

SEQ ID NO: 2809831 - RNA, 19 nt, Artificial Sequence
  Description of Artificial Sequence: Synthetic oligonucleotide
aggcgcgggagaaagacgc

SEQ ID NO: 2809832 - RNA, 19 nt, Artificial Sequence
  Description of Artificial Sequence: Synthetic oligonucleotide
uucacaagccauucccacu

SEQ ID NO: 2809833 - RNA, 19 nt, Artificial Sequence
  Description of Artificial Sequence: Synthetic oligonucleotide
aguugaggaggucgaagug

SEQ ID NO: 2809834 - RNA, 19 nt, Artificial Sequence
  Description of Artificial Sequence: Synthetic oligonucleotide
uccagaucaggccgcagac

SEQ ID NO: 2809835 - RNA, 19 nt, Artificial Sequence
  Description of Artificial Sequence: Synthetic oligonucleotide
acccgcuccgcguucaaac

SEQ ID NO: 2809836 - RNA, 19 nt, Artificial Sequence
  Description of Artificial Sequence: Synthetic oligonucleotide
uccgucaucucgccgcucc

SEQ ID NO: 2809837 - RNA, 19 nt, Artificial Sequence
  Description of Artificial Sequence: Synthetic oligonucleotide
ucguucucggcgauggcga

SEQ ID NO: 2809838 - RNA, 19 nt, Artificial Sequence
  Description of Artificial Sequence: Synthetic oligonucleotide
gacacggaacuucuaucug

SEQ ID NO: 2809839 - RNA, 19 nt, Artificial Sequence
  Description of Artificial Sequence: Synthetic oligonucleotide
auguaggagcaguaggagu

SEQ ID NO: 2809840 - RNA, 19 nt, Artificial Sequence
  Description of Artificial Sequence: Synthetic oligonucleotide
aggaggaccggcccaccgc

SEQ ID NO: 2809841 - RNA, 19 nt, Artificial Sequence
  Description of Artificial Sequence: Synthetic oligonucleotide
ucuguguaggcgcgggaga

SEQ ID NO: 2809842 - RNA, 19 nt, Artificial Sequence
  Description of Artificial Sequence: Synthetic oligonucleotide
guucacaagccauucccac

SEQ ID NO: 2809843 - RNA, 19 nt, Artificial Sequence
  Description of Artificial Sequence: Synthetic oligonucleotide
caaaccugagagacgccgc

SEQ ID NO: 2809844 - RNA, 19 nt, Artificial Sequence
  Description of Artificial Sequence: Synthetic oligonucleotide
cagguaagcaggccaggcg

SEQ ID NO: 2809845 - RNA, 19 nt, Artificial Sequence
  Description of Artificial Sequence: Synthetic oligonucleotide
cauguaggagcaguaggag

SEQ ID NO: 2809846 - RNA, 19 nt, Artificial Sequence
  Description of Artificial Sequence: Synthetic oligonucleotide
cacggaacuucuaucugug

SEQ ID NO: 2809847 - RNA, 19 nt, Artificial Sequence
  Description of Artificial Sequence: Synthetic oligonucleotide
uaggcgcgggagaaagacg

SEQ ID NO: 2809848 - RNA, 19 nt, Artificial Sequence
  Description of Artificial Sequence: Synthetic oligonucleotide
ucuaucuguguaggcgcgg

SEQ ID NO: 2809849 - RNA, 19 nt, Artificial Sequence
  Description of Artificial Sequence: Synthetic oligonucleotide
ugagagacgccgccgccgc

SEQ ID NO: 2809850 - RNA, 19 nt, Artificial Sequence
  Description of Artificial Sequence: Synthetic oligonucleotide
guaguugaggaggucgaag

SEQ ID NO: 2809851 - RNA, 19 nt, Artificial Sequence
  Description of Artificial Sequence: Synthetic oligonucleotide
cucucguucucggcgaugg

SEQ ID NO: 2809852 - RNA, 19 nt, Artificial Sequence
  Description of Artificial Sequence: Synthetic oligonucleotide
cucguucucggcgauggcg

SEQ ID NO: 2809853 - RNA, 19 nt, Artificial Sequence
  Description of Artificial Sequence: Synthetic oligonucleotide
ugacuuguucggaaucguc

SEQ ID NO: 2809854 - RNA, 19 nt, Artificial Sequence
  Description of Artificial Sequence: Synthetic oligonucleotide
ggugacuuguucggaaucg

SEQ ID NO: 2809855 - RNA, 19 nt, Artificial Sequence
  Description of Artificial Sequence: Synthetic oligonucleotide
ucccacuugguggugucgg

SEQ ID NO: 2809856 - RNA, 19 nt, Artificial Sequence
  Description of Artificial Sequence: Synthetic oligonucleotide
uaccgguccgucaucucgc

SEQ ID NO: 2809857 - RNA, 19 nt, Artificial Sequence
  Description of Artificial Sequence: Synthetic oligonucleotide
gucggcguggcccguaccg

SEQ ID NO: 2809858 - RNA, 19 nt, Artificial Sequence
  Description of Artificial Sequence: Synthetic oligonucleotide
uccgcucuaggcuuccaga

SEQ ID NO: 2809859 - RNA, 19 nt, Artificial Sequence
  Description of Artificial Sequence: Synthetic oligonucleotide
ugguguaccgguccgucau

SEQ ID NO: 2809860 - RNA, 19 nt, Artificial Sequence
  Description of Artificial Sequence: Synthetic oligonucleotide
guaccgauguacuuggacu

SEQ ID NO: 2809861 - RNA, 19 nt, Artificial Sequence
  Description of Artificial Sequence: Synthetic oligonucleotide
ugcagaugcuccagcuggc

SEQ ID NO: 2809862 - RNA, 19 nt, Artificial Sequence
  Description of Artificial Sequence: Synthetic oligonucleotide
aggucgaagugacccaugu

SEQ ID NO: 2809863 - RNA, 19 nt, Artificial Sequence
  Description of Artificial Sequence: Synthetic oligonucleotide
cuaucuguguaggcgcggg

SEQ ID NO: 2809864 - RNA, 19 nt, Artificial Sequence
  Description of Artificial Sequence: Synthetic oligonucleotide
ugacccauguaggagcagu

SEQ ID NO: 2809865 - RNA, 19 nt, Artificial Sequence
  Description of Artificial Sequence: Synthetic oligonucleotide
aucuguguaggcgcgggag

SEQ ID NO: 2809866 - RNA, 19 nt, Artificial Sequence
  Description of Artificial Sequence: Synthetic oligonucleotide
guugaggaggucgaaguga

SEQ ID NO: 2809867 - RNA, 19 nt, Artificial Sequence
  Description of Artificial Sequence: Synthetic oligonucleotide
uuguucggaaucguccaca

SEQ ID NO: 2809868 - RNA, 19 nt, Artificial Sequence
  Description of Artificial Sequence: Synthetic oligonucleotide
ccgcguucaaaccugagag

SEQ ID NO: 2809869 - RNA, 19 nt, Artificial Sequence
  Description of Artificial Sequence: Synthetic oligonucleotide
gaagcgcucgccucaguuc

SEQ ID NO: 2809870 - RNA, 19 nt, Artificial Sequence
  Description of Artificial Sequence: Synthetic oligonucleotide
aaucguccacagguaagca

SEQ ID NO: 2809871 - RNA, 19 nt, Artificial Sequence
  Description of Artificial Sequence: Synthetic oligonucleotide
uguggaugguguaccgguc

SEQ ID NO: 2809872 - RNA, 19 nt, Artificial Sequence
  Description of Artificial Sequence: Synthetic oligonucleotide
gcucuaggcuuccagauca

SEQ ID NO: 2809873 - RNA, 19 nt, Artificial Sequence
  Description of Artificial Sequence: Synthetic oligonucleotide
gagcaaggaggaccggccc

SEQ ID NO: 2809874 - RNA, 19 nt, Artificial Sequence
  Description of Artificial Sequence: Synthetic oligonucleotide
caucagguugaagcgcacg

SEQ ID NO: 2809875 - RNA, 19 nt, Artificial Sequence
  Description of Artificial Sequence: Synthetic oligonucleotide
uucucggcgauggcgaagu

SEQ ID NO: 2809876 - RNA, 19 nt, Artificial Sequence
  Description of Artificial Sequence: Synthetic oligonucleotide
guaggcgcgggagaaagac

SEQ ID NO: 2809877 - RNA, 19 nt, Artificial Sequence
  Description of Artificial Sequence: Synthetic oligonucleotide
cuuguucggaaucguccac

SEQ ID NO: 2809878 - RNA, 19 nt, Artificial Sequence
  Description of Artificial Sequence: Synthetic oligonucleotide
guucggaaucguccacagg

SEQ ID NO: 2809879 - RNA, 19 nt, Artificial Sequence
  Description of Artificial Sequence: Synthetic oligonucleotide
ugaggaggucgaagugacc

SEQ ID NO: 2809880 - RNA, 19 nt, Artificial Sequence
  Description of Artificial Sequence: Synthetic oligonucleotide
uccgccggcggcccgcugg

SEQ ID NO: 2809881 - RNA, 19 nt, Artificial Sequence
  Description of Artificial Sequence: Synthetic oligonucleotide
accgguccgucaucucgcc

SEQ ID NO: 2809882 - RNA, 19 nt, Artificial Sequence
  Description of Artificial Sequence: Synthetic oligonucleotide
uugcucucguucucggcga

SEQ ID NO: 2809883 - RNA, 19 nt, Artificial Sequence
  Description of Artificial Sequence: Synthetic oligonucleotide
uaucuguguaggcgcggga

SEQ ID NO: 2809884 - RNA, 19 nt, Artificial Sequence
  Description of Artificial Sequence: Synthetic oligonucleotide
uugaagcgcacgcgggccu

SEQ ID NO: 2809885 - RNA, 19 nt, Artificial Sequence
  Description of Artificial Sequence: Synthetic oligonucleotide
gguggugucggcguggccc

SEQ ID NO: 2809886 - RNA, 19 nt, Artificial Sequence
  Description of Artificial Sequence: Synthetic oligonucleotide
guguaggcgcgggagaaag

SEQ ID NO: 2809887 - RNA, 19 nt, Artificial Sequence
  Description of Artificial Sequence: Synthetic oligonucleotide
ugcugguucacaagccauu

SEQ ID NO: 2809888 - RNA, 19 nt, Artificial Sequence
  Description of Artificial Sequence: Synthetic oligonucleotide
agcaaggaggaccggccca

SEQ ID NO: 2809889 - RNA, 19 nt, Artificial Sequence
  Description of Artificial Sequence: Synthetic oligonucleotide
ucggaaucguccacaggua

SEQ ID NO: 2809890 - RNA, 19 nt, Artificial Sequence
  Description of Artificial Sequence: Synthetic oligonucleotide
uguaggcgcgggagaaaga

SEQ ID NO: 2809891 - RNA, 19 nt, Artificial Sequence
  Description of Artificial Sequence: Synthetic oligonucleotide
aagcaggccaggcgugaca

SEQ ID NO: 2809892 - RNA, 19 nt, Artificial Sequence
  Description of Artificial Sequence: Synthetic oligonucleotide
guggugucggcguggcccg

SEQ ID NO: 2809893 - RNA, 19 nt, Artificial Sequence
  Description of Artificial Sequence: Synthetic oligonucleotide
gaagaagcccgagcaagga

SEQ ID NO: 2809894 - RNA, 19 nt, Artificial Sequence
  Description of Artificial Sequence: Synthetic oligonucleotide
uggcccguaccgauguacu

SEQ ID NO: 2809895 - RNA, 19 nt, Artificial Sequence
  Description of Artificial Sequence: Synthetic oligonucleotide
ggagcaguaggagucccgg

SEQ ID NO: 2809896 - RNA, 19 nt, Artificial Sequence
  Description of Artificial Sequence: Synthetic oligonucleotide
gcguucaaaccugagagac

SEQ ID NO: 2809897 - RNA, 19 nt, Artificial Sequence
  Description of Artificial Sequence: Synthetic oligonucleotide
ucaguucuccucgggcuug

SEQ ID NO: 2809898 - RNA, 19 nt, Artificial Sequence
  Description of Artificial Sequence: Synthetic oligonucleotide
uacuuggacugcagaugcu

SEQ ID NO: 2809899 - RNA, 19 nt, Artificial Sequence
  Description of Artificial Sequence: Synthetic oligonucleotide
gcgauggcgaaguaguuga

SEQ ID NO: 2809900 - RNA, 19 nt, Artificial Sequence
  Description of Artificial Sequence: Synthetic oligonucleotide
cugagagacgccgccgccg

SEQ ID NO: 2809901 - RNA, 19 nt, Artificial Sequence
  Description of Artificial Sequence: Synthetic oligonucleotide
cuugguggugucggcgugg

SEQ ID NO: 2809902 - RNA, 19 nt, Artificial Sequence
  Description of Artificial Sequence: Synthetic oligonucleotide
gaugguguaccgguccguc

SEQ ID NO: 2809903 - RNA, 19 nt, Artificial Sequence
  Description of Artificial Sequence: Synthetic oligonucleotide
acccauguaggagcaguag

SEQ ID NO: 2809904 - RNA, 19 nt, Artificial Sequence
  Description of Artificial Sequence: Synthetic oligonucleotide
agguugaagcgcacgcggg

SEQ ID NO: 2809905 - RNA, 19 nt, Artificial Sequence
  Description of Artificial Sequence: Synthetic oligonucleotide
aggaggucgaagugaccca

SEQ ID NO: 2809906 - RNA, 19 nt, Artificial Sequence
  Description of Artificial Sequence: Synthetic oligonucleotide
gguugaagcgcacgcgggc

SEQ ID NO: 2809907 - RNA, 19 nt, Artificial Sequence
  Description of Artificial Sequence: Synthetic oligonucleotide
acuugguggugucggcgug

SEQ ID NO: 2809908 - RNA, 19 nt, Artificial Sequence
  Description of Artificial Sequence: Synthetic oligonucleotide
ggaaucguccacagguaag

SEQ ID NO: 2809909 - RNA, 19 nt, Artificial Sequence
  Description of Artificial Sequence: Synthetic oligonucleotide
ucgggcuuguccgccggcg

SEQ ID NO: 2809910 - RNA, 19 nt, Artificial Sequence
  Description of Artificial Sequence: Synthetic oligonucleotide
uccucgggcuuguccgccg

SEQ ID NO: 2809911 - RNA, 19 nt, Artificial Sequence
  Description of Artificial Sequence: Synthetic oligonucleotide
cucggcgauggcgaaguag

SEQ ID NO: 2809912 - RNA, 19 nt, Artificial Sequence
  Description of Artificial Sequence: Synthetic oligonucleotide
gaucaggccgcagacccga

SEQ ID NO: 2809913 - RNA, 19 nt, Artificial Sequence
  Description of Artificial Sequence: Synthetic oligonucleotide
augguguaccgguccguca

SEQ ID NO: 2809914 - RNA, 19 nt, Artificial Sequence
  Description of Artificial Sequence: Synthetic oligonucleotide
aagcgcacgcgggccuugc

SEQ ID NO: 2809915 - RNA, 19 nt, Artificial Sequence
  Description of Artificial Sequence: Synthetic oligonucleotide
cccguaccgauguacuugg

SEQ ID NO: 2809916 - RNA, 19 nt, Artificial Sequence
  Description of Artificial Sequence: Synthetic oligonucleotide
acggaacuucuaucugugu

SEQ ID NO: 2809917 - RNA, 19 nt, Artificial Sequence
  Description of Artificial Sequence: Synthetic oligonucleotide
ucgccucaguucuccucgg

SEQ ID NO: 2809918 - RNA, 19 nt, Artificial Sequence
  Description of Artificial Sequence: Synthetic oligonucleotide
cucuaggcuuccagaucag

SEQ ID NO: 2809919 - RNA, 19 nt, Artificial Sequence
  Description of Artificial Sequence: Synthetic oligonucleotide
acccgacgcuacccgcucc

SEQ ID NO: 2809920 - RNA, 19 nt, Artificial Sequence
  Description of Artificial Sequence: Synthetic oligonucleotide
agugacccauguaggagca

SEQ ID NO: 2809921 - RNA, 19 nt, Artificial Sequence
  Description of Artificial Sequence: Synthetic oligonucleotide
ggugcugguucacaagcca

SEQ ID NO: 2809922 - RNA, 19 nt, Artificial Sequence
  Description of Artificial Sequence: Synthetic oligonucleotide
gaagcccgagcaaggagga

SEQ ID NO: 2809923 - RNA, 19 nt, Artificial Sequence
  Description of Artificial Sequence: Synthetic oligonucleotide
ucucguucucggcgauggc

SEQ ID NO: 2809924 - RNA, 19 nt, Artificial Sequence
  Description of Artificial Sequence: Synthetic oligonucleotide
aagcccgagcaaggaggac

SEQ ID NO: 2809925 - RNA, 19 nt, Artificial Sequence
  Description of Artificial Sequence: Synthetic oligonucleotide
cacagguaagcaggccagg

SEQ ID NO: 2809926 - RNA, 19 nt, Artificial Sequence
  Description of Artificial Sequence: Synthetic oligonucleotide
acagucucucggugacuug

SEQ ID NO: 2809927 - RNA, 19 nt, Artificial Sequence
  Description of Artificial Sequence: Synthetic oligonucleotide
gcagacccgacgcuacccg

SEQ ID NO: 2809928 - RNA, 19 nt, Artificial Sequence
  Description of Artificial Sequence: Synthetic oligonucleotide
cagacccgacgcuacccgc

SEQ ID NO: 2809929 - RNA, 19 nt, Artificial Sequence
  Description of Artificial Sequence: Synthetic oligonucleotide
aggagcaguaggagucccg

SEQ ID NO: 2809930 - RNA, 19 nt, Artificial Sequence
  Description of Artificial Sequence: Synthetic oligonucleotide
ggcuguggaugguguaccg

SEQ ID NO: 2809931 - RNA, 19 nt, Artificial Sequence
  Description of Artificial Sequence: Synthetic oligonucleotide
ucucggugacuuguucgga

SEQ ID NO: 2809932 - RNA, 19 nt, Artificial Sequence
  Description of Artificial Sequence: Synthetic oligonucleotide
cuccgcucuaggcuuccag

SEQ ID NO: 2809933 - RNA, 19 nt, Artificial Sequence
  Description of Artificial Sequence: Synthetic oligonucleotide
ccacagguaagcaggccag

SEQ ID NO: 2809934 - RNA, 19 nt, Artificial Sequence
  Description of Artificial Sequence: Synthetic oligonucleotide
uugguggugucggcguggc

SEQ ID NO: 2809935 - RNA, 19 nt, Artificial Sequence
  Description of Artificial Sequence: Synthetic oligonucleotide
gagccugggaagcgcucgc

SEQ ID NO: 2809936 - RNA, 19 nt, Artificial Sequence
  Description of Artificial Sequence: Synthetic oligonucleotide
ccggugcugguucacaagc

SEQ ID NO: 2809937 - RNA, 19 nt, Artificial Sequence
  Description of Artificial Sequence: Synthetic oligonucleotide
accggcccaccgcuggccg

SEQ ID NO: 2809938 - RNA, 19 nt, Artificial Sequence
  Description of Artificial Sequence: Synthetic oligonucleotide
ggcgauggcgaaguaguug

SEQ ID NO: 2809939 - RNA, 19 nt, Artificial Sequence
  Description of Artificial Sequence: Synthetic oligonucleotide
cguucaaaccugagagacg

SEQ ID NO: 2809940 - RNA, 19 nt, Artificial Sequence
  Description of Artificial Sequence: Synthetic oligonucleotide
ucgccgcuccgcucuaggc

SEQ ID NO: 2809941 - RNA, 19 nt, Artificial Sequence
  Description of Artificial Sequence: Synthetic oligonucleotide
uguaccgguccgucaucuc

SEQ ID NO: 2809942 - RNA, 19 nt, Artificial Sequence
  Description of Artificial Sequence: Synthetic oligonucleotide
ucccggugcugguucacaa

SEQ ID NO: 2809943 - RNA, 19 nt, Artificial Sequence
  Description of Artificial Sequence: Synthetic oligonucleotide
uaagcaggccaggcgugac

SEQ ID NO: 2809944 - RNA, 19 nt, Artificial Sequence
  Description of Artificial Sequence: Synthetic oligonucleotide
cucgccgcuccgcucuagg

SEQ ID NO: 2809945 - RNA, 19 nt, Artificial Sequence
  Description of Artificial Sequence: Synthetic oligonucleotide
caggcgugacagacgauga

SEQ ID NO: 2809946 - RNA, 19 nt, Artificial Sequence
  Description of Artificial Sequence: Synthetic oligonucleotide
gacgcuacccgcuccgcgu

SEQ ID NO: 2809947 - RNA, 19 nt, Artificial Sequence
  Description of Artificial Sequence: Synthetic oligonucleotide
cucggugacuuguucggaa

SEQ ID NO: 2809948 - RNA, 19 nt, Artificial Sequence
  Description of Artificial Sequence: Synthetic oligonucleotide
gccucaguucuccucgggc

SEQ ID NO: 2809949 - RNA, 19 nt, Artificial Sequence
  Description of Artificial Sequence: Synthetic oligonucleotide
gucucucggugacuuguuc

SEQ ID NO: 2809950 - RNA, 19 nt, Artificial Sequence
  Description of Artificial Sequence: Synthetic oligonucleotide
ucaucucgccgcuccgcuc

SEQ ID NO: 2809951 - RNA, 19 nt, Artificial Sequence
  Description of Artificial Sequence: Synthetic oligonucleotide
ugucggcguggcccguacc

SEQ ID NO: 2809952 - RNA, 19 nt, Artificial Sequence
  Description of Artificial Sequence: Synthetic oligonucleotide
gcuguggaugguguaccgg

SEQ ID NO: 2809953 - RNA, 19 nt, Artificial Sequence
  Description of Artificial Sequence: Synthetic oligonucleotide
gaggucgaagugacccaug

SEQ ID NO: 2809954 - RNA, 19 nt, Artificial Sequence
  Description of Artificial Sequence: Synthetic oligonucleotide
uguguaggcgcgggagaaa

SEQ ID NO: 2809955 - RNA, 19 nt, Artificial Sequence
  Description of Artificial Sequence: Synthetic oligonucleotide
aggcgugacagacgaugaa

SEQ ID NO: 2809956 - RNA, 19 nt, Artificial Sequence
  Description of Artificial Sequence: Synthetic oligonucleotide
uaggagucccggugcuggu

SEQ ID NO: 2809957 - RNA, 19 nt, Artificial Sequence
  Description of Artificial Sequence: Synthetic oligonucleotide
cuccgcguucaaaccugag

SEQ ID NO: 2809958 - RNA, 19 nt, Artificial Sequence
  Description of Artificial Sequence: Synthetic oligonucleotide
cgagcaaggaggaccggcc

SEQ ID NO: 2809959 - RNA, 19 nt, Artificial Sequence
  Description of Artificial Sequence: Synthetic oligonucleotide
guucucggcgauggcgaag

SEQ ID NO: 2809960 - RNA, 19 nt, Artificial Sequence
  Description of Artificial Sequence: Synthetic oligonucleotide
agucccggugcugguucac

SEQ ID NO: 2809961 - RNA, 19 nt, Artificial Sequence
  Description of Artificial Sequence: Synthetic oligonucleotide
guggcccguaccgauguac

SEQ ID NO: 2809962 - RNA, 19 nt, Artificial Sequence
  Description of Artificial Sequence: Synthetic oligonucleotide
cguaccgauguacuuggac

SEQ ID NO: 2809963 - RNA, 19 nt, Artificial Sequence
  Description of Artificial Sequence: Synthetic oligonucleotide
guaagcaggccaggcguga

SEQ ID NO: 2809964 - RNA, 19 nt, Artificial Sequence
  Description of Artificial Sequence: Synthetic oligonucleotide
gguaagcaggccaggcgug

SEQ ID NO: 2809965 - RNA, 19 nt, Artificial Sequence
  Description of Artificial Sequence: Synthetic oligonucleotide
gccuugcucucguucucgg

SEQ ID NO: 2809966 - RNA, 19 nt, Artificial Sequence
  Description of Artificial Sequence: Synthetic oligonucleotide
gcccgagcaaggaggaccg

SEQ ID NO: 2809967 - RNA, 19 nt, Artificial Sequence
  Description of Artificial Sequence: Synthetic oligonucleotide
gacccgacgcuacccgcuc

SEQ ID NO: 2809968 - RNA, 19 nt, Artificial Sequence
  Description of Artificial Sequence: Synthetic oligonucleotide
gccgcugccggcccgacac

SEQ ID NO: 2809969 - RNA, 19 nt, Artificial Sequence
  Description of Artificial Sequence: Synthetic oligonucleotide
ugcucucguucucggcgau

SEQ ID NO: 2809970 - RNA, 19 nt, Artificial Sequence
  Description of Artificial Sequence: Synthetic oligonucleotide
ggccuugcucucguucucg

SEQ ID NO: 2809971 - RNA, 19 nt, Artificial Sequence
  Description of Artificial Sequence: Synthetic oligonucleotide
ggagucccggugcugguuc

SEQ ID NO: 2809972 - RNA, 19 nt, Artificial Sequence
  Description of Artificial Sequence: Synthetic oligonucleotide
gcgugacagacgaugaaga

SEQ ID NO: 2809973 - RNA, 19 nt, Artificial Sequence
  Description of Artificial Sequence: Synthetic oligonucleotide
gacagucucucggugacuu

SEQ ID NO: 2809974 - RNA, 19 nt, Artificial Sequence
  Description of Artificial Sequence: Synthetic oligonucleotide
cgguccgucaucucgccgc

SEQ ID NO: 2809975 - RNA, 19 nt, Artificial Sequence
  Description of Artificial Sequence: Synthetic oligonucleotide
agacccgacgcuacccgcu

SEQ ID NO: 2809976 - RNA, 19 nt, Artificial Sequence
  Description of Artificial Sequence: Synthetic oligonucleotide
ccgacacggaacuucuauc

SEQ ID NO: 2809977 - RNA, 19 nt, Artificial Sequence
  Description of Artificial Sequence: Synthetic oligonucleotide
ugguggugucggcguggcc

SEQ ID NO: 2809978 - RNA, 19 nt, Artificial Sequence
  Description of Artificial Sequence: Synthetic oligonucleotide
ucggcguggcccguaccga

SEQ ID NO: 2809979 - RNA, 19 nt, Artificial Sequence
  Description of Artificial Sequence: Synthetic oligonucleotide
cuuguccgccggcggcccg

SEQ ID NO: 2809980 - RNA, 19 nt, Artificial Sequence
  Description of Artificial Sequence: Synthetic oligonucleotide
ccacuugguggugucggcg

SEQ ID NO: 2809981 - RNA, 19 nt, Artificial Sequence
  Description of Artificial Sequence: Synthetic oligonucleotide
cacgcgggccuugcucucg

SEQ ID NO: 2809982 - RNA, 19 nt, Artificial Sequence
  Description of Artificial Sequence: Synthetic oligonucleotide
gacccauguaggagcagua

SEQ ID NO: 2809983 - RNA, 19 nt, Artificial Sequence
  Description of Artificial Sequence: Synthetic oligonucleotide
cgaagugacccauguagga

SEQ ID NO: 2809984 - RNA, 19 nt, Artificial Sequence
  Description of Artificial Sequence: Synthetic oligonucleotide
cuccucgggcuuguccgcc

SEQ ID NO: 2809985 - RNA, 19 nt, Artificial Sequence
  Description of Artificial Sequence: Synthetic oligonucleotide
gucaucucgccgcuccgcu

SEQ ID NO: 2809986 - RNA, 19 nt, Artificial Sequence
  Description of Artificial Sequence: Synthetic oligonucleotide
caaggaggaccggcccacc

SEQ ID NO: 2809987 - RNA, 19 nt, Artificial Sequence
  Description of Artificial Sequence: Synthetic oligonucleotide
gaagcgcacgcgggccuug

SEQ ID NO: 2809988 - RNA, 19 nt, Artificial Sequence
  Description of Artificial Sequence: Synthetic oligonucleotide
caucucgccgcuccgcucu

SEQ ID NO: 2809989 - RNA, 19 nt, Artificial Sequence
  Description of Artificial Sequence: Synthetic oligonucleotide
cccgcuccgcguucaaacc

SEQ ID NO: 2809990 - RNA, 19 nt, Artificial Sequence
  Description of Artificial Sequence: Synthetic oligonucleotide
cucgggcuuguccgccggc

SEQ ID NO: 2809991 - RNA, 19 nt, Artificial Sequence
  Description of Artificial Sequence: Synthetic oligonucleotide
ccgagcaaggaggaccggc

SEQ ID NO: 2809992 - RNA, 19 nt, Artificial Sequence
  Description of Artificial Sequence: Synthetic oligonucleotide
gagcaguaggagucccggu

SEQ ID NO: 2809993 - RNA, 19 nt, Artificial Sequence
  Description of Artificial Sequence: Synthetic oligonucleotide
gggcuuguccgccggcggc

SEQ ID NO: 2809994 - RNA, 19 nt, Artificial Sequence
  Description of Artificial Sequence: Synthetic oligonucleotide
aggccgcagacccgacgcu

SEQ ID NO: 2809995 - RNA, 19 nt, Artificial Sequence
  Description of Artificial Sequence: Synthetic oligonucleotide
ggcuuccagaucaggccgc

SEQ ID NO: 2809996 - RNA, 19 nt, Artificial Sequence
  Description of Artificial Sequence: Synthetic oligonucleotide
ccagaucaggccgcagacc

SEQ ID NO: 2809997 - RNA, 19 nt, Artificial Sequence
  Description of Artificial Sequence: Synthetic oligonucleotide
gugacuuguucggaaucgu

SEQ ID NO: 2809998 - RNA, 19 nt, Artificial Sequence
  Description of Artificial Sequence: Synthetic oligonucleotide
gugucggcguggcccguac

SEQ ID NO: 2809999 - RNA, 19 nt, Artificial Sequence
  Description of Artificial Sequence: Synthetic oligonucleotide
cccgacgcuacccgcuccg

SEQ ID NO: 2810000 - RNA, 19 nt, Artificial Sequence
  Description of Artificial Sequence: Synthetic oligonucleotide
aucaggccgcagacccgac

SEQ ID NO: 2810001 - RNA, 19 nt, Artificial Sequence
  Description of Artificial Sequence: Synthetic oligonucleotide
cccggugcugguucacaag

SEQ ID NO: 2810002 - RNA, 19 nt, Artificial Sequence
  Description of Artificial Sequence: Synthetic oligonucleotide
cagucucucggugacuugu

SEQ ID NO: 2810003 - RNA, 19 nt, Artificial Sequence
  Description of Artificial Sequence: Synthetic oligonucleotide
cggacagucucucggugac

SEQ ID NO: 2810004 - RNA, 19 nt, Artificial Sequence
  Description of Artificial Sequence: Synthetic oligonucleotide
gguguaccgguccgucauc

SEQ ID NO: 2810005 - RNA, 19 nt, Artificial Sequence
  Description of Artificial Sequence: Synthetic oligonucleotide
acgcuacccgcuccgcguu

SEQ ID NO: 2810006 - RNA, 19 nt, Artificial Sequence
  Description of Artificial Sequence: Synthetic oligonucleotide
cggugcugguucacaagcc

SEQ ID NO: 2810007 - RNA, 19 nt, Artificial Sequence
  Description of Artificial Sequence: Synthetic oligonucleotide
agcgcucgccucaguucuc

SEQ ID NO: 2810008 - RNA, 19 nt, Artificial Sequence
  Description of Artificial Sequence: Synthetic oligonucleotide
gaggaccggcccaccgcug

SEQ ID NO: 2810009 - RNA, 19 nt, Artificial Sequence
  Description of Artificial Sequence: Synthetic oligonucleotide
acgcgggccuugcucucgu

SEQ ID NO: 2810010 - RNA, 19 nt, Artificial Sequence
  Description of Artificial Sequence: Synthetic oligonucleotide
ucucggcgauggcgaagua

SEQ ID NO: 2810011 - RNA, 19 nt, Artificial Sequence
  Description of Artificial Sequence: Synthetic oligonucleotide
agucucucggugacuuguu

SEQ ID NO: 2810012 - RNA, 19 nt, Artificial Sequence
  Description of Artificial Sequence: Synthetic oligonucleotide
gcucgccucaguucuccuc

SEQ ID NO: 2810013 - RNA, 19 nt, Artificial Sequence
  Description of Artificial Sequence: Synthetic oligonucleotide
ggcuuguccgccggcggcc

SEQ ID NO: 2810014 - RNA, 19 nt, Artificial Sequence
  Description of Artificial Sequence: Synthetic oligonucleotide
uacccgcuccgcguucaaa

SEQ ID NO: 2810015 - RNA, 19 nt, Artificial Sequence
  Description of Artificial Sequence: Synthetic oligonucleotide
ggucgaagugacccaugua

SEQ ID NO: 2810016 - RNA, 19 nt, Artificial Sequence
  Description of Artificial Sequence: Synthetic oligonucleotide
guguaccgguccgucaucu

SEQ ID NO: 2810017 - RNA, 19 nt, Artificial Sequence
  Description of Artificial Sequence: Synthetic oligonucleotide
cggaacuucuaucugugua

SEQ ID NO: 2810018 - RNA, 19 nt, Artificial Sequence
  Description of Artificial Sequence: Synthetic oligonucleotide
cucaguucuccucgggcuu

SEQ ID NO: 2810019 - RNA, 19 nt, Artificial Sequence
  Description of Artificial Sequence: Synthetic oligonucleotide
ggaggaccggcccaccgcu

SEQ ID NO: 2810020 - RNA, 19 nt, Artificial Sequence
  Description of Artificial Sequence: Synthetic oligonucleotide
cgacacggaacuucuaucu

SEQ ID NO: 2810021 - RNA, 19 nt, Artificial Sequence
  Description of Artificial Sequence: Synthetic oligonucleotide
ccucaguucuccucgggcu

SEQ ID NO: 2810022 - RNA, 19 nt, Artificial Sequence
  Description of Artificial Sequence: Synthetic oligonucleotide
gcgggccuugcucucguuc

SEQ ID NO: 2810023 - RNA, 19 nt, Artificial Sequence
  Description of Artificial Sequence: Synthetic oligonucleotide
cgcgggagaaagacgccac

SEQ ID NO: 2810024 - RNA, 19 nt, Artificial Sequence
  Description of Artificial Sequence: Synthetic oligonucleotide
cccaccgcuggccggcggg

SEQ ID NO: 2810025 - RNA, 19 nt, Artificial Sequence
  Description of Artificial Sequence: Synthetic oligonucleotide
aggagucccggugcugguu

SEQ ID NO: 2810026 - RNA, 19 nt, Artificial Sequence
  Description of Artificial Sequence: Synthetic oligonucleotide
cauucccacuugguggugu

SEQ ID NO: 2810027 - RNA, 19 nt, Artificial Sequence
  Description of Artificial Sequence: Synthetic oligonucleotide
cugccggcccgacacggaa

SEQ ID NO: 2810028 - RNA, 19 nt, Artificial Sequence
  Description of Artificial Sequence: Synthetic oligonucleotide
cgugacagacgaugaagaa

SEQ ID NO: 2810029 - RNA, 19 nt, Artificial Sequence
  Description of Artificial Sequence: Synthetic oligonucleotide
cgcuccgcguucaaaccug

SEQ ID NO: 2810030 - RNA, 19 nt, Artificial Sequence
  Description of Artificial Sequence: Synthetic oligonucleotide
caguaggagucccggugcu

SEQ ID NO: 2810031 - RNA, 19 nt, Artificial Sequence
  Description of Artificial Sequence: Synthetic oligonucleotide
gugcugguucacaagccau

SEQ ID NO: 2810032 - RNA, 19 nt, Artificial Sequence
  Description of Artificial Sequence: Synthetic oligonucleotide
cccggacagucucucggug

SEQ ID NO: 2810033 - RNA, 19 nt, Artificial Sequence
  Description of Artificial Sequence: Synthetic oligonucleotide
ccgucaucucgccgcuccg

SEQ ID NO: 2810034 - RNA, 19 nt, Artificial Sequence
  Description of Artificial Sequence: Synthetic oligonucleotide
cccgcugggcugcagcauc

SEQ ID NO: 2810035 - RNA, 19 nt, Artificial Sequence
  Description of Artificial Sequence: Synthetic oligonucleotide
cgacgcuacccgcuccgcg

SEQ ID NO: 2810036 - RNA, 19 nt, Artificial Sequence
  Description of Artificial Sequence: Synthetic oligonucleotide
ccucgggcuuguccgccgg

SEQ ID NO: 2810037 - RNA, 19 nt, Artificial Sequence
  Description of Artificial Sequence: Synthetic oligonucleotide
cggugacuuguucggaauc

SEQ ID NO: 2810038 - RNA, 19 nt, Artificial Sequence
  Description of Artificial Sequence: Synthetic oligonucleotide
ggcgcgggagaaagacgcc

SEQ ID NO: 2810039 - RNA, 19 nt, Artificial Sequence
  Description of Artificial Sequence: Synthetic oligonucleotide
gcgcgggagaaagacgcca

SEQ ID NO: 2810040 - RNA, 19 nt, Artificial Sequence
  Description of Artificial Sequence: Synthetic oligonucleotide
gcgaaguaguugaggaggu

SEQ ID NO: 2810041 - RNA, 19 nt, Artificial Sequence
  Description of Artificial Sequence: Synthetic oligonucleotide
cgcucuaggcuuccagauc

SEQ ID NO: 2810042 - RNA, 19 nt, Artificial Sequence
  Description of Artificial Sequence: Synthetic oligonucleotide
ggcguggcccguaccgaug

SEQ ID NO: 2810043 - RNA, 19 nt, Artificial Sequence
  Description of Artificial Sequence: Synthetic oligonucleotide
ggcccgcugggcugcagca

SEQ ID NO: 2810044 - RNA, 19 nt, Artificial Sequence
  Description of Artificial Sequence: Synthetic oligonucleotide
gcgcucgccucaguucucc

SEQ ID NO: 2810045 - RNA, 19 nt, Artificial Sequence
  Description of Artificial Sequence: Synthetic oligonucleotide
gcgcacgcgggccuugcuc

SEQ ID NO: 2810046 - RNA, 19 nt, Artificial Sequence
  Description of Artificial Sequence: Synthetic oligonucleotide
ccgguccgucaucucgccg

SEQ ID NO: 2810047 - RNA, 19 nt, Artificial Sequence
  Description of Artificial Sequence: Synthetic oligonucleotide
cgcguucaaaccugagaga

SEQ ID NO: 2810048 - RNA, 19 nt, Artificial Sequence
  Description of Artificial Sequence: Synthetic oligonucleotide
gcuuccagaucaggccgca

SEQ ID NO: 2810049 - RNA, 19 nt, Artificial Sequence
  Description of Artificial Sequence: Synthetic oligonucleotide
uguccgccggcggcccgcu

SEQ ID NO: 2810050 - RNA, 19 nt, Artificial Sequence
  Description of Artificial Sequence: Synthetic oligonucleotide
aucucgccgcuccgcucua

SEQ ID NO: 2810051 - RNA, 19 nt, Artificial Sequence
  Description of Artificial Sequence: Synthetic oligonucleotide
ggaggucgaagugacccau

SEQ ID NO: 2810052 - RNA, 19 nt, Artificial Sequence
  Description of Artificial Sequence: Synthetic oligonucleotide
cgcagacccgacgcuaccc

SEQ ID NO: 2810053 - RNA, 19 nt, Artificial Sequence
  Description of Artificial Sequence: Synthetic oligonucleotide
gcuuguccgccggcggccc

SEQ ID NO: 2810054 - RNA, 19 nt, Artificial Sequence
  Description of Artificial Sequence: Synthetic oligonucleotide
cggaaucguccacagguaa

SEQ ID NO: 2810055 - RNA, 19 nt, Artificial Sequence
  Description of Artificial Sequence: Synthetic oligonucleotide
gcucucguucucggcgaug

SEQ ID NO: 2810056 - RNA, 19 nt, Artificial Sequence
  Description of Artificial Sequence: Synthetic oligonucleotide
ccgcagacccgacgcuacc

SEQ ID NO: 2810057 - RNA, 19 nt, Artificial Sequence
  Description of Artificial Sequence: Synthetic oligonucleotide
gcuacccgcuccgcguuca

SEQ ID NO: 2810058 - RNA, 19 nt, Artificial Sequence
  Description of Artificial Sequence: Synthetic oligonucleotide
cgucaucucgccgcuccgc

SEQ ID NO: 2810059 - RNA, 19 nt, Artificial Sequence
  Description of Artificial Sequence: Synthetic oligonucleotide
cgaaguaguugaggagguc

SEQ ID NO: 2810060 - RNA, 19 nt, Artificial Sequence
  Description of Artificial Sequence: Synthetic oligonucleotide
cgccucaguucuccucggg

SEQ ID NO: 2810061 - RNA, 19 nt, Artificial Sequence
  Description of Artificial Sequence: Synthetic oligonucleotide
gguccgucaucucgccgcu

SEQ ID NO: 2810062 - RNA, 19 nt, Artificial Sequence
  Description of Artificial Sequence: Synthetic oligonucleotide
cccgacacggaacuucuau

SEQ ID NO: 2810063 - RNA, 19 nt, Artificial Sequence
  Description of Artificial Sequence: Synthetic oligonucleotide
uggugucggcguggcccgu

SEQ ID NO: 2810064 - RNA, 19 nt, Artificial Sequence
  Description of Artificial Sequence: Synthetic oligonucleotide
gccggcccgacacggaacu

SEQ ID NO: 2810065 - RNA, 19 nt, Artificial Sequence
  Description of Artificial Sequence: Synthetic oligonucleotide
gcguggcccguaccgaugu

SEQ ID NO: 2810066 - RNA, 19 nt, Artificial Sequence
  Description of Artificial Sequence: Synthetic oligonucleotide
gcuccgcguucaaaccuga

SEQ ID NO: 2810067 - RNA, 19 nt, Artificial Sequence
  Description of Artificial Sequence: Synthetic oligonucleotide
gccgcuccgcucuaggcuu

SEQ ID NO: 2810068 - RNA, 19 nt, Artificial Sequence
  Description of Artificial Sequence: Synthetic oligonucleotide
ccggcccaccgcuggccgg

SEQ ID NO: 2810069 - RNA, 19 nt, Artificial Sequence
  Description of Artificial Sequence: Synthetic oligonucleotide
ggcccgacacggaacuucu

SEQ ID NO: 2810070 - RNA, 19 nt, Artificial Sequence
  Description of Artificial Sequence: Synthetic oligonucleotide
cuacccgcuccgcguucaa

SEQ ID NO: 2810071 - RNA, 19 nt, Artificial Sequence
  Description of Artificial Sequence: Synthetic oligonucleotide
ccauucccacuugguggug

SEQ ID NO: 2810072 - RNA, 19 nt, Artificial Sequence
  Description of Artificial Sequence: Synthetic oligonucleotide
ccaccgcuggccggcgggg

SEQ ID NO: 2810073 - RNA, 19 nt, Artificial Sequence
  Description of Artificial Sequence: Synthetic oligonucleotide
gcacgcgggccuugcucuc

SEQ ID NO: 2810074 - RNA, 19 nt, Artificial Sequence
  Description of Artificial Sequence: Synthetic oligonucleotide
ccgcucuaggcuuccagau

SEQ ID NO: 2810075 - RNA, 19 nt, Artificial Sequence
  Description of Artificial Sequence: Synthetic oligonucleotide
guccgucaucucgccgcuc

SEQ ID NO: 2810076 - RNA, 19 nt, Artificial Sequence
  Description of Artificial Sequence: Synthetic oligonucleotide
gcccaccgcuggccggcgg

SEQ ID NO: 2810077 - RNA, 19 nt, Artificial Sequence
  Description of Artificial Sequence: Synthetic oligonucleotide
ccgccggcggcccgcuggg

SEQ ID NO: 2810078 - RNA, 19 nt, Artificial Sequence
  Description of Artificial Sequence: Synthetic oligonucleotide
cggcccgacacggaacuuc

SEQ ID NO: 2810079 - RNA, 19 nt, Artificial Sequence
  Description of Artificial Sequence: Synthetic oligonucleotide
ccgacgcuacccgcuccgc

SEQ ID NO: 2810080 - RNA, 19 nt, Artificial Sequence
  Description of Artificial Sequence: Synthetic oligonucleotide
cccgagcaaggaggaccgg

SEQ ID NO: 2810081 - RNA, 19 nt, Artificial Sequence
  Description of Artificial Sequence: Synthetic oligonucleotide
ggcccguaccgauguacuu

SEQ ID NO: 2810082 - RNA, 19 nt, Artificial Sequence
  Description of Artificial Sequence: Synthetic oligonucleotide
ccgcugccggcccgacacg

SEQ ID NO: 2810083 - RNA, 19 nt, Artificial Sequence
  Description of Artificial Sequence: Synthetic oligonucleotide
caguucuccucgggcuugu

SEQ ID NO: 2810084 - RNA, 19 nt, Artificial Sequence
  Description of Artificial Sequence: Synthetic oligonucleotide
ggcccaccgcuggccggcg

SEQ ID NO: 2810085 - RNA, 19 nt, Artificial Sequence
  Description of Artificial Sequence: Synthetic oligonucleotide
ggacagucucucggugacu

SEQ ID NO: 2810086 - RNA, 19 nt, Artificial Sequence
  Description of Artificial Sequence: Synthetic oligonucleotide
ccgcuccgcguucaaaccu

SEQ ID NO: 2810087 - RNA, 19 nt, Artificial Sequence
  Description of Artificial Sequence: Synthetic oligonucleotide
ccgcuccgcucuaggcuuc

SEQ ID NO: 2810088 - RNA, 19 nt, Artificial Sequence
  Description of Artificial Sequence: Synthetic oligonucleotide
gcugccggcccgacacgga

SEQ ID NO: 2810089 - RNA, 19 nt, Artificial Sequence
  Description of Artificial Sequence: Synthetic oligonucleotide
ccguaccgauguacuugga

SEQ ID NO: 2810090 - RNA, 19 nt, Artificial Sequence
  Description of Artificial Sequence: Synthetic oligonucleotide
guccgccggcggcccgcug

SEQ ID NO: 2810091 - RNA, 19 nt, Artificial Sequence
  Description of Artificial Sequence: Synthetic oligonucleotide
cgcacgcgggccuugcucu

SEQ ID NO: 2810092 - RNA, 19 nt, Artificial Sequence
  Description of Artificial Sequence: Synthetic oligonucleotide
gccggcggcccgcugggcu

SEQ ID NO: 2810093 - RNA, 19 nt, Artificial Sequence
  Description of Artificial Sequence: Synthetic oligonucleotide
ggugucggcguggcccgua

SEQ ID NO: 2810094 - RNA, 19 nt, Artificial Sequence
  Description of Artificial Sequence: Synthetic oligonucleotide
cguucucggcgauggcgaa

SEQ ID NO: 2810095 - RNA, 19 nt, Artificial Sequence
  Description of Artificial Sequence: Synthetic oligonucleotide
cggcccaccgcuggccggc

SEQ ID NO: 2810096 - RNA, 19 nt, Artificial Sequence
  Description of Artificial Sequence: Synthetic oligonucleotide
cgcuccgcucuaggcuucc

SEQ ID NO: 2810097 - RNA, 19 nt, Artificial Sequence
  Description of Artificial Sequence: Synthetic oligonucleotide
gcuccgcucuaggcuucca

SEQ ID NO: 2810098 - RNA, 19 nt, Artificial Sequence
  Description of Artificial Sequence: Synthetic oligonucleotide
cgccgcuccgcucuaggcu

SEQ ID NO: 2810099 - RNA, 19 nt, Artificial Sequence
  Description of Artificial Sequence: Synthetic oligonucleotide
cgcuacccgcuccgcguuc

SEQ ID NO: 2810100 - RNA, 19 nt, Artificial Sequence
  Description of Artificial Sequence: Synthetic oligonucleotide
ccgcugggcugcagcaucu

SEQ ID NO: 2810101 - RNA, 19 nt, Artificial Sequence
  Description of Artificial Sequence: Synthetic oligonucleotide
gcccgacacggaacuucua

SEQ ID NO: 2810102 - RNA, 19 nt, Artificial Sequence
  Description of Artificial Sequence: Synthetic oligonucleotide
gcggcccgcugggcugcag

SEQ ID NO: 2810103 - RNA, 19 nt, Artificial Sequence
  Description of Artificial Sequence: Synthetic oligonucleotide
gcccgcugggcugcagcau

SEQ ID NO: 2810104 - RNA, 19 nt, Artificial Sequence
  Description of Artificial Sequence: Synthetic oligonucleotide
cggcguggcccguaccgau

SEQ ID NO: 2810105 - RNA, 19 nt, Artificial Sequence
  Description of Artificial Sequence: Synthetic oligonucleotide
cguggcccguaccgaugua

SEQ ID NO: 2810106 - RNA, 19 nt, Artificial Sequence
  Description of Artificial Sequence: Synthetic oligonucleotide
ggcggcccgcugggcugca

SEQ ID NO: 2810107 - RNA, 19 nt, Artificial Sequence
  Description of Artificial Sequence: Synthetic oligonucleotide
cggcgauggcgaaguaguu

SEQ ID NO: 2810108 - RNA, 19 nt, Artificial Sequence
  Description of Artificial Sequence: Synthetic oligonucleotide
cgcucgccucaguucuccu

SEQ ID NO: 2810109 - RNA, 19 nt, Artificial Sequence
  Description of Artificial Sequence: Synthetic oligonucleotide
ccgccgcugccggcccgac

SEQ ID NO: 2810110 - RNA, 19 nt, Artificial Sequence
  Description of Artificial Sequence: Synthetic oligonucleotide
cgccggcggcccgcugggc

SEQ ID NO: 2810111 - RNA, 19 nt, Artificial Sequence
  Description of Artificial Sequence: Synthetic oligonucleotide
ccggcccgacacggaacuu

SEQ ID NO: 2810112 - RNA, 19 nt, Artificial Sequence
  Description of Artificial Sequence: Synthetic oligonucleotide
aaauggacaguauugucag

SEQ ID NO: 2810113 - RNA, 19 nt, Artificial Sequence
  Description of Artificial Sequence: Synthetic oligonucleotide
uaaacugcugucaaacucc

SEQ ID NO: 2810114 - RNA, 19 nt, Artificial Sequence
  Description of Artificial Sequence: Synthetic oligonucleotide
uuuguuugcagccugcuac

SEQ ID NO: 2810115 - RNA, 19 nt, Artificial Sequence
  Description of Artificial Sequence: Synthetic oligonucleotide
aaucuugagcagcuccacc

SEQ ID NO: 2810116 - RNA, 19 nt, Artificial Sequence
  Description of Artificial Sequence: Synthetic oligonucleotide
acugcugucaaacuccguc

SEQ ID NO: 2810117 - RNA, 19 nt, Artificial Sequence
  Description of Artificial Sequence: Synthetic oligonucleotide
ugaaacaaagggcugguuc

SEQ ID NO: 2810118 - RNA, 19 nt, Artificial Sequence
  Description of Artificial Sequence: Synthetic oligonucleotide
cauaccccagcucagacgg

SEQ ID NO: 2810119 - RNA, 19 nt, Artificial Sequence
  Description of Artificial Sequence: Synthetic oligonucleotide
gacaguauugucaggaccc

SEQ ID NO: 2810120 - RNA, 19 nt, Artificial Sequence
  Description of Artificial Sequence: Synthetic oligonucleotide
aagggugaaacaaagggcu

SEQ ID NO: 2810121 - RNA, 19 nt, Artificial Sequence
  Description of Artificial Sequence: Synthetic oligonucleotide
cuugaugggacaguggucc

SEQ ID NO: 2810122 - RNA, 19 nt, Artificial Sequence
  Description of Artificial Sequence: Synthetic oligonucleotide
caagggugaaacaaagggc

SEQ ID NO: 2810123 - RNA, 19 nt, Artificial Sequence
  Description of Artificial Sequence: Synthetic oligonucleotide
ccugcuacaguucugaacg

SEQ ID NO: 2810124 - RNA, 19 nt, Artificial Sequence
  Description of Artificial Sequence: Synthetic oligonucleotide
ugaacgucgcucaaucuug

SEQ ID NO: 2810125 - RNA, 19 nt, Artificial Sequence
  Description of Artificial Sequence: Synthetic oligonucleotide
agggcacucaggcaaaugg

SEQ ID NO: 2810126 - RNA, 19 nt, Artificial Sequence
  Description of Artificial Sequence: Synthetic oligonucleotide
uagugcaugugcaagacau

SEQ ID NO: 2810127 - RNA, 19 nt, Artificial Sequence
  Description of Artificial Sequence: Synthetic oligonucleotide
uuccccuucacacaucccc

SEQ ID NO: 2810128 - RNA, 19 nt, Artificial Sequence
  Description of Artificial Sequence: Synthetic oligonucleotide
ugucucuguaggcacagcc

SEQ ID NO: 2810129 - RNA, 19 nt, Artificial Sequence
  Description of Artificial Sequence: Synthetic oligonucleotide
ucaaucuugagcagcucca

SEQ ID NO: 2810130 - RNA, 19 nt, Artificial Sequence
  Description of Artificial Sequence: Synthetic oligonucleotide
aguauugucaggacccggc

SEQ ID NO: 2810131 - RNA, 19 nt, Artificial Sequence
  Description of Artificial Sequence: Synthetic oligonucleotide
accagcuuccgcuuuuccc

SEQ ID NO: 2810132 - RNA, 19 nt, Artificial Sequence
  Description of Artificial Sequence: Synthetic oligonucleotide
uccaccugggaucuuuggg

SEQ ID NO: 2810133 - RNA, 19 nt, Artificial Sequence
  Description of Artificial Sequence: Synthetic oligonucleotide
acgucgcucaaucuugagc

SEQ ID NO: 2810134 - RNA, 19 nt, Artificial Sequence
  Description of Artificial Sequence: Synthetic oligonucleotide
caaauggacaguauuguca

SEQ ID NO: 2810135 - RNA, 19 nt, Artificial Sequence
  Description of Artificial Sequence: Synthetic oligonucleotide
uucugugguaaacugcugu

SEQ ID NO: 2810136 - RNA, 19 nt, Artificial Sequence
  Description of Artificial Sequence: Synthetic oligonucleotide
ucucuguaggcacagccca

SEQ ID NO: 2810137 - RNA, 19 nt, Artificial Sequence
  Description of Artificial Sequence: Synthetic oligonucleotide
ccaagggugaaacaaaggg

SEQ ID NO: 2810138 - RNA, 19 nt, Artificial Sequence
  Description of Artificial Sequence: Synthetic oligonucleotide
uuucuagacuugaugggac

SEQ ID NO: 2810139 - RNA, 19 nt, Artificial Sequence
  Description of Artificial Sequence: Synthetic oligonucleotide
guaaacugcugucaaacuc

SEQ ID NO: 2810140 - RNA, 19 nt, Artificial Sequence
  Description of Artificial Sequence: Synthetic oligonucleotide
cucaaucuugagcagcucc

SEQ ID NO: 2810141 - RNA, 19 nt, Artificial Sequence
  Description of Artificial Sequence: Synthetic oligonucleotide
aaagggcugguucuguggu

SEQ ID NO: 2810142 - RNA, 19 nt, Artificial Sequence
  Description of Artificial Sequence: Synthetic oligonucleotide
uuugcagccugcuacaguu

SEQ ID NO: 2810143 - RNA, 19 nt, Artificial Sequence
  Description of Artificial Sequence: Synthetic oligonucleotide
cuuccguuugccuucggcc

SEQ ID NO: 2810144 - RNA, 19 nt, Artificial Sequence
  Description of Artificial Sequence: Synthetic oligonucleotide
guuucuucacuccaaucug

SEQ ID NO: 2810145 - RNA, 19 nt, Artificial Sequence
  Description of Artificial Sequence: Synthetic oligonucleotide
guaggcacagcccaccucc

SEQ ID NO: 2810146 - RNA, 19 nt, Artificial Sequence
  Description of Artificial Sequence: Synthetic oligonucleotide
ucagacgggaucaccagcu

SEQ ID NO: 2810147 - RNA, 19 nt, Artificial Sequence
  Description of Artificial Sequence: Synthetic oligonucleotide
auugucaggacccggcuca

SEQ ID NO: 2810148 - RNA, 19 nt, Artificial Sequence
  Description of Artificial Sequence: Synthetic oligonucleotide
ugccaagggugaaacaaag

SEQ ID NO: 2810149 - RNA, 19 nt, Artificial Sequence
  Description of Artificial Sequence: Synthetic oligonucleotide
ugugguaaacugcugucaa

SEQ ID NO: 2810150 - RNA, 19 nt, Artificial Sequence
  Description of Artificial Sequence: Synthetic oligonucleotide
cacucaggcaaauggacag

SEQ ID NO: 2810151 - RNA, 19 nt, Artificial Sequence
  Description of Artificial Sequence: Synthetic oligonucleotide
agcagcuccaccucaaaca

SEQ ID NO: 2810152 - RNA, 19 nt, Artificial Sequence
  Description of Artificial Sequence: Synthetic oligonucleotide
ugguaaacugcugucaaac

SEQ ID NO: 2810153 - RNA, 19 nt, Artificial Sequence
  Description of Artificial Sequence: Synthetic oligonucleotide
aucuugagcagcuccaccu

SEQ ID NO: 2810154 - RNA, 19 nt, Artificial Sequence
  Description of Artificial Sequence: Synthetic oligonucleotide
caaacaccaggguugcucc

SEQ ID NO: 2810155 - RNA, 19 nt, Artificial Sequence
  Description of Artificial Sequence: Synthetic oligonucleotide
ucuucuagcuuccccgugu

SEQ ID NO: 2810156 - RNA, 19 nt, Artificial Sequence
  Description of Artificial Sequence: Synthetic oligonucleotide
uucugaacgucgcucaauc

SEQ ID NO: 2810157 - RNA, 19 nt, Artificial Sequence
  Description of Artificial Sequence: Synthetic oligonucleotide
ucuagacuugaugggacag

SEQ ID NO: 2810158 - RNA, 19 nt, Artificial Sequence
  Description of Artificial Sequence: Synthetic oligonucleotide
gaaacaaagggcugguucu

SEQ ID NO: 2810159 - RNA, 19 nt, Artificial Sequence
  Description of Artificial Sequence: Synthetic oligonucleotide
ugaugaccuggccagugcc

SEQ ID NO: 2810160 - RNA, 19 nt, Artificial Sequence
  Description of Artificial Sequence: Synthetic oligonucleotide
cccuuucuagacuugaugg

SEQ ID NO: 2810161 - RNA, 19 nt, Artificial Sequence
  Description of Artificial Sequence: Synthetic oligonucleotide
uucuucacuccaaucugca

SEQ ID NO: 2810162 - RNA, 19 nt, Artificial Sequence
  Description of Artificial Sequence: Synthetic oligonucleotide
aaacugcugucaaacuccg

SEQ ID NO: 2810163 - RNA, 19 nt, Artificial Sequence
  Description of Artificial Sequence: Synthetic oligonucleotide
acaguucugaacgucgcuc

SEQ ID NO: 2810164 - RNA, 19 nt, Artificial Sequence
  Description of Artificial Sequence: Synthetic oligonucleotide
ugcugucaaacuccguccc

SEQ ID NO: 2810165 - RNA, 19 nt, Artificial Sequence
  Description of Artificial Sequence: Synthetic oligonucleotide
caaagggcugguucugugg

SEQ ID NO: 2810166 - RNA, 19 nt, Artificial Sequence
  Description of Artificial Sequence: Synthetic oligonucleotide
uagacuugaugggacagug

SEQ ID NO: 2810167 - RNA, 19 nt, Artificial Sequence
  Description of Artificial Sequence: Synthetic oligonucleotide
uccgcuuuuccccuucaca

SEQ ID NO: 2810168 - RNA, 19 nt, Artificial Sequence
  Description of Artificial Sequence: Synthetic oligonucleotide
gaugggacagugguccacg

SEQ ID NO: 2810169 - RNA, 19 nt, Artificial Sequence
  Description of Artificial Sequence: Synthetic oligonucleotide
ucugugguaaacugcuguc

SEQ ID NO: 2810170 - RNA, 19 nt, Artificial Sequence
  Description of Artificial Sequence: Synthetic oligonucleotide
auggacaguauugucagga

SEQ ID NO: 2810171 - RNA, 19 nt, Artificial Sequence
  Description of Artificial Sequence: Synthetic oligonucleotide
ugcaugugcaagacauccc

SEQ ID NO: 2810172 - RNA, 19 nt, Artificial Sequence
  Description of Artificial Sequence: Synthetic oligonucleotide
cuggccagugccaagggug

SEQ ID NO: 2810173 - RNA, 19 nt, Artificial Sequence
  Description of Artificial Sequence: Synthetic oligonucleotide
ucuucacuccaaucugcag

SEQ ID NO: 2810174 - RNA, 19 nt, Artificial Sequence
  Description of Artificial Sequence: Synthetic oligonucleotide
acuccaaucugcagcuucc

SEQ ID NO: 2810175 - RNA, 19 nt, Artificial Sequence
  Description of Artificial Sequence: Synthetic oligonucleotide
ucuagcuuccccguguagu

SEQ ID NO: 2810176 - RNA, 19 nt, Artificial Sequence
  Description of Artificial Sequence: Synthetic oligonucleotide
accucaaacaccaggguug

SEQ ID NO: 2810177 - RNA, 19 nt, Artificial Sequence
  Description of Artificial Sequence: Synthetic oligonucleotide
cuacaguucugaacgucgc

SEQ ID NO: 2810178 - RNA, 19 nt, Artificial Sequence
  Description of Artificial Sequence: Synthetic oligonucleotide
agugccaagggugaaacaa

SEQ ID NO: 2810179 - RNA, 19 nt, Artificial Sequence
  Description of Artificial Sequence: Synthetic oligonucleotide
gacgggaucaccagcuucc

SEQ ID NO: 2810180 - RNA, 19 nt, Artificial Sequence
  Description of Artificial Sequence: Synthetic oligonucleotide
cucaugucucuguaggcac

SEQ ID NO: 2810181 - RNA, 19 nt, Artificial Sequence
  Description of Artificial Sequence: Synthetic oligonucleotide
uucuagacuugaugggaca

SEQ ID NO: 2810182 - RNA, 19 nt, Artificial Sequence
  Description of Artificial Sequence: Synthetic oligonucleotide
gugcaugugcaagacaucc

SEQ ID NO: 2810183 - RNA, 19 nt, Artificial Sequence
  Description of Artificial Sequence: Synthetic oligonucleotide
cugcugucaaacuccgucc

SEQ ID NO: 2810184 - RNA, 19 nt, Artificial Sequence
  Description of Artificial Sequence: Synthetic oligonucleotide
agacgggaucaccagcuuc

SEQ ID NO: 2810185 - RNA, 19 nt, Artificial Sequence
  Description of Artificial Sequence: Synthetic oligonucleotide
cuagcuuccccguguagug

SEQ ID NO: 2810186 - RNA, 19 nt, Artificial Sequence
  Description of Artificial Sequence: Synthetic oligonucleotide
uguagugcaugugcaagac

SEQ ID NO: 2810187 - RNA, 19 nt, Artificial Sequence
  Description of Artificial Sequence: Synthetic oligonucleotide
aaacaaagggcugguucug

SEQ ID NO: 2810188 - RNA, 19 nt, Artificial Sequence
  Description of Artificial Sequence: Synthetic oligonucleotide
ccaucuucuagcuuccccg

SEQ ID NO: 2810189 - RNA, 19 nt, Artificial Sequence
  Description of Artificial Sequence: Synthetic oligonucleotide
cucuccauaccccagcuca

SEQ ID NO: 2810190 - RNA, 19 nt, Artificial Sequence
  Description of Artificial Sequence: Synthetic oligonucleotide
ugggacagugguccacgcg

SEQ ID NO: 2810191 - RNA, 19 nt, Artificial Sequence
  Description of Artificial Sequence: Synthetic oligonucleotide
uuguuugcagccugcuaca

SEQ ID NO: 2810192 - RNA, 19 nt, Artificial Sequence
  Description of Artificial Sequence: Synthetic oligonucleotide
aaucugcagcuuccguuug

SEQ ID NO: 2810193 - RNA, 19 nt, Artificial Sequence
  Description of Artificial Sequence: Synthetic oligonucleotide
acuccgucccaucuucuag

SEQ ID NO: 2810194 - RNA, 19 nt, Artificial Sequence
  Description of Artificial Sequence: Synthetic oligonucleotide
aacgucgcucaaucuugag

SEQ ID NO: 2810195 - RNA, 19 nt, Artificial Sequence
  Description of Artificial Sequence: Synthetic oligonucleotide
ucuccauaccccagcucag

SEQ ID NO: 2810196 - RNA, 19 nt, Artificial Sequence
  Description of Artificial Sequence: Synthetic oligonucleotide
aggcaaauggacaguauug

SEQ ID NO: 2810197 - RNA, 19 nt, Artificial Sequence
  Description of Artificial Sequence: Synthetic oligonucleotide
uauugucaggacccggcuc

SEQ ID NO: 2810198 - RNA, 19 nt, Artificial Sequence
  Description of Artificial Sequence: Synthetic oligonucleotide
ucaugucucuguaggcaca

SEQ ID NO: 2810199 - RNA, 19 nt, Artificial Sequence
  Description of Artificial Sequence: Synthetic oligonucleotide
uuuuguuugcagccugcua

SEQ ID NO: 2810200 - RNA, 19 nt, Artificial Sequence
  Description of Artificial Sequence: Synthetic oligonucleotide
acaccaggguugcuccacc

SEQ ID NO: 2810201 - RNA, 19 nt, Artificial Sequence
  Description of Artificial Sequence: Synthetic oligonucleotide
gucaggacccggcucagcc

SEQ ID NO: 2810202 - RNA, 19 nt, Artificial Sequence
  Description of Artificial Sequence: Synthetic oligonucleotide
gcuacaguucugaacgucg

SEQ ID NO: 2810203 - RNA, 19 nt, Artificial Sequence
  Description of Artificial Sequence: Synthetic oligonucleotide
gcaugugcaagacaucccc

SEQ ID NO: 2810204 - RNA, 19 nt, Artificial Sequence
  Description of Artificial Sequence: Synthetic oligonucleotide
caaacuccgucccaucuuc

SEQ ID NO: 2810205 - RNA, 19 nt, Artificial Sequence
  Description of Artificial Sequence: Synthetic oligonucleotide
agcccuugaugaccuggcc

SEQ ID NO: 2810206 - RNA, 19 nt, Artificial Sequence
  Description of Artificial Sequence: Synthetic oligonucleotide
cuucacacauccccagcag

SEQ ID NO: 2810207 - RNA, 19 nt, Artificial Sequence
  Description of Artificial Sequence: Synthetic oligonucleotide
uccauaccccagcucagac

SEQ ID NO: 2810208 - RNA, 19 nt, Artificial Sequence
  Description of Artificial Sequence: Synthetic oligonucleotide
ucuguaggcacagcccacc

SEQ ID NO: 2810209 - RNA, 19 nt, Artificial Sequence
  Description of Artificial Sequence: Synthetic oligonucleotide
ggacaguauugucaggacc

SEQ ID NO: 2810210 - RNA, 19 nt, Artificial Sequence
  Description of Artificial Sequence: Synthetic oligonucleotide
ccuuucuagacuugauggg

SEQ ID NO: 2810211 - RNA, 19 nt, Artificial Sequence
  Description of Artificial Sequence: Synthetic oligonucleotide
acaaagggcugguucugug

SEQ ID NO: 2810212 - RNA, 19 nt, Artificial Sequence
  Description of Artificial Sequence: Synthetic oligonucleotide
uggacaguauugucaggac

SEQ ID NO: 2810213 - RNA, 19 nt, Artificial Sequence
  Description of Artificial Sequence: Synthetic oligonucleotide
ucugaacgucgcucaaucu

SEQ ID NO: 2810214 - RNA, 19 nt, Artificial Sequence
  Description of Artificial Sequence: Synthetic oligonucleotide
ucaaacuccgucccaucuu

SEQ ID NO: 2810215 - RNA, 19 nt, Artificial Sequence
  Description of Artificial Sequence: Synthetic oligonucleotide
acaguauugucaggacccg

SEQ ID NO: 2810216 - RNA, 19 nt, Artificial Sequence
  Description of Artificial Sequence: Synthetic oligonucleotide
uccguuugccuucggcccc

SEQ ID NO: 2810217 - RNA, 19 nt, Artificial Sequence
  Description of Artificial Sequence: Synthetic oligonucleotide
uccccuucacacaucccca

SEQ ID NO: 2810218 - RNA, 19 nt, Artificial Sequence
  Description of Artificial Sequence: Synthetic oligonucleotide
ccagcuuccgcuuuucccc

SEQ ID NO: 2810219 - RNA, 19 nt, Artificial Sequence
  Description of Artificial Sequence: Synthetic oligonucleotide
ucugcagcuuccguuugcc

SEQ ID NO: 2810220 - RNA, 19 nt, Artificial Sequence
  Description of Artificial Sequence: Synthetic oligonucleotide
cuccgucccaucuucuagc

SEQ ID NO: 2810221 - RNA, 19 nt, Artificial Sequence
  Description of Artificial Sequence: Synthetic oligonucleotide
ugcagcuuccguuugccuu

SEQ ID NO: 2810222 - RNA, 19 nt, Artificial Sequence
  Description of Artificial Sequence: Synthetic oligonucleotide
augggacagugguccacgc

SEQ ID NO: 2810223 - RNA, 19 nt, Artificial Sequence
  Description of Artificial Sequence: Synthetic oligonucleotide
uccaaucugcagcuuccgu

SEQ ID NO: 2810224 - RNA, 19 nt, Artificial Sequence
  Description of Artificial Sequence: Synthetic oligonucleotide
aacaaagggcugguucugu

SEQ ID NO: 2810225 - RNA, 19 nt, Artificial Sequence
  Description of Artificial Sequence: Synthetic oligonucleotide
cuccucgcucuccauaccc

SEQ ID NO: 2810226 - RNA, 19 nt, Artificial Sequence
  Description of Artificial Sequence: Synthetic oligonucleotide
uguggccagggcacucagg

SEQ ID NO: 2810227 - RNA, 19 nt, Artificial Sequence
  Description of Artificial Sequence: Synthetic oligonucleotide
uucuagcuuccccguguag

SEQ ID NO: 2810228 - RNA, 19 nt, Artificial Sequence
  Description of Artificial Sequence: Synthetic oligonucleotide
uccucgcucuccauacccc

SEQ ID NO: 2810229 - RNA, 19 nt, Artificial Sequence
  Description of Artificial Sequence: Synthetic oligonucleotide
cucagacgggaucaccagc

SEQ ID NO: 2810230 - RNA, 19 nt, Artificial Sequence
  Description of Artificial Sequence: Synthetic oligonucleotide
ucgcucaaucuugagcagc

SEQ ID NO: 2810231 - RNA, 19 nt, Artificial Sequence
  Description of Artificial Sequence: Synthetic oligonucleotide
ucaggcaaauggacaguau

SEQ ID NO: 2810232 - RNA, 19 nt, Artificial Sequence
  Description of Artificial Sequence: Synthetic oligonucleotide
gggugaaacaaagggcugg

SEQ ID NO: 2810233 - RNA, 19 nt, Artificial Sequence
  Description of Artificial Sequence: Synthetic oligonucleotide
ucgcucuccauaccccagc

SEQ ID NO: 2810234 - RNA, 19 nt, Artificial Sequence
  Description of Artificial Sequence: Synthetic oligonucleotide
acagugguccacgcguuuc

SEQ ID NO: 2810235 - RNA, 19 nt, Artificial Sequence
  Description of Artificial Sequence: Synthetic oligonucleotide
uguuugcagccugcuacag

SEQ ID NO: 2810236 - RNA, 19 nt, Artificial Sequence
  Description of Artificial Sequence: Synthetic oligonucleotide
acuugaugggacagugguc

SEQ ID NO: 2810237 - RNA, 19 nt, Artificial Sequence
  Description of Artificial Sequence: Synthetic oligonucleotide
cacuccaaucugcagcuuc

SEQ ID NO: 2810238 - RNA, 19 nt, Artificial Sequence
  Description of Artificial Sequence: Synthetic oligonucleotide
gucucuguaggcacagccc

SEQ ID NO: 2810239 - RNA, 19 nt, Artificial Sequence
  Description of Artificial Sequence: Synthetic oligonucleotide
guguagugcaugugcaaga

SEQ ID NO: 2810240 - RNA, 19 nt, Artificial Sequence
  Description of Artificial Sequence: Synthetic oligonucleotide
acccggcucagccucaugu

SEQ ID NO: 2810241 - RNA, 19 nt, Artificial Sequence
  Description of Artificial Sequence: Synthetic oligonucleotide
caggguugcuccaccuggg

SEQ ID NO: 2810242 - RNA, 19 nt, Artificial Sequence
  Description of Artificial Sequence: Synthetic oligonucleotide
aacuccgucccaucuucua

SEQ ID NO: 2810243 - RNA, 19 nt, Artificial Sequence
  Description of Artificial Sequence: Synthetic oligonucleotide
uguaggcacagcccaccuc

SEQ ID NO: 2810244 - RNA, 19 nt, Artificial Sequence
  Description of Artificial Sequence: Synthetic oligonucleotide
agcuuccccguguagugca

SEQ ID NO: 2810245 - RNA, 19 nt, Artificial Sequence
  Description of Artificial Sequence: Synthetic oligonucleotide
aucuucuagcuuccccgug

SEQ ID NO: 2810246 - RNA, 19 nt, Artificial Sequence
  Description of Artificial Sequence: Synthetic oligonucleotide
gguugcuccaccugggauc

SEQ ID NO: 2810247 - RNA, 19 nt, Artificial Sequence
  Description of Artificial Sequence: Synthetic oligonucleotide
agacuugaugggacagugg

SEQ ID NO: 2810248 - RNA, 19 nt, Artificial Sequence
  Description of Artificial Sequence: Synthetic oligonucleotide
agugcaugugcaagacauc

SEQ ID NO: 2810249 - RNA, 19 nt, Artificial Sequence
  Description of Artificial Sequence: Synthetic oligonucleotide
ucccagcccuugaugaccu

SEQ ID NO: 2810250 - RNA, 19 nt, Artificial Sequence
  Description of Artificial Sequence: Synthetic oligonucleotide
uccgucccaucuucuagcu

SEQ ID NO: 2810251 - RNA, 19 nt, Artificial Sequence
  Description of Artificial Sequence: Synthetic oligonucleotide
ugucaaacuccgucccauc

SEQ ID NO: 2810252 - RNA, 19 nt, Artificial Sequence
  Description of Artificial Sequence: Synthetic oligonucleotide
cagcccuugaugaccuggc

SEQ ID NO: 2810253 - RNA, 19 nt, Artificial Sequence
  Description of Artificial Sequence: Synthetic oligonucleotide
uuccccguguagugcaugu

SEQ ID NO: 2810254 - RNA, 19 nt, Artificial Sequence
  Description of Artificial Sequence: Synthetic oligonucleotide
ugcuacaguucugaacguc

SEQ ID NO: 2810255 - RNA, 19 nt, Artificial Sequence
  Description of Artificial Sequence: Synthetic oligonucleotide
uugaugggacaguggucca

SEQ ID NO: 2810256 - RNA, 19 nt, Artificial Sequence
  Description of Artificial Sequence: Synthetic oligonucleotide
gcaaauggacaguauuguc

SEQ ID NO: 2810257 - RNA, 19 nt, Artificial Sequence
  Description of Artificial Sequence: Synthetic oligonucleotide
gucgcucaaucuugagcag

SEQ ID NO: 2810258 - RNA, 19 nt, Artificial Sequence
  Description of Artificial Sequence: Synthetic oligonucleotide
agcucagacgggaucacca

SEQ ID NO: 2810259 - RNA, 19 nt, Artificial Sequence
  Description of Artificial Sequence: Synthetic oligonucleotide
caguucugaacgucgcuca

SEQ ID NO: 2810260 - RNA, 19 nt, Artificial Sequence
  Description of Artificial Sequence: Synthetic oligonucleotide
accaggguugcuccaccug

SEQ ID NO: 2810261 - RNA, 19 nt, Artificial Sequence
  Description of Artificial Sequence: Synthetic oligonucleotide
uccacgcguuucuucacuc

SEQ ID NO: 2810262 - RNA, 19 nt, Artificial Sequence
  Description of Artificial Sequence: Synthetic oligonucleotide
gcagcuccaccucaaacac

SEQ ID NO: 2810263 - RNA, 19 nt, Artificial Sequence
  Description of Artificial Sequence: Synthetic oligonucleotide
caguauugucaggacccgg

SEQ ID NO: 2810264 - RNA, 19 nt, Artificial Sequence
  Description of Artificial Sequence: Synthetic oligonucleotide
ccgcuuuuccccuucacac

SEQ ID NO: 2810265 - RNA, 19 nt, Artificial Sequence
  Description of Artificial Sequence: Synthetic oligonucleotide
caaucuugagcagcuccac

SEQ ID NO: 2810266 - RNA, 19 nt, Artificial Sequence
  Description of Artificial Sequence: Synthetic oligonucleotide
ccaggguugcuccaccugg

SEQ ID NO: 2810267 - RNA, 19 nt, Artificial Sequence
  Description of Artificial Sequence: Synthetic oligonucleotide
aguucugaacgucgcucaa

SEQ ID NO: 2810268 - RNA, 19 nt, Artificial Sequence
  Description of Artificial Sequence: Synthetic oligonucleotide
uaccccagcucagacggga

SEQ ID NO: 2810269 - RNA, 19 nt, Artificial Sequence
  Description of Artificial Sequence: Synthetic oligonucleotide
cucgcucuccauaccccag

SEQ ID NO: 2810270 - RNA, 19 nt, Artificial Sequence
  Description of Artificial Sequence: Synthetic oligonucleotide
cucuguaggcacagcccac

SEQ ID NO: 2810271 - RNA, 19 nt, Artificial Sequence
  Description of Artificial Sequence: Synthetic oligonucleotide
uaggcacagcccaccuccc

SEQ ID NO: 2810272 - RNA, 19 nt, Artificial Sequence
  Description of Artificial Sequence: Synthetic oligonucleotide
guagugcaugugcaagaca

SEQ ID NO: 2810273 - RNA, 19 nt, Artificial Sequence
  Description of Artificial Sequence: Synthetic oligonucleotide
uuccgcuuuuccccuucac

SEQ ID NO: 2810274 - RNA, 19 nt, Artificial Sequence
  Description of Artificial Sequence: Synthetic oligonucleotide
ugaugggacagugguccac

SEQ ID NO: 2810275 - RNA, 19 nt, Artificial Sequence
  Description of Artificial Sequence: Synthetic oligonucleotide
cuccaaucugcagcuuccg

SEQ ID NO: 2810276 - RNA, 19 nt, Artificial Sequence
  Description of Artificial Sequence: Synthetic oligonucleotide
cgucccaucuucuagcuuc

SEQ ID NO: 2810277 - RNA, 19 nt, Artificial Sequence
  Description of Artificial Sequence: Synthetic oligonucleotide
agccccuggucccagcccu

SEQ ID NO: 2810278 - RNA, 19 nt, Artificial Sequence
  Description of Artificial Sequence: Synthetic oligonucleotide
augucucuguaggcacagc

SEQ ID NO: 2810279 - RNA, 19 nt, Artificial Sequence
  Description of Artificial Sequence: Synthetic oligonucleotide
cagccucaugucucuguag

SEQ ID NO: 2810280 - RNA, 19 nt, Artificial Sequence
  Description of Artificial Sequence: Synthetic oligonucleotide
gaugaccuggccagugcca

SEQ ID NO: 2810281 - RNA, 19 nt, Artificial Sequence
  Description of Artificial Sequence: Synthetic oligonucleotide
cgucgcucaaucuugagca

SEQ ID NO: 2810282 - RNA, 19 nt, Artificial Sequence
  Description of Artificial Sequence: Synthetic oligonucleotide
ccauaccccagcucagacg

SEQ ID NO: 2810283 - RNA, 19 nt, Artificial Sequence
  Description of Artificial Sequence: Synthetic oligonucleotide
gucccagcccuugaugacc

SEQ ID NO: 2810284 - RNA, 19 nt, Artificial Sequence
  Description of Artificial Sequence: Synthetic oligonucleotide
agggugaaacaaagggcug

SEQ ID NO: 2810285 - RNA, 19 nt, Artificial Sequence
  Description of Artificial Sequence: Synthetic oligonucleotide
gucaaacuccgucccaucu

SEQ ID NO: 2810286 - RNA, 19 nt, Artificial Sequence
  Description of Artificial Sequence: Synthetic oligonucleotide
uagcuuccccguguagugc

SEQ ID NO: 2810287 - RNA, 19 nt, Artificial Sequence
  Description of Artificial Sequence: Synthetic oligonucleotide
cacgcguuucuucacucca

SEQ ID NO: 2810288 - RNA, 19 nt, Artificial Sequence
  Description of Artificial Sequence: Synthetic oligonucleotide
cugugguaaacugcuguca

SEQ ID NO: 2810289 - RNA, 19 nt, Artificial Sequence
  Description of Artificial Sequence: Synthetic oligonucleotide
gggaucaccagcuuccgcu

SEQ ID NO: 2810290 - RNA, 19 nt, Artificial Sequence
  Description of Artificial Sequence: Synthetic oligonucleotide
caggacccggcucagccuc

SEQ ID NO: 2810291 - RNA, 19 nt, Artificial Sequence
  Description of Artificial Sequence: Synthetic oligonucleotide
aaacuccgucccaucuucu

SEQ ID NO: 2810292 - RNA, 19 nt, Artificial Sequence
  Description of Artificial Sequence: Synthetic oligonucleotide
gccaagggugaaacaaagg

SEQ ID NO: 2810293 - RNA, 19 nt, Artificial Sequence
  Description of Artificial Sequence: Synthetic oligonucleotide
ggcacucaggcaaauggac

SEQ ID NO: 2810294 - RNA, 19 nt, Artificial Sequence
  Description of Artificial Sequence: Synthetic oligonucleotide
gguucugugguaaacugcu

SEQ ID NO: 2810295 - RNA, 19 nt, Artificial Sequence
  Description of Artificial Sequence: Synthetic oligonucleotide
aucaccagcuuccgcuuuu

SEQ ID NO: 2810296 - RNA, 19 nt, Artificial Sequence
  Description of Artificial Sequence: Synthetic oligonucleotide
cuuuuccccuucacacauc

SEQ ID NO: 2810297 - RNA, 19 nt, Artificial Sequence
  Description of Artificial Sequence: Synthetic oligonucleotide
gcucagacgggaucaccag

SEQ ID NO: 2810298 - RNA, 19 nt, Artificial Sequence
  Description of Artificial Sequence: Synthetic oligonucleotide
aggguugcuccaccuggga

SEQ ID NO: 2810299 - RNA, 19 nt, Artificial Sequence
  Description of Artificial Sequence: Synthetic oligonucleotide
gugguaaacugcugucaaa

SEQ ID NO: 2810300 - RNA, 19 nt, Artificial Sequence
  Description of Artificial Sequence: Synthetic oligonucleotide
agcagccccuggucccagc

SEQ ID NO: 2810301 - RNA, 19 nt, Artificial Sequence
  Description of Artificial Sequence: Synthetic oligonucleotide
gcuuccguuugccuucggc

SEQ ID NO: 2810302 - RNA, 19 nt, Artificial Sequence
  Description of Artificial Sequence: Synthetic oligonucleotide
gcagcuuccguuugccuuc

SEQ ID NO: 2810303 - RNA, 19 nt, Artificial Sequence
  Description of Artificial Sequence: Synthetic oligonucleotide
ggcuccucgcucuccauac

SEQ ID NO: 2810304 - RNA, 19 nt, Artificial Sequence
  Description of Artificial Sequence: Synthetic oligonucleotide
acucaggcaaauggacagu

SEQ ID NO: 2810305 - RNA, 19 nt, Artificial Sequence
  Description of Artificial Sequence: Synthetic oligonucleotide
agggcugguucugugguaa

SEQ ID NO: 2810306 - RNA, 19 nt, Artificial Sequence
  Description of Artificial Sequence: Synthetic oligonucleotide
acgggaucaccagcuuccg

SEQ ID NO: 2810307 - RNA, 19 nt, Artificial Sequence
  Description of Artificial Sequence: Synthetic oligonucleotide
gccugcuacaguucugaac

SEQ ID NO: 2810308 - RNA, 19 nt, Artificial Sequence
  Description of Artificial Sequence: Synthetic oligonucleotide
gaacgucgcucaaucuuga

SEQ ID NO: 2810309 - RNA, 19 nt, Artificial Sequence
  Description of Artificial Sequence: Synthetic oligonucleotide
guucugugguaaacugcug

SEQ ID NO: 2810310 - RNA, 19 nt, Artificial Sequence
  Description of Artificial Sequence: Synthetic oligonucleotide
cccaucuucuagcuucccc

SEQ ID NO: 2810311 - RNA, 19 nt, Artificial Sequence
  Description of Artificial Sequence: Synthetic oligonucleotide
uggccagggcacucaggca

SEQ ID NO: 2810312 - RNA, 19 nt, Artificial Sequence
  Description of Artificial Sequence: Synthetic oligonucleotide
guauugucaggacccggcu

SEQ ID NO: 2810313 - RNA, 19 nt, Artificial Sequence
  Description of Artificial Sequence: Synthetic oligonucleotide
uugucaggacccggcucag

SEQ ID NO: 2810314 - RNA, 19 nt, Artificial Sequence
  Description of Artificial Sequence: Synthetic oligonucleotide
cugaacgucgcucaaucuu

SEQ ID NO: 2810315 - RNA, 19 nt, Artificial Sequence
  Description of Artificial Sequence: Synthetic oligonucleotide
gguaaacugcugucaaacu

SEQ ID NO: 2810316 - RNA, 19 nt, Artificial Sequence
  Description of Artificial Sequence: Synthetic oligonucleotide
ccccuuucuagacuugaug

SEQ ID NO: 2810317 - RNA, 19 nt, Artificial Sequence
  Description of Artificial Sequence: Synthetic oligonucleotide
caaucugcagcuuccguuu

SEQ ID NO: 2810318 - RNA, 19 nt, Artificial Sequence
  Description of Artificial Sequence: Synthetic oligonucleotide
gugguccacgcguuucuuc

SEQ ID NO: 2810319 - RNA, 19 nt, Artificial Sequence
  Description of Artificial Sequence: Synthetic oligonucleotide
gucccaucuucuagcuucc

SEQ ID NO: 2810320 - RNA, 19 nt, Artificial Sequence
  Description of Artificial Sequence: Synthetic oligonucleotide
augaccuggccagugccaa

SEQ ID NO: 2810321 - RNA, 19 nt, Artificial Sequence
  Description of Artificial Sequence: Synthetic oligonucleotide
caccagcuuccgcuuuucc

SEQ ID NO: 2810322 - RNA, 19 nt, Artificial Sequence
  Description of Artificial Sequence: Synthetic oligonucleotide
gggacagugguccacgcgu

SEQ ID NO: 2810323 - RNA, 19 nt, Artificial Sequence
  Description of Artificial Sequence: Synthetic oligonucleotide
ggcaaauggacaguauugu

SEQ ID NO: 2810324 - RNA, 19 nt, Artificial Sequence
  Description of Artificial Sequence: Synthetic oligonucleotide
aacugcugucaaacuccgu

SEQ ID NO: 2810325 - RNA, 19 nt, Artificial Sequence
  Description of Artificial Sequence: Synthetic oligonucleotide
cguguagugcaugugcaag

SEQ ID NO: 2810326 - RNA, 19 nt, Artificial Sequence
  Description of Artificial Sequence: Synthetic oligonucleotide
caggcaaauggacaguauu

SEQ ID NO: 2810327 - RNA, 19 nt, Artificial Sequence
  Description of Artificial Sequence: Synthetic oligonucleotide
cguuucuucacuccaaucu

SEQ ID NO: 2810328 - RNA, 19 nt, Artificial Sequence
  Description of Artificial Sequence: Synthetic oligonucleotide
uccccguguagugcaugug

SEQ ID NO: 2810329 - RNA, 19 nt, Artificial Sequence
  Description of Artificial Sequence: Synthetic oligonucleotide
cucaggcaaauggacagua

SEQ ID NO: 2810330 - RNA, 19 nt, Artificial Sequence
  Description of Artificial Sequence: Synthetic oligonucleotide
ugucaggacccggcucagc

SEQ ID NO: 2810331 - RNA, 19 nt, Artificial Sequence
  Description of Artificial Sequence: Synthetic oligonucleotide
guuugcagccugcuacagu

SEQ ID NO: 2810332 - RNA, 19 nt, Artificial Sequence
  Description of Artificial Sequence: Synthetic oligonucleotide
ccuucacacauccccagca

SEQ ID NO: 2810333 - RNA, 19 nt, Artificial Sequence
  Description of Artificial Sequence: Synthetic oligonucleotide
guugcuccaccugggaucu

SEQ ID NO: 2810334 - RNA, 19 nt, Artificial Sequence
  Description of Artificial Sequence: Synthetic oligonucleotide
cagcucagacgggaucacc

SEQ ID NO: 2810335 - RNA, 19 nt, Artificial Sequence
  Description of Artificial Sequence: Synthetic oligonucleotide
ccagcccuugaugaccugg

SEQ ID NO: 2810336 - RNA, 19 nt, Artificial Sequence
  Description of Artificial Sequence: Synthetic oligonucleotide
cagcccaccuccccucaac

SEQ ID NO: 2810337 - RNA, 19 nt, Artificial Sequence
  Description of Artificial Sequence: Synthetic oligonucleotide
gugccaagggugaaacaaa

SEQ ID NO: 2810338 - RNA, 19 nt, Artificial Sequence
  Description of Artificial Sequence: Synthetic oligonucleotide
caucuucuagcuuccccgu

SEQ ID NO: 2810339 - RNA, 19 nt, Artificial Sequence
  Description of Artificial Sequence: Synthetic oligonucleotide
ucccaucuucuagcuuccc

SEQ ID NO: 2810340 - RNA, 19 nt, Artificial Sequence
  Description of Artificial Sequence: Synthetic oligonucleotide
ggucccagcccuugaugac

SEQ ID NO: 2810341 - RNA, 19 nt, Artificial Sequence
  Description of Artificial Sequence: Synthetic oligonucleotide
ccagugccaagggugaaac

SEQ ID NO: 2810342 - RNA, 19 nt, Artificial Sequence
  Description of Artificial Sequence: Synthetic oligonucleotide
ccacgcguuucuucacucc

SEQ ID NO: 2810343 - RNA, 19 nt, Artificial Sequence
  Description of Artificial Sequence: Synthetic oligonucleotide
cuuccccguguagugcaug

SEQ ID NO: 2810344 - RNA, 19 nt, Artificial Sequence
  Description of Artificial Sequence: Synthetic oligonucleotide
gcacucaggcaaauggaca

SEQ ID NO: 2810345 - RNA, 19 nt, Artificial Sequence
  Description of Artificial Sequence: Synthetic oligonucleotide
cagcuuccguuugccuucg

SEQ ID NO: 2810346 - RNA, 19 nt, Artificial Sequence
  Description of Artificial Sequence: Synthetic oligonucleotide
cuucuagcuuccccgugua

SEQ ID NO: 2810347 - RNA, 19 nt, Artificial Sequence
  Description of Artificial Sequence: Synthetic oligonucleotide
agcuuccguuugccuucgg

SEQ ID NO: 2810348 - RNA, 19 nt, Artificial Sequence
  Description of Artificial Sequence: Synthetic oligonucleotide
gcuuuuccccuucacacau

SEQ ID NO: 2810349 - RNA, 19 nt, Artificial Sequence
  Description of Artificial Sequence: Synthetic oligonucleotide
gcguuucuucacuccaauc

SEQ ID NO: 2810350 - RNA, 19 nt, Artificial Sequence
  Description of Artificial Sequence: Synthetic oligonucleotide
agccugcuacaguucugaa

SEQ ID NO: 2810351 - RNA, 19 nt, Artificial Sequence
  Description of Artificial Sequence: Synthetic oligonucleotide
gcugucaaacuccguccca

SEQ ID NO: 2810352 - RNA, 19 nt, Artificial Sequence
  Description of Artificial Sequence: Synthetic oligonucleotide
auaccccagcucagacggg

SEQ ID NO: 2810353 - RNA, 19 nt, Artificial Sequence
  Description of Artificial Sequence: Synthetic oligonucleotide
cagggcacucaggcaaaug

SEQ ID NO: 2810354 - RNA, 19 nt, Artificial Sequence
  Description of Artificial Sequence: Synthetic oligonucleotide
caccucaaacaccaggguu

SEQ ID NO: 2810355 - RNA, 19 nt, Artificial Sequence
  Description of Artificial Sequence: Synthetic oligonucleotide
gcagccccuggucccagcc

SEQ ID NO: 2810356 - RNA, 19 nt, Artificial Sequence
  Description of Artificial Sequence: Synthetic oligonucleotide
ggcugguucugugguaaac

SEQ ID NO: 2810357 - RNA, 19 nt, Artificial Sequence
  Description of Artificial Sequence: Synthetic oligonucleotide
cccuucacacauccccagc

SEQ ID NO: 2810358 - RNA, 19 nt, Artificial Sequence
  Description of Artificial Sequence: Synthetic oligonucleotide
cuagacuugaugggacagu

SEQ ID NO: 2810359 - RNA, 19 nt, Artificial Sequence
  Description of Artificial Sequence: Synthetic oligonucleotide
gguccacgcguuucuucac

SEQ ID NO: 2810360 - RNA, 19 nt, Artificial Sequence
  Description of Artificial Sequence: Synthetic oligonucleotide
cuccauaccccagcucaga

SEQ ID NO: 2810361 - RNA, 19 nt, Artificial Sequence
  Description of Artificial Sequence: Synthetic oligonucleotide
cagugccaagggugaaaca

SEQ ID NO: 2810362 - RNA, 19 nt, Artificial Sequence
  Description of Artificial Sequence: Synthetic oligonucleotide
gggcacucaggcaaaugga

SEQ ID NO: 2810363 - RNA, 19 nt, Artificial Sequence
  Description of Artificial Sequence: Synthetic oligonucleotide
ccccuucacacauccccag

SEQ ID NO: 2810364 - RNA, 19 nt, Artificial Sequence
  Description of Artificial Sequence: Synthetic oligonucleotide
ggugaaacaaagggcuggu

SEQ ID NO: 2810365 - RNA, 19 nt, Artificial Sequence
  Description of Artificial Sequence: Synthetic oligonucleotide
cccguguagugcaugugca

SEQ ID NO: 2810366 - RNA, 19 nt, Artificial Sequence
  Description of Artificial Sequence: Synthetic oligonucleotide
cuuccgcuuuuccccuuca

SEQ ID NO: 2810367 - RNA, 19 nt, Artificial Sequence
  Description of Artificial Sequence: Synthetic oligonucleotide
acauccccagcagccccug

SEQ ID NO: 2810368 - RNA, 19 nt, Artificial Sequence
  Description of Artificial Sequence: Synthetic oligonucleotide
guccacgcguuucuucacu

SEQ ID NO: 2810369 - RNA, 19 nt, Artificial Sequence
  Description of Artificial Sequence: Synthetic oligonucleotide
gcugguucugugguaaacu

SEQ ID NO: 2810370 - RNA, 19 nt, Artificial Sequence
  Description of Artificial Sequence: Synthetic oligonucleotide
agugguccacgcguuucuu

SEQ ID NO: 2810371 - RNA, 19 nt, Artificial Sequence
  Description of Artificial Sequence: Synthetic oligonucleotide
acgcguuucuucacuccaa

SEQ ID NO: 2810372 - RNA, 19 nt, Artificial Sequence
  Description of Artificial Sequence: Synthetic oligonucleotide
gacccggcucagccucaug

SEQ ID NO: 2810373 - RNA, 19 nt, Artificial Sequence
  Description of Artificial Sequence: Synthetic oligonucleotide
gcuccucgcucuccauacc

SEQ ID NO: 2810374 - RNA, 19 nt, Artificial Sequence
  Description of Artificial Sequence: Synthetic oligonucleotide
gaucaccagcuuccgcuuu

SEQ ID NO: 2810375 - RNA, 19 nt, Artificial Sequence
  Description of Artificial Sequence: Synthetic oligonucleotide
gcuuccgcuuuuccccuuc

SEQ ID NO: 2810376 - RNA, 19 nt, Artificial Sequence
  Description of Artificial Sequence: Synthetic oligonucleotide
cugucaaacuccgucccau

SEQ ID NO: 2810377 - RNA, 19 nt, Artificial Sequence
  Description of Artificial Sequence: Synthetic oligonucleotide
gacagugguccacgcguuu

SEQ ID NO: 2810378 - RNA, 19 nt, Artificial Sequence
  Description of Artificial Sequence: Synthetic oligonucleotide
uggcuguggccagggcacu

SEQ ID NO: 2810379 - RNA, 19 nt, Artificial Sequence
  Description of Artificial Sequence: Synthetic oligonucleotide
guucugaacgucgcucaau

SEQ ID NO: 2810380 - RNA, 19 nt, Artificial Sequence
  Description of Artificial Sequence: Synthetic oligonucleotide
cccagcucagacgggauca

SEQ ID NO: 2810381 - RNA, 19 nt, Artificial Sequence
  Description of Artificial Sequence: Synthetic oligonucleotide
agcuuccgcuuuuccccuu

SEQ ID NO: 2810382 - RNA, 19 nt, Artificial Sequence
  Description of Artificial Sequence: Synthetic oligonucleotide
ccaaucugcagcuuccguu

SEQ ID NO: 2810383 - RNA, 19 nt, Artificial Sequence
  Description of Artificial Sequence: Synthetic oligonucleotide
cagugguccacgcguuucu

SEQ ID NO: 2810384 - RNA, 19 nt, Artificial Sequence
  Description of Artificial Sequence: Synthetic oligonucleotide
gcucuccauaccccagcuc

SEQ ID NO: 2810385 - RNA, 19 nt, Artificial Sequence
  Description of Artificial Sequence: Synthetic oligonucleotide
cugcuacaguucugaacgu

SEQ ID NO: 2810386 - RNA, 19 nt, Artificial Sequence
  Description of Artificial Sequence: Synthetic oligonucleotide
cuguaggcacagcccaccu

SEQ ID NO: 2810387 - RNA, 19 nt, Artificial Sequence
  Description of Artificial Sequence: Synthetic oligonucleotide
ccucgcucuccauacccca

SEQ ID NO: 2810388 - RNA, 19 nt, Artificial Sequence
  Description of Artificial Sequence: Synthetic oligonucleotide
cccggcucagccucauguc

SEQ ID NO: 2810389 - RNA, 19 nt, Artificial Sequence
  Description of Artificial Sequence: Synthetic oligonucleotide
cagcuuccgcuuuuccccu

SEQ ID NO: 2810390 - RNA, 19 nt, Artificial Sequence
  Description of Artificial Sequence: Synthetic oligonucleotide
cgcuuuuccccuucacaca

SEQ ID NO: 2810391 - RNA, 19 nt, Artificial Sequence
  Description of Artificial Sequence: Synthetic oligonucleotide
gcuguggccagggcacuca

SEQ ID NO: 2810392 - RNA, 19 nt, Artificial Sequence
  Description of Artificial Sequence: Synthetic oligonucleotide
gcucaaucuugagcagcuc

SEQ ID NO: 2810393 - RNA, 19 nt, Artificial Sequence
  Description of Artificial Sequence: Synthetic oligonucleotide
caccaggguugcuccaccu

SEQ ID NO: 2810394 - RNA, 19 nt, Artificial Sequence
  Description of Artificial Sequence: Synthetic oligonucleotide
ggaucaccagcuuccgcuu

SEQ ID NO: 2810395 - RNA, 19 nt, Artificial Sequence
  Description of Artificial Sequence: Synthetic oligonucleotide
ccguguagugcaugugcaa

SEQ ID NO: 2810396 - RNA, 19 nt, Artificial Sequence
  Description of Artificial Sequence: Synthetic oligonucleotide
cugcagcuuccguuugccu

SEQ ID NO: 2810397 - RNA, 19 nt, Artificial Sequence
  Description of Artificial Sequence: Synthetic oligonucleotide
ccuuggcuguggccagggc

SEQ ID NO: 2810398 - RNA, 19 nt, Artificial Sequence
  Description of Artificial Sequence: Synthetic oligonucleotide
ggguugcuccaccugggau

SEQ ID NO: 2810399 - RNA, 19 nt, Artificial Sequence
  Description of Artificial Sequence: Synthetic oligonucleotide
ccccagcucagacgggauc

SEQ ID NO: 2810400 - RNA, 19 nt, Artificial Sequence
  Description of Artificial Sequence: Synthetic oligonucleotide
gugaaacaaagggcugguu

SEQ ID NO: 2810401 - RNA, 19 nt, Artificial Sequence
  Description of Artificial Sequence: Synthetic oligonucleotide
accccagcucagacgggau

SEQ ID NO: 2810402 - RNA, 19 nt, Artificial Sequence
  Description of Artificial Sequence: Synthetic oligonucleotide
aggacccggcucagccuca

SEQ ID NO: 2810403 - RNA, 19 nt, Artificial Sequence
  Description of Artificial Sequence: Synthetic oligonucleotide
gccagugccaagggugaaa

SEQ ID NO: 2810404 - RNA, 19 nt, Artificial Sequence
  Description of Artificial Sequence: Synthetic oligonucleotide
ccagcucagacgggaucac

SEQ ID NO: 2810405 - RNA, 19 nt, Artificial Sequence
  Description of Artificial Sequence: Synthetic oligonucleotide
cagcagccccuggucccag

SEQ ID NO: 2810406 - RNA, 19 nt, Artificial Sequence
  Description of Artificial Sequence: Synthetic oligonucleotide
cgggaucaccagcuuccgc

SEQ ID NO: 2810407 - RNA, 19 nt, Artificial Sequence
  Description of Artificial Sequence: Synthetic oligonucleotide
gggcuccucgcucuccaua

SEQ ID NO: 2810408 - RNA, 19 nt, Artificial Sequence
  Description of Artificial Sequence: Synthetic oligonucleotide
cgcucaaucuugagcagcu

SEQ ID NO: 2810409 - RNA, 19 nt, Artificial Sequence
  Description of Artificial Sequence: Synthetic oligonucleotide
gggcugguucugugguaaa

SEQ ID NO: 2810410 - RNA, 19 nt, Artificial Sequence
  Description of Artificial Sequence: Synthetic oligonucleotide
ccggcucagccucaugucu

SEQ ID NO: 2810411 - RNA, 19 nt, Artificial Sequence
  Description of Artificial Sequence: Synthetic oligonucleotide
ccaccucaaacaccagggu

SEQ ID NO: 2810412 - RNA, 19 nt, Artificial Sequence
  Description of Artificial Sequence: Synthetic oligonucleotide
cagacgggaucaccagcuu

SEQ ID NO: 2810413 - RNA, 19 nt, Artificial Sequence
  Description of Artificial Sequence: Synthetic oligonucleotide
cucaaacaccaggguugcu

SEQ ID NO: 2810414 - RNA, 19 nt, Artificial Sequence
  Description of Artificial Sequence: Synthetic oligonucleotide
ccccuuggcuguggccagg

SEQ ID NO: 2810415 - RNA, 19 nt, Artificial Sequence
  Description of Artificial Sequence: Synthetic oligonucleotide
cccagcccuugaugaccug

SEQ ID NO: 2810416 - RNA, 19 nt, Artificial Sequence
  Description of Artificial Sequence: Synthetic oligonucleotide
ccuggccagugccaagggu

SEQ ID NO: 2810417 - RNA, 19 nt, Artificial Sequence
  Description of Artificial Sequence: Synthetic oligonucleotide
ggacagugguccacgcguu

SEQ ID NO: 2810418 - RNA, 19 nt, Artificial Sequence
  Description of Artificial Sequence: Synthetic oligonucleotide
ccccuggucccagcccuug

SEQ ID NO: 2810419 - RNA, 19 nt, Artificial Sequence
  Description of Artificial Sequence: Synthetic oligonucleotide
ggccagugccaagggugaa

SEQ ID NO: 2810420 - RNA, 19 nt, Artificial Sequence
  Description of Artificial Sequence: Synthetic oligonucleotide
cccuggucccagcccuuga

SEQ ID NO: 2810421 - RNA, 19 nt, Artificial Sequence
  Description of Artificial Sequence: Synthetic oligonucleotide
cgcguuucuucacuccaau

SEQ ID NO: 2810422 - RNA, 19 nt, Artificial Sequence
  Description of Artificial Sequence: Synthetic oligonucleotide
ccuugaugaccuggccagu

SEQ ID NO: 2810423 - RNA, 19 nt, Artificial Sequence
  Description of Artificial Sequence: Synthetic oligonucleotide
gcuuccccguguagugcau

SEQ ID NO: 2810424 - RNA, 19 nt, Artificial Sequence
  Description of Artificial Sequence: Synthetic oligonucleotide
ggacccggcucagccucau

SEQ ID NO: 2810425 - RNA, 19 nt, Artificial Sequence
  Description of Artificial Sequence: Synthetic oligonucleotide
ccgucccaucuucuagcuu

SEQ ID NO: 2810426 - RNA, 19 nt, Artificial Sequence
  Description of Artificial Sequence: Synthetic oligonucleotide
ccagggcacucaggcaaau

SEQ ID NO: 2810427 - RNA, 19 nt, Artificial Sequence
  Description of Artificial Sequence: Synthetic oligonucleotide
gccccuggucccagcccuu

SEQ ID NO: 2810428 - RNA, 19 nt, Artificial Sequence
  Description of Artificial Sequence: Synthetic oligonucleotide
aauugcuucagccuuuccc

SEQ ID NO: 2810429 - RNA, 19 nt, Artificial Sequence
  Description of Artificial Sequence: Synthetic oligonucleotide
uuuucuguggaucuuagug

SEQ ID NO: 2810430 - RNA, 19 nt, Artificial Sequence
  Description of Artificial Sequence: Synthetic oligonucleotide
guugcaauagcucugguag

SEQ ID NO: 2810431 - RNA, 19 nt, Artificial Sequence
  Description of Artificial Sequence: Synthetic oligonucleotide
uguguuagcucuaucuagg

SEQ ID NO: 2810432 - RNA, 19 nt, Artificial Sequence
  Description of Artificial Sequence: Synthetic oligonucleotide
aagaccaacugacagcauc

SEQ ID NO: 2810433 - RNA, 19 nt, Artificial Sequence
  Description of Artificial Sequence: Synthetic oligonucleotide
augaccaggguguagaggg

SEQ ID NO: 2810434 - RNA, 19 nt, Artificial Sequence
  Description of Artificial Sequence: Synthetic oligonucleotide
uguucuucagcacuggggc

SEQ ID NO: 2810435 - RNA, 19 nt, Artificial Sequence
  Description of Artificial Sequence: Synthetic oligonucleotide
ugaguaggaguucagacga

SEQ ID NO: 2810436 - RNA, 19 nt, Artificial Sequence
  Description of Artificial Sequence: Synthetic oligonucleotide
ucugguaaaacugggaugc

SEQ ID NO: 2810437 - RNA, 19 nt, Artificial Sequence
  Description of Artificial Sequence: Synthetic oligonucleotide
uuuuacuucuggguaaucg

SEQ ID NO: 2810438 - RNA, 19 nt, Artificial Sequence
  Description of Artificial Sequence: Synthetic oligonucleotide
aaguguguuagcucuaucu

SEQ ID NO: 2810439 - RNA, 19 nt, Artificial Sequence
  Description of Artificial Sequence: Synthetic oligonucleotide
cuuacaagaaguguguuag

SEQ ID NO: 2810440 - RNA, 19 nt, Artificial Sequence
  Description of Artificial Sequence: Synthetic oligonucleotide
ugcucuuacaagaagugug

SEQ ID NO: 2810441 - RNA, 19 nt, Artificial Sequence
  Description of Artificial Sequence: Synthetic oligonucleotide
aaggccuucagaccgcugg

SEQ ID NO: 2810442 - RNA, 19 nt, Artificial Sequence
  Description of Artificial Sequence: Synthetic oligonucleotide
uucuguaauugcuucagcc

SEQ ID NO: 2810443 - RNA, 19 nt, Artificial Sequence
  Description of Artificial Sequence: Synthetic oligonucleotide
ucuuagugcucuuacaaga

SEQ ID NO: 2810444 - RNA, 19 nt, Artificial Sequence
  Description of Artificial Sequence: Synthetic oligonucleotide
uuucuguggaucuuagugc

SEQ ID NO: 2810445 - RNA, 19 nt, Artificial Sequence
  Description of Artificial Sequence: Synthetic oligonucleotide
ucaggagcuuuucucaggg

SEQ ID NO: 2810446 - RNA, 19 nt, Artificial Sequence
  Description of Artificial Sequence: Synthetic oligonucleotide
aaacugggaugccuuuugc

SEQ ID NO: 2810447 - RNA, 19 nt, Artificial Sequence
  Description of Artificial Sequence: Synthetic oligonucleotide
aaaacugggaugccuuuug

SEQ ID NO: 2810448 - RNA, 19 nt, Artificial Sequence
  Description of Artificial Sequence: Synthetic oligonucleotide
aggagcuuuucucagggcg

SEQ ID NO: 2810449 - RNA, 19 nt, Artificial Sequence
  Description of Artificial Sequence: Synthetic oligonucleotide
cacacacacacacacaggg

SEQ ID NO: 2810450 - RNA, 19 nt, Artificial Sequence
  Description of Artificial Sequence: Synthetic oligonucleotide
uuuacuucuggguaaucga

SEQ ID NO: 2810451 - RNA, 19 nt, Artificial Sequence
  Description of Artificial Sequence: Synthetic oligonucleotide
uuucugguaaaacugggau

SEQ ID NO: 2810452 - RNA, 19 nt, Artificial Sequence
  Description of Artificial Sequence: Synthetic oligonucleotide
aauugucucaguucuucca

SEQ ID NO: 2810453 - RNA, 19 nt, Artificial Sequence
  Description of Artificial Sequence: Synthetic oligonucleotide
agcucuaucuagguuaccc

SEQ ID NO: 2810454 - RNA, 19 nt, Artificial Sequence
  Description of Artificial Sequence: Synthetic oligonucleotide
ugccuuuugcaguacaucc

SEQ ID NO: 2810455 - RNA, 19 nt, Artificial Sequence
  Description of Artificial Sequence: Synthetic oligonucleotide
cugaguaggaguucagacg

SEQ ID NO: 2810456 - RNA, 19 nt, Artificial Sequence
  Description of Artificial Sequence: Synthetic oligonucleotide
aaucgaugaggucugagua

SEQ ID NO: 2810457 - RNA, 19 nt, Artificial Sequence
  Description of Artificial Sequence: Synthetic oligonucleotide
ucuguaauugcuucagccu

SEQ ID NO: 2810458 - RNA, 19 nt, Artificial Sequence
  Description of Artificial Sequence: Synthetic oligonucleotide
uuuucuguaauugcuucag

SEQ ID NO: 2810459 - RNA, 19 nt, Artificial Sequence
  Description of Artificial Sequence: Synthetic oligonucleotide
uggguaaucgaugaggucu

SEQ ID NO: 2810460 - RNA, 19 nt, Artificial Sequence
  Description of Artificial Sequence: Synthetic oligonucleotide
uuugcaguacauccgcuug

SEQ ID NO: 2810461 - RNA, 19 nt, Artificial Sequence
  Description of Artificial Sequence: Synthetic oligonucleotide
ucugaguaggaguucagac

SEQ ID NO: 2810462 - RNA, 19 nt, Artificial Sequence
  Description of Artificial Sequence: Synthetic oligonucleotide
uucuggguaaucgaugagg

SEQ ID NO: 2810463 - RNA, 19 nt, Artificial Sequence
  Description of Artificial Sequence: Synthetic oligonucleotide
acaagaaguguguuagcuc

SEQ ID NO: 2810464 - RNA, 19 nt, Artificial Sequence
  Description of Artificial Sequence: Synthetic oligonucleotide
acugacagcaucguuuuac

SEQ ID NO: 2810465 - RNA, 19 nt, Artificial Sequence
  Description of Artificial Sequence: Synthetic oligonucleotide
ucagccuuucccuguaacg

SEQ ID NO: 2810466 - RNA, 19 nt, Artificial Sequence
  Description of Artificial Sequence: Synthetic oligonucleotide
gacagcaucguuuuacuuc

SEQ ID NO: 2810467 - RNA, 19 nt, Artificial Sequence
  Description of Artificial Sequence: Synthetic oligonucleotide
acugggaugccuuuugcag

SEQ ID NO: 2810468 - RNA, 19 nt, Artificial Sequence
  Description of Artificial Sequence: Synthetic oligonucleotide
uacuccaugguuaauuguc

SEQ ID NO: 2810469 - RNA, 19 nt, Artificial Sequence
  Description of Artificial Sequence: Synthetic oligonucleotide
uguacuccaugguuaauug

SEQ ID NO: 2810470 - RNA, 19 nt, Artificial Sequence
  Description of Artificial Sequence: Synthetic oligonucleotide
uuuucugguaaaacuggga

SEQ ID NO: 2810471 - RNA, 19 nt, Artificial Sequence
  Description of Artificial Sequence: Synthetic oligonucleotide
uuagugcucuuacaagaag

SEQ ID NO: 2810472 - RNA, 19 nt, Artificial Sequence
  Description of Artificial Sequence: Synthetic oligonucleotide
cuggugauauuccuggagg

SEQ ID NO: 2810473 - RNA, 19 nt, Artificial Sequence
  Description of Artificial Sequence: Synthetic oligonucleotide
ucuggguaaucgaugaggu

SEQ ID NO: 2810474 - RNA, 19 nt, Artificial Sequence
  Description of Artificial Sequence: Synthetic oligonucleotide
ugaucaggagcuuuucuca

SEQ ID NO: 2810475 - RNA, 19 nt, Artificial Sequence
  Description of Artificial Sequence: Synthetic oligonucleotide
agcuucuucucccauuuuc

SEQ ID NO: 2810476 - RNA, 19 nt, Artificial Sequence
  Description of Artificial Sequence: Synthetic oligonucleotide
cacacacacacacacacag

SEQ ID NO: 2810477 - RNA, 19 nt, Artificial Sequence
  Description of Artificial Sequence: Synthetic oligonucleotide
aguacauccgcuugaucag

SEQ ID NO: 2810478 - RNA, 19 nt, Artificial Sequence
  Description of Artificial Sequence: Synthetic oligonucleotide
ucuuguuuucuguggaucu

SEQ ID NO: 2810479 - RNA, 19 nt, Artificial Sequence
  Description of Artificial Sequence: Synthetic oligonucleotide
uagugcucuuacaagaagu

SEQ ID NO: 2810480 - RNA, 19 nt, Artificial Sequence
  Description of Artificial Sequence: Synthetic oligonucleotide
agcauuuccgguuuucugu

SEQ ID NO: 2810481 - RNA, 19 nt, Artificial Sequence
  Description of Artificial Sequence: Synthetic oligonucleotide
guuagcucuaucuagguua

SEQ ID NO: 2810482 - RNA, 19 nt, Artificial Sequence
  Description of Artificial Sequence: Synthetic oligonucleotide
aucuucucuaggcugucac

SEQ ID NO: 2810483 - RNA, 19 nt, Artificial Sequence
  Description of Artificial Sequence: Synthetic oligonucleotide
uugccgaagaccaacugac

SEQ ID NO: 2810484 - RNA, 19 nt, Artificial Sequence
  Description of Artificial Sequence: Synthetic oligonucleotide
acagcaucguuuuacuucu

SEQ ID NO: 2810485 - RNA, 19 nt, Artificial Sequence
  Description of Artificial Sequence: Synthetic oligonucleotide
uguaacggcacaugaccag

SEQ ID NO: 2810486 - RNA, 19 nt, Artificial Sequence
  Description of Artificial Sequence: Synthetic oligonucleotide
uaaucgaugaggucugagu

SEQ ID NO: 2810487 - RNA, 19 nt, Artificial Sequence
  Description of Artificial Sequence: Synthetic oligonucleotide
aguucagacgacuuuugcu

SEQ ID NO: 2810488 - RNA, 19 nt, Artificial Sequence
  Description of Artificial Sequence: Synthetic oligonucleotide
gaucuuagugcucuuacaa

SEQ ID NO: 2810489 - RNA, 19 nt, Artificial Sequence
  Description of Artificial Sequence: Synthetic oligonucleotide
uucugguaaaacugggaug

SEQ ID NO: 2810490 - RNA, 19 nt, Artificial Sequence
  Description of Artificial Sequence: Synthetic oligonucleotide
caguacauccgcuugauca

SEQ ID NO: 2810491 - RNA, 19 nt, Artificial Sequence
  Description of Artificial Sequence: Synthetic oligonucleotide
ucgaugaggucugaguagg

SEQ ID NO: 2810492 - RNA, 19 nt, Artificial Sequence
  Description of Artificial Sequence: Synthetic oligonucleotide
uucuguggaucuuagugcu

SEQ ID NO: 2810493 - RNA, 19 nt, Artificial Sequence
  Description of Artificial Sequence: Synthetic oligonucleotide
uacaagaaguguguuagcu

SEQ ID NO: 2810494 - RNA, 19 nt, Artificial Sequence
  Description of Artificial Sequence: Synthetic oligonucleotide
uguuuucuguggaucuuag

SEQ ID NO: 2810495 - RNA, 19 nt, Artificial Sequence
  Description of Artificial Sequence: Synthetic oligonucleotide
aucuuagugcucuuacaag

SEQ ID NO: 2810496 - RNA, 19 nt, Artificial Sequence
  Description of Artificial Sequence: Synthetic oligonucleotide
uuaauugucucaguucuuc

SEQ ID NO: 2810497 - RNA, 19 nt, Artificial Sequence
  Description of Artificial Sequence: Synthetic oligonucleotide
aguucuuccaucuucucua

SEQ ID NO: 2810498 - RNA, 19 nt, Artificial Sequence
  Description of Artificial Sequence: Synthetic oligonucleotide
cacacacacacacacacac

SEQ ID NO: 2810499 - RNA, 19 nt, Artificial Sequence
  Description of Artificial Sequence: Synthetic oligonucleotide
agcaucguuuuacuucugg

SEQ ID NO: 2810500 - RNA, 19 nt, Artificial Sequence
  Description of Artificial Sequence: Synthetic oligonucleotide
uggcgcauguacuccaugg

SEQ ID NO: 2810501 - RNA, 19 nt, Artificial Sequence
  Description of Artificial Sequence: Synthetic oligonucleotide
ugcaauagcucugguagag

SEQ ID NO: 2810502 - RNA, 19 nt, Artificial Sequence
  Description of Artificial Sequence: Synthetic oligonucleotide
guguguuagcucuaucuag

SEQ ID NO: 2810503 - RNA, 19 nt, Artificial Sequence
  Description of Artificial Sequence: Synthetic oligonucleotide
ucucaguucuuccaucuuc

SEQ ID NO: 2810504 - RNA, 19 nt, Artificial Sequence
  Description of Artificial Sequence: Synthetic oligonucleotide
uaauugucucaguucuucc

SEQ ID NO: 2810505 - RNA, 19 nt, Artificial Sequence
  Description of Artificial Sequence: Synthetic oligonucleotide
uuagcucuaucuagguuac

SEQ ID NO: 2810506 - RNA, 19 nt, Artificial Sequence
  Description of Artificial Sequence: Synthetic oligonucleotide
agccuuucccuguaacggc

SEQ ID NO: 2810507 - RNA, 19 nt, Artificial Sequence
  Description of Artificial Sequence: Synthetic oligonucleotide
aucgaugaggucugaguag

SEQ ID NO: 2810508 - RNA, 19 nt, Artificial Sequence
  Description of Artificial Sequence: Synthetic oligonucleotide
uggaucuuagugcucuuac

SEQ ID NO: 2810509 - RNA, 19 nt, Artificial Sequence
  Description of Artificial Sequence: Synthetic oligonucleotide
cagcaaggccuucagaccg

SEQ ID NO: 2810510 - RNA, 19 nt, Artificial Sequence
  Description of Artificial Sequence: Synthetic oligonucleotide
uccaugguuaauugucuca

SEQ ID NO: 2810511 - RNA, 19 nt, Artificial Sequence
  Description of Artificial Sequence: Synthetic oligonucleotide
uacuucuggguaaucgaug

SEQ ID NO: 2810512 - RNA, 19 nt, Artificial Sequence
  Description of Artificial Sequence: Synthetic oligonucleotide
gaucaggagcuuuucucag

SEQ ID NO: 2810513 - RNA, 19 nt, Artificial Sequence
  Description of Artificial Sequence: Synthetic oligonucleotide
uccgguuuucuguaauugc

SEQ ID NO: 2810514 - RNA, 19 nt, Artificial Sequence
  Description of Artificial Sequence: Synthetic oligonucleotide
ucuuacaagaaguguguua

SEQ ID NO: 2810515 - RNA, 19 nt, Artificial Sequence
  Description of Artificial Sequence: Synthetic oligonucleotide
aacugggaugccuuuugca

SEQ ID NO: 2810516 - RNA, 19 nt, Artificial Sequence
  Description of Artificial Sequence: Synthetic oligonucleotide
ugguuaauugucucaguuc

SEQ ID NO: 2810517 - RNA, 19 nt, Artificial Sequence
  Description of Artificial Sequence: Synthetic oligonucleotide
aucguuuuacuucugggua

SEQ ID NO: 2810518 - RNA, 19 nt, Artificial Sequence
  Description of Artificial Sequence: Synthetic oligonucleotide
uuucuguaauugcuucagc

SEQ ID NO: 2810519 - RNA, 19 nt, Artificial Sequence
  Description of Artificial Sequence: Synthetic oligonucleotide
caaucagucgcucuccuuc

SEQ ID NO: 2810520 - RNA, 19 nt, Artificial Sequence
  Description of Artificial Sequence: Synthetic oligonucleotide
uccaucuucucuaggcugu

SEQ ID NO: 2810521 - RNA, 19 nt, Artificial Sequence
  Description of Artificial Sequence: Synthetic oligonucleotide
ugaggucugaguaggaguu

SEQ ID NO: 2810522 - RNA, 19 nt, Artificial Sequence
  Description of Artificial Sequence: Synthetic oligonucleotide
aaucagucgcucuccuuca

SEQ ID NO: 2810523 - RNA, 19 nt, Artificial Sequence
  Description of Artificial Sequence: Synthetic oligonucleotide
uaacggcacaugaccaggg

SEQ ID NO: 2810524 - RNA, 19 nt, Artificial Sequence
  Description of Artificial Sequence: Synthetic oligonucleotide
ucugguagagcuguuguuc

SEQ ID NO: 2810525 - RNA, 19 nt, Artificial Sequence
  Description of Artificial Sequence: Synthetic oligonucleotide
uuacuucuggguaaucgau

SEQ ID NO: 2810526 - RNA, 19 nt, Artificial Sequence
  Description of Artificial Sequence: Synthetic oligonucleotide
ugucucaguucuuccaucu

SEQ ID NO: 2810527 - RNA, 19 nt, Artificial Sequence
  Description of Artificial Sequence: Synthetic oligonucleotide
aucaggagcuuuucucagg

SEQ ID NO: 2810528 - RNA, 19 nt, Artificial Sequence
  Description of Artificial Sequence: Synthetic oligonucleotide
acuggagccagcauuuccg

SEQ ID NO: 2810529 - RNA, 19 nt, Artificial Sequence
  Description of Artificial Sequence: Synthetic oligonucleotide
agaccaacugacagcaucg

SEQ ID NO: 2810530 - RNA, 19 nt, Artificial Sequence
  Description of Artificial Sequence: Synthetic oligonucleotide
uugcuuccucugaagagcc

SEQ ID NO: 2810531 - RNA, 19 nt, Artificial Sequence
  Description of Artificial Sequence: Synthetic oligonucleotide
acgacuuuugcuuccucug

SEQ ID NO: 2810532 - RNA, 19 nt, Artificial Sequence
  Description of Artificial Sequence: Synthetic oligonucleotide
augguuaauugucucaguu

SEQ ID NO: 2810533 - RNA, 19 nt, Artificial Sequence
  Description of Artificial Sequence: Synthetic oligonucleotide
gaugaggucugaguaggag

SEQ ID NO: 2810534 - RNA, 19 nt, Artificial Sequence
  Description of Artificial Sequence: Synthetic oligonucleotide
gugauauuccuggagguug

SEQ ID NO: 2810535 - RNA, 19 nt, Artificial Sequence
  Description of Artificial Sequence: Synthetic oligonucleotide
ugucacuggagccagcauu

SEQ ID NO: 2810536 - RNA, 19 nt, Artificial Sequence
  Description of Artificial Sequence: Synthetic oligonucleotide
ggagucuuguuuucugugg

SEQ ID NO: 2810537 - RNA, 19 nt, Artificial Sequence
  Description of Artificial Sequence: Synthetic oligonucleotide
gagguugcaauagcucugg

SEQ ID NO: 2810538 - RNA, 19 nt, Artificial Sequence
  Description of Artificial Sequence: Synthetic oligonucleotide
guuguucuucagcacuggg

SEQ ID NO: 2810539 - RNA, 19 nt, Artificial Sequence
  Description of Artificial Sequence: Synthetic oligonucleotide
auugucucaguucuuccau

SEQ ID NO: 2810540 - RNA, 19 nt, Artificial Sequence
  Description of Artificial Sequence: Synthetic oligonucleotide
ucuaucuagguuacccuuu

SEQ ID NO: 2810541 - RNA, 19 nt, Artificial Sequence
  Description of Artificial Sequence: Synthetic oligonucleotide
ucagacgacuuuugcuucc

SEQ ID NO: 2810542 - RNA, 19 nt, Artificial Sequence
  Description of Artificial Sequence: Synthetic oligonucleotide
agcacuggggcucuccuug

SEQ ID NO: 2810543 - RNA, 19 nt, Artificial Sequence
  Description of Artificial Sequence: Synthetic oligonucleotide
aguguguuagcucuaucua

SEQ ID NO: 2810544 - RNA, 19 nt, Artificial Sequence
  Description of Artificial Sequence: Synthetic oligonucleotide
ucccauuuucugcaguuuc

SEQ ID NO: 2810545 - RNA, 19 nt, Artificial Sequence
  Description of Artificial Sequence: Synthetic oligonucleotide
gaguucagacgacuuuugc

SEQ ID NO: 2810546 - RNA, 19 nt, Artificial Sequence
  Description of Artificial Sequence: Synthetic oligonucleotide
ucgucaaucagucgcucuc

SEQ ID NO: 2810547 - RNA, 19 nt, Artificial Sequence
  Description of Artificial Sequence: Synthetic oligonucleotide
uuacaagaaguguguuagc

SEQ ID NO: 2810548 - RNA, 19 nt, Artificial Sequence
  Description of Artificial Sequence: Synthetic oligonucleotide
ucguuuuacuucuggguaa

SEQ ID NO: 2810549 - RNA, 19 nt, Artificial Sequence
  Description of Artificial Sequence: Synthetic oligonucleotide
cuaggcugucacuggagcc

SEQ ID NO: 2810550 - RNA, 19 nt, Artificial Sequence
  Description of Artificial Sequence: Synthetic oligonucleotide
ggcgucgucaaucagucgc

SEQ ID NO: 2810551 - RNA, 19 nt, Artificial Sequence
  Description of Artificial Sequence: Synthetic oligonucleotide
ccuguaacggcacaugacc

SEQ ID NO: 2810552 - RNA, 19 nt, Artificial Sequence
  Description of Artificial Sequence: Synthetic oligonucleotide
ucucuaggcugucacugga

SEQ ID NO: 2810553 - RNA, 19 nt, Artificial Sequence
  Description of Artificial Sequence: Synthetic oligonucleotide
cagccuuucccuguaacgg

SEQ ID NO: 2810554 - RNA, 19 nt, Artificial Sequence
  Description of Artificial Sequence: Synthetic oligonucleotide
uguaauugcuucagccuuu

SEQ ID NO: 2810555 - RNA, 19 nt, Artificial Sequence
  Description of Artificial Sequence: Synthetic oligonucleotide
auagcucugguagagcugu

SEQ ID NO: 2810556 - RNA, 19 nt, Artificial Sequence
  Description of Artificial Sequence: Synthetic oligonucleotide
cauccgcuugaucaggagc

SEQ ID NO: 2810557 - RNA, 19 nt, Artificial Sequence
  Description of Artificial Sequence: Synthetic oligonucleotide
uuuucucagggcgucguca

SEQ ID NO: 2810558 - RNA, 19 nt, Artificial Sequence
  Description of Artificial Sequence: Synthetic oligonucleotide
caagaaguguguuagcucu

SEQ ID NO: 2810559 - RNA, 19 nt, Artificial Sequence
  Description of Artificial Sequence: Synthetic oligonucleotide
ggcagcaaggccuucagac

SEQ ID NO: 2810560 - RNA, 19 nt, Artificial Sequence
  Description of Artificial Sequence: Synthetic oligonucleotide
guaacggcacaugaccagg

SEQ ID NO: 2810561 - RNA, 19 nt, Artificial Sequence
  Description of Artificial Sequence: Synthetic oligonucleotide
aauagcucugguagagcug

SEQ ID NO: 2810562 - RNA, 19 nt, Artificial Sequence
  Description of Artificial Sequence: Synthetic oligonucleotide
gguuaauugucucaguucu

SEQ ID NO: 2810563 - RNA, 19 nt, Artificial Sequence
  Description of Artificial Sequence: Synthetic oligonucleotide
uuccgguuuucuguaauug

SEQ ID NO: 2810564 - RNA, 19 nt, Artificial Sequence
  Description of Artificial Sequence: Synthetic oligonucleotide
uuuugcaguacauccgcuu

SEQ ID NO: 2810565 - RNA, 19 nt, Artificial Sequence
  Description of Artificial Sequence: Synthetic oligonucleotide
cacacacacacacagggca

SEQ ID NO: 2810566 - RNA, 19 nt, Artificial Sequence
  Description of Artificial Sequence: Synthetic oligonucleotide
ucccuguaacggcacauga

SEQ ID NO: 2810567 - RNA, 19 nt, Artificial Sequence
  Description of Artificial Sequence: Synthetic oligonucleotide
cuuccucugaagagccugg

SEQ ID NO: 2810568 - RNA, 19 nt, Artificial Sequence
  Description of Artificial Sequence: Synthetic oligonucleotide
uugcaguacauccgcuuga

SEQ ID NO: 2810569 - RNA, 19 nt, Artificial Sequence
  Description of Artificial Sequence: Synthetic oligonucleotide
ugaagagccuggcgcaugu

SEQ ID NO: 2810570 - RNA, 19 nt, Artificial Sequence
  Description of Artificial Sequence: Synthetic oligonucleotide
agugcucuuacaagaagug

SEQ ID NO: 2810571 - RNA, 19 nt, Artificial Sequence
  Description of Artificial Sequence: Synthetic oligonucleotide
gagucuuguuuucugugga

SEQ ID NO: 2810572 - RNA, 19 nt, Artificial Sequence
  Description of Artificial Sequence: Synthetic oligonucleotide
cacacacagggcagcaagg

SEQ ID NO: 2810573 - RNA, 19 nt, Artificial Sequence
  Description of Artificial Sequence: Synthetic oligonucleotide
acuggggcucuccuugccg

SEQ ID NO: 2810574 - RNA, 19 nt, Artificial Sequence
  Description of Artificial Sequence: Synthetic oligonucleotide
uucagacgacuuuugcuuc

SEQ ID NO: 2810575 - RNA, 19 nt, Artificial Sequence
  Description of Artificial Sequence: Synthetic oligonucleotide
gcaucguuuuacuucuggg

SEQ ID NO: 2810576 - RNA, 19 nt, Artificial Sequence
  Description of Artificial Sequence: Synthetic oligonucleotide
uguuagcucuaucuagguu

SEQ ID NO: 2810577 - RNA, 19 nt, Artificial Sequence
  Description of Artificial Sequence: Synthetic oligonucleotide
acacacacacacacagggc

SEQ ID NO: 2810578 - RNA, 19 nt, Artificial Sequence
  Description of Artificial Sequence: Synthetic oligonucleotide
uacauccgcuugaucagga

SEQ ID NO: 2810579 - RNA, 19 nt, Artificial Sequence
  Description of Artificial Sequence: Synthetic oligonucleotide
uccuggagguugcaauagc

SEQ ID NO: 2810580 - RNA, 19 nt, Artificial Sequence
  Description of Artificial Sequence: Synthetic oligonucleotide
ucuucucuaggcugucacu

SEQ ID NO: 2810581 - RNA, 19 nt, Artificial Sequence
  Description of Artificial Sequence: Synthetic oligonucleotide
aacggcacaugaccagggu

SEQ ID NO: 2810582 - RNA, 19 nt, Artificial Sequence
  Description of Artificial Sequence: Synthetic oligonucleotide
uugcaauagcucugguaga

SEQ ID NO: 2810583 - RNA, 19 nt, Artificial Sequence
  Description of Artificial Sequence: Synthetic oligonucleotide
ugguaaaacugggaugccu

SEQ ID NO: 2810584 - RNA, 19 nt, Artificial Sequence
  Description of Artificial Sequence: Synthetic oligonucleotide
augccuuuugcaguacauc

SEQ ID NO: 2810585 - RNA, 19 nt, Artificial Sequence
  Description of Artificial Sequence: Synthetic oligonucleotide
uuccuggagguugcaauag

SEQ ID NO: 2810586 - RNA, 19 nt, Artificial Sequence
  Description of Artificial Sequence: Synthetic oligonucleotide
cuggagguugcaauagcuc

SEQ ID NO: 2810587 - RNA, 19 nt, Artificial Sequence
  Description of Artificial Sequence: Synthetic oligonucleotide
cuugccgaagaccaacuga

SEQ ID NO: 2810588 - RNA, 19 nt, Artificial Sequence
  Description of Artificial Sequence: Synthetic oligonucleotide
gccgaagaccaacugacag

SEQ ID NO: 2810589 - RNA, 19 nt, Artificial Sequence
  Description of Artificial Sequence: Synthetic oligonucleotide
cuuagugcucuuacaagaa

SEQ ID NO: 2810590 - RNA, 19 nt, Artificial Sequence
  Description of Artificial Sequence: Synthetic oligonucleotide
auuuccgguuuucuguaau

SEQ ID NO: 2810591 - RNA, 19 nt, Artificial Sequence
  Description of Artificial Sequence: Synthetic oligonucleotide
aguaggaguucagacgacu

SEQ ID NO: 2810592 - RNA, 19 nt, Artificial Sequence
  Description of Artificial Sequence: Synthetic oligonucleotide
uaggaguucagacgacuuu

SEQ ID NO: 2810593 - RNA, 19 nt, Artificial Sequence
  Description of Artificial Sequence: Synthetic oligonucleotide
acggcacaugaccagggug

SEQ ID NO: 2810594 - RNA, 19 nt, Artificial Sequence
  Description of Artificial Sequence: Synthetic oligonucleotide
cuggagccagcauuuccgg

SEQ ID NO: 2810595 - RNA, 19 nt, Artificial Sequence
  Description of Artificial Sequence: Synthetic oligonucleotide
uuucucagggcgucgucaa

SEQ ID NO: 2810596 - RNA, 19 nt, Artificial Sequence
  Description of Artificial Sequence: Synthetic oligonucleotide
acaugaccaggguguagag

SEQ ID NO: 2810597 - RNA, 19 nt, Artificial Sequence
  Description of Artificial Sequence: Synthetic oligonucleotide
agggcgucgucaaucaguc

SEQ ID NO: 2810598 - RNA, 19 nt, Artificial Sequence
  Description of Artificial Sequence: Synthetic oligonucleotide
ucucccauuuucugcaguu

SEQ ID NO: 2810599 - RNA, 19 nt, Artificial Sequence
  Description of Artificial Sequence: Synthetic oligonucleotide
uucuucagcacuggggcuc

SEQ ID NO: 2810600 - RNA, 19 nt, Artificial Sequence
  Description of Artificial Sequence: Synthetic oligonucleotide
cacacagggcagcaaggcc

SEQ ID NO: 2810601 - RNA, 19 nt, Artificial Sequence
  Description of Artificial Sequence: Synthetic oligonucleotide
uaauugcuucagccuuucc

SEQ ID NO: 2810602 - RNA, 19 nt, Artificial Sequence
  Description of Artificial Sequence: Synthetic oligonucleotide
ccuuuugcaguacauccgc

SEQ ID NO: 2810603 - RNA, 19 nt, Artificial Sequence
  Description of Artificial Sequence: Synthetic oligonucleotide
ugggaugccuuuugcagua

SEQ ID NO: 2810604 - RNA, 19 nt, Artificial Sequence
  Description of Artificial Sequence: Synthetic oligonucleotide
auccgcuugaucaggagcu

SEQ ID NO: 2810605 - RNA, 19 nt, Artificial Sequence
  Description of Artificial Sequence: Synthetic oligonucleotide
cacuggagccagcauuucc

SEQ ID NO: 2810606 - RNA, 19 nt, Artificial Sequence
  Description of Artificial Sequence: Synthetic oligonucleotide
gucgcucuccuucagcuuc

SEQ ID NO: 2810607 - RNA, 19 nt, Artificial Sequence
  Description of Artificial Sequence: Synthetic oligonucleotide
guaaucgaugaggucugag

SEQ ID NO: 2810608 - RNA, 19 nt, Artificial Sequence
  Description of Artificial Sequence: Synthetic oligonucleotide
ucagcacuggggcucuccu

SEQ ID NO: 2810609 - RNA, 19 nt, Artificial Sequence
  Description of Artificial Sequence: Synthetic oligonucleotide
gacuuuugcuuccucugaa

SEQ ID NO: 2810610 - RNA, 19 nt, Artificial Sequence
  Description of Artificial Sequence: Synthetic oligonucleotide
agaccgcuggugauauucc

SEQ ID NO: 2810611 - RNA, 19 nt, Artificial Sequence
  Description of Artificial Sequence: Synthetic oligonucleotide
cagcauuuccgguuuucug

SEQ ID NO: 2810612 - RNA, 19 nt, Artificial Sequence
  Description of Artificial Sequence: Synthetic oligonucleotide
guucagacgacuuuugcuu

SEQ ID NO: 2810613 - RNA, 19 nt, Artificial Sequence
  Description of Artificial Sequence: Synthetic oligonucleotide
uucucccauuuucugcagu

SEQ ID NO: 2810614 - RNA, 19 nt, Artificial Sequence
  Description of Artificial Sequence: Synthetic oligonucleotide
cucuaggcugucacuggag

SEQ ID NO: 2810615 - RNA, 19 nt, Artificial Sequence
  Description of Artificial Sequence: Synthetic oligonucleotide
acauccgcuugaucaggag

SEQ ID NO: 2810616 - RNA, 19 nt, Artificial Sequence
  Description of Artificial Sequence: Synthetic oligonucleotide
cagaccgcuggugauauuc

SEQ ID NO: 2810617 - RNA, 19 nt, Artificial Sequence
  Description of Artificial Sequence: Synthetic oligonucleotide
guacauccgcuugaucagg

SEQ ID NO: 2810618 - RNA, 19 nt, Artificial Sequence
  Description of Artificial Sequence: Synthetic oligonucleotide
uuuccgguuuucuguaauu

SEQ ID NO: 2810619 - RNA, 19 nt, Artificial Sequence
  Description of Artificial Sequence: Synthetic oligonucleotide
auguacuccaugguuaauu

SEQ ID NO: 2810620 - RNA, 19 nt, Artificial Sequence
  Description of Artificial Sequence: Synthetic oligonucleotide
cuguaacggcacaugacca

SEQ ID NO: 2810621 - RNA, 19 nt, Artificial Sequence
  Description of Artificial Sequence: Synthetic oligonucleotide
cuccaugguuaauugucuc

SEQ ID NO: 2810622 - RNA, 19 nt, Artificial Sequence
  Description of Artificial Sequence: Synthetic oligonucleotide
uugucucaguucuuccauc

SEQ ID NO: 2810623 - RNA, 19 nt, Artificial Sequence
  Description of Artificial Sequence: Synthetic oligonucleotide
ugccgaagaccaacugaca

SEQ ID NO: 2810624 - RNA, 19 nt, Artificial Sequence
  Description of Artificial Sequence: Synthetic oligonucleotide
uuguuuucuguggaucuua

SEQ ID NO: 2810625 - RNA, 19 nt, Artificial Sequence
  Description of Artificial Sequence: Synthetic oligonucleotide
ucucagggcgucgucaauc

SEQ ID NO: 2810626 - RNA, 19 nt, Artificial Sequence
  Description of Artificial Sequence: Synthetic oligonucleotide
caucguuuuacuucugggu

SEQ ID NO: 2810627 - RNA, 19 nt, Artificial Sequence
  Description of Artificial Sequence: Synthetic oligonucleotide
gacgacuuuugcuuccucu

SEQ ID NO: 2810628 - RNA, 19 nt, Artificial Sequence
  Description of Artificial Sequence: Synthetic oligonucleotide
uucccuguaacggcacaug

SEQ ID NO: 2810629 - RNA, 19 nt, Artificial Sequence
  Description of Artificial Sequence: Synthetic oligonucleotide
gaaguguguuagcucuauc

SEQ ID NO: 2810630 - RNA, 19 nt, Artificial Sequence
  Description of Artificial Sequence: Synthetic oligonucleotide
acacacacacacacacagg

SEQ ID NO: 2810631 - RNA, 19 nt, Artificial Sequence
  Description of Artificial Sequence: Synthetic oligonucleotide
ucuguggaucuuagugcuc

SEQ ID NO: 2810632 - RNA, 19 nt, Artificial Sequence
  Description of Artificial Sequence: Synthetic oligonucleotide
aggaguucagacgacuuuu

SEQ ID NO: 2810633 - RNA, 19 nt, Artificial Sequence
  Description of Artificial Sequence: Synthetic oligonucleotide
acuccaugguuaauugucu

SEQ ID NO: 2810634 - RNA, 19 nt, Artificial Sequence
  Description of Artificial Sequence: Synthetic oligonucleotide
aggucugaguaggaguuca

SEQ ID NO: 2810635 - RNA, 19 nt, Artificial Sequence
  Description of Artificial Sequence: Synthetic oligonucleotide
gucuuguuuucuguggauc

SEQ ID NO: 2810636 - RNA, 19 nt, Artificial Sequence
  Description of Artificial Sequence: Synthetic oligonucleotide
guagagcuguuguucuuca

SEQ ID NO: 2810637 - RNA, 19 nt, Artificial Sequence
  Description of Artificial Sequence: Synthetic oligonucleotide
gagccuggcgcauguacuc

SEQ ID NO: 2810638 - RNA, 19 nt, Artificial Sequence
  Description of Artificial Sequence: Synthetic oligonucleotide
aucagucgcucuccuucag

SEQ ID NO: 2810639 - RNA, 19 nt, Artificial Sequence
  Description of Artificial Sequence: Synthetic oligonucleotide
gggagucuuguuuucugug

SEQ ID NO: 2810640 - RNA, 19 nt, Artificial Sequence
  Description of Artificial Sequence: Synthetic oligonucleotide
acacacacacacagggcag

SEQ ID NO: 2810641 - RNA, 19 nt, Artificial Sequence
  Description of Artificial Sequence: Synthetic oligonucleotide
ccgaagaccaacugacagc

SEQ ID NO: 2810642 - RNA, 19 nt, Artificial Sequence
  Description of Artificial Sequence: Synthetic oligonucleotide
agacgacuuuugcuuccuc

SEQ ID NO: 2810643 - RNA, 19 nt, Artificial Sequence
  Description of Artificial Sequence: Synthetic oligonucleotide
uucagaccgcuggugauau

SEQ ID NO: 2810644 - RNA, 19 nt, Artificial Sequence
  Description of Artificial Sequence: Synthetic oligonucleotide
agcaaggccuucagaccgc

SEQ ID NO: 2810645 - RNA, 19 nt, Artificial Sequence
  Description of Artificial Sequence: Synthetic oligonucleotide
cacaugaccaggguguaga

SEQ ID NO: 2810646 - RNA, 19 nt, Artificial Sequence
  Description of Artificial Sequence: Synthetic oligonucleotide
gcagcaaggccuucagacc

SEQ ID NO: 2810647 - RNA, 19 nt, Artificial Sequence
  Description of Artificial Sequence: Synthetic oligonucleotide
uguagaggggagucuuguu

SEQ ID NO: 2810648 - RNA, 19 nt, Artificial Sequence
  Description of Artificial Sequence: Synthetic oligonucleotide
uuucccuguaacggcacau

SEQ ID NO: 2810649 - RNA, 19 nt, Artificial Sequence
  Description of Artificial Sequence: Synthetic oligonucleotide
ugacagcaucguuuuacuu

SEQ ID NO: 2810650 - RNA, 19 nt, Artificial Sequence
  Description of Artificial Sequence: Synthetic oligonucleotide
cacacacacacagggcagc

SEQ ID NO: 2810651 - RNA, 19 nt, Artificial Sequence
  Description of Artificial Sequence: Synthetic oligonucleotide
ucaaucagucgcucuccuu

SEQ ID NO: 2810652 - RNA, 19 nt, Artificial Sequence
  Description of Artificial Sequence: Synthetic oligonucleotide
gccuuuugcaguacauccg

SEQ ID NO: 2810653 - RNA, 19 nt, Artificial Sequence
  Description of Artificial Sequence: Synthetic oligonucleotide
agaaguguguuagcucuau

SEQ ID NO: 2810654 - RNA, 19 nt, Artificial Sequence
  Description of Artificial Sequence: Synthetic oligonucleotide
cuggguaaucgaugagguc

SEQ ID NO: 2810655 - RNA, 19 nt, Artificial Sequence
  Description of Artificial Sequence: Synthetic oligonucleotide
uucagcacuggggcucucc

SEQ ID NO: 2810656 - RNA, 19 nt, Artificial Sequence
  Description of Artificial Sequence: Synthetic oligonucleotide
ugcaguacauccgcuugau

SEQ ID NO: 2810657 - RNA, 19 nt, Artificial Sequence
  Description of Artificial Sequence: Synthetic oligonucleotide
cuccuugccgaagaccaac

SEQ ID NO: 2810658 - RNA, 19 nt, Artificial Sequence
  Description of Artificial Sequence: Synthetic oligonucleotide
uggagccagcauuuccggu

SEQ ID NO: 2810659 - RNA, 19 nt, Artificial Sequence
  Description of Artificial Sequence: Synthetic oligonucleotide
ggaucuuagugcucuuaca

SEQ ID NO: 2810660 - RNA, 19 nt, Artificial Sequence
  Description of Artificial Sequence: Synthetic oligonucleotide
guaauugcuucagccuuuc

SEQ ID NO: 2810661 - RNA, 19 nt, Artificial Sequence
  Description of Artificial Sequence: Synthetic oligonucleotide
agcuuuucucagggcgucg

SEQ ID NO: 2810662 - RNA, 19 nt, Artificial Sequence
  Description of Artificial Sequence: Synthetic oligonucleotide
agcucugguagagcuguug

SEQ ID NO: 2810663 - RNA, 19 nt, Artificial Sequence
  Description of Artificial Sequence: Synthetic oligonucleotide
caggagcuuuucucagggc

SEQ ID NO: 2810664 - RNA, 19 nt, Artificial Sequence
  Description of Artificial Sequence: Synthetic oligonucleotide
agagccuggcgcauguacu

SEQ ID NO: 2810665 - RNA, 19 nt, Artificial Sequence
  Description of Artificial Sequence: Synthetic oligonucleotide
ucuccuugccgaagaccaa

SEQ ID NO: 2810666 - RNA, 19 nt, Artificial Sequence
  Description of Artificial Sequence: Synthetic oligonucleotide
cucagggcgucgucaauca

SEQ ID NO: 2810667 - RNA, 19 nt, Artificial Sequence
  Description of Artificial Sequence: Synthetic oligonucleotide
accaacugacagcaucguu

SEQ ID NO: 2810668 - RNA, 19 nt, Artificial Sequence
  Description of Artificial Sequence: Synthetic oligonucleotide
ggagguugcaauagcucug

SEQ ID NO: 2810669 - RNA, 19 nt, Artificial Sequence
  Description of Artificial Sequence: Synthetic oligonucleotide
ucuucagcacuggggcucu

SEQ ID NO: 2810670 - RNA, 19 nt, Artificial Sequence
  Description of Artificial Sequence: Synthetic oligonucleotide
guagaggggagucuuguuu

SEQ ID NO: 2810671 - RNA, 19 nt, Artificial Sequence
  Description of Artificial Sequence: Synthetic oligonucleotide
cuuuucucagggcgucguc

SEQ ID NO: 2810672 - RNA, 19 nt, Artificial Sequence
  Description of Artificial Sequence: Synthetic oligonucleotide
ucgcucuccuucagcuucu

SEQ ID NO: 2810673 - RNA, 19 nt, Artificial Sequence
  Description of Artificial Sequence: Synthetic oligonucleotide
aacugacagcaucguuuua

SEQ ID NO: 2810674 - RNA, 19 nt, Artificial Sequence
  Description of Artificial Sequence: Synthetic oligonucleotide
accgcuggugauauuccug

SEQ ID NO: 2810675 - RNA, 19 nt, Artificial Sequence
  Description of Artificial Sequence: Synthetic oligonucleotide
cugguaaaacugggaugcc

SEQ ID NO: 2810676 - RNA, 19 nt, Artificial Sequence
  Description of Artificial Sequence: Synthetic oligonucleotide
caggguguagaggggaguc

SEQ ID NO: 2810677 - RNA, 19 nt, Artificial Sequence
  Description of Artificial Sequence: Synthetic oligonucleotide
gguagagcuguuguucuuc

SEQ ID NO: 2810678 - RNA, 19 nt, Artificial Sequence
  Description of Artificial Sequence: Synthetic oligonucleotide
gguugcaauagcucuggua

SEQ ID NO: 2810679 - RNA, 19 nt, Artificial Sequence
  Description of Artificial Sequence: Synthetic oligonucleotide
cuguaauugcuucagccuu

SEQ ID NO: 2810680 - RNA, 19 nt, Artificial Sequence
  Description of Artificial Sequence: Synthetic oligonucleotide
aagaaguguguuagcucua

SEQ ID NO: 2810681 - RNA, 19 nt, Artificial Sequence
  Description of Artificial Sequence: Synthetic oligonucleotide
gucugaguaggaguucaga

SEQ ID NO: 2810682 - RNA, 19 nt, Artificial Sequence
  Description of Artificial Sequence: Synthetic oligonucleotide
aggccuucagaccgcuggu

SEQ ID NO: 2810683 - RNA, 19 nt, Artificial Sequence
  Description of Artificial Sequence: Synthetic oligonucleotide
cuugaucaggagcuuuucu

SEQ ID NO: 2810684 - RNA, 19 nt, Artificial Sequence
  Description of Artificial Sequence: Synthetic oligonucleotide
ugguagagcuguuguucuu

SEQ ID NO: 2810685 - RNA, 19 nt, Artificial Sequence
  Description of Artificial Sequence: Synthetic oligonucleotide
ggguaaucgaugaggucug

SEQ ID NO: 2810686 - RNA, 19 nt, Artificial Sequence
  Description of Artificial Sequence: Synthetic oligonucleotide
ggaguucagacgacuuuug

SEQ ID NO: 2810687 - RNA, 19 nt, Artificial Sequence
  Description of Artificial Sequence: Synthetic oligonucleotide
acacacacacacacacaca

SEQ ID NO: 2810688 - RNA, 19 nt, Artificial Sequence
  Description of Artificial Sequence: Synthetic oligonucleotide
cugguagagcuguuguucu

SEQ ID NO: 2810689 - RNA, 19 nt, Artificial Sequence
  Description of Artificial Sequence: Synthetic oligonucleotide
uguggaucuuagugcucuu

SEQ ID NO: 2810690 - RNA, 19 nt, Artificial Sequence
  Description of Artificial Sequence: Synthetic oligonucleotide
acacacacacagggcagca

SEQ ID NO: 2810691 - RNA, 19 nt, Artificial Sequence
  Description of Artificial Sequence: Synthetic oligonucleotide
gaguaggaguucagacgac

SEQ ID NO: 2810692 - RNA, 19 nt, Artificial Sequence
  Description of Artificial Sequence: Synthetic oligonucleotide
uucucagggcgucgucaau

SEQ ID NO: 2810693 - RNA, 19 nt, Artificial Sequence
  Description of Artificial Sequence: Synthetic oligonucleotide
aggcugucacuggagccag

SEQ ID NO: 2810694 - RNA, 19 nt, Artificial Sequence
  Description of Artificial Sequence: Synthetic oligonucleotide
guacuccaugguuaauugu

SEQ ID NO: 2810695 - RNA, 19 nt, Artificial Sequence
  Description of Artificial Sequence: Synthetic oligonucleotide
guguuagcucuaucuaggu

SEQ ID NO: 2810696 - RNA, 19 nt, Artificial Sequence
  Description of Artificial Sequence: Synthetic oligonucleotide
cugacagcaucguuuuacu

SEQ ID NO: 2810697 - RNA, 19 nt, Artificial Sequence
  Description of Artificial Sequence: Synthetic oligonucleotide
gcauguacuccaugguuaa

SEQ ID NO: 2810698 - RNA, 19 nt, Artificial Sequence
  Description of Artificial Sequence: Synthetic oligonucleotide
gaugccuuuugcaguacau

SEQ ID NO: 2810699 - RNA, 19 nt, Artificial Sequence
  Description of Artificial Sequence: Synthetic oligonucleotide
guuuucuguggaucuuagu

SEQ ID NO: 2810700 - RNA, 19 nt, Artificial Sequence
  Description of Artificial Sequence: Synthetic oligonucleotide
cccuguaacggcacaugac

SEQ ID NO: 2810701 - RNA, 19 nt, Artificial Sequence
  Description of Artificial Sequence: Synthetic oligonucleotide
cucuaucuagguuacccuu

SEQ ID NO: 2810702 - RNA, 19 nt, Artificial Sequence
  Description of Artificial Sequence: Synthetic oligonucleotide
cuuucccuguaacggcaca

SEQ ID NO: 2810703 - RNA, 19 nt, Artificial Sequence
  Description of Artificial Sequence: Synthetic oligonucleotide
gaggucugaguaggaguuc

SEQ ID NO: 2810704 - RNA, 19 nt, Artificial Sequence
  Description of Artificial Sequence: Synthetic oligonucleotide
agguugcaauagcucuggu

SEQ ID NO: 2810705 - RNA, 19 nt, Artificial Sequence
  Description of Artificial Sequence: Synthetic oligonucleotide
cuggggcucuccuugccga

SEQ ID NO: 2810706 - RNA, 19 nt, Artificial Sequence
  Description of Artificial Sequence: Synthetic oligonucleotide
aggguguagaggggagucu

SEQ ID NO: 2810707 - RNA, 19 nt, Artificial Sequence
  Description of Artificial Sequence: Synthetic oligonucleotide
agucgcucuccuucagcuu

SEQ ID NO: 2810708 - RNA, 19 nt, Artificial Sequence
  Description of Artificial Sequence: Synthetic oligonucleotide
cuggcgcauguacuccaug

SEQ ID NO: 2810709 - RNA, 19 nt, Artificial Sequence
  Description of Artificial Sequence: Synthetic oligonucleotide
gcaauagcucugguagagc

SEQ ID NO: 2810710 - RNA, 19 nt, Artificial Sequence
  Description of Artificial Sequence: Synthetic oligonucleotide
guaaaacugggaugccuuu

SEQ ID NO: 2810711 - RNA, 19 nt, Artificial Sequence
  Description of Artificial Sequence: Synthetic oligonucleotide
cagucgcucuccuucagcu

SEQ ID NO: 2810712 - RNA, 19 nt, Artificial Sequence
  Description of Artificial Sequence: Synthetic oligonucleotide
guuuuacuucuggguaauc

SEQ ID NO: 2810713 - RNA, 19 nt, Artificial Sequence
  Description of Artificial Sequence: Synthetic oligonucleotide
caugguuaauugucucagu

SEQ ID NO: 2810714 - RNA, 19 nt, Artificial Sequence
  Description of Artificial Sequence: Synthetic oligonucleotide
caacugacagcaucguuuu

SEQ ID NO: 2810715 - RNA, 19 nt, Artificial Sequence
  Description of Artificial Sequence: Synthetic oligonucleotide
cuguggaucuuagugcucu

SEQ ID NO: 2810716 - RNA, 19 nt, Artificial Sequence
  Description of Artificial Sequence: Synthetic oligonucleotide
cuuuugcaguacauccgcu

SEQ ID NO: 2810717 - RNA, 19 nt, Artificial Sequence
  Description of Artificial Sequence: Synthetic oligonucleotide
cagggcgucgucaaucagu

SEQ ID NO: 2810718 - RNA, 19 nt, Artificial Sequence
  Description of Artificial Sequence: Synthetic oligonucleotide
uagcucuaucuagguuacc

SEQ ID NO: 2810719 - RNA, 19 nt, Artificial Sequence
  Description of Artificial Sequence: Synthetic oligonucleotide
cauuuccgguuuucuguaa

SEQ ID NO: 2810720 - RNA, 19 nt, Artificial Sequence
  Description of Artificial Sequence: Synthetic oligonucleotide
gucgucaaucagucgcucu

SEQ ID NO: 2810721 - RNA, 19 nt, Artificial Sequence
  Description of Artificial Sequence: Synthetic oligonucleotide
cgaagaccaacugacagca

SEQ ID NO: 2810722 - RNA, 19 nt, Artificial Sequence
  Description of Artificial Sequence: Synthetic oligonucleotide
ggaugccuuuugcaguaca

SEQ ID NO: 2810723 - RNA, 19 nt, Artificial Sequence
  Description of Artificial Sequence: Synthetic oligonucleotide
gaccgcuggugauauuccu

SEQ ID NO: 2810724 - RNA, 19 nt, Artificial Sequence
  Description of Artificial Sequence: Synthetic oligonucleotide
gccuucagaccgcugguga

SEQ ID NO: 2810725 - RNA, 19 nt, Artificial Sequence
  Description of Artificial Sequence: Synthetic oligonucleotide
ccaacugacagcaucguuu

SEQ ID NO: 2810726 - RNA, 19 nt, Artificial Sequence
  Description of Artificial Sequence: Synthetic oligonucleotide
guucuucagcacuggggcu

SEQ ID NO: 2810727 - RNA, 19 nt, Artificial Sequence
  Description of Artificial Sequence: Synthetic oligonucleotide
gguguagaggggagucuug

SEQ ID NO: 2810728 - RNA, 19 nt, Artificial Sequence
  Description of Artificial Sequence: Synthetic oligonucleotide
gucaaucagucgcucuccu

SEQ ID NO: 2810729 - RNA, 19 nt, Artificial Sequence
  Description of Artificial Sequence: Synthetic oligonucleotide
gcauuuccgguuuucugua

SEQ ID NO: 2810730 - RNA, 19 nt, Artificial Sequence
  Description of Artificial Sequence: Synthetic oligonucleotide
ucacuggagccagcauuuc

SEQ ID NO: 2810731 - RNA, 19 nt, Artificial Sequence
  Description of Artificial Sequence: Synthetic oligonucleotide
uggggcucuccuugccgaa

SEQ ID NO: 2810732 - RNA, 19 nt, Artificial Sequence
  Description of Artificial Sequence: Synthetic oligonucleotide
caaggccuucagaccgcug

SEQ ID NO: 2810733 - RNA, 19 nt, Artificial Sequence
  Description of Artificial Sequence: Synthetic oligonucleotide
gguaaaacugggaugccuu

SEQ ID NO: 2810734 - RNA, 19 nt, Artificial Sequence
  Description of Artificial Sequence: Synthetic oligonucleotide
ggucugaguaggaguucag

SEQ ID NO: 2810735 - RNA, 19 nt, Artificial Sequence
  Description of Artificial Sequence: Synthetic oligonucleotide
gugcucuuacaagaagugu

SEQ ID NO: 2810736 - RNA, 19 nt, Artificial Sequence
  Description of Artificial Sequence: Synthetic oligonucleotide
cagcaucguuuuacuucug

SEQ ID NO: 2810737 - RNA, 19 nt, Artificial Sequence
  Description of Artificial Sequence: Synthetic oligonucleotide
gcucuccuugccgaagacc

SEQ ID NO: 2810738 - RNA, 19 nt, Artificial Sequence
  Description of Artificial Sequence: Synthetic oligonucleotide
gcucuaucuagguuacccu

SEQ ID NO: 2810739 - RNA, 19 nt, Artificial Sequence
  Description of Artificial Sequence: Synthetic oligonucleotide
gcucuuacaagaagugugu

SEQ ID NO: 2810740 - RNA, 19 nt, Artificial Sequence
  Description of Artificial Sequence: Synthetic oligonucleotide
cuaucuagguuacccuuuu

SEQ ID NO: 2810741 - RNA, 19 nt, Artificial Sequence
  Description of Artificial Sequence: Synthetic oligonucleotide
gcugucacuggagccagca

SEQ ID NO: 2810742 - RNA, 19 nt, Artificial Sequence
  Description of Artificial Sequence: Synthetic oligonucleotide
gucacuggagccagcauuu

SEQ ID NO: 2810743 - RNA, 19 nt, Artificial Sequence
  Description of Artificial Sequence: Synthetic oligonucleotide
cuucagaccgcuggugaua

SEQ ID NO: 2810744 - RNA, 19 nt, Artificial Sequence
  Description of Artificial Sequence: Synthetic oligonucleotide
guguagaggggagucuugu

SEQ ID NO: 2810745 - RNA, 19 nt, Artificial Sequence
  Description of Artificial Sequence: Synthetic oligonucleotide
ggagccagcauuuccgguu

SEQ ID NO: 2810746 - RNA, 19 nt, Artificial Sequence
  Description of Artificial Sequence: Synthetic oligonucleotide
ccuuucccuguaacggcac

SEQ ID NO: 2810747 - RNA, 19 nt, Artificial Sequence
  Description of Artificial Sequence: Synthetic oligonucleotide
gaggggagucuuguuuucu

SEQ ID NO: 2810748 - RNA, 19 nt, Artificial Sequence
  Description of Artificial Sequence: Synthetic oligonucleotide
ccgguuuucuguaauugcu

SEQ ID NO: 2810749 - RNA, 19 nt, Artificial Sequence
  Description of Artificial Sequence: Synthetic oligonucleotide
ccuugccgaagaccaacug

SEQ ID NO: 2810750 - RNA, 19 nt, Artificial Sequence
  Description of Artificial Sequence: Synthetic oligonucleotide
gcucugguagagcuguugu

SEQ ID NO: 2810751 - RNA, 19 nt, Artificial Sequence
  Description of Artificial Sequence: Synthetic oligonucleotide
guggaucuuagugcucuua

SEQ ID NO: 2810752 - RNA, 19 nt, Artificial Sequence
  Description of Artificial Sequence: Synthetic oligonucleotide
gagccagcauuuccgguuu

SEQ ID NO: 2810753 - RNA, 19 nt, Artificial Sequence
  Description of Artificial Sequence: Synthetic oligonucleotide
uccgcuugaucaggagcuu

SEQ ID NO: 2810754 - RNA, 19 nt, Artificial Sequence
  Description of Artificial Sequence: Synthetic oligonucleotide
gcuugaucaggagcuuuuc

SEQ ID NO: 2810755 - RNA, 19 nt, Artificial Sequence
  Description of Artificial Sequence: Synthetic oligonucleotide
guaggaguucagacgacuu

SEQ ID NO: 2810756 - RNA, 19 nt, Artificial Sequence
  Description of Artificial Sequence: Synthetic oligonucleotide
gggcgucgucaaucagucg

SEQ ID NO: 2810757 - RNA, 19 nt, Artificial Sequence
  Description of Artificial Sequence: Synthetic oligonucleotide
guuaauugucucaguucuu

SEQ ID NO: 2810758 - RNA, 19 nt, Artificial Sequence
  Description of Artificial Sequence: Synthetic oligonucleotide
cgucaaucagucgcucucc

SEQ ID NO: 2810759 - RNA, 19 nt, Artificial Sequence
  Description of Artificial Sequence: Synthetic oligonucleotide
gaccaacugacagcaucgu

SEQ ID NO: 2810760 - RNA, 19 nt, Artificial Sequence
  Description of Artificial Sequence: Synthetic oligonucleotide
ccuggagguugcaauagcu

SEQ ID NO: 2810761 - RNA, 19 nt, Artificial Sequence
  Description of Artificial Sequence: Synthetic oligonucleotide
cgcauguacuccaugguua

SEQ ID NO: 2810762 - RNA, 19 nt, Artificial Sequence
  Description of Artificial Sequence: Synthetic oligonucleotide
ggagcuuuucucagggcgu

SEQ ID NO: 2810763 - RNA, 19 nt, Artificial Sequence
  Description of Artificial Sequence: Synthetic oligonucleotide
gcacuggggcucuccuugc

SEQ ID NO: 2810764 - RNA, 19 nt, Artificial Sequence
  Description of Artificial Sequence: Synthetic oligonucleotide
gcacaugaccaggguguag

SEQ ID NO: 2810765 - RNA, 19 nt, Artificial Sequence
  Description of Artificial Sequence: Synthetic oligonucleotide
gcaguacauccgcuugauc

SEQ ID NO: 2810766 - RNA, 19 nt, Artificial Sequence
  Description of Artificial Sequence: Synthetic oligonucleotide
gggcucuccuugccgaaga

SEQ ID NO: 2810767 - RNA, 19 nt, Artificial Sequence
  Description of Artificial Sequence: Synthetic oligonucleotide
ggcucuccuugccgaagac

SEQ ID NO: 2810768 - RNA, 19 nt, Artificial Sequence
  Description of Artificial Sequence: Synthetic oligonucleotide
uagcucugguagagcuguu

SEQ ID NO: 2810769 - RNA, 19 nt, Artificial Sequence
  Description of Artificial Sequence: Synthetic oligonucleotide
gccuuucccuguaacggca

SEQ ID NO: 2810770 - RNA, 19 nt, Artificial Sequence
  Description of Artificial Sequence: Synthetic oligonucleotide
ggcgcauguacuccauggu

SEQ ID NO: 2810771 - RNA, 19 nt, Artificial Sequence
  Description of Artificial Sequence: Synthetic oligonucleotide
ucagaccgcuggugauauu

SEQ ID NO: 2810772 - RNA, 19 nt, Artificial Sequence
  Description of Artificial Sequence: Synthetic oligonucleotide
ggccuucagaccgcuggug

SEQ ID NO: 2810773 - RNA, 19 nt, Artificial Sequence
  Description of Artificial Sequence: Synthetic oligonucleotide
cucugguagagcuguuguu

SEQ ID NO: 2810774 - RNA, 19 nt, Artificial Sequence
  Description of Artificial Sequence: Synthetic oligonucleotide
gguaaucgaugaggucuga

SEQ ID NO: 2810775 - RNA, 19 nt, Artificial Sequence
  Description of Artificial Sequence: Synthetic oligonucleotide
ggggcucuccuugccgaag

SEQ ID NO: 2810776 - RNA, 19 nt, Artificial Sequence
  Description of Artificial Sequence: Synthetic oligonucleotide
gcuucagccuuucccugua

SEQ ID NO: 2810777 - RNA, 19 nt, Artificial Sequence
  Description of Artificial Sequence: Synthetic oligonucleotide
ggugauauuccuggagguu

SEQ ID NO: 2810778 - RNA, 19 nt, Artificial Sequence
  Description of Artificial Sequence: Synthetic oligonucleotide
agccagcauuuccgguuuu

SEQ ID NO: 2810779 - RNA, 19 nt, Artificial Sequence
  Description of Artificial Sequence: Synthetic oligonucleotide
cacacacacagggcagcaa

SEQ ID NO: 2810780 - RNA, 19 nt, Artificial Sequence
  Description of Artificial Sequence: Synthetic oligonucleotide
cgacuuuugcuuccucuga

SEQ ID NO: 2810781 - RNA, 19 nt, Artificial Sequence
  Description of Artificial Sequence: Synthetic oligonucleotide
gaagagccuggcgcaugua

SEQ ID NO: 2810782 - RNA, 19 nt, Artificial Sequence
  Description of Artificial Sequence: Synthetic oligonucleotide
cucuuacaagaaguguguu

SEQ ID NO: 2810783 - RNA, 19 nt, Artificial Sequence
  Description of Artificial Sequence: Synthetic oligonucleotide
gcgcauguacuccaugguu

SEQ ID NO: 2810784 - RNA, 19 nt, Artificial Sequence
  Description of Artificial Sequence: Synthetic oligonucleotide
gggcagcaaggccuucaga

SEQ ID NO: 2810785 - RNA, 19 nt, Artificial Sequence
  Description of Artificial Sequence: Synthetic oligonucleotide
gaagaccaacugacagcau

SEQ ID NO: 2810786 - RNA, 19 nt, Artificial Sequence
  Description of Artificial Sequence: Synthetic oligonucleotide
cagacgacuuuugcuuccu

SEQ ID NO: 2810787 - RNA, 19 nt, Artificial Sequence
  Description of Artificial Sequence: Synthetic oligonucleotide
cggcacaugaccagggugu

SEQ ID NO: 2810788 - RNA, 19 nt, Artificial Sequence
  Description of Artificial Sequence: Synthetic oligonucleotide
gcuuuucucagggcgucgu

SEQ ID NO: 2810789 - RNA, 19 nt, Artificial Sequence
  Description of Artificial Sequence: Synthetic oligonucleotide
gggaugccuuuugcaguac

SEQ ID NO: 2810790 - RNA, 19 nt, Artificial Sequence
  Description of Artificial Sequence: Synthetic oligonucleotide
ccaucuucucuaggcuguc

SEQ ID NO: 2810791 - RNA, 19 nt, Artificial Sequence
  Description of Artificial Sequence: Synthetic oligonucleotide
ggcacaugaccagggugua

SEQ ID NO: 2810792 - RNA, 19 nt, Artificial Sequence
  Description of Artificial Sequence: Synthetic oligonucleotide
cauguacuccaugguuaau

SEQ ID NO: 2810793 - RNA, 19 nt, Artificial Sequence
  Description of Artificial Sequence: Synthetic oligonucleotide
ggguguagaggggagucuu

SEQ ID NO: 2810794 - RNA, 19 nt, Artificial Sequence
  Description of Artificial Sequence: Synthetic oligonucleotide
cucccauuuucugcaguuu

SEQ ID NO: 2810795 - RNA, 19 nt, Artificial Sequence
  Description of Artificial Sequence: Synthetic oligonucleotide
cugucacuggagccagcau

SEQ ID NO: 2810796 - RNA, 19 nt, Artificial Sequence
  Description of Artificial Sequence: Synthetic oligonucleotide
cuucagcacuggggcucuc

SEQ ID NO: 2810797 - RNA, 19 nt, Artificial Sequence
  Description of Artificial Sequence: Synthetic oligonucleotide
ccagcauuuccgguuuucu

SEQ ID NO: 2810798 - RNA, 19 nt, Artificial Sequence
  Description of Artificial Sequence: Synthetic oligonucleotide
gcgucgucaaucagucgcu

SEQ ID NO: 2810799 - RNA, 19 nt, Artificial Sequence
  Description of Artificial Sequence: Synthetic oligonucleotide
cgaugaggucugaguagga

SEQ ID NO: 2810800 - RNA, 19 nt, Artificial Sequence
  Description of Artificial Sequence: Synthetic oligonucleotide
ccuucagaccgcuggugau

SEQ ID NO: 2810801 - RNA, 19 nt, Artificial Sequence
  Description of Artificial Sequence: Synthetic oligonucleotide
cgucgucaaucagucgcuc

SEQ ID NO: 2810802 - RNA, 19 nt, Artificial Sequence
  Description of Artificial Sequence: Synthetic oligonucleotide
gcaaggccuucagaccgcu

SEQ ID NO: 2810803 - RNA, 19 nt, Artificial Sequence
  Description of Artificial Sequence: Synthetic oligonucleotide
cguuuuacuucuggguaau

SEQ ID NO: 2810804 - RNA, 19 nt, Artificial Sequence
  Description of Artificial Sequence: Synthetic oligonucleotide
ccuggcgcauguacuccau

SEQ ID NO: 2810805 - RNA, 19 nt, Artificial Sequence
  Description of Artificial Sequence: Synthetic oligonucleotide
ccgcuugaucaggagcuuu

SEQ ID NO: 2810806 - RNA, 19 nt, Artificial Sequence
  Description of Artificial Sequence: Synthetic oligonucleotide
aaaacuauguccuucauug

SEQ ID NO: 2810807 - RNA, 19 nt, Artificial Sequence
  Description of Artificial Sequence: Synthetic oligonucleotide
aaaucaaugagauauugca

SEQ ID NO: 2810808 - RNA, 19 nt, Artificial Sequence
  Description of Artificial Sequence: Synthetic oligonucleotide
aaugagauauugcagucuc

SEQ ID NO: 2810809 - RNA, 19 nt, Artificial Sequence
  Description of Artificial Sequence: Synthetic oligonucleotide
gaugucuaaaacuaugucc

SEQ ID NO: 2810810 - RNA, 19 nt, Artificial Sequence
  Description of Artificial Sequence: Synthetic oligonucleotide
aauggcuaauucugaagcc

SEQ ID NO: 2810811 - RNA, 19 nt, Artificial Sequence
  Description of Artificial Sequence: Synthetic oligonucleotide
auugaauccauacuuuggg

SEQ ID NO: 2810812 - RNA, 19 nt, Artificial Sequence
  Description of Artificial Sequence: Synthetic oligonucleotide
aauagguuguguuggauca

SEQ ID NO: 2810813 - RNA, 19 nt, Artificial Sequence
  Description of Artificial Sequence: Synthetic oligonucleotide
ucuucaaccagcuggaccc

SEQ ID NO: 2810814 - RNA, 19 nt, Artificial Sequence
  Description of Artificial Sequence: Synthetic oligonucleotide
uuuugcuugaaaaguauca

SEQ ID NO: 2810815 - RNA, 19 nt, Artificial Sequence
  Description of Artificial Sequence: Synthetic oligonucleotide
ucuuccauugacaagcuga

SEQ ID NO: 2810816 - RNA, 19 nt, Artificial Sequence
  Description of Artificial Sequence: Synthetic oligonucleotide
ugcuugaaaaguaucagca

SEQ ID NO: 2810817 - RNA, 19 nt, Artificial Sequence
  Description of Artificial Sequence: Synthetic oligonucleotide
cuugaaaaguaucagcacc

SEQ ID NO: 2810818 - RNA, 19 nt, Artificial Sequence
  Description of Artificial Sequence: Synthetic oligonucleotide
uucacuuuugcuugaaaag

SEQ ID NO: 2810819 - RNA, 19 nt, Artificial Sequence
  Description of Artificial Sequence: Synthetic oligonucleotide
uugaaaaguaucagcaccc

SEQ ID NO: 2810820 - RNA, 19 nt, Artificial Sequence
  Description of Artificial Sequence: Synthetic oligonucleotide
guuguguuggaucaacucg

SEQ ID NO: 2810821 - RNA, 19 nt, Artificial Sequence
  Description of Artificial Sequence: Synthetic oligonucleotide
cauaaucccuuuuaugugg

SEQ ID NO: 2810822 - RNA, 19 nt, Artificial Sequence
  Description of Artificial Sequence: Synthetic oligonucleotide
cuuuuaugugguuggaugg

SEQ ID NO: 2810823 - RNA, 19 nt, Artificial Sequence
  Description of Artificial Sequence: Synthetic oligonucleotide
accaccauuucuuucaauc

SEQ ID NO: 2810824 - RNA, 19 nt, Artificial Sequence
  Description of Artificial Sequence: Synthetic oligonucleotide
aucaaugagauauugcagu

SEQ ID NO: 2810825 - RNA, 19 nt, Artificial Sequence
  Description of Artificial Sequence: Synthetic oligonucleotide
aagucaauagguuguguug

SEQ ID NO: 2810826 - RNA, 19 nt, Artificial Sequence
  Description of Artificial Sequence: Synthetic oligonucleotide
aaaaguaucagcacccucu

SEQ ID NO: 2810827 - RNA, 19 nt, Artificial Sequence
  Description of Artificial Sequence: Synthetic oligonucleotide
cuuucaaucgcagcaaugg

SEQ ID NO: 2810828 - RNA, 19 nt, Artificial Sequence
  Description of Artificial Sequence: Synthetic oligonucleotide
aucaacucgcccuaaauca

SEQ ID NO: 2810829 - RNA, 19 nt, Artificial Sequence
  Description of Artificial Sequence: Synthetic oligonucleotide
aguaucagcacccucuuca

SEQ ID NO: 2810830 - RNA, 19 nt, Artificial Sequence
  Description of Artificial Sequence: Synthetic oligonucleotide
caauggcuaauucugaagc

SEQ ID NO: 2810831 - RNA, 19 nt, Artificial Sequence
  Description of Artificial Sequence: Synthetic oligonucleotide
aauccauacuuugggauuc

SEQ ID NO: 2810832 - RNA, 19 nt, Artificial Sequence
  Description of Artificial Sequence: Synthetic oligonucleotide
gauauugcagucuccugag

SEQ ID NO: 2810833 - RNA, 19 nt, Artificial Sequence
  Description of Artificial Sequence: Synthetic oligonucleotide
gaguuaagucaauagguug

SEQ ID NO: 2810834 - RNA, 19 nt, Artificial Sequence
  Description of Artificial Sequence: Synthetic oligonucleotide
gauacugaugucuaaaacu

SEQ ID NO: 2810835 - RNA, 19 nt, Artificial Sequence
  Description of Artificial Sequence: Synthetic oligonucleotide
uuguguuggaucaacucgc

SEQ ID NO: 2810836 - RNA, 19 nt, Artificial Sequence
  Description of Artificial Sequence: Synthetic oligonucleotide
cauugaauccauacuuugg

SEQ ID NO: 2810837 - RNA, 19 nt, Artificial Sequence
  Description of Artificial Sequence: Synthetic oligonucleotide
aaucaaugagauauugcag

SEQ ID NO: 2810838 - RNA, 19 nt, Artificial Sequence
  Description of Artificial Sequence: Synthetic oligonucleotide
aaggcuguaguaacaacac

SEQ ID NO: 2810839 - RNA, 19 nt, Artificial Sequence
  Description of Artificial Sequence: Synthetic oligonucleotide
uucuccuaucucuuggacg

SEQ ID NO: 2810840 - RNA, 19 nt, Artificial Sequence
  Description of Artificial Sequence: Synthetic oligonucleotide
uacuuugggauucggaugu

SEQ ID NO: 2810841 - RNA, 19 nt, Artificial Sequence
  Description of Artificial Sequence: Synthetic oligonucleotide
uguuggaucaacucgcccu

SEQ ID NO: 2810842 - RNA, 19 nt, Artificial Sequence
  Description of Artificial Sequence: Synthetic oligonucleotide
ucauugaauccauacuuug

SEQ ID NO: 2810843 - RNA, 19 nt, Artificial Sequence
  Description of Artificial Sequence: Synthetic oligonucleotide
agauauugcagucuccuga

SEQ ID NO: 2810844 - RNA, 19 nt, Artificial Sequence
  Description of Artificial Sequence: Synthetic oligonucleotide
gacucaaaggcugauacug

SEQ ID NO: 2810845 - RNA, 19 nt, Artificial Sequence
  Description of Artificial Sequence: Synthetic oligonucleotide
aacuauguccuucauugaa

SEQ ID NO: 2810846 - RNA, 19 nt, Artificial Sequence
  Description of Artificial Sequence: Synthetic oligonucleotide
uguaaaagggagucugccc

SEQ ID NO: 2810847 - RNA, 19 nt, Artificial Sequence
  Description of Artificial Sequence: Synthetic oligonucleotide
ucccucaaagcccagccgg

SEQ ID NO: 2810848 - RNA, 19 nt, Artificial Sequence
  Description of Artificial Sequence: Synthetic oligonucleotide
uucaaucgcagcaauggcu

SEQ ID NO: 2810849 - RNA, 19 nt, Artificial Sequence
  Description of Artificial Sequence: Synthetic oligonucleotide
gagacucaaaggcugauac

SEQ ID NO: 2810850 - RNA, 19 nt, Artificial Sequence
  Description of Artificial Sequence: Synthetic oligonucleotide
ugauacugaugucuaaaac

SEQ ID NO: 2810851 - RNA, 19 nt, Artificial Sequence
  Description of Artificial Sequence: Synthetic oligonucleotide
agucaauagguuguguugg

SEQ ID NO: 2810852 - RNA, 19 nt, Artificial Sequence
  Description of Artificial Sequence: Synthetic oligonucleotide
gacaagcugaguuaaguca

SEQ ID NO: 2810853 - RNA, 19 nt, Artificial Sequence
  Description of Artificial Sequence: Synthetic oligonucleotide
agcuggaccccauaauccc

SEQ ID NO: 2810854 - RNA, 19 nt, Artificial Sequence
  Description of Artificial Sequence: Synthetic oligonucleotide
aaggcugauacugaugucu

SEQ ID NO: 2810855 - RNA, 19 nt, Artificial Sequence
  Description of Artificial Sequence: Synthetic oligonucleotide
gcugaguuaagucaauagg

SEQ ID NO: 2810856 - RNA, 19 nt, Artificial Sequence
  Description of Artificial Sequence: Synthetic oligonucleotide
auguaaaagggagucugcc

SEQ ID NO: 2810857 - RNA, 19 nt, Artificial Sequence
  Description of Artificial Sequence: Synthetic oligonucleotide
ugggauucggauguaaaag

SEQ ID NO: 2810858 - RNA, 19 nt, Artificial Sequence
  Description of Artificial Sequence: Synthetic oligonucleotide
cauagaaggcuguaguaac

SEQ ID NO: 2810859 - RNA, 19 nt, Artificial Sequence
  Description of Artificial Sequence: Synthetic oligonucleotide
agcugaguuaagucaauag

SEQ ID NO: 2810860 - RNA, 19 nt, Artificial Sequence
  Description of Artificial Sequence: Synthetic oligonucleotide
aucccuuuuaugugguugg

SEQ ID NO: 2810861 - RNA, 19 nt, Artificial Sequence
  Description of Artificial Sequence: Synthetic oligonucleotide
aaaagggagucugcccucc

SEQ ID NO: 2810862 - RNA, 19 nt, Artificial Sequence
  Description of Artificial Sequence: Synthetic oligonucleotide
aaucccuuuuaugugguug

SEQ ID NO: 2810863 - RNA, 19 nt, Artificial Sequence
  Description of Artificial Sequence: Synthetic oligonucleotide
ugaguuaagucaauagguu

SEQ ID NO: 2810864 - RNA, 19 nt, Artificial Sequence
  Description of Artificial Sequence: Synthetic oligonucleotide
uccuuuauggccucugcca

SEQ ID NO: 2810865 - RNA, 19 nt, Artificial Sequence
  Description of Artificial Sequence: Synthetic oligonucleotide
uccuucauugaauccauac

SEQ ID NO: 2810866 - RNA, 19 nt, Artificial Sequence
  Description of Artificial Sequence: Synthetic oligonucleotide
ugaauccauacuuugggau

SEQ ID NO: 2810867 - RNA, 19 nt, Artificial Sequence
  Description of Artificial Sequence: Synthetic oligonucleotide
uuucaaucgcagcaauggc

SEQ ID NO: 2810868 - RNA, 19 nt, Artificial Sequence
  Description of Artificial Sequence: Synthetic oligonucleotide
ugcaccucaauauucacuu

SEQ ID NO: 2810869 - RNA, 19 nt, Artificial Sequence
  Description of Artificial Sequence: Synthetic oligonucleotide
ugagauauugcagucuccu

SEQ ID NO: 2810870 - RNA, 19 nt, Artificial Sequence
  Description of Artificial Sequence: Synthetic oligonucleotide
auacuuugggauucggaug

SEQ ID NO: 2810871 - RNA, 19 nt, Artificial Sequence
  Description of Artificial Sequence: Synthetic oligonucleotide
ucaaucgcagcaauggcua

SEQ ID NO: 2810872 - RNA, 19 nt, Artificial Sequence
  Description of Artificial Sequence: Synthetic oligonucleotide
uuaugugguuggaugguca

SEQ ID NO: 2810873 - RNA, 19 nt, Artificial Sequence
  Description of Artificial Sequence: Synthetic oligonucleotide
gaucaacucgcccuaaauc

SEQ ID NO: 2810874 - RNA, 19 nt, Artificial Sequence
  Description of Artificial Sequence: Synthetic oligonucleotide
ucuuucaaucgcagcaaug

SEQ ID NO: 2810875 - RNA, 19 nt, Artificial Sequence
  Description of Artificial Sequence: Synthetic oligonucleotide
gacuucuugggucauagaa

SEQ ID NO: 2810876 - RNA, 19 nt, Artificial Sequence
  Description of Artificial Sequence: Synthetic oligonucleotide
cuuccauugacaagcugag

SEQ ID NO: 2810877 - RNA, 19 nt, Artificial Sequence
  Description of Artificial Sequence: Synthetic oligonucleotide
ucaaugagauauugcaguc

SEQ ID NO: 2810878 - RNA, 19 nt, Artificial Sequence
  Description of Artificial Sequence: Synthetic oligonucleotide
aaaggcugauacugauguc

SEQ ID NO: 2810879 - RNA, 19 nt, Artificial Sequence
  Description of Artificial Sequence: Synthetic oligonucleotide
ucaaaggcugauacugaug

SEQ ID NO: 2810880 - RNA, 19 nt, Artificial Sequence
  Description of Artificial Sequence: Synthetic oligonucleotide
ucgcccuaaaucaaugaga

SEQ ID NO: 2810881 - RNA, 19 nt, Artificial Sequence
  Description of Artificial Sequence: Synthetic oligonucleotide
uucagguuggccaggcuca

SEQ ID NO: 2810882 - RNA, 19 nt, Artificial Sequence
  Description of Artificial Sequence: Synthetic oligonucleotide
aguaacaacaccaccauuu

SEQ ID NO: 2810883 - RNA, 19 nt, Artificial Sequence
  Description of Artificial Sequence: Synthetic oligonucleotide
aacaacaccaccauuucuu

SEQ ID NO: 2810884 - RNA, 19 nt, Artificial Sequence
  Description of Artificial Sequence: Synthetic oligonucleotide
uauguccuucauugaaucc

SEQ ID NO: 2810885 - RNA, 19 nt, Artificial Sequence
  Description of Artificial Sequence: Synthetic oligonucleotide
ucuugggucauagaaggcu

SEQ ID NO: 2810886 - RNA, 19 nt, Artificial Sequence
  Description of Artificial Sequence: Synthetic oligonucleotide
uugaauccauacuuuggga

SEQ ID NO: 2810887 - RNA, 19 nt, Artificial Sequence
  Description of Artificial Sequence: Synthetic oligonucleotide
ucauagaaggcuguaguaa

SEQ ID NO: 2810888 - RNA, 19 nt, Artificial Sequence
  Description of Artificial Sequence: Synthetic oligonucleotide
uuuucuggagucagcgcug

SEQ ID NO: 2810889 - RNA, 19 nt, Artificial Sequence
  Description of Artificial Sequence: Synthetic oligonucleotide
aggcuguaguaacaacacc

SEQ ID NO: 2810890 - RNA, 19 nt, Artificial Sequence
  Description of Artificial Sequence: Synthetic oligonucleotide
cauuucuuucaaucgcagc

SEQ ID NO: 2810891 - RNA, 19 nt, Artificial Sequence
  Description of Artificial Sequence: Synthetic oligonucleotide
aaacuauguccuucauuga

SEQ ID NO: 2810892 - RNA, 19 nt, Artificial Sequence
  Description of Artificial Sequence: Synthetic oligonucleotide
ugguuggauggucacaccu

SEQ ID NO: 2810893 - RNA, 19 nt, Artificial Sequence
  Description of Artificial Sequence: Synthetic oligonucleotide
uuugggauucggauguaaa

SEQ ID NO: 2810894 - RNA, 19 nt, Artificial Sequence
  Description of Artificial Sequence: Synthetic oligonucleotide
gucuccugagacucaaagg

SEQ ID NO: 2810895 - RNA, 19 nt, Artificial Sequence
  Description of Artificial Sequence: Synthetic oligonucleotide
auuuccuaccucuucuccu

SEQ ID NO: 2810896 - RNA, 19 nt, Artificial Sequence
  Description of Artificial Sequence: Synthetic oligonucleotide
ugugguuggauggucacac

SEQ ID NO: 2810897 - RNA, 19 nt, Artificial Sequence
  Description of Artificial Sequence: Synthetic oligonucleotide
caauagguuguguuggauc

SEQ ID NO: 2810898 - RNA, 19 nt, Artificial Sequence
  Description of Artificial Sequence: Synthetic oligonucleotide
acauuuccuaccucuucuc

SEQ ID NO: 2810899 - RNA, 19 nt, Artificial Sequence
  Description of Artificial Sequence: Synthetic oligonucleotide
uugacaagcugaguuaagu

SEQ ID NO: 2810900 - RNA, 19 nt, Artificial Sequence
  Description of Artificial Sequence: Synthetic oligonucleotide
uguguuggaucaacucgcc

SEQ ID NO: 2810901 - RNA, 19 nt, Artificial Sequence
  Description of Artificial Sequence: Synthetic oligonucleotide
ugccacauuuccuaccucu

SEQ ID NO: 2810902 - RNA, 19 nt, Artificial Sequence
  Description of Artificial Sequence: Synthetic oligonucleotide
acugcaccucaauauucac

SEQ ID NO: 2810903 - RNA, 19 nt, Artificial Sequence
  Description of Artificial Sequence: Synthetic oligonucleotide
aaguaucagcacccucuuc

SEQ ID NO: 2810904 - RNA, 19 nt, Artificial Sequence
  Description of Artificial Sequence: Synthetic oligonucleotide
ugacaagcugaguuaaguc

SEQ ID NO: 2810905 - RNA, 19 nt, Artificial Sequence
  Description of Artificial Sequence: Synthetic oligonucleotide
uaacaacaccaccauuucu

SEQ ID NO: 2810906 - RNA, 19 nt, Artificial Sequence
  Description of Artificial Sequence: Synthetic oligonucleotide
acuucuugggucauagaag

SEQ ID NO: 2810907 - RNA, 19 nt, Artificial Sequence
  Description of Artificial Sequence: Synthetic oligonucleotide
ucggauguaaaagggaguc

SEQ ID NO: 2810908 - RNA, 19 nt, Artificial Sequence
  Description of Artificial Sequence: Synthetic oligonucleotide
aaaguaucagcacccucuu

SEQ ID NO: 2810909 - RNA, 19 nt, Artificial Sequence
  Description of Artificial Sequence: Synthetic oligonucleotide
uucggauguaaaagggagu

SEQ ID NO: 2810910 - RNA, 19 nt, Artificial Sequence
  Description of Artificial Sequence: Synthetic oligonucleotide
uugggauucggauguaaaa

SEQ ID NO: 2810911 - RNA, 19 nt, Artificial Sequence
  Description of Artificial Sequence: Synthetic oligonucleotide
cucuucaaccagcuggacc

SEQ ID NO: 2810912 - RNA, 19 nt, Artificial Sequence
  Description of Artificial Sequence: Synthetic oligonucleotide
cugaguuaagucaauaggu

SEQ ID NO: 2810913 - RNA, 19 nt, Artificial Sequence
  Description of Artificial Sequence: Synthetic oligonucleotide
agcgcugggcuucagguug

SEQ ID NO: 2810914 - RNA, 19 nt, Artificial Sequence
  Description of Artificial Sequence: Synthetic oligonucleotide
uuuuaugugguuggauggu

SEQ ID NO: 2810915 - RNA, 19 nt, Artificial Sequence
  Description of Artificial Sequence: Synthetic oligonucleotide
uccuaucucuuggacgucg

SEQ ID NO: 2810916 - RNA, 19 nt, Artificial Sequence
  Description of Artificial Sequence: Synthetic oligonucleotide
cuguaguaacaacaccacc

SEQ ID NO: 2810917 - RNA, 19 nt, Artificial Sequence
  Description of Artificial Sequence: Synthetic oligonucleotide
cauuuccuaccucuucucc

SEQ ID NO: 2810918 - RNA, 19 nt, Artificial Sequence
  Description of Artificial Sequence: Synthetic oligonucleotide
cucgcccuaaaucaaugag

SEQ ID NO: 2810919 - RNA, 19 nt, Artificial Sequence
  Description of Artificial Sequence: Synthetic oligonucleotide
uggauggucacaccucuuc

SEQ ID NO: 2810920 - RNA, 19 nt, Artificial Sequence
  Description of Artificial Sequence: Synthetic oligonucleotide
ucagcgcugggcuucaggu

SEQ ID NO: 2810921 - RNA, 19 nt, Artificial Sequence
  Description of Artificial Sequence: Synthetic oligonucleotide
ucaacucgcccuaaaucaa

SEQ ID NO: 2810922 - RNA, 19 nt, Artificial Sequence
  Description of Artificial Sequence: Synthetic oligonucleotide
gaaaaguaucagcacccuc

SEQ ID NO: 2810923 - RNA, 19 nt, Artificial Sequence
  Description of Artificial Sequence: Synthetic oligonucleotide
auacugaugucuaaaacua

SEQ ID NO: 2810924 - RNA, 19 nt, Artificial Sequence
  Description of Artificial Sequence: Synthetic oligonucleotide
uaugugguuggauggucac

SEQ ID NO: 2810925 - RNA, 19 nt, Artificial Sequence
  Description of Artificial Sequence: Synthetic oligonucleotide
cagcuggaccccauaaucc

SEQ ID NO: 2810926 - RNA, 19 nt, Artificial Sequence
  Description of Artificial Sequence: Synthetic oligonucleotide
ucuccuuuauggccucugc

SEQ ID NO: 2810927 - RNA, 19 nt, Artificial Sequence
  Description of Artificial Sequence: Synthetic oligonucleotide
ucuucuccuaucucuugga

SEQ ID NO: 2810928 - RNA, 19 nt, Artificial Sequence
  Description of Artificial Sequence: Synthetic oligonucleotide
ccuuuuaugugguuggaug

SEQ ID NO: 2810929 - RNA, 19 nt, Artificial Sequence
  Description of Artificial Sequence: Synthetic oligonucleotide
ucagcacccucuucaacca

SEQ ID NO: 2810930 - RNA, 19 nt, Artificial Sequence
  Description of Artificial Sequence: Synthetic oligonucleotide
uggcuaauucugaagccaa

SEQ ID NO: 2810931 - RNA, 19 nt, Artificial Sequence
  Description of Artificial Sequence: Synthetic oligonucleotide
gauggucacaccucuucca

SEQ ID NO: 2810932 - RNA, 19 nt, Artificial Sequence
  Description of Artificial Sequence: Synthetic oligonucleotide
gauucggauguaaaaggga

SEQ ID NO: 2810933 - RNA, 19 nt, Artificial Sequence
  Description of Artificial Sequence: Synthetic oligonucleotide
uaucucuuggacgucguuc

SEQ ID NO: 2810934 - RNA, 19 nt, Artificial Sequence
  Description of Artificial Sequence: Synthetic oligonucleotide
uuggccaggcucacucgcg

SEQ ID NO: 2810935 - RNA, 19 nt, Artificial Sequence
  Description of Artificial Sequence: Synthetic oligonucleotide
uguccuucauugaauccau

SEQ ID NO: 2810936 - RNA, 19 nt, Artificial Sequence
  Description of Artificial Sequence: Synthetic oligonucleotide
guuuucuggagucagcgcu

SEQ ID NO: 2810937 - RNA, 19 nt, Artificial Sequence
  Description of Artificial Sequence: Synthetic oligonucleotide
ugaaaaguaucagcacccu

SEQ ID NO: 2810938 - RNA, 19 nt, Artificial Sequence
  Description of Artificial Sequence: Synthetic oligonucleotide
uuuccuaccucuucuccua

SEQ ID NO: 2810939 - RNA, 19 nt, Artificial Sequence
  Description of Artificial Sequence: Synthetic oligonucleotide
gcagcaauggcuaauucug

SEQ ID NO: 2810940 - RNA, 19 nt, Artificial Sequence
  Description of Artificial Sequence: Synthetic oligonucleotide
auggcuaauucugaagcca

SEQ ID NO: 2810941 - RNA, 19 nt, Artificial Sequence
  Description of Artificial Sequence: Synthetic oligonucleotide
cucaauauucacuuuugcu

SEQ ID NO: 2810942 - RNA, 19 nt, Artificial Sequence
  Description of Artificial Sequence: Synthetic oligonucleotide
ucacucgcggcagggagcg

SEQ ID NO: 2810943 - RNA, 19 nt, Artificial Sequence
  Description of Artificial Sequence: Synthetic oligonucleotide
uacugaugucuaaaacuau

SEQ ID NO: 2810944 - RNA, 19 nt, Artificial Sequence
  Description of Artificial Sequence: Synthetic oligonucleotide
agcaauggcuaauucugaa

SEQ ID NO: 2810945 - RNA, 19 nt, Artificial Sequence
  Description of Artificial Sequence: Synthetic oligonucleotide
agucugcccucccucaaag

SEQ ID NO: 2810946 - RNA, 19 nt, Artificial Sequence
  Description of Artificial Sequence: Synthetic oligonucleotide
cuccuuuauggccucugcc

SEQ ID NO: 2810947 - RNA, 19 nt, Artificial Sequence
  Description of Artificial Sequence: Synthetic oligonucleotide
ucuuggacgucguucccgu

SEQ ID NO: 2810948 - RNA, 19 nt, Artificial Sequence
  Description of Artificial Sequence: Synthetic oligonucleotide
ucacaccucuuccauugac

SEQ ID NO: 2810949 - RNA, 19 nt, Artificial Sequence
  Description of Artificial Sequence: Synthetic oligonucleotide
uuuaugugguuggaugguc

SEQ ID NO: 2810950 - RNA, 19 nt, Artificial Sequence
  Description of Artificial Sequence: Synthetic oligonucleotide
ccaccauuucuuucaaucg

SEQ ID NO: 2810951 - RNA, 19 nt, Artificial Sequence
  Description of Artificial Sequence: Synthetic oligonucleotide
gcaauggcuaauucugaag

SEQ ID NO: 2810952 - RNA, 19 nt, Artificial Sequence
  Description of Artificial Sequence: Synthetic oligonucleotide
ugaagccaacugcaccuca

SEQ ID NO: 2810953 - RNA, 19 nt, Artificial Sequence
  Description of Artificial Sequence: Synthetic oligonucleotide
agggagucugcccucccuc

SEQ ID NO: 2810954 - RNA, 19 nt, Artificial Sequence
  Description of Artificial Sequence: Synthetic oligonucleotide
agcacccucuucaaccagc

SEQ ID NO: 2810955 - RNA, 19 nt, Artificial Sequence
  Description of Artificial Sequence: Synthetic oligonucleotide
uggccaggcucacucgcgg

SEQ ID NO: 2810956 - RNA, 19 nt, Artificial Sequence
  Description of Artificial Sequence: Synthetic oligonucleotide
uuuauggccucugccacau

SEQ ID NO: 2810957 - RNA, 19 nt, Artificial Sequence
  Description of Artificial Sequence: Synthetic oligonucleotide
agacucaaaggcugauacu

SEQ ID NO: 2810958 - RNA, 19 nt, Artificial Sequence
  Description of Artificial Sequence: Synthetic oligonucleotide
aacucgcccuaaaucaaug

SEQ ID NO: 2810959 - RNA, 19 nt, Artificial Sequence
  Description of Artificial Sequence: Synthetic oligonucleotide
ggcuguaguaacaacacca

SEQ ID NO: 2810960 - RNA, 19 nt, Artificial Sequence
  Description of Artificial Sequence: Synthetic oligonucleotide
uugggucauagaaggcugu

SEQ ID NO: 2810961 - RNA, 19 nt, Artificial Sequence
  Description of Artificial Sequence: Synthetic oligonucleotide
cugcccucccucaaagccc

SEQ ID NO: 2810962 - RNA, 19 nt, Artificial Sequence
  Description of Artificial Sequence: Synthetic oligonucleotide
uccauacuuugggauucgg

SEQ ID NO: 2810963 - RNA, 19 nt, Artificial Sequence
  Description of Artificial Sequence: Synthetic oligonucleotide
cuucuccuaucucuuggac

SEQ ID NO: 2810964 - RNA, 19 nt, Artificial Sequence
  Description of Artificial Sequence: Synthetic oligonucleotide
cucaaagcccagccggggc

SEQ ID NO: 2810965 - RNA, 19 nt, Artificial Sequence
  Description of Artificial Sequence: Synthetic oligonucleotide
uuggacgucguucccguuu

SEQ ID NO: 2810966 - RNA, 19 nt, Artificial Sequence
  Description of Artificial Sequence: Synthetic oligonucleotide
aagccaacugcaccucaau

SEQ ID NO: 2810967 - RNA, 19 nt, Artificial Sequence
  Description of Artificial Sequence: Synthetic oligonucleotide
gcuugaaaaguaucagcac

SEQ ID NO: 2810968 - RNA, 19 nt, Artificial Sequence
  Description of Artificial Sequence: Synthetic oligonucleotide
guucccguuuucuggaguc

SEQ ID NO: 2810969 - RNA, 19 nt, Artificial Sequence
  Description of Artificial Sequence: Synthetic oligonucleotide
auagaaggcuguaguaaca

SEQ ID NO: 2810970 - RNA, 19 nt, Artificial Sequence
  Description of Artificial Sequence: Synthetic oligonucleotide
acucgcccuaaaucaauga

SEQ ID NO: 2810971 - RNA, 19 nt, Artificial Sequence
  Description of Artificial Sequence: Synthetic oligonucleotide
acgucguucccguuuucug

SEQ ID NO: 2810972 - RNA, 19 nt, Artificial Sequence
  Description of Artificial Sequence: Synthetic oligonucleotide
cugauacugaugucuaaaa

SEQ ID NO: 2810973 - RNA, 19 nt, Artificial Sequence
  Description of Artificial Sequence: Synthetic oligonucleotide
ucucuuggacgucguuccc

SEQ ID NO: 2810974 - RNA, 19 nt, Artificial Sequence
  Description of Artificial Sequence: Synthetic oligonucleotide
acuauguccuucauugaau

SEQ ID NO: 2810975 - RNA, 19 nt, Artificial Sequence
  Description of Artificial Sequence: Synthetic oligonucleotide
auggucacaccucuuccau

SEQ ID NO: 2810976 - RNA, 19 nt, Artificial Sequence
  Description of Artificial Sequence: Synthetic oligonucleotide
ccauaaucccuuuuaugug

SEQ ID NO: 2810977 - RNA, 19 nt, Artificial Sequence
  Description of Artificial Sequence: Synthetic oligonucleotide
ucccguuuucuggagucag

SEQ ID NO: 2810978 - RNA, 19 nt, Artificial Sequence
  Description of Artificial Sequence: Synthetic oligonucleotide
ucaauagguuguguuggau

SEQ ID NO: 2810979 - RNA, 19 nt, Artificial Sequence
  Description of Artificial Sequence: Synthetic oligonucleotide
gaauccauacuuugggauu

SEQ ID NO: 2810980 - RNA, 19 nt, Artificial Sequence
  Description of Artificial Sequence: Synthetic oligonucleotide
gaccccauaaucccuuuua

SEQ ID NO: 2810981 - RNA, 19 nt, Artificial Sequence
  Description of Artificial Sequence: Synthetic oligonucleotide
aaucgcagcaauggcuaau

SEQ ID NO: 2810982 - RNA, 19 nt, Artificial Sequence
  Description of Artificial Sequence: Synthetic oligonucleotide
cucacucgcggcagggagc

SEQ ID NO: 2810983 - RNA, 19 nt, Artificial Sequence
  Description of Artificial Sequence: Synthetic oligonucleotide
auugacaagcugaguuaag

SEQ ID NO: 2810984 - RNA, 19 nt, Artificial Sequence
  Description of Artificial Sequence: Synthetic oligonucleotide
ggauggucacaccucuucc

SEQ ID NO: 2810985 - RNA, 19 nt, Artificial Sequence
  Description of Artificial Sequence: Synthetic oligonucleotide
uggaucaacucgcccuaaa

SEQ ID NO: 2810986 - RNA, 19 nt, Artificial Sequence
  Description of Artificial Sequence: Synthetic oligonucleotide
cacaccucuuccauugaca

SEQ ID NO: 2810987 - RNA, 19 nt, Artificial Sequence
  Description of Artificial Sequence: Synthetic oligonucleotide
cucccucaaagcccagccg

SEQ ID NO: 2810988 - RNA, 19 nt, Artificial Sequence
  Description of Artificial Sequence: Synthetic oligonucleotide
guguuggaucaacucgccc

SEQ ID NO: 2810989 - RNA, 19 nt, Artificial Sequence
  Description of Artificial Sequence: Synthetic oligonucleotide
accccauaaucccuuuuau

SEQ ID NO: 2810990 - RNA, 19 nt, Artificial Sequence
  Description of Artificial Sequence: Synthetic oligonucleotide
auauugcagucuccugaga

SEQ ID NO: 2810991 - RNA, 19 nt, Artificial Sequence
  Description of Artificial Sequence: Synthetic oligonucleotide
guaguaacaacaccaccau

SEQ ID NO: 2810992 - RNA, 19 nt, Artificial Sequence
  Description of Artificial Sequence: Synthetic oligonucleotide
uucuggagucagcgcuggg

SEQ ID NO: 2810993 - RNA, 19 nt, Artificial Sequence
  Description of Artificial Sequence: Synthetic oligonucleotide
gucaauagguuguguugga

SEQ ID NO: 2810994 - RNA, 19 nt, Artificial Sequence
  Description of Artificial Sequence: Synthetic oligonucleotide
cccauaaucccuuuuaugu

SEQ ID NO: 2810995 - RNA, 19 nt, Artificial Sequence
  Description of Artificial Sequence: Synthetic oligonucleotide
ccucaauauucacuuuugc

SEQ ID NO: 2810996 - RNA, 19 nt, Artificial Sequence
  Description of Artificial Sequence: Synthetic oligonucleotide
gucguucccguuuucugga

SEQ ID NO: 2810997 - RNA, 19 nt, Artificial Sequence
  Description of Artificial Sequence: Synthetic oligonucleotide
guuggauggucacaccucu

SEQ ID NO: 2810998 - RNA, 19 nt, Artificial Sequence
  Description of Artificial Sequence: Synthetic oligonucleotide
uggacgucguucccguuuu

SEQ ID NO: 2810999 - RNA, 19 nt, Artificial Sequence
  Description of Artificial Sequence: Synthetic oligonucleotide
caccucuuccauugacaag

SEQ ID NO: 2811000 - RNA, 19 nt, Artificial Sequence
  Description of Artificial Sequence: Synthetic oligonucleotide
ugagacucaaaggcugaua

SEQ ID NO: 2811001 - RNA, 19 nt, Artificial Sequence
  Description of Artificial Sequence: Synthetic oligonucleotide
cuuuauggccucugccaca

SEQ ID NO: 2811002 - RNA, 19 nt, Artificial Sequence
  Description of Artificial Sequence: Synthetic oligonucleotide
ucguucccguuuucuggag

SEQ ID NO: 2811003 - RNA, 19 nt, Artificial Sequence
  Description of Artificial Sequence: Synthetic oligonucleotide
guuggaucaacucgcccua

SEQ ID NO: 2811004 - RNA, 19 nt, Artificial Sequence
  Description of Artificial Sequence: Synthetic oligonucleotide
cauugacaagcugaguuaa

SEQ ID NO: 2811005 - RNA, 19 nt, Artificial Sequence
  Description of Artificial Sequence: Synthetic oligonucleotide
cacauuuccuaccucuucu

SEQ ID NO: 2811006 - RNA, 19 nt, Artificial Sequence
  Description of Artificial Sequence: Synthetic oligonucleotide
gcuguaguaacaacaccac

SEQ ID NO: 2811007 - RNA, 19 nt, Artificial Sequence
  Description of Artificial Sequence: Synthetic oligonucleotide
accagcuggaccccauaau

SEQ ID NO: 2811008 - RNA, 19 nt, Artificial Sequence
  Description of Artificial Sequence: Synthetic oligonucleotide
ccagcuggaccccauaauc

SEQ ID NO: 2811009 - RNA, 19 nt, Artificial Sequence
  Description of Artificial Sequence: Synthetic oligonucleotide
ucgcagcaauggcuaauuc

SEQ ID NO: 2811010 - RNA, 19 nt, Artificial Sequence
  Description of Artificial Sequence: Synthetic oligonucleotide
guaucagcacccucuucaa

SEQ ID NO: 2811011 - RNA, 19 nt, Artificial Sequence
  Description of Artificial Sequence: Synthetic oligonucleotide
auauucacuuuugcuugaa

SEQ ID NO: 2811012 - RNA, 19 nt, Artificial Sequence
  Description of Artificial Sequence: Synthetic oligonucleotide
ucccuuuuaugugguugga

SEQ ID NO: 2811013 - RNA, 19 nt, Artificial Sequence
  Description of Artificial Sequence: Synthetic oligonucleotide
uucccguuuucuggaguca

SEQ ID NO: 2811014 - RNA, 19 nt, Artificial Sequence
  Description of Artificial Sequence: Synthetic oligonucleotide
cagcaauggcuaauucuga

SEQ ID NO: 2811015 - RNA, 19 nt, Artificial Sequence
  Description of Artificial Sequence: Synthetic oligonucleotide
uuccauugacaagcugagu

SEQ ID NO: 2811016 - RNA, 19 nt, Artificial Sequence
  Description of Artificial Sequence: Synthetic oligonucleotide
gcucacucgcggcagggag

SEQ ID NO: 2811017 - RNA, 19 nt, Artificial Sequence
  Description of Artificial Sequence: Synthetic oligonucleotide
uuccuaccucuucuccuau

SEQ ID NO: 2811018 - RNA, 19 nt, Artificial Sequence
  Description of Artificial Sequence: Synthetic oligonucleotide
cgucguucccguuuucugg

SEQ ID NO: 2811019 - RNA, 19 nt, Artificial Sequence
  Description of Artificial Sequence: Synthetic oligonucleotide
gugguuggauggucacacc

SEQ ID NO: 2811020 - RNA, 19 nt, Artificial Sequence
  Description of Artificial Sequence: Synthetic oligonucleotide
uucaaccagcuggacccca

SEQ ID NO: 2811021 - RNA, 19 nt, Artificial Sequence
  Description of Artificial Sequence: Synthetic oligonucleotide
uaaucccuuuuaugugguu

SEQ ID NO: 2811022 - RNA, 19 nt, Artificial Sequence
  Description of Artificial Sequence: Synthetic oligonucleotide
ccucccucaaagcccagcc

SEQ ID NO: 2811023 - RNA, 19 nt, Artificial Sequence
  Description of Artificial Sequence: Synthetic oligonucleotide
aucgcagcaauggcuaauu

SEQ ID NO: 2811024 - RNA, 19 nt, Artificial Sequence
  Description of Artificial Sequence: Synthetic oligonucleotide
cuucaaccagcuggacccc

SEQ ID NO: 2811025 - RNA, 19 nt, Artificial Sequence
  Description of Artificial Sequence: Synthetic oligonucleotide
gcugauacugaugucuaaa

SEQ ID NO: 2811026 - RNA, 19 nt, Artificial Sequence
  Description of Artificial Sequence: Synthetic oligonucleotide
uggucacaccucuuccauu

SEQ ID NO: 2811027 - RNA, 19 nt, Artificial Sequence
  Description of Artificial Sequence: Synthetic oligonucleotide
augugguuggauggucaca

SEQ ID NO: 2811028 - RNA, 19 nt, Artificial Sequence
  Description of Artificial Sequence: Synthetic oligonucleotide
ugggucauagaaggcugua

SEQ ID NO: 2811029 - RNA, 19 nt, Artificial Sequence
  Description of Artificial Sequence: Synthetic oligonucleotide
cucaaaggcugauacugau

SEQ ID NO: 2811030 - RNA, 19 nt, Artificial Sequence
  Description of Artificial Sequence: Synthetic oligonucleotide
cagguccaggcuggcaccg

SEQ ID NO: 2811031 - RNA, 19 nt, Artificial Sequence
  Description of Artificial Sequence: Synthetic oligonucleotide
gccaacugcaccucaauau

SEQ ID NO: 2811032 - RNA, 19 nt, Artificial Sequence
  Description of Artificial Sequence: Synthetic oligonucleotide
acucgcggcagggagcgga

SEQ ID NO: 2811033 - RNA, 19 nt, Artificial Sequence
  Description of Artificial Sequence: Synthetic oligonucleotide
aggcucacucgcggcaggg

SEQ ID NO: 2811034 - RNA, 19 nt, Artificial Sequence
  Description of Artificial Sequence: Synthetic oligonucleotide
gagucugcccucccucaaa

SEQ ID NO: 2811035 - RNA, 19 nt, Artificial Sequence
  Description of Artificial Sequence: Synthetic oligonucleotide
cugcaccucaauauucacu

SEQ ID NO: 2811036 - RNA, 19 nt, Artificial Sequence
  Description of Artificial Sequence: Synthetic oligonucleotide
gguuggauggucacaccuc

SEQ ID NO: 2811037 - RNA, 19 nt, Artificial Sequence
  Description of Artificial Sequence: Synthetic oligonucleotide
caaugagauauugcagucu

SEQ ID NO: 2811038 - RNA, 19 nt, Artificial Sequence
  Description of Artificial Sequence: Synthetic oligonucleotide
caccucaauauucacuuuu

SEQ ID NO: 2811039 - RNA, 19 nt, Artificial Sequence
  Description of Artificial Sequence: Synthetic oligonucleotide
cccucaaagcccagccggg

SEQ ID NO: 2811040 - RNA, 19 nt, Artificial Sequence
  Description of Artificial Sequence: Synthetic oligonucleotide
gcuaauucugaagccaacu

SEQ ID NO: 2811041 - RNA, 19 nt, Artificial Sequence
  Description of Artificial Sequence: Synthetic oligonucleotide
cugaagccaacugcaccuc

SEQ ID NO: 2811042 - RNA, 19 nt, Artificial Sequence
  Description of Artificial Sequence: Synthetic oligonucleotide
uuggaucaacucgcccuaa

SEQ ID NO: 2811043 - RNA, 19 nt, Artificial Sequence
  Description of Artificial Sequence: Synthetic oligonucleotide
cagcacccucuucaaccag

SEQ ID NO: 2811044 - RNA, 19 nt, Artificial Sequence
  Description of Artificial Sequence: Synthetic oligonucleotide
cuuugggauucggauguaa

SEQ ID NO: 2811045 - RNA, 19 nt, Artificial Sequence
  Description of Artificial Sequence: Synthetic oligonucleotide
gucacaccucuuccauuga

SEQ ID NO: 2811046 - RNA, 19 nt, Artificial Sequence
  Description of Artificial Sequence: Synthetic oligonucleotide
ccauacuuugggauucgga

SEQ ID NO: 2811047 - RNA, 19 nt, Artificial Sequence
  Description of Artificial Sequence: Synthetic oligonucleotide
cguuuucuggagucagcgc

SEQ ID NO: 2811048 - RNA, 19 nt, Artificial Sequence
  Description of Artificial Sequence: Synthetic oligonucleotide
aggcugauacugaugucua

SEQ ID NO: 2811049 - RNA, 19 nt, Artificial Sequence
  Description of Artificial Sequence: Synthetic oligonucleotide
gacgucguucccguuuucu

SEQ ID NO: 2811050 - RNA, 19 nt, Artificial Sequence
  Description of Artificial Sequence: Synthetic oligonucleotide
ccuucauugaauccauacu

SEQ ID NO: 2811051 - RNA, 19 nt, Artificial Sequence
  Description of Artificial Sequence: Synthetic oligonucleotide
uggaccccauaaucccuuu

SEQ ID NO: 2811052 - RNA, 19 nt, Artificial Sequence
  Description of Artificial Sequence: Synthetic oligonucleotide
ggcuaauucugaagccaac

SEQ ID NO: 2811053 - RNA, 19 nt, Artificial Sequence
  Description of Artificial Sequence: Synthetic oligonucleotide
ggagucagcgcugggcuuc

SEQ ID NO: 2811054 - RNA, 19 nt, Artificial Sequence
  Description of Artificial Sequence: Synthetic oligonucleotide
caaucgcagcaauggcuaa

SEQ ID NO: 2811055 - RNA, 19 nt, Artificial Sequence
  Description of Artificial Sequence: Synthetic oligonucleotide
cccguuuucuggagucagc

SEQ ID NO: 2811056 - RNA, 19 nt, Artificial Sequence
  Description of Artificial Sequence: Synthetic oligonucleotide
ggagcggagcagguccagg

SEQ ID NO: 2811057 - RNA, 19 nt, Artificial Sequence
  Description of Artificial Sequence: Synthetic oligonucleotide
aaagcccagccggggccga

SEQ ID NO: 2811058 - RNA, 19 nt, Artificial Sequence
  Description of Artificial Sequence: Synthetic oligonucleotide
ggggccgaguuccucucug

SEQ ID NO: 2811059 - RNA, 19 nt, Artificial Sequence
  Description of Artificial Sequence: Synthetic oligonucleotide
ggaucaacucgcccuaaau

SEQ ID NO: 2811060 - RNA, 19 nt, Artificial Sequence
  Description of Artificial Sequence: Synthetic oligonucleotide
cacccucuucaaccagcug

SEQ ID NO: 2811061 - RNA, 19 nt, Artificial Sequence
  Description of Artificial Sequence: Synthetic oligonucleotide
cugccacauuuccuaccuc

SEQ ID NO: 2811062 - RNA, 19 nt, Artificial Sequence
  Description of Artificial Sequence: Synthetic oligonucleotide
gggagucugcccucccuca

SEQ ID NO: 2811063 - RNA, 19 nt, Artificial Sequence
  Description of Artificial Sequence: Synthetic oligonucleotide
caacucgcccuaaaucaau

SEQ ID NO: 2811064 - RNA, 19 nt, Artificial Sequence
  Description of Artificial Sequence: Synthetic oligonucleotide
aagcccagccggggccgag

SEQ ID NO: 2811065 - RNA, 19 nt, Artificial Sequence
  Description of Artificial Sequence: Synthetic oligonucleotide
ggccgaguuccucucuguc

SEQ ID NO: 2811066 - RNA, 19 nt, Artificial Sequence
  Description of Artificial Sequence: Synthetic oligonucleotide
ggcugauacugaugucuaa

SEQ ID NO: 2811067 - RNA, 19 nt, Artificial Sequence
  Description of Artificial Sequence: Synthetic oligonucleotide
uuauggccucugccacauu

SEQ ID NO: 2811068 - RNA, 19 nt, Artificial Sequence
  Description of Artificial Sequence: Synthetic oligonucleotide
gagucagcgcugggcuuca

SEQ ID NO: 2811069 - RNA, 19 nt, Artificial Sequence
  Description of Artificial Sequence: Synthetic oligonucleotide
cuccuaucucuuggacguc

SEQ ID NO: 2811070 - RNA, 19 nt, Artificial Sequence
  Description of Artificial Sequence: Synthetic oligonucleotide
gccgaguuccucucugucu

SEQ ID NO: 2811071 - RNA, 19 nt, Artificial Sequence
  Description of Artificial Sequence: Synthetic oligonucleotide
acuuugggauucggaugua

SEQ ID NO: 2811072 - RNA, 19 nt, Artificial Sequence
  Description of Artificial Sequence: Synthetic oligonucleotide
agccggggccgaguuccuc

SEQ ID NO: 2811073 - RNA, 19 nt, Artificial Sequence
  Description of Artificial Sequence: Synthetic oligonucleotide
cgcccuaaaucaaugagau

SEQ ID NO: 2811074 - RNA, 19 nt, Artificial Sequence
  Description of Artificial Sequence: Synthetic oligonucleotide
ggagucugcccucccucaa

SEQ ID NO: 2811075 - RNA, 19 nt, Artificial Sequence
  Description of Artificial Sequence: Synthetic oligonucleotide
ccuaaaucaaugagauauu

SEQ ID NO: 2811076 - RNA, 19 nt, Artificial Sequence
  Description of Artificial Sequence: Synthetic oligonucleotide
ucgcggcagggagcggagc

SEQ ID NO: 2811077 - RNA, 19 nt, Artificial Sequence
  Description of Artificial Sequence: Synthetic oligonucleotide
cuggaccccauaaucccuu

SEQ ID NO: 2811078 - RNA, 19 nt, Artificial Sequence
  Description of Artificial Sequence: Synthetic oligonucleotide
ccaacugcaccucaauauu

SEQ ID NO: 2811079 - RNA, 19 nt, Artificial Sequence
  Description of Artificial Sequence: Synthetic oligonucleotide
gcggcagggagcggagcag

SEQ ID NO: 2811080 - RNA, 19 nt, Artificial Sequence
  Description of Artificial Sequence: Synthetic oligonucleotide
agucagcgcugggcuucag

SEQ ID NO: 2811081 - RNA, 19 nt, Artificial Sequence
  Description of Artificial Sequence: Synthetic oligonucleotide
gcccuaaaucaaugagaua

SEQ ID NO: 2811082 - RNA, 19 nt, Artificial Sequence
  Description of Artificial Sequence: Synthetic oligonucleotide
gggagcggagcagguccag

SEQ ID NO: 2811083 - RNA, 19 nt, Artificial Sequence
  Description of Artificial Sequence: Synthetic oligonucleotide
cuaucucuuggacgucguu

SEQ ID NO: 2811084 - RNA, 19 nt, Artificial Sequence
  Description of Artificial Sequence: Synthetic oligonucleotide
ccaggcuggcaccgccgcc

SEQ ID NO: 2811085 - RNA, 19 nt, Artificial Sequence
  Description of Artificial Sequence: Synthetic oligonucleotide
cugagacucaaaggcugau

SEQ ID NO: 2811086 - RNA, 19 nt, Artificial Sequence
  Description of Artificial Sequence: Synthetic oligonucleotide
gcuggaccccauaaucccu

SEQ ID NO: 2811087 - RNA, 19 nt, Artificial Sequence
  Description of Artificial Sequence: Synthetic oligonucleotide
ccucuucaaccagcuggac

SEQ ID NO: 2811088 - RNA, 19 nt, Artificial Sequence
  Description of Artificial Sequence: Synthetic oligonucleotide
ccgaguuccucucugucuu

SEQ ID NO: 2811089 - RNA, 19 nt, Artificial Sequence
  Description of Artificial Sequence: Synthetic oligonucleotide
caccaccauuucuuucaau

SEQ ID NO: 2811090 - RNA, 19 nt, Artificial Sequence
  Description of Artificial Sequence: Synthetic oligonucleotide
ccuaucucuuggacgucgu

SEQ ID NO: 2811091 - RNA, 19 nt, Artificial Sequence
  Description of Artificial Sequence: Synthetic oligonucleotide
cacucgcggcagggagcgg

SEQ ID NO: 2811092 - RNA, 19 nt, Artificial Sequence
  Description of Artificial Sequence: Synthetic oligonucleotide
gcacccucuucaaccagcu

SEQ ID NO: 2811093 - RNA, 19 nt, Artificial Sequence
  Description of Artificial Sequence: Synthetic oligonucleotide
gccggggccgaguuccucu

SEQ ID NO: 2811094 - RNA, 19 nt, Artificial Sequence
  Description of Artificial Sequence: Synthetic oligonucleotide
ggcucacucgcggcaggga

SEQ ID NO: 2811095 - RNA, 19 nt, Artificial Sequence
  Description of Artificial Sequence: Synthetic oligonucleotide
ccggggccgaguuccucuc

SEQ ID NO: 2811096 - RNA, 19 nt, Artificial Sequence
  Description of Artificial Sequence: Synthetic oligonucleotide
cagcgcugggcuucagguu

SEQ ID NO: 2811097 - RNA, 19 nt, Artificial Sequence
  Description of Artificial Sequence: Synthetic oligonucleotide
gcaccucaauauucacuuu

SEQ ID NO: 2811098 - RNA, 19 nt, Artificial Sequence
  Description of Artificial Sequence: Synthetic oligonucleotide
ggaccccauaaucccuuuu

SEQ ID NO: 2811099 - RNA, 19 nt, Artificial Sequence
  Description of Artificial Sequence: Synthetic oligonucleotide
cgcggcagggagcggagca

SEQ ID NO: 2811100 - RNA, 19 nt, Artificial Sequence
  Description of Artificial Sequence: Synthetic oligonucleotide
cuuggacgucguucccguu

SEQ ID NO: 2811101 - RNA, 19 nt, Artificial Sequence
  Description of Artificial Sequence: Synthetic oligonucleotide
cccuuuuaugugguuggau

SEQ ID NO: 2811102 - RNA, 19 nt, Artificial Sequence
  Description of Artificial Sequence: Synthetic oligonucleotide
cccagccggggccgaguuc

SEQ ID NO: 2811103 - RNA, 19 nt, Artificial Sequence
  Description of Artificial Sequence: Synthetic oligonucleotide
cggauguaaaagggagucu

SEQ ID NO: 2811104 - RNA, 19 nt, Artificial Sequence
  Description of Artificial Sequence: Synthetic oligonucleotide
cguucccguuuucuggagu

SEQ ID NO: 2811105 - RNA, 19 nt, Artificial Sequence
  Description of Artificial Sequence: Synthetic oligonucleotide
cagccggggccgaguuccu

SEQ ID NO: 2811106 - RNA, 19 nt, Artificial Sequence
  Description of Artificial Sequence: Synthetic oligonucleotide
cggggccgaguuccucucu

SEQ ID NO: 2811107 - RNA, 19 nt, Artificial Sequence
  Description of Artificial Sequence: Synthetic oligonucleotide
auuuacgugauacacaucc

SEQ ID NO: 2811108 - RNA, 19 nt, Artificial Sequence
  Description of Artificial Sequence: Synthetic oligonucleotide
uuaagugacauauuuaugg

SEQ ID NO: 2811109 - RNA, 19 nt, Artificial Sequence
  Description of Artificial Sequence: Synthetic oligonucleotide
ucuuaaugcauucagauga

SEQ ID NO: 2811110 - RNA, 19 nt, Artificial Sequence
  Description of Artificial Sequence: Synthetic oligonucleotide
uucagaugaacuaugacug

SEQ ID NO: 2811111 - RNA, 19 nt, Artificial Sequence
  Description of Artificial Sequence: Synthetic oligonucleotide
augggcauaucuuagagac

SEQ ID NO: 2811112 - RNA, 19 nt, Artificial Sequence
  Description of Artificial Sequence: Synthetic oligonucleotide
acuaugacuguucucauac

SEQ ID NO: 2811113 - RNA, 19 nt, Artificial Sequence
  Description of Artificial Sequence: Synthetic oligonucleotide
ugaaauuucgccaggaugu

SEQ ID NO: 2811114 - RNA, 19 nt, Artificial Sequence
  Description of Artificial Sequence: Synthetic oligonucleotide
uauuuauggaaaauaguug

SEQ ID NO: 2811115 - RNA, 19 nt, Artificial Sequence
  Description of Artificial Sequence: Synthetic oligonucleotide
auuuauggaaaauaguuga

SEQ ID NO: 2811116 - RNA, 19 nt, Artificial Sequence
  Description of Artificial Sequence: Synthetic oligonucleotide
gaaaaugccugucaagggg

SEQ ID NO: 2811117 - RNA, 19 nt, Artificial Sequence
  Description of Artificial Sequence: Synthetic oligonucleotide
uauuaagugacauauuuau

SEQ ID NO: 2811118 - RNA, 19 nt, Artificial Sequence
  Description of Artificial Sequence: Synthetic oligonucleotide
ugcuuaaucacccauucug

SEQ ID NO: 2811119 - RNA, 19 nt, Artificial Sequence
  Description of Artificial Sequence: Synthetic oligonucleotide
ugaacuaugacuguucuca

SEQ ID NO: 2811120 - RNA, 19 nt, Artificial Sequence
  Description of Artificial Sequence: Synthetic oligonucleotide
uucuguguuaccuucgagg

SEQ ID NO: 2811121 - RNA, 19 nt, Artificial Sequence
  Description of Artificial Sequence: Synthetic oligonucleotide
aaauaguugaaaaugccug

SEQ ID NO: 2811122 - RNA, 19 nt, Artificial Sequence
  Description of Artificial Sequence: Synthetic oligonucleotide
uauauaugcaucgggaucc

SEQ ID NO: 2811123 - RNA, 19 nt, Artificial Sequence
  Description of Artificial Sequence: Synthetic oligonucleotide
auauauaugcaucgggauc

SEQ ID NO: 2811124 - RNA, 19 nt, Artificial Sequence
  Description of Artificial Sequence: Synthetic oligonucleotide
uucucauacugaaauuucg

SEQ ID NO: 2811125 - RNA, 19 nt, Artificial Sequence
  Description of Artificial Sequence: Synthetic oligonucleotide
uacacauccaauauauaug

SEQ ID NO: 2811126 - RNA, 19 nt, Artificial Sequence
  Description of Artificial Sequence: Synthetic oligonucleotide
aauauauaugcaucgggau

SEQ ID NO: 2811127 - RNA, 19 nt, Artificial Sequence
  Description of Artificial Sequence: Synthetic oligonucleotide
aauaguugaaaaugccugu

SEQ ID NO: 2811128 - RNA, 19 nt, Artificial Sequence
  Description of Artificial Sequence: Synthetic oligonucleotide
ugauacacauccaauauau

SEQ ID NO: 2811129 - RNA, 19 nt, Artificial Sequence
  Description of Artificial Sequence: Synthetic oligonucleotide
ugacuguugagcugaaugg

SEQ ID NO: 2811130 - RNA, 19 nt, Artificial Sequence
  Description of Artificial Sequence: Synthetic oligonucleotide
aggcaagucagacacacac

SEQ ID NO: 2811131 - RNA, 19 nt, Artificial Sequence
  Description of Artificial Sequence: Synthetic oligonucleotide
ugcaucgggauccaaacag

SEQ ID NO: 2811132 - RNA, 19 nt, Artificial Sequence
  Description of Artificial Sequence: Synthetic oligonucleotide
cauacugaaauuucgccag

SEQ ID NO: 2811133 - RNA, 19 nt, Artificial Sequence
  Description of Artificial Sequence: Synthetic oligonucleotide
ugcaucuuaaugcauucag

SEQ ID NO: 2811134 - RNA, 19 nt, Artificial Sequence
  Description of Artificial Sequence: Synthetic oligonucleotide
agaaguggagcguggaccc

SEQ ID NO: 2811135 - RNA, 19 nt, Artificial Sequence
  Description of Artificial Sequence: Synthetic oligonucleotide
uaugacuguucucauacug

SEQ ID NO: 2811136 - RNA, 19 nt, Artificial Sequence
  Description of Artificial Sequence: Synthetic oligonucleotide
auccaauauauaugcaucg

SEQ ID NO: 2811137 - RNA, 19 nt, Artificial Sequence
  Description of Artificial Sequence: Synthetic oligonucleotide
uuucuucuaggcaagucag

SEQ ID NO: 2811138 - RNA, 19 nt, Artificial Sequence
  Description of Artificial Sequence: Synthetic oligonucleotide
ugguucugcaucuuaaugc

SEQ ID NO: 2811139 - RNA, 19 nt, Artificial Sequence
  Description of Artificial Sequence: Synthetic oligonucleotide
uucauauaaccuuugguuc

SEQ ID NO: 2811140 - RNA, 19 nt, Artificial Sequence
  Description of Artificial Sequence: Synthetic oligonucleotide
uuuggacagaaguggagcg

SEQ ID NO: 2811141 - RNA, 19 nt, Artificial Sequence
  Description of Artificial Sequence: Synthetic oligonucleotide
auacacauccaauauauau

SEQ ID NO: 2811142 - RNA, 19 nt, Artificial Sequence
  Description of Artificial Sequence: Synthetic oligonucleotide
ugaaaaugccugucaaggg

SEQ ID NO: 2811143 - RNA, 19 nt, Artificial Sequence
  Description of Artificial Sequence: Synthetic oligonucleotide
guuucuucacacuugggag

SEQ ID NO: 2811144 - RNA, 19 nt, Artificial Sequence
  Description of Artificial Sequence: Synthetic oligonucleotide
ucauacugaaauuucgcca

SEQ ID NO: 2811145 - RNA, 19 nt, Artificial Sequence
  Description of Artificial Sequence: Synthetic oligonucleotide
ugacacuuuggacagaagu

SEQ ID NO: 2811146 - RNA, 19 nt, Artificial Sequence
  Description of Artificial Sequence: Synthetic oligonucleotide
uuacaguucuuucuucuag

SEQ ID NO: 2811147 - RNA, 19 nt, Artificial Sequence
  Description of Artificial Sequence: Synthetic oligonucleotide
uuagagacuugucuagugc

SEQ ID NO: 2811148 - RNA, 19 nt, Artificial Sequence
  Description of Artificial Sequence: Synthetic oligonucleotide
agugcuuaaucacccauuc

SEQ ID NO: 2811149 - RNA, 19 nt, Artificial Sequence
  Description of Artificial Sequence: Synthetic oligonucleotide
gaaaauaguugaaaaugcc

SEQ ID NO: 2811150 - RNA, 19 nt, Artificial Sequence
  Description of Artificial Sequence: Synthetic oligonucleotide
aguuucuucacacuuggga

SEQ ID NO: 2811151 - RNA, 19 nt, Artificial Sequence
  Description of Artificial Sequence: Synthetic oligonucleotide
auuacucuuuauuaaguga

SEQ ID NO: 2811152 - RNA, 19 nt, Artificial Sequence
  Description of Artificial Sequence: Synthetic oligonucleotide
uaaucacccauucugcaug

SEQ ID NO: 2811153 - RNA, 19 nt, Artificial Sequence
  Description of Artificial Sequence: Synthetic oligonucleotide
agugcuguccuauguuucc

SEQ ID NO: 2811154 - RNA, 19 nt, Artificial Sequence
  Description of Artificial Sequence: Synthetic oligonucleotide
ucauauaaccuuugguucu

SEQ ID NO: 2811155 - RNA, 19 nt, Artificial Sequence
  Description of Artificial Sequence: Synthetic oligonucleotide
aggucuuggggcuggaacc

SEQ ID NO: 2811156 - RNA, 19 nt, Artificial Sequence
  Description of Artificial Sequence: Synthetic oligonucleotide
uguguuaccuucgaggucu

SEQ ID NO: 2811157 - RNA, 19 nt, Artificial Sequence
  Description of Artificial Sequence: Synthetic oligonucleotide
cuaguuucuucacacuugg

SEQ ID NO: 2811158 - RNA, 19 nt, Artificial Sequence
  Description of Artificial Sequence: Synthetic oligonucleotide
accuucgaggucuuggggc

SEQ ID NO: 2811159 - RNA, 19 nt, Artificial Sequence
  Description of Artificial Sequence: Synthetic oligonucleotide
caaggggaguguuauaucc

SEQ ID NO: 2811160 - RNA, 19 nt, Artificial Sequence
  Description of Artificial Sequence: Synthetic oligonucleotide
ugagcuaguuucuucacac

SEQ ID NO: 2811161 - RNA, 19 nt, Artificial Sequence
  Description of Artificial Sequence: Synthetic oligonucleotide
ugucuagugcuuaaucacc

SEQ ID NO: 2811162 - RNA, 19 nt, Artificial Sequence
  Description of Artificial Sequence: Synthetic oligonucleotide
ucuguguuaccuucgaggu

SEQ ID NO: 2811163 - RNA, 19 nt, Artificial Sequence
  Description of Artificial Sequence: Synthetic oligonucleotide
gaaugggcauaucuuagag

SEQ ID NO: 2811164 - RNA, 19 nt, Artificial Sequence
  Description of Artificial Sequence: Synthetic oligonucleotide
uaaccuuugguucugcauc

SEQ ID NO: 2811165 - RNA, 19 nt, Artificial Sequence
  Description of Artificial Sequence: Synthetic oligonucleotide
uaagugacauauuuaugga

SEQ ID NO: 2811166 - RNA, 19 nt, Artificial Sequence
  Description of Artificial Sequence: Synthetic oligonucleotide
uugaaggugauuucugugu

SEQ ID NO: 2811167 - RNA, 19 nt, Artificial Sequence
  Description of Artificial Sequence: Synthetic oligonucleotide
ugcauggggauuuacguga

SEQ ID NO: 2811168 - RNA, 19 nt, Artificial Sequence
  Description of Artificial Sequence: Synthetic oligonucleotide
uuauuaagugacauauuua

SEQ ID NO: 2811169 - RNA, 19 nt, Artificial Sequence
  Description of Artificial Sequence: Synthetic oligonucleotide
aaucacccauucugcaugg

SEQ ID NO: 2811170 - RNA, 19 nt, Artificial Sequence
  Description of Artificial Sequence: Synthetic oligonucleotide
acuugucuagugcuuaauc

SEQ ID NO: 2811171 - RNA, 19 nt, Artificial Sequence
  Description of Artificial Sequence: Synthetic oligonucleotide
ucgggauccaaacagugcu

SEQ ID NO: 2811172 - RNA, 19 nt, Artificial Sequence
  Description of Artificial Sequence: Synthetic oligonucleotide
acauccaauauauaugcau

SEQ ID NO: 2811173 - RNA, 19 nt, Artificial Sequence
  Description of Artificial Sequence: Synthetic oligonucleotide
auggggauuuacgugauac

SEQ ID NO: 2811174 - RNA, 19 nt, Artificial Sequence
  Description of Artificial Sequence: Synthetic oligonucleotide
uccaauauauaugcaucgg

SEQ ID NO: 2811175 - RNA, 19 nt, Artificial Sequence
  Description of Artificial Sequence: Synthetic oligonucleotide
gacuucauauaaccuuugg

SEQ ID NO: 2811176 - RNA, 19 nt, Artificial Sequence
  Description of Artificial Sequence: Synthetic oligonucleotide
acuucauauaaccuuuggu

SEQ ID NO: 2811177 - RNA, 19 nt, Artificial Sequence
  Description of Artificial Sequence: Synthetic oligonucleotide
aaugggcauaucuuagaga

SEQ ID NO: 2811178 - RNA, 19 nt, Artificial Sequence
  Description of Artificial Sequence: Synthetic oligonucleotide
cauccaauauauaugcauc

SEQ ID NO: 2811179 - RNA, 19 nt, Artificial Sequence
  Description of Artificial Sequence: Synthetic oligonucleotide
cagacacacacaugaaugg

SEQ ID NO: 2811180 - RNA, 19 nt, Artificial Sequence
  Description of Artificial Sequence: Synthetic oligonucleotide
uuaccuucgaggucuuggg

SEQ ID NO: 2811181 - RNA, 19 nt, Artificial Sequence
  Description of Artificial Sequence: Synthetic oligonucleotide
uaugcaucgggauccaaac

SEQ ID NO: 2811182 - RNA, 19 nt, Artificial Sequence
  Description of Artificial Sequence: Synthetic oligonucleotide
aucuuagagacuugucuag

SEQ ID NO: 2811183 - RNA, 19 nt, Artificial Sequence
  Description of Artificial Sequence: Synthetic oligonucleotide
uuuggucugacuguugagc

SEQ ID NO: 2811184 - RNA, 19 nt, Artificial Sequence
  Description of Artificial Sequence: Synthetic oligonucleotide
caauauauaugcaucggga

SEQ ID NO: 2811185 - RNA, 19 nt, Artificial Sequence
  Description of Artificial Sequence: Synthetic oligonucleotide
ucacccauucugcaugggg

SEQ ID NO: 2811186 - RNA, 19 nt, Artificial Sequence
  Description of Artificial Sequence: Synthetic oligonucleotide
cuuccucugagcuaguuuc

SEQ ID NO: 2811187 - RNA, 19 nt, Artificial Sequence
  Description of Artificial Sequence: Synthetic oligonucleotide
ugucacauuacucuuuauu

SEQ ID NO: 2811188 - RNA, 19 nt, Artificial Sequence
  Description of Artificial Sequence: Synthetic oligonucleotide
cugacuguugagcugaaug

SEQ ID NO: 2811189 - RNA, 19 nt, Artificial Sequence
  Description of Artificial Sequence: Synthetic oligonucleotide
ugcauucagaugaacuaug

SEQ ID NO: 2811190 - RNA, 19 nt, Artificial Sequence
  Description of Artificial Sequence: Synthetic oligonucleotide
cugaaauuucgccaggaug

SEQ ID NO: 2811191 - RNA, 19 nt, Artificial Sequence
  Description of Artificial Sequence: Synthetic oligonucleotide
guugaaaaugccugucaag

SEQ ID NO: 2811192 - RNA, 19 nt, Artificial Sequence
  Description of Artificial Sequence: Synthetic oligonucleotide
gacacuuuggacagaagug

SEQ ID NO: 2811193 - RNA, 19 nt, Artificial Sequence
  Description of Artificial Sequence: Synthetic oligonucleotide
auggaaaauaguugaaaau

SEQ ID NO: 2811194 - RNA, 19 nt, Artificial Sequence
  Description of Artificial Sequence: Synthetic oligonucleotide
aaggggaguguuauauccc

SEQ ID NO: 2811195 - RNA, 19 nt, Artificial Sequence
  Description of Artificial Sequence: Synthetic oligonucleotide
aucuuaaugcauucagaug

SEQ ID NO: 2811196 - RNA, 19 nt, Artificial Sequence
  Description of Artificial Sequence: Synthetic oligonucleotide
uaugacgccuucuggcacg

SEQ ID NO: 2811197 - RNA, 19 nt, Artificial Sequence
  Description of Artificial Sequence: Synthetic oligonucleotide
ggaaaauaguugaaaaugc

SEQ ID NO: 2811198 - RNA, 19 nt, Artificial Sequence
  Description of Artificial Sequence: Synthetic oligonucleotide
uuacgugauacacauccaa

SEQ ID NO: 2811199 - RNA, 19 nt, Artificial Sequence
  Description of Artificial Sequence: Synthetic oligonucleotide
gauccaaacagugcugucc

SEQ ID NO: 2811200 - RNA, 19 nt, Artificial Sequence
  Description of Artificial Sequence: Synthetic oligonucleotide
agcguggacccuuaugacg

SEQ ID NO: 2811201 - RNA, 19 nt, Artificial Sequence
  Description of Artificial Sequence: Synthetic oligonucleotide
uucgccaggaugucuuugg

SEQ ID NO: 2811202 - RNA, 19 nt, Artificial Sequence
  Description of Artificial Sequence: Synthetic oligonucleotide
uggccauugacacuuugga

SEQ ID NO: 2811203 - RNA, 19 nt, Artificial Sequence
  Description of Artificial Sequence: Synthetic oligonucleotide
auaguugaaaaugccuguc

SEQ ID NO: 2811204 - RNA, 19 nt, Artificial Sequence
  Description of Artificial Sequence: Synthetic oligonucleotide
acgucagacauucuucuug

SEQ ID NO: 2811205 - RNA, 19 nt, Artificial Sequence
  Description of Artificial Sequence: Synthetic oligonucleotide
guuaccuucgaggucuugg

SEQ ID NO: 2811206 - RNA, 19 nt, Artificial Sequence
  Description of Artificial Sequence: Synthetic oligonucleotide
cuuuggacagaaguggagc

SEQ ID NO: 2811207 - RNA, 19 nt, Artificial Sequence
  Description of Artificial Sequence: Synthetic oligonucleotide
uacucuuuauuaagugaca

SEQ ID NO: 2811208 - RNA, 19 nt, Artificial Sequence
  Description of Artificial Sequence: Synthetic oligonucleotide
ucuucuaggcaagucagac

SEQ ID NO: 2811209 - RNA, 19 nt, Artificial Sequence
  Description of Artificial Sequence: Synthetic oligonucleotide
uaugucacauuacucuuua

SEQ ID NO: 2811210 - RNA, 19 nt, Artificial Sequence
  Description of Artificial Sequence: Synthetic oligonucleotide
aaaaugccugucaagggga

SEQ ID NO: 2811211 - RNA, 19 nt, Artificial Sequence
  Description of Artificial Sequence: Synthetic oligonucleotide
cuuagagacuugucuagug

SEQ ID NO: 2811212 - RNA, 19 nt, Artificial Sequence
  Description of Artificial Sequence: Synthetic oligonucleotide
ugaaugggcauaucuuaga

SEQ ID NO: 2811213 - RNA, 19 nt, Artificial Sequence
  Description of Artificial Sequence: Synthetic oligonucleotide
uuaaucacccauucugcau

SEQ ID NO: 2811214 - RNA, 19 nt, Artificial Sequence
  Description of Artificial Sequence: Synthetic oligonucleotide
aguugaaaaugccugucaa

SEQ ID NO: 2811215 - RNA, 19 nt, Artificial Sequence
  Description of Artificial Sequence: Synthetic oligonucleotide
uuuacgugauacacaucca

SEQ ID NO: 2811216 - RNA, 19 nt, Artificial Sequence
  Description of Artificial Sequence: Synthetic oligonucleotide
uccgacuucauauaaccuu

SEQ ID NO: 2811217 - RNA, 19 nt, Artificial Sequence
  Description of Artificial Sequence: Synthetic oligonucleotide
gacauauuuauggaaaaua

SEQ ID NO: 2811218 - RNA, 19 nt, Artificial Sequence
  Description of Artificial Sequence: Synthetic oligonucleotide
uguccuauguuuccuccga

SEQ ID NO: 2811219 - RNA, 19 nt, Artificial Sequence
  Description of Artificial Sequence: Synthetic oligonucleotide
gacacacacaugaaugggc

SEQ ID NO: 2811220 - RNA, 19 nt, Artificial Sequence
  Description of Artificial Sequence: Synthetic oligonucleotide
ugacuguucucauacugaa

SEQ ID NO: 2811221 - RNA, 19 nt, Artificial Sequence
  Description of Artificial Sequence: Synthetic oligonucleotide
uccagcgucuuccucugag

SEQ ID NO: 2811222 - RNA, 19 nt, Artificial Sequence
  Description of Artificial Sequence: Synthetic oligonucleotide
aauggccauugacacuuug

SEQ ID NO: 2811223 - RNA, 19 nt, Artificial Sequence
  Description of Artificial Sequence: Synthetic oligonucleotide
ucugcaucuuaaugcauuc

SEQ ID NO: 2811224 - RNA, 19 nt, Artificial Sequence
  Description of Artificial Sequence: Synthetic oligonucleotide
ccaauauauaugcaucggg

SEQ ID NO: 2811225 - RNA, 19 nt, Artificial Sequence
  Description of Artificial Sequence: Synthetic oligonucleotide
uucugcaucuuaaugcauu

SEQ ID NO: 2811226 - RNA, 19 nt, Artificial Sequence
  Description of Artificial Sequence: Synthetic oligonucleotide
agacacacacaugaauggg

SEQ ID NO: 2811227 - RNA, 19 nt, Artificial Sequence
  Description of Artificial Sequence: Synthetic oligonucleotide
agaugaacuaugacuguuc

SEQ ID NO: 2811228 - RNA, 19 nt, Artificial Sequence
  Description of Artificial Sequence: Synthetic oligonucleotide
ucuggcacgucagacauuc

SEQ ID NO: 2811229 - RNA, 19 nt, Artificial Sequence
  Description of Artificial Sequence: Synthetic oligonucleotide
gccauugacacuuuggaca

SEQ ID NO: 2811230 - RNA, 19 nt, Artificial Sequence
  Description of Artificial Sequence: Synthetic oligonucleotide
cuucauauaaccuuugguu

SEQ ID NO: 2811231 - RNA, 19 nt, Artificial Sequence
  Description of Artificial Sequence: Synthetic oligonucleotide
auuaagugacauauuuaug

SEQ ID NO: 2811232 - RNA, 19 nt, Artificial Sequence
  Description of Artificial Sequence: Synthetic oligonucleotide
uacgugauacacauccaau

SEQ ID NO: 2811233 - RNA, 19 nt, Artificial Sequence
  Description of Artificial Sequence: Synthetic oligonucleotide
cuaggcaagucagacacac

SEQ ID NO: 2811234 - RNA, 19 nt, Artificial Sequence
  Description of Artificial Sequence: Synthetic oligonucleotide
auccaaacagugcuguccu

SEQ ID NO: 2811235 - RNA, 19 nt, Artificial Sequence
  Description of Artificial Sequence: Synthetic oligonucleotide
uaccuucgaggucuugggg

SEQ ID NO: 2811236 - RNA, 19 nt, Artificial Sequence
  Description of Artificial Sequence: Synthetic oligonucleotide
gacuguugagcugaauggc

SEQ ID NO: 2811237 - RNA, 19 nt, Artificial Sequence
  Description of Artificial Sequence: Synthetic oligonucleotide
uuuacaguucuuucuucua

SEQ ID NO: 2811238 - RNA, 19 nt, Artificial Sequence
  Description of Artificial Sequence: Synthetic oligonucleotide
uaguuucuucacacuuggg

SEQ ID NO: 2811239 - RNA, 19 nt, Artificial Sequence
  Description of Artificial Sequence: Synthetic oligonucleotide
uauaaccuuugguucugca

SEQ ID NO: 2811240 - RNA, 19 nt, Artificial Sequence
  Description of Artificial Sequence: Synthetic oligonucleotide
cauaucuuagagacuuguc

SEQ ID NO: 2811241 - RNA, 19 nt, Artificial Sequence
  Description of Artificial Sequence: Synthetic oligonucleotide
aucgggauccaaacagugc

SEQ ID NO: 2811242 - RNA, 19 nt, Artificial Sequence
  Description of Artificial Sequence: Synthetic oligonucleotide
auuucuguguuaccuucga

SEQ ID NO: 2811243 - RNA, 19 nt, Artificial Sequence
  Description of Artificial Sequence: Synthetic oligonucleotide
ucagaugaacuaugacugu

SEQ ID NO: 2811244 - RNA, 19 nt, Artificial Sequence
  Description of Artificial Sequence: Synthetic oligonucleotide
gcugaauggccauugacac

SEQ ID NO: 2811245 - RNA, 19 nt, Artificial Sequence
  Description of Artificial Sequence: Synthetic oligonucleotide
ucuagugcuuaaucaccca

SEQ ID NO: 2811246 - RNA, 19 nt, Artificial Sequence
  Description of Artificial Sequence: Synthetic oligonucleotide
ugggaguugcuucuucaac

SEQ ID NO: 2811247 - RNA, 19 nt, Artificial Sequence
  Description of Artificial Sequence: Synthetic oligonucleotide
cuuaaucacccauucugca

SEQ ID NO: 2811248 - RNA, 19 nt, Artificial Sequence
  Description of Artificial Sequence: Synthetic oligonucleotide
augaaugggcauaucuuag

SEQ ID NO: 2811249 - RNA, 19 nt, Artificial Sequence
  Description of Artificial Sequence: Synthetic oligonucleotide
agcuaguuucuucacacuu

SEQ ID NO: 2811250 - RNA, 19 nt, Artificial Sequence
  Description of Artificial Sequence: Synthetic oligonucleotide
gaggucuuggggcuggaac

SEQ ID NO: 2811251 - RNA, 19 nt, Artificial Sequence
  Description of Artificial Sequence: Synthetic oligonucleotide
ugucuuuggcuuuggucug

SEQ ID NO: 2811252 - RNA, 19 nt, Artificial Sequence
  Description of Artificial Sequence: Synthetic oligonucleotide
cuuaugacgccuucuggca

SEQ ID NO: 2811253 - RNA, 19 nt, Artificial Sequence
  Description of Artificial Sequence: Synthetic oligonucleotide
acgugauacacauccaaua

SEQ ID NO: 2811254 - RNA, 19 nt, Artificial Sequence
  Description of Artificial Sequence: Synthetic oligonucleotide
agcugaauggccauugaca

SEQ ID NO: 2811255 - RNA, 19 nt, Artificial Sequence
  Description of Artificial Sequence: Synthetic oligonucleotide
aacuaugacuguucucaua

SEQ ID NO: 2811256 - RNA, 19 nt, Artificial Sequence
  Description of Artificial Sequence: Synthetic oligonucleotide
caucgggauccaaacagug

SEQ ID NO: 2811257 - RNA, 19 nt, Artificial Sequence
  Description of Artificial Sequence: Synthetic oligonucleotide
aauuucgccaggaugucuu

SEQ ID NO: 2811258 - RNA, 19 nt, Artificial Sequence
  Description of Artificial Sequence: Synthetic oligonucleotide
uccuauguuuccuccgacu

SEQ ID NO: 2811259 - RNA, 19 nt, Artificial Sequence
  Description of Artificial Sequence: Synthetic oligonucleotide
uggacagaaguggagcgug

SEQ ID NO: 2811260 - RNA, 19 nt, Artificial Sequence
  Description of Artificial Sequence: Synthetic oligonucleotide
auauaaccuuugguucugc

SEQ ID NO: 2811261 - RNA, 19 nt, Artificial Sequence
  Description of Artificial Sequence: Synthetic oligonucleotide
ggaguugcuucuucaacag

SEQ ID NO: 2811262 - RNA, 19 nt, Artificial Sequence
  Description of Artificial Sequence: Synthetic oligonucleotide
ggaaccucccgcuccagcg

SEQ ID NO: 2811263 - RNA, 19 nt, Artificial Sequence
  Description of Artificial Sequence: Synthetic oligonucleotide
caugaaugggcauaucuua

SEQ ID NO: 2811264 - RNA, 19 nt, Artificial Sequence
  Description of Artificial Sequence: Synthetic oligonucleotide
ccuuaugacgccuucuggc

SEQ ID NO: 2811265 - RNA, 19 nt, Artificial Sequence
  Description of Artificial Sequence: Synthetic oligonucleotide
uugagcugaauggccauug

SEQ ID NO: 2811266 - RNA, 19 nt, Artificial Sequence
  Description of Artificial Sequence: Synthetic oligonucleotide
aaauuucgccaggaugucu

SEQ ID NO: 2811267 - RNA, 19 nt, Artificial Sequence
  Description of Artificial Sequence: Synthetic oligonucleotide
acccuuaugacgccuucug

SEQ ID NO: 2811268 - RNA, 19 nt, Artificial Sequence
  Description of Artificial Sequence: Synthetic oligonucleotide
gaugaacuaugacuguucu

SEQ ID NO: 2811269 - RNA, 19 nt, Artificial Sequence
  Description of Artificial Sequence: Synthetic oligonucleotide
gucuagugcuuaaucaccc

SEQ ID NO: 2811270 - RNA, 19 nt, Artificial Sequence
  Description of Artificial Sequence: Synthetic oligonucleotide
guuuccuccgacuucauau

SEQ ID NO: 2811271 - RNA, 19 nt, Artificial Sequence
  Description of Artificial Sequence: Synthetic oligonucleotide
ucuuagagacuugucuagu

SEQ ID NO: 2811272 - RNA, 19 nt, Artificial Sequence
  Description of Artificial Sequence: Synthetic oligonucleotide
auugacacuuuggacagaa

SEQ ID NO: 2811273 - RNA, 19 nt, Artificial Sequence
  Description of Artificial Sequence: Synthetic oligonucleotide
ggagcguggacccuuauga

SEQ ID NO: 2811274 - RNA, 19 nt, Artificial Sequence
  Description of Artificial Sequence: Synthetic oligonucleotide
uggggauuuacgugauaca

SEQ ID NO: 2811275 - RNA, 19 nt, Artificial Sequence
  Description of Artificial Sequence: Synthetic oligonucleotide
gguucugcaucuuaaugca

SEQ ID NO: 2811276 - RNA, 19 nt, Artificial Sequence
  Description of Artificial Sequence: Synthetic oligonucleotide
gagcugaauggccauugac

SEQ ID NO: 2811277 - RNA, 19 nt, Artificial Sequence
  Description of Artificial Sequence: Synthetic oligonucleotide
uggggcuggaaccucccgc

SEQ ID NO: 2811278 - RNA, 19 nt, Artificial Sequence
  Description of Artificial Sequence: Synthetic oligonucleotide
acucuuuauuaagugacau

SEQ ID NO: 2811279 - RNA, 19 nt, Artificial Sequence
  Description of Artificial Sequence: Synthetic oligonucleotide
cuuuggucugacuguugag

SEQ ID NO: 2811280 - RNA, 19 nt, Artificial Sequence
  Description of Artificial Sequence: Synthetic oligonucleotide
ccuccgacuucauauaacc

SEQ ID NO: 2811281 - RNA, 19 nt, Artificial Sequence
  Description of Artificial Sequence: Synthetic oligonucleotide
caucuuaaugcauucagau

SEQ ID NO: 2811282 - RNA, 19 nt, Artificial Sequence
  Description of Artificial Sequence: Synthetic oligonucleotide
uuaaugcauucagaugaac

SEQ ID NO: 2811283 - RNA, 19 nt, Artificial Sequence
  Description of Artificial Sequence: Synthetic oligonucleotide
cuucacacuugggaguugc

SEQ ID NO: 2811284 - RNA, 19 nt, Artificial Sequence
  Description of Artificial Sequence: Synthetic oligonucleotide
ucuuccucugagcuaguuu

SEQ ID NO: 2811285 - RNA, 19 nt, Artificial Sequence
  Description of Artificial Sequence: Synthetic oligonucleotide
aaaugccugucaaggggag

SEQ ID NO: 2811286 - RNA, 19 nt, Artificial Sequence
  Description of Artificial Sequence: Synthetic oligonucleotide
cugcauggggauuuacgug

SEQ ID NO: 2811287 - RNA, 19 nt, Artificial Sequence
  Description of Artificial Sequence: Synthetic oligonucleotide
uggagcguggacccuuaug

SEQ ID NO: 2811288 - RNA, 19 nt, Artificial Sequence
  Description of Artificial Sequence: Synthetic oligonucleotide
cauauaaccuuugguucug

SEQ ID NO: 2811289 - RNA, 19 nt, Artificial Sequence
  Description of Artificial Sequence: Synthetic oligonucleotide
ucaaggggaguguuauauc

SEQ ID NO: 2811290 - RNA, 19 nt, Artificial Sequence
  Description of Artificial Sequence: Synthetic oligonucleotide
uagugcuuaaucacccauu

SEQ ID NO: 2811291 - RNA, 19 nt, Artificial Sequence
  Description of Artificial Sequence: Synthetic oligonucleotide
ccauugacacuuuggacag

SEQ ID NO: 2811292 - RNA, 19 nt, Artificial Sequence
  Description of Artificial Sequence: Synthetic oligonucleotide
gacgccuucuggcacguca

SEQ ID NO: 2811293 - RNA, 19 nt, Artificial Sequence
  Description of Artificial Sequence: Synthetic oligonucleotide
uggcacgucagacauucuu

SEQ ID NO: 2811294 - RNA, 19 nt, Artificial Sequence
  Description of Artificial Sequence: Synthetic oligonucleotide
uuuccuccgacuucauaua

SEQ ID NO: 2811295 - RNA, 19 nt, Artificial Sequence
  Description of Artificial Sequence: Synthetic oligonucleotide
ucuaggcaagucagacaca

SEQ ID NO: 2811296 - RNA, 19 nt, Artificial Sequence
  Description of Artificial Sequence: Synthetic oligonucleotide
augacuguucucauacuga

SEQ ID NO: 2811297 - RNA, 19 nt, Artificial Sequence
  Description of Artificial Sequence: Synthetic oligonucleotide
cuuugguucugcaucuuaa

SEQ ID NO: 2811298 - RNA, 19 nt, Artificial Sequence
  Description of Artificial Sequence: Synthetic oligonucleotide
uggucugacuguugagcug

SEQ ID NO: 2811299 - RNA, 19 nt, Artificial Sequence
  Description of Artificial Sequence: Synthetic oligonucleotide
augccugucaaggggagug

SEQ ID NO: 2811300 - RNA, 19 nt, Artificial Sequence
  Description of Artificial Sequence: Synthetic oligonucleotide
gggaguugcuucuucaaca

SEQ ID NO: 2811301 - RNA, 19 nt, Artificial Sequence
  Description of Artificial Sequence: Synthetic oligonucleotide
ggggauuuacgugauacac

SEQ ID NO: 2811302 - RNA, 19 nt, Artificial Sequence
  Description of Artificial Sequence: Synthetic oligonucleotide
uguugagcugaauggccau

SEQ ID NO: 2811303 - RNA, 19 nt, Artificial Sequence
  Description of Artificial Sequence: Synthetic oligonucleotide
augcauucagaugaacuau

SEQ ID NO: 2811304 - RNA, 19 nt, Artificial Sequence
  Description of Artificial Sequence: Synthetic oligonucleotide
cuuaaugcauucagaugaa

SEQ ID NO: 2811305 - RNA, 19 nt, Artificial Sequence
  Description of Artificial Sequence: Synthetic oligonucleotide
ggauuuacgugauacacau

SEQ ID NO: 2811306 - RNA, 19 nt, Artificial Sequence
  Description of Artificial Sequence: Synthetic oligonucleotide
ugggcauaucuuagagacu

SEQ ID NO: 2811307 - RNA, 19 nt, Artificial Sequence
  Description of Artificial Sequence: Synthetic oligonucleotide
gcuuaaucacccauucugc

SEQ ID NO: 2811308 - RNA, 19 nt, Artificial Sequence
  Description of Artificial Sequence: Synthetic oligonucleotide
uuggggcuggaaccucccg

SEQ ID NO: 2811309 - RNA, 19 nt, Artificial Sequence
  Description of Artificial Sequence: Synthetic oligonucleotide
uucgaggucuuggggcugg

SEQ ID NO: 2811310 - RNA, 19 nt, Artificial Sequence
  Description of Artificial Sequence: Synthetic oligonucleotide
acaugaaugggcauaucuu

SEQ ID NO: 2811311 - RNA, 19 nt, Artificial Sequence
  Description of Artificial Sequence: Synthetic oligonucleotide
gugauacacauccaauaua

SEQ ID NO: 2811312 - RNA, 19 nt, Artificial Sequence
  Description of Artificial Sequence: Synthetic oligonucleotide
cacaugaaugggcauaucu

SEQ ID NO: 2811313 - RNA, 19 nt, Artificial Sequence
  Description of Artificial Sequence: Synthetic oligonucleotide
cacccauucugcaugggga

SEQ ID NO: 2811314 - RNA, 19 nt, Artificial Sequence
  Description of Artificial Sequence: Synthetic oligonucleotide
uggaaccucccgcuccagc

SEQ ID NO: 2811315 - RNA, 19 nt, Artificial Sequence
  Description of Artificial Sequence: Synthetic oligonucleotide
gaaauuucgccaggauguc

SEQ ID NO: 2811316 - RNA, 19 nt, Artificial Sequence
  Description of Artificial Sequence: Synthetic oligonucleotide
ucgccaggaugucuuuggc

SEQ ID NO: 2811317 - RNA, 19 nt, Artificial Sequence
  Description of Artificial Sequence: Synthetic oligonucleotide
uuggacagaaguggagcgu

SEQ ID NO: 2811318 - RNA, 19 nt, Artificial Sequence
  Description of Artificial Sequence: Synthetic oligonucleotide
cuucuaggcaagucagaca

SEQ ID NO: 2811319 - RNA, 19 nt, Artificial Sequence
  Description of Artificial Sequence: Synthetic oligonucleotide
cagugcuguccuauguuuc

SEQ ID NO: 2811320 - RNA, 19 nt, Artificial Sequence
  Description of Artificial Sequence: Synthetic oligonucleotide
gagcguggacccuuaugac

SEQ ID NO: 2811321 - RNA, 19 nt, Artificial Sequence
  Description of Artificial Sequence: Synthetic oligonucleotide
uaggcaagucagacacaca

SEQ ID NO: 2811322 - RNA, 19 nt, Artificial Sequence
  Description of Artificial Sequence: Synthetic oligonucleotide
uguuuccuccgacuucaua

SEQ ID NO: 2811323 - RNA, 19 nt, Artificial Sequence
  Description of Artificial Sequence: Synthetic oligonucleotide
auaugcaucgggauccaaa

SEQ ID NO: 2811324 - RNA, 19 nt, Artificial Sequence
  Description of Artificial Sequence: Synthetic oligonucleotide
aaugccugucaaggggagu

SEQ ID NO: 2811325 - RNA, 19 nt, Artificial Sequence
  Description of Artificial Sequence: Synthetic oligonucleotide
augcaucgggauccaaaca

SEQ ID NO: 2811326 - RNA, 19 nt, Artificial Sequence
  Description of Artificial Sequence: Synthetic oligonucleotide
cuuggggcuggaaccuccc

SEQ ID NO: 2811327 - RNA, 19 nt, Artificial Sequence
  Description of Artificial Sequence: Synthetic oligonucleotide
uuucgccaggaugucuuug

SEQ ID NO: 2811328 - RNA, 19 nt, Artificial Sequence
  Description of Artificial Sequence: Synthetic oligonucleotide
ucccgcuccagcgucuucc

SEQ ID NO: 2811329 - RNA, 19 nt, Artificial Sequence
  Description of Artificial Sequence: Synthetic oligonucleotide
gcuaguuucuucacacuug

SEQ ID NO: 2811330 - RNA, 19 nt, Artificial Sequence
  Description of Artificial Sequence: Synthetic oligonucleotide
agacuugucuagugcuuaa

SEQ ID NO: 2811331 - RNA, 19 nt, Artificial Sequence
  Description of Artificial Sequence: Synthetic oligonucleotide
gcuguccuauguuuccucc

SEQ ID NO: 2811332 - RNA, 19 nt, Artificial Sequence
  Description of Artificial Sequence: Synthetic oligonucleotide
cugagcuaguuucuucaca

SEQ ID NO: 2811333 - RNA, 19 nt, Artificial Sequence
  Description of Artificial Sequence: Synthetic oligonucleotide
ucacacuugggaguugcuu

SEQ ID NO: 2811334 - RNA, 19 nt, Artificial Sequence
  Description of Artificial Sequence: Synthetic oligonucleotide
cacauccaauauauaugca

SEQ ID NO: 2811335 - RNA, 19 nt, Artificial Sequence
  Description of Artificial Sequence: Synthetic oligonucleotide
gcguggacccuuaugacgc

SEQ ID NO: 2811336 - RNA, 19 nt, Artificial Sequence
  Description of Artificial Sequence: Synthetic oligonucleotide
cuguguuaccuucgagguc

SEQ ID NO: 2811337 - RNA, 19 nt, Artificial Sequence
  Description of Artificial Sequence: Synthetic oligonucleotide
gacagaaguggagcgugga

SEQ ID NO: 2811338 - RNA, 19 nt, Artificial Sequence
  Description of Artificial Sequence: Synthetic oligonucleotide
ggccauugacacuuuggac

SEQ ID NO: 2811339 - RNA, 19 nt, Artificial Sequence
  Description of Artificial Sequence: Synthetic oligonucleotide
gagacuugucuagugcuua

SEQ ID NO: 2811340 - RNA, 19 nt, Artificial Sequence
  Description of Artificial Sequence: Synthetic oligonucleotide
ggucugacuguugagcuga

SEQ ID NO: 2811341 - RNA, 19 nt, Artificial Sequence
  Description of Artificial Sequence: Synthetic oligonucleotide
gauuuacgugauacacauc

SEQ ID NO: 2811342 - RNA, 19 nt, Artificial Sequence
  Description of Artificial Sequence: Synthetic oligonucleotide
auauaugcaucgggaucca

SEQ ID NO: 2811343 - RNA, 19 nt, Artificial Sequence
  Description of Artificial Sequence: Synthetic oligonucleotide
gucaaggggaguguuauau

SEQ ID NO: 2811344 - RNA, 19 nt, Artificial Sequence
  Description of Artificial Sequence: Synthetic oligonucleotide
caggaugucuuuggcuuug

SEQ ID NO: 2811345 - RNA, 19 nt, Artificial Sequence
  Description of Artificial Sequence: Synthetic oligonucleotide
guccuauguuuccuccgac

SEQ ID NO: 2811346 - RNA, 19 nt, Artificial Sequence
  Description of Artificial Sequence: Synthetic oligonucleotide
cccgauuuacaguucuuuc

SEQ ID NO: 2811347 - RNA, 19 nt, Artificial Sequence
  Description of Artificial Sequence: Synthetic oligonucleotide
uggacccuuaugacgccuu

SEQ ID NO: 2811348 - RNA, 19 nt, Artificial Sequence
  Description of Artificial Sequence: Synthetic oligonucleotide
gggauuuacgugauacaca

SEQ ID NO: 2811349 - RNA, 19 nt, Artificial Sequence
  Description of Artificial Sequence: Synthetic oligonucleotide
ugucaaggggaguguuaua

SEQ ID NO: 2811350 - RNA, 19 nt, Artificial Sequence
  Description of Artificial Sequence: Synthetic oligonucleotide
aaguggagcguggacccuu

SEQ ID NO: 2811351 - RNA, 19 nt, Artificial Sequence
  Description of Artificial Sequence: Synthetic oligonucleotide
ucuucacacuugggaguug

SEQ ID NO: 2811352 - RNA, 19 nt, Artificial Sequence
  Description of Artificial Sequence: Synthetic oligonucleotide
uauaugcaucgggauccaa

SEQ ID NO: 2811353 - RNA, 19 nt, Artificial Sequence
  Description of Artificial Sequence: Synthetic oligonucleotide
agcgucuuccucugagcua

SEQ ID NO: 2811354 - RNA, 19 nt, Artificial Sequence
  Description of Artificial Sequence: Synthetic oligonucleotide
aucacccauucugcauggg

SEQ ID NO: 2811355 - RNA, 19 nt, Artificial Sequence
  Description of Artificial Sequence: Synthetic oligonucleotide
auuucgccaggaugucuuu

SEQ ID NO: 2811356 - RNA, 19 nt, Artificial Sequence
  Description of Artificial Sequence: Synthetic oligonucleotide
ggcacgucagacauucuuc

SEQ ID NO: 2811357 - RNA, 19 nt, Artificial Sequence
  Description of Artificial Sequence: Synthetic oligonucleotide
gaacuaugacuguucucau

SEQ ID NO: 2811358 - RNA, 19 nt, Artificial Sequence
  Description of Artificial Sequence: Synthetic oligonucleotide
gcaucuuaaugcauucaga

SEQ ID NO: 2811359 - RNA, 19 nt, Artificial Sequence
  Description of Artificial Sequence: Synthetic oligonucleotide
uguuaccuucgaggucuug

SEQ ID NO: 2811360 - RNA, 19 nt, Artificial Sequence
  Description of Artificial Sequence: Synthetic oligonucleotide
cuagugcuuaaucacccau

SEQ ID NO: 2811361 - RNA, 19 nt, Artificial Sequence
  Description of Artificial Sequence: Synthetic oligonucleotide
gagcuaguuucuucacacu

SEQ ID NO: 2811362 - RNA, 19 nt, Artificial Sequence
  Description of Artificial Sequence: Synthetic oligonucleotide
uccaaacagugcuguccua

SEQ ID NO: 2811363 - RNA, 19 nt, Artificial Sequence
  Description of Artificial Sequence: Synthetic oligonucleotide
ggacagaaguggagcgugg

SEQ ID NO: 2811364 - RNA, 19 nt, Artificial Sequence
  Description of Artificial Sequence: Synthetic oligonucleotide
acgccuucuggcacgucag

SEQ ID NO: 2811365 - RNA, 19 nt, Artificial Sequence
  Description of Artificial Sequence: Synthetic oligonucleotide
ucugacuguugagcugaau

SEQ ID NO: 2811366 - RNA, 19 nt, Artificial Sequence
  Description of Artificial Sequence: Synthetic oligonucleotide
ccagcgucuuccucugagc

SEQ ID NO: 2811367 - RNA, 19 nt, Artificial Sequence
  Description of Artificial Sequence: Synthetic oligonucleotide
ugccugucaaggggagugu

SEQ ID NO: 2811368 - RNA, 19 nt, Artificial Sequence
  Description of Artificial Sequence: Synthetic oligonucleotide
cugcaucuuaaugcauuca

SEQ ID NO: 2811369 - RNA, 19 nt, Artificial Sequence
  Description of Artificial Sequence: Synthetic oligonucleotide
ggauccaaacagugcuguc

SEQ ID NO: 2811370 - RNA, 19 nt, Artificial Sequence
  Description of Artificial Sequence: Synthetic oligonucleotide
gggcauaucuuagagacuu

SEQ ID NO: 2811371 - RNA, 19 nt, Artificial Sequence
  Description of Artificial Sequence: Synthetic oligonucleotide
ccgauuuacaguucuuucu

SEQ ID NO: 2811372 - RNA, 19 nt, Artificial Sequence
  Description of Artificial Sequence: Synthetic oligonucleotide
gucagacauucuucuugaa

SEQ ID NO: 2811373 - RNA, 19 nt, Artificial Sequence
  Description of Artificial Sequence: Synthetic oligonucleotide
cauucuucuugaaggugau

SEQ ID NO: 2811374 - RNA, 19 nt, Artificial Sequence
  Description of Artificial Sequence: Synthetic oligonucleotide
ccuucuggcacgucagaca

SEQ ID NO: 2811375 - RNA, 19 nt, Artificial Sequence
  Description of Artificial Sequence: Synthetic oligonucleotide
cugaauggccauugacacu

SEQ ID NO: 2811376 - RNA, 19 nt, Artificial Sequence
  Description of Artificial Sequence: Synthetic oligonucleotide
gaaccucccgcuccagcgu

SEQ ID NO: 2811377 - RNA, 19 nt, Artificial Sequence
  Description of Artificial Sequence: Synthetic oligonucleotide
cuccgacuucauauaaccu

SEQ ID NO: 2811378 - RNA, 19 nt, Artificial Sequence
  Description of Artificial Sequence: Synthetic oligonucleotide
cuaugacuguucucauacu

SEQ ID NO: 2811379 - RNA, 19 nt, Artificial Sequence
  Description of Artificial Sequence: Synthetic oligonucleotide
gcauaucuuagagacuugu

SEQ ID NO: 2811380 - RNA, 19 nt, Artificial Sequence
  Description of Artificial Sequence: Synthetic oligonucleotide
cagcgucuuccucugagcu

SEQ ID NO: 2811381 - RNA, 19 nt, Artificial Sequence
  Description of Artificial Sequence: Synthetic oligonucleotide
ggcauaucuuagagacuug

SEQ ID NO: 2811382 - RNA, 19 nt, Artificial Sequence
  Description of Artificial Sequence: Synthetic oligonucleotide
cugucaaggggaguguuau

SEQ ID NO: 2811383 - RNA, 19 nt, Artificial Sequence
  Description of Artificial Sequence: Synthetic oligonucleotide
augacgccuucuggcacgu

SEQ ID NO: 2811384 - RNA, 19 nt, Artificial Sequence
  Description of Artificial Sequence: Synthetic oligonucleotide
cacacaugaaugggcauau

SEQ ID NO: 2811385 - RNA, 19 nt, Artificial Sequence
  Description of Artificial Sequence: Synthetic oligonucleotide
gacccuuaugacgccuucu

SEQ ID NO: 2811386 - RNA, 19 nt, Artificial Sequence
  Description of Artificial Sequence: Synthetic oligonucleotide
cagaugaacuaugacuguu

SEQ ID NO: 2811387 - RNA, 19 nt, Artificial Sequence
  Description of Artificial Sequence: Synthetic oligonucleotide
ggacccuuaugacgccuuc

SEQ ID NO: 2811388 - RNA, 19 nt, Artificial Sequence
  Description of Artificial Sequence: Synthetic oligonucleotide
gacuugucuagugcuuaau

SEQ ID NO: 2811389 - RNA, 19 nt, Artificial Sequence
  Description of Artificial Sequence: Synthetic oligonucleotide
gggauccaaacagugcugu

SEQ ID NO: 2811390 - RNA, 19 nt, Artificial Sequence
  Description of Artificial Sequence: Synthetic oligonucleotide
cacacacaugaaugggcau

SEQ ID NO: 2811391 - RNA, 19 nt, Artificial Sequence
  Description of Artificial Sequence: Synthetic oligonucleotide
cgugauacacauccaauau

SEQ ID NO: 2811392 - RNA, 19 nt, Artificial Sequence
  Description of Artificial Sequence: Synthetic oligonucleotide
cauugacacuuuggacaga

SEQ ID NO: 2811393 - RNA, 19 nt, Artificial Sequence
  Description of Artificial Sequence: Synthetic oligonucleotide
cgggauccaaacagugcug

SEQ ID NO: 2811394 - RNA, 19 nt, Artificial Sequence
  Description of Artificial Sequence: Synthetic oligonucleotide
cauggggauuuacgugaua

SEQ ID NO: 2811395 - RNA, 19 nt, Artificial Sequence
  Description of Artificial Sequence: Synthetic oligonucleotide
gucuuggggcuggaaccuc

SEQ ID NO: 2811396 - RNA, 19 nt, Artificial Sequence
  Description of Artificial Sequence: Synthetic oligonucleotide
ccgacuucauauaaccuuu

SEQ ID NO: 2811397 - RNA, 19 nt, Artificial Sequence
  Description of Artificial Sequence: Synthetic oligonucleotide
aguggagcguggacccuua

SEQ ID NO: 2811398 - RNA, 19 nt, Artificial Sequence
  Description of Artificial Sequence: Synthetic oligonucleotide
gaaguggagcguggacccu

SEQ ID NO: 2811399 - RNA, 19 nt, Artificial Sequence
  Description of Artificial Sequence: Synthetic oligonucleotide
guucugcaucuuaaugcau

SEQ ID NO: 2811400 - RNA, 19 nt, Artificial Sequence
  Description of Artificial Sequence: Synthetic oligonucleotide
ccuucgaggucuuggggcu

SEQ ID NO: 2811401 - RNA, 19 nt, Artificial Sequence
  Description of Artificial Sequence: Synthetic oligonucleotide
gugcuguccuauguuuccu

SEQ ID NO: 2811402 - RNA, 19 nt, Artificial Sequence
  Description of Artificial Sequence: Synthetic oligonucleotide
ggaugucuuuggcuuuggu

SEQ ID NO: 2811403 - RNA, 19 nt, Artificial Sequence
  Description of Artificial Sequence: Synthetic oligonucleotide
ccuuugguucugcaucuua

SEQ ID NO: 2811404 - RNA, 19 nt, Artificial Sequence
  Description of Artificial Sequence: Synthetic oligonucleotide
cgauuuacaguucuuucuu

SEQ ID NO: 2811405 - RNA, 19 nt, Artificial Sequence
  Description of Artificial Sequence: Synthetic oligonucleotide
guugagcugaauggccauu

SEQ ID NO: 2811406 - RNA, 19 nt, Artificial Sequence
  Description of Artificial Sequence: Synthetic oligonucleotide
cacgucagacauucuucuu

SEQ ID NO: 2811407 - RNA, 19 nt, Artificial Sequence
  Description of Artificial Sequence: Synthetic oligonucleotide
cguggacccuuaugacgcc

SEQ ID NO: 2811408 - RNA, 19 nt, Artificial Sequence
  Description of Artificial Sequence: Synthetic oligonucleotide
gcaucgggauccaaacagu

SEQ ID NO: 2811409 - RNA, 19 nt, Artificial Sequence
  Description of Artificial Sequence: Synthetic oligonucleotide
guggacccuuaugacgccu

SEQ ID NO: 2811410 - RNA, 19 nt, Artificial Sequence
  Description of Artificial Sequence: Synthetic oligonucleotide
ccaaacagugcuguccuau

SEQ ID NO: 2811411 - RNA, 19 nt, Artificial Sequence
  Description of Artificial Sequence: Synthetic oligonucleotide
gucugacuguugagcugaa

SEQ ID NO: 2811412 - RNA, 19 nt, Artificial Sequence
  Description of Artificial Sequence: Synthetic oligonucleotide
ugacgccuucuggcacguc

SEQ ID NO: 2811413 - RNA, 19 nt, Artificial Sequence
  Description of Artificial Sequence: Synthetic oligonucleotide
cgcuccagcgucuuccucu

SEQ ID NO: 2811414 - RNA, 19 nt, Artificial Sequence
  Description of Artificial Sequence: Synthetic oligonucleotide
gaauggccauugacacuuu

SEQ ID NO: 2811415 - RNA, 19 nt, Artificial Sequence
  Description of Artificial Sequence: Synthetic oligonucleotide
cuggcacgucagacauucu

SEQ ID NO: 2811416 - RNA, 19 nt, Artificial Sequence
  Description of Artificial Sequence: Synthetic oligonucleotide
guggagcguggacccuuau

SEQ ID NO: 2811417 - RNA, 19 nt, Artificial Sequence
  Description of Artificial Sequence: Synthetic oligonucleotide
gcauggggauuuacgugau

SEQ ID NO: 2811418 - RNA, 19 nt, Artificial Sequence
  Description of Artificial Sequence: Synthetic oligonucleotide
ccccgauuuacaguucuuu

SEQ ID NO: 2811419 - RNA, 19 nt, Artificial Sequence
  Description of Artificial Sequence: Synthetic oligonucleotide
cacuugggaguugcuucuu

SEQ ID NO: 2811420 - RNA, 19 nt, Artificial Sequence
  Description of Artificial Sequence: Synthetic oligonucleotide
guguuaccuucgaggucuu

SEQ ID NO: 2811421 - RNA, 19 nt, Artificial Sequence
  Description of Artificial Sequence: Synthetic oligonucleotide
gccugucaaggggaguguu

SEQ ID NO: 2811422 - RNA, 19 nt, Artificial Sequence
  Description of Artificial Sequence: Synthetic oligonucleotide
cccauucugcauggggauu

SEQ ID NO: 2811423 - RNA, 19 nt, Artificial Sequence
  Description of Artificial Sequence: Synthetic oligonucleotide
cgaggucuuggggcuggaa

SEQ ID NO: 2811424 - RNA, 19 nt, Artificial Sequence
  Description of Artificial Sequence: Synthetic oligonucleotide
aagauuauucucuucuucc

SEQ ID NO: 2811425 - RNA, 19 nt, Artificial Sequence
  Description of Artificial Sequence: Synthetic oligonucleotide
aggauguccacuuugagcc

SEQ ID NO: 2811426 - RNA, 19 nt, Artificial Sequence
  Description of Artificial Sequence: Synthetic oligonucleotide
uucuuuauccuuuaagugg

SEQ ID NO: 2811427 - RNA, 19 nt, Artificial Sequence
  Description of Artificial Sequence: Synthetic oligonucleotide
aaaaucaaagggcucugcc

SEQ ID NO: 2811428 - RNA, 19 nt, Artificial Sequence
  Description of Artificial Sequence: Synthetic oligonucleotide
ugaauauacucccaaagag

SEQ ID NO: 2811429 - RNA, 19 nt, Artificial Sequence
  Description of Artificial Sequence: Synthetic oligonucleotide
auagucaaggcccagcucc

SEQ ID NO: 2811430 - RNA, 19 nt, Artificial Sequence
  Description of Artificial Sequence: Synthetic oligonucleotide
ucuuuauccuuuaaguggg

SEQ ID NO: 2811431 - RNA, 19 nt, Artificial Sequence
  Description of Artificial Sequence: Synthetic oligonucleotide
aaagaaugcagauuggaga

SEQ ID NO: 2811432 - RNA, 19 nt, Artificial Sequence
  Description of Artificial Sequence: Synthetic oligonucleotide
aagaaugcagauuggagag

SEQ ID NO: 2811433 - RNA, 19 nt, Artificial Sequence
  Description of Artificial Sequence: Synthetic oligonucleotide
aaagauuauucucuucuuc

SEQ ID NO: 2811434 - RNA, 19 nt, Artificial Sequence
  Description of Artificial Sequence: Synthetic oligonucleotide
aucuaaagaaugcagauug

SEQ ID NO: 2811435 - RNA, 19 nt, Artificial Sequence
  Description of Artificial Sequence: Synthetic oligonucleotide
aauauacucccaaagagag

SEQ ID NO: 2811436 - RNA, 19 nt, Artificial Sequence
  Description of Artificial Sequence: Synthetic oligonucleotide
caaacuucaaguuuugccc

SEQ ID NO: 2811437 - RNA, 19 nt, Artificial Sequence
  Description of Artificial Sequence: Synthetic oligonucleotide
aguuccauagucaaggccc

SEQ ID NO: 2811438 - RNA, 19 nt, Artificial Sequence
  Description of Artificial Sequence: Synthetic oligonucleotide
ucaaacuucaaguuuugcc

SEQ ID NO: 2811439 - RNA, 19 nt, Artificial Sequence
  Description of Artificial Sequence: Synthetic oligonucleotide
uaaagaaugcagauuggag

SEQ ID NO: 2811440 - RNA, 19 nt, Artificial Sequence
  Description of Artificial Sequence: Synthetic oligonucleotide
uauacucccaaagagaggc

SEQ ID NO: 2811441 - RNA, 19 nt, Artificial Sequence
  Description of Artificial Sequence: Synthetic oligonucleotide
uuaagugggacucagcagu

SEQ ID NO: 2811442 - RNA, 19 nt, Artificial Sequence
  Description of Artificial Sequence: Synthetic oligonucleotide
aguucuuuauccuuuaagu

SEQ ID NO: 2811443 - RNA, 19 nt, Artificial Sequence
  Description of Artificial Sequence: Synthetic oligonucleotide
uuuggacugaauauacucc

SEQ ID NO: 2811444 - RNA, 19 nt, Artificial Sequence
  Description of Artificial Sequence: Synthetic oligonucleotide
ucucugauacccuagggag

SEQ ID NO: 2811445 - RNA, 19 nt, Artificial Sequence
  Description of Artificial Sequence: Synthetic oligonucleotide
acugaauauacucccaaag

SEQ ID NO: 2811446 - RNA, 19 nt, Artificial Sequence
  Description of Artificial Sequence: Synthetic oligonucleotide
auuauucucuucuuccaac

SEQ ID NO: 2811447 - RNA, 19 nt, Artificial Sequence
  Description of Artificial Sequence: Synthetic oligonucleotide
aaagagaggcauuccugac

SEQ ID NO: 2811448 - RNA, 19 nt, Artificial Sequence
  Description of Artificial Sequence: Synthetic oligonucleotide
gauaaucuucagcucaucc

SEQ ID NO: 2811449 - RNA, 19 nt, Artificial Sequence
  Description of Artificial Sequence: Synthetic oligonucleotide
ucugaaagcauguccagca

SEQ ID NO: 2811450 - RNA, 19 nt, Artificial Sequence
  Description of Artificial Sequence: Synthetic oligonucleotide
ugaaagcauguccagcagg

SEQ ID NO: 2811451 - RNA, 19 nt, Artificial Sequence
  Description of Artificial Sequence: Synthetic oligonucleotide
ucuaaagaaugcagauugg

SEQ ID NO: 2811452 - RNA, 19 nt, Artificial Sequence
  Description of Artificial Sequence: Synthetic oligonucleotide
uugaccgaucuaaagaaug

SEQ ID NO: 2811453 - RNA, 19 nt, Artificial Sequence
  Description of Artificial Sequence: Synthetic oligonucleotide
aaucaaagggcucugccau

SEQ ID NO: 2811454 - RNA, 19 nt, Artificial Sequence
  Description of Artificial Sequence: Synthetic oligonucleotide
aaucacugugucugcuacc

SEQ ID NO: 2811455 - RNA, 19 nt, Artificial Sequence
  Description of Artificial Sequence: Synthetic oligonucleotide
agagaggcauuccugacuc

SEQ ID NO: 2811456 - RNA, 19 nt, Artificial Sequence
  Description of Artificial Sequence: Synthetic oligonucleotide
aaacuucaaguuuugcccu

SEQ ID NO: 2811457 - RNA, 19 nt, Artificial Sequence
  Description of Artificial Sequence: Synthetic oligonucleotide
uuggacugaauauacuccc

SEQ ID NO: 2811458 - RNA, 19 nt, Artificial Sequence
  Description of Artificial Sequence: Synthetic oligonucleotide
guugauaaucuucagcuca

SEQ ID NO: 2811459 - RNA, 19 nt, Artificial Sequence
  Description of Artificial Sequence: Synthetic oligonucleotide
uuuaagugggacucagcag

SEQ ID NO: 2811460 - RNA, 19 nt, Artificial Sequence
  Description of Artificial Sequence: Synthetic oligonucleotide
cuuuggacugaauauacuc

SEQ ID NO: 2811461 - RNA, 19 nt, Artificial Sequence
  Description of Artificial Sequence: Synthetic oligonucleotide
guucuuuauccuuuaagug

SEQ ID NO: 2811462 - RNA, 19 nt, Artificial Sequence
  Description of Artificial Sequence: Synthetic oligonucleotide
auaaucuucagcucaucca

SEQ ID NO: 2811463 - RNA, 19 nt, Artificial Sequence
  Description of Artificial Sequence: Synthetic oligonucleotide
aagcauguccagcaggaug

SEQ ID NO: 2811464 - RNA, 19 nt, Artificial Sequence
  Description of Artificial Sequence: Synthetic oligonucleotide
cauggugggaguuccauag

SEQ ID NO: 2811465 - RNA, 19 nt, Artificial Sequence
  Description of Artificial Sequence: Synthetic oligonucleotide
cuagggaguguucacaggc

SEQ ID NO: 2811466 - RNA, 19 nt, Artificial Sequence
  Description of Artificial Sequence: Synthetic oligonucleotide
ugcccugcuagguucaugg

SEQ ID NO: 2811467 - RNA, 19 nt, Artificial Sequence
  Description of Artificial Sequence: Synthetic oligonucleotide
aucacugugucugcuaccc

SEQ ID NO: 2811468 - RNA, 19 nt, Artificial Sequence
  Description of Artificial Sequence: Synthetic oligonucleotide
ugaccgaucuaaagaaugc

SEQ ID NO: 2811469 - RNA, 19 nt, Artificial Sequence
  Description of Artificial Sequence: Synthetic oligonucleotide
uccacuuugagccgcaaaa

SEQ ID NO: 2811470 - RNA, 19 nt, Artificial Sequence
  Description of Artificial Sequence: Synthetic oligonucleotide
aaggcccagcuccaauucc

SEQ ID NO: 2811471 - RNA, 19 nt, Artificial Sequence
  Description of Artificial Sequence: Synthetic oligonucleotide
aggaaacuccagcacuucc

SEQ ID NO: 2811472 - RNA, 19 nt, Artificial Sequence
  Description of Artificial Sequence: Synthetic oligonucleotide
aaaagauuauucucuucuu

SEQ ID NO: 2811473 - RNA, 19 nt, Artificial Sequence
  Description of Artificial Sequence: Synthetic oligonucleotide
gaaugcagauuggagagag

SEQ ID NO: 2811474 - RNA, 19 nt, Artificial Sequence
  Description of Artificial Sequence: Synthetic oligonucleotide
uuauccuuuaagugggacu

SEQ ID NO: 2811475 - RNA, 19 nt, Artificial Sequence
  Description of Artificial Sequence: Synthetic oligonucleotide
uuugagccgcaaaagauua

SEQ ID NO: 2811476 - RNA, 19 nt, Artificial Sequence
  Description of Artificial Sequence: Synthetic oligonucleotide
auuuucaaacuucaaguuu

SEQ ID NO: 2811477 - RNA, 19 nt, Artificial Sequence
  Description of Artificial Sequence: Synthetic oligonucleotide
agggaguguucacaggcgc

SEQ ID NO: 2811478 - RNA, 19 nt, Artificial Sequence
  Description of Artificial Sequence: Synthetic oligonucleotide
aagagaggcauuccugacu

SEQ ID NO: 2811479 - RNA, 19 nt, Artificial Sequence
  Description of Artificial Sequence: Synthetic oligonucleotide
gaauauacucccaaagaga

SEQ ID NO: 2811480 - RNA, 19 nt, Artificial Sequence
  Description of Artificial Sequence: Synthetic oligonucleotide
ugcagauuggagagagagg

SEQ ID NO: 2811481 - RNA, 19 nt, Artificial Sequence
  Description of Artificial Sequence: Synthetic oligonucleotide
uuauucucuucuuccaacu

SEQ ID NO: 2811482 - RNA, 19 nt, Artificial Sequence
  Description of Artificial Sequence: Synthetic oligonucleotide
uauccuuuaagugggacuc

SEQ ID NO: 2811483 - RNA, 19 nt, Artificial Sequence
  Description of Artificial Sequence: Synthetic oligonucleotide
cuuuaagugggacucagca

SEQ ID NO: 2811484 - RNA, 19 nt, Artificial Sequence
  Description of Artificial Sequence: Synthetic oligonucleotide
uaaucacugugucugcuac

SEQ ID NO: 2811485 - RNA, 19 nt, Artificial Sequence
  Description of Artificial Sequence: Synthetic oligonucleotide
ucuuccaacugcugguucc

SEQ ID NO: 2811486 - RNA, 19 nt, Artificial Sequence
  Description of Artificial Sequence: Synthetic oligonucleotide
uuucaaacuucaaguuuug

SEQ ID NO: 2811487 - RNA, 19 nt, Artificial Sequence
  Description of Artificial Sequence: Synthetic oligonucleotide
ucugauacccuagggagug

SEQ ID NO: 2811488 - RNA, 19 nt, Artificial Sequence
  Description of Artificial Sequence: Synthetic oligonucleotide
cucuucuuccaacugcugg

SEQ ID NO: 2811489 - RNA, 19 nt, Artificial Sequence
  Description of Artificial Sequence: Synthetic oligonucleotide
ucucucugauacccuaggg

SEQ ID NO: 2811490 - RNA, 19 nt, Artificial Sequence
  Description of Artificial Sequence: Synthetic oligonucleotide
ucuucuuccaacugcuggu

SEQ ID NO: 2811491 - RNA, 19 nt, Artificial Sequence
  Description of Artificial Sequence: Synthetic oligonucleotide
uauucucuucuuccaacug

SEQ ID NO: 2811492 - RNA, 19 nt, Artificial Sequence
  Description of Artificial Sequence: Synthetic oligonucleotide
uggagagagaggcagacuu

SEQ ID NO: 2811493 - RNA, 19 nt, Artificial Sequence
  Description of Artificial Sequence: Synthetic oligonucleotide
ucgaggaaacuccagcacu

SEQ ID NO: 2811494 - RNA, 19 nt, Artificial Sequence
  Description of Artificial Sequence: Synthetic oligonucleotide
caaguuuugcccugcuagg

SEQ ID NO: 2811495 - RNA, 19 nt, Artificial Sequence
  Description of Artificial Sequence: Synthetic oligonucleotide
agauuauucucuucuucca

SEQ ID NO: 2811496 - RNA, 19 nt, Artificial Sequence
  Description of Artificial Sequence: Synthetic oligonucleotide
agagaggcagacuuccgag

SEQ ID NO: 2811497 - RNA, 19 nt, Artificial Sequence
  Description of Artificial Sequence: Synthetic oligonucleotide
agcaguggucucugaaagc

SEQ ID NO: 2811498 - RNA, 19 nt, Artificial Sequence
  Description of Artificial Sequence: Synthetic oligonucleotide
auuggagagagaggcagac

SEQ ID NO: 2811499 - RNA, 19 nt, Artificial Sequence
  Description of Artificial Sequence: Synthetic oligonucleotide
gacucgaggaaacuccagc

SEQ ID NO: 2811500 - RNA, 19 nt, Artificial Sequence
  Description of Artificial Sequence: Synthetic oligonucleotide
gccauuuucaaacuucaag

SEQ ID NO: 2811501 - RNA, 19 nt, Artificial Sequence
  Description of Artificial Sequence: Synthetic oligonucleotide
uagggaguguucacaggcg

SEQ ID NO: 2811502 - RNA, 19 nt, Artificial Sequence
  Description of Artificial Sequence: Synthetic oligonucleotide
guggaacucucucugauac

SEQ ID NO: 2811503 - RNA, 19 nt, Artificial Sequence
  Description of Artificial Sequence: Synthetic oligonucleotide
aacuucaaguuuugcccug

SEQ ID NO: 2811504 - RNA, 19 nt, Artificial Sequence
  Description of Artificial Sequence: Synthetic oligonucleotide
ugugucugcuacccacugg

SEQ ID NO: 2811505 - RNA, 19 nt, Artificial Sequence
  Description of Artificial Sequence: Synthetic oligonucleotide
caguucuuuauccuuuaag

SEQ ID NO: 2811506 - RNA, 19 nt, Artificial Sequence
  Description of Artificial Sequence: Synthetic oligonucleotide
uggccauuuucaaacuuca

SEQ ID NO: 2811507 - RNA, 19 nt, Artificial Sequence
  Description of Artificial Sequence: Synthetic oligonucleotide
caaaagauuauucucuucu

SEQ ID NO: 2811508 - RNA, 19 nt, Artificial Sequence
  Description of Artificial Sequence: Synthetic oligonucleotide
gggaguuccauagucaagg

SEQ ID NO: 2811509 - RNA, 19 nt, Artificial Sequence
  Description of Artificial Sequence: Synthetic oligonucleotide
cugagucucccuccgaucc

SEQ ID NO: 2811510 - RNA, 19 nt, Artificial Sequence
  Description of Artificial Sequence: Synthetic oligonucleotide
cugaauauacucccaaaga

SEQ ID NO: 2811511 - RNA, 19 nt, Artificial Sequence
  Description of Artificial Sequence: Synthetic oligonucleotide
ucuuuggacugaauauacu

SEQ ID NO: 2811512 - RNA, 19 nt, Artificial Sequence
  Description of Artificial Sequence: Synthetic oligonucleotide
gaguuccauagucaaggcc

SEQ ID NO: 2811513 - RNA, 19 nt, Artificial Sequence
  Description of Artificial Sequence: Synthetic oligonucleotide
ucauccaguucuuuauccu

SEQ ID NO: 2811514 - RNA, 19 nt, Artificial Sequence
  Description of Artificial Sequence: Synthetic oligonucleotide
ccugcuagguucauggugg

SEQ ID NO: 2811515 - RNA, 19 nt, Artificial Sequence
  Description of Artificial Sequence: Synthetic oligonucleotide
uugauaaucuucagcucau

SEQ ID NO: 2811516 - RNA, 19 nt, Artificial Sequence
  Description of Artificial Sequence: Synthetic oligonucleotide
gagagagaggcagacuucc

SEQ ID NO: 2811517 - RNA, 19 nt, Artificial Sequence
  Description of Artificial Sequence: Synthetic oligonucleotide
uuugcgcaggcgcugaguc

SEQ ID NO: 2811518 - RNA, 19 nt, Artificial Sequence
  Description of Artificial Sequence: Synthetic oligonucleotide
acucgaggaaacuccagca

SEQ ID NO: 2811519 - RNA, 19 nt, Artificial Sequence
  Description of Artificial Sequence: Synthetic oligonucleotide
guuccguuugcgcaggcgc

SEQ ID NO: 2811520 - RNA, 19 nt, Artificial Sequence
  Description of Artificial Sequence: Synthetic oligonucleotide
gauuauucucuucuuccaa

SEQ ID NO: 2811521 - RNA, 19 nt, Artificial Sequence
  Description of Artificial Sequence: Synthetic oligonucleotide
ccaauucccgcguugaccg

SEQ ID NO: 2811522 - RNA, 19 nt, Artificial Sequence
  Description of Artificial Sequence: Synthetic oligonucleotide
gaaagcauguccagcagga

SEQ ID NO: 2811523 - RNA, 19 nt, Artificial Sequence
  Description of Artificial Sequence: Synthetic oligonucleotide
aggcauuccugacucgagg

SEQ ID NO: 2811524 - RNA, 19 nt, Artificial Sequence
  Description of Artificial Sequence: Synthetic oligonucleotide
gagcuugcuaaucugacua

SEQ ID NO: 2811525 - RNA, 19 nt, Artificial Sequence
  Description of Artificial Sequence: Synthetic oligonucleotide
ugcugguuccguuugcgca

SEQ ID NO: 2811526 - RNA, 19 nt, Artificial Sequence
  Description of Artificial Sequence: Synthetic oligonucleotide
ucacaggcgcgucacuucc

SEQ ID NO: 2811527 - RNA, 19 nt, Artificial Sequence
  Description of Artificial Sequence: Synthetic oligonucleotide
caaagagaggcauuccuga

SEQ ID NO: 2811528 - RNA, 19 nt, Artificial Sequence
  Description of Artificial Sequence: Synthetic oligonucleotide
uccaauucccgcguugacc

SEQ ID NO: 2811529 - RNA, 19 nt, Artificial Sequence
  Description of Artificial Sequence: Synthetic oligonucleotide
uaagugggacucagcagug

SEQ ID NO: 2811530 - RNA, 19 nt, Artificial Sequence
  Description of Artificial Sequence: Synthetic oligonucleotide
uuuauccuuuaagugggac

SEQ ID NO: 2811531 - RNA, 19 nt, Artificial Sequence
  Description of Artificial Sequence: Synthetic oligonucleotide
auuccugacucgaggaaac

SEQ ID NO: 2811532 - RNA, 19 nt, Artificial Sequence
  Description of Artificial Sequence: Synthetic oligonucleotide
ucagcaguggucucugaaa

SEQ ID NO: 2811533 - RNA, 19 nt, Artificial Sequence
  Description of Artificial Sequence: Synthetic oligonucleotide
agaggcagacuuccgagga

SEQ ID NO: 2811534 - RNA, 19 nt, Artificial Sequence
  Description of Artificial Sequence: Synthetic oligonucleotide
cuggccauuuucaaacuuc

SEQ ID NO: 2811535 - RNA, 19 nt, Artificial Sequence
  Description of Artificial Sequence: Synthetic oligonucleotide
ggaacucucucugauaccc

SEQ ID NO: 2811536 - RNA, 19 nt, Artificial Sequence
  Description of Artificial Sequence: Synthetic oligonucleotide
uacccacuggccauuuuca

SEQ ID NO: 2811537 - RNA, 19 nt, Artificial Sequence
  Description of Artificial Sequence: Synthetic oligonucleotide
aaguuuugcccugcuaggu

SEQ ID NO: 2811538 - RNA, 19 nt, Artificial Sequence
  Description of Artificial Sequence: Synthetic oligonucleotide
ugggaguuccauagucaag

SEQ ID NO: 2811539 - RNA, 19 nt, Artificial Sequence
  Description of Artificial Sequence: Synthetic oligonucleotide
cagcaguggucucugaaag

SEQ ID NO: 2811540 - RNA, 19 nt, Artificial Sequence
  Description of Artificial Sequence: Synthetic oligonucleotide
accgaucuaaagaaugcag

SEQ ID NO: 2811541 - RNA, 19 nt, Artificial Sequence
  Description of Artificial Sequence: Synthetic oligonucleotide
cuaaagaaugcagauugga

SEQ ID NO: 2811542 - RNA, 19 nt, Artificial Sequence
  Description of Artificial Sequence: Synthetic oligonucleotide
uccuuuaagugggacucag

SEQ ID NO: 2811543 - RNA, 19 nt, Artificial Sequence
  Description of Artificial Sequence: Synthetic oligonucleotide
uucaaacuucaaguuuugc

SEQ ID NO: 2811544 - RNA, 19 nt, Artificial Sequence
  Description of Artificial Sequence: Synthetic oligonucleotide
gaggaggggucuucuuugg

SEQ ID NO: 2811545 - RNA, 19 nt, Artificial Sequence
  Description of Artificial Sequence: Synthetic oligonucleotide
aacucucucugauacccua

SEQ ID NO: 2811546 - RNA, 19 nt, Artificial Sequence
  Description of Artificial Sequence: Synthetic oligonucleotide
cacugugucugcuacccac

SEQ ID NO: 2811547 - RNA, 19 nt, Artificial Sequence
  Description of Artificial Sequence: Synthetic oligonucleotide
ucugcuacccacuggccau

SEQ ID NO: 2811548 - RNA, 19 nt, Artificial Sequence
  Description of Artificial Sequence: Synthetic oligonucleotide
gaccuugggagcuugcuaa

SEQ ID NO: 2811549 - RNA, 19 nt, Artificial Sequence
  Description of Artificial Sequence: Synthetic oligonucleotide
cucucucugauacccuagg

SEQ ID NO: 2811550 - RNA, 19 nt, Artificial Sequence
  Description of Artificial Sequence: Synthetic oligonucleotide
uugggagcuugcuaaucug

SEQ ID NO: 2811551 - RNA, 19 nt, Artificial Sequence
  Description of Artificial Sequence: Synthetic oligonucleotide
uuuugcccugcuagguuca

SEQ ID NO: 2811552 - RNA, 19 nt, Artificial Sequence
  Description of Artificial Sequence: Synthetic oligonucleotide
ugggacucagcaguggucu

SEQ ID NO: 2811553 - RNA, 19 nt, Artificial Sequence
  Description of Artificial Sequence: Synthetic oligonucleotide
guuuugcccugcuagguuc

SEQ ID NO: 2811554 - RNA, 19 nt, Artificial Sequence
  Description of Artificial Sequence: Synthetic oligonucleotide
ugacucgaggaaacuccag

SEQ ID NO: 2811555 - RNA, 19 nt, Artificial Sequence
  Description of Artificial Sequence: Synthetic oligonucleotide
gucucugaaagcaugucca

SEQ ID NO: 2811556 - RNA, 19 nt, Artificial Sequence
  Description of Artificial Sequence: Synthetic oligonucleotide
agugggacucagcaguggu

SEQ ID NO: 2811557 - RNA, 19 nt, Artificial Sequence
  Description of Artificial Sequence: Synthetic oligonucleotide
auauacucccaaagagagg

SEQ ID NO: 2811558 - RNA, 19 nt, Artificial Sequence
  Description of Artificial Sequence: Synthetic oligonucleotide
ucucccuccgauccacgcc

SEQ ID NO: 2811559 - RNA, 19 nt, Artificial Sequence
  Description of Artificial Sequence: Synthetic oligonucleotide
gauguccacuuugagccgc

SEQ ID NO: 2811560 - RNA, 19 nt, Artificial Sequence
  Description of Artificial Sequence: Synthetic oligonucleotide
ccugacucgaggaaacucc

SEQ ID NO: 2811561 - RNA, 19 nt, Artificial Sequence
  Description of Artificial Sequence: Synthetic oligonucleotide
gagagaggcagacuuccga

SEQ ID NO: 2811562 - RNA, 19 nt, Artificial Sequence
  Description of Artificial Sequence: Synthetic oligonucleotide
ugcgguugauaaucuucag

SEQ ID NO: 2811563 - RNA, 19 nt, Artificial Sequence
  Description of Artificial Sequence: Synthetic oligonucleotide
gcuagguucauggugggag

SEQ ID NO: 2811564 - RNA, 19 nt, Artificial Sequence
  Description of Artificial Sequence: Synthetic oligonucleotide
aggcagacuuccgaggagg

SEQ ID NO: 2811565 - RNA, 19 nt, Artificial Sequence
  Description of Artificial Sequence: Synthetic oligonucleotide
acuuugagccgcaaaagau

SEQ ID NO: 2811566 - RNA, 19 nt, Artificial Sequence
  Description of Artificial Sequence: Synthetic oligonucleotide
ucaguggaacucucucuga

SEQ ID NO: 2811567 - RNA, 19 nt, Artificial Sequence
  Description of Artificial Sequence: Synthetic oligonucleotide
cuacccacuggccauuuuc

SEQ ID NO: 2811568 - RNA, 19 nt, Artificial Sequence
  Description of Artificial Sequence: Synthetic oligonucleotide
cucucugauacccuaggga

SEQ ID NO: 2811569 - RNA, 19 nt, Artificial Sequence
  Description of Artificial Sequence: Synthetic oligonucleotide
cugucagugggucagugga

SEQ ID NO: 2811570 - RNA, 19 nt, Artificial Sequence
  Description of Artificial Sequence: Synthetic oligonucleotide
cucgaggaaacuccagcac

SEQ ID NO: 2811571 - RNA, 19 nt, Artificial Sequence
  Description of Artificial Sequence: Synthetic oligonucleotide
aagugggacucagcagugg

SEQ ID NO: 2811572 - RNA, 19 nt, Artificial Sequence
  Description of Artificial Sequence: Synthetic oligonucleotide
uccuccucccugucagugg

SEQ ID NO: 2811573 - RNA, 19 nt, Artificial Sequence
  Description of Artificial Sequence: Synthetic oligonucleotide
cugaaagcauguccagcag

SEQ ID NO: 2811574 - RNA, 19 nt, Artificial Sequence
  Description of Artificial Sequence: Synthetic oligonucleotide
gacugaauauacucccaaa

SEQ ID NO: 2811575 - RNA, 19 nt, Artificial Sequence
  Description of Artificial Sequence: Synthetic oligonucleotide
acugcugguuccguuugcg

SEQ ID NO: 2811576 - RNA, 19 nt, Artificial Sequence
  Description of Artificial Sequence: Synthetic oligonucleotide
aguggucucugaaagcaug

SEQ ID NO: 2811577 - RNA, 19 nt, Artificial Sequence
  Description of Artificial Sequence: Synthetic oligonucleotide
uggaacucucucugauacc

SEQ ID NO: 2811578 - RNA, 19 nt, Artificial Sequence
  Description of Artificial Sequence: Synthetic oligonucleotide
acaggcgcgucacuuccuc

SEQ ID NO: 2811579 - RNA, 19 nt, Artificial Sequence
  Description of Artificial Sequence: Synthetic oligonucleotide
cucccuccgauccacgccc

SEQ ID NO: 2811580 - RNA, 19 nt, Artificial Sequence
  Description of Artificial Sequence: Synthetic oligonucleotide
uucaaguuuugcccugcua

SEQ ID NO: 2811581 - RNA, 19 nt, Artificial Sequence
  Description of Artificial Sequence: Synthetic oligonucleotide
cuugcuaaucugacuaaaa

SEQ ID NO: 2811582 - RNA, 19 nt, Artificial Sequence
  Description of Artificial Sequence: Synthetic oligonucleotide
aggcgcugagucucccucc

SEQ ID NO: 2811583 - RNA, 19 nt, Artificial Sequence
  Description of Artificial Sequence: Synthetic oligonucleotide
uccagcaggauguccacuu

SEQ ID NO: 2811584 - RNA, 19 nt, Artificial Sequence
  Description of Artificial Sequence: Synthetic oligonucleotide
cugcgguugauaaucuuca

SEQ ID NO: 2811585 - RNA, 19 nt, Artificial Sequence
  Description of Artificial Sequence: Synthetic oligonucleotide
ccacuaaucacugugucug

SEQ ID NO: 2811586 - RNA, 19 nt, Artificial Sequence
  Description of Artificial Sequence: Synthetic oligonucleotide
uagucaaggcccagcucca

SEQ ID NO: 2811587 - RNA, 19 nt, Artificial Sequence
  Description of Artificial Sequence: Synthetic oligonucleotide
cacuaaucacugugucugc

SEQ ID NO: 2811588 - RNA, 19 nt, Artificial Sequence
  Description of Artificial Sequence: Synthetic oligonucleotide
cuuccaacugcugguuccg

SEQ ID NO: 2811589 - RNA, 19 nt, Artificial Sequence
  Description of Artificial Sequence: Synthetic oligonucleotide
auacccuagggaguguuca

SEQ ID NO: 2811590 - RNA, 19 nt, Artificial Sequence
  Description of Artificial Sequence: Synthetic oligonucleotide
ucaaggcccagcuccaauu

SEQ ID NO: 2811591 - RNA, 19 nt, Artificial Sequence
  Description of Artificial Sequence: Synthetic oligonucleotide
ugucugcuacccacuggcc

SEQ ID NO: 2811592 - RNA, 19 nt, Artificial Sequence
  Description of Artificial Sequence: Synthetic oligonucleotide
aguguucacaggcgcguca

SEQ ID NO: 2811593 - RNA, 19 nt, Artificial Sequence
  Description of Artificial Sequence: Synthetic oligonucleotide
gaggcagacuuccgaggag

SEQ ID NO: 2811594 - RNA, 19 nt, Artificial Sequence
  Description of Artificial Sequence: Synthetic oligonucleotide
cacuuugagccgcaaaaga

SEQ ID NO: 2811595 - RNA, 19 nt, Artificial Sequence
  Description of Artificial Sequence: Synthetic oligonucleotide
uuccguuugcgcaggcgcu

SEQ ID NO: 2811596 - RNA, 19 nt, Artificial Sequence
  Description of Artificial Sequence: Synthetic oligonucleotide
uuccuccugcgguugauaa

SEQ ID NO: 2811597 - RNA, 19 nt, Artificial Sequence
  Description of Artificial Sequence: Synthetic oligonucleotide
gccgcaaaagauuauucuc

SEQ ID NO: 2811598 - RNA, 19 nt, Artificial Sequence
  Description of Artificial Sequence: Synthetic oligonucleotide
ugagucucccuccgaucca

SEQ ID NO: 2811599 - RNA, 19 nt, Artificial Sequence
  Description of Artificial Sequence: Synthetic oligonucleotide
acuaaucacugugucugcu

SEQ ID NO: 2811600 - RNA, 19 nt, Artificial Sequence
  Description of Artificial Sequence: Synthetic oligonucleotide
agaggcauuccugacucga

SEQ ID NO: 2811601 - RNA, 19 nt, Artificial Sequence
  Description of Artificial Sequence: Synthetic oligonucleotide
ucagugggucaguggaacu

SEQ ID NO: 2811602 - RNA, 19 nt, Artificial Sequence
  Description of Artificial Sequence: Synthetic oligonucleotide
ccauuuucaaacuucaagu

SEQ ID NO: 2811603 - RNA, 19 nt, Artificial Sequence
  Description of Artificial Sequence: Synthetic oligonucleotide
aguuuugcccugcuagguu

SEQ ID NO: 2811604 - RNA, 19 nt, Artificial Sequence
  Description of Artificial Sequence: Synthetic oligonucleotide
gagaggcauuccugacucg

SEQ ID NO: 2811605 - RNA, 19 nt, Artificial Sequence
  Description of Artificial Sequence: Synthetic oligonucleotide
uucacaggcgcgucacuuc

SEQ ID NO: 2811606 - RNA, 19 nt, Artificial Sequence
  Description of Artificial Sequence: Synthetic oligonucleotide
gaccgaucuaaagaaugca

SEQ ID NO: 2811607 - RNA, 19 nt, Artificial Sequence
  Description of Artificial Sequence: Synthetic oligonucleotide
gcgguugauaaucuucagc

SEQ ID NO: 2811608 - RNA, 19 nt, Artificial Sequence
  Description of Artificial Sequence: Synthetic oligonucleotide
ugucagugggucaguggaa

SEQ ID NO: 2811609 - RNA, 19 nt, Artificial Sequence
  Description of Artificial Sequence: Synthetic oligonucleotide
auguccagcaggaugucca

SEQ ID NO: 2811610 - RNA, 19 nt, Artificial Sequence
  Description of Artificial Sequence: Synthetic oligonucleotide
ccaaagagaggcauuccug

SEQ ID NO: 2811611 - RNA, 19 nt, Artificial Sequence
  Description of Artificial Sequence: Synthetic oligonucleotide
ugggucaguggaacucucu

SEQ ID NO: 2811612 - RNA, 19 nt, Artificial Sequence
  Description of Artificial Sequence: Synthetic oligonucleotide
aguggaacucucucugaua

SEQ ID NO: 2811613 - RNA, 19 nt, Artificial Sequence
  Description of Artificial Sequence: Synthetic oligonucleotide
uccaguucuuuauccuuua

SEQ ID NO: 2811614 - RNA, 19 nt, Artificial Sequence
  Description of Artificial Sequence: Synthetic oligonucleotide
agcuccaauucccgcguug

SEQ ID NO: 2811615 - RNA, 19 nt, Artificial Sequence
  Description of Artificial Sequence: Synthetic oligonucleotide
uacucccaaagagaggcau

SEQ ID NO: 2811616 - RNA, 19 nt, Artificial Sequence
  Description of Artificial Sequence: Synthetic oligonucleotide
gugggaguuccauagucaa

SEQ ID NO: 2811617 - RNA, 19 nt, Artificial Sequence
  Description of Artificial Sequence: Synthetic oligonucleotide
aauucccgcguugaccgau

SEQ ID NO: 2811618 - RNA, 19 nt, Artificial Sequence
  Description of Artificial Sequence: Synthetic oligonucleotide
agugggucaguggaacucu

SEQ ID NO: 2811619 - RNA, 19 nt, Artificial Sequence
  Description of Artificial Sequence: Synthetic oligonucleotide
agguucauggugggaguuc

SEQ ID NO: 2811620 - RNA, 19 nt, Artificial Sequence
  Description of Artificial Sequence: Synthetic oligonucleotide
uucauggugggaguuccau

SEQ ID NO: 2811621 - RNA, 19 nt, Artificial Sequence
  Description of Artificial Sequence: Synthetic oligonucleotide
cauuuucaaacuucaaguu

SEQ ID NO: 2811622 - RNA, 19 nt, Artificial Sequence
  Description of Artificial Sequence: Synthetic oligonucleotide
gcugguuccguuugcgcag

SEQ ID NO: 2811623 - RNA, 19 nt, Artificial Sequence
  Description of Artificial Sequence: Synthetic oligonucleotide
gguugauaaucuucagcuc

SEQ ID NO: 2811624 - RNA, 19 nt, Artificial Sequence
  Description of Artificial Sequence: Synthetic oligonucleotide
uguccagcaggauguccac

SEQ ID NO: 2811625 - RNA, 19 nt, Artificial Sequence
  Description of Artificial Sequence: Synthetic oligonucleotide
gucugcuacccacuggcca

SEQ ID NO: 2811626 - RNA, 19 nt, Artificial Sequence
  Description of Artificial Sequence: Synthetic oligonucleotide
ggaggggucuucuuuggac

SEQ ID NO: 2811627 - RNA, 19 nt, Artificial Sequence
  Description of Artificial Sequence: Synthetic oligonucleotide
gcguugaccgaucuaaaga

SEQ ID NO: 2811628 - RNA, 19 nt, Artificial Sequence
  Description of Artificial Sequence: Synthetic oligonucleotide
acuggccauuuucaaacuu

SEQ ID NO: 2811629 - RNA, 19 nt, Artificial Sequence
  Description of Artificial Sequence: Synthetic oligonucleotide
ucauggugggaguuccaua

SEQ ID NO: 2811630 - RNA, 19 nt, Artificial Sequence
  Description of Artificial Sequence: Synthetic oligonucleotide
gaggcauuccugacucgag

SEQ ID NO: 2811631 - RNA, 19 nt, Artificial Sequence
  Description of Artificial Sequence: Synthetic oligonucleotide
cauagucaaggcccagcuc

SEQ ID NO: 2811632 - RNA, 19 nt, Artificial Sequence
  Description of Artificial Sequence: Synthetic oligonucleotide
cagcaggauguccacuuug

SEQ ID NO: 2811633 - RNA, 19 nt, Artificial Sequence
  Description of Artificial Sequence: Synthetic oligonucleotide
uccugacucgaggaaacuc

SEQ ID NO: 2811634 - RNA, 19 nt, Artificial Sequence
  Description of Artificial Sequence: Synthetic oligonucleotide
cugcuagguucaugguggg

SEQ ID NO: 2811635 - RNA, 19 nt, Artificial Sequence
  Description of Artificial Sequence: Synthetic oligonucleotide
aaagcauguccagcaggau

SEQ ID NO: 2811636 - RNA, 19 nt, Artificial Sequence
  Description of Artificial Sequence: Synthetic oligonucleotide
gaggggucuucuuuggacu

SEQ ID NO: 2811637 - RNA, 19 nt, Artificial Sequence
  Description of Artificial Sequence: Synthetic oligonucleotide
gucagugggucaguggaac

SEQ ID NO: 2811638 - RNA, 19 nt, Artificial Sequence
  Description of Artificial Sequence: Synthetic oligonucleotide
aaugcagauuggagagaga

SEQ ID NO: 2811639 - RNA, 19 nt, Artificial Sequence
  Description of Artificial Sequence: Synthetic oligonucleotide
agcuugcuaaucugacuaa

SEQ ID NO: 2811640 - RNA, 19 nt, Artificial Sequence
  Description of Artificial Sequence: Synthetic oligonucleotide
ugauaaucuucagcucauc

SEQ ID NO: 2811641 - RNA, 19 nt, Artificial Sequence
  Description of Artificial Sequence: Synthetic oligonucleotide
caaggcccagcuccaauuc

SEQ ID NO: 2811642 - RNA, 19 nt, Artificial Sequence
  Description of Artificial Sequence: Synthetic oligonucleotide
cugcugguuccguuugcgc

SEQ ID NO: 2811643 - RNA, 19 nt, Artificial Sequence
  Description of Artificial Sequence: Synthetic oligonucleotide
gguucauggugggaguucc

SEQ ID NO: 2811644 - RNA, 19 nt, Artificial Sequence
  Description of Artificial Sequence: Synthetic oligonucleotide
ccugcgguugauaaucuuc

SEQ ID NO: 2811645 - RNA, 19 nt, Artificial Sequence
  Description of Artificial Sequence: Synthetic oligonucleotide
aggcgcgucacuuccuccu

SEQ ID NO: 2811646 - RNA, 19 nt, Artificial Sequence
  Description of Artificial Sequence: Synthetic oligonucleotide
uacccuagggaguguucac

SEQ ID NO: 2811647 - RNA, 19 nt, Artificial Sequence
  Description of Artificial Sequence: Synthetic oligonucleotide
ggaguuccauagucaaggc

SEQ ID NO: 2811648 - RNA, 19 nt, Artificial Sequence
  Description of Artificial Sequence: Synthetic oligonucleotide
cugacucgaggaaacucca

SEQ ID NO: 2811649 - RNA, 19 nt, Artificial Sequence
  Description of Artificial Sequence: Synthetic oligonucleotide
gacucagcaguggucucug

SEQ ID NO: 2811650 - RNA, 19 nt, Artificial Sequence
  Description of Artificial Sequence: Synthetic oligonucleotide
uguucacaggcgcgucacu

SEQ ID NO: 2811651 - RNA, 19 nt, Artificial Sequence
  Description of Artificial Sequence: Synthetic oligonucleotide
uugagccgcaaaagauuau

SEQ ID NO: 2811652 - RNA, 19 nt, Artificial Sequence
  Description of Artificial Sequence: Synthetic oligonucleotide
agcaggauguccacuuuga

SEQ ID NO: 2811653 - RNA, 19 nt, Artificial Sequence
  Description of Artificial Sequence: Synthetic oligonucleotide
agaaugcagauuggagaga

SEQ ID NO: 2811654 - RNA, 19 nt, Artificial Sequence
  Description of Artificial Sequence: Synthetic oligonucleotide
ggauguccacuuugagccg

SEQ ID NO: 2811655 - RNA, 19 nt, Artificial Sequence
  Description of Artificial Sequence: Synthetic oligonucleotide
acucucucugauacccuag

SEQ ID NO: 2811656 - RNA, 19 nt, Artificial Sequence
  Description of Artificial Sequence: Synthetic oligonucleotide
cuaaucacugugucugcua

SEQ ID NO: 2811657 - RNA, 19 nt, Artificial Sequence
  Description of Artificial Sequence: Synthetic oligonucleotide
cuugggagcuugcuaaucu

SEQ ID NO: 2811658 - RNA, 19 nt, Artificial Sequence
  Description of Artificial Sequence: Synthetic oligonucleotide
cuuugagccgcaaaagauu

SEQ ID NO: 2811659 - RNA, 19 nt, Artificial Sequence
  Description of Artificial Sequence: Synthetic oligonucleotide
ggcauuccugacucgagga

SEQ ID NO: 2811660 - RNA, 19 nt, Artificial Sequence
  Description of Artificial Sequence: Synthetic oligonucleotide
gcaguggucucugaaagca

SEQ ID NO: 2811661 - RNA, 19 nt, Artificial Sequence
  Description of Artificial Sequence: Synthetic oligonucleotide
cugugucugcuacccacug

SEQ ID NO: 2811662 - RNA, 19 nt, Artificial Sequence
  Description of Artificial Sequence: Synthetic oligonucleotide
gaucuaaagaaugcagauu

SEQ ID NO: 2811663 - RNA, 19 nt, Artificial Sequence
  Description of Artificial Sequence: Synthetic oligonucleotide
uggaccuugggagcuugcu

SEQ ID NO: 2811664 - RNA, 19 nt, Artificial Sequence
  Description of Artificial Sequence: Synthetic oligonucleotide
gucucccuccgauccacgc

SEQ ID NO: 2811665 - RNA, 19 nt, Artificial Sequence
  Description of Artificial Sequence: Synthetic oligonucleotide
ccgaucuaaagaaugcaga

SEQ ID NO: 2811666 - RNA, 19 nt, Artificial Sequence
  Description of Artificial Sequence: Synthetic oligonucleotide
gauacccuagggaguguuc

SEQ ID NO: 2811667 - RNA, 19 nt, Artificial Sequence
  Description of Artificial Sequence: Synthetic oligonucleotide
agacuuccgaggagggguc

SEQ ID NO: 2811668 - RNA, 19 nt, Artificial Sequence
  Description of Artificial Sequence: Synthetic oligonucleotide
auggugggaguuccauagu

SEQ ID NO: 2811669 - RNA, 19 nt, Artificial Sequence
  Description of Artificial Sequence: Synthetic oligonucleotide
uuggagagagaggcagacu

SEQ ID NO: 2811670 - RNA, 19 nt, Artificial Sequence
  Description of Artificial Sequence: Synthetic oligonucleotide
cuuuauccuuuaaguggga

SEQ ID NO: 2811671 - RNA, 19 nt, Artificial Sequence
  Description of Artificial Sequence: Synthetic oligonucleotide
uccaacugcugguuccguu

SEQ ID NO: 2811672 - RNA, 19 nt, Artificial Sequence
  Description of Artificial Sequence: Synthetic oligonucleotide
ucacuuccuccugcgguug

SEQ ID NO: 2811673 - RNA, 19 nt, Artificial Sequence
  Description of Artificial Sequence: Synthetic oligonucleotide
uuccauagucaaggcccag

SEQ ID NO: 2811674 - RNA, 19 nt, Artificial Sequence
  Description of Artificial Sequence: Synthetic oligonucleotide
uccguuugcgcaggcgcug

SEQ ID NO: 2811675 - RNA, 19 nt, Artificial Sequence
  Description of Artificial Sequence: Synthetic oligonucleotide
ugauacccuagggaguguu

SEQ ID NO: 2811676 - RNA, 19 nt, Artificial Sequence
  Description of Artificial Sequence: Synthetic oligonucleotide
gaggaaacuccagcacuuc

SEQ ID NO: 2811677 - RNA, 19 nt, Artificial Sequence
  Description of Artificial Sequence: Synthetic oligonucleotide
cagugggucaguggaacuc

SEQ ID NO: 2811678 - RNA, 19 nt, Artificial Sequence
  Description of Artificial Sequence: Synthetic oligonucleotide
acugugucugcuacccacu

SEQ ID NO: 2811679 - RNA, 19 nt, Artificial Sequence
  Description of Artificial Sequence: Synthetic oligonucleotide
cauuccugacucgaggaaa

SEQ ID NO: 2811680 - RNA, 19 nt, Artificial Sequence
  Description of Artificial Sequence: Synthetic oligonucleotide
uggucucugaaagcauguc

SEQ ID NO: 2811681 - RNA, 19 nt, Artificial Sequence
  Description of Artificial Sequence: Synthetic oligonucleotide
gggaguguucacaggcgcg

SEQ ID NO: 2811682 - RNA, 19 nt, Artificial Sequence
  Description of Artificial Sequence: Synthetic oligonucleotide
ccugucagugggucagugg

SEQ ID NO: 2811683 - RNA, 19 nt, Artificial Sequence
  Description of Artificial Sequence: Synthetic oligonucleotide
cagauuggagagagaggca

SEQ ID NO: 2811684 - RNA, 19 nt, Artificial Sequence
  Description of Artificial Sequence: Synthetic oligonucleotide
ggcgcugagucucccuccg

SEQ ID NO: 2811685 - RNA, 19 nt, Artificial Sequence
  Description of Artificial Sequence: Synthetic oligonucleotide
uucccgcguugaccgaucu

SEQ ID NO: 2811686 - RNA, 19 nt, Artificial Sequence
  Description of Artificial Sequence: Synthetic oligonucleotide
guuccauagucaaggccca

SEQ ID NO: 2811687 - RNA, 19 nt, Artificial Sequence
  Description of Artificial Sequence: Synthetic oligonucleotide
cccuagggaguguucacag

SEQ ID NO: 2811688 - RNA, 19 nt, Artificial Sequence
  Description of Artificial Sequence: Synthetic oligonucleotide
ccuagggaguguucacagg

SEQ ID NO: 2811689 - RNA, 19 nt, Artificial Sequence
  Description of Artificial Sequence: Synthetic oligonucleotide
auccaguucuuuauccuuu

SEQ ID NO: 2811690 - RNA, 19 nt, Artificial Sequence
  Description of Artificial Sequence: Synthetic oligonucleotide
cuccaauucccgcguugac

SEQ ID NO: 2811691 - RNA, 19 nt, Artificial Sequence
  Description of Artificial Sequence: Synthetic oligonucleotide
uccuccugcgguugauaau

SEQ ID NO: 2811692 - RNA, 19 nt, Artificial Sequence
  Description of Artificial Sequence: Synthetic oligonucleotide
ccuuuaagugggacucagc

SEQ ID NO: 2811693 - RNA, 19 nt, Artificial Sequence
  Description of Artificial Sequence: Synthetic oligonucleotide
uuccugacucgaggaaacu

SEQ ID NO: 2811694 - RNA, 19 nt, Artificial Sequence
  Description of Artificial Sequence: Synthetic oligonucleotide
acccuagggaguguucaca

SEQ ID NO: 2811695 - RNA, 19 nt, Artificial Sequence
  Description of Artificial Sequence: Synthetic oligonucleotide
gggucaguggaacucucuc

SEQ ID NO: 2811696 - RNA, 19 nt, Artificial Sequence
  Description of Artificial Sequence: Synthetic oligonucleotide
guguucacaggcgcgucac

SEQ ID NO: 2811697 - RNA, 19 nt, Artificial Sequence
  Description of Artificial Sequence: Synthetic oligonucleotide
ugcuagguucaugguggga

SEQ ID NO: 2811698 - RNA, 19 nt, Artificial Sequence
  Description of Artificial Sequence: Synthetic oligonucleotide
cugguuccguuugcgcagg

SEQ ID NO: 2811699 - RNA, 19 nt, Artificial Sequence
  Description of Artificial Sequence: Synthetic oligonucleotide
acccacuggccauuuucaa

SEQ ID NO: 2811700 - RNA, 19 nt, Artificial Sequence
  Description of Artificial Sequence: Synthetic oligonucleotide
ccuccugcgguugauaauc

SEQ ID NO: 2811701 - RNA, 19 nt, Artificial Sequence
  Description of Artificial Sequence: Synthetic oligonucleotide
cgguugauaaucuucagcu

SEQ ID NO: 2811702 - RNA, 19 nt, Artificial Sequence
  Description of Artificial Sequence: Synthetic oligonucleotide
uagguucauggugggaguu

SEQ ID NO: 2811703 - RNA, 19 nt, Artificial Sequence
  Description of Artificial Sequence: Synthetic oligonucleotide
ggugggaguuccauaguca

SEQ ID NO: 2811704 - RNA, 19 nt, Artificial Sequence
  Description of Artificial Sequence: Synthetic oligonucleotide
uccucccugucaguggguc

SEQ ID NO: 2811705 - RNA, 19 nt, Artificial Sequence
  Description of Artificial Sequence: Synthetic oligonucleotide
cccugcuagguucauggug

SEQ ID NO: 2811706 - RNA, 19 nt, Artificial Sequence
  Description of Artificial Sequence: Synthetic oligonucleotide
caggcgcgucacuuccucc

SEQ ID NO: 2811707 - RNA, 19 nt, Artificial Sequence
  Description of Artificial Sequence: Synthetic oligonucleotide
auccuuuaagugggacuca

SEQ ID NO: 2811708 - RNA, 19 nt, Artificial Sequence
  Description of Artificial Sequence: Synthetic oligonucleotide
accuugggagcuugcuaau

SEQ ID NO: 2811709 - RNA, 19 nt, Artificial Sequence
  Description of Artificial Sequence: Synthetic oligonucleotide
gguuccguuugcgcaggcg

SEQ ID NO: 2811710 - RNA, 19 nt, Artificial Sequence
  Description of Artificial Sequence: Synthetic oligonucleotide
cagacuuccgaggaggggu

SEQ ID NO: 2811711 - RNA, 19 nt, Artificial Sequence
  Description of Artificial Sequence: Synthetic oligonucleotide
ggcagacuuccgaggaggg

SEQ ID NO: 2811712 - RNA, 19 nt, Artificial Sequence
  Description of Artificial Sequence: Synthetic oligonucleotide
cguugaccgaucuaaagaa

SEQ ID NO: 2811713 - RNA, 19 nt, Artificial Sequence
  Description of Artificial Sequence: Synthetic oligonucleotide
uccugcgguugauaaucuu

SEQ ID NO: 2811714 - RNA, 19 nt, Artificial Sequence
  Description of Artificial Sequence: Synthetic oligonucleotide
ccacuuugagccgcaaaag

SEQ ID NO: 2811715 - RNA, 19 nt, Artificial Sequence
  Description of Artificial Sequence: Synthetic oligonucleotide
auucccgcguugaccgauc

SEQ ID NO: 2811716 - RNA, 19 nt, Artificial Sequence
  Description of Artificial Sequence: Synthetic oligonucleotide
cucugauacccuagggagu

SEQ ID NO: 2811717 - RNA, 19 nt, Artificial Sequence
  Description of Artificial Sequence: Synthetic oligonucleotide
ucccuccgauccacgcccc

SEQ ID NO: 2811718 - RNA, 19 nt, Artificial Sequence
  Description of Artificial Sequence: Synthetic oligonucleotide
uuccgaggaggggucuucu

SEQ ID NO: 2811719 - RNA, 19 nt, Artificial Sequence
  Description of Artificial Sequence: Synthetic oligonucleotide
ugguuccguuugcgcaggc

SEQ ID NO: 2811720 - RNA, 19 nt, Artificial Sequence
  Description of Artificial Sequence: Synthetic oligonucleotide
cuagguucauggugggagu

SEQ ID NO: 2811721 - RNA, 19 nt, Artificial Sequence
  Description of Artificial Sequence: Synthetic oligonucleotide
gggagcuugcuaaucugac

SEQ ID NO: 2811722 - RNA, 19 nt, Artificial Sequence
  Description of Artificial Sequence: Synthetic oligonucleotide
ccgcaaaagauuauucucu

SEQ ID NO: 2811723 - RNA, 19 nt, Artificial Sequence
  Description of Artificial Sequence: Synthetic oligonucleotide
uugcccugcuagguucaug

SEQ ID NO: 2811724 - RNA, 19 nt, Artificial Sequence
  Description of Artificial Sequence: Synthetic oligonucleotide
gaguguucacaggcgcguc

SEQ ID NO: 2811725 - RNA, 19 nt, Artificial Sequence
  Description of Artificial Sequence: Synthetic oligonucleotide
cgaggaggggucuucuuug

SEQ ID NO: 2811726 - RNA, 19 nt, Artificial Sequence
  Description of Artificial Sequence: Synthetic oligonucleotide
cgcguugaccgaucuaaag

SEQ ID NO: 2811727 - RNA, 19 nt, Artificial Sequence
  Description of Artificial Sequence: Synthetic oligonucleotide
agucucccuccgauccacg

SEQ ID NO: 2811728 - RNA, 19 nt, Artificial Sequence
  Description of Artificial Sequence: Synthetic oligonucleotide
uuccaacugcugguuccgu

SEQ ID NO: 2811729 - RNA, 19 nt, Artificial Sequence
  Description of Artificial Sequence: Synthetic oligonucleotide
auacucccaaagagaggca

SEQ ID NO: 2811730 - RNA, 19 nt, Artificial Sequence
  Description of Artificial Sequence: Synthetic oligonucleotide
ggaaacuccagcacuuccu

SEQ ID NO: 2811731 - RNA, 19 nt, Artificial Sequence
  Description of Artificial Sequence: Synthetic oligonucleotide
cuuccgaggaggggucuuc

SEQ ID NO: 2811732 - RNA, 19 nt, Artificial Sequence
  Description of Artificial Sequence: Synthetic oligonucleotide
acucagcaguggucucuga

SEQ ID NO: 2811733 - RNA, 19 nt, Artificial Sequence
  Description of Artificial Sequence: Synthetic oligonucleotide
ggagcuugcuaaucugacu

SEQ ID NO: 2811734 - RNA, 19 nt, Artificial Sequence
  Description of Artificial Sequence: Synthetic oligonucleotide
guccacuuugagccgcaaa

SEQ ID NO: 2811735 - RNA, 19 nt, Artificial Sequence
  Description of Artificial Sequence: Synthetic oligonucleotide
gugggacucagcagugguc

SEQ ID NO: 2811736 - RNA, 19 nt, Artificial Sequence
  Description of Artificial Sequence: Synthetic oligonucleotide
ggagagagaggcagacuuc

SEQ ID NO: 2811737 - RNA, 19 nt, Artificial Sequence
  Description of Artificial Sequence: Synthetic oligonucleotide
uccgaggaggggucuucuu

SEQ ID NO: 2811738 - RNA, 19 nt, Artificial Sequence
  Description of Artificial Sequence: Synthetic oligonucleotide
gcugagucucccuccgauc

SEQ ID NO: 2811739 - RNA, 19 nt, Artificial Sequence
  Description of Artificial Sequence: Synthetic oligonucleotide
gucacuuccuccugcgguu

SEQ ID NO: 2811740 - RNA, 19 nt, Artificial Sequence
  Description of Artificial Sequence: Synthetic oligonucleotide
gcgucacuuccuccugcgg

SEQ ID NO: 2811741 - RNA, 19 nt, Artificial Sequence
  Description of Artificial Sequence: Synthetic oligonucleotide
guugaccgaucuaaagaau

SEQ ID NO: 2811742 - RNA, 19 nt, Artificial Sequence
  Description of Artificial Sequence: Synthetic oligonucleotide
guggucucugaaagcaugu

SEQ ID NO: 2811743 - RNA, 19 nt, Artificial Sequence
  Description of Artificial Sequence: Synthetic oligonucleotide
gcauuccugacucgaggaa

SEQ ID NO: 2811744 - RNA, 19 nt, Artificial Sequence
  Description of Artificial Sequence: Synthetic oligonucleotide
gcuugcuaaucugacuaaa

SEQ ID NO: 2811745 - RNA, 19 nt, Artificial Sequence
  Description of Artificial Sequence: Synthetic oligonucleotide
uuugcccugcuagguucau

SEQ ID NO: 2811746 - RNA, 19 nt, Artificial Sequence
  Description of Artificial Sequence: Synthetic oligonucleotide
gcuccaauucccgcguuga

SEQ ID NO: 2811747 - RNA, 19 nt, Artificial Sequence
  Description of Artificial Sequence: Synthetic oligonucleotide
ucccgcguugaccgaucua

SEQ ID NO: 2811748 - RNA, 19 nt, Artificial Sequence
  Description of Artificial Sequence: Synthetic oligonucleotide
ccccacuaaucacuguguc

SEQ ID NO: 2811749 - RNA, 19 nt, Artificial Sequence
  Description of Artificial Sequence: Synthetic oligonucleotide
uguccacuuugagccgcaa

SEQ ID NO: 2811750 - RNA, 19 nt, Artificial Sequence
  Description of Artificial Sequence: Synthetic oligonucleotide
acuuccuccugcgguugau

SEQ ID NO: 2811751 - RNA, 19 nt, Artificial Sequence
  Description of Artificial Sequence: Synthetic oligonucleotide
caguggaacucucucugau

SEQ ID NO: 2811752 - RNA, 19 nt, Artificial Sequence
  Description of Artificial Sequence: Synthetic oligonucleotide
ggaccuugggagcuugcua

SEQ ID NO: 2811753 - RNA, 19 nt, Artificial Sequence
  Description of Artificial Sequence: Synthetic oligonucleotide
guucauggugggaguucca

SEQ ID NO: 2811754 - RNA, 19 nt, Artificial Sequence
  Description of Artificial Sequence: Synthetic oligonucleotide
cgcgucacuuccuccugcg

SEQ ID NO: 2811755 - RNA, 19 nt, Artificial Sequence
  Description of Artificial Sequence: Synthetic oligonucleotide
auguccacuuugagccgca

SEQ ID NO: 2811756 - RNA, 19 nt, Artificial Sequence
  Description of Artificial Sequence: Synthetic oligonucleotide
ggcgcgucacuuccuccug

SEQ ID NO: 2811757 - RNA, 19 nt, Artificial Sequence
  Description of Artificial Sequence: Synthetic oligonucleotide
cuucaaguuuugcccugcu

SEQ ID NO: 2811758 - RNA, 19 nt, Artificial Sequence
  Description of Artificial Sequence: Synthetic oligonucleotide
caauucccgcguugaccga

SEQ ID NO: 2811759 - RNA, 19 nt, Artificial Sequence
  Description of Artificial Sequence: Synthetic oligonucleotide
agucaaggcccagcuccaa

SEQ ID NO: 2811760 - RNA, 19 nt, Artificial Sequence
  Description of Artificial Sequence: Synthetic oligonucleotide
cgaucuaaagaaugcagau

SEQ ID NO: 2811761 - RNA, 19 nt, Artificial Sequence
  Description of Artificial Sequence: Synthetic oligonucleotide
guucacaggcgcgucacuu

SEQ ID NO: 2811762 - RNA, 19 nt, Artificial Sequence
  Description of Artificial Sequence: Synthetic oligonucleotide
guggaccuugggagcuugc

SEQ ID NO: 2811763 - RNA, 19 nt, Artificial Sequence
  Description of Artificial Sequence: Synthetic oligonucleotide
gugggucaguggaacucuc

SEQ ID NO: 2811764 - RNA, 19 nt, Artificial Sequence
  Description of Artificial Sequence: Synthetic oligonucleotide
cccaaagagaggcauuccu

SEQ ID NO: 2811765 - RNA, 19 nt, Artificial Sequence
  Description of Artificial Sequence: Synthetic oligonucleotide
acuuccgaggaggggucuu

SEQ ID NO: 2811766 - RNA, 19 nt, Artificial Sequence
  Description of Artificial Sequence: Synthetic oligonucleotide
ggaguguucacaggcgcgu

SEQ ID NO: 2811767 - RNA, 19 nt, Artificial Sequence
  Description of Artificial Sequence: Synthetic oligonucleotide
gucaaggcccagcuccaau

SEQ ID NO: 2811768 - RNA, 19 nt, Artificial Sequence
  Description of Artificial Sequence: Synthetic oligonucleotide
ucccugucagugggucagu

SEQ ID NO: 2811769 - RNA, 19 nt, Artificial Sequence
  Description of Artificial Sequence: Synthetic oligonucleotide
cccgcguugaccgaucuaa

SEQ ID NO: 2811770 - RNA, 19 nt, Artificial Sequence
  Description of Artificial Sequence: Synthetic oligonucleotide
gcgcgucacuuccuccugc

SEQ ID NO: 2811771 - RNA, 19 nt, Artificial Sequence
  Description of Artificial Sequence: Synthetic oligonucleotide
ugcuacccacuggccauuu

SEQ ID NO: 2811772 - RNA, 19 nt, Artificial Sequence
  Description of Artificial Sequence: Synthetic oligonucleotide
cccacuaaucacugugucu

SEQ ID NO: 2811773 - RNA, 19 nt, Artificial Sequence
  Description of Artificial Sequence: Synthetic oligonucleotide
cuccugcgguugauaaucu

SEQ ID NO: 2811774 - RNA, 19 nt, Artificial Sequence
  Description of Artificial Sequence: Synthetic oligonucleotide
ccuugggagcuugcuaauc

SEQ ID NO: 2811775 - RNA, 19 nt, Artificial Sequence
  Description of Artificial Sequence: Synthetic oligonucleotide
guuugcgcaggcgcugagu

SEQ ID NO: 2811776 - RNA, 19 nt, Artificial Sequence
  Description of Artificial Sequence: Synthetic oligonucleotide
ggggucuucuuuggacuga

SEQ ID NO: 2811777 - RNA, 19 nt, Artificial Sequence
  Description of Artificial Sequence: Synthetic oligonucleotide
ggccauuuucaaacuucaa

SEQ ID NO: 2811778 - RNA, 19 nt, Artificial Sequence
  Description of Artificial Sequence: Synthetic oligonucleotide
gggucuucuuuggacugaa

SEQ ID NO: 2811779 - RNA, 19 nt, Artificial Sequence
  Description of Artificial Sequence: Synthetic oligonucleotide
cuucuuccaacugcugguu

SEQ ID NO: 2811780 - RNA, 19 nt, Artificial Sequence
  Description of Artificial Sequence: Synthetic oligonucleotide
cuuccuccugcgguugaua

SEQ ID NO: 2811781 - RNA, 19 nt, Artificial Sequence
  Description of Artificial Sequence: Synthetic oligonucleotide
gacuuccgaggaggggucu

SEQ ID NO: 2811782 - RNA, 19 nt, Artificial Sequence
  Description of Artificial Sequence: Synthetic oligonucleotide
ggacucagcaguggucucu

SEQ ID NO: 2811783 - RNA, 19 nt, Artificial Sequence
  Description of Artificial Sequence: Synthetic oligonucleotide
ccaguucuuuauccuuuaa

SEQ ID NO: 2811784 - RNA, 19 nt, Artificial Sequence
  Description of Artificial Sequence: Synthetic oligonucleotide
ccaacugcugguuccguuu

SEQ ID NO: 2811785 - RNA, 19 nt, Artificial Sequence
  Description of Artificial Sequence: Synthetic oligonucleotide
cugccaucuccuccucccu

SEQ ID NO: 2811786 - RNA, 19 nt, Artificial Sequence
  Description of Artificial Sequence: Synthetic oligonucleotide
cccugucagugggucagug

SEQ ID NO: 2811787 - RNA, 19 nt, Artificial Sequence
  Description of Artificial Sequence: Synthetic oligonucleotide
guccagcaggauguccacu

SEQ ID NO: 2811788 - RNA, 19 nt, Artificial Sequence
  Description of Artificial Sequence: Synthetic oligonucleotide
cacaggcgcgucacuuccu

SEQ ID NO: 2811789 - RNA, 19 nt, Artificial Sequence
  Description of Artificial Sequence: Synthetic oligonucleotide
cgcaaaagauuauucucuu

SEQ ID NO: 2811790 - RNA, 19 nt, Artificial Sequence
  Description of Artificial Sequence: Synthetic oligonucleotide
cgucacuuccuccugcggu

SEQ ID NO: 2811791 - RNA, 19 nt, Artificial Sequence
  Description of Artificial Sequence: Synthetic oligonucleotide
ccagcuccaauucccgcgu

SEQ ID NO: 2811792 - RNA, 19 nt, Artificial Sequence
  Description of Artificial Sequence: Synthetic oligonucleotide
cgaggaaacuccagcacuu

SEQ ID NO: 2811793 - RNA, 19 nt, Artificial Sequence
  Description of Artificial Sequence: Synthetic oligonucleotide
cguuugcgcaggcgcugag

SEQ ID NO: 2811794 - RNA, 19 nt, Artificial Sequence
  Description of Artificial Sequence: Synthetic oligonucleotide
cugauacccuagggagugu

SEQ ID NO: 2811795 - RNA, 19 nt, Artificial Sequence
  Description of Artificial Sequence: Synthetic oligonucleotide
cuccucccugucagugggu

SEQ ID NO: 2811796 - RNA, 19 nt, Artificial Sequence
  Description of Artificial Sequence: Synthetic oligonucleotide
ccgcguugaccgaucuaaa

SEQ ID NO: 2811797 - RNA, 19 nt, Artificial Sequence
  Description of Artificial Sequence: Synthetic oligonucleotide
gcgcugagucucccuccga

SEQ ID NO: 2811798 - RNA, 19 nt, Artificial Sequence
  Description of Artificial Sequence: Synthetic oligonucleotide
ccgaggaggggucuucuuu

SEQ ID NO: 2811799 - RNA, 19 nt, Artificial Sequence
  Description of Artificial Sequence: Synthetic oligonucleotide
gcccugcuagguucauggu

SEQ ID NO: 2811800 - RNA, 19 nt, Artificial Sequence
  Description of Artificial Sequence: Synthetic oligonucleotide
ccguuugcgcaggcgcuga

SEQ ID NO: 2811801 - RNA, 19 nt, Artificial Sequence
  Description of Artificial Sequence: Synthetic oligonucleotide
ggucuucuuuggacugaau

SEQ ID NO: 2811802 - RNA, 19 nt, Artificial Sequence
  Description of Artificial Sequence: Synthetic oligonucleotide
gcuacccacuggccauuuu

SEQ ID NO: 2811803 - RNA, 19 nt, Artificial Sequence
  Description of Artificial Sequence: Synthetic oligonucleotide
cugcuacccacuggccauu

SEQ ID NO: 2811804 - RNA, 19 nt, Artificial Sequence
  Description of Artificial Sequence: Synthetic oligonucleotide
cagcuccaauucccgcguu

SEQ ID NO: 2811805 - RNA, 19 nt, Artificial Sequence
  Description of Artificial Sequence: Synthetic oligonucleotide
cgcugagucucccuccgau

SEQ ID NO: 2811806 - RNA, 19 nt, Artificial Sequence
  Description of Artificial Sequence: Synthetic oligonucleotide
ccagcaggauguccacuuu

SEQ ID NO: 2811807 - RNA, 19 nt, Artificial Sequence
  Description of Artificial Sequence: Synthetic oligonucleotide
uuuguugucacccugauca

SEQ ID NO: 2811808 - RNA, 19 nt, Artificial Sequence
  Description of Artificial Sequence: Synthetic oligonucleotide
aaacuccacaaacaaaggc

SEQ ID NO: 2811809 - RNA, 19 nt, Artificial Sequence
  Description of Artificial Sequence: Synthetic oligonucleotide
ucaagaaucccuuuucugg

SEQ ID NO: 2811810 - RNA, 19 nt, Artificial Sequence
  Description of Artificial Sequence: Synthetic oligonucleotide
gaggaagucagcuauagag

SEQ ID NO: 2811811 - RNA, 19 nt, Artificial Sequence
  Description of Artificial Sequence: Synthetic oligonucleotide
aaagagcacauccaguuuc

SEQ ID NO: 2811812 - RNA, 19 nt, Artificial Sequence
  Description of Artificial Sequence: Synthetic oligonucleotide
aacucuuuaaauucugcag

SEQ ID NO: 2811813 - RNA, 19 nt, Artificial Sequence
  Description of Artificial Sequence: Synthetic oligonucleotide
uuaaacaacagucugcaaa

SEQ ID NO: 2811814 - RNA, 19 nt, Artificial Sequence
  Description of Artificial Sequence: Synthetic oligonucleotide
aucaagguuaaccaucagc

SEQ ID NO: 2811815 - RNA, 19 nt, Artificial Sequence
  Description of Artificial Sequence: Synthetic oligonucleotide
uaaaguugcagauucaccu

SEQ ID NO: 2811816 - RNA, 19 nt, Artificial Sequence
  Description of Artificial Sequence: Synthetic oligonucleotide
ugcagauucaccuaaacuc

SEQ ID NO: 2811817 - RNA, 19 nt, Artificial Sequence
  Description of Artificial Sequence: Synthetic oligonucleotide
accuaaacucuuuaaauuc

SEQ ID NO: 2811818 - RNA, 19 nt, Artificial Sequence
  Description of Artificial Sequence: Synthetic oligonucleotide
acaguuucacuguugagcg

SEQ ID NO: 2811819 - RNA, 19 nt, Artificial Sequence
  Description of Artificial Sequence: Synthetic oligonucleotide
aaauucugcagagacacuc

SEQ ID NO: 2811820 - RNA, 19 nt, Artificial Sequence
  Description of Artificial Sequence: Synthetic oligonucleotide
uugagcaaagagcacaucc

SEQ ID NO: 2811821 - RNA, 19 nt, Artificial Sequence
  Description of Artificial Sequence: Synthetic oligonucleotide
aagguuaaccaucagcugu

SEQ ID NO: 2811822 - RNA, 19 nt, Artificial Sequence
  Description of Artificial Sequence: Synthetic oligonucleotide
uauagaggagucaucaucu

SEQ ID NO: 2811823 - RNA, 19 nt, Artificial Sequence
  Description of Artificial Sequence: Synthetic oligonucleotide
cuuuaaauucugcagagac

SEQ ID NO: 2811824 - RNA, 19 nt, Artificial Sequence
  Description of Artificial Sequence: Synthetic oligonucleotide
agacagaucacgcagacca

SEQ ID NO: 2811825 - RNA, 19 nt, Artificial Sequence
  Description of Artificial Sequence: Synthetic oligonucleotide
aacaacagucugcaaacuc

SEQ ID NO: 2811826 - RNA, 19 nt, Artificial Sequence
  Description of Artificial Sequence: Synthetic oligonucleotide
uguucuucuguucucagca

SEQ ID NO: 2811827 - RNA, 19 nt, Artificial Sequence
  Description of Artificial Sequence: Synthetic oligonucleotide
acaaccuccuccuaggagg

SEQ ID NO: 2811828 - RNA, 19 nt, Artificial Sequence
  Description of Artificial Sequence: Synthetic oligonucleotide
aaacucuuuaaauucugca

SEQ ID NO: 2811829 - RNA, 19 nt, Artificial Sequence
  Description of Artificial Sequence: Synthetic oligonucleotide
agcaguaaacuucuuaaag

SEQ ID NO: 2811830 - RNA, 19 nt, Artificial Sequence
  Description of Artificial Sequence: Synthetic oligonucleotide
uucuuaaaguugcagauuc

SEQ ID NO: 2811831 - RNA, 19 nt, Artificial Sequence
  Description of Artificial Sequence: Synthetic oligonucleotide
uaaacaacagucugcaaac

SEQ ID NO: 2811832 - RNA, 19 nt, Artificial Sequence
  Description of Artificial Sequence: Synthetic oligonucleotide
uuaaccaucagcugucuca

SEQ ID NO: 2811833 - RNA, 19 nt, Artificial Sequence
  Description of Artificial Sequence: Synthetic oligonucleotide
cuuugcuuuccucagaccc

SEQ ID NO: 2811834 - RNA, 19 nt, Artificial Sequence
  Description of Artificial Sequence: Synthetic oligonucleotide
ugugcuucuggaaacaagu

SEQ ID NO: 2811835 - RNA, 19 nt, Artificial Sequence
  Description of Artificial Sequence: Synthetic oligonucleotide
ucagacccuauauucaccg

SEQ ID NO: 2811836 - RNA, 19 nt, Artificial Sequence
  Description of Artificial Sequence: Synthetic oligonucleotide
uucuuaaacaacagucugc

SEQ ID NO: 2811837 - RNA, 19 nt, Artificial Sequence
  Description of Artificial Sequence: Synthetic oligonucleotide
agcacauccaguuucaaga

SEQ ID NO: 2811838 - RNA, 19 nt, Artificial Sequence
  Description of Artificial Sequence: Synthetic oligonucleotide
uuaaaguugcagauucacc

SEQ ID NO: 2811839 - RNA, 19 nt, Artificial Sequence
  Description of Artificial Sequence: Synthetic oligonucleotide
auucuuaaacaacagucug

SEQ ID NO: 2811840 - RNA, 19 nt, Artificial Sequence
  Description of Artificial Sequence: Synthetic oligonucleotide
aaacaagugacagagcagu

SEQ ID NO: 2811841 - RNA, 19 nt, Artificial Sequence
  Description of Artificial Sequence: Synthetic oligonucleotide
ucacuguugaggaagucag

SEQ ID NO: 2811842 - RNA, 19 nt, Artificial Sequence
  Description of Artificial Sequence: Synthetic oligonucleotide
guaaacuucuuaaaguugc

SEQ ID NO: 2811843 - RNA, 19 nt, Artificial Sequence
  Description of Artificial Sequence: Synthetic oligonucleotide
aaacaaaggcuccugcaug

SEQ ID NO: 2811844 - RNA, 19 nt, Artificial Sequence
  Description of Artificial Sequence: Synthetic oligonucleotide
uccaguuucaagaaucccu

SEQ ID NO: 2811845 - RNA, 19 nt, Artificial Sequence
  Description of Artificial Sequence: Synthetic oligonucleotide
ugagcaguaaacuucuuaa

SEQ ID NO: 2811846 - RNA, 19 nt, Artificial Sequence
  Description of Artificial Sequence: Synthetic oligonucleotide
acaacagucugcaaacucc

SEQ ID NO: 2811847 - RNA, 19 nt, Artificial Sequence
  Description of Artificial Sequence: Synthetic oligonucleotide
ucuuaaacaacagucugca

SEQ ID NO: 2811848 - RNA, 19 nt, Artificial Sequence
  Description of Artificial Sequence: Synthetic oligonucleotide
cuggaaacaagugacagag

SEQ ID NO: 2811849 - RNA, 19 nt, Artificial Sequence
  Description of Artificial Sequence: Synthetic oligonucleotide
uaaacucuuuaaauucugc

SEQ ID NO: 2811850 - RNA, 19 nt, Artificial Sequence
  Description of Artificial Sequence: Synthetic oligonucleotide
uucuguucucagcaggacg

SEQ ID NO: 2811851 - RNA, 19 nt, Artificial Sequence
  Description of Artificial Sequence: Synthetic oligonucleotide
uuugggcuucuccagacag

SEQ ID NO: 2811852 - RNA, 19 nt, Artificial Sequence
  Description of Artificial Sequence: Synthetic oligonucleotide
uucuucuguucucagcagg

SEQ ID NO: 2811853 - RNA, 19 nt, Artificial Sequence
  Description of Artificial Sequence: Synthetic oligonucleotide
ugaucaagguuaaccauca

SEQ ID NO: 2811854 - RNA, 19 nt, Artificial Sequence
  Description of Artificial Sequence: Synthetic oligonucleotide
aacuccacaaacaaaggcu

SEQ ID NO: 2811855 - RNA, 19 nt, Artificial Sequence
  Description of Artificial Sequence: Synthetic oligonucleotide
uguugaggaagucagcuau

SEQ ID NO: 2811856 - RNA, 19 nt, Artificial Sequence
  Description of Artificial Sequence: Synthetic oligonucleotide
uucaccuaaacucuuuaaa

SEQ ID NO: 2811857 - RNA, 19 nt, Artificial Sequence
  Description of Artificial Sequence: Synthetic oligonucleotide
aguuucacuguugagcgac

SEQ ID NO: 2811858 - RNA, 19 nt, Artificial Sequence
  Description of Artificial Sequence: Synthetic oligonucleotide
caagugacagagcaguagg

SEQ ID NO: 2811859 - RNA, 19 nt, Artificial Sequence
  Description of Artificial Sequence: Synthetic oligonucleotide
ugagcaaagagcacaucca

SEQ ID NO: 2811860 - RNA, 19 nt, Artificial Sequence
  Description of Artificial Sequence: Synthetic oligonucleotide
acccugaucaagguuaacc

SEQ ID NO: 2811861 - RNA, 19 nt, Artificial Sequence
  Description of Artificial Sequence: Synthetic oligonucleotide
caaacaaccuccuccuagg

SEQ ID NO: 2811862 - RNA, 19 nt, Artificial Sequence
  Description of Artificial Sequence: Synthetic oligonucleotide
uguggguugagcaguaaac

SEQ ID NO: 2811863 - RNA, 19 nt, Artificial Sequence
  Description of Artificial Sequence: Synthetic oligonucleotide
agugacagagcaguagggc

SEQ ID NO: 2811864 - RNA, 19 nt, Artificial Sequence
  Description of Artificial Sequence: Synthetic oligonucleotide
cacaguuucacuguugagc

SEQ ID NO: 2811865 - RNA, 19 nt, Artificial Sequence
  Description of Artificial Sequence: Synthetic oligonucleotide
ucaccuaaacucuuuaaau

SEQ ID NO: 2811866 - RNA, 19 nt, Artificial Sequence
  Description of Artificial Sequence: Synthetic oligonucleotide
uucaagaaucccuuuucug

SEQ ID NO: 2811867 - RNA, 19 nt, Artificial Sequence
  Description of Artificial Sequence: Synthetic oligonucleotide
aguagugggcagcuugagc

SEQ ID NO: 2811868 - RNA, 19 nt, Artificial Sequence
  Description of Artificial Sequence: Synthetic oligonucleotide
aacaaccuccuccuaggag

SEQ ID NO: 2811869 - RNA, 19 nt, Artificial Sequence
  Description of Artificial Sequence: Synthetic oligonucleotide
agagcaguagggcacgcgg

SEQ ID NO: 2811870 - RNA, 19 nt, Artificial Sequence
  Description of Artificial Sequence: Synthetic oligonucleotide
aaacuucuuaaaguugcag

SEQ ID NO: 2811871 - RNA, 19 nt, Artificial Sequence
  Description of Artificial Sequence: Synthetic oligonucleotide
ucaucuuugcuuuccucag

SEQ ID NO: 2811872 - RNA, 19 nt, Artificial Sequence
  Description of Artificial Sequence: Synthetic oligonucleotide
cacucugucuucuuccucg

SEQ ID NO: 2811873 - RNA, 19 nt, Artificial Sequence
  Description of Artificial Sequence: Synthetic oligonucleotide
uucuggaaacaagugacag

SEQ ID NO: 2811874 - RNA, 19 nt, Artificial Sequence
  Description of Artificial Sequence: Synthetic oligonucleotide
ucuuccucgucacuguuga

SEQ ID NO: 2811875 - RNA, 19 nt, Artificial Sequence
  Description of Artificial Sequence: Synthetic oligonucleotide
uccacgauucuuaaacaac

SEQ ID NO: 2811876 - RNA, 19 nt, Artificial Sequence
  Description of Artificial Sequence: Synthetic oligonucleotide
guagugggcagcuugagca

SEQ ID NO: 2811877 - RNA, 19 nt, Artificial Sequence
  Description of Artificial Sequence: Synthetic oligonucleotide
cuaaacucuuuaaauucug

SEQ ID NO: 2811878 - RNA, 19 nt, Artificial Sequence
  Description of Artificial Sequence: Synthetic oligonucleotide
cuauagaggagucaucauc

SEQ ID NO: 2811879 - RNA, 19 nt, Artificial Sequence
  Description of Artificial Sequence: Synthetic oligonucleotide
gguuccacgauucuuaaac

SEQ ID NO: 2811880 - RNA, 19 nt, Artificial Sequence
  Description of Artificial Sequence: Synthetic oligonucleotide
uugcagauucaccuaaacu

SEQ ID NO: 2811881 - RNA, 19 nt, Artificial Sequence
  Description of Artificial Sequence: Synthetic oligonucleotide
ugcaugcaggcuuucauca

SEQ ID NO: 2811882 - RNA, 19 nt, Artificial Sequence
  Description of Artificial Sequence: Synthetic oligonucleotide
ucugcagagacacucuguc

SEQ ID NO: 2811883 - RNA, 19 nt, Artificial Sequence
  Description of Artificial Sequence: Synthetic oligonucleotide
ggaaacaagugacagagca

SEQ ID NO: 2811884 - RNA, 19 nt, Artificial Sequence
  Description of Artificial Sequence: Synthetic oligonucleotide
aagucagcuauagaggagu

SEQ ID NO: 2811885 - RNA, 19 nt, Artificial Sequence
  Description of Artificial Sequence: Synthetic oligonucleotide
cuuugcuuuguugucaccc

SEQ ID NO: 2811886 - RNA, 19 nt, Artificial Sequence
  Description of Artificial Sequence: Synthetic oligonucleotide
gagcaaagagcacauccag

SEQ ID NO: 2811887 - RNA, 19 nt, Artificial Sequence
  Description of Artificial Sequence: Synthetic oligonucleotide
cuuaaaguugcagauucac

SEQ ID NO: 2811888 - RNA, 19 nt, Artificial Sequence
  Description of Artificial Sequence: Synthetic oligonucleotide
agcaggacggguuuccggg

SEQ ID NO: 2811889 - RNA, 19 nt, Artificial Sequence
  Description of Artificial Sequence: Synthetic oligonucleotide
uaaacuucuuaaaguugca

SEQ ID NO: 2811890 - RNA, 19 nt, Artificial Sequence
  Description of Artificial Sequence: Synthetic oligonucleotide
ucuucuguucucagcagga

SEQ ID NO: 2811891 - RNA, 19 nt, Artificial Sequence
  Description of Artificial Sequence: Synthetic oligonucleotide
uucuccagacagaucacgc

SEQ ID NO: 2811892 - RNA, 19 nt, Artificial Sequence
  Description of Artificial Sequence: Synthetic oligonucleotide
cugaucaagguuaaccauc

SEQ ID NO: 2811893 - RNA, 19 nt, Artificial Sequence
  Description of Artificial Sequence: Synthetic oligonucleotide
guugucacccugaucaagg

SEQ ID NO: 2811894 - RNA, 19 nt, Artificial Sequence
  Description of Artificial Sequence: Synthetic oligonucleotide
uuccucagacccuauauuc

SEQ ID NO: 2811895 - RNA, 19 nt, Artificial Sequence
  Description of Artificial Sequence: Synthetic oligonucleotide
ucuggaaacaagugacaga

SEQ ID NO: 2811896 - RNA, 19 nt, Artificial Sequence
  Description of Artificial Sequence: Synthetic oligonucleotide
ugcagagacacucugucuu

SEQ ID NO: 2811897 - RNA, 19 nt, Artificial Sequence
  Description of Artificial Sequence: Synthetic oligonucleotide
acaaacaaaggcuccugca

SEQ ID NO: 2811898 - RNA, 19 nt, Artificial Sequence
  Description of Artificial Sequence: Synthetic oligonucleotide
ucuuugugcuucuggaaac

SEQ ID NO: 2811899 - RNA, 19 nt, Artificial Sequence
  Description of Artificial Sequence: Synthetic oligonucleotide
uuugcuuuccucagacccu

SEQ ID NO: 2811900 - RNA, 19 nt, Artificial Sequence
  Description of Artificial Sequence: Synthetic oligonucleotide
cauccaguuucaagaaucc

SEQ ID NO: 2811901 - RNA, 19 nt, Artificial Sequence
  Description of Artificial Sequence: Synthetic oligonucleotide
aaaguugcagauucaccua

SEQ ID NO: 2811902 - RNA, 19 nt, Artificial Sequence
  Description of Artificial Sequence: Synthetic oligonucleotide
aggaagucagcuauagagg

SEQ ID NO: 2811903 - RNA, 19 nt, Artificial Sequence
  Description of Artificial Sequence: Synthetic oligonucleotide
ucagguguggguugagcag

SEQ ID NO: 2811904 - RNA, 19 nt, Artificial Sequence
  Description of Artificial Sequence: Synthetic oligonucleotide
ucagcuauagaggagucau

SEQ ID NO: 2811905 - RNA, 19 nt, Artificial Sequence
  Description of Artificial Sequence: Synthetic oligonucleotide
gaaacaagugacagagcag

SEQ ID NO: 2811906 - RNA, 19 nt, Artificial Sequence
  Description of Artificial Sequence: Synthetic oligonucleotide
ucuuaaaguugcagauuca

SEQ ID NO: 2811907 - RNA, 19 nt, Artificial Sequence
  Description of Artificial Sequence: Synthetic oligonucleotide
uugcaaacaaccuccuccu

SEQ ID NO: 2811908 - RNA, 19 nt, Artificial Sequence
  Description of Artificial Sequence: Synthetic oligonucleotide
agaggagucaucaucuuug

SEQ ID NO: 2811909 - RNA, 19 nt, Artificial Sequence
  Description of Artificial Sequence: Synthetic oligonucleotide
aaguugcagauucaccuaa

SEQ ID NO: 2811910 - RNA, 19 nt, Artificial Sequence
  Description of Artificial Sequence: Synthetic oligonucleotide
uugugcuucuggaaacaag

SEQ ID NO: 2811911 - RNA, 19 nt, Artificial Sequence
  Description of Artificial Sequence: Synthetic oligonucleotide
uccucagacccuauauuca

SEQ ID NO: 2811912 - RNA, 19 nt, Artificial Sequence
  Description of Artificial Sequence: Synthetic oligonucleotide
uugaggaagucagcuauag

SEQ ID NO: 2811913 - RNA, 19 nt, Artificial Sequence
  Description of Artificial Sequence: Synthetic oligonucleotide
ugcucuuugugcuucugga

SEQ ID NO: 2811914 - RNA, 19 nt, Artificial Sequence
  Description of Artificial Sequence: Synthetic oligonucleotide
uagggcacgcggcaggccg

SEQ ID NO: 2811915 - RNA, 19 nt, Artificial Sequence
  Description of Artificial Sequence: Synthetic oligonucleotide
aagaaucccuuuucuggga

SEQ ID NO: 2811916 - RNA, 19 nt, Artificial Sequence
  Description of Artificial Sequence: Synthetic oligonucleotide
acgauucuuaaacaacagu

SEQ ID NO: 2811917 - RNA, 19 nt, Artificial Sequence
  Description of Artificial Sequence: Synthetic oligonucleotide
aggaguagugggcagcuug

SEQ ID NO: 2811918 - RNA, 19 nt, Artificial Sequence
  Description of Artificial Sequence: Synthetic oligonucleotide
uugagcaguaaacuucuua

SEQ ID NO: 2811919 - RNA, 19 nt, Artificial Sequence
  Description of Artificial Sequence: Synthetic oligonucleotide
acuccacaaacaaaggcuc

SEQ ID NO: 2811920 - RNA, 19 nt, Artificial Sequence
  Description of Artificial Sequence: Synthetic oligonucleotide
agcuauagaggagucauca

SEQ ID NO: 2811921 - RNA, 19 nt, Artificial Sequence
  Description of Artificial Sequence: Synthetic oligonucleotide
guugcacugcucuuugugc

SEQ ID NO: 2811922 - RNA, 19 nt, Artificial Sequence
  Description of Artificial Sequence: Synthetic oligonucleotide
aagugacagagcaguaggg

SEQ ID NO: 2811923 - RNA, 19 nt, Artificial Sequence
  Description of Artificial Sequence: Synthetic oligonucleotide
cacgauucuuaaacaacag

SEQ ID NO: 2811924 - RNA, 19 nt, Artificial Sequence
  Description of Artificial Sequence: Synthetic oligonucleotide
uaaccaucagcugucucag

SEQ ID NO: 2811925 - RNA, 19 nt, Artificial Sequence
  Description of Artificial Sequence: Synthetic oligonucleotide
acuguugaggaagucagcu

SEQ ID NO: 2811926 - RNA, 19 nt, Artificial Sequence
  Description of Artificial Sequence: Synthetic oligonucleotide
accaucagcugucucaggu

SEQ ID NO: 2811927 - RNA, 19 nt, Artificial Sequence
  Description of Artificial Sequence: Synthetic oligonucleotide
uuccacgauucuuaaacaa

SEQ ID NO: 2811928 - RNA, 19 nt, Artificial Sequence
  Description of Artificial Sequence: Synthetic oligonucleotide
uauuugggcuucuccagac

SEQ ID NO: 2811929 - RNA, 19 nt, Artificial Sequence
  Description of Artificial Sequence: Synthetic oligonucleotide
agacccuauauucaccgga

SEQ ID NO: 2811930 - RNA, 19 nt, Artificial Sequence
  Description of Artificial Sequence: Synthetic oligonucleotide
acaagugacagagcaguag

SEQ ID NO: 2811931 - RNA, 19 nt, Artificial Sequence
  Description of Artificial Sequence: Synthetic oligonucleotide
ucacuguugagcgacgcca

SEQ ID NO: 2811932 - RNA, 19 nt, Artificial Sequence
  Description of Artificial Sequence: Synthetic oligonucleotide
caggcuuucaucagcuuug

SEQ ID NO: 2811933 - RNA, 19 nt, Artificial Sequence
  Description of Artificial Sequence: Synthetic oligonucleotide
acccuauauucaccggagc

SEQ ID NO: 2811934 - RNA, 19 nt, Artificial Sequence
  Description of Artificial Sequence: Synthetic oligonucleotide
cuccagacagaucacgcag

SEQ ID NO: 2811935 - RNA, 19 nt, Artificial Sequence
  Description of Artificial Sequence: Synthetic oligonucleotide
gagcacauccaguuucaag

SEQ ID NO: 2811936 - RNA, 19 nt, Artificial Sequence
  Description of Artificial Sequence: Synthetic oligonucleotide
ggcuucuccagacagauca

SEQ ID NO: 2811937 - RNA, 19 nt, Artificial Sequence
  Description of Artificial Sequence: Synthetic oligonucleotide
caugcaggcuuucaucagc

SEQ ID NO: 2811938 - RNA, 19 nt, Artificial Sequence
  Description of Artificial Sequence: Synthetic oligonucleotide
ucagcugucucaggugugg

SEQ ID NO: 2811939 - RNA, 19 nt, Artificial Sequence
  Description of Artificial Sequence: Synthetic oligonucleotide
gauucuuaaacaacagucu

SEQ ID NO: 2811940 - RNA, 19 nt, Artificial Sequence
  Description of Artificial Sequence: Synthetic oligonucleotide
gacgccaugacuucccaga

SEQ ID NO: 2811941 - RNA, 19 nt, Artificial Sequence
  Description of Artificial Sequence: Synthetic oligonucleotide
uucacuguugagcgacgcc

SEQ ID NO: 2811942 - RNA, 19 nt, Artificial Sequence
  Description of Artificial Sequence: Synthetic oligonucleotide
ucuccagacagaucacgca

SEQ ID NO: 2811943 - RNA, 19 nt, Artificial Sequence
  Description of Artificial Sequence: Synthetic oligonucleotide
gguauuugggcuucuccag

SEQ ID NO: 2811944 - RNA, 19 nt, Artificial Sequence
  Description of Artificial Sequence: Synthetic oligonucleotide
aaacaaccuccuccuagga

SEQ ID NO: 2811945 - RNA, 19 nt, Artificial Sequence
  Description of Artificial Sequence: Synthetic oligonucleotide
cucgucacuguugaggaag

SEQ ID NO: 2811946 - RNA, 19 nt, Artificial Sequence
  Description of Artificial Sequence: Synthetic oligonucleotide
ucacgcagaccacaguuuc

SEQ ID NO: 2811947 - RNA, 19 nt, Artificial Sequence
  Description of Artificial Sequence: Synthetic oligonucleotide
auccaguuucaagaauccc

SEQ ID NO: 2811948 - RNA, 19 nt, Artificial Sequence
  Description of Artificial Sequence: Synthetic oligonucleotide
ugggaugguuccacgauuc

SEQ ID NO: 2811949 - RNA, 19 nt, Artificial Sequence
  Description of Artificial Sequence: Synthetic oligonucleotide
cacaaacaaaggcuccugc

SEQ ID NO: 2811950 - RNA, 19 nt, Artificial Sequence
  Description of Artificial Sequence: Synthetic oligonucleotide
cuauauucaccggagccac

SEQ ID NO: 2811951 - RNA, 19 nt, Artificial Sequence
  Description of Artificial Sequence: Synthetic oligonucleotide
ucaucaucuuugcuuuccu

SEQ ID NO: 2811952 - RNA, 19 nt, Artificial Sequence
  Description of Artificial Sequence: Synthetic oligonucleotide
aauucugcagagacacucu

SEQ ID NO: 2811953 - RNA, 19 nt, Artificial Sequence
  Description of Artificial Sequence: Synthetic oligonucleotide
gaggagucaucaucuuugc

SEQ ID NO: 2811954 - RNA, 19 nt, Artificial Sequence
  Description of Artificial Sequence: Synthetic oligonucleotide
agcuugagcaaagagcaca

SEQ ID NO: 2811955 - RNA, 19 nt, Artificial Sequence
  Description of Artificial Sequence: Synthetic oligonucleotide
uugcacugcucuuugugcu

SEQ ID NO: 2811956 - RNA, 19 nt, Artificial Sequence
  Description of Artificial Sequence: Synthetic oligonucleotide
gcaaacaaccuccuccuag

SEQ ID NO: 2811957 - RNA, 19 nt, Artificial Sequence
  Description of Artificial Sequence: Synthetic oligonucleotide
uuuccucagacccuauauu

SEQ ID NO: 2811958 - RNA, 19 nt, Artificial Sequence
  Description of Artificial Sequence: Synthetic oligonucleotide
caagguuaaccaucagcug

SEQ ID NO: 2811959 - RNA, 19 nt, Artificial Sequence
  Description of Artificial Sequence: Synthetic oligonucleotide
ggaagucagcuauagagga

SEQ ID NO: 2811960 - RNA, 19 nt, Artificial Sequence
  Description of Artificial Sequence: Synthetic oligonucleotide
uguugagcgacgccaugac

SEQ ID NO: 2811961 - RNA, 19 nt, Artificial Sequence
  Description of Artificial Sequence: Synthetic oligonucleotide
gaagucagcuauagaggag

SEQ ID NO: 2811962 - RNA, 19 nt, Artificial Sequence
  Description of Artificial Sequence: Synthetic oligonucleotide
auucugcagagacacucug

SEQ ID NO: 2811963 - RNA, 19 nt, Artificial Sequence
  Description of Artificial Sequence: Synthetic oligonucleotide
ugaggaagucagcuauaga

SEQ ID NO: 2811964 - RNA, 19 nt, Artificial Sequence
  Description of Artificial Sequence: Synthetic oligonucleotide
gacccuauauucaccggag

SEQ ID NO: 2811965 - RNA, 19 nt, Artificial Sequence
  Description of Artificial Sequence: Synthetic oligonucleotide
auauucaccggagccacug

SEQ ID NO: 2811966 - RNA, 19 nt, Artificial Sequence
  Description of Artificial Sequence: Synthetic oligonucleotide
uguugucacccugaucaag

SEQ ID NO: 2811967 - RNA, 19 nt, Artificial Sequence
  Description of Artificial Sequence: Synthetic oligonucleotide
guugcagauucaccuaaac

SEQ ID NO: 2811968 - RNA, 19 nt, Artificial Sequence
  Description of Artificial Sequence: Synthetic oligonucleotide
acgcagaccacaguuucac

SEQ ID NO: 2811969 - RNA, 19 nt, Artificial Sequence
  Description of Artificial Sequence: Synthetic oligonucleotide
acuguucuucuguucucag

SEQ ID NO: 2811970 - RNA, 19 nt, Artificial Sequence
  Description of Artificial Sequence: Synthetic oligonucleotide
cucagacccuauauucacc

SEQ ID NO: 2811971 - RNA, 19 nt, Artificial Sequence
  Description of Artificial Sequence: Synthetic oligonucleotide
cuccacaaacaaaggcucc

SEQ ID NO: 2811972 - RNA, 19 nt, Artificial Sequence
  Description of Artificial Sequence: Synthetic oligonucleotide
ucaccggagccacuguucu

SEQ ID NO: 2811973 - RNA, 19 nt, Artificial Sequence
  Description of Artificial Sequence: Synthetic oligonucleotide
aacagucugcaaacuccac

SEQ ID NO: 2811974 - RNA, 19 nt, Artificial Sequence
  Description of Artificial Sequence: Synthetic oligonucleotide
agguuaaccaucagcuguc

SEQ ID NO: 2811975 - RNA, 19 nt, Artificial Sequence
  Description of Artificial Sequence: Synthetic oligonucleotide
uucugcagagacacucugu

SEQ ID NO: 2811976 - RNA, 19 nt, Artificial Sequence
  Description of Artificial Sequence: Synthetic oligonucleotide
gugacagagcaguagggca

SEQ ID NO: 2811977 - RNA, 19 nt, Artificial Sequence
  Description of Artificial Sequence: Synthetic oligonucleotide
uggaaacaagugacagagc

SEQ ID NO: 2811978 - RNA, 19 nt, Artificial Sequence
  Description of Artificial Sequence: Synthetic oligonucleotide
auucaccuaaacucuuuaa

SEQ ID NO: 2811979 - RNA, 19 nt, Artificial Sequence
  Description of Artificial Sequence: Synthetic oligonucleotide
gaugguuccacgauucuua

SEQ ID NO: 2811980 - RNA, 19 nt, Artificial Sequence
  Description of Artificial Sequence: Synthetic oligonucleotide
uuucaucagcuuugcuuug

SEQ ID NO: 2811981 - RNA, 19 nt, Artificial Sequence
  Description of Artificial Sequence: Synthetic oligonucleotide
uaaauucugcagagacacu

SEQ ID NO: 2811982 - RNA, 19 nt, Artificial Sequence
  Description of Artificial Sequence: Synthetic oligonucleotide
cagaucacgcagaccacag

SEQ ID NO: 2811983 - RNA, 19 nt, Artificial Sequence
  Description of Artificial Sequence: Synthetic oligonucleotide
cuucuccagacagaucacg

SEQ ID NO: 2811984 - RNA, 19 nt, Artificial Sequence
  Description of Artificial Sequence: Synthetic oligonucleotide
aaacaacagucugcaaacu

SEQ ID NO: 2811985 - RNA, 19 nt, Artificial Sequence
  Description of Artificial Sequence: Synthetic oligonucleotide
uggguugagcaguaaacuu

SEQ ID NO: 2811986 - RNA, 19 nt, Artificial Sequence
  Description of Artificial Sequence: Synthetic oligonucleotide
aggaggaguagugggcagc

SEQ ID NO: 2811987 - RNA, 19 nt, Artificial Sequence
  Description of Artificial Sequence: Synthetic oligonucleotide
uucugggaugguuccacga

SEQ ID NO: 2811988 - RNA, 19 nt, Artificial Sequence
  Description of Artificial Sequence: Synthetic oligonucleotide
gucaucaucuuugcuuucc

SEQ ID NO: 2811989 - RNA, 19 nt, Artificial Sequence
  Description of Artificial Sequence: Synthetic oligonucleotide
aaccaucagcugucucagg

SEQ ID NO: 2811990 - RNA, 19 nt, Artificial Sequence
  Description of Artificial Sequence: Synthetic oligonucleotide
gaaucccuuuucugggaug

SEQ ID NO: 2811991 - RNA, 19 nt, Artificial Sequence
  Description of Artificial Sequence: Synthetic oligonucleotide
uagaggagucaucaucuuu

SEQ ID NO: 2811992 - RNA, 19 nt, Artificial Sequence
  Description of Artificial Sequence: Synthetic oligonucleotide
gcuucuggaaacaagugac

SEQ ID NO: 2811993 - RNA, 19 nt, Artificial Sequence
  Description of Artificial Sequence: Synthetic oligonucleotide
uucaccggagccacuguuc

SEQ ID NO: 2811994 - RNA, 19 nt, Artificial Sequence
  Description of Artificial Sequence: Synthetic oligonucleotide
gauucaccuaaacucuuua

SEQ ID NO: 2811995 - RNA, 19 nt, Artificial Sequence
  Description of Artificial Sequence: Synthetic oligonucleotide
gagacacucugucuucuuc

SEQ ID NO: 2811996 - RNA, 19 nt, Artificial Sequence
  Description of Artificial Sequence: Synthetic oligonucleotide
aguagggcacgcggcaggc

SEQ ID NO: 2811997 - RNA, 19 nt, Artificial Sequence
  Description of Artificial Sequence: Synthetic oligonucleotide
uuucacuguugagcgacgc

SEQ ID NO: 2811998 - RNA, 19 nt, Artificial Sequence
  Description of Artificial Sequence: Synthetic oligonucleotide
gaucaagguuaaccaucag

SEQ ID NO: 2811999 - RNA, 19 nt, Artificial Sequence
  Description of Artificial Sequence: Synthetic oligonucleotide
aagagcacauccaguuuca

SEQ ID NO: 2812000 - RNA, 19 nt, Artificial Sequence
  Description of Artificial Sequence: Synthetic oligonucleotide
cuuucaucagcuuugcuuu

SEQ ID NO: 2812001 - RNA, 19 nt, Artificial Sequence
  Description of Artificial Sequence: Synthetic oligonucleotide
gguugcacugcucuuugug

SEQ ID NO: 2812002 - RNA, 19 nt, Artificial Sequence
  Description of Artificial Sequence: Synthetic oligonucleotide
acacucugucuucuuccuc

SEQ ID NO: 2812003 - RNA, 19 nt, Artificial Sequence
  Description of Artificial Sequence: Synthetic oligonucleotide
cucagguguggguugagca

SEQ ID NO: 2812004 - RNA, 19 nt, Artificial Sequence
  Description of Artificial Sequence: Synthetic oligonucleotide
agaaucccuuuucugggau

SEQ ID NO: 2812005 - RNA, 19 nt, Artificial Sequence
  Description of Artificial Sequence: Synthetic oligonucleotide
uaggaggaguagugggcag

SEQ ID NO: 2812006 - RNA, 19 nt, Artificial Sequence
  Description of Artificial Sequence: Synthetic oligonucleotide
cccuauauucaccggagcc

SEQ ID NO: 2812007 - RNA, 19 nt, Artificial Sequence
  Description of Artificial Sequence: Synthetic oligonucleotide
agcaguagggcacgcggca

SEQ ID NO: 2812008 - RNA, 19 nt, Artificial Sequence
  Description of Artificial Sequence: Synthetic oligonucleotide
caucagcuuugcuuuguug

SEQ ID NO: 2812009 - RNA, 19 nt, Artificial Sequence
  Description of Artificial Sequence: Synthetic oligonucleotide
gagcaguaaacuucuuaaa

SEQ ID NO: 2812010 - RNA, 19 nt, Artificial Sequence
  Description of Artificial Sequence: Synthetic oligonucleotide
guuccacgauucuuaaaca

SEQ ID NO: 2812011 - RNA, 19 nt, Artificial Sequence
  Description of Artificial Sequence: Synthetic oligonucleotide
cucuuugugcuucuggaaa

SEQ ID NO: 2812012 - RNA, 19 nt, Artificial Sequence
  Description of Artificial Sequence: Synthetic oligonucleotide
caaaggcuccugcaugcag

SEQ ID NO: 2812013 - RNA, 19 nt, Artificial Sequence
  Description of Artificial Sequence: Synthetic oligonucleotide
gucacuguugaggaaguca

SEQ ID NO: 2812014 - RNA, 19 nt, Artificial Sequence
  Description of Artificial Sequence: Synthetic oligonucleotide
agccacuguucuucuguuc

SEQ ID NO: 2812015 - RNA, 19 nt, Artificial Sequence
  Description of Artificial Sequence: Synthetic oligonucleotide
aggcuuucaucagcuuugc

SEQ ID NO: 2812016 - RNA, 19 nt, Artificial Sequence
  Description of Artificial Sequence: Synthetic oligonucleotide
guauuugggcuucuccaga

SEQ ID NO: 2812017 - RNA, 19 nt, Artificial Sequence
  Description of Artificial Sequence: Synthetic oligonucleotide
caacagucugcaaacucca

SEQ ID NO: 2812018 - RNA, 19 nt, Artificial Sequence
  Description of Artificial Sequence: Synthetic oligonucleotide
gcaguaaacuucuuaaagu

SEQ ID NO: 2812019 - RNA, 19 nt, Artificial Sequence
  Description of Artificial Sequence: Synthetic oligonucleotide
cugcaugcaggcuuucauc

SEQ ID NO: 2812020 - RNA, 19 nt, Artificial Sequence
  Description of Artificial Sequence: Synthetic oligonucleotide
cuucuggaaacaagugaca

SEQ ID NO: 2812021 - RNA, 19 nt, Artificial Sequence
  Description of Artificial Sequence: Synthetic oligonucleotide
uucucagcaggacggguuu

SEQ ID NO: 2812022 - RNA, 19 nt, Artificial Sequence
  Description of Artificial Sequence: Synthetic oligonucleotide
cagacccuauauucaccgg

SEQ ID NO: 2812023 - RNA, 19 nt, Artificial Sequence
  Description of Artificial Sequence: Synthetic oligonucleotide
ucgucacuguugaggaagu

SEQ ID NO: 2812024 - RNA, 19 nt, Artificial Sequence
  Description of Artificial Sequence: Synthetic oligonucleotide
uucaucagcuuugcuuugu

SEQ ID NO: 2812025 - RNA, 19 nt, Artificial Sequence
  Description of Artificial Sequence: Synthetic oligonucleotide
ugggcuucuccagacagau

SEQ ID NO: 2812026 - RNA, 19 nt, Artificial Sequence
  Description of Artificial Sequence: Synthetic oligonucleotide
uugucacccugaucaaggu

SEQ ID NO: 2812027 - RNA, 19 nt, Artificial Sequence
  Description of Artificial Sequence: Synthetic oligonucleotide
caguaaacuucuuaaaguu

SEQ ID NO: 2812028 - RNA, 19 nt, Artificial Sequence
  Description of Artificial Sequence: Synthetic oligonucleotide
ugagcgacgccaugacuuc

SEQ ID NO: 2812029 - RNA, 19 nt, Artificial Sequence
  Description of Artificial Sequence: Synthetic oligonucleotide
uauucaccggagccacugu

SEQ ID NO: 2812030 - RNA, 19 nt, Artificial Sequence
  Description of Artificial Sequence: Synthetic oligonucleotide
auuugggcuucuccagaca

SEQ ID NO: 2812031 - RNA, 19 nt, Artificial Sequence
  Description of Artificial Sequence: Synthetic oligonucleotide
caucaucuuugcuuuccuc

SEQ ID NO: 2812032 - RNA, 19 nt, Artificial Sequence
  Description of Artificial Sequence: Synthetic oligonucleotide
ucagcaggacggguuuccg

SEQ ID NO: 2812033 - RNA, 19 nt, Artificial Sequence
  Description of Artificial Sequence: Synthetic oligonucleotide
agcgacgccaugacuuccc

SEQ ID NO: 2812034 - RNA, 19 nt, Artificial Sequence
  Description of Artificial Sequence: Synthetic oligonucleotide
uuugugcuucuggaaacaa

SEQ ID NO: 2812035 - RNA, 19 nt, Artificial Sequence
  Description of Artificial Sequence: Synthetic oligonucleotide
gaucacgcagaccacaguu

SEQ ID NO: 2812036 - RNA, 19 nt, Artificial Sequence
  Description of Artificial Sequence: Synthetic oligonucleotide
acagaucacgcagaccaca

SEQ ID NO: 2812037 - RNA, 19 nt, Artificial Sequence
  Description of Artificial Sequence: Synthetic oligonucleotide
cacuguugaggaagucagc

SEQ ID NO: 2812038 - RNA, 19 nt, Artificial Sequence
  Description of Artificial Sequence: Synthetic oligonucleotide
gucacccugaucaagguua

SEQ ID NO: 2812039 - RNA, 19 nt, Artificial Sequence
  Description of Artificial Sequence: Synthetic oligonucleotide
ccuaggaggaguagugggc

SEQ ID NO: 2812040 - RNA, 19 nt, Artificial Sequence
  Description of Artificial Sequence: Synthetic oligonucleotide
ucacccugaucaagguuaa

SEQ ID NO: 2812041 - RNA, 19 nt, Artificial Sequence
  Description of Artificial Sequence: Synthetic oligonucleotide
ugucacccugaucaagguu

SEQ ID NO: 2812042 - RNA, 19 nt, Artificial Sequence
  Description of Artificial Sequence: Synthetic oligonucleotide
acuguugagcgacgccaug

SEQ ID NO: 2812043 - RNA, 19 nt, Artificial Sequence
  Description of Artificial Sequence: Synthetic oligonucleotide
acggguuuccggguugcac

SEQ ID NO: 2812044 - RNA, 19 nt, Artificial Sequence
  Description of Artificial Sequence: Synthetic oligonucleotide
cuuuguugucacccugauc

SEQ ID NO: 2812045 - RNA, 19 nt, Artificial Sequence
  Description of Artificial Sequence: Synthetic oligonucleotide
ucucagguguggguugagc

SEQ ID NO: 2812046 - RNA, 19 nt, Artificial Sequence
  Description of Artificial Sequence: Synthetic oligonucleotide
ucaucagcuuugcuuuguu

SEQ ID NO: 2812047 - RNA, 19 nt, Artificial Sequence
  Description of Artificial Sequence: Synthetic oligonucleotide
agcaaagagcacauccagu

SEQ ID NO: 2812048 - RNA, 19 nt, Artificial Sequence
  Description of Artificial Sequence: Synthetic oligonucleotide
cagcaggacggguuuccgg

SEQ ID NO: 2812049 - RNA, 19 nt, Artificial Sequence
  Description of Artificial Sequence: Synthetic oligonucleotide
agucagcuauagaggaguc

SEQ ID NO: 2812050 - RNA, 19 nt, Artificial Sequence
  Description of Artificial Sequence: Synthetic oligonucleotide
caguagggcacgcggcagg

SEQ ID NO: 2812051 - RNA, 19 nt, Artificial Sequence
  Description of Artificial Sequence: Synthetic oligonucleotide
ccacgauucuuaaacaaca

SEQ ID NO: 2812052 - RNA, 19 nt, Artificial Sequence
  Description of Artificial Sequence: Synthetic oligonucleotide
guuucacuguugagcgacg

SEQ ID NO: 2812053 - RNA, 19 nt, Artificial Sequence
  Description of Artificial Sequence: Synthetic oligonucleotide
auagaggagucaucaucuu

SEQ ID NO: 2812054 - RNA, 19 nt, Artificial Sequence
  Description of Artificial Sequence: Synthetic oligonucleotide
agaucacgcagaccacagu

SEQ ID NO: 2812055 - RNA, 19 nt, Artificial Sequence
  Description of Artificial Sequence: Synthetic oligonucleotide
guuaaccaucagcugucuc

SEQ ID NO: 2812056 - RNA, 19 nt, Artificial Sequence
  Description of Artificial Sequence: Synthetic oligonucleotide
cucagcaggacggguuucc

SEQ ID NO: 2812057 - RNA, 19 nt, Artificial Sequence
  Description of Artificial Sequence: Synthetic oligonucleotide
cuaggaggaguagugggca

SEQ ID NO: 2812058 - RNA, 19 nt, Artificial Sequence
  Description of Artificial Sequence: Synthetic oligonucleotide
uguucucagcaggacgggu

SEQ ID NO: 2812059 - RNA, 19 nt, Artificial Sequence
  Description of Artificial Sequence: Synthetic oligonucleotide
uuguugucacccugaucaa

SEQ ID NO: 2812060 - RNA, 19 nt, Artificial Sequence
  Description of Artificial Sequence: Synthetic oligonucleotide
ggguugagcaguaaacuuc

SEQ ID NO: 2812061 - RNA, 19 nt, Artificial Sequence
  Description of Artificial Sequence: Synthetic oligonucleotide
gaguagugggcagcuugag

SEQ ID NO: 2812062 - RNA, 19 nt, Artificial Sequence
  Description of Artificial Sequence: Synthetic oligonucleotide
auucaccggagccacuguu

SEQ ID NO: 2812063 - RNA, 19 nt, Artificial Sequence
  Description of Artificial Sequence: Synthetic oligonucleotide
agcugucucaggugugggu

SEQ ID NO: 2812064 - RNA, 19 nt, Artificial Sequence
  Description of Artificial Sequence: Synthetic oligonucleotide
uagugggcagcuugagcaa

SEQ ID NO: 2812065 - RNA, 19 nt, Artificial Sequence
  Description of Artificial Sequence: Synthetic oligonucleotide
ugucucagguguggguuga

SEQ ID NO: 2812066 - RNA, 19 nt, Artificial Sequence
  Description of Artificial Sequence: Synthetic oligonucleotide
cuucuguucucagcaggac

SEQ ID NO: 2812067 - RNA, 19 nt, Artificial Sequence
  Description of Artificial Sequence: Synthetic oligonucleotide
ccucagacccuauauucac

SEQ ID NO: 2812068 - RNA, 19 nt, Artificial Sequence
  Description of Artificial Sequence: Synthetic oligonucleotide
gagcaguagggcacgcggc

SEQ ID NO: 2812069 - RNA, 19 nt, Artificial Sequence
  Description of Artificial Sequence: Synthetic oligonucleotide
acagagcaguagggcacgc

SEQ ID NO: 2812070 - RNA, 19 nt, Artificial Sequence
  Description of Artificial Sequence: Synthetic oligonucleotide
aggacggguuuccggguug

SEQ ID NO: 2812071 - RNA, 19 nt, Artificial Sequence
  Description of Artificial Sequence: Synthetic oligonucleotide
caccuaaacucuuuaaauu

SEQ ID NO: 2812072 - RNA, 19 nt, Artificial Sequence
  Description of Artificial Sequence: Synthetic oligonucleotide
aacaagugacagagcagua

SEQ ID NO: 2812073 - RNA, 19 nt, Artificial Sequence
  Description of Artificial Sequence: Synthetic oligonucleotide
ugcaaacaaccuccuccua

SEQ ID NO: 2812074 - RNA, 19 nt, Artificial Sequence
  Description of Artificial Sequence: Synthetic oligonucleotide
gacacucugucuucuuccu

SEQ ID NO: 2812075 - RNA, 19 nt, Artificial Sequence
  Description of Artificial Sequence: Synthetic oligonucleotide
gcgguauuugggcuucucc

SEQ ID NO: 2812076 - RNA, 19 nt, Artificial Sequence
  Description of Artificial Sequence: Synthetic oligonucleotide
cuuuccucagacccuauau

SEQ ID NO: 2812077 - RNA, 19 nt, Artificial Sequence
  Description of Artificial Sequence: Synthetic oligonucleotide
cuuugugcuucuggaaaca

SEQ ID NO: 2812078 - RNA, 19 nt, Artificial Sequence
  Description of Artificial Sequence: Synthetic oligonucleotide
ugcacugcucuuugugcuu

SEQ ID NO: 2812079 - RNA, 19 nt, Artificial Sequence
  Description of Artificial Sequence: Synthetic oligonucleotide
cuuaaacaacagucugcaa

SEQ ID NO: 2812080 - RNA, 19 nt, Artificial Sequence
  Description of Artificial Sequence: Synthetic oligonucleotide
gacagaucacgcagaccac

SEQ ID NO: 2812081 - RNA, 19 nt, Artificial Sequence
  Description of Artificial Sequence: Synthetic oligonucleotide
cagacagaucacgcagacc

SEQ ID NO: 2812082 - RNA, 19 nt, Artificial Sequence
  Description of Artificial Sequence: Synthetic oligonucleotide
guguggguugagcaguaaa

SEQ ID NO: 2812083 - RNA, 19 nt, Artificial Sequence
  Description of Artificial Sequence: Synthetic oligonucleotide
cccugaucaagguuaacca

SEQ ID NO: 2812084 - RNA, 19 nt, Artificial Sequence
  Description of Artificial Sequence: Synthetic oligonucleotide
ugguuccacgauucuuaaa

SEQ ID NO: 2812085 - RNA, 19 nt, Artificial Sequence
  Description of Artificial Sequence: Synthetic oligonucleotide
cagcuauagaggagucauc

SEQ ID NO: 2812086 - RNA, 19 nt, Artificial Sequence
  Description of Artificial Sequence: Synthetic oligonucleotide
agcgguauuugggcuucuc

SEQ ID NO: 2812087 - RNA, 19 nt, Artificial Sequence
  Description of Artificial Sequence: Synthetic oligonucleotide
cagagcaguagggcacgcg

SEQ ID NO: 2812088 - RNA, 19 nt, Artificial Sequence
  Description of Artificial Sequence: Synthetic oligonucleotide
cccuuuucugggaugguuc

SEQ ID NO: 2812089 - RNA, 19 nt, Artificial Sequence
  Description of Artificial Sequence: Synthetic oligonucleotide
agagacacucugucuucuu

SEQ ID NO: 2812090 - RNA, 19 nt, Artificial Sequence
  Description of Artificial Sequence: Synthetic oligonucleotide
cagcuugagcaaagagcac

SEQ ID NO: 2812091 - RNA, 19 nt, Artificial Sequence
  Description of Artificial Sequence: Synthetic oligonucleotide
caucuuugcuuuccucaga

SEQ ID NO: 2812092 - RNA, 19 nt, Artificial Sequence
  Description of Artificial Sequence: Synthetic oligonucleotide
uuuccggguugcacugcuc

SEQ ID NO: 2812093 - RNA, 19 nt, Artificial Sequence
  Description of Artificial Sequence: Synthetic oligonucleotide
cuguugagcgacgccauga

SEQ ID NO: 2812094 - RNA, 19 nt, Artificial Sequence
  Description of Artificial Sequence: Synthetic oligonucleotide
ucccuuuucugggaugguu

SEQ ID NO: 2812095 - RNA, 19 nt, Artificial Sequence
  Description of Artificial Sequence: Synthetic oligonucleotide
caaccuccuccuaggagga

SEQ ID NO: 2812096 - RNA, 19 nt, Artificial Sequence
  Description of Artificial Sequence: Synthetic oligonucleotide
cagaccacaguuucacugu

SEQ ID NO: 2812097 - RNA, 19 nt, Artificial Sequence
  Description of Artificial Sequence: Synthetic oligonucleotide
uccugcaugcaggcuuuca

SEQ ID NO: 2812098 - RNA, 19 nt, Artificial Sequence
  Description of Artificial Sequence: Synthetic oligonucleotide
agauucaccuaaacucuuu

SEQ ID NO: 2812099 - RNA, 19 nt, Artificial Sequence
  Description of Artificial Sequence: Synthetic oligonucleotide
guggguugagcaguaaacu

SEQ ID NO: 2812100 - RNA, 19 nt, Artificial Sequence
  Description of Artificial Sequence: Synthetic oligonucleotide
gucagcuauagaggaguca

SEQ ID NO: 2812101 - RNA, 19 nt, Artificial Sequence
  Description of Artificial Sequence: Synthetic oligonucleotide
acaaaggcuccugcaugca

SEQ ID NO: 2812102 - RNA, 19 nt, Artificial Sequence
  Description of Artificial Sequence: Synthetic oligonucleotide
ccgggcagcgguauuuggg

SEQ ID NO: 2812103 - RNA, 19 nt, Artificial Sequence
  Description of Artificial Sequence: Synthetic oligonucleotide
cuugagcaaagagcacauc

SEQ ID NO: 2812104 - RNA, 19 nt, Artificial Sequence
  Description of Artificial Sequence: Synthetic oligonucleotide
cacuguucuucuguucuca

SEQ ID NO: 2812105 - RNA, 19 nt, Artificial Sequence
  Description of Artificial Sequence: Synthetic oligonucleotide
ccuaaacucuuuaaauucu

SEQ ID NO: 2812106 - RNA, 19 nt, Artificial Sequence
  Description of Artificial Sequence: Synthetic oligonucleotide
ccuauauucaccggagcca

SEQ ID NO: 2812107 - RNA, 19 nt, Artificial Sequence
  Description of Artificial Sequence: Synthetic oligonucleotide
ccagacagaucacgcagac

SEQ ID NO: 2812108 - RNA, 19 nt, Artificial Sequence
  Description of Artificial Sequence: Synthetic oligonucleotide
gcagauucaccuaaacucu

SEQ ID NO: 2812109 - RNA, 19 nt, Artificial Sequence
  Description of Artificial Sequence: Synthetic oligonucleotide
ggguuuccggguugcacug

SEQ ID NO: 2812110 - RNA, 19 nt, Artificial Sequence
  Description of Artificial Sequence: Synthetic oligonucleotide
cacgcggcaggccgggcag

SEQ ID NO: 2812111 - RNA, 19 nt, Artificial Sequence
  Description of Artificial Sequence: Synthetic oligonucleotide
cuguugaggaagucagcua

SEQ ID NO: 2812112 - RNA, 19 nt, Artificial Sequence
  Description of Artificial Sequence: Synthetic oligonucleotide
gguugagcaguaaacuucu

SEQ ID NO: 2812113 - RNA, 19 nt, Artificial Sequence
  Description of Artificial Sequence: Synthetic oligonucleotide
aaccuccuccuaggaggag

SEQ ID NO: 2812114 - RNA, 19 nt, Artificial Sequence
  Description of Artificial Sequence: Synthetic oligonucleotide
cacgcagaccacaguuuca

SEQ ID NO: 2812115 - RNA, 19 nt, Artificial Sequence
  Description of Artificial Sequence: Synthetic oligonucleotide
ggagccacuguucuucugu

SEQ ID NO: 2812116 - RNA, 19 nt, Artificial Sequence
  Description of Artificial Sequence: Synthetic oligonucleotide
ccaucagcugucucaggug

SEQ ID NO: 2812117 - RNA, 19 nt, Artificial Sequence
  Description of Artificial Sequence: Synthetic oligonucleotide
gagcgacgccaugacuucc

SEQ ID NO: 2812118 - RNA, 19 nt, Artificial Sequence
  Description of Artificial Sequence: Synthetic oligonucleotide
gccacuguucuucuguucu

SEQ ID NO: 2812119 - RNA, 19 nt, Artificial Sequence
  Description of Artificial Sequence: Synthetic oligonucleotide
aguugcagauucaccuaaa

SEQ ID NO: 2812120 - RNA, 19 nt, Artificial Sequence
  Description of Artificial Sequence: Synthetic oligonucleotide
cagcugucucagguguggg

SEQ ID NO: 2812121 - RNA, 19 nt, Artificial Sequence
  Description of Artificial Sequence: Synthetic oligonucleotide
aucagcugucucaggugug

SEQ ID NO: 2812122 - RNA, 19 nt, Artificial Sequence
  Description of Artificial Sequence: Synthetic oligonucleotide
agugggcagcuugagcaaa

SEQ ID NO: 2812123 - RNA, 19 nt, Artificial Sequence
  Description of Artificial Sequence: Synthetic oligonucleotide
aucacgcagaccacaguuu

SEQ ID NO: 2812124 - RNA, 19 nt, Artificial Sequence
  Description of Artificial Sequence: Synthetic oligonucleotide
gcacauccaguuucaagaa

SEQ ID NO: 2812125 - RNA, 19 nt, Artificial Sequence
  Description of Artificial Sequence: Synthetic oligonucleotide
ucucagcaggacggguuuc

SEQ ID NO: 2812126 - RNA, 19 nt, Artificial Sequence
  Description of Artificial Sequence: Synthetic oligonucleotide
ugcaggcuuucaucagcuu

SEQ ID NO: 2812127 - RNA, 19 nt, Artificial Sequence
  Description of Artificial Sequence: Synthetic oligonucleotide
guugagcgacgccaugacu

SEQ ID NO: 2812128 - RNA, 19 nt, Artificial Sequence
  Description of Artificial Sequence: Synthetic oligonucleotide
guuuccggguugcacugcu

SEQ ID NO: 2812129 - RNA, 19 nt, Artificial Sequence
  Description of Artificial Sequence: Synthetic oligonucleotide
ggaguagugggcagcuuga

SEQ ID NO: 2812130 - RNA, 19 nt, Artificial Sequence
  Description of Artificial Sequence: Synthetic oligonucleotide
ccacaguuucacuguugag

SEQ ID NO: 2812131 - RNA, 19 nt, Artificial Sequence
  Description of Artificial Sequence: Synthetic oligonucleotide
cgggcagcgguauuugggc

SEQ ID NO: 2812132 - RNA, 19 nt, Artificial Sequence
  Description of Artificial Sequence: Synthetic oligonucleotide
uccggguugcacugcucuu

SEQ ID NO: 2812133 - RNA, 19 nt, Artificial Sequence
  Description of Artificial Sequence: Synthetic oligonucleotide
gcucuuugugcuucuggaa

SEQ ID NO: 2812134 - RNA, 19 nt, Artificial Sequence
  Description of Artificial Sequence: Synthetic oligonucleotide
cgguauuugggcuucucca

SEQ ID NO: 2812135 - RNA, 19 nt, Artificial Sequence
  Description of Artificial Sequence: Synthetic oligonucleotide
agagcacauccaguuucaa

SEQ ID NO: 2812136 - RNA, 19 nt, Artificial Sequence
  Description of Artificial Sequence: Synthetic oligonucleotide
caaagagcacauccaguuu

SEQ ID NO: 2812137 - RNA, 19 nt, Artificial Sequence
  Description of Artificial Sequence: Synthetic oligonucleotide
cugcagagacacucugucu

SEQ ID NO: 2812138 - RNA, 19 nt, Artificial Sequence
  Description of Artificial Sequence: Synthetic oligonucleotide
gccgggcagcgguauuugg

SEQ ID NO: 2812139 - RNA, 19 nt, Artificial Sequence
  Description of Artificial Sequence: Synthetic oligonucleotide
gcaguagggcacgcggcag

SEQ ID NO: 2812140 - RNA, 19 nt, Artificial Sequence
  Description of Artificial Sequence: Synthetic oligonucleotide
gucucagguguggguugag

SEQ ID NO: 2812141 - RNA, 19 nt, Artificial Sequence
  Description of Artificial Sequence: Synthetic oligonucleotide
agggcacgcggcaggccgg

SEQ ID NO: 2812142 - RNA, 19 nt, Artificial Sequence
  Description of Artificial Sequence: Synthetic oligonucleotide
cagauucaccuaaacucuu

SEQ ID NO: 2812143 - RNA, 19 nt, Artificial Sequence
  Description of Artificial Sequence: Synthetic oligonucleotide
guagggcacgcggcaggcc

SEQ ID NO: 2812144 - RNA, 19 nt, Artificial Sequence
  Description of Artificial Sequence: Synthetic oligonucleotide
aucccuuuucugggauggu

SEQ ID NO: 2812145 - RNA, 19 nt, Artificial Sequence
  Description of Artificial Sequence: Synthetic oligonucleotide
gcaggcuuucaucagcuuu

SEQ ID NO: 2812146 - RNA, 19 nt, Artificial Sequence
  Description of Artificial Sequence: Synthetic oligonucleotide
cacauccaguuucaagaau

SEQ ID NO: 2812147 - RNA, 19 nt, Artificial Sequence
  Description of Artificial Sequence: Synthetic oligonucleotide
ccacuguucuucuguucuc

SEQ ID NO: 2812148 - RNA, 19 nt, Artificial Sequence
  Description of Artificial Sequence: Synthetic oligonucleotide
cagguguggguugagcagu

SEQ ID NO: 2812149 - RNA, 19 nt, Artificial Sequence
  Description of Artificial Sequence: Synthetic oligonucleotide
gagccacuguucuucuguu

SEQ ID NO: 2812150 - RNA, 19 nt, Artificial Sequence
  Description of Artificial Sequence: Synthetic oligonucleotide
guucucagcaggacggguu

SEQ ID NO: 2812151 - RNA, 19 nt, Artificial Sequence
  Description of Artificial Sequence: Synthetic oligonucleotide
acgcggcaggccgggcagc

SEQ ID NO: 2812152 - RNA, 19 nt, Artificial Sequence
  Description of Artificial Sequence: Synthetic oligonucleotide
gcuauagaggagucaucau

SEQ ID NO: 2812153 - RNA, 19 nt, Artificial Sequence
  Description of Artificial Sequence: Synthetic oligonucleotide
gguuuccggguugcacugc

SEQ ID NO: 2812154 - RNA, 19 nt, Artificial Sequence
  Description of Artificial Sequence: Synthetic oligonucleotide
ggacggguuuccggguugc

SEQ ID NO: 2812155 - RNA, 19 nt, Artificial Sequence
  Description of Artificial Sequence: Synthetic oligonucleotide
gcuucuccagacagaucac

SEQ ID NO: 2812156 - RNA, 19 nt, Artificial Sequence
  Description of Artificial Sequence: Synthetic oligonucleotide
ggcuccugcaugcaggcuu

SEQ ID NO: 2812157 - RNA, 19 nt, Artificial Sequence
  Description of Artificial Sequence: Synthetic oligonucleotide
cacccugaucaagguuaac

SEQ ID NO: 2812158 - RNA, 19 nt, Artificial Sequence
  Description of Artificial Sequence: Synthetic oligonucleotide
gcagcgguauuugggcuuc

SEQ ID NO: 2812159 - RNA, 19 nt, Artificial Sequence
  Description of Artificial Sequence: Synthetic oligonucleotide
ccugaucaagguuaaccau

SEQ ID NO: 2812160 - RNA, 19 nt, Artificial Sequence
  Description of Artificial Sequence: Synthetic oligonucleotide
cacuguugagcgacgccau

SEQ ID NO: 2812161 - RNA, 19 nt, Artificial Sequence
  Description of Artificial Sequence: Synthetic oligonucleotide
cugggaugguuccacgauu

SEQ ID NO: 2812162 - RNA, 19 nt, Artificial Sequence
  Description of Artificial Sequence: Synthetic oligonucleotide
gacggguuuccggguugca

SEQ ID NO: 2812163 - RNA, 19 nt, Artificial Sequence
  Description of Artificial Sequence: Synthetic oligonucleotide
aggccgggcagcgguauuu

SEQ ID NO: 2812164 - RNA, 19 nt, Artificial Sequence
  Description of Artificial Sequence: Synthetic oligonucleotide
cagagacacucugucuucu

SEQ ID NO: 2812165 - RNA, 19 nt, Artificial Sequence
  Description of Artificial Sequence: Synthetic oligonucleotide
agguguggguugagcagua

SEQ ID NO: 2812166 - RNA, 19 nt, Artificial Sequence
  Description of Artificial Sequence: Synthetic oligonucleotide
ggaggaguagugggcagcu

SEQ ID NO: 2812167 - RNA, 19 nt, Artificial Sequence
  Description of Artificial Sequence: Synthetic oligonucleotide
gcuuuguugucacccugau

SEQ ID NO: 2812168 - RNA, 19 nt, Artificial Sequence
  Description of Artificial Sequence: Synthetic oligonucleotide
gcuugagcaaagagcacau

SEQ ID NO: 2812169 - RNA, 19 nt, Artificial Sequence
  Description of Artificial Sequence: Synthetic oligonucleotide
cggguugcacugcucuuug

SEQ ID NO: 2812170 - RNA, 19 nt, Artificial Sequence
  Description of Artificial Sequence: Synthetic oligonucleotide
gcugucucagguguggguu

SEQ ID NO: 2812171 - RNA, 19 nt, Artificial Sequence
  Description of Artificial Sequence: Synthetic oligonucleotide
gggaugguuccacgauucu

SEQ ID NO: 2812172 - RNA, 19 nt, Artificial Sequence
  Description of Artificial Sequence: Synthetic oligonucleotide
gguuaaccaucagcugucu

SEQ ID NO: 2812173 - RNA, 19 nt, Artificial Sequence
  Description of Artificial Sequence: Synthetic oligonucleotide
ggaugguuccacgauucuu

SEQ ID NO: 2812174 - RNA, 19 nt, Artificial Sequence
  Description of Artificial Sequence: Synthetic oligonucleotide
ggcagcgguauuugggcuu

SEQ ID NO: 2812175 - RNA, 19 nt, Artificial Sequence
  Description of Artificial Sequence: Synthetic oligonucleotide
gcacgcggcaggccgggca

SEQ ID NO: 2812176 - RNA, 19 nt, Artificial Sequence
  Description of Artificial Sequence: Synthetic oligonucleotide
ggccgggcagcgguauuug

SEQ ID NO: 2812177 - RNA, 19 nt, Artificial Sequence
  Description of Artificial Sequence: Synthetic oligonucleotide
cgacgccaugacuucccag

SEQ ID NO: 2812178 - RNA, 19 nt, Artificial Sequence
  Description of Artificial Sequence: Synthetic oligonucleotide
gcgacgccaugacuuccca

SEQ ID NO: 2812179 - RNA, 19 nt, Artificial Sequence
  Description of Artificial Sequence: Synthetic oligonucleotide
ccuccuccuaggaggagua

SEQ ID NO: 2812180 - RNA, 19 nt, Artificial Sequence
  Description of Artificial Sequence: Synthetic oligonucleotide
ccugcaugcaggcuuucau

SEQ ID NO: 2812181 - RNA, 19 nt, Artificial Sequence
  Description of Artificial Sequence: Synthetic oligonucleotide
cuccugcaugcaggcuuuc

SEQ ID NO: 2812182 - RNA, 19 nt, Artificial Sequence
  Description of Artificial Sequence: Synthetic oligonucleotide
gggcacgcggcaggccggg

SEQ ID NO: 2812183 - RNA, 19 nt, Artificial Sequence
  Description of Artificial Sequence: Synthetic oligonucleotide
gguguggguugagcaguaa

SEQ ID NO: 2812184 - RNA, 19 nt, Artificial Sequence
  Description of Artificial Sequence: Synthetic oligonucleotide
cggguuuccggguugcacu

SEQ ID NO: 2812185 - RNA, 19 nt, Artificial Sequence
  Description of Artificial Sequence: Synthetic oligonucleotide
gcaggacggguuuccgggu

SEQ ID NO: 2812186 - RNA, 19 nt, Artificial Sequence
  Description of Artificial Sequence: Synthetic oligonucleotide
caggacggguuuccggguu

SEQ ID NO: 2812187 - RNA, 19 nt, Artificial Sequence
  Description of Artificial Sequence: Synthetic oligonucleotide
ggguugcacugcucuuugu

SEQ ID NO: 2812188 - RNA, 19 nt, Artificial Sequence
  Description of Artificial Sequence: Synthetic oligonucleotide
gaggaguagugggcagcuu

SEQ ID NO: 2812189 - RNA, 19 nt, Artificial Sequence
  Description of Artificial Sequence: Synthetic oligonucleotide
gggcuucuccagacagauc

SEQ ID NO: 2812190 - RNA, 19 nt, Artificial Sequence
  Description of Artificial Sequence: Synthetic oligonucleotide
ccucgucacuguugaggaa

SEQ ID NO: 2812191 - RNA, 19 nt, Artificial Sequence
  Description of Artificial Sequence: Synthetic oligonucleotide
cggagccacuguucuucug

SEQ ID NO: 2812192 - RNA, 19 nt, Artificial Sequence
  Description of Artificial Sequence: Synthetic oligonucleotide
gcggcaggccgggcagcgg

SEQ ID NO: 2812193 - RNA, 19 nt, Artificial Sequence
  Description of Artificial Sequence: Synthetic oligonucleotide
cgucacuguugaggaaguc

SEQ ID NO: 2812194 - RNA, 19 nt, Artificial Sequence
  Description of Artificial Sequence: Synthetic oligonucleotide
cgcggcaggccgggcagcg

SEQ ID NO: 2812195 - RNA, 19 nt, Artificial Sequence
  Description of Artificial Sequence: Synthetic oligonucleotide
caccggagccacuguucuu

SEQ ID NO: 2812196 - RNA, 19 nt, Artificial Sequence
  Description of Artificial Sequence: Synthetic oligonucleotide
gcuccugcaugcaggcuuu

SEQ ID NO: 2812197 - RNA, 19 nt, Artificial Sequence
  Description of Artificial Sequence: Synthetic oligonucleotide
ggcacgcggcaggccgggc

SEQ ID NO: 2812198 - RNA, 19 nt, Artificial Sequence
  Description of Artificial Sequence: Synthetic oligonucleotide
ccggagccacuguucuucu

SEQ ID NO: 2812199 - RNA, 19 nt, Artificial Sequence
  Description of Artificial Sequence: Synthetic oligonucleotide
cgcagaccacaguuucacu

SEQ ID NO: 2812200 - RNA, 19 nt, Artificial Sequence
  Description of Artificial Sequence: Synthetic oligonucleotide
ggcaggccgggcagcggua

SEQ ID NO: 2812201 - RNA, 19 nt, Artificial Sequence
  Description of Artificial Sequence: Synthetic oligonucleotide
ccggguugcacugcucuuu

SEQ ID NO: 2812202 - RNA, 19 nt, Artificial Sequence
  Description of Artificial Sequence: Synthetic oligonucleotide
cagcgguauuugggcuucu

SEQ ID NO: 2812203 - RNA, 19 nt, Artificial Sequence
  Description of Artificial Sequence: Synthetic oligonucleotide
caggccgggcagcgguauu

SEQ ID NO: 2812204 - RNA, 19 nt, Artificial Sequence
  Description of Artificial Sequence: Synthetic oligonucleotide
gcaggccgggcagcgguau

SEQ ID NO: 2812205 - RNA, 19 nt, Artificial Sequence
  Description of Artificial Sequence: Synthetic oligonucleotide
cggcaggccgggcagcggu

SEQ ID NO: 2812206 - RNA, 19 nt, Artificial Sequence
  Description of Artificial Sequence: Synthetic oligonucleotide
aauacuuuuauauauaagc

SEQ ID NO: 2812207 - RNA, 19 nt, Artificial Sequence
  Description of Artificial Sequence: Synthetic oligonucleotide
aauacuauuaccaaacagg

SEQ ID NO: 2812208 - RNA, 19 nt, Artificial Sequence
  Description of Artificial Sequence: Synthetic oligonucleotide
uauauauaagcacaaauac

SEQ ID NO: 2812209 - RNA, 19 nt, Artificial Sequence
  Description of Artificial Sequence: Synthetic oligonucleotide
caagauauaauccuuuugg

SEQ ID NO: 2812210 - RNA, 19 nt, Artificial Sequence
  Description of Artificial Sequence: Synthetic oligonucleotide
agauauaauccuuuugggc

SEQ ID NO: 2812211 - RNA, 19 nt, Artificial Sequence
  Description of Artificial Sequence: Synthetic oligonucleotide
aaauacuauuaccaaacag

SEQ ID NO: 2812212 - RNA, 19 nt, Artificial Sequence
  Description of Artificial Sequence: Synthetic oligonucleotide
gaugcuuucagccucuugg

SEQ ID NO: 2812213 - RNA, 19 nt, Artificial Sequence
  Description of Artificial Sequence: Synthetic oligonucleotide
aagauauaauccuuuuggg

SEQ ID NO: 2812214 - RNA, 19 nt, Artificial Sequence
  Description of Artificial Sequence: Synthetic oligonucleotide
aguguucgcagacagaagc

SEQ ID NO: 2812215 - RNA, 19 nt, Artificial Sequence
  Description of Artificial Sequence: Synthetic oligonucleotide
aagcacaaauacuauuacc

SEQ ID NO: 2812216 - RNA, 19 nt, Artificial Sequence
  Description of Artificial Sequence: Synthetic oligonucleotide
gauauaauccuuuugggca

SEQ ID NO: 2812217 - RNA, 19 nt, Artificial Sequence
  Description of Artificial Sequence: Synthetic oligonucleotide
uuauauauaagcacaaaua

SEQ ID NO: 2812218 - RNA, 19 nt, Artificial Sequence
  Description of Artificial Sequence: Synthetic oligonucleotide
uccauguucacacacagug

SEQ ID NO: 2812219 - RNA, 19 nt, Artificial Sequence
  Description of Artificial Sequence: Synthetic oligonucleotide
uuuucguucaccaggcugg

SEQ ID NO: 2812220 - RNA, 19 nt, Artificial Sequence
  Description of Artificial Sequence: Synthetic oligonucleotide
uuuuccaauacuuuuauau

SEQ ID NO: 2812221 - RNA, 19 nt, Artificial Sequence
  Description of Artificial Sequence: Synthetic oligonucleotide
acuauuaccaaacagggau

SEQ ID NO: 2812222 - RNA, 19 nt, Artificial Sequence
  Description of Artificial Sequence: Synthetic oligonucleotide
uuuguuuccacuucuaaac

SEQ ID NO: 2812223 - RNA, 19 nt, Artificial Sequence
  Description of Artificial Sequence: Synthetic oligonucleotide
acaaauacuauuaccaaac

SEQ ID NO: 2812224 - RNA, 19 nt, Artificial Sequence
  Description of Artificial Sequence: Synthetic oligonucleotide
uuugguauugucuguuugg

SEQ ID NO: 2812225 - RNA, 19 nt, Artificial Sequence
  Description of Artificial Sequence: Synthetic oligonucleotide
acagggaugaugaacaacc

SEQ ID NO: 2812226 - RNA, 19 nt, Artificial Sequence
  Description of Artificial Sequence: Synthetic oligonucleotide
aaccauaggaaaugguguc

SEQ ID NO: 2812227 - RNA, 19 nt, Artificial Sequence
  Description of Artificial Sequence: Synthetic oligonucleotide
uaaaccgugcccuucauca

SEQ ID NO: 2812228 - RNA, 19 nt, Artificial Sequence
  Description of Artificial Sequence: Synthetic oligonucleotide
auagaaguuguguuugcac

SEQ ID NO: 2812229 - RNA, 19 nt, Artificial Sequence
  Description of Artificial Sequence: Synthetic oligonucleotide
ugaugaacaaccauaggaa

SEQ ID NO: 2812230 - RNA, 19 nt, Artificial Sequence
  Description of Artificial Sequence: Synthetic oligonucleotide
uacuuuuauauauaagcac

SEQ ID NO: 2812231 - RNA, 19 nt, Artificial Sequence
  Description of Artificial Sequence: Synthetic oligonucleotide
aguccaaauguuuucguuc

SEQ ID NO: 2812232 - RNA, 19 nt, Artificial Sequence
  Description of Artificial Sequence: Synthetic oligonucleotide
ugcauuuaucagaauagug

SEQ ID NO: 2812233 - RNA, 19 nt, Artificial Sequence
  Description of Artificial Sequence: Synthetic oligonucleotide
auacuauuaccaaacaggg

SEQ ID NO: 2812234 - RNA, 19 nt, Artificial Sequence
  Description of Artificial Sequence: Synthetic oligonucleotide
uagaaguuguguuugcacc

SEQ ID NO: 2812235 - RNA, 19 nt, Artificial Sequence
  Description of Artificial Sequence: Synthetic oligonucleotide
uuuaucagaauaguguccu

SEQ ID NO: 2812236 - RNA, 19 nt, Artificial Sequence
  Description of Artificial Sequence: Synthetic oligonucleotide
cauuuaucagaauaguguc

SEQ ID NO: 2812237 - RNA, 19 nt, Artificial Sequence
  Description of Artificial Sequence: Synthetic oligonucleotide
agaauaguguccuugucca

SEQ ID NO: 2812238 - RNA, 19 nt, Artificial Sequence
  Description of Artificial Sequence: Synthetic oligonucleotide
ugaacaaccauaggaaaug

SEQ ID NO: 2812239 - RNA, 19 nt, Artificial Sequence
  Description of Artificial Sequence: Synthetic oligonucleotide
auuuaucagaauagugucc

SEQ ID NO: 2812240 - RNA, 19 nt, Artificial Sequence
  Description of Artificial Sequence: Synthetic oligonucleotide
uugcauuugguauugucug

SEQ ID NO: 2812241 - RNA, 19 nt, Artificial Sequence
  Description of Artificial Sequence: Synthetic oligonucleotide
auauaauccuuuugggcag

SEQ ID NO: 2812242 - RNA, 19 nt, Artificial Sequence
  Description of Artificial Sequence: Synthetic oligonucleotide
ucuucugcauuuaucagaa

SEQ ID NO: 2812243 - RNA, 19 nt, Artificial Sequence
  Description of Artificial Sequence: Synthetic oligonucleotide
ucaaggugcaguuuguuuc

SEQ ID NO: 2812244 - RNA, 19 nt, Artificial Sequence
  Description of Artificial Sequence: Synthetic oligonucleotide
agcacaaauacuauuacca

SEQ ID NO: 2812245 - RNA, 19 nt, Artificial Sequence
  Description of Artificial Sequence: Synthetic oligonucleotide
uccacuucuaaaccgugcc

SEQ ID NO: 2812246 - RNA, 19 nt, Artificial Sequence
  Description of Artificial Sequence: Synthetic oligonucleotide
cagaauaguguccuugucc

SEQ ID NO: 2812247 - RNA, 19 nt, Artificial Sequence
  Description of Artificial Sequence: Synthetic oligonucleotide
aauaguguccuuguccaug

SEQ ID NO: 2812248 - RNA, 19 nt, Artificial Sequence
  Description of Artificial Sequence: Synthetic oligonucleotide
uguacaguccaaauguuuu

SEQ ID NO: 2812249 - RNA, 19 nt, Artificial Sequence
  Description of Artificial Sequence: Synthetic oligonucleotide
uaagcacaaauacuauuac

SEQ ID NO: 2812250 - RNA, 19 nt, Artificial Sequence
  Description of Artificial Sequence: Synthetic oligonucleotide
ugacuguacaguccaaaug

SEQ ID NO: 2812251 - RNA, 19 nt, Artificial Sequence
  Description of Artificial Sequence: Synthetic oligonucleotide
uggugugcacuccucaagg

SEQ ID NO: 2812252 - RNA, 19 nt, Artificial Sequence
  Description of Artificial Sequence: Synthetic oligonucleotide
cucggugaugcuuucagcc

SEQ ID NO: 2812253 - RNA, 19 nt, Artificial Sequence
  Description of Artificial Sequence: Synthetic oligonucleotide
gaugaugaacaaccauagg

SEQ ID NO: 2812254 - RNA, 19 nt, Artificial Sequence
  Description of Artificial Sequence: Synthetic oligonucleotide
uauuccuucccuuccgugc

SEQ ID NO: 2812255 - RNA, 19 nt, Artificial Sequence
  Description of Artificial Sequence: Synthetic oligonucleotide
uacaguccaaauguuuucg

SEQ ID NO: 2812256 - RNA, 19 nt, Artificial Sequence
  Description of Artificial Sequence: Synthetic oligonucleotide
ugcaccugcacuuugguau

SEQ ID NO: 2812257 - RNA, 19 nt, Artificial Sequence
  Description of Artificial Sequence: Synthetic oligonucleotide
cacagugcaaggaucacag

SEQ ID NO: 2812258 - RNA, 19 nt, Artificial Sequence
  Description of Artificial Sequence: Synthetic oligonucleotide
uuuaccaccacugacugua

SEQ ID NO: 2812259 - RNA, 19 nt, Artificial Sequence
  Description of Artificial Sequence: Synthetic oligonucleotide
auacuuuuauauauaagca

SEQ ID NO: 2812260 - RNA, 19 nt, Artificial Sequence
  Description of Artificial Sequence: Synthetic oligonucleotide
aacauuccuucccaacuug

SEQ ID NO: 2812261 - RNA, 19 nt, Artificial Sequence
  Description of Artificial Sequence: Synthetic oligonucleotide
auuccuucccaacuugguc

SEQ ID NO: 2812262 - RNA, 19 nt, Artificial Sequence
  Description of Artificial Sequence: Synthetic oligonucleotide
ucuugcuugcauuugguau

SEQ ID NO: 2812263 - RNA, 19 nt, Artificial Sequence
  Description of Artificial Sequence: Synthetic oligonucleotide
ugcccuucaucacacagug

SEQ ID NO: 2812264 - RNA, 19 nt, Artificial Sequence
  Description of Artificial Sequence: Synthetic oligonucleotide
gaagcguugcaauagaagu

SEQ ID NO: 2812265 - RNA, 19 nt, Artificial Sequence
  Description of Artificial Sequence: Synthetic oligonucleotide
acaaccauaggaaauggug

SEQ ID NO: 2812266 - RNA, 19 nt, Artificial Sequence
  Description of Artificial Sequence: Synthetic oligonucleotide
ugggucaaggugcaguuug

SEQ ID NO: 2812267 - RNA, 19 nt, Artificial Sequence
  Description of Artificial Sequence: Synthetic oligonucleotide
aacuuggucuucucgguga

SEQ ID NO: 2812268 - RNA, 19 nt, Artificial Sequence
  Description of Artificial Sequence: Synthetic oligonucleotide
gugucuggaacuuucuugc

SEQ ID NO: 2812269 - RNA, 19 nt, Artificial Sequence
  Description of Artificial Sequence: Synthetic oligonucleotide
uucucggugaugcuuucag

SEQ ID NO: 2812270 - RNA, 19 nt, Artificial Sequence
  Description of Artificial Sequence: Synthetic oligonucleotide
uauaagcacaaauacuauu

SEQ ID NO: 2812271 - RNA, 19 nt, Artificial Sequence
  Description of Artificial Sequence: Synthetic oligonucleotide
cuuuugggcagcuagucuc

SEQ ID NO: 2812272 - RNA, 19 nt, Artificial Sequence
  Description of Artificial Sequence: Synthetic oligonucleotide
uuggguaccaacacuuaac

SEQ ID NO: 2812273 - RNA, 19 nt, Artificial Sequence
  Description of Artificial Sequence: Synthetic oligonucleotide
auuugguauugucuguuug

SEQ ID NO: 2812274 - RNA, 19 nt, Artificial Sequence
  Description of Artificial Sequence: Synthetic oligonucleotide
uaucagaauaguguccuug

SEQ ID NO: 2812275 - RNA, 19 nt, Artificial Sequence
  Description of Artificial Sequence: Synthetic oligonucleotide
gacagaagcguugcaauag

SEQ ID NO: 2812276 - RNA, 19 nt, Artificial Sequence
  Description of Artificial Sequence: Synthetic oligonucleotide
uggguaccaacacuuaacu

SEQ ID NO: 2812277 - RNA, 19 nt, Artificial Sequence
  Description of Artificial Sequence: Synthetic oligonucleotide
uugguuuaccaccacugac

SEQ ID NO: 2812278 - RNA, 19 nt, Artificial Sequence
  Description of Artificial Sequence: Synthetic oligonucleotide
guauucugggucaaggugc

SEQ ID NO: 2812279 - RNA, 19 nt, Artificial Sequence
  Description of Artificial Sequence: Synthetic oligonucleotide
uguucacacacagugcaag

SEQ ID NO: 2812280 - RNA, 19 nt, Artificial Sequence
  Description of Artificial Sequence: Synthetic oligonucleotide
uuguccauguauuccuucc

SEQ ID NO: 2812281 - RNA, 19 nt, Artificial Sequence
  Description of Artificial Sequence: Synthetic oligonucleotide
agaaguuguguuugcaccu

SEQ ID NO: 2812282 - RNA, 19 nt, Artificial Sequence
  Description of Artificial Sequence: Synthetic oligonucleotide
aaaccgugcccuucaucac

SEQ ID NO: 2812283 - RNA, 19 nt, Artificial Sequence
  Description of Artificial Sequence: Synthetic oligonucleotide
aggaucacaguguucgcag

SEQ ID NO: 2812284 - RNA, 19 nt, Artificial Sequence
  Description of Artificial Sequence: Synthetic oligonucleotide
ugcaauagaaguuguguuu

SEQ ID NO: 2812285 - RNA, 19 nt, Artificial Sequence
  Description of Artificial Sequence: Synthetic oligonucleotide
guuccauguucacacacag

SEQ ID NO: 2812286 - RNA, 19 nt, Artificial Sequence
  Description of Artificial Sequence: Synthetic oligonucleotide
auguuuucguucaccaggc

SEQ ID NO: 2812287 - RNA, 19 nt, Artificial Sequence
  Description of Artificial Sequence: Synthetic oligonucleotide
guuuucguucaccaggcug

SEQ ID NO: 2812288 - RNA, 19 nt, Artificial Sequence
  Description of Artificial Sequence: Synthetic oligonucleotide
cagugcaaggaucacagug

SEQ ID NO: 2812289 - RNA, 19 nt, Artificial Sequence
  Description of Artificial Sequence: Synthetic oligonucleotide
cauguauuccuucccuucc

SEQ ID NO: 2812290 - RNA, 19 nt, Artificial Sequence
  Description of Artificial Sequence: Synthetic oligonucleotide
uacuauuaccaaacaggga

SEQ ID NO: 2812291 - RNA, 19 nt, Artificial Sequence
  Description of Artificial Sequence: Synthetic oligonucleotide
gaugaacaaccauaggaaa

SEQ ID NO: 2812292 - RNA, 19 nt, Artificial Sequence
  Description of Artificial Sequence: Synthetic oligonucleotide
uucgcagacagaagcguug

SEQ ID NO: 2812293 - RNA, 19 nt, Artificial Sequence
  Description of Artificial Sequence: Synthetic oligonucleotide
uuccgugcagggaaggcag

SEQ ID NO: 2812294 - RNA, 19 nt, Artificial Sequence
  Description of Artificial Sequence: Synthetic oligonucleotide
auaagcacaaauacuauua

SEQ ID NO: 2812295 - RNA, 19 nt, Artificial Sequence
  Description of Artificial Sequence: Synthetic oligonucleotide
gaacaaccauaggaaaugg

SEQ ID NO: 2812296 - RNA, 19 nt, Artificial Sequence
  Description of Artificial Sequence: Synthetic oligonucleotide
auguauuccuucccuuccg

SEQ ID NO: 2812297 - RNA, 19 nt, Artificial Sequence
  Description of Artificial Sequence: Synthetic oligonucleotide
ugguugacagcaaaauuua

SEQ ID NO: 2812298 - RNA, 19 nt, Artificial Sequence
  Description of Artificial Sequence: Synthetic oligonucleotide
uucuaaaccgugcccuuca

SEQ ID NO: 2812299 - RNA, 19 nt, Artificial Sequence
  Description of Artificial Sequence: Synthetic oligonucleotide
aaggcagcuugguuuacca

SEQ ID NO: 2812300 - RNA, 19 nt, Artificial Sequence
  Description of Artificial Sequence: Synthetic oligonucleotide
cuuucagccucuuggguac

SEQ ID NO: 2812301 - RNA, 19 nt, Artificial Sequence
  Description of Artificial Sequence: Synthetic oligonucleotide
accaccacugacuguacag

SEQ ID NO: 2812302 - RNA, 19 nt, Artificial Sequence
  Description of Artificial Sequence: Synthetic oligonucleotide
uguccauguauuccuuccc

SEQ ID NO: 2812303 - RNA, 19 nt, Artificial Sequence
  Description of Artificial Sequence: Synthetic oligonucleotide
aacuuucuugcuugcauuu

SEQ ID NO: 2812304 - RNA, 19 nt, Artificial Sequence
  Description of Artificial Sequence: Synthetic oligonucleotide
uccuuguccauguauuccu

SEQ ID NO: 2812305 - RNA, 19 nt, Artificial Sequence
  Description of Artificial Sequence: Synthetic oligonucleotide
uuggugugcacuccucaag

SEQ ID NO: 2812306 - RNA, 19 nt, Artificial Sequence
  Description of Artificial Sequence: Synthetic oligonucleotide
cuauuaccaaacagggaug

SEQ ID NO: 2812307 - RNA, 19 nt, Artificial Sequence
  Description of Artificial Sequence: Synthetic oligonucleotide
uauucugggucaaggugca

SEQ ID NO: 2812308 - RNA, 19 nt, Artificial Sequence
  Description of Artificial Sequence: Synthetic oligonucleotide
ucccaacuuggucuucucg

SEQ ID NO: 2812309 - RNA, 19 nt, Artificial Sequence
  Description of Artificial Sequence: Synthetic oligonucleotide
caaggugcaguuuguuucc

SEQ ID NO: 2812310 - RNA, 19 nt, Artificial Sequence
  Description of Artificial Sequence: Synthetic oligonucleotide
agcguugcaauagaaguug

SEQ ID NO: 2812311 - RNA, 19 nt, Artificial Sequence
  Description of Artificial Sequence: Synthetic oligonucleotide
cauaggaaauggugucugg

SEQ ID NO: 2812312 - RNA, 19 nt, Artificial Sequence
  Description of Artificial Sequence: Synthetic oligonucleotide
ucacacagugcacaucuuc

SEQ ID NO: 2812313 - RNA, 19 nt, Artificial Sequence
  Description of Artificial Sequence: Synthetic oligonucleotide
gguaccaacacuuaacugu

SEQ ID NO: 2812314 - RNA, 19 nt, Artificial Sequence
  Description of Artificial Sequence: Synthetic oligonucleotide
augguugacagcaaaauuu

SEQ ID NO: 2812315 - RNA, 19 nt, Artificial Sequence
  Description of Artificial Sequence: Synthetic oligonucleotide
uuuccacuucuaaaccgug

SEQ ID NO: 2812316 - RNA, 19 nt, Artificial Sequence
  Description of Artificial Sequence: Synthetic oligonucleotide
uugcaauagaaguuguguu

SEQ ID NO: 2812317 - RNA, 19 nt, Artificial Sequence
  Description of Artificial Sequence: Synthetic oligonucleotide
gguauucugggucaaggug

SEQ ID NO: 2812318 - RNA, 19 nt, Artificial Sequence
  Description of Artificial Sequence: Synthetic oligonucleotide
caauagaaguuguguuugc

SEQ ID NO: 2812319 - RNA, 19 nt, Artificial Sequence
  Description of Artificial Sequence: Synthetic oligonucleotide
auaguguccuuguccaugu

SEQ ID NO: 2812320 - RNA, 19 nt, Artificial Sequence
  Description of Artificial Sequence: Synthetic oligonucleotide
agaagcguugcaauagaag

SEQ ID NO: 2812321 - RNA, 19 nt, Artificial Sequence
  Description of Artificial Sequence: Synthetic oligonucleotide
ugugcacuccucaaggguu

SEQ ID NO: 2812322 - RNA, 19 nt, Artificial Sequence
  Description of Artificial Sequence: Synthetic oligonucleotide
accacugacuguacagucc

SEQ ID NO: 2812323 - RNA, 19 nt, Artificial Sequence
  Description of Artificial Sequence: Synthetic oligonucleotide
ggugucuggaacuuucuug

SEQ ID NO: 2812324 - RNA, 19 nt, Artificial Sequence
  Description of Artificial Sequence: Synthetic oligonucleotide
aaccgugcccuucaucaca

SEQ ID NO: 2812325 - RNA, 19 nt, Artificial Sequence
  Description of Artificial Sequence: Synthetic oligonucleotide
ucguucaccaggcuggcau

SEQ ID NO: 2812326 - RNA, 19 nt, Artificial Sequence
  Description of Artificial Sequence: Synthetic oligonucleotide
ggaugaugaacaaccauag

SEQ ID NO: 2812327 - RNA, 19 nt, Artificial Sequence
  Description of Artificial Sequence: Synthetic oligonucleotide
acaguguucgcagacagaa

SEQ ID NO: 2812328 - RNA, 19 nt, Artificial Sequence
  Description of Artificial Sequence: Synthetic oligonucleotide
uguauuccuucccuuccgu

SEQ ID NO: 2812329 - RNA, 19 nt, Artificial Sequence
  Description of Artificial Sequence: Synthetic oligonucleotide
guuuguuuccacuucuaaa

SEQ ID NO: 2812330 - RNA, 19 nt, Artificial Sequence
  Description of Artificial Sequence: Synthetic oligonucleotide
ucagucucccgaacauucc

SEQ ID NO: 2812331 - RNA, 19 nt, Artificial Sequence
  Description of Artificial Sequence: Synthetic oligonucleotide
guccaaauguuuucguuca

SEQ ID NO: 2812332 - RNA, 19 nt, Artificial Sequence
  Description of Artificial Sequence: Synthetic oligonucleotide
acagugcacaucuucugca

SEQ ID NO: 2812333 - RNA, 19 nt, Artificial Sequence
  Description of Artificial Sequence: Synthetic oligonucleotide
aguuuguuuccacuucuaa

SEQ ID NO: 2812334 - RNA, 19 nt, Artificial Sequence
  Description of Artificial Sequence: Synthetic oligonucleotide
guaccaacacuuaacugug

SEQ ID NO: 2812335 - RNA, 19 nt, Artificial Sequence
  Description of Artificial Sequence: Synthetic oligonucleotide
cacaaauacuauuaccaaa

SEQ ID NO: 2812336 - RNA, 19 nt, Artificial Sequence
  Description of Artificial Sequence: Synthetic oligonucleotide
ggcagcuugguuuaccacc

SEQ ID NO: 2812337 - RNA, 19 nt, Artificial Sequence
  Description of Artificial Sequence: Synthetic oligonucleotide
ugguauugucuguuuggug

SEQ ID NO: 2812338 - RNA, 19 nt, Artificial Sequence
  Description of Artificial Sequence: Synthetic oligonucleotide
ucagaauaguguccuuguc

SEQ ID NO: 2812339 - RNA, 19 nt, Artificial Sequence
  Description of Artificial Sequence: Synthetic oligonucleotide
agugcaaggaucacagugu

SEQ ID NO: 2812340 - RNA, 19 nt, Artificial Sequence
  Description of Artificial Sequence: Synthetic oligonucleotide
gguauugucuguuuggugu

SEQ ID NO: 2812341 - RNA, 19 nt, Artificial Sequence
  Description of Artificial Sequence: Synthetic oligonucleotide
cuugcauuugguauugucu

SEQ ID NO: 2812342 - RNA, 19 nt, Artificial Sequence
  Description of Artificial Sequence: Synthetic oligonucleotide
uugguauugucuguuuggu

SEQ ID NO: 2812343 - RNA, 19 nt, Artificial Sequence
  Description of Artificial Sequence: Synthetic oligonucleotide
auuccuucccuuccgugca

SEQ ID NO: 2812344 - RNA, 19 nt, Artificial Sequence
  Description of Artificial Sequence: Synthetic oligonucleotide
uuuggugugcacuccucaa

SEQ ID NO: 2812345 - RNA, 19 nt, Artificial Sequence
  Description of Artificial Sequence: Synthetic oligonucleotide
aaacagggaugaugaacaa

SEQ ID NO: 2812346 - RNA, 19 nt, Artificial Sequence
  Description of Artificial Sequence: Synthetic oligonucleotide
acagaagcguugcaauaga

SEQ ID NO: 2812347 - RNA, 19 nt, Artificial Sequence
  Description of Artificial Sequence: Synthetic oligonucleotide
agucucagucucccgaaca

SEQ ID NO: 2812348 - RNA, 19 nt, Artificial Sequence
  Description of Artificial Sequence: Synthetic oligonucleotide
ugucuguuuggugugcacu

SEQ ID NO: 2812349 - RNA, 19 nt, Artificial Sequence
  Description of Artificial Sequence: Synthetic oligonucleotide
ucccgaacauuccuuccca

SEQ ID NO: 2812350 - RNA, 19 nt, Artificial Sequence
  Description of Artificial Sequence: Synthetic oligonucleotide
aacaaccauaggaaauggu

SEQ ID NO: 2812351 - RNA, 19 nt, Artificial Sequence
  Description of Artificial Sequence: Synthetic oligonucleotide
ucggugaugcuuucagccu

SEQ ID NO: 2812352 - RNA, 19 nt, Artificial Sequence
  Description of Artificial Sequence: Synthetic oligonucleotide
cucccgaacauuccuuccc

SEQ ID NO: 2812353 - RNA, 19 nt, Artificial Sequence
  Description of Artificial Sequence: Synthetic oligonucleotide
uuugguauucugggucaag

SEQ ID NO: 2812354 - RNA, 19 nt, Artificial Sequence
  Description of Artificial Sequence: Synthetic oligonucleotide
guugcaauagaaguugugu

SEQ ID NO: 2812355 - RNA, 19 nt, Artificial Sequence
  Description of Artificial Sequence: Synthetic oligonucleotide
augaacaaccauaggaaau

SEQ ID NO: 2812356 - RNA, 19 nt, Artificial Sequence
  Description of Artificial Sequence: Synthetic oligonucleotide
uguucgcagacagaagcgu

SEQ ID NO: 2812357 - RNA, 19 nt, Artificial Sequence
  Description of Artificial Sequence: Synthetic oligonucleotide
caaauacuauuaccaaaca

SEQ ID NO: 2812358 - RNA, 19 nt, Artificial Sequence
  Description of Artificial Sequence: Synthetic oligonucleotide
cacacacagugcaaggauc

SEQ ID NO: 2812359 - RNA, 19 nt, Artificial Sequence
  Description of Artificial Sequence: Synthetic oligonucleotide
guacaguccaaauguuuuc

SEQ ID NO: 2812360 - RNA, 19 nt, Artificial Sequence
  Description of Artificial Sequence: Synthetic oligonucleotide
gaaguuguguuugcaccug

SEQ ID NO: 2812361 - RNA, 19 nt, Artificial Sequence
  Description of Artificial Sequence: Synthetic oligonucleotide
ugcuuucagccucuugggu

SEQ ID NO: 2812362 - RNA, 19 nt, Artificial Sequence
  Description of Artificial Sequence: Synthetic oligonucleotide
acaguccaaauguuuucgu

SEQ ID NO: 2812363 - RNA, 19 nt, Artificial Sequence
  Description of Artificial Sequence: Synthetic oligonucleotide
ucucggugaugcuuucagc

SEQ ID NO: 2812364 - RNA, 19 nt, Artificial Sequence
  Description of Artificial Sequence: Synthetic oligonucleotide
acauuccuucccaacuugg

SEQ ID NO: 2812365 - RNA, 19 nt, Artificial Sequence
  Description of Artificial Sequence: Synthetic oligonucleotide
guguucgcagacagaagcg

SEQ ID NO: 2812366 - RNA, 19 nt, Artificial Sequence
  Description of Artificial Sequence: Synthetic oligonucleotide
agggaugaugaacaaccau

SEQ ID NO: 2812367 - RNA, 19 nt, Artificial Sequence
  Description of Artificial Sequence: Synthetic oligonucleotide
uauugucuguuuggugugc

SEQ ID NO: 2812368 - RNA, 19 nt, Artificial Sequence
  Description of Artificial Sequence: Synthetic oligonucleotide
uucugggucaaggugcagu

SEQ ID NO: 2812369 - RNA, 19 nt, Artificial Sequence
  Description of Artificial Sequence: Synthetic oligonucleotide
auauaagcacaaauacuau

SEQ ID NO: 2812370 - RNA, 19 nt, Artificial Sequence
  Description of Artificial Sequence: Synthetic oligonucleotide
cucaaggguuccauguuca

SEQ ID NO: 2812371 - RNA, 19 nt, Artificial Sequence
  Description of Artificial Sequence: Synthetic oligonucleotide
guauuccuucccuuccgug

SEQ ID NO: 2812372 - RNA, 19 nt, Artificial Sequence
  Description of Artificial Sequence: Synthetic oligonucleotide
uucuugcuugcauuuggua

SEQ ID NO: 2812373 - RNA, 19 nt, Artificial Sequence
  Description of Artificial Sequence: Synthetic oligonucleotide
ucaaggguuccauguucac

SEQ ID NO: 2812374 - RNA, 19 nt, Artificial Sequence
  Description of Artificial Sequence: Synthetic oligonucleotide
aagcguugcaauagaaguu

SEQ ID NO: 2812375 - RNA, 19 nt, Artificial Sequence
  Description of Artificial Sequence: Synthetic oligonucleotide
cuugguuuaccaccacuga

SEQ ID NO: 2812376 - RNA, 19 nt, Artificial Sequence
  Description of Artificial Sequence: Synthetic oligonucleotide
ggugugcacuccucaaggg

SEQ ID NO: 2812377 - RNA, 19 nt, Artificial Sequence
  Description of Artificial Sequence: Synthetic oligonucleotide
ucuuggguaccaacacuua

SEQ ID NO: 2812378 - RNA, 19 nt, Artificial Sequence
  Description of Artificial Sequence: Synthetic oligonucleotide
caccaggcuggcaugguug

SEQ ID NO: 2812379 - RNA, 19 nt, Artificial Sequence
  Description of Artificial Sequence: Synthetic oligonucleotide
ugucuggaacuuucuugcu

SEQ ID NO: 2812380 - RNA, 19 nt, Artificial Sequence
  Description of Artificial Sequence: Synthetic oligonucleotide
uguuuucguucaccaggcu

SEQ ID NO: 2812381 - RNA, 19 nt, Artificial Sequence
  Description of Artificial Sequence: Synthetic oligonucleotide
agacagaagcguugcaaua

SEQ ID NO: 2812382 - RNA, 19 nt, Artificial Sequence
  Description of Artificial Sequence: Synthetic oligonucleotide
caaggaucacaguguucgc

SEQ ID NO: 2812383 - RNA, 19 nt, Artificial Sequence
  Description of Artificial Sequence: Synthetic oligonucleotide
ccaagauauaauccuuuug

SEQ ID NO: 2812384 - RNA, 19 nt, Artificial Sequence
  Description of Artificial Sequence: Synthetic oligonucleotide
uggcaugguugacagcaaa

SEQ ID NO: 2812385 - RNA, 19 nt, Artificial Sequence
  Description of Artificial Sequence: Synthetic oligonucleotide
uccuuuugggcagcuaguc

SEQ ID NO: 2812386 - RNA, 19 nt, Artificial Sequence
  Description of Artificial Sequence: Synthetic oligonucleotide
agcuagucucagucucccg

SEQ ID NO: 2812387 - RNA, 19 nt, Artificial Sequence
  Description of Artificial Sequence: Synthetic oligonucleotide
ucgcagacagaagcguugc

SEQ ID NO: 2812388 - RNA, 19 nt, Artificial Sequence
  Description of Artificial Sequence: Synthetic oligonucleotide
uaccaccacugacuguaca

SEQ ID NO: 2812389 - RNA, 19 nt, Artificial Sequence
  Description of Artificial Sequence: Synthetic oligonucleotide
uagucucagucucccgaac

SEQ ID NO: 2812390 - RNA, 19 nt, Artificial Sequence
  Description of Artificial Sequence: Synthetic oligonucleotide
uccucaaggguuccauguu

SEQ ID NO: 2812391 - RNA, 19 nt, Artificial Sequence
  Description of Artificial Sequence: Synthetic oligonucleotide
uugucuguuuggugugcac

SEQ ID NO: 2812392 - RNA, 19 nt, Artificial Sequence
  Description of Artificial Sequence: Synthetic oligonucleotide
ggaaauggugucuggaacu

SEQ ID NO: 2812393 - RNA, 19 nt, Artificial Sequence
  Description of Artificial Sequence: Synthetic oligonucleotide
cuaaaccgugcccuucauc

SEQ ID NO: 2812394 - RNA, 19 nt, Artificial Sequence
  Description of Artificial Sequence: Synthetic oligonucleotide
ucuaaaccgugcccuucau

SEQ ID NO: 2812395 - RNA, 19 nt, Artificial Sequence
  Description of Artificial Sequence: Synthetic oligonucleotide
cuuggguaccaacacuuaa

SEQ ID NO: 2812396 - RNA, 19 nt, Artificial Sequence
  Description of Artificial Sequence: Synthetic oligonucleotide
acacagugcaaggaucaca

SEQ ID NO: 2812397 - RNA, 19 nt, Artificial Sequence
  Description of Artificial Sequence: Synthetic oligonucleotide
ccaaacagggaugaugaac

SEQ ID NO: 2812398 - RNA, 19 nt, Artificial Sequence
  Description of Artificial Sequence: Synthetic oligonucleotide
ccaaauguuuucguucacc

SEQ ID NO: 2812399 - RNA, 19 nt, Artificial Sequence
  Description of Artificial Sequence: Synthetic oligonucleotide
uuucguucaccaggcuggc

SEQ ID NO: 2812400 - RNA, 19 nt, Artificial Sequence
  Description of Artificial Sequence: Synthetic oligonucleotide
caguguucgcagacagaag

SEQ ID NO: 2812401 - RNA, 19 nt, Artificial Sequence
  Description of Artificial Sequence: Synthetic oligonucleotide
uuaucagaauaguguccuu

SEQ ID NO: 2812402 - RNA, 19 nt, Artificial Sequence
  Description of Artificial Sequence: Synthetic oligonucleotide
accgugcccuucaucacac

SEQ ID NO: 2812403 - RNA, 19 nt, Artificial Sequence
  Description of Artificial Sequence: Synthetic oligonucleotide
uggugucuggaacuuucuu

SEQ ID NO: 2812404 - RNA, 19 nt, Artificial Sequence
  Description of Artificial Sequence: Synthetic oligonucleotide
uuaccaccacugacuguac

SEQ ID NO: 2812405 - RNA, 19 nt, Artificial Sequence
  Description of Artificial Sequence: Synthetic oligonucleotide
agugcacaucuucugcauu

SEQ ID NO: 2812406 - RNA, 19 nt, Artificial Sequence
  Description of Artificial Sequence: Synthetic oligonucleotide
gucucccgaacauuccuuc

SEQ ID NO: 2812407 - RNA, 19 nt, Artificial Sequence
  Description of Artificial Sequence: Synthetic oligonucleotide
uuugggcagcuagucucag

SEQ ID NO: 2812408 - RNA, 19 nt, Artificial Sequence
  Description of Artificial Sequence: Synthetic oligonucleotide
gaacuuucuugcuugcauu

SEQ ID NO: 2812409 - RNA, 19 nt, Artificial Sequence
  Description of Artificial Sequence: Synthetic oligonucleotide
ggcagcuagucucagucuc

SEQ ID NO: 2812410 - RNA, 19 nt, Artificial Sequence
  Description of Artificial Sequence: Synthetic oligonucleotide
ggguaccaacacuuaacug

SEQ ID NO: 2812411 - RNA, 19 nt, Artificial Sequence
  Description of Artificial Sequence: Synthetic oligonucleotide
uccuucccuuccgugcagg

SEQ ID NO: 2812412 - RNA, 19 nt, Artificial Sequence
  Description of Artificial Sequence: Synthetic oligonucleotide
gaacauuccuucccaacuu

SEQ ID NO: 2812413 - RNA, 19 nt, Artificial Sequence
  Description of Artificial Sequence: Synthetic oligonucleotide
cacacagugcacaucuucu

SEQ ID NO: 2812414 - RNA, 19 nt, Artificial Sequence
  Description of Artificial Sequence: Synthetic oligonucleotide
cuugcuugcauuugguauu

SEQ ID NO: 2812415 - RNA, 19 nt, Artificial Sequence
  Description of Artificial Sequence: Synthetic oligonucleotide
cagcuagucucagucuccc

SEQ ID NO: 2812416 - RNA, 19 nt, Artificial Sequence
  Description of Artificial Sequence: Synthetic oligonucleotide
aaauggugucuggaacuuu

SEQ ID NO: 2812417 - RNA, 19 nt, Artificial Sequence
  Description of Artificial Sequence: Synthetic oligonucleotide
ucaucacacagugcacauc

SEQ ID NO: 2812418 - RNA, 19 nt, Artificial Sequence
  Description of Artificial Sequence: Synthetic oligonucleotide
cuucuaaaccgugcccuuc

SEQ ID NO: 2812419 - RNA, 19 nt, Artificial Sequence
  Description of Artificial Sequence: Synthetic oligonucleotide
ccauguauuccuucccuuc

SEQ ID NO: 2812420 - RNA, 19 nt, Artificial Sequence
  Description of Artificial Sequence: Synthetic oligonucleotide
guuuccacuucuaaaccgu

SEQ ID NO: 2812421 - RNA, 19 nt, Artificial Sequence
  Description of Artificial Sequence: Synthetic oligonucleotide
cuagucucagucucccgaa

SEQ ID NO: 2812422 - RNA, 19 nt, Artificial Sequence
  Description of Artificial Sequence: Synthetic oligonucleotide
agccucuuggguaccaaca

SEQ ID NO: 2812423 - RNA, 19 nt, Artificial Sequence
  Description of Artificial Sequence: Synthetic oligonucleotide
gcuugcauuugguauuguc

SEQ ID NO: 2812424 - RNA, 19 nt, Artificial Sequence
  Description of Artificial Sequence: Synthetic oligonucleotide
uccgugcagggaaggcagc

SEQ ID NO: 2812425 - RNA, 19 nt, Artificial Sequence
  Description of Artificial Sequence: Synthetic oligonucleotide
cagggaugaugaacaacca

SEQ ID NO: 2812426 - RNA, 19 nt, Artificial Sequence
  Description of Artificial Sequence: Synthetic oligonucleotide
ucuucucggugaugcuuuc

SEQ ID NO: 2812427 - RNA, 19 nt, Artificial Sequence
  Description of Artificial Sequence: Synthetic oligonucleotide
cagccucuuggguaccaac

SEQ ID NO: 2812428 - RNA, 19 nt, Artificial Sequence
  Description of Artificial Sequence: Synthetic oligonucleotide
ugcacuccucaaggguucc

SEQ ID NO: 2812429 - RNA, 19 nt, Artificial Sequence
  Description of Artificial Sequence: Synthetic oligonucleotide
cuccucaaggguuccaugu

SEQ ID NO: 2812430 - RNA, 19 nt, Artificial Sequence
  Description of Artificial Sequence: Synthetic oligonucleotide
auuaccaaacagggaugau

SEQ ID NO: 2812431 - RNA, 19 nt, Artificial Sequence
  Description of Artificial Sequence: Synthetic oligonucleotide
cucuuggguaccaacacuu

SEQ ID NO: 2812432 - RNA, 19 nt, Artificial Sequence
  Description of Artificial Sequence: Synthetic oligonucleotide
gcuuucagccucuugggua

SEQ ID NO: 2812433 - RNA, 19 nt, Artificial Sequence
  Description of Artificial Sequence: Synthetic oligonucleotide
cagaagcguugcaauagaa

SEQ ID NO: 2812434 - RNA, 19 nt, Artificial Sequence
  Description of Artificial Sequence: Synthetic oligonucleotide
uggucuucucggugaugcu

SEQ ID NO: 2812435 - RNA, 19 nt, Artificial Sequence
  Description of Artificial Sequence: Synthetic oligonucleotide
uucccaacuuggucuucuc

SEQ ID NO: 2812436 - RNA, 19 nt, Artificial Sequence
  Description of Artificial Sequence: Synthetic oligonucleotide
gguugacagcaaaauuuac

SEQ ID NO: 2812437 - RNA, 19 nt, Artificial Sequence
  Description of Artificial Sequence: Synthetic oligonucleotide
auccuuuugggcagcuagu

SEQ ID NO: 2812438 - RNA, 19 nt, Artificial Sequence
  Description of Artificial Sequence: Synthetic oligonucleotide
cuuccgugcagggaaggca

SEQ ID NO: 2812439 - RNA, 19 nt, Artificial Sequence
  Description of Artificial Sequence: Synthetic oligonucleotide
gccucuuggguaccaacac

SEQ ID NO: 2812440 - RNA, 19 nt, Artificial Sequence
  Description of Artificial Sequence: Synthetic oligonucleotide
ccacuucuaaaccgugccc

SEQ ID NO: 2812441 - RNA, 19 nt, Artificial Sequence
  Description of Artificial Sequence: Synthetic oligonucleotide
uuucagccucuuggguacc

SEQ ID NO: 2812442 - RNA, 19 nt, Artificial Sequence
  Description of Artificial Sequence: Synthetic oligonucleotide
ccgaacauuccuucccaac

SEQ ID NO: 2812443 - RNA, 19 nt, Artificial Sequence
  Description of Artificial Sequence: Synthetic oligonucleotide
gaaauggugucuggaacuu

SEQ ID NO: 2812444 - RNA, 19 nt, Artificial Sequence
  Description of Artificial Sequence: Synthetic oligonucleotide
caugguugacagcaaaauu

SEQ ID NO: 2812445 - RNA, 19 nt, Artificial Sequence
  Description of Artificial Sequence: Synthetic oligonucleotide
cugacuguacaguccaaau

SEQ ID NO: 2812446 - RNA, 19 nt, Artificial Sequence
  Description of Artificial Sequence: Synthetic oligonucleotide
ggugcaguuuguuuccacu

SEQ ID NO: 2812447 - RNA, 19 nt, Artificial Sequence
  Description of Artificial Sequence: Synthetic oligonucleotide
cauuccuucccaacuuggu

SEQ ID NO: 2812448 - RNA, 19 nt, Artificial Sequence
  Description of Artificial Sequence: Synthetic oligonucleotide
gguuccauguucacacaca

SEQ ID NO: 2812449 - RNA, 19 nt, Artificial Sequence
  Description of Artificial Sequence: Synthetic oligonucleotide
gucaaggugcaguuuguuu

SEQ ID NO: 2812450 - RNA, 19 nt, Artificial Sequence
  Description of Artificial Sequence: Synthetic oligonucleotide
ccucaaggguuccauguuc

SEQ ID NO: 2812451 - RNA, 19 nt, Artificial Sequence
  Description of Artificial Sequence: Synthetic oligonucleotide
cacaguguucgcagacaga

SEQ ID NO: 2812452 - RNA, 19 nt, Artificial Sequence
  Description of Artificial Sequence: Synthetic oligonucleotide
uaauccuuuugggcagcua

SEQ ID NO: 2812453 - RNA, 19 nt, Artificial Sequence
  Description of Artificial Sequence: Synthetic oligonucleotide
uucaccaggcuggcauggu

SEQ ID NO: 2812454 - RNA, 19 nt, Artificial Sequence
  Description of Artificial Sequence: Synthetic oligonucleotide
cuguacaguccaaauguuu

SEQ ID NO: 2812455 - RNA, 19 nt, Artificial Sequence
  Description of Artificial Sequence: Synthetic oligonucleotide
gaauaguguccuuguccau

SEQ ID NO: 2812456 - RNA, 19 nt, Artificial Sequence
  Description of Artificial Sequence: Synthetic oligonucleotide
cugcauuuaucagaauagu

SEQ ID NO: 2812457 - RNA, 19 nt, Artificial Sequence
  Description of Artificial Sequence: Synthetic oligonucleotide
cgugcccuucaucacacag

SEQ ID NO: 2812458 - RNA, 19 nt, Artificial Sequence
  Description of Artificial Sequence: Synthetic oligonucleotide
cguugcaauagaaguugug

SEQ ID NO: 2812459 - RNA, 19 nt, Artificial Sequence
  Description of Artificial Sequence: Synthetic oligonucleotide
uucguucaccaggcuggca

SEQ ID NO: 2812460 - RNA, 19 nt, Artificial Sequence
  Description of Artificial Sequence: Synthetic oligonucleotide
auguucacacacagugcaa

SEQ ID NO: 2812461 - RNA, 19 nt, Artificial Sequence
  Description of Artificial Sequence: Synthetic oligonucleotide
ccacugacuguacagucca

SEQ ID NO: 2812462 - RNA, 19 nt, Artificial Sequence
  Description of Artificial Sequence: Synthetic oligonucleotide
caguuuguuuccacuucua

SEQ ID NO: 2812463 - RNA, 19 nt, Artificial Sequence
  Description of Artificial Sequence: Synthetic oligonucleotide
gcagcuagucucagucucc

SEQ ID NO: 2812464 - RNA, 19 nt, Artificial Sequence
  Description of Artificial Sequence: Synthetic oligonucleotide
uaguguccuuguccaugua

SEQ ID NO: 2812465 - RNA, 19 nt, Artificial Sequence
  Description of Artificial Sequence: Synthetic oligonucleotide
gugcaguuuguuuccacuu

SEQ ID NO: 2812466 - RNA, 19 nt, Artificial Sequence
  Description of Artificial Sequence: Synthetic oligonucleotide
auucugggucaaggugcag

SEQ ID NO: 2812467 - RNA, 19 nt, Artificial Sequence
  Description of Artificial Sequence: Synthetic oligonucleotide
agucucccgaacauuccuu

SEQ ID NO: 2812468 - RNA, 19 nt, Artificial Sequence
  Description of Artificial Sequence: Synthetic oligonucleotide
guuuaccaccacugacugu

SEQ ID NO: 2812469 - RNA, 19 nt, Artificial Sequence
  Description of Artificial Sequence: Synthetic oligonucleotide
ugcuugcauuugguauugu

SEQ ID NO: 2812470 - RNA, 19 nt, Artificial Sequence
  Description of Artificial Sequence: Synthetic oligonucleotide
caguccaaauguuuucguu

SEQ ID NO: 2812471 - RNA, 19 nt, Artificial Sequence
  Description of Artificial Sequence: Synthetic oligonucleotide
cauuugguauugucuguuu

SEQ ID NO: 2812472 - RNA, 19 nt, Artificial Sequence
  Description of Artificial Sequence: Synthetic oligonucleotide
cagcuugguuuaccaccac

SEQ ID NO: 2812473 - RNA, 19 nt, Artificial Sequence
  Description of Artificial Sequence: Synthetic oligonucleotide
ggcaugguugacagcaaaa

SEQ ID NO: 2812474 - RNA, 19 nt, Artificial Sequence
  Description of Artificial Sequence: Synthetic oligonucleotide
cuuugguauucugggucaa

SEQ ID NO: 2812475 - RNA, 19 nt, Artificial Sequence
  Description of Artificial Sequence: Synthetic oligonucleotide
cuguuuggugugcacuccu

SEQ ID NO: 2812476 - RNA, 19 nt, Artificial Sequence
  Description of Artificial Sequence: Synthetic oligonucleotide
gugcaaggaucacaguguu

SEQ ID NO: 2812477 - RNA, 19 nt, Artificial Sequence
  Description of Artificial Sequence: Synthetic oligonucleotide
cagucucccgaacauuccu

SEQ ID NO: 2812478 - RNA, 19 nt, Artificial Sequence
  Description of Artificial Sequence: Synthetic oligonucleotide
cuucccaacuuggucuucu

SEQ ID NO: 2812479 - RNA, 19 nt, Artificial Sequence
  Description of Artificial Sequence: Synthetic oligonucleotide
gugcccuucaucacacagu

SEQ ID NO: 2812480 - RNA, 19 nt, Artificial Sequence
  Description of Artificial Sequence: Synthetic oligonucleotide
gcaugguugacagcaaaau

SEQ ID NO: 2812481 - RNA, 19 nt, Artificial Sequence
  Description of Artificial Sequence: Synthetic oligonucleotide
cagugcacaucuucugcau

SEQ ID NO: 2812482 - RNA, 19 nt, Artificial Sequence
  Description of Artificial Sequence: Synthetic oligonucleotide
cgaacauuccuucccaacu

SEQ ID NO: 2812483 - RNA, 19 nt, Artificial Sequence
  Description of Artificial Sequence: Synthetic oligonucleotide
caccugcacuuugguauuc

SEQ ID NO: 2812484 - RNA, 19 nt, Artificial Sequence
  Description of Artificial Sequence: Synthetic oligonucleotide
ccuuccgugcagggaaggc

SEQ ID NO: 2812485 - RNA, 19 nt, Artificial Sequence
  Description of Artificial Sequence: Synthetic oligonucleotide
guucgcagacagaagcguu

SEQ ID NO: 2812486 - RNA, 19 nt, Artificial Sequence
  Description of Artificial Sequence: Synthetic oligonucleotide
ccaacuuggucuucucggu

SEQ ID NO: 2812487 - RNA, 19 nt, Artificial Sequence
  Description of Artificial Sequence: Synthetic oligonucleotide
ggcuggcaugguugacagc

SEQ ID NO: 2812488 - RNA, 19 nt, Artificial Sequence
  Description of Artificial Sequence: Synthetic oligonucleotide
ggugaugcuuucagccucu

SEQ ID NO: 2812489 - RNA, 19 nt, Artificial Sequence
  Description of Artificial Sequence: Synthetic oligonucleotide
ggaaggcagcuugguuuac

SEQ ID NO: 2812490 - RNA, 19 nt, Artificial Sequence
  Description of Artificial Sequence: Synthetic oligonucleotide
ccuuuugggcagcuagucu

SEQ ID NO: 2812491 - RNA, 19 nt, Artificial Sequence
  Description of Artificial Sequence: Synthetic oligonucleotide
cccaagauauaauccuuuu

SEQ ID NO: 2812492 - RNA, 19 nt, Artificial Sequence
  Description of Artificial Sequence: Synthetic oligonucleotide
cccuuccgugcagggaagg

SEQ ID NO: 2812493 - RNA, 19 nt, Artificial Sequence
  Description of Artificial Sequence: Synthetic oligonucleotide
ggucuucucggugaugcuu

SEQ ID NO: 2812494 - RNA, 19 nt, Artificial Sequence
  Description of Artificial Sequence: Synthetic oligonucleotide
gggcagcuagucucagucu

SEQ ID NO: 2812495 - RNA, 19 nt, Artificial Sequence
  Description of Artificial Sequence: Synthetic oligonucleotide
cuucugcauuuaucagaau

SEQ ID NO: 2812496 - RNA, 19 nt, Artificial Sequence
  Description of Artificial Sequence: Synthetic oligonucleotide
cacuccucaaggguuccau

SEQ ID NO: 2812497 - RNA, 19 nt, Artificial Sequence
  Description of Artificial Sequence: Synthetic oligonucleotide
ccucuuggguaccaacacu

SEQ ID NO: 2812498 - RNA, 19 nt, Artificial Sequence
  Description of Artificial Sequence: Synthetic oligonucleotide
ccccaagauauaauccuuu

SEQ ID NO: 2812499 - RNA, 19 nt, Artificial Sequence
  Description of Artificial Sequence: Synthetic oligonucleotide
cccgaacauuccuucccaa

SEQ ID NO: 2812500 - RNA, 19 nt, Artificial Sequence
  Description of Artificial Sequence: Synthetic oligonucleotide
gggucaaggugcaguuugu

SEQ ID NO: 2812501 - RNA, 19 nt, Artificial Sequence
  Description of Artificial Sequence: Synthetic oligonucleotide
gcguugcaauagaaguugu

SEQ ID NO: 2812502 - RNA, 19 nt, Artificial Sequence
  Description of Artificial Sequence: Synthetic oligonucleotide
ggucaaggugcaguuuguu

SEQ ID NO: 2812503 - RNA, 19 nt, Artificial Sequence
  Description of Artificial Sequence: Synthetic oligonucleotide
ccuucccaacuuggucuuc

SEQ ID NO: 2812504 - RNA, 19 nt, Artificial Sequence
  Description of Artificial Sequence: Synthetic oligonucleotide
cugggucaaggugcaguuu

SEQ ID NO: 2812505 - RNA, 19 nt, Artificial Sequence
  Description of Artificial Sequence: Synthetic oligonucleotide
ccgugcccuucaucacaca

SEQ ID NO: 2812506 - RNA, 19 nt, Artificial Sequence
  Description of Artificial Sequence: Synthetic oligonucleotide
ccgugcagggaaggcagcu

SEQ ID NO: 2812507 - RNA, 19 nt, Artificial Sequence
  Description of Artificial Sequence: Synthetic oligonucleotide
acuuuuaucccacaaaugg

SEQ ID NO: 2812508 - RNA, 19 nt, Artificial Sequence
  Description of Artificial Sequence: Synthetic oligonucleotide
aguguuacagacaugagcc

SEQ ID NO: 2812509 - RNA, 19 nt, Artificial Sequence
  Description of Artificial Sequence: Synthetic oligonucleotide
uuugacauacauuauuugc

SEQ ID NO: 2812510 - RNA, 19 nt, Artificial Sequence
  Description of Artificial Sequence: Synthetic oligonucleotide
aaaguuguggcaauccucc

SEQ ID NO: 2812511 - RNA, 19 nt, Artificial Sequence
  Description of Artificial Sequence: Synthetic oligonucleotide
ucuucaucagcucagguug

SEQ ID NO: 2812512 - RNA, 19 nt, Artificial Sequence
  Description of Artificial Sequence: Synthetic oligonucleotide
uaggcugucacauucacag

SEQ ID NO: 2812513 - RNA, 19 nt, Artificial Sequence
  Description of Artificial Sequence: Synthetic oligonucleotide
ucuaagagcaauucccagg

SEQ ID NO: 2812514 - RNA, 19 nt, Artificial Sequence
  Description of Artificial Sequence: Synthetic oligonucleotide
caugguaucucuaagagca

SEQ ID NO: 2812515 - RNA, 19 nt, Artificial Sequence
  Description of Artificial Sequence: Synthetic oligonucleotide
aagagcaauucccaggcag

SEQ ID NO: 2812516 - RNA, 19 nt, Artificial Sequence
  Description of Artificial Sequence: Synthetic oligonucleotide
uccaguaggagcauguuug

SEQ ID NO: 2812517 - RNA, 19 nt, Artificial Sequence
  Description of Artificial Sequence: Synthetic oligonucleotide
uuugccuucugaaugcuag

SEQ ID NO: 2812518 - RNA, 19 nt, Artificial Sequence
  Description of Artificial Sequence: Synthetic oligonucleotide
aucucuaagagcaauuccc

SEQ ID NO: 2812519 - RNA, 19 nt, Artificial Sequence
  Description of Artificial Sequence: Synthetic oligonucleotide
uugacauacauuauuugcu

SEQ ID NO: 2812520 - RNA, 19 nt, Artificial Sequence
  Description of Artificial Sequence: Synthetic oligonucleotide
uacauuauuugcuaugcca

SEQ ID NO: 2812521 - RNA, 19 nt, Artificial Sequence
  Description of Artificial Sequence: Synthetic oligonucleotide
agucaacgcugcuagaugc

SEQ ID NO: 2812522 - RNA, 19 nt, Artificial Sequence
  Description of Artificial Sequence: Synthetic oligonucleotide
aauaggcugucacauucac

SEQ ID NO: 2812523 - RNA, 19 nt, Artificial Sequence
  Description of Artificial Sequence: Synthetic oligonucleotide
uaguguuacagacaugagc

SEQ ID NO: 2812524 - RNA, 19 nt, Artificial Sequence
  Description of Artificial Sequence: Synthetic oligonucleotide
gaugccaccacgcuggaag

SEQ ID NO: 2812525 - RNA, 19 nt, Artificial Sequence
  Description of Artificial Sequence: Synthetic oligonucleotide
cuagaugccaccacgcugg

SEQ ID NO: 2812526 - RNA, 19 nt, Artificial Sequence
  Description of Artificial Sequence: Synthetic oligonucleotide
uuuuaucccacaaaugguc

SEQ ID NO: 2812527 - RNA, 19 nt, Artificial Sequence
  Description of Artificial Sequence: Synthetic oligonucleotide
uuuugaaauaggcugucac

SEQ ID NO: 2812528 - RNA, 19 nt, Artificial Sequence
  Description of Artificial Sequence: Synthetic oligonucleotide
acauucacaggcuuggcuc

SEQ ID NO: 2812529 - RNA, 19 nt, Artificial Sequence
  Description of Artificial Sequence: Synthetic oligonucleotide
ucaauuguccuuccaguag

SEQ ID NO: 2812530 - RNA, 19 nt, Artificial Sequence
  Description of Artificial Sequence: Synthetic oligonucleotide
uguccuuccaguaggagca

SEQ ID NO: 2812531 - RNA, 19 nt, Artificial Sequence
  Description of Artificial Sequence: Synthetic oligonucleotide
cuuugguuuugaaauaggc

SEQ ID NO: 2812532 - RNA, 19 nt, Artificial Sequence
  Description of Artificial Sequence: Synthetic oligonucleotide
ugaacuaugguguuucuuc

SEQ ID NO: 2812533 - RNA, 19 nt, Artificial Sequence
  Description of Artificial Sequence: Synthetic oligonucleotide
acagacaugagccaccaug

SEQ ID NO: 2812534 - RNA, 19 nt, Artificial Sequence
  Description of Artificial Sequence: Synthetic oligonucleotide
aacgcugcuagaugccacc

SEQ ID NO: 2812535 - RNA, 19 nt, Artificial Sequence
  Description of Artificial Sequence: Synthetic oligonucleotide
uccucagucauucaauugu

SEQ ID NO: 2812536 - RNA, 19 nt, Artificial Sequence
  Description of Artificial Sequence: Synthetic oligonucleotide
uuugaaauaggcugucaca

SEQ ID NO: 2812537 - RNA, 19 nt, Artificial Sequence
  Description of Artificial Sequence: Synthetic oligonucleotide
cuaagagcaauucccaggc

SEQ ID NO: 2812538 - RNA, 19 nt, Artificial Sequence
  Description of Artificial Sequence: Synthetic oligonucleotide
gaaauaggcugucacauuc

SEQ ID NO: 2812539 - RNA, 19 nt, Artificial Sequence
  Description of Artificial Sequence: Synthetic oligonucleotide
ucacuuuuaucccacaaau

SEQ ID NO: 2812540 - RNA, 19 nt, Artificial Sequence
  Description of Artificial Sequence: Synthetic oligonucleotide
gaaugcuaguguuacagac

SEQ ID NO: 2812541 - RNA, 19 nt, Artificial Sequence
  Description of Artificial Sequence: Synthetic oligonucleotide
aggggaauuguccucaguc

SEQ ID NO: 2812542 - RNA, 19 nt, Artificial Sequence
  Description of Artificial Sequence: Synthetic oligonucleotide
auacauuauuugcuaugcc

SEQ ID NO: 2812543 - RNA, 19 nt, Artificial Sequence
  Description of Artificial Sequence: Synthetic oligonucleotide
ugguguuucuucuuguugc

SEQ ID NO: 2812544 - RNA, 19 nt, Artificial Sequence
  Description of Artificial Sequence: Synthetic oligonucleotide
uuuugacauacauuauuug

SEQ ID NO: 2812545 - RNA, 19 nt, Artificial Sequence
  Description of Artificial Sequence: Synthetic oligonucleotide
uaucucuaagagcaauucc

SEQ ID NO: 2812546 - RNA, 19 nt, Artificial Sequence
  Description of Artificial Sequence: Synthetic oligonucleotide
auuauuugcuaugccaggg

SEQ ID NO: 2812547 - RNA, 19 nt, Artificial Sequence
  Description of Artificial Sequence: Synthetic oligonucleotide
cauacauuauuugcuaugc

SEQ ID NO: 2812548 - RNA, 19 nt, Artificial Sequence
  Description of Artificial Sequence: Synthetic oligonucleotide
uuugcuaugccagggaucu

SEQ ID NO: 2812549 - RNA, 19 nt, Artificial Sequence
  Description of Artificial Sequence: Synthetic oligonucleotide
aaagccaugguaucucuaa

SEQ ID NO: 2812550 - RNA, 19 nt, Artificial Sequence
  Description of Artificial Sequence: Synthetic oligonucleotide
aucagcucagguuggaguc

SEQ ID NO: 2812551 - RNA, 19 nt, Artificial Sequence
  Description of Artificial Sequence: Synthetic oligonucleotide
acauacauuauuugcuaug

SEQ ID NO: 2812552 - RNA, 19 nt, Artificial Sequence
  Description of Artificial Sequence: Synthetic oligonucleotide
agucauucaauuguccuuc

SEQ ID NO: 2812553 - RNA, 19 nt, Artificial Sequence
  Description of Artificial Sequence: Synthetic oligonucleotide
uaacacaggcucuucauac

SEQ ID NO: 2812554 - RNA, 19 nt, Artificial Sequence
  Description of Artificial Sequence: Synthetic oligonucleotide
uuuaucccacaaauggucu

SEQ ID NO: 2812555 - RNA, 19 nt, Artificial Sequence
  Description of Artificial Sequence: Synthetic oligonucleotide
uaugccagggaucuugaac

SEQ ID NO: 2812556 - RNA, 19 nt, Artificial Sequence
  Description of Artificial Sequence: Synthetic oligonucleotide
caauuguccuuccaguagg

SEQ ID NO: 2812557 - RNA, 19 nt, Artificial Sequence
  Description of Artificial Sequence: Synthetic oligonucleotide
accaugcccaguaaaagcc

SEQ ID NO: 2812558 - RNA, 19 nt, Artificial Sequence
  Description of Artificial Sequence: Synthetic oligonucleotide
ucagucauucaauuguccu

SEQ ID NO: 2812559 - RNA, 19 nt, Artificial Sequence
  Description of Artificial Sequence: Synthetic oligonucleotide
uggaagagcacuucuuuca

SEQ ID NO: 2812560 - RNA, 19 nt, Artificial Sequence
  Description of Artificial Sequence: Synthetic oligonucleotide
ucucuaagagcaauuccca

SEQ ID NO: 2812561 - RNA, 19 nt, Artificial Sequence
  Description of Artificial Sequence: Synthetic oligonucleotide
uguagcccaagccaacugc

SEQ ID NO: 2812562 - RNA, 19 nt, Artificial Sequence
  Description of Artificial Sequence: Synthetic oligonucleotide
agcauguuugccuagcccu

SEQ ID NO: 2812563 - RNA, 19 nt, Artificial Sequence
  Description of Artificial Sequence: Synthetic oligonucleotide
cauuauuugcuaugccagg

SEQ ID NO: 2812564 - RNA, 19 nt, Artificial Sequence
  Description of Artificial Sequence: Synthetic oligonucleotide
aagagcacuucuuucacuu

SEQ ID NO: 2812565 - RNA, 19 nt, Artificial Sequence
  Description of Artificial Sequence: Synthetic oligonucleotide
acauuauuugcuaugccag

SEQ ID NO: 2812566 - RNA, 19 nt, Artificial Sequence
  Description of Artificial Sequence: Synthetic oligonucleotide
uuguccuuccaguaggagc

SEQ ID NO: 2812567 - RNA, 19 nt, Artificial Sequence
  Description of Artificial Sequence: Synthetic oligonucleotide
acuaugguguuucuucuug

SEQ ID NO: 2812568 - RNA, 19 nt, Artificial Sequence
  Description of Artificial Sequence: Synthetic oligonucleotide
uucuugcucacacagggaa

SEQ ID NO: 2812569 - RNA, 19 nt, Artificial Sequence
  Description of Artificial Sequence: Synthetic oligonucleotide
uucacuuuuaucccacaaa

SEQ ID NO: 2812570 - RNA, 19 nt, Artificial Sequence
  Description of Artificial Sequence: Synthetic oligonucleotide
cugaaugcuaguguuacag

SEQ ID NO: 2812571 - RNA, 19 nt, Artificial Sequence
  Description of Artificial Sequence: Synthetic oligonucleotide
auucaauuguccuuccagu

SEQ ID NO: 2812572 - RNA, 19 nt, Artificial Sequence
  Description of Artificial Sequence: Synthetic oligonucleotide
augccagggaucuugaacu

SEQ ID NO: 2812573 - RNA, 19 nt, Artificial Sequence
  Description of Artificial Sequence: Synthetic oligonucleotide
caagccaacugcaaaguug

SEQ ID NO: 2812574 - RNA, 19 nt, Artificial Sequence
  Description of Artificial Sequence: Synthetic oligonucleotide
ugguuuugaaauaggcugu

SEQ ID NO: 2812575 - RNA, 19 nt, Artificial Sequence
  Description of Artificial Sequence: Synthetic oligonucleotide
ucauacugggcugaugucc

SEQ ID NO: 2812576 - RNA, 19 nt, Artificial Sequence
  Description of Artificial Sequence: Synthetic oligonucleotide
gacaugagccaccaugccc

SEQ ID NO: 2812577 - RNA, 19 nt, Artificial Sequence
  Description of Artificial Sequence: Synthetic oligonucleotide
cagacaugagccaccaugc

SEQ ID NO: 2812578 - RNA, 19 nt, Artificial Sequence
  Description of Artificial Sequence: Synthetic oligonucleotide
uuauuugcuaugccaggga

SEQ ID NO: 2812579 - RNA, 19 nt, Artificial Sequence
  Description of Artificial Sequence: Synthetic oligonucleotide
ucccagucaacgcugcuag

SEQ ID NO: 2812580 - RNA, 19 nt, Artificial Sequence
  Description of Artificial Sequence: Synthetic oligonucleotide
gggaucuugaacuauggug

SEQ ID NO: 2812581 - RNA, 19 nt, Artificial Sequence
  Description of Artificial Sequence: Synthetic oligonucleotide
uagaccuuggucuccacac

SEQ ID NO: 2812582 - RNA, 19 nt, Artificial Sequence
  Description of Artificial Sequence: Synthetic oligonucleotide
ugcuuugguuuugaaauag

SEQ ID NO: 2812583 - RNA, 19 nt, Artificial Sequence
  Description of Artificial Sequence: Synthetic oligonucleotide
ugcccaguaaaagccaugg

SEQ ID NO: 2812584 - RNA, 19 nt, Artificial Sequence
  Description of Artificial Sequence: Synthetic oligonucleotide
gcuucuugcucacacaggg

SEQ ID NO: 2812585 - RNA, 19 nt, Artificial Sequence
  Description of Artificial Sequence: Synthetic oligonucleotide
acaggcuuggcucacuaug

SEQ ID NO: 2812586 - RNA, 19 nt, Artificial Sequence
  Description of Artificial Sequence: Synthetic oligonucleotide
acaggcucuucauacuggg

SEQ ID NO: 2812587 - RNA, 19 nt, Artificial Sequence
  Description of Artificial Sequence: Synthetic oligonucleotide
aaaaucccagucaacgcug

SEQ ID NO: 2812588 - RNA, 19 nt, Artificial Sequence
  Description of Artificial Sequence: Synthetic oligonucleotide
aaugcuaguguuacagaca

SEQ ID NO: 2812589 - RNA, 19 nt, Artificial Sequence
  Description of Artificial Sequence: Synthetic oligonucleotide
agccauggcuccuagaccu

SEQ ID NO: 2812590 - RNA, 19 nt, Artificial Sequence
  Description of Artificial Sequence: Synthetic oligonucleotide
ugacauacauuauuugcua

SEQ ID NO: 2812591 - RNA, 19 nt, Artificial Sequence
  Description of Artificial Sequence: Synthetic oligonucleotide
aagccaacugcaaaguugu

SEQ ID NO: 2812592 - RNA, 19 nt, Artificial Sequence
  Description of Artificial Sequence: Synthetic oligonucleotide
agacaugagccaccaugcc

SEQ ID NO: 2812593 - RNA, 19 nt, Artificial Sequence
  Description of Artificial Sequence: Synthetic oligonucleotide
aagccaugguaucucuaag

SEQ ID NO: 2812594 - RNA, 19 nt, Artificial Sequence
  Description of Artificial Sequence: Synthetic oligonucleotide
uuucacuuuuaucccacaa

SEQ ID NO: 2812595 - RNA, 19 nt, Artificial Sequence
  Description of Artificial Sequence: Synthetic oligonucleotide
aaaucccagucaacgcugc

SEQ ID NO: 2812596 - RNA, 19 nt, Artificial Sequence
  Description of Artificial Sequence: Synthetic oligonucleotide
acaaauggucuccaccuca

SEQ ID NO: 2812597 - RNA, 19 nt, Artificial Sequence
  Description of Artificial Sequence: Synthetic oligonucleotide
uauuugcuaugccagggau

SEQ ID NO: 2812598 - RNA, 19 nt, Artificial Sequence
  Description of Artificial Sequence: Synthetic oligonucleotide
aggcucuucauacugggcu

SEQ ID NO: 2812599 - RNA, 19 nt, Artificial Sequence
  Description of Artificial Sequence: Synthetic oligonucleotide
ucuugaacuaugguguuuc

SEQ ID NO: 2812600 - RNA, 19 nt, Artificial Sequence
  Description of Artificial Sequence: Synthetic oligonucleotide
uccaccucagccauggcuc

SEQ ID NO: 2812601 - RNA, 19 nt, Artificial Sequence
  Description of Artificial Sequence: Synthetic oligonucleotide
aguaaaagccaugguaucu

SEQ ID NO: 2812602 - RNA, 19 nt, Artificial Sequence
  Description of Artificial Sequence: Synthetic oligonucleotide
uucugaaugcuaguguuac

SEQ ID NO: 2812603 - RNA, 19 nt, Artificial Sequence
  Description of Artificial Sequence: Synthetic oligonucleotide
gucacauucacaggcuugg

SEQ ID NO: 2812604 - RNA, 19 nt, Artificial Sequence
  Description of Artificial Sequence: Synthetic oligonucleotide
uguuacagacaugagccac

SEQ ID NO: 2812605 - RNA, 19 nt, Artificial Sequence
  Description of Artificial Sequence: Synthetic oligonucleotide
augcuaguguuacagacau

SEQ ID NO: 2812606 - RNA, 19 nt, Artificial Sequence
  Description of Artificial Sequence: Synthetic oligonucleotide
caaaguuguggcaauccuc

SEQ ID NO: 2812607 - RNA, 19 nt, Artificial Sequence
  Description of Artificial Sequence: Synthetic oligonucleotide
uucaauuguccuuccagua

SEQ ID NO: 2812608 - RNA, 19 nt, Artificial Sequence
  Description of Artificial Sequence: Synthetic oligonucleotide
uggcucacuauguagccca

SEQ ID NO: 2812609 - RNA, 19 nt, Artificial Sequence
  Description of Artificial Sequence: Synthetic oligonucleotide
cugauguccuucuucauca

SEQ ID NO: 2812610 - RNA, 19 nt, Artificial Sequence
  Description of Artificial Sequence: Synthetic oligonucleotide
auuguccucagucauucaa

SEQ ID NO: 2812611 - RNA, 19 nt, Artificial Sequence
  Description of Artificial Sequence: Synthetic oligonucleotide
augguguuucuucuuguug

SEQ ID NO: 2812612 - RNA, 19 nt, Artificial Sequence
  Description of Artificial Sequence: Synthetic oligonucleotide
gcaauucccaggcaggagg

SEQ ID NO: 2812613 - RNA, 19 nt, Artificial Sequence
  Description of Artificial Sequence: Synthetic oligonucleotide
aacugcaaaguuguggcaa

SEQ ID NO: 2812614 - RNA, 19 nt, Artificial Sequence
  Description of Artificial Sequence: Synthetic oligonucleotide
uguggcaauccuccuuugc

SEQ ID NO: 2812615 - RNA, 19 nt, Artificial Sequence
  Description of Artificial Sequence: Synthetic oligonucleotide
cucagucauucaauugucc

SEQ ID NO: 2812616 - RNA, 19 nt, Artificial Sequence
  Description of Artificial Sequence: Synthetic oligonucleotide
gaauuguccucagucauuc

SEQ ID NO: 2812617 - RNA, 19 nt, Artificial Sequence
  Description of Artificial Sequence: Synthetic oligonucleotide
ugggugcagggauaugacg

SEQ ID NO: 2812618 - RNA, 19 nt, Artificial Sequence
  Description of Artificial Sequence: Synthetic oligonucleotide
gauguccuucuucaucagc

SEQ ID NO: 2812619 - RNA, 19 nt, Artificial Sequence
  Description of Artificial Sequence: Synthetic oligonucleotide
caauucccaggcaggaggg

SEQ ID NO: 2812620 - RNA, 19 nt, Artificial Sequence
  Description of Artificial Sequence: Synthetic oligonucleotide
uaaaagccaugguaucucu

SEQ ID NO: 2812621 - RNA, 19 nt, Artificial Sequence
  Description of Artificial Sequence: Synthetic oligonucleotide
uaucccacaaauggucucc

SEQ ID NO: 2812622 - RNA, 19 nt, Artificial Sequence
  Description of Artificial Sequence: Synthetic oligonucleotide
ugagccaccaugcccagua

SEQ ID NO: 2812623 - RNA, 19 nt, Artificial Sequence
  Description of Artificial Sequence: Synthetic oligonucleotide
cacuuuuaucccacaaaug

SEQ ID NO: 2812624 - RNA, 19 nt, Artificial Sequence
  Description of Artificial Sequence: Synthetic oligonucleotide
cucuaagagcaauucccag

SEQ ID NO: 2812625 - RNA, 19 nt, Artificial Sequence
  Description of Artificial Sequence: Synthetic oligonucleotide
caaauggucuccaccucag

SEQ ID NO: 2812626 - RNA, 19 nt, Artificial Sequence
  Description of Artificial Sequence: Synthetic oligonucleotide
cucagguuggagucacugg

SEQ ID NO: 2812627 - RNA, 19 nt, Artificial Sequence
  Description of Artificial Sequence: Synthetic oligonucleotide
ugcuaugccagggaucuug

SEQ ID NO: 2812628 - RNA, 19 nt, Artificial Sequence
  Description of Artificial Sequence: Synthetic oligonucleotide
ucauucaauuguccuucca

SEQ ID NO: 2812629 - RNA, 19 nt, Artificial Sequence
  Description of Artificial Sequence: Synthetic oligonucleotide
gcuaguguuacagacauga

SEQ ID NO: 2812630 - RNA, 19 nt, Artificial Sequence
  Description of Artificial Sequence: Synthetic oligonucleotide
cagggaucuugaacuaugg

SEQ ID NO: 2812631 - RNA, 19 nt, Artificial Sequence
  Description of Artificial Sequence: Synthetic oligonucleotide
ugcagggauaugacgacaa

SEQ ID NO: 2812632 - RNA, 19 nt, Artificial Sequence
  Description of Artificial Sequence: Synthetic oligonucleotide
agagcaauucccaggcagg

SEQ ID NO: 2812633 - RNA, 19 nt, Artificial Sequence
  Description of Artificial Sequence: Synthetic oligonucleotide
gagcauguuugccuagccc

SEQ ID NO: 2812634 - RNA, 19 nt, Artificial Sequence
  Description of Artificial Sequence: Synthetic oligonucleotide
ggcugucacauucacaggc

SEQ ID NO: 2812635 - RNA, 19 nt, Artificial Sequence
  Description of Artificial Sequence: Synthetic oligonucleotide
cagcuucuugcucacacag

SEQ ID NO: 2812636 - RNA, 19 nt, Artificial Sequence
  Description of Artificial Sequence: Synthetic oligonucleotide
agccaugguaucucuaaga

SEQ ID NO: 2812637 - RNA, 19 nt, Artificial Sequence
  Description of Artificial Sequence: Synthetic oligonucleotide
cuucaucagcucagguugg

SEQ ID NO: 2812638 - RNA, 19 nt, Artificial Sequence
  Description of Artificial Sequence: Synthetic oligonucleotide
gcugcuagaugccaccacg

SEQ ID NO: 2812639 - RNA, 19 nt, Artificial Sequence
  Description of Artificial Sequence: Synthetic oligonucleotide
acaugagccaccaugccca

SEQ ID NO: 2812640 - RNA, 19 nt, Artificial Sequence
  Description of Artificial Sequence: Synthetic oligonucleotide
gccaugguaucucuaagag

SEQ ID NO: 2812641 - RNA, 19 nt, Artificial Sequence
  Description of Artificial Sequence: Synthetic oligonucleotide
uuguccucagucauucaau

SEQ ID NO: 2812642 - RNA, 19 nt, Artificial Sequence
  Description of Artificial Sequence: Synthetic oligonucleotide
cacaggcucuucauacugg

SEQ ID NO: 2812643 - RNA, 19 nt, Artificial Sequence
  Description of Artificial Sequence: Synthetic oligonucleotide
auuugcuaugccagggauc

SEQ ID NO: 2812644 - RNA, 19 nt, Artificial Sequence
  Description of Artificial Sequence: Synthetic oligonucleotide
aaauaggcugucacauuca

SEQ ID NO: 2812645 - RNA, 19 nt, Artificial Sequence
  Description of Artificial Sequence: Synthetic oligonucleotide
cuaguguuacagacaugag

SEQ ID NO: 2812646 - RNA, 19 nt, Artificial Sequence
  Description of Artificial Sequence: Synthetic oligonucleotide
ucuucuuguugcuuugguu

SEQ ID NO: 2812647 - RNA, 19 nt, Artificial Sequence
  Description of Artificial Sequence: Synthetic oligonucleotide
aggagcauguuugccuagc

SEQ ID NO: 2812648 - RNA, 19 nt, Artificial Sequence
  Description of Artificial Sequence: Synthetic oligonucleotide
uuaucccacaaauggucuc

SEQ ID NO: 2812649 - RNA, 19 nt, Artificial Sequence
  Description of Artificial Sequence: Synthetic oligonucleotide
ugccuagcccuccucagcu

SEQ ID NO: 2812650 - RNA, 19 nt, Artificial Sequence
  Description of Artificial Sequence: Synthetic oligonucleotide
guuacagacaugagccacc

SEQ ID NO: 2812651 - RNA, 19 nt, Artificial Sequence
  Description of Artificial Sequence: Synthetic oligonucleotide
acugggugcagggauauga

SEQ ID NO: 2812652 - RNA, 19 nt, Artificial Sequence
  Description of Artificial Sequence: Synthetic oligonucleotide
agguuggagucacugggug

SEQ ID NO: 2812653 - RNA, 19 nt, Artificial Sequence
  Description of Artificial Sequence: Synthetic oligonucleotide
gaccuuggucuccacacac

SEQ ID NO: 2812654 - RNA, 19 nt, Artificial Sequence
  Description of Artificial Sequence: Synthetic oligonucleotide
gucuccacacaccagcuuc

SEQ ID NO: 2812655 - RNA, 19 nt, Artificial Sequence
  Description of Artificial Sequence: Synthetic oligonucleotide
ucugaaugcuaguguuaca

SEQ ID NO: 2812656 - RNA, 19 nt, Artificial Sequence
  Description of Artificial Sequence: Synthetic oligonucleotide
ugcuagaugccaccacgcu

SEQ ID NO: 2812657 - RNA, 19 nt, Artificial Sequence
  Description of Artificial Sequence: Synthetic oligonucleotide
ugggcugauguccuucuuc

SEQ ID NO: 2812658 - RNA, 19 nt, Artificial Sequence
  Description of Artificial Sequence: Synthetic oligonucleotide
uuacagacaugagccacca

SEQ ID NO: 2812659 - RNA, 19 nt, Artificial Sequence
  Description of Artificial Sequence: Synthetic oligonucleotide
guaucucuaagagcaauuc

SEQ ID NO: 2812660 - RNA, 19 nt, Artificial Sequence
  Description of Artificial Sequence: Synthetic oligonucleotide
cuggaagagcacuucuuuc

SEQ ID NO: 2812661 - RNA, 19 nt, Artificial Sequence
  Description of Artificial Sequence: Synthetic oligonucleotide
caguaaaagccaugguauc

SEQ ID NO: 2812662 - RNA, 19 nt, Artificial Sequence
  Description of Artificial Sequence: Synthetic oligonucleotide
cuucauacugggcugaugu

SEQ ID NO: 2812663 - RNA, 19 nt, Artificial Sequence
  Description of Artificial Sequence: Synthetic oligonucleotide
aauucccaggcaggagggg

SEQ ID NO: 2812664 - RNA, 19 nt, Artificial Sequence
  Description of Artificial Sequence: Synthetic oligonucleotide
cugcuagaugccaccacgc

SEQ ID NO: 2812665 - RNA, 19 nt, Artificial Sequence
  Description of Artificial Sequence: Synthetic oligonucleotide
uaugguguuucuucuuguu

SEQ ID NO: 2812666 - RNA, 19 nt, Artificial Sequence
  Description of Artificial Sequence: Synthetic oligonucleotide
ucuccacacaccagcuucu

SEQ ID NO: 2812667 - RNA, 19 nt, Artificial Sequence
  Description of Artificial Sequence: Synthetic oligonucleotide
cuugcucacacagggaauc

SEQ ID NO: 2812668 - RNA, 19 nt, Artificial Sequence
  Description of Artificial Sequence: Synthetic oligonucleotide
ccacacaccagcuucuugc

SEQ ID NO: 2812669 - RNA, 19 nt, Artificial Sequence
  Description of Artificial Sequence: Synthetic oligonucleotide
cuauguagcccaagccaac

SEQ ID NO: 2812670 - RNA, 19 nt, Artificial Sequence
  Description of Artificial Sequence: Synthetic oligonucleotide
acuauguagcccaagccaa

SEQ ID NO: 2812671 - RNA, 19 nt, Artificial Sequence
  Description of Artificial Sequence: Synthetic oligonucleotide
ugccuucugaaugcuagug

SEQ ID NO: 2812672 - RNA, 19 nt, Artificial Sequence
  Description of Artificial Sequence: Synthetic oligonucleotide
uaagagcaauucccaggca

SEQ ID NO: 2812673 - RNA, 19 nt, Artificial Sequence
  Description of Artificial Sequence: Synthetic oligonucleotide
ugauguccuucuucaucag

SEQ ID NO: 2812674 - RNA, 19 nt, Artificial Sequence
  Description of Artificial Sequence: Synthetic oligonucleotide
uguccucagucauucaauu

SEQ ID NO: 2812675 - RNA, 19 nt, Artificial Sequence
  Description of Artificial Sequence: Synthetic oligonucleotide
uuccaguaggagcauguuu

SEQ ID NO: 2812676 - RNA, 19 nt, Artificial Sequence
  Description of Artificial Sequence: Synthetic oligonucleotide
agcuaacacaggcucuuca

SEQ ID NO: 2812677 - RNA, 19 nt, Artificial Sequence
  Description of Artificial Sequence: Synthetic oligonucleotide
aaguuguggcaauccuccu

SEQ ID NO: 2812678 - RNA, 19 nt, Artificial Sequence
  Description of Artificial Sequence: Synthetic oligonucleotide
agucacugggugcagggau

SEQ ID NO: 2812679 - RNA, 19 nt, Artificial Sequence
  Description of Artificial Sequence: Synthetic oligonucleotide
uugccuagcccuccucagc

SEQ ID NO: 2812680 - RNA, 19 nt, Artificial Sequence
  Description of Artificial Sequence: Synthetic oligonucleotide
uucuuguugcuuugguuuu

SEQ ID NO: 2812681 - RNA, 19 nt, Artificial Sequence
  Description of Artificial Sequence: Synthetic oligonucleotide
cauggcuccuagaccuugg

SEQ ID NO: 2812682 - RNA, 19 nt, Artificial Sequence
  Description of Artificial Sequence: Synthetic oligonucleotide
ucuugcucacacagggaau

SEQ ID NO: 2812683 - RNA, 19 nt, Artificial Sequence
  Description of Artificial Sequence: Synthetic oligonucleotide
gccaacugcaaaguugugg

SEQ ID NO: 2812684 - RNA, 19 nt, Artificial Sequence
  Description of Artificial Sequence: Synthetic oligonucleotide
cuuuuaucccacaaauggu

SEQ ID NO: 2812685 - RNA, 19 nt, Artificial Sequence
  Description of Artificial Sequence: Synthetic oligonucleotide
guccucagucauucaauug

SEQ ID NO: 2812686 - RNA, 19 nt, Artificial Sequence
  Description of Artificial Sequence: Synthetic oligonucleotide
cccuccucagcuaacacag

SEQ ID NO: 2812687 - RNA, 19 nt, Artificial Sequence
  Description of Artificial Sequence: Synthetic oligonucleotide
ucaacgcugcuagaugcca

SEQ ID NO: 2812688 - RNA, 19 nt, Artificial Sequence
  Description of Artificial Sequence: Synthetic oligonucleotide
acugcaaaguuguggcaau

SEQ ID NO: 2812689 - RNA, 19 nt, Artificial Sequence
  Description of Artificial Sequence: Synthetic oligonucleotide
guuggagucacugggugca

SEQ ID NO: 2812690 - RNA, 19 nt, Artificial Sequence
  Description of Artificial Sequence: Synthetic oligonucleotide
aaucccagucaacgcugcu

SEQ ID NO: 2812691 - RNA, 19 nt, Artificial Sequence
  Description of Artificial Sequence: Synthetic oligonucleotide
ucuuguugcuuugguuuug

SEQ ID NO: 2812692 - RNA, 19 nt, Artificial Sequence
  Description of Artificial Sequence: Synthetic oligonucleotide
ucaucagcucagguuggag

SEQ ID NO: 2812693 - RNA, 19 nt, Artificial Sequence
  Description of Artificial Sequence: Synthetic oligonucleotide
auguagcccaagccaacug

SEQ ID NO: 2812694 - RNA, 19 nt, Artificial Sequence
  Description of Artificial Sequence: Synthetic oligonucleotide
gaacuaugguguuucuucu

SEQ ID NO: 2812695 - RNA, 19 nt, Artificial Sequence
  Description of Artificial Sequence: Synthetic oligonucleotide
cuuggucuccacacaccag

SEQ ID NO: 2812696 - RNA, 19 nt, Artificial Sequence
  Description of Artificial Sequence: Synthetic oligonucleotide
uguccuucuucaucagcuc

SEQ ID NO: 2812697 - RNA, 19 nt, Artificial Sequence
  Description of Artificial Sequence: Synthetic oligonucleotide
ggaucuugaacuauggugu

SEQ ID NO: 2812698 - RNA, 19 nt, Artificial Sequence
  Description of Artificial Sequence: Synthetic oligonucleotide
uucauacugggcugauguc

SEQ ID NO: 2812699 - RNA, 19 nt, Artificial Sequence
  Description of Artificial Sequence: Synthetic oligonucleotide
ucagcuaacacaggcucuu

SEQ ID NO: 2812700 - RNA, 19 nt, Artificial Sequence
  Description of Artificial Sequence: Synthetic oligonucleotide
uuggcucacuauguagccc

SEQ ID NO: 2812701 - RNA, 19 nt, Artificial Sequence
  Description of Artificial Sequence: Synthetic oligonucleotide
aguuguggcaauccuccuu

SEQ ID NO: 2812702 - RNA, 19 nt, Artificial Sequence
  Description of Artificial Sequence: Synthetic oligonucleotide
gucauucaauuguccuucc

SEQ ID NO: 2812703 - RNA, 19 nt, Artificial Sequence
  Description of Artificial Sequence: Synthetic oligonucleotide
uggucuccacacaccagcu

SEQ ID NO: 2812704 - RNA, 19 nt, Artificial Sequence
  Description of Artificial Sequence: Synthetic oligonucleotide
uggucuccaccucagccau

SEQ ID NO: 2812705 - RNA, 19 nt, Artificial Sequence
  Description of Artificial Sequence: Synthetic oligonucleotide
aggcugucacauucacagg

SEQ ID NO: 2812706 - RNA, 19 nt, Artificial Sequence
  Description of Artificial Sequence: Synthetic oligonucleotide
cagucaacgcugcuagaug

SEQ ID NO: 2812707 - RNA, 19 nt, Artificial Sequence
  Description of Artificial Sequence: Synthetic oligonucleotide
accuuggucuccacacacc

SEQ ID NO: 2812708 - RNA, 19 nt, Artificial Sequence
  Description of Artificial Sequence: Synthetic oligonucleotide
guuugccuagcccuccuca

SEQ ID NO: 2812709 - RNA, 19 nt, Artificial Sequence
  Description of Artificial Sequence: Synthetic oligonucleotide
gcuagaugccaccacgcug

SEQ ID NO: 2812710 - RNA, 19 nt, Artificial Sequence
  Description of Artificial Sequence: Synthetic oligonucleotide
auuguccuuccaguaggag

SEQ ID NO: 2812711 - RNA, 19 nt, Artificial Sequence
  Description of Artificial Sequence: Synthetic oligonucleotide
uaggagcauguuugccuag

SEQ ID NO: 2812712 - RNA, 19 nt, Artificial Sequence
  Description of Artificial Sequence: Synthetic oligonucleotide
cauucacaggcuuggcuca

SEQ ID NO: 2812713 - RNA, 19 nt, Artificial Sequence
  Description of Artificial Sequence: Synthetic oligonucleotide
ugguaucucuaagagcaau

SEQ ID NO: 2812714 - RNA, 19 nt, Artificial Sequence
  Description of Artificial Sequence: Synthetic oligonucleotide
cugggugcagggauaugac

SEQ ID NO: 2812715 - RNA, 19 nt, Artificial Sequence
  Description of Artificial Sequence: Synthetic oligonucleotide
cauguuugccuagcccucc

SEQ ID NO: 2812716 - RNA, 19 nt, Artificial Sequence
  Description of Artificial Sequence: Synthetic oligonucleotide
ucuucauacugggcugaug

SEQ ID NO: 2812717 - RNA, 19 nt, Artificial Sequence
  Description of Artificial Sequence: Synthetic oligonucleotide
ggaagagcacuucuuucac

SEQ ID NO: 2812718 - RNA, 19 nt, Artificial Sequence
  Description of Artificial Sequence: Synthetic oligonucleotide
acugggcugauguccuucu

SEQ ID NO: 2812719 - RNA, 19 nt, Artificial Sequence
  Description of Artificial Sequence: Synthetic oligonucleotide
gacauacauuauuugcuau

SEQ ID NO: 2812720 - RNA, 19 nt, Artificial Sequence
  Description of Artificial Sequence: Synthetic oligonucleotide
guaggagcauguuugccua

SEQ ID NO: 2812721 - RNA, 19 nt, Artificial Sequence
  Description of Artificial Sequence: Synthetic oligonucleotide
ugcuaguguuacagacaug

SEQ ID NO: 2812722 - RNA, 19 nt, Artificial Sequence
  Description of Artificial Sequence: Synthetic oligonucleotide
ccaugguaucucuaagagc

SEQ ID NO: 2812723 - RNA, 19 nt, Artificial Sequence
  Description of Artificial Sequence: Synthetic oligonucleotide
agaccuuggucuccacaca

SEQ ID NO: 2812724 - RNA, 19 nt, Artificial Sequence
  Description of Artificial Sequence: Synthetic oligonucleotide
uugccuucugaaugcuagu

SEQ ID NO: 2812725 - RNA, 19 nt, Artificial Sequence
  Description of Artificial Sequence: Synthetic oligonucleotide
cccacaaauggucuccacc

SEQ ID NO: 2812726 - RNA, 19 nt, Artificial Sequence
  Description of Artificial Sequence: Synthetic oligonucleotide
uugaacuaugguguuucuu

SEQ ID NO: 2812727 - RNA, 19 nt, Artificial Sequence
  Description of Artificial Sequence: Synthetic oligonucleotide
auucacaggcuuggcucac

SEQ ID NO: 2812728 - RNA, 19 nt, Artificial Sequence
  Description of Artificial Sequence: Synthetic oligonucleotide
gcugauguccuucuucauc

SEQ ID NO: 2812729 - RNA, 19 nt, Artificial Sequence
  Description of Artificial Sequence: Synthetic oligonucleotide
ggcuccuagaccuuggucu

SEQ ID NO: 2812730 - RNA, 19 nt, Artificial Sequence
  Description of Artificial Sequence: Synthetic oligonucleotide
aggaggggaauuguccuca

SEQ ID NO: 2812731 - RNA, 19 nt, Artificial Sequence
  Description of Artificial Sequence: Synthetic oligonucleotide
gguuggagucacugggugc

SEQ ID NO: 2812732 - RNA, 19 nt, Artificial Sequence
  Description of Artificial Sequence: Synthetic oligonucleotide
agcaauucccaggcaggag

SEQ ID NO: 2812733 - RNA, 19 nt, Artificial Sequence
  Description of Artificial Sequence: Synthetic oligonucleotide
agcuucuugcucacacagg

SEQ ID NO: 2812734 - RNA, 19 nt, Artificial Sequence
  Description of Artificial Sequence: Synthetic oligonucleotide
cagccauggcuccuagacc

SEQ ID NO: 2812735 - RNA, 19 nt, Artificial Sequence
  Description of Artificial Sequence: Synthetic oligonucleotide
ucagcucagguuggaguca

SEQ ID NO: 2812736 - RNA, 19 nt, Artificial Sequence
  Description of Artificial Sequence: Synthetic oligonucleotide
gcuuugguuuugaaauagg

SEQ ID NO: 2812737 - RNA, 19 nt, Artificial Sequence
  Description of Artificial Sequence: Synthetic oligonucleotide
agcccaagccaacugcaaa

SEQ ID NO: 2812738 - RNA, 19 nt, Artificial Sequence
  Description of Artificial Sequence: Synthetic oligonucleotide
caggcucuucauacugggc

SEQ ID NO: 2812739 - RNA, 19 nt, Artificial Sequence
  Description of Artificial Sequence: Synthetic oligonucleotide
cacaaauggucuccaccuc

SEQ ID NO: 2812740 - RNA, 19 nt, Artificial Sequence
  Description of Artificial Sequence: Synthetic oligonucleotide
uucaucagcucagguugga

SEQ ID NO: 2812741 - RNA, 19 nt, Artificial Sequence
  Description of Artificial Sequence: Synthetic oligonucleotide
uucccaggcaggaggggaa

SEQ ID NO: 2812742 - RNA, 19 nt, Artificial Sequence
  Description of Artificial Sequence: Synthetic oligonucleotide
caacgcugcuagaugccac

SEQ ID NO: 2812743 - RNA, 19 nt, Artificial Sequence
  Description of Artificial Sequence: Synthetic oligonucleotide
auucccaggcaggagggga

SEQ ID NO: 2812744 - RNA, 19 nt, Artificial Sequence
  Description of Artificial Sequence: Synthetic oligonucleotide
caguaggagcauguuugcc

SEQ ID NO: 2812745 - RNA, 19 nt, Artificial Sequence
  Description of Artificial Sequence: Synthetic oligonucleotide
guguuacagacaugagcca

SEQ ID NO: 2812746 - RNA, 19 nt, Artificial Sequence
  Description of Artificial Sequence: Synthetic oligonucleotide
ggcucuucauacugggcug

SEQ ID NO: 2812747 - RNA, 19 nt, Artificial Sequence
  Description of Artificial Sequence: Synthetic oligonucleotide
uccuagaccuuggucucca

SEQ ID NO: 2812748 - RNA, 19 nt, Artificial Sequence
  Description of Artificial Sequence: Synthetic oligonucleotide
ucacaggcuuggcucacua

SEQ ID NO: 2812749 - RNA, 19 nt, Artificial Sequence
  Description of Artificial Sequence: Synthetic oligonucleotide
acgcuggaagagcacuucu

SEQ ID NO: 2812750 - RNA, 19 nt, Artificial Sequence
  Description of Artificial Sequence: Synthetic oligonucleotide
aaaagccaugguaucucua

SEQ ID NO: 2812751 - RNA, 19 nt, Artificial Sequence
  Description of Artificial Sequence: Synthetic oligonucleotide
gaagagcacuucuuucacu

SEQ ID NO: 2812752 - RNA, 19 nt, Artificial Sequence
  Description of Artificial Sequence: Synthetic oligonucleotide
guuuugaaauaggcuguca

SEQ ID NO: 2812753 - RNA, 19 nt, Artificial Sequence
  Description of Artificial Sequence: Synthetic oligonucleotide
uguuugccuagcccuccuc

SEQ ID NO: 2812754 - RNA, 19 nt, Artificial Sequence
  Description of Artificial Sequence: Synthetic oligonucleotide
uuguggcaauccuccuuug

SEQ ID NO: 2812755 - RNA, 19 nt, Artificial Sequence
  Description of Artificial Sequence: Synthetic oligonucleotide
uagcccaagccaacugcaa

SEQ ID NO: 2812756 - RNA, 19 nt, Artificial Sequence
  Description of Artificial Sequence: Synthetic oligonucleotide
uggcuccuagaccuugguc

SEQ ID NO: 2812757 - RNA, 19 nt, Artificial Sequence
  Description of Artificial Sequence: Synthetic oligonucleotide
ggcaggaggggaauugucc

SEQ ID NO: 2812758 - RNA, 19 nt, Artificial Sequence
  Description of Artificial Sequence: Synthetic oligonucleotide
cucacacagggaaucucca

SEQ ID NO: 2812759 - RNA, 19 nt, Artificial Sequence
  Description of Artificial Sequence: Synthetic oligonucleotide
ggagcauguuugccuagcc

SEQ ID NO: 2812760 - RNA, 19 nt, Artificial Sequence
  Description of Artificial Sequence: Synthetic oligonucleotide
accacgcuggaagagcacu

SEQ ID NO: 2812761 - RNA, 19 nt, Artificial Sequence
  Description of Artificial Sequence: Synthetic oligonucleotide
cuucugaaugcuaguguua

SEQ ID NO: 2812762 - RNA, 19 nt, Artificial Sequence
  Description of Artificial Sequence: Synthetic oligonucleotide
gucaacgcugcuagaugcc

SEQ ID NO: 2812763 - RNA, 19 nt, Artificial Sequence
  Description of Artificial Sequence: Synthetic oligonucleotide
cuaacacaggcucuucaua

SEQ ID NO: 2812764 - RNA, 19 nt, Artificial Sequence
  Description of Artificial Sequence: Synthetic oligonucleotide
ggugcagggauaugacgac

SEQ ID NO: 2812765 - RNA, 19 nt, Artificial Sequence
  Description of Artificial Sequence: Synthetic oligonucleotide
gcucacacagggaaucucc

SEQ ID NO: 2812766 - RNA, 19 nt, Artificial Sequence
  Description of Artificial Sequence: Synthetic oligonucleotide
ccagggaucuugaacuaug

SEQ ID NO: 2812767 - RNA, 19 nt, Artificial Sequence
  Description of Artificial Sequence: Synthetic oligonucleotide
cuagaccuuggucuccaca

SEQ ID NO: 2812768 - RNA, 19 nt, Artificial Sequence
  Description of Artificial Sequence: Synthetic oligonucleotide
gagcaauucccaggcagga

SEQ ID NO: 2812769 - RNA, 19 nt, Artificial Sequence
  Description of Artificial Sequence: Synthetic oligonucleotide
auguuugccuagcccuccu

SEQ ID NO: 2812770 - RNA, 19 nt, Artificial Sequence
  Description of Artificial Sequence: Synthetic oligonucleotide
cauacugggcugauguccu

SEQ ID NO: 2812771 - RNA, 19 nt, Artificial Sequence
  Description of Artificial Sequence: Synthetic oligonucleotide
gggugcagggauaugacga

SEQ ID NO: 2812772 - RNA, 19 nt, Artificial Sequence
  Description of Artificial Sequence: Synthetic oligonucleotide
guagcccaagccaacugca

SEQ ID NO: 2812773 - RNA, 19 nt, Artificial Sequence
  Description of Artificial Sequence: Synthetic oligonucleotide
guuguggcaauccuccuuu

SEQ ID NO: 2812774 - RNA, 19 nt, Artificial Sequence
  Description of Artificial Sequence: Synthetic oligonucleotide
caggaggggaauuguccuc

SEQ ID NO: 2812775 - RNA, 19 nt, Artificial Sequence
  Description of Artificial Sequence: Synthetic oligonucleotide
cagggauaugacgacaaaa

SEQ ID NO: 2812776 - RNA, 19 nt, Artificial Sequence
  Description of Artificial Sequence: Synthetic oligonucleotide
auggcuccuagaccuuggu

SEQ ID NO: 2812777 - RNA, 19 nt, Artificial Sequence
  Description of Artificial Sequence: Synthetic oligonucleotide
cuucuugcucacacaggga

SEQ ID NO: 2812778 - RNA, 19 nt, Artificial Sequence
  Description of Artificial Sequence: Synthetic oligonucleotide
uagcccuccucagcuaaca

SEQ ID NO: 2812779 - RNA, 19 nt, Artificial Sequence
  Description of Artificial Sequence: Synthetic oligonucleotide
uugcucacacagggaaucu

SEQ ID NO: 2812780 - RNA, 19 nt, Artificial Sequence
  Description of Artificial Sequence: Synthetic oligonucleotide
auaggcugucacauucaca

SEQ ID NO: 2812781 - RNA, 19 nt, Artificial Sequence
  Description of Artificial Sequence: Synthetic oligonucleotide
ccaguaaaagccaugguau

SEQ ID NO: 2812782 - RNA, 19 nt, Artificial Sequence
  Description of Artificial Sequence: Synthetic oligonucleotide
agagcacuucuuucacuuu

SEQ ID NO: 2812783 - RNA, 19 nt, Artificial Sequence
  Description of Artificial Sequence: Synthetic oligonucleotide
ucccacaaauggucuccac

SEQ ID NO: 2812784 - RNA, 19 nt, Artificial Sequence
  Description of Artificial Sequence: Synthetic oligonucleotide
augccaccacgcuggaaga

SEQ ID NO: 2812785 - RNA, 19 nt, Artificial Sequence
  Description of Artificial Sequence: Synthetic oligonucleotide
caugagccaccaugcccag

SEQ ID NO: 2812786 - RNA, 19 nt, Artificial Sequence
  Description of Artificial Sequence: Synthetic oligonucleotide
caucagcucagguuggagu

SEQ ID NO: 2812787 - RNA, 19 nt, Artificial Sequence
  Description of Artificial Sequence: Synthetic oligonucleotide
cccaguaaaagccauggua

SEQ ID NO: 2812788 - RNA, 19 nt, Artificial Sequence
  Description of Artificial Sequence: Synthetic oligonucleotide
agccaccaugcccaguaaa

SEQ ID NO: 2812789 - RNA, 19 nt, Artificial Sequence
  Description of Artificial Sequence: Synthetic oligonucleotide
ugcucacacagggaaucuc

SEQ ID NO: 2812790 - RNA, 19 nt, Artificial Sequence
  Description of Artificial Sequence: Synthetic oligonucleotide
ugccaccacgcuggaagag

SEQ ID NO: 2812791 - RNA, 19 nt, Artificial Sequence
  Description of Artificial Sequence: Synthetic oligonucleotide
aggcaggaggggaauuguc

SEQ ID NO: 2812792 - RNA, 19 nt, Artificial Sequence
  Description of Artificial Sequence: Synthetic oligonucleotide
cuagcccuccucagcuaac

SEQ ID NO: 2812793 - RNA, 19 nt, Artificial Sequence
  Description of Artificial Sequence: Synthetic oligonucleotide
caacugcaaaguuguggca

SEQ ID NO: 2812794 - RNA, 19 nt, Artificial Sequence
  Description of Artificial Sequence: Synthetic oligonucleotide
cuuguugcuuugguuuuga

SEQ ID NO: 2812795 - RNA, 19 nt, Artificial Sequence
  Description of Artificial Sequence: Synthetic oligonucleotide
uagaugccaccacgcugga

SEQ ID NO: 2812796 - RNA, 19 nt, Artificial Sequence
  Description of Artificial Sequence: Synthetic oligonucleotide
ccucagucauucaauuguc

SEQ ID NO: 2812797 - RNA, 19 nt, Artificial Sequence
  Description of Artificial Sequence: Synthetic oligonucleotide
uccuuccaguaggagcaug

SEQ ID NO: 2812798 - RNA, 19 nt, Artificial Sequence
  Description of Artificial Sequence: Synthetic oligonucleotide
gguuuugaaauaggcuguc

SEQ ID NO: 2812799 - RNA, 19 nt, Artificial Sequence
  Description of Artificial Sequence: Synthetic oligonucleotide
uuggagucacugggugcag

SEQ ID NO: 2812800 - RNA, 19 nt, Artificial Sequence
  Description of Artificial Sequence: Synthetic oligonucleotide
gaucuugaacuaugguguu

SEQ ID NO: 2812801 - RNA, 19 nt, Artificial Sequence
  Description of Artificial Sequence: Synthetic oligonucleotide
cuaugguguuucuucuugu

SEQ ID NO: 2812802 - RNA, 19 nt, Artificial Sequence
  Description of Artificial Sequence: Synthetic oligonucleotide
aucuugaacuaugguguuu

SEQ ID NO: 2812803 - RNA, 19 nt, Artificial Sequence
  Description of Artificial Sequence: Synthetic oligonucleotide
gcucagguuggagucacug

SEQ ID NO: 2812804 - RNA, 19 nt, Artificial Sequence
  Description of Artificial Sequence: Synthetic oligonucleotide
uacagacaugagccaccau

SEQ ID NO: 2812805 - RNA, 19 nt, Artificial Sequence
  Description of Artificial Sequence: Synthetic oligonucleotide
aggcuuggcucacuaugua

SEQ ID NO: 2812806 - RNA, 19 nt, Artificial Sequence
  Description of Artificial Sequence: Synthetic oligonucleotide
ucuccaccucagccauggc

SEQ ID NO: 2812807 - RNA, 19 nt, Artificial Sequence
  Description of Artificial Sequence: Synthetic oligonucleotide
uucacaggcuuggcucacu

SEQ ID NO: 2812808 - RNA, 19 nt, Artificial Sequence
  Description of Artificial Sequence: Synthetic oligonucleotide
cuccuagaccuuggucucc

SEQ ID NO: 2812809 - RNA, 19 nt, Artificial Sequence
  Description of Artificial Sequence: Synthetic oligonucleotide
gcuccuagaccuuggucuc

SEQ ID NO: 2812810 - RNA, 19 nt, Artificial Sequence
  Description of Artificial Sequence: Synthetic oligonucleotide
cacgcuggaagagcacuuc

SEQ ID NO: 2812811 - RNA, 19 nt, Artificial Sequence
  Description of Artificial Sequence: Synthetic oligonucleotide
aucccagucaacgcugcua

SEQ ID NO: 2812812 - RNA, 19 nt, Artificial Sequence
  Description of Artificial Sequence: Synthetic oligonucleotide
cugcaaaguuguggcaauc

SEQ ID NO: 2812813 - RNA, 19 nt, Artificial Sequence
  Description of Artificial Sequence: Synthetic oligonucleotide
ccacaaauggucuccaccu

SEQ ID NO: 2812814 - RNA, 19 nt, Artificial Sequence
  Description of Artificial Sequence: Synthetic oligonucleotide
aucccacaaauggucucca

SEQ ID NO: 2812815 - RNA, 19 nt, Artificial Sequence
  Description of Artificial Sequence: Synthetic oligonucleotide
cagucauucaauuguccuu

SEQ ID NO: 2812816 - RNA, 19 nt, Artificial Sequence
  Description of Artificial Sequence: Synthetic oligonucleotide
gcaaaguuguggcaauccu

SEQ ID NO: 2812817 - RNA, 19 nt, Artificial Sequence
  Description of Artificial Sequence: Synthetic oligonucleotide
gggaauuguccucagucau

SEQ ID NO: 2812818 - RNA, 19 nt, Artificial Sequence
  Description of Artificial Sequence: Synthetic oligonucleotide
ggaggggaauuguccucag

SEQ ID NO: 2812819 - RNA, 19 nt, Artificial Sequence
  Description of Artificial Sequence: Synthetic oligonucleotide
ccuuggucuccacacacca

SEQ ID NO: 2812820 - RNA, 19 nt, Artificial Sequence
  Description of Artificial Sequence: Synthetic oligonucleotide
gguguuucuucuuguugcu

SEQ ID NO: 2812821 - RNA, 19 nt, Artificial Sequence
  Description of Artificial Sequence: Synthetic oligonucleotide
cuuugccuucugaaugcua

SEQ ID NO: 2812822 - RNA, 19 nt, Artificial Sequence
  Description of Artificial Sequence: Synthetic oligonucleotide
gagucacugggugcaggga

SEQ ID NO: 2812823 - RNA, 19 nt, Artificial Sequence
  Description of Artificial Sequence: Synthetic oligonucleotide
caccacgcuggaagagcac

SEQ ID NO: 2812824 - RNA, 19 nt, Artificial Sequence
  Description of Artificial Sequence: Synthetic oligonucleotide
cuugaacuaugguguuucu

SEQ ID NO: 2812825 - RNA, 19 nt, Artificial Sequence
  Description of Artificial Sequence: Synthetic oligonucleotide
gugcagggauaugacgaca

SEQ ID NO: 2812826 - RNA, 19 nt, Artificial Sequence
  Description of Artificial Sequence: Synthetic oligonucleotide
gcaggaggggaauuguccu

SEQ ID NO: 2812827 - RNA, 19 nt, Artificial Sequence
  Description of Artificial Sequence: Synthetic oligonucleotide
gccaccacgcuggaagagc

SEQ ID NO: 2812828 - RNA, 19 nt, Artificial Sequence
  Description of Artificial Sequence: Synthetic oligonucleotide
gcuaacacaggcucuucau

SEQ ID NO: 2812829 - RNA, 19 nt, Artificial Sequence
  Description of Artificial Sequence: Synthetic oligonucleotide
caugcccaguaaaagccau

SEQ ID NO: 2812830 - RNA, 19 nt, Artificial Sequence
  Description of Artificial Sequence: Synthetic oligonucleotide
gcaauccuccuuugccuuc

SEQ ID NO: 2812831 - RNA, 19 nt, Artificial Sequence
  Description of Artificial Sequence: Synthetic oligonucleotide
augguaucucuaagagcaa

SEQ ID NO: 2812832 - RNA, 19 nt, Artificial Sequence
  Description of Artificial Sequence: Synthetic oligonucleotide
acgcugcuagaugccacca

SEQ ID NO: 2812833 - RNA, 19 nt, Artificial Sequence
  Description of Artificial Sequence: Synthetic oligonucleotide
cuaugccagggaucuugaa

SEQ ID NO: 2812834 - RNA, 19 nt, Artificial Sequence
  Description of Artificial Sequence: Synthetic oligonucleotide
gaggggaauuguccucagu

SEQ ID NO: 2812835 - RNA, 19 nt, Artificial Sequence
  Description of Artificial Sequence: Synthetic oligonucleotide
auacugggcugauguccuu

SEQ ID NO: 2812836 - RNA, 19 nt, Artificial Sequence
  Description of Artificial Sequence: Synthetic oligonucleotide
cagguuggagucacugggu

SEQ ID NO: 2812837 - RNA, 19 nt, Artificial Sequence
  Description of Artificial Sequence: Synthetic oligonucleotide
ccaccucagccauggcucc

SEQ ID NO: 2812838 - RNA, 19 nt, Artificial Sequence
  Description of Artificial Sequence: Synthetic oligonucleotide
gcuggaagagcacuucuuu

SEQ ID NO: 2812839 - RNA, 19 nt, Artificial Sequence
  Description of Artificial Sequence: Synthetic oligonucleotide
gccuucugaaugcuagugu

SEQ ID NO: 2812840 - RNA, 19 nt, Artificial Sequence
  Description of Artificial Sequence: Synthetic oligonucleotide
gcauguuugccuagcccuc

SEQ ID NO: 2812841 - RNA, 19 nt, Artificial Sequence
  Description of Artificial Sequence: Synthetic oligonucleotide
ccaugcccaguaaaagcca

SEQ ID NO: 2812842 - RNA, 19 nt, Artificial Sequence
  Description of Artificial Sequence: Synthetic oligonucleotide
ccaggcaggaggggaauug

SEQ ID NO: 2812843 - RNA, 19 nt, Artificial Sequence
  Description of Artificial Sequence: Synthetic oligonucleotide
cucagccauggcuccuaga

SEQ ID NO: 2812844 - RNA, 19 nt, Artificial Sequence
  Description of Artificial Sequence: Synthetic oligonucleotide
cagcuaacacaggcucuuc

SEQ ID NO: 2812845 - RNA, 19 nt, Artificial Sequence
  Description of Artificial Sequence: Synthetic oligonucleotide
gucacugggugcagggaua

SEQ ID NO: 2812846 - RNA, 19 nt, Artificial Sequence
  Description of Artificial Sequence: Synthetic oligonucleotide
ucccaggcaggaggggaau

SEQ ID NO: 2812847 - RNA, 19 nt, Artificial Sequence
  Description of Artificial Sequence: Synthetic oligonucleotide
agccaacugcaaaguugug

SEQ ID NO: 2812848 - RNA, 19 nt, Artificial Sequence
  Description of Artificial Sequence: Synthetic oligonucleotide
gagccaccaugcccaguaa

SEQ ID NO: 2812849 - RNA, 19 nt, Artificial Sequence
  Description of Artificial Sequence: Synthetic oligonucleotide
gguaucucuaagagcaauu

SEQ ID NO: 2812850 - RNA, 19 nt, Artificial Sequence
  Description of Artificial Sequence: Synthetic oligonucleotide
ccaccacgcuggaagagca

SEQ ID NO: 2812851 - RNA, 19 nt, Artificial Sequence
  Description of Artificial Sequence: Synthetic oligonucleotide
ccagcuucuugcucacaca

SEQ ID NO: 2812852 - RNA, 19 nt, Artificial Sequence
  Description of Artificial Sequence: Synthetic oligonucleotide
gcucuucauacugggcuga

SEQ ID NO: 2812853 - RNA, 19 nt, Artificial Sequence
  Description of Artificial Sequence: Synthetic oligonucleotide
gcuaugccagggaucuuga

SEQ ID NO: 2812854 - RNA, 19 nt, Artificial Sequence
  Description of Artificial Sequence: Synthetic oligonucleotide
gcagggauaugacgacaaa

SEQ ID NO: 2812855 - RNA, 19 nt, Artificial Sequence
  Description of Artificial Sequence: Synthetic oligonucleotide
accucagccauggcuccua

SEQ ID NO: 2812856 - RNA, 19 nt, Artificial Sequence
  Description of Artificial Sequence: Synthetic oligonucleotide
ccuuccaguaggagcaugu

SEQ ID NO: 2812857 - RNA, 19 nt, Artificial Sequence
  Description of Artificial Sequence: Synthetic oligonucleotide
caauccuccuuugccuucu

SEQ ID NO: 2812858 - RNA, 19 nt, Artificial Sequence
  Description of Artificial Sequence: Synthetic oligonucleotide
augagccaccaugcccagu

SEQ ID NO: 2812859 - RNA, 19 nt, Artificial Sequence
  Description of Artificial Sequence: Synthetic oligonucleotide
agaugccaccacgcuggaa

SEQ ID NO: 2812860 - RNA, 19 nt, Artificial Sequence
  Description of Artificial Sequence: Synthetic oligonucleotide
ccauggcuccuagaccuug

SEQ ID NO: 2812861 - RNA, 19 nt, Artificial Sequence
  Description of Artificial Sequence: Synthetic oligonucleotide
ccuagcccuccucagcuaa

SEQ ID NO: 2812862 - RNA, 19 nt, Artificial Sequence
  Description of Artificial Sequence: Synthetic oligonucleotide
ggaauuguccucagucauu

SEQ ID NO: 2812863 - RNA, 19 nt, Artificial Sequence
  Description of Artificial Sequence: Synthetic oligonucleotide
ccucagccauggcuccuag

SEQ ID NO: 2812864 - RNA, 19 nt, Artificial Sequence
  Description of Artificial Sequence: Synthetic oligonucleotide
ccuagaccuuggucuccac

SEQ ID NO: 2812865 - RNA, 19 nt, Artificial Sequence
  Description of Artificial Sequence: Synthetic oligonucleotide
agcucagguuggagucacu

SEQ ID NO: 2812866 - RNA, 19 nt, Artificial Sequence
  Description of Artificial Sequence: Synthetic oligonucleotide
caggcaggaggggaauugu

SEQ ID NO: 2812867 - RNA, 19 nt, Artificial Sequence
  Description of Artificial Sequence: Synthetic oligonucleotide
uugcuaugccagggaucuu

SEQ ID NO: 2812868 - RNA, 19 nt, Artificial Sequence
  Description of Artificial Sequence: Synthetic oligonucleotide
guguuucuucuuguugcuu

SEQ ID NO: 2812869 - RNA, 19 nt, Artificial Sequence
  Description of Artificial Sequence: Synthetic oligonucleotide
cacaggcuuggcucacuau

SEQ ID NO: 2812870 - RNA, 19 nt, Artificial Sequence
  Description of Artificial Sequence: Synthetic oligonucleotide
ccagucaacgcugcuagau

SEQ ID NO: 2812871 - RNA, 19 nt, Artificial Sequence
  Description of Artificial Sequence: Synthetic oligonucleotide
cuuccaguaggagcauguu

SEQ ID NO: 2812872 - RNA, 19 nt, Artificial Sequence
  Description of Artificial Sequence: Synthetic oligonucleotide
cgcugcuagaugccaccac

SEQ ID NO: 2812873 - RNA, 19 nt, Artificial Sequence
  Description of Artificial Sequence: Synthetic oligonucleotide
gcccaguaaaagccauggu

SEQ ID NO: 2812874 - RNA, 19 nt, Artificial Sequence
  Description of Artificial Sequence: Synthetic oligonucleotide
ggucuccacacaccagcuu

SEQ ID NO: 2812875 - RNA, 19 nt, Artificial Sequence
  Description of Artificial Sequence: Synthetic oligonucleotide
cucuucauacugggcugau

SEQ ID NO: 2812876 - RNA, 19 nt, Artificial Sequence
  Description of Artificial Sequence: Synthetic oligonucleotide
cccaagccaacugcaaagu

SEQ ID NO: 2812877 - RNA, 19 nt, Artificial Sequence
  Description of Artificial Sequence: Synthetic oligonucleotide
cccagucaacgcugcuaga

SEQ ID NO: 2812878 - RNA, 19 nt, Artificial Sequence
  Description of Artificial Sequence: Synthetic oligonucleotide
ggcucacuauguagcccaa

SEQ ID NO: 2812879 - RNA, 19 nt, Artificial Sequence
  Description of Artificial Sequence: Synthetic oligonucleotide
ccaagccaacugcaaaguu

SEQ ID NO: 2812880 - RNA, 19 nt, Artificial Sequence
  Description of Artificial Sequence: Synthetic oligonucleotide
gccagggaucuugaacuau

SEQ ID NO: 2812881 - RNA, 19 nt, Artificial Sequence
  Description of Artificial Sequence: Synthetic oligonucleotide
gccuagcccuccucagcua

SEQ ID NO: 2812882 - RNA, 19 nt, Artificial Sequence
  Description of Artificial Sequence: Synthetic oligonucleotide
cugggcugauguccuucuu

SEQ ID NO: 2812883 - RNA, 19 nt, Artificial Sequence
  Description of Artificial Sequence: Synthetic oligonucleotide
guccuuccaguaggagcau

SEQ ID NO: 2812884 - RNA, 19 nt, Artificial Sequence
  Description of Artificial Sequence: Synthetic oligonucleotide
cuccacacaccagcuucuu

SEQ ID NO: 2812885 - RNA, 19 nt, Artificial Sequence
  Description of Artificial Sequence: Synthetic oligonucleotide
caccucagccauggcuccu

SEQ ID NO: 2812886 - RNA, 19 nt, Artificial Sequence
  Description of Artificial Sequence: Synthetic oligonucleotide
ccacgcuggaagagcacuu

SEQ ID NO: 2812887 - RNA, 19 nt, Artificial Sequence
  Description of Artificial Sequence: Synthetic oligonucleotide
cgcuggaagagcacuucuu

SEQ ID NO: 2812888 - RNA, 19 nt, Artificial Sequence
  Description of Artificial Sequence: Synthetic oligonucleotide
gccauggcuccuagaccuu

SEQ ID NO: 2812889 - RNA, 19 nt, Artificial Sequence
  Description of Artificial Sequence: Synthetic oligonucleotide
cccaggcaggaggggaauu

SEQ ID NO: 2812890 - RNA, 19 nt, Artificial Sequence
  Description of Artificial Sequence: Synthetic oligonucleotide
aauggcacucugcaaaugc

SEQ ID NO: 2812891 - RNA, 19 nt, Artificial Sequence
  Description of Artificial Sequence: Synthetic oligonucleotide
uuaaggaugcuaucaaugg

SEQ ID NO: 2812892 - RNA, 19 nt, Artificial Sequence
  Description of Artificial Sequence: Synthetic oligonucleotide
ucugcaaaugcucugugag

SEQ ID NO: 2812893 - RNA, 19 nt, Artificial Sequence
  Description of Artificial Sequence: Synthetic oligonucleotide
aacacgcugguacaguucg

SEQ ID NO: 2812894 - RNA, 19 nt, Artificial Sequence
  Description of Artificial Sequence: Synthetic oligonucleotide
agagaagcuggccuggucc

SEQ ID NO: 2812895 - RNA, 19 nt, Artificial Sequence
  Description of Artificial Sequence: Synthetic oligonucleotide
agugccauucaucugcgcc

SEQ ID NO: 2812896 - RNA, 19 nt, Artificial Sequence
  Description of Artificial Sequence: Synthetic oligonucleotide
uagagugccauucaucugc

SEQ ID NO: 2812897 - RNA, 19 nt, Artificial Sequence
  Description of Artificial Sequence: Synthetic oligonucleotide
ucuagagugccauucaucu

SEQ ID NO: 2812898 - RNA, 19 nt, Artificial Sequence
  Description of Artificial Sequence: Synthetic oligonucleotide
ugcaaaugcucugugagcg

SEQ ID NO: 2812899 - RNA, 19 nt, Artificial Sequence
  Description of Artificial Sequence: Synthetic oligonucleotide
cuugagaacacgcugguac

SEQ ID NO: 2812900 - RNA, 19 nt, Artificial Sequence
  Description of Artificial Sequence: Synthetic oligonucleotide
uacaguucguccuccaccg

SEQ ID NO: 2812901 - RNA, 19 nt, Artificial Sequence
  Description of Artificial Sequence: Synthetic oligonucleotide
gagcguaucguccugcggg

SEQ ID NO: 2812902 - RNA, 19 nt, Artificial Sequence
  Description of Artificial Sequence: Synthetic oligonucleotide
uaaggaugcuaucaauggc

SEQ ID NO: 2812903 - RNA, 19 nt, Artificial Sequence
  Description of Artificial Sequence: Synthetic oligonucleotide
aucaauggcacucugcaaa

SEQ ID NO: 2812904 - RNA, 19 nt, Artificial Sequence
  Description of Artificial Sequence: Synthetic oligonucleotide
guuaaggaugcuaucaaug

SEQ ID NO: 2812905 - RNA, 19 nt, Artificial Sequence
  Description of Artificial Sequence: Synthetic oligonucleotide
ucacuagagaagcuggccu

SEQ ID NO: 2812906 - RNA, 19 nt, Artificial Sequence
  Description of Artificial Sequence: Synthetic oligonucleotide
uucaucugcgccugcgugg

SEQ ID NO: 2812907 - RNA, 19 nt, Artificial Sequence
  Description of Artificial Sequence: Synthetic oligonucleotide
uggguuugcgcgcugcggg

SEQ ID NO: 2812908 - RNA, 19 nt, Artificial Sequence
  Description of Artificial Sequence: Synthetic oligonucleotide
ugcagguuaaggaugcuau

SEQ ID NO: 2812909 - RNA, 19 nt, Artificial Sequence
  Description of Artificial Sequence: Synthetic oligonucleotide
cugucacuagagaagcugg

SEQ ID NO: 2812910 - RNA, 19 nt, Artificial Sequence
  Description of Artificial Sequence: Synthetic oligonucleotide
acuugcgucguuuggccgg

SEQ ID NO: 2812911 - RNA, 19 nt, Artificial Sequence
  Description of Artificial Sequence: Synthetic oligonucleotide
uaggucuugcgcaauggga

SEQ ID NO: 2812912 - RNA, 19 nt, Artificial Sequence
  Description of Artificial Sequence: Synthetic oligonucleotide
cuaucaauggcacucugca

SEQ ID NO: 2812913 - RNA, 19 nt, Artificial Sequence
  Description of Artificial Sequence: Synthetic oligonucleotide
ugcugcagguuaaggaugc

SEQ ID NO: 2812914 - RNA, 19 nt, Artificial Sequence
  Description of Artificial Sequence: Synthetic oligonucleotide
ucgcggaucagcccacugg

SEQ ID NO: 2812915 - RNA, 19 nt, Artificial Sequence
  Description of Artificial Sequence: Synthetic oligonucleotide
ugucacuagagaagcuggc

SEQ ID NO: 2812916 - RNA, 19 nt, Artificial Sequence
  Description of Artificial Sequence: Synthetic oligonucleotide
guacaguucguccuccacc

SEQ ID NO: 2812917 - RNA, 19 nt, Artificial Sequence
  Description of Artificial Sequence: Synthetic oligonucleotide
agcguaucguccugcgggc

SEQ ID NO: 2812918 - RNA, 19 nt, Artificial Sequence
  Description of Artificial Sequence: Synthetic oligonucleotide
ucugugagcguaucguccu

SEQ ID NO: 2812919 - RNA, 19 nt, Artificial Sequence
  Description of Artificial Sequence: Synthetic oligonucleotide
cucugugagcguaucgucc

SEQ ID NO: 2812920 - RNA, 19 nt, Artificial Sequence
  Description of Artificial Sequence: Synthetic oligonucleotide
uugagaacacgcugguaca

SEQ ID NO: 2812921 - RNA, 19 nt, Artificial Sequence
  Description of Artificial Sequence: Synthetic oligonucleotide
auggucuagagugccauuc

SEQ ID NO: 2812922 - RNA, 19 nt, Artificial Sequence
  Description of Artificial Sequence: Synthetic oligonucleotide
guaggucuugcgcaauggg

SEQ ID NO: 2812923 - RNA, 19 nt, Artificial Sequence
  Description of Artificial Sequence: Synthetic oligonucleotide
aaugcucugugagcguauc

SEQ ID NO: 2812924 - RNA, 19 nt, Artificial Sequence
  Description of Artificial Sequence: Synthetic oligonucleotide
uuggcaggcaguggggucg

SEQ ID NO: 2812925 - RNA, 19 nt, Artificial Sequence
  Description of Artificial Sequence: Synthetic oligonucleotide
ugagcguaucguccugcgg

SEQ ID NO: 2812926 - RNA, 19 nt, Artificial Sequence
  Description of Artificial Sequence: Synthetic oligonucleotide
gugagggcggagcagggcg

SEQ ID NO: 2812927 - RNA, 19 nt, Artificial Sequence
  Description of Artificial Sequence: Synthetic oligonucleotide
ggcacgguggguuugcgcg

SEQ ID NO: 2812928 - RNA, 19 nt, Artificial Sequence
  Description of Artificial Sequence: Synthetic oligonucleotide
ucggacuugcgucguuugg

SEQ ID NO: 2812929 - RNA, 19 nt, Artificial Sequence
  Description of Artificial Sequence: Synthetic oligonucleotide
auucaucugcgccugcgug

SEQ ID NO: 2812930 - RNA, 19 nt, Artificial Sequence
  Description of Artificial Sequence: Synthetic oligonucleotide
caccuuggcaggcaguggg

SEQ ID NO: 2812931 - RNA, 19 nt, Artificial Sequence
  Description of Artificial Sequence: Synthetic oligonucleotide
aggucuugcgcaaugggag

SEQ ID NO: 2812932 - RNA, 19 nt, Artificial Sequence
  Description of Artificial Sequence: Synthetic oligonucleotide
cugcaaaugcucugugagc

SEQ ID NO: 2812933 - RNA, 19 nt, Artificial Sequence
  Description of Artificial Sequence: Synthetic oligonucleotide
ugagaacacgcugguacag

SEQ ID NO: 2812934 - RNA, 19 nt, Artificial Sequence
  Description of Artificial Sequence: Synthetic oligonucleotide
acuagagaagcuggccugg

SEQ ID NO: 2812935 - RNA, 19 nt, Artificial Sequence
  Description of Artificial Sequence: Synthetic oligonucleotide
uggucuagagugccauuca

SEQ ID NO: 2812936 - RNA, 19 nt, Artificial Sequence
  Description of Artificial Sequence: Synthetic oligonucleotide
cacuagagaagcuggccug

SEQ ID NO: 2812937 - RNA, 19 nt, Artificial Sequence
  Description of Artificial Sequence: Synthetic oligonucleotide
aggaugcuaucaauggcac

SEQ ID NO: 2812938 - RNA, 19 nt, Artificial Sequence
  Description of Artificial Sequence: Synthetic oligonucleotide
gacuugcgucguuuggccg

SEQ ID NO: 2812939 - RNA, 19 nt, Artificial Sequence
  Description of Artificial Sequence: Synthetic oligonucleotide
ucaauggcacucugcaaau

SEQ ID NO: 2812940 - RNA, 19 nt, Artificial Sequence
  Description of Artificial Sequence: Synthetic oligonucleotide
ugcucugugagcguaucgu

SEQ ID NO: 2812941 - RNA, 19 nt, Artificial Sequence
  Description of Artificial Sequence: Synthetic oligonucleotide
cucgcgguaggucuugcgc

SEQ ID NO: 2812942 - RNA, 19 nt, Artificial Sequence
  Description of Artificial Sequence: Synthetic oligonucleotide
agguuaaggaugcuaucaa

SEQ ID NO: 2812943 - RNA, 19 nt, Artificial Sequence
  Description of Artificial Sequence: Synthetic oligonucleotide
cagggugcgggcacggugg

SEQ ID NO: 2812944 - RNA, 19 nt, Artificial Sequence
  Description of Artificial Sequence: Synthetic oligonucleotide
gccucguccaccuuggcag

SEQ ID NO: 2812945 - RNA, 19 nt, Artificial Sequence
  Description of Artificial Sequence: Synthetic oligonucleotide
acugguggccucguccacc

SEQ ID NO: 2812946 - RNA, 19 nt, Artificial Sequence
  Description of Artificial Sequence: Synthetic oligonucleotide
uccaccuuggcaggcagug

SEQ ID NO: 2812947 - RNA, 19 nt, Artificial Sequence
  Description of Artificial Sequence: Synthetic oligonucleotide
gcaggugggagugagggcg

SEQ ID NO: 2812948 - RNA, 19 nt, Artificial Sequence
  Description of Artificial Sequence: Synthetic oligonucleotide
ugggccgcccuugagaaca

SEQ ID NO: 2812949 - RNA, 19 nt, Artificial Sequence
  Description of Artificial Sequence: Synthetic oligonucleotide
uaucaauggcacucugcaa

SEQ ID NO: 2812950 - RNA, 19 nt, Artificial Sequence
  Description of Artificial Sequence: Synthetic oligonucleotide
ugcgcaaugggaggcgcgg

SEQ ID NO: 2812951 - RNA, 19 nt, Artificial Sequence
  Description of Artificial Sequence: Synthetic oligonucleotide
ugcuaucaauggcacucug

SEQ ID NO: 2812952 - RNA, 19 nt, Artificial Sequence
  Description of Artificial Sequence: Synthetic oligonucleotide
ucuugcgcaaugggaggcg

SEQ ID NO: 2812953 - RNA, 19 nt, Artificial Sequence
  Description of Artificial Sequence: Synthetic oligonucleotide
gucacuagagaagcuggcc

SEQ ID NO: 2812954 - RNA, 19 nt, Artificial Sequence
  Description of Artificial Sequence: Synthetic oligonucleotide
ucgcgguaggucuugcgca

SEQ ID NO: 2812955 - RNA, 19 nt, Artificial Sequence
  Description of Artificial Sequence: Synthetic oligonucleotide
augcucugugagcguaucg

SEQ ID NO: 2812956 - RNA, 19 nt, Artificial Sequence
  Description of Artificial Sequence: Synthetic oligonucleotide
uugcgcaaugggaggcgcg

SEQ ID NO: 2812957 - RNA, 19 nt, Artificial Sequence
  Description of Artificial Sequence: Synthetic oligonucleotide
cuagagugccauucaucug

SEQ ID NO: 2812958 - RNA, 19 nt, Artificial Sequence
  Description of Artificial Sequence: Synthetic oligonucleotide
ugggagugagggcggagca

SEQ ID NO: 2812959 - RNA, 19 nt, Artificial Sequence
  Description of Artificial Sequence: Synthetic oligonucleotide
uggugggccgcccuugaga

SEQ ID NO: 2812960 - RNA, 19 nt, Artificial Sequence
  Description of Artificial Sequence: Synthetic oligonucleotide
acaguucguccuccaccgc

SEQ ID NO: 2812961 - RNA, 19 nt, Artificial Sequence
  Description of Artificial Sequence: Synthetic oligonucleotide
guggggucggggcugcucg

SEQ ID NO: 2812962 - RNA, 19 nt, Artificial Sequence
  Description of Artificial Sequence: Synthetic oligonucleotide
agaacacgcugguacaguu

SEQ ID NO: 2812963 - RNA, 19 nt, Artificial Sequence
  Description of Artificial Sequence: Synthetic oligonucleotide
cagguuaaggaugcuauca

SEQ ID NO: 2812964 - RNA, 19 nt, Artificial Sequence
  Description of Artificial Sequence: Synthetic oligonucleotide
gugagcguaucguccugcg

SEQ ID NO: 2812965 - RNA, 19 nt, Artificial Sequence
  Description of Artificial Sequence: Synthetic oligonucleotide
ugugagcguaucguccugc

SEQ ID NO: 2812966 - RNA, 19 nt, Artificial Sequence
  Description of Artificial Sequence: Synthetic oligonucleotide
ucaucugcgccugcguggc

SEQ ID NO: 2812967 - RNA, 19 nt, Artificial Sequence
  Description of Artificial Sequence: Synthetic oligonucleotide
agcuggguucgguggggcc

SEQ ID NO: 2812968 - RNA, 19 nt, Artificial Sequence
  Description of Artificial Sequence: Synthetic oligonucleotide
ucucgcgguaggucuugcg

SEQ ID NO: 2812969 - RNA, 19 nt, Artificial Sequence
  Description of Artificial Sequence: Synthetic oligonucleotide
agcgcgggugcuucccagc

SEQ ID NO: 2812970 - RNA, 19 nt, Artificial Sequence
  Description of Artificial Sequence: Synthetic oligonucleotide
agugagggcggagcagggc

SEQ ID NO: 2812971 - RNA, 19 nt, Artificial Sequence
  Description of Artificial Sequence: Synthetic oligonucleotide
gucgcccaaguucucgcgg

SEQ ID NO: 2812972 - RNA, 19 nt, Artificial Sequence
  Description of Artificial Sequence: Synthetic oligonucleotide
caggcaguggggucggggc

SEQ ID NO: 2812973 - RNA, 19 nt, Artificial Sequence
  Description of Artificial Sequence: Synthetic oligonucleotide
gggacucggacuugcgucg

SEQ ID NO: 2812974 - RNA, 19 nt, Artificial Sequence
  Description of Artificial Sequence: Synthetic oligonucleotide
accgcagccagcucgcgga

SEQ ID NO: 2812975 - RNA, 19 nt, Artificial Sequence
  Description of Artificial Sequence: Synthetic oligonucleotide
ggucuugcgcaaugggagg

SEQ ID NO: 2812976 - RNA, 19 nt, Artificial Sequence
  Description of Artificial Sequence: Synthetic oligonucleotide
ugggucgcccaaguucucg

SEQ ID NO: 2812977 - RNA, 19 nt, Artificial Sequence
  Description of Artificial Sequence: Synthetic oligonucleotide
ggagugagggcggagcagg

SEQ ID NO: 2812978 - RNA, 19 nt, Artificial Sequence
  Description of Artificial Sequence: Synthetic oligonucleotide
agagugccauucaucugcg

SEQ ID NO: 2812979 - RNA, 19 nt, Artificial Sequence
  Description of Artificial Sequence: Synthetic oligonucleotide
uagagaagcuggccugguc

SEQ ID NO: 2812980 - RNA, 19 nt, Artificial Sequence
  Description of Artificial Sequence: Synthetic oligonucleotide
ucguccugcgggcugucac

SEQ ID NO: 2812981 - RNA, 19 nt, Artificial Sequence
  Description of Artificial Sequence: Synthetic oligonucleotide
gcugucacuagagaagcug

SEQ ID NO: 2812982 - RNA, 19 nt, Artificial Sequence
  Description of Artificial Sequence: Synthetic oligonucleotide
ucugcgccugcguggcagg

SEQ ID NO: 2812983 - RNA, 19 nt, Artificial Sequence
  Description of Artificial Sequence: Synthetic oligonucleotide
gguaggucuugcgcaaugg

SEQ ID NO: 2812984 - RNA, 19 nt, Artificial Sequence
  Description of Artificial Sequence: Synthetic oligonucleotide
ggacuugcgucguuuggcc

SEQ ID NO: 2812985 - RNA, 19 nt, Artificial Sequence
  Description of Artificial Sequence: Synthetic oligonucleotide
ugcguggcaggugggagug

SEQ ID NO: 2812986 - RNA, 19 nt, Artificial Sequence
  Description of Artificial Sequence: Synthetic oligonucleotide
ugcuucccagcuggguucg

SEQ ID NO: 2812987 - RNA, 19 nt, Artificial Sequence
  Description of Artificial Sequence: Synthetic oligonucleotide
ugcgggcugucacuagaga

SEQ ID NO: 2812988 - RNA, 19 nt, Artificial Sequence
  Description of Artificial Sequence: Synthetic oligonucleotide
ugccauucaucugcgccug

SEQ ID NO: 2812989 - RNA, 19 nt, Artificial Sequence
  Description of Artificial Sequence: Synthetic oligonucleotide
aguucguccuccaccgcag

SEQ ID NO: 2812990 - RNA, 19 nt, Artificial Sequence
  Description of Artificial Sequence: Synthetic oligonucleotide
gcgggugcuucccagcugg

SEQ ID NO: 2812991 - RNA, 19 nt, Artificial Sequence
  Description of Artificial Sequence: Synthetic oligonucleotide
gaucagcccacugguggcc

SEQ ID NO: 2812992 - RNA, 19 nt, Artificial Sequence
  Description of Artificial Sequence: Synthetic oligonucleotide
ucgcccaaguucucgcggu

SEQ ID NO: 2812993 - RNA, 19 nt, Artificial Sequence
  Description of Artificial Sequence: Synthetic oligonucleotide
guuugcgcgcugcgggcgg

SEQ ID NO: 2812994 - RNA, 19 nt, Artificial Sequence
  Description of Artificial Sequence: Synthetic oligonucleotide
cucugcaaaugcucuguga

SEQ ID NO: 2812995 - RNA, 19 nt, Artificial Sequence
  Description of Artificial Sequence: Synthetic oligonucleotide
cuuggcaggcagugggguc

SEQ ID NO: 2812996 - RNA, 19 nt, Artificial Sequence
  Description of Artificial Sequence: Synthetic oligonucleotide
caaugggaggcgcgggcag

SEQ ID NO: 2812997 - RNA, 19 nt, Artificial Sequence
  Description of Artificial Sequence: Synthetic oligonucleotide
ggaucagcccacugguggc

SEQ ID NO: 2812998 - RNA, 19 nt, Artificial Sequence
  Description of Artificial Sequence: Synthetic oligonucleotide
gcuaucaauggcacucugc

SEQ ID NO: 2812999 - RNA, 19 nt, Artificial Sequence
  Description of Artificial Sequence: Synthetic oligonucleotide
gucuagagugccauucauc

SEQ ID NO: 2813000 - RNA, 19 nt, Artificial Sequence
  Description of Artificial Sequence: Synthetic oligonucleotide
agaagcuggccugguccac

SEQ ID NO: 2813001 - RNA, 19 nt, Artificial Sequence
  Description of Artificial Sequence: Synthetic oligonucleotide
ugguacaguucguccucca

SEQ ID NO: 2813002 - RNA, 19 nt, Artificial Sequence
  Description of Artificial Sequence: Synthetic oligonucleotide
cucggacuugcgucguuug

SEQ ID NO: 2813003 - RNA, 19 nt, Artificial Sequence
  Description of Artificial Sequence: Synthetic oligonucleotide
ggccugguccacaucaggg

SEQ ID NO: 2813004 - RNA, 19 nt, Artificial Sequence
  Description of Artificial Sequence: Synthetic oligonucleotide
gucuugcgcaaugggaggc

SEQ ID NO: 2813005 - RNA, 19 nt, Artificial Sequence
  Description of Artificial Sequence: Synthetic oligonucleotide
gcccugugcacccucggcg

SEQ ID NO: 2813006 - RNA, 19 nt, Artificial Sequence
  Description of Artificial Sequence: Synthetic oligonucleotide
gguggccucguccaccuug

SEQ ID NO: 2813007 - RNA, 19 nt, Artificial Sequence
  Description of Artificial Sequence: Synthetic oligonucleotide
aaaugcucugugagcguau

SEQ ID NO: 2813008 - RNA, 19 nt, Artificial Sequence
  Description of Artificial Sequence: Synthetic oligonucleotide
caggugggagugagggcgg

SEQ ID NO: 2813009 - RNA, 19 nt, Artificial Sequence
  Description of Artificial Sequence: Synthetic oligonucleotide
gcuggccugguccacauca

SEQ ID NO: 2813010 - RNA, 19 nt, Artificial Sequence
  Description of Artificial Sequence: Synthetic oligonucleotide
cuugcgcaaugggaggcgc

SEQ ID NO: 2813011 - RNA, 19 nt, Artificial Sequence
  Description of Artificial Sequence: Synthetic oligonucleotide
aucugcgccugcguggcag

SEQ ID NO: 2813012 - RNA, 19 nt, Artificial Sequence
  Description of Artificial Sequence: Synthetic oligonucleotide
aagcuggccugguccacau

SEQ ID NO: 2813013 - RNA, 19 nt, Artificial Sequence
  Description of Artificial Sequence: Synthetic oligonucleotide
cuugcgucguuuggccggg

SEQ ID NO: 2813014 - RNA, 19 nt, Artificial Sequence
  Description of Artificial Sequence: Synthetic oligonucleotide
gaacacgcugguacaguuc

SEQ ID NO: 2813015 - RNA, 19 nt, Artificial Sequence
  Description of Artificial Sequence: Synthetic oligonucleotide
guggguuugcgcgcugcgg

SEQ ID NO: 2813016 - RNA, 19 nt, Artificial Sequence
  Description of Artificial Sequence: Synthetic oligonucleotide
ggggacucggacuugcguc

SEQ ID NO: 2813017 - RNA, 19 nt, Artificial Sequence
  Description of Artificial Sequence: Synthetic oligonucleotide
gugcuucccagcuggguuc

SEQ ID NO: 2813018 - RNA, 19 nt, Artificial Sequence
  Description of Artificial Sequence: Synthetic oligonucleotide
gagugagggcggagcaggg

SEQ ID NO: 2813019 - RNA, 19 nt, Artificial Sequence
  Description of Artificial Sequence: Synthetic oligonucleotide
cggaucagcccacuggugg

SEQ ID NO: 2813020 - RNA, 19 nt, Artificial Sequence
  Description of Artificial Sequence: Synthetic oligonucleotide
gguacaguucguccuccac

SEQ ID NO: 2813021 - RNA, 19 nt, Artificial Sequence
  Description of Artificial Sequence: Synthetic oligonucleotide
cuggccugguccacaucag

SEQ ID NO: 2813022 - RNA, 19 nt, Artificial Sequence
  Description of Artificial Sequence: Synthetic oligonucleotide
gggcugucacuagagaagc

SEQ ID NO: 2813023 - RNA, 19 nt, Artificial Sequence
  Description of Artificial Sequence: Synthetic oligonucleotide
gguggguuugcgcgcugcg

SEQ ID NO: 2813024 - RNA, 19 nt, Artificial Sequence
  Description of Artificial Sequence: Synthetic oligonucleotide
cacgcugguacaguucguc

SEQ ID NO: 2813025 - RNA, 19 nt, Artificial Sequence
  Description of Artificial Sequence: Synthetic oligonucleotide
caguucguccuccaccgca

SEQ ID NO: 2813026 - RNA, 19 nt, Artificial Sequence
  Description of Artificial Sequence: Synthetic oligonucleotide
gagugccauucaucugcgc

SEQ ID NO: 2813027 - RNA, 19 nt, Artificial Sequence
  Description of Artificial Sequence: Synthetic oligonucleotide
ggucgcccaaguucucgcg

SEQ ID NO: 2813028 - RNA, 19 nt, Artificial Sequence
  Description of Artificial Sequence: Synthetic oligonucleotide
guggggcccuggcuggugg

SEQ ID NO: 2813029 - RNA, 19 nt, Artificial Sequence
  Description of Artificial Sequence: Synthetic oligonucleotide
gagcgcgggugcuucccag

SEQ ID NO: 2813030 - RNA, 19 nt, Artificial Sequence
  Description of Artificial Sequence: Synthetic oligonucleotide
gugccauucaucugcgccu

SEQ ID NO: 2813031 - RNA, 19 nt, Artificial Sequence
  Description of Artificial Sequence: Synthetic oligonucleotide
augggaggcgcgggcaggg

SEQ ID NO: 2813032 - RNA, 19 nt, Artificial Sequence
  Description of Artificial Sequence: Synthetic oligonucleotide
aguggggucggggcugcuc

SEQ ID NO: 2813033 - RNA, 19 nt, Artificial Sequence
  Description of Artificial Sequence: Synthetic oligonucleotide
accuuggcaggcagugggg

SEQ ID NO: 2813034 - RNA, 19 nt, Artificial Sequence
  Description of Artificial Sequence: Synthetic oligonucleotide
caauggcacucugcaaaug

SEQ ID NO: 2813035 - RNA, 19 nt, Artificial Sequence
  Description of Artificial Sequence: Synthetic oligonucleotide
gaagcuggccugguccaca

SEQ ID NO: 2813036 - RNA, 19 nt, Artificial Sequence
  Description of Artificial Sequence: Synthetic oligonucleotide
ucggcggcggccccugggu

SEQ ID NO: 2813037 - RNA, 19 nt, Artificial Sequence
  Description of Artificial Sequence: Synthetic oligonucleotide
gcgccugcguggcaggugg

SEQ ID NO: 2813038 - RNA, 19 nt, Artificial Sequence
  Description of Artificial Sequence: Synthetic oligonucleotide
uuugcgcgcugcgggcggg

SEQ ID NO: 2813039 - RNA, 19 nt, Artificial Sequence
  Description of Artificial Sequence: Synthetic oligonucleotide
uccugcgggcugucacuag

SEQ ID NO: 2813040 - RNA, 19 nt, Artificial Sequence
  Description of Artificial Sequence: Synthetic oligonucleotide
cccacugguggccucgucc

SEQ ID NO: 2813041 - RNA, 19 nt, Artificial Sequence
  Description of Artificial Sequence: Synthetic oligonucleotide
cagcucgcggaucagccca

SEQ ID NO: 2813042 - RNA, 19 nt, Artificial Sequence
  Description of Artificial Sequence: Synthetic oligonucleotide
cgggcugucacuagagaag

SEQ ID NO: 2813043 - RNA, 19 nt, Artificial Sequence
  Description of Artificial Sequence: Synthetic oligonucleotide
guucguccuccaccgcagc

SEQ ID NO: 2813044 - RNA, 19 nt, Artificial Sequence
  Description of Artificial Sequence: Synthetic oligonucleotide
gcugcucgcaccccgcggc

SEQ ID NO: 2813045 - RNA, 19 nt, Artificial Sequence
  Description of Artificial Sequence: Synthetic oligonucleotide
ugcucgcaccccgcggccg

SEQ ID NO: 2813046 - RNA, 19 nt, Artificial Sequence
  Description of Artificial Sequence: Synthetic oligonucleotide
cugugcacccucggcggcg

SEQ ID NO: 2813047 - RNA, 19 nt, Artificial Sequence
  Description of Artificial Sequence: Synthetic oligonucleotide
gcagguuaaggaugcuauc

SEQ ID NO: 2813048 - RNA, 19 nt, Artificial Sequence
  Description of Artificial Sequence: Synthetic oligonucleotide
caaaugcucugugagcgua

SEQ ID NO: 2813049 - RNA, 19 nt, Artificial Sequence
  Description of Artificial Sequence: Synthetic oligonucleotide
cccugugcacccucggcgg

SEQ ID NO: 2813050 - RNA, 19 nt, Artificial Sequence
  Description of Artificial Sequence: Synthetic oligonucleotide
gguuaaggaugcuaucaau

SEQ ID NO: 2813051 - RNA, 19 nt, Artificial Sequence
  Description of Artificial Sequence: Synthetic oligonucleotide
ccauucaucugcgccugcg

SEQ ID NO: 2813052 - RNA, 19 nt, Artificial Sequence
  Description of Artificial Sequence: Synthetic oligonucleotide
ggugggccgcccuugagaa

SEQ ID NO: 2813053 - RNA, 19 nt, Artificial Sequence
  Description of Artificial Sequence: Synthetic oligonucleotide
gguuugcgcgcugcgggcg

SEQ ID NO: 2813054 - RNA, 19 nt, Artificial Sequence
  Description of Artificial Sequence: Synthetic oligonucleotide
gcagccagcucgcggauca

SEQ ID NO: 2813055 - RNA, 19 nt, Artificial Sequence
  Description of Artificial Sequence: Synthetic oligonucleotide
uggcaggcaguggggucgg

SEQ ID NO: 2813056 - RNA, 19 nt, Artificial Sequence
  Description of Artificial Sequence: Synthetic oligonucleotide
gcucugugagcguaucguc

SEQ ID NO: 2813057 - RNA, 19 nt, Artificial Sequence
  Description of Artificial Sequence: Synthetic oligonucleotide
agcuggccugguccacauc

SEQ ID NO: 2813058 - RNA, 19 nt, Artificial Sequence
  Description of Artificial Sequence: Synthetic oligonucleotide
cucgcggaucagcccacug

SEQ ID NO: 2813059 - RNA, 19 nt, Artificial Sequence
  Description of Artificial Sequence: Synthetic oligonucleotide
cccugggucgcccaaguuc

SEQ ID NO: 2813060 - RNA, 19 nt, Artificial Sequence
  Description of Artificial Sequence: Synthetic oligonucleotide
ugcacccucggcggcggcc

SEQ ID NO: 2813061 - RNA, 19 nt, Artificial Sequence
  Description of Artificial Sequence: Synthetic oligonucleotide
guucucgcgguaggucuug

SEQ ID NO: 2813062 - RNA, 19 nt, Artificial Sequence
  Description of Artificial Sequence: Synthetic oligonucleotide
gggucgcccaaguucucgc

SEQ ID NO: 2813063 - RNA, 19 nt, Artificial Sequence
  Description of Artificial Sequence: Synthetic oligonucleotide
gguucgguggggcccuggc

SEQ ID NO: 2813064 - RNA, 19 nt, Artificial Sequence
  Description of Artificial Sequence: Synthetic oligonucleotide
ggcggcggccccugggucg

SEQ ID NO: 2813065 - RNA, 19 nt, Artificial Sequence
  Description of Artificial Sequence: Synthetic oligonucleotide
cucggcggcggccccuggg

SEQ ID NO: 2813066 - RNA, 19 nt, Artificial Sequence
  Description of Artificial Sequence: Synthetic oligonucleotide
gagaacacgcugguacagu

SEQ ID NO: 2813067 - RNA, 19 nt, Artificial Sequence
  Description of Artificial Sequence: Synthetic oligonucleotide
gcagggugcgggcacggug

SEQ ID NO: 2813068 - RNA, 19 nt, Artificial Sequence
  Description of Artificial Sequence: Synthetic oligonucleotide
gcgggcugucacuagagaa

SEQ ID NO: 2813069 - RNA, 19 nt, Artificial Sequence
  Description of Artificial Sequence: Synthetic oligonucleotide
uucucgcgguaggucuugc

SEQ ID NO: 2813070 - RNA, 19 nt, Artificial Sequence
  Description of Artificial Sequence: Synthetic oligonucleotide
cucguccaccuuggcaggc

SEQ ID NO: 2813071 - RNA, 19 nt, Artificial Sequence
  Description of Artificial Sequence: Synthetic oligonucleotide
uggggucggggcugcucgc

SEQ ID NO: 2813072 - RNA, 19 nt, Artificial Sequence
  Description of Artificial Sequence: Synthetic oligonucleotide
gcuggguucgguggggccc

SEQ ID NO: 2813073 - RNA, 19 nt, Artificial Sequence
  Description of Artificial Sequence: Synthetic oligonucleotide
cagcccacugguggccucg

SEQ ID NO: 2813074 - RNA, 19 nt, Artificial Sequence
  Description of Artificial Sequence: Synthetic oligonucleotide
ggguuugcgcgcugcgggc

SEQ ID NO: 2813075 - RNA, 19 nt, Artificial Sequence
  Description of Artificial Sequence: Synthetic oligonucleotide
agcucgcggaucagcccac

SEQ ID NO: 2813076 - RNA, 19 nt, Artificial Sequence
  Description of Artificial Sequence: Synthetic oligonucleotide
ggcaggugggagugagggc

SEQ ID NO: 2813077 - RNA, 19 nt, Artificial Sequence
  Description of Artificial Sequence: Synthetic oligonucleotide
aucagcccacugguggccu

SEQ ID NO: 2813078 - RNA, 19 nt, Artificial Sequence
  Description of Artificial Sequence: Synthetic oligonucleotide
ugcgccugcguggcaggug

SEQ ID NO: 2813079 - RNA, 19 nt, Artificial Sequence
  Description of Artificial Sequence: Synthetic oligonucleotide
acucggacuugcgucguuu

SEQ ID NO: 2813080 - RNA, 19 nt, Artificial Sequence
  Description of Artificial Sequence: Synthetic oligonucleotide
cccagcuggguucgguggg

SEQ ID NO: 2813081 - RNA, 19 nt, Artificial Sequence
  Description of Artificial Sequence: Synthetic oligonucleotide
cugcucgcaccccgcggcc

SEQ ID NO: 2813082 - RNA, 19 nt, Artificial Sequence
  Description of Artificial Sequence: Synthetic oligonucleotide
ggcugcucgcaccccgcgg

SEQ ID NO: 2813083 - RNA, 19 nt, Artificial Sequence
  Description of Artificial Sequence: Synthetic oligonucleotide
ugcgggcacgguggguuug

SEQ ID NO: 2813084 - RNA, 19 nt, Artificial Sequence
  Description of Artificial Sequence: Synthetic oligonucleotide
ggaggcgcgggcagggugc

SEQ ID NO: 2813085 - RNA, 19 nt, Artificial Sequence
  Description of Artificial Sequence: Synthetic oligonucleotide
gagggcggagcagggcgug

SEQ ID NO: 2813086 - RNA, 19 nt, Artificial Sequence
  Description of Artificial Sequence: Synthetic oligonucleotide
cauucaucugcgccugcgu

SEQ ID NO: 2813087 - RNA, 19 nt, Artificial Sequence
  Description of Artificial Sequence: Synthetic oligonucleotide
ggcgcgggcagggugcggg

SEQ ID NO: 2813088 - RNA, 19 nt, Artificial Sequence
  Description of Artificial Sequence: Synthetic oligonucleotide
ccucguccaccuuggcagg

SEQ ID NO: 2813089 - RNA, 19 nt, Artificial Sequence
  Description of Artificial Sequence: Synthetic oligonucleotide
gauggucuagagugccauu

SEQ ID NO: 2813090 - RNA, 19 nt, Artificial Sequence
  Description of Artificial Sequence: Synthetic oligonucleotide
ccagcucgcggaucagccc

SEQ ID NO: 2813091 - RNA, 19 nt, Artificial Sequence
  Description of Artificial Sequence: Synthetic oligonucleotide
ggucggggcugcucgcacc

SEQ ID NO: 2813092 - RNA, 19 nt, Artificial Sequence
  Description of Artificial Sequence: Synthetic oligonucleotide
ggccucguccaccuuggca

SEQ ID NO: 2813093 - RNA, 19 nt, Artificial Sequence
  Description of Artificial Sequence: Synthetic oligonucleotide
cacucugcaaaugcucugu

SEQ ID NO: 2813094 - RNA, 19 nt, Artificial Sequence
  Description of Artificial Sequence: Synthetic oligonucleotide
gccgcccuugagaacacgc

SEQ ID NO: 2813095 - RNA, 19 nt, Artificial Sequence
  Description of Artificial Sequence: Synthetic oligonucleotide
gggagugagggcggagcag

SEQ ID NO: 2813096 - RNA, 19 nt, Artificial Sequence
  Description of Artificial Sequence: Synthetic oligonucleotide
aguucucgcgguaggucuu

SEQ ID NO: 2813097 - RNA, 19 nt, Artificial Sequence
  Description of Artificial Sequence: Synthetic oligonucleotide
cugcagguuaaggaugcua

SEQ ID NO: 2813098 - RNA, 19 nt, Artificial Sequence
  Description of Artificial Sequence: Synthetic oligonucleotide
ggcccugugcacccucggc

SEQ ID NO: 2813099 - RNA, 19 nt, Artificial Sequence
  Description of Artificial Sequence: Synthetic oligonucleotide
uggggcccuggcugguggu

SEQ ID NO: 2813100 - RNA, 19 nt, Artificial Sequence
  Description of Artificial Sequence: Synthetic oligonucleotide
gcacgguggguuugcgcgc

SEQ ID NO: 2813101 - RNA, 19 nt, Artificial Sequence
  Description of Artificial Sequence: Synthetic oligonucleotide
ggggcuccgccccuuucgc

SEQ ID NO: 2813102 - RNA, 19 nt, Artificial Sequence
  Description of Artificial Sequence: Synthetic oligonucleotide
gcccaaguucucgcgguag

SEQ ID NO: 2813103 - RNA, 19 nt, Artificial Sequence
  Description of Artificial Sequence: Synthetic oligonucleotide
gggaggcgcgggcagggug

SEQ ID NO: 2813104 - RNA, 19 nt, Artificial Sequence
  Description of Artificial Sequence: Synthetic oligonucleotide
cggacuugcgucguuuggc

SEQ ID NO: 2813105 - RNA, 19 nt, Artificial Sequence
  Description of Artificial Sequence: Synthetic oligonucleotide
ggugcuucccagcuggguu

SEQ ID NO: 2813106 - RNA, 19 nt, Artificial Sequence
  Description of Artificial Sequence: Synthetic oligonucleotide
agggcggagcagggcgugg

SEQ ID NO: 2813107 - RNA, 19 nt, Artificial Sequence
  Description of Artificial Sequence: Synthetic oligonucleotide
uugcgcgcugcgggcgggg

SEQ ID NO: 2813108 - RNA, 19 nt, Artificial Sequence
  Description of Artificial Sequence: Synthetic oligonucleotide
gcucgcaccccgcggccgg

SEQ ID NO: 2813109 - RNA, 19 nt, Artificial Sequence
  Description of Artificial Sequence: Synthetic oligonucleotide
gggcacgguggguuugcgc

SEQ ID NO: 2813110 - RNA, 19 nt, Artificial Sequence
  Description of Artificial Sequence: Synthetic oligonucleotide
ccugggucgcccaaguucu

SEQ ID NO: 2813111 - RNA, 19 nt, Artificial Sequence
  Description of Artificial Sequence: Synthetic oligonucleotide
cgcccuugagaacacgcug

SEQ ID NO: 2813112 - RNA, 19 nt, Artificial Sequence
  Description of Artificial Sequence: Synthetic oligonucleotide
ggucuagagugccauucau

SEQ ID NO: 2813113 - RNA, 19 nt, Artificial Sequence
  Description of Artificial Sequence: Synthetic oligonucleotide
cugggucgcccaaguucuc

SEQ ID NO: 2813114 - RNA, 19 nt, Artificial Sequence
  Description of Artificial Sequence: Synthetic oligonucleotide
gggcccuggcugguggugg

SEQ ID NO: 2813115 - RNA, 19 nt, Artificial Sequence
  Description of Artificial Sequence: Synthetic oligonucleotide
uugcgucguuuggccgggg

SEQ ID NO: 2813116 - RNA, 19 nt, Artificial Sequence
  Description of Artificial Sequence: Synthetic oligonucleotide
ggaugcuaucaauggcacu

SEQ ID NO: 2813117 - RNA, 19 nt, Artificial Sequence
  Description of Artificial Sequence: Synthetic oligonucleotide
ccugcguggcaggugggag

SEQ ID NO: 2813118 - RNA, 19 nt, Artificial Sequence
  Description of Artificial Sequence: Synthetic oligonucleotide
acgguggguuugcgcgcug

SEQ ID NO: 2813119 - RNA, 19 nt, Artificial Sequence
  Description of Artificial Sequence: Synthetic oligonucleotide
gcaaugggaggcgcgggca

SEQ ID NO: 2813120 - RNA, 19 nt, Artificial Sequence
  Description of Artificial Sequence: Synthetic oligonucleotide
cguaucguccugcgggcug

SEQ ID NO: 2813121 - RNA, 19 nt, Artificial Sequence
  Description of Artificial Sequence: Synthetic oligonucleotide
guaucguccugcgggcugu

SEQ ID NO: 2813122 - RNA, 19 nt, Artificial Sequence
  Description of Artificial Sequence: Synthetic oligonucleotide
guucgguggggcccuggcu

SEQ ID NO: 2813123 - RNA, 19 nt, Artificial Sequence
  Description of Artificial Sequence: Synthetic oligonucleotide
cgcaaugggaggcgcgggc

SEQ ID NO: 2813124 - RNA, 19 nt, Artificial Sequence
  Description of Artificial Sequence: Synthetic oligonucleotide
gugggccgcccuugagaac

SEQ ID NO: 2813125 - RNA, 19 nt, Artificial Sequence
  Description of Artificial Sequence: Synthetic oligonucleotide
acacgcugguacaguucgu

SEQ ID NO: 2813126 - RNA, 19 nt, Artificial Sequence
  Description of Artificial Sequence: Synthetic oligonucleotide
ccugugcacccucggcggc

SEQ ID NO: 2813127 - RNA, 19 nt, Artificial Sequence
  Description of Artificial Sequence: Synthetic oligonucleotide
gguggugggccgcccuuga

SEQ ID NO: 2813128 - RNA, 19 nt, Artificial Sequence
  Description of Artificial Sequence: Synthetic oligonucleotide
ggauggucuagagugccau

SEQ ID NO: 2813129 - RNA, 19 nt, Artificial Sequence
  Description of Artificial Sequence: Synthetic oligonucleotide
cugcguggcaggugggagu

SEQ ID NO: 2813130 - RNA, 19 nt, Artificial Sequence
  Description of Artificial Sequence: Synthetic oligonucleotide
gcaaaugcucugugagcgu

SEQ ID NO: 2813131 - RNA, 19 nt, Artificial Sequence
  Description of Artificial Sequence: Synthetic oligonucleotide
ucggggcugcucgcacccc

SEQ ID NO: 2813132 - RNA, 19 nt, Artificial Sequence
  Description of Artificial Sequence: Synthetic oligonucleotide
aucguccugcgggcuguca

SEQ ID NO: 2813133 - RNA, 19 nt, Artificial Sequence
  Description of Artificial Sequence: Synthetic oligonucleotide
uaucguccugcgggcuguc

SEQ ID NO: 2813134 - RNA, 19 nt, Artificial Sequence
  Description of Artificial Sequence: Synthetic oligonucleotide
gcgcaaugggaggcgcggg

SEQ ID NO: 2813135 - RNA, 19 nt, Artificial Sequence
  Description of Artificial Sequence: Synthetic oligonucleotide
ccugcgggcugucacuaga

SEQ ID NO: 2813136 - RNA, 19 nt, Artificial Sequence
  Description of Artificial Sequence: Synthetic oligonucleotide
gccauucaucugcgccugc

SEQ ID NO: 2813137 - RNA, 19 nt, Artificial Sequence
  Description of Artificial Sequence: Synthetic oligonucleotide
ccaccuuggcaggcagugg

SEQ ID NO: 2813138 - RNA, 19 nt, Artificial Sequence
  Description of Artificial Sequence: Synthetic oligonucleotide
gggauggucuagagugcca

SEQ ID NO: 2813139 - RNA, 19 nt, Artificial Sequence
  Description of Artificial Sequence: Synthetic oligonucleotide
cguccuccaccgcagccag

SEQ ID NO: 2813140 - RNA, 19 nt, Artificial Sequence
  Description of Artificial Sequence: Synthetic oligonucleotide
gggagcgcgggugcuuccc

SEQ ID NO: 2813141 - RNA, 19 nt, Artificial Sequence
  Description of Artificial Sequence: Synthetic oligonucleotide
cuagagaagcuggccuggu

SEQ ID NO: 2813142 - RNA, 19 nt, Artificial Sequence
  Description of Artificial Sequence: Synthetic oligonucleotide
ccggcccugugcacccucg

SEQ ID NO: 2813143 - RNA, 19 nt, Artificial Sequence
  Description of Artificial Sequence: Synthetic oligonucleotide
cccgcggccggcccugugc

SEQ ID NO: 2813144 - RNA, 19 nt, Artificial Sequence
  Description of Artificial Sequence: Synthetic oligonucleotide
gcggccggcccugugcacc

SEQ ID NO: 2813145 - RNA, 19 nt, Artificial Sequence
  Description of Artificial Sequence: Synthetic oligonucleotide
gggucggggcugcucgcac

SEQ ID NO: 2813146 - RNA, 19 nt, Artificial Sequence
  Description of Artificial Sequence: Synthetic oligonucleotide
ggagcgcgggugcuuccca

SEQ ID NO: 2813147 - RNA, 19 nt, Artificial Sequence
  Description of Artificial Sequence: Synthetic oligonucleotide
gcggaucagcccacuggug

SEQ ID NO: 2813148 - RNA, 19 nt, Artificial Sequence
  Description of Artificial Sequence: Synthetic oligonucleotide
gcacccucggcggcggccc

SEQ ID NO: 2813149 - RNA, 19 nt, Artificial Sequence
  Description of Artificial Sequence: Synthetic oligonucleotide
cguccaccuuggcaggcag

SEQ ID NO: 2813150 - RNA, 19 nt, Artificial Sequence
  Description of Artificial Sequence: Synthetic oligonucleotide
cgguaggucuugcgcaaug

SEQ ID NO: 2813151 - RNA, 19 nt, Artificial Sequence
  Description of Artificial Sequence: Synthetic oligonucleotide
gggcggagcagggcguggc

SEQ ID NO: 2813152 - RNA, 19 nt, Artificial Sequence
  Description of Artificial Sequence: Synthetic oligonucleotide
ggggagcgcgggugcuucc

SEQ ID NO: 2813153 - RNA, 19 nt, Artificial Sequence
  Description of Artificial Sequence: Synthetic oligonucleotide
gcgggcagggugcgggcac

SEQ ID NO: 2813154 - RNA, 19 nt, Artificial Sequence
  Description of Artificial Sequence: Synthetic oligonucleotide
cucgcaccccgcggccggc

SEQ ID NO: 2813155 - RNA, 19 nt, Artificial Sequence
  Description of Artificial Sequence: Synthetic oligonucleotide
cacccucggcggcggcccc

SEQ ID NO: 2813156 - RNA, 19 nt, Artificial Sequence
  Description of Artificial Sequence: Synthetic oligonucleotide
ugguggccucguccaccuu

SEQ ID NO: 2813157 - RNA, 19 nt, Artificial Sequence
  Description of Artificial Sequence: Synthetic oligonucleotide
cuucccagcuggguucggu

SEQ ID NO: 2813158 - RNA, 19 nt, Artificial Sequence
  Description of Artificial Sequence: Synthetic oligonucleotide
ggguucgguggggcccugg

SEQ ID NO: 2813159 - RNA, 19 nt, Artificial Sequence
  Description of Artificial Sequence: Synthetic oligonucleotide
cggggcugcucgcaccccg

SEQ ID NO: 2813160 - RNA, 19 nt, Artificial Sequence
  Description of Artificial Sequence: Synthetic oligonucleotide
ggccgcccuugagaacacg

SEQ ID NO: 2813161 - RNA, 19 nt, Artificial Sequence
  Description of Artificial Sequence: Synthetic oligonucleotide
ggggcugcucgcaccccgc

SEQ ID NO: 2813162 - RNA, 19 nt, Artificial Sequence
  Description of Artificial Sequence: Synthetic oligonucleotide
gcaguggggucggggcugc

SEQ ID NO: 2813163 - RNA, 19 nt, Artificial Sequence
  Description of Artificial Sequence: Synthetic oligonucleotide
uggguucgguggggcccug

SEQ ID NO: 2813164 - RNA, 19 nt, Artificial Sequence
  Description of Artificial Sequence: Synthetic oligonucleotide
gguggggcccuggcuggug

SEQ ID NO: 2813165 - RNA, 19 nt, Artificial Sequence
  Description of Artificial Sequence: Synthetic oligonucleotide
ggugcgggcacgguggguu

SEQ ID NO: 2813166 - RNA, 19 nt, Artificial Sequence
  Description of Artificial Sequence: Synthetic oligonucleotide
ggggcccuggcugguggug

SEQ ID NO: 2813167 - RNA, 19 nt, Artificial Sequence
  Description of Artificial Sequence: Synthetic oligonucleotide
gugcacccucggcggcggc

SEQ ID NO: 2813168 - RNA, 19 nt, Artificial Sequence
  Description of Artificial Sequence: Synthetic oligonucleotide
gcgggcacgguggguuugc

SEQ ID NO: 2813169 - RNA, 19 nt, Artificial Sequence
  Description of Artificial Sequence: Synthetic oligonucleotide
gacucggacuugcgucguu

SEQ ID NO: 2813170 - RNA, 19 nt, Artificial Sequence
  Description of Artificial Sequence: Synthetic oligonucleotide
ggccccugggucgcccaag

SEQ ID NO: 2813171 - RNA, 19 nt, Artificial Sequence
  Description of Artificial Sequence: Synthetic oligonucleotide
caucugcgccugcguggca

SEQ ID NO: 2813172 - RNA, 19 nt, Artificial Sequence
  Description of Artificial Sequence: Synthetic oligonucleotide
caccccgcggccggcccug

SEQ ID NO: 2813173 - RNA, 19 nt, Artificial Sequence
  Description of Artificial Sequence: Synthetic oligonucleotide
gcuucccagcuggguucgg

SEQ ID NO: 2813174 - RNA, 19 nt, Artificial Sequence
  Description of Artificial Sequence: Synthetic oligonucleotide
cgcugguacaguucguccu

SEQ ID NO: 2813175 - RNA, 19 nt, Artificial Sequence
  Description of Artificial Sequence: Synthetic oligonucleotide
cacgguggguuugcgcgcu

SEQ ID NO: 2813176 - RNA, 19 nt, Artificial Sequence
  Description of Artificial Sequence: Synthetic oligonucleotide
cuggguucgguggggcccu

SEQ ID NO: 2813177 - RNA, 19 nt, Artificial Sequence
  Description of Artificial Sequence: Synthetic oligonucleotide
cccuugagaacacgcuggu

SEQ ID NO: 2813178 - RNA, 19 nt, Artificial Sequence
  Description of Artificial Sequence: Synthetic oligonucleotide
gccugcguggcagguggga

SEQ ID NO: 2813179 - RNA, 19 nt, Artificial Sequence
  Description of Artificial Sequence: Synthetic oligonucleotide
cgggugcuucccagcuggg

SEQ ID NO: 2813180 - RNA, 19 nt, Artificial Sequence
  Description of Artificial Sequence: Synthetic oligonucleotide
gcccuggcuggugguggag

SEQ ID NO: 2813181 - RNA, 19 nt, Artificial Sequence
  Description of Artificial Sequence: Synthetic oligonucleotide
ggggucggggcugcucgca

SEQ ID NO: 2813182 - RNA, 19 nt, Artificial Sequence
  Description of Artificial Sequence: Synthetic oligonucleotide
ggcugucacuagagaagcu

SEQ ID NO: 2813183 - RNA, 19 nt, Artificial Sequence
  Description of Artificial Sequence: Synthetic oligonucleotide
gcgcgggcagggugcgggc

SEQ ID NO: 2813184 - RNA, 19 nt, Artificial Sequence
  Description of Artificial Sequence: Synthetic oligonucleotide
ggcaggcaguggggucggg

SEQ ID NO: 2813185 - RNA, 19 nt, Artificial Sequence
  Description of Artificial Sequence: Synthetic oligonucleotide
ccgcccuugagaacacgcu

SEQ ID NO: 2813186 - RNA, 19 nt, Artificial Sequence
  Description of Artificial Sequence: Synthetic oligonucleotide
cgcgguaggucuugcgcaa

SEQ ID NO: 2813187 - RNA, 19 nt, Artificial Sequence
  Description of Artificial Sequence: Synthetic oligonucleotide
gcggcggccccugggucgc

SEQ ID NO: 2813188 - RNA, 19 nt, Artificial Sequence
  Description of Artificial Sequence: Synthetic oligonucleotide
gcgcgggugcuucccagcu

SEQ ID NO: 2813189 - RNA, 19 nt, Artificial Sequence
  Description of Artificial Sequence: Synthetic oligonucleotide
cgguggguuugcgcgcugc

SEQ ID NO: 2813190 - RNA, 19 nt, Artificial Sequence
  Description of Artificial Sequence: Synthetic oligonucleotide
ccuugagaacacgcuggua

SEQ ID NO: 2813191 - RNA, 19 nt, Artificial Sequence
  Description of Artificial Sequence: Synthetic oligonucleotide
gccggcccugugcacccuc

SEQ ID NO: 2813192 - RNA, 19 nt, Artificial Sequence
  Description of Artificial Sequence: Synthetic oligonucleotide
cggcccugugcacccucgg

SEQ ID NO: 2813193 - RNA, 19 nt, Artificial Sequence
  Description of Artificial Sequence: Synthetic oligonucleotide
cggccggcccugugcaccc

SEQ ID NO: 2813194 - RNA, 19 nt, Artificial Sequence
  Description of Artificial Sequence: Synthetic oligonucleotide
cgcgggugcuucccagcug

SEQ ID NO: 2813195 - RNA, 19 nt, Artificial Sequence
  Description of Artificial Sequence: Synthetic oligonucleotide
ggcggccccugggucgccc

SEQ ID NO: 2813196 - RNA, 19 nt, Artificial Sequence
  Description of Artificial Sequence: Synthetic oligonucleotide
ccuuggcaggcaguggggu

SEQ ID NO: 2813197 - RNA, 19 nt, Artificial Sequence
  Description of Artificial Sequence: Synthetic oligonucleotide
ggacucggacuugcgucgu

SEQ ID NO: 2813198 - RNA, 19 nt, Artificial Sequence
  Description of Artificial Sequence: Synthetic oligonucleotide
gugcgggcacgguggguuu

SEQ ID NO: 2813199 - RNA, 19 nt, Artificial Sequence
  Description of Artificial Sequence: Synthetic oligonucleotide
gccccugggucgcccaagu

SEQ ID NO: 2813200 - RNA, 19 nt, Artificial Sequence
  Description of Artificial Sequence: Synthetic oligonucleotide
ccuccaccgcagccagcuc

SEQ ID NO: 2813201 - RNA, 19 nt, Artificial Sequence
  Description of Artificial Sequence: Synthetic oligonucleotide
cgccugcguggcagguggg

SEQ ID NO: 2813202 - RNA, 19 nt, Artificial Sequence
  Description of Artificial Sequence: Synthetic oligonucleotide
gggccgcccuugagaacac

SEQ ID NO: 2813203 - RNA, 19 nt, Artificial Sequence
  Description of Artificial Sequence: Synthetic oligonucleotide
gcccacugguggccucguc

SEQ ID NO: 2813204 - RNA, 19 nt, Artificial Sequence
  Description of Artificial Sequence: Synthetic oligonucleotide
gcugcagguuaaggaugcu

SEQ ID NO: 2813205 - RNA, 19 nt, Artificial Sequence
  Description of Artificial Sequence: Synthetic oligonucleotide
gcggccccugggucgccca

SEQ ID NO: 2813206 - RNA, 19 nt, Artificial Sequence
  Description of Artificial Sequence: Synthetic oligonucleotide
ccgcggccggcccugugca

SEQ ID NO: 2813207 - RNA, 19 nt, Artificial Sequence
  Description of Artificial Sequence: Synthetic oligonucleotide
cgggcacgguggguuugcg

SEQ ID NO: 2813208 - RNA, 19 nt, Artificial Sequence
  Description of Artificial Sequence: Synthetic oligonucleotide
cgcaccccgcggccggccc

SEQ ID NO: 2813209 - RNA, 19 nt, Artificial Sequence
  Description of Artificial Sequence: Synthetic oligonucleotide
gcguaucguccugcgggcu

SEQ ID NO: 2813210 - RNA, 19 nt, Artificial Sequence
  Description of Artificial Sequence: Synthetic oligonucleotide
gggguggugggccgcccuu

SEQ ID NO: 2813211 - RNA, 19 nt, Artificial Sequence
  Description of Artificial Sequence: Synthetic oligonucleotide
cugcgccugcguggcaggu

SEQ ID NO: 2813212 - RNA, 19 nt, Artificial Sequence
  Description of Artificial Sequence: Synthetic oligonucleotide
cccucggcggcggccccug

SEQ ID NO: 2813213 - RNA, 19 nt, Artificial Sequence
  Description of Artificial Sequence: Synthetic oligonucleotide
cgcagccagcucgcggauc

SEQ ID NO: 2813214 - RNA, 19 nt, Artificial Sequence
  Description of Artificial Sequence: Synthetic oligonucleotide
ggcagggugcgggcacggu

SEQ ID NO: 2813215 - RNA, 19 nt, Artificial Sequence
  Description of Artificial Sequence: Synthetic oligonucleotide
gcgguaggucuugcgcaau

SEQ ID NO: 2813216 - RNA, 19 nt, Artificial Sequence
  Description of Artificial Sequence: Synthetic oligonucleotide
cgcggccggcccugugcac

SEQ ID NO: 2813217 - RNA, 19 nt, Artificial Sequence
  Description of Artificial Sequence: Synthetic oligonucleotide
cgcccaaguucucgcggua

SEQ ID NO: 2813218 - RNA, 19 nt, Artificial Sequence
  Description of Artificial Sequence: Synthetic oligonucleotide
gcaccccgcggccggcccu

SEQ ID NO: 2813219 - RNA, 19 nt, Artificial Sequence
  Description of Artificial Sequence: Synthetic oligonucleotide
gcucgcggaucagcccacu

SEQ ID NO: 2813220 - RNA, 19 nt, Artificial Sequence
  Description of Artificial Sequence: Synthetic oligonucleotide
cggcggcggccccuggguc

SEQ ID NO: 2813221 - RNA, 19 nt, Artificial Sequence
  Description of Artificial Sequence: Synthetic oligonucleotide
gggugcgggcacggugggu

SEQ ID NO: 2813222 - RNA, 19 nt, Artificial Sequence
  Description of Artificial Sequence: Synthetic oligonucleotide
ccccgcggccggcccugug

SEQ ID NO: 2813223 - RNA, 19 nt, Artificial Sequence
  Description of Artificial Sequence: Synthetic oligonucleotide
cgcgggcagggugcgggca

SEQ ID NO: 2813224 - RNA, 19 nt, Artificial Sequence
  Description of Artificial Sequence: Synthetic oligonucleotide
caguggggucggggcugcu

SEQ ID NO: 2813225 - RNA, 19 nt, Artificial Sequence
  Description of Artificial Sequence: Synthetic oligonucleotide
ccccugggucgcccaaguu

SEQ ID NO: 2813226 - RNA, 19 nt, Artificial Sequence
  Description of Artificial Sequence: Synthetic oligonucleotide
ggccggcccugugcacccu

SEQ ID NO: 2813227 - RNA, 19 nt, Artificial Sequence
  Description of Artificial Sequence: Synthetic oligonucleotide
cggccccugggucgcccaa

SEQ ID NO: 2813228 - RNA, 19 nt, Artificial Sequence
  Description of Artificial Sequence: Synthetic oligonucleotide
cggcggccccugggucgcc

SEQ ID NO: 2813229 - RNA, 19 nt, Artificial Sequence
  Description of Artificial Sequence: Synthetic oligonucleotide
uauaugaugaccaacagcc

SEQ ID NO: 2813230 - RNA, 19 nt, Artificial Sequence
  Description of Artificial Sequence: Synthetic oligonucleotide
aacuaaacaaaugaaaugc

SEQ ID NO: 2813231 - RNA, 19 nt, Artificial Sequence
  Description of Artificial Sequence: Synthetic oligonucleotide
aagaaaguuagcuaaguac

SEQ ID NO: 2813232 - RNA, 19 nt, Artificial Sequence
  Description of Artificial Sequence: Synthetic oligonucleotide
uauguuauuaccuagcacc

SEQ ID NO: 2813233 - RNA, 19 nt, Artificial Sequence
  Description of Artificial Sequence: Synthetic oligonucleotide
  modified_base (5)..(5): a, c, u, g, unknown or other
aauunaacaacagauuugg

SEQ ID NO: 2813234 - RNA, 19 nt, Artificial Sequence
  Description of Artificial Sequence: Synthetic oligonucleotide
aacauuaagauucuagaag

SEQ ID NO: 2813235 - RNA, 19 nt, Artificial Sequence
  Description of Artificial Sequence: Synthetic oligonucleotide
aacgagaacauuaagauuc

SEQ ID NO: 2813236 - RNA, 19 nt, Artificial Sequence
  Description of Artificial Sequence: Synthetic oligonucleotide
uuaagauucuagaagaaag

SEQ ID NO: 2813237 - RNA, 19 nt, Artificial Sequence
  Description of Artificial Sequence: Synthetic oligonucleotide
  modified_base (14)..(14): a, c, u, g, unknown or other
uacaguaucaauunaacaa

SEQ ID NO: 2813238 - RNA, 19 nt, Artificial Sequence
  Description of Artificial Sequence: Synthetic oligonucleotide
aucacauucauucauauug

SEQ ID NO: 2813239 - RNA, 19 nt, Artificial Sequence
  Description of Artificial Sequence: Synthetic oligonucleotide
augagcaucacauucauuc

SEQ ID NO: 2813240 - RNA, 19 nt, Artificial Sequence
  Description of Artificial Sequence: Synthetic oligonucleotide
  modified_base (2)..(2): a, c, u, g, unknown or other
unaacaacagauuuggucu

SEQ ID NO: 2813241 - RNA, 19 nt, Artificial Sequence
  Description of Artificial Sequence: Synthetic oligonucleotide
aaugacaugagcucgguca

SEQ ID NO: 2813242 - RNA, 19 nt, Artificial Sequence
  Description of Artificial Sequence: Synthetic oligonucleotide
uuuguuaaaacaaccaacu

SEQ ID NO: 2813243 - RNA, 19 nt, Artificial Sequence
  Description of Artificial Sequence: Synthetic oligonucleotide
  modified_base (9)..(9): a, c, u, g, unknown or other
uaucaauunaacaacagau

SEQ ID NO: 2813244 - RNA, 19 nt, Artificial Sequence
  Description of Artificial Sequence: Synthetic oligonucleotide
  modified_base (7)..(7): a, c, u, g, unknown or other
ucaauunaacaacagauuu

SEQ ID NO: 2813245 - RNA, 19 nt, Artificial Sequence
  Description of Artificial Sequence: Synthetic oligonucleotide
gauucuagaagaaaguuag

SEQ ID NO: 2813246 - RNA, 19 nt, Artificial Sequence
  Description of Artificial Sequence: Synthetic oligonucleotide
ucgucuuccauucucaagg

SEQ ID NO: 2813247 - RNA, 19 nt, Artificial Sequence
  Description of Artificial Sequence: Synthetic oligonucleotide
auugaugaacucuugauug

SEQ ID NO: 2813248 - RNA, 19 nt, Artificial Sequence
  Description of Artificial Sequence: Synthetic oligonucleotide
uguuaaaacaaccaacuaa

SEQ ID NO: 2813249 - RNA, 19 nt, Artificial Sequence
  Description of Artificial Sequence: Synthetic oligonucleotide
uaaacaaaugaaaugcaug

SEQ ID NO: 2813250 - RNA, 19 nt, Artificial Sequence
  Description of Artificial Sequence: Synthetic oligonucleotide
uuuguauuauguuauuacc

SEQ ID NO: 2813251 - RNA, 19 nt, Artificial Sequence
  Description of Artificial Sequence: Synthetic oligonucleotide
uuaccuagcaccaugacuc

SEQ ID NO: 2813252 - RNA, 19 nt, Artificial Sequence
  Description of Artificial Sequence: Synthetic oligonucleotide
  modified_base (3)..(3): a, c, u, g, unknown or other
uunaacaacagauuugguc

SEQ ID NO: 2813253 - RNA, 19 nt, Artificial Sequence
  Description of Artificial Sequence: Synthetic oligonucleotide
uuuuguauuauguuauuac

SEQ ID NO: 2813254 - RNA, 19 nt, Artificial Sequence
  Description of Artificial Sequence: Synthetic oligonucleotide
auuaucaaaagaaugagca

SEQ ID NO: 2813255 - RNA, 19 nt, Artificial Sequence
  Description of Artificial Sequence: Synthetic oligonucleotide
uugacauugaguuugucca

SEQ ID NO: 2813256 - RNA, 19 nt, Artificial Sequence
  Description of Artificial Sequence: Synthetic oligonucleotide
uuuugguugauuuucccag

SEQ ID NO: 2813257 - RNA, 19 nt, Artificial Sequence
  Description of Artificial Sequence: Synthetic oligonucleotide
aaaacuucacuuuuccacu

SEQ ID NO: 2813258 - RNA, 19 nt, Artificial Sequence
  Description of Artificial Sequence: Synthetic oligonucleotide
uuuaaugacaugagcucgg

SEQ ID NO: 2813259 - RNA, 19 nt, Artificial Sequence
  Description of Artificial Sequence: Synthetic oligonucleotide
uuugacauugaguuugucc

SEQ ID NO: 2813260 - RNA, 19 nt, Artificial Sequence
  Description of Artificial Sequence: Synthetic oligonucleotide
uuuuaaugacaugagcucg

SEQ ID NO: 2813261 - RNA, 19 nt, Artificial Sequence
  Description of Artificial Sequence: Synthetic oligonucleotide
acauuaagauucuagaaga

SEQ ID NO: 2813262 - RNA, 19 nt, Artificial Sequence
  Description of Artificial Sequence: Synthetic oligonucleotide
uauuauguuauuaccuagc

SEQ ID NO: 2813263 - RNA, 19 nt, Artificial Sequence
  Description of Artificial Sequence: Synthetic oligonucleotide
caaaacuucacuuuuccac

SEQ ID NO: 2813264 - RNA, 19 nt, Artificial Sequence
  Description of Artificial Sequence: Synthetic oligonucleotide
uaucaugacccacacuucg

SEQ ID NO: 2813265 - RNA, 19 nt, Artificial Sequence
  Description of Artificial Sequence: Synthetic oligonucleotide
ugaacuucaaaacuucacu

SEQ ID NO: 2813266 - RNA, 19 nt, Artificial Sequence
  Description of Artificial Sequence: Synthetic oligonucleotide
augaccaacagccauuuuc

SEQ ID NO: 2813267 - RNA, 19 nt, Artificial Sequence
  Description of Artificial Sequence: Synthetic oligonucleotide
ugaauuaucaugacccaca

SEQ ID NO: 2813268 - RNA, 19 nt, Artificial Sequence
  Description of Artificial Sequence: Synthetic oligonucleotide
uaguguuucguccacuagg

SEQ ID NO: 2813269 - RNA, 19 nt, Artificial Sequence
  Description of Artificial Sequence: Synthetic oligonucleotide
  modified_base (16)..(16): a, c, u, g, unknown or other
aguacaguaucaauunaac

SEQ ID NO: 2813270 - RNA, 19 nt, Artificial Sequence
  Description of Artificial Sequence: Synthetic oligonucleotide
uuguauuauguuauuaccu

SEQ ID NO: 2813271 - RNA, 19 nt, Artificial Sequence
  Description of Artificial Sequence: Synthetic oligonucleotide
ucggucauguauaugauga

SEQ ID NO: 2813272 - RNA, 19 nt, Artificial Sequence
  Description of Artificial Sequence: Synthetic oligonucleotide
acuucgaugaauuuucucu

SEQ ID NO: 2813273 - RNA, 19 nt, Artificial Sequence
  Description of Artificial Sequence: Synthetic oligonucleotide
agaacauuaagauucuaga

SEQ ID NO: 2813274 - RNA, 19 nt, Artificial Sequence
  Description of Artificial Sequence: Synthetic oligonucleotide
uuagcuaaguacaguauca

SEQ ID NO: 2813275 - RNA, 19 nt, Artificial Sequence
  Description of Artificial Sequence: Synthetic oligonucleotide
uucaaaacuucacuuuucc

SEQ ID NO: 2813276 - RNA, 19 nt, Artificial Sequence
  Description of Artificial Sequence: Synthetic oligonucleotide
ugaacuucgaugaauuuuc

SEQ ID NO: 2813277 - RNA, 19 nt, Artificial Sequence
  Description of Artificial Sequence: Synthetic oligonucleotide
uuucucuagaccacuauca

SEQ ID NO: 2813278 - RNA, 19 nt, Artificial Sequence
  Description of Artificial Sequence: Synthetic oligonucleotide
uccuuuugaguucucgugg

SEQ ID NO: 2813279 - RNA, 19 nt, Artificial Sequence
  Description of Artificial Sequence: Synthetic oligonucleotide
  modified_base (13)..(13): a, c, u, g, unknown or other
acaguaucaauunaacaac

SEQ ID NO: 2813280 - RNA, 19 nt, Artificial Sequence
  Description of Artificial Sequence: Synthetic oligonucleotide
aagggcugaacuucgauga

SEQ ID NO: 2813281 - RNA, 19 nt, Artificial Sequence
  Description of Artificial Sequence: Synthetic oligonucleotide
ucuuccauucucaagggcu

SEQ ID NO: 2813282 - RNA, 19 nt, Artificial Sequence
  Description of Artificial Sequence: Synthetic oligonucleotide
uaagauucuagaagaaagu

SEQ ID NO: 2813283 - RNA, 19 nt, Artificial Sequence
  Description of Artificial Sequence: Synthetic oligonucleotide
uugauugaccucuucaucu

SEQ ID NO: 2813284 - RNA, 19 nt, Artificial Sequence
  Description of Artificial Sequence: Synthetic oligonucleotide
ucauuaucaaaagaaugag

SEQ ID NO: 2813285 - RNA, 19 nt, Artificial Sequence
  Description of Artificial Sequence: Synthetic oligonucleotide
aacagauuuggucuuuugu

SEQ ID NO: 2813286 - RNA, 19 nt, Artificial Sequence
  Description of Artificial Sequence: Synthetic oligonucleotide
cucauuaucaaaagaauga

SEQ ID NO: 2813287 - RNA, 19 nt, Artificial Sequence
  Description of Artificial Sequence: Synthetic oligonucleotide
cauuaucaaaagaaugagc

SEQ ID NO: 2813288 - RNA, 19 nt, Artificial Sequence
  Description of Artificial Sequence: Synthetic oligonucleotide
uguauaugaugaccaacag

SEQ ID NO: 2813289 - RNA, 19 nt, Artificial Sequence
  Description of Artificial Sequence: Synthetic oligonucleotide
uuuccacucauuaucaaaa

SEQ ID NO: 2813290 - RNA, 19 nt, Artificial Sequence
  Description of Artificial Sequence: Synthetic oligonucleotide
gaauucuaguguuucgucc

SEQ ID NO: 2813291 - RNA, 19 nt, Artificial Sequence
  Description of Artificial Sequence: Synthetic oligonucleotide
aaugcauggcuauuuauuu

SEQ ID NO: 2813292 - RNA, 19 nt, Artificial Sequence
  Description of Artificial Sequence: Synthetic oligonucleotide
acagccauuuucucuagac

SEQ ID NO: 2813293 - RNA, 19 nt, Artificial Sequence
  Description of Artificial Sequence: Synthetic oligonucleotide
uguauuauguuauuaccua

SEQ ID NO: 2813294 - RNA, 19 nt, Artificial Sequence
  Description of Artificial Sequence: Synthetic oligonucleotide
  modified_base (10)..(10): a, c, u, g, unknown or other
guaucaauunaacaacaga

SEQ ID NO: 2813295 - RNA, 19 nt, Artificial Sequence
  Description of Artificial Sequence: Synthetic oligonucleotide
auugaguuuguccacaaaa

SEQ ID NO: 2813296 - RNA, 19 nt, Artificial Sequence
  Description of Artificial Sequence: Synthetic oligonucleotide
aaacuucacuuuuccacuc

SEQ ID NO: 2813297 - RNA, 19 nt, Artificial Sequence
  Description of Artificial Sequence: Synthetic oligonucleotide
  modified_base (6)..(6): a, c, u, g, unknown or other
caauunaacaacagauuug

SEQ ID NO: 2813298 - RNA, 19 nt, Artificial Sequence
  Description of Artificial Sequence: Synthetic oligonucleotide
gagaacauuaagauucuag

SEQ ID NO: 2813299 - RNA, 19 nt, Artificial Sequence
  Description of Artificial Sequence: Synthetic oligonucleotide
cacacuucgaauucuagug

SEQ ID NO: 2813300 - RNA, 19 nt, Artificial Sequence
  Description of Artificial Sequence: Synthetic oligonucleotide
cucuuuuguuaaaacaacc

SEQ ID NO: 2813301 - RNA, 19 nt, Artificial Sequence
  Description of Artificial Sequence: Synthetic oligonucleotide
caacuaaacaaaugaaaug

SEQ ID NO: 2813302 - RNA, 19 nt, Artificial Sequence
  Description of Artificial Sequence: Synthetic oligonucleotide
agcaccaugacucuuuugu

SEQ ID NO: 2813303 - RNA, 19 nt, Artificial Sequence
  Description of Artificial Sequence: Synthetic oligonucleotide
uucuagaagaaaguuagcu

SEQ ID NO: 2813304 - RNA, 19 nt, Artificial Sequence
  Description of Artificial Sequence: Synthetic oligonucleotide
auuauguuauuaccuagca

SEQ ID NO: 2813305 - RNA, 19 nt, Artificial Sequence
  Description of Artificial Sequence: Synthetic oligonucleotide
aaaugaaaugcauggcuau

SEQ ID NO: 2813306 - RNA, 19 nt, Artificial Sequence
  Description of Artificial Sequence: Synthetic oligonucleotide
aacuucgaugaauuuucuc

SEQ ID NO: 2813307 - RNA, 19 nt, Artificial Sequence
  Description of Artificial Sequence: Synthetic oligonucleotide
ugacucuuuuguuaaaaca

SEQ ID NO: 2813308 - RNA, 19 nt, Artificial Sequence
  Description of Artificial Sequence: Synthetic oligonucleotide
uucacuuuuccacucauua

SEQ ID NO: 2813309 - RNA, 19 nt, Artificial Sequence
  Description of Artificial Sequence: Synthetic oligonucleotide
aaguuagcuaaguacagua

SEQ ID NO: 2813310 - RNA, 19 nt, Artificial Sequence
  Description of Artificial Sequence: Synthetic oligonucleotide
agaaaguuagcuaaguaca

SEQ ID NO: 2813311 - RNA, 19 nt, Artificial Sequence
  Description of Artificial Sequence: Synthetic oligonucleotide
uaaaacguaacgagaacau

SEQ ID NO: 2813312 - RNA, 19 nt, Artificial Sequence
  Description of Artificial Sequence: Synthetic oligonucleotide
ugauuuucccaggugaucc

SEQ ID NO: 2813313 - RNA, 19 nt, Artificial Sequence
  Description of Artificial Sequence: Synthetic oligonucleotide
aucagaaucucucacugcu

SEQ ID NO: 2813314 - RNA, 19 nt, Artificial Sequence
  Description of Artificial Sequence: Synthetic oligonucleotide
ugaauuuucucucuccuuu

SEQ ID NO: 2813315 - RNA, 19 nt, Artificial Sequence
  Description of Artificial Sequence: Synthetic oligonucleotide
guauuauguuauuaccuag

SEQ ID NO: 2813316 - RNA, 19 nt, Artificial Sequence
  Description of Artificial Sequence: Synthetic oligonucleotide
augacucuuuuguuaaaac

SEQ ID NO: 2813317 - RNA, 19 nt, Artificial Sequence
  Description of Artificial Sequence: Synthetic oligonucleotide
uaggcuugaacuucaaaac

SEQ ID NO: 2813318 - RNA, 19 nt, Artificial Sequence
  Description of Artificial Sequence: Synthetic oligonucleotide
cuagaagaaaguuagcuaa

SEQ ID NO: 2813319 - RNA, 19 nt, Artificial Sequence
  Description of Artificial Sequence: Synthetic oligonucleotide
uucauauugaugaacucuu

SEQ ID NO: 2813320 - RNA, 19 nt, Artificial Sequence
  Description of Artificial Sequence: Synthetic oligonucleotide
uugaacuucaaaacuucac

SEQ ID NO: 2813321 - RNA, 19 nt, Artificial Sequence
  Description of Artificial Sequence: Synthetic oligonucleotide
ugaccaacagccauuuucu

SEQ ID NO: 2813322 - RNA, 19 nt, Artificial Sequence
  Description of Artificial Sequence: Synthetic oligonucleotide
agcucggucauguauauga

SEQ ID NO: 2813323 - RNA, 19 nt, Artificial Sequence
  Description of Artificial Sequence: Synthetic oligonucleotide
guuaaaacaaccaacuaaa

SEQ ID NO: 2813324 - RNA, 19 nt, Artificial Sequence
  Description of Artificial Sequence: Synthetic oligonucleotide
uagaagaaaguuagcuaag

SEQ ID NO: 2813325 - RNA, 19 nt, Artificial Sequence
  Description of Artificial Sequence: Synthetic oligonucleotide
uuggucuuuuguauuaugu

SEQ ID NO: 2813326 - RNA, 19 nt, Artificial Sequence
  Description of Artificial Sequence: Synthetic oligonucleotide
uauugaugaacucuugauu

SEQ ID NO: 2813327 - RNA, 19 nt, Artificial Sequence
  Description of Artificial Sequence: Synthetic oligonucleotide
guuauuaccuagcaccaug

SEQ ID NO: 2813328 - RNA, 19 nt, Artificial Sequence
  Description of Artificial Sequence: Synthetic oligonucleotide
gauccuuugacauugaguu

SEQ ID NO: 2813329 - RNA, 19 nt, Artificial Sequence
  Description of Artificial Sequence: Synthetic oligonucleotide
ucuagaagaaaguuagcua

SEQ ID NO: 2813330 - RNA, 19 nt, Artificial Sequence
  Description of Artificial Sequence: Synthetic oligonucleotide
accacuaucagaaucucuc

SEQ ID NO: 2813331 - RNA, 19 nt, Artificial Sequence
  Description of Artificial Sequence: Synthetic oligonucleotide
uuauuaccuagcaccauga

SEQ ID NO: 2813332 - RNA, 19 nt, Artificial Sequence
  Description of Artificial Sequence: Synthetic oligonucleotide
uuugguugauuuucccagg

SEQ ID NO: 2813333 - RNA, 19 nt, Artificial Sequence
  Description of Artificial Sequence: Synthetic oligonucleotide
uuauguuauuaccuagcac

SEQ ID NO: 2813334 - RNA, 19 nt, Artificial Sequence
  Description of Artificial Sequence: Synthetic oligonucleotide
uaugaugaccaacagccau

SEQ ID NO: 2813335 - RNA, 19 nt, Artificial Sequence
  Description of Artificial Sequence: Synthetic oligonucleotide
aguguuucguccacuaggc

SEQ ID NO: 2813336 - RNA, 19 nt, Artificial Sequence
  Description of Artificial Sequence: Synthetic oligonucleotide
aacuucaaaacuucacuuu

SEQ ID NO: 2813337 - RNA, 19 nt, Artificial Sequence
  Description of Artificial Sequence: Synthetic oligonucleotide
guauaugaugaccaacagc

SEQ ID NO: 2813338 - RNA, 19 nt, Artificial Sequence
  Description of Artificial Sequence: Synthetic oligonucleotide
uucucuagaccacuaucag

SEQ ID NO: 2813339 - RNA, 19 nt, Artificial Sequence
  Description of Artificial Sequence: Synthetic oligonucleotide
ucacauucauucauauuga

SEQ ID NO: 2813340 - RNA, 19 nt, Artificial Sequence
  Description of Artificial Sequence: Synthetic oligonucleotide
augaacucuugauugaccu

SEQ ID NO: 2813341 - RNA, 19 nt, Artificial Sequence
  Description of Artificial Sequence: Synthetic oligonucleotide
auuaccuagcaccaugacu

SEQ ID NO: 2813342 - RNA, 19 nt, Artificial Sequence
  Description of Artificial Sequence: Synthetic oligonucleotide
ugauccuuugacauugagu

SEQ ID NO: 2813343 - RNA, 19 nt, Artificial Sequence
  Description of Artificial Sequence: Synthetic oligonucleotide
uucgaauucuaguguuucg

SEQ ID NO: 2813344 - RNA, 19 nt, Artificial Sequence
  Description of Artificial Sequence: Synthetic oligonucleotide
caaccaacuaaacaaauga

SEQ ID NO: 2813345 - RNA, 19 nt, Artificial Sequence
  Description of Artificial Sequence: Synthetic oligonucleotide
uuuucucuagaccacuauc

SEQ ID NO: 2813346 - RNA, 19 nt, Artificial Sequence
  Description of Artificial Sequence: Synthetic oligonucleotide
auauugaugaacucuugau

SEQ ID NO: 2813347 - RNA, 19 nt, Artificial Sequence
  Description of Artificial Sequence: Synthetic oligonucleotide
cccugaauuaucaugaccc

SEQ ID NO: 2813348 - RNA, 19 nt, Artificial Sequence
  Description of Artificial Sequence: Synthetic oligonucleotide
cuaucagaaucucucacug

SEQ ID NO: 2813349 - RNA, 19 nt, Artificial Sequence
  Description of Artificial Sequence: Synthetic oligonucleotide
gaaaguuagcuaaguacag

SEQ ID NO: 2813350 - RNA, 19 nt, Artificial Sequence
  Description of Artificial Sequence: Synthetic oligonucleotide
uggcccugaauuaucauga

SEQ ID NO: 2813351 - RNA, 19 nt, Artificial Sequence
  Description of Artificial Sequence: Synthetic oligonucleotide
acuaucagaaucucucacu

SEQ ID NO: 2813352 - RNA, 19 nt, Artificial Sequence
  Description of Artificial Sequence: Synthetic oligonucleotide
aaacguaacgagaacauua

SEQ ID NO: 2813353 - RNA, 19 nt, Artificial Sequence
  Description of Artificial Sequence: Synthetic oligonucleotide
ucucaagggcugaacuucg

SEQ ID NO: 2813354 - RNA, 19 nt, Artificial Sequence
  Description of Artificial Sequence: Synthetic oligonucleotide
uccacucauuaucaaaaga

SEQ ID NO: 2813355 - RNA, 19 nt, Artificial Sequence
  Description of Artificial Sequence: Synthetic oligonucleotide
acucauuaucaaaagaaug

SEQ ID NO: 2813356 - RNA, 19 nt, Artificial Sequence
  Description of Artificial Sequence: Synthetic oligonucleotide
uuuuccacucauuaucaaa

SEQ ID NO: 2813357 - RNA, 19 nt, Artificial Sequence
  Description of Artificial Sequence: Synthetic oligonucleotide
uguccuguuguucuuggac

SEQ ID NO: 2813358 - RNA, 19 nt, Artificial Sequence
  Description of Artificial Sequence: Synthetic oligonucleotide
guuagcuaaguacaguauc

SEQ ID NO: 2813359 - RNA, 19 nt, Artificial Sequence
  Description of Artificial Sequence: Synthetic oligonucleotide
acucuuuuguuaaaacaac

SEQ ID NO: 2813360 - RNA, 19 nt, Artificial Sequence
  Description of Artificial Sequence: Synthetic oligonucleotide
cacuuuuccacucauuauc

SEQ ID NO: 2813361 - RNA, 19 nt, Artificial Sequence
  Description of Artificial Sequence: Synthetic oligonucleotide
cuaggcuugaacuucaaaa

SEQ ID NO: 2813362 - RNA, 19 nt, Artificial Sequence
  Description of Artificial Sequence: Synthetic oligonucleotide
uuaucaaaagaaugagcau

SEQ ID NO: 2813363 - RNA, 19 nt, Artificial Sequence
  Description of Artificial Sequence: Synthetic oligonucleotide
uuugucgucuuccauucuc

SEQ ID NO: 2813364 - RNA, 19 nt, Artificial Sequence
  Description of Artificial Sequence: Synthetic oligonucleotide
aaaguuagcuaaguacagu

SEQ ID NO: 2813365 - RNA, 19 nt, Artificial Sequence
  Description of Artificial Sequence: Synthetic oligonucleotide
acagauuuggucuuuugua

SEQ ID NO: 2813366 - RNA, 19 nt, Artificial Sequence
  Description of Artificial Sequence: Synthetic oligonucleotide
ucuugauugaccucuucau

SEQ ID NO: 2813367 - RNA, 19 nt, Artificial Sequence
  Description of Artificial Sequence: Synthetic oligonucleotide
ucauauugaugaacucuug

SEQ ID NO: 2813368 - RNA, 19 nt, Artificial Sequence
  Description of Artificial Sequence: Synthetic oligonucleotide
ucaaaacuucacuuuucca

SEQ ID NO: 2813369 - RNA, 19 nt, Artificial Sequence
  Description of Artificial Sequence: Synthetic oligonucleotide
  modified_base (19)..(19): a, c, u, g, unknown or other
cuaaguacaguaucaauun

SEQ ID NO: 2813370 - RNA, 19 nt, Artificial Sequence
  Description of Artificial Sequence: Synthetic oligonucleotide
gacucuuuuguuaaaacaa

SEQ ID NO: 2813371 - RNA, 19 nt, Artificial Sequence
  Description of Artificial Sequence: Synthetic oligonucleotide
uuuugaguucucguggccc

SEQ ID NO: 2813372 - RNA, 19 nt, Artificial Sequence
  Description of Artificial Sequence: Synthetic oligonucleotide
auguauaugaugaccaaca

SEQ ID NO: 2813373 - RNA, 19 nt, Artificial Sequence
  Description of Artificial Sequence: Synthetic oligonucleotide
aagauucuagaagaaaguu

SEQ ID NO: 2813374 - RNA, 19 nt, Artificial Sequence
  Description of Artificial Sequence: Synthetic oligonucleotide
  modified_base (11)..(11): a, c, u, g, unknown or other
aguaucaauunaacaacag

SEQ ID NO: 2813375 - RNA, 19 nt, Artificial Sequence
  Description of Artificial Sequence: Synthetic oligonucleotide
guaacgagaacauuaagau

SEQ ID NO: 2813376 - RNA, 19 nt, Artificial Sequence
  Description of Artificial Sequence: Synthetic oligonucleotide
  modified_base (18)..(18): a, c, u, g, unknown or other
uaaguacaguaucaauuna

SEQ ID NO: 2813377 - RNA, 19 nt, Artificial Sequence
  Description of Artificial Sequence: Synthetic oligonucleotide
uucauucauauugaugaac

SEQ ID NO: 2813378 - RNA, 19 nt, Artificial Sequence
  Description of Artificial Sequence: Synthetic oligonucleotide
uguuucguccacuaggcuu

SEQ ID NO: 2813379 - RNA, 19 nt, Artificial Sequence
  Description of Artificial Sequence: Synthetic oligonucleotide
ucuccuguccuguuguucu

SEQ ID NO: 2813380 - RNA, 19 nt, Artificial Sequence
  Description of Artificial Sequence: Synthetic oligonucleotide
aaaugcauggcuauuuauu

SEQ ID NO: 2813381 - RNA, 19 nt, Artificial Sequence
  Description of Artificial Sequence: Synthetic oligonucleotide
uuccacucauuaucaaaag

SEQ ID NO: 2813382 - RNA, 19 nt, Artificial Sequence
  Description of Artificial Sequence: Synthetic oligonucleotide
cuucgaugaauuuucucuc

SEQ ID NO: 2813383 - RNA, 19 nt, Artificial Sequence
  Description of Artificial Sequence: Synthetic oligonucleotide
aucaaaagaaugagcauca

SEQ ID NO: 2813384 - RNA, 19 nt, Artificial Sequence
  Description of Artificial Sequence: Synthetic oligonucleotide
  modified_base (17)..(17): a, c, u, g, unknown or other
aaguacaguaucaauunaa

SEQ ID NO: 2813385 - RNA, 19 nt, Artificial Sequence
  Description of Artificial Sequence: Synthetic oligonucleotide
ugagcaucacauucauuca

SEQ ID NO: 2813386 - RNA, 19 nt, Artificial Sequence
  Description of Artificial Sequence: Synthetic oligonucleotide
cuaaaacguaacgagaaca

SEQ ID NO: 2813387 - RNA, 19 nt, Artificial Sequence
  Description of Artificial Sequence: Synthetic oligonucleotide
uuuggucuuuuguauuaug

SEQ ID NO: 2813388 - RNA, 19 nt, Artificial Sequence
  Description of Artificial Sequence: Synthetic oligonucleotide
auucuaguguuucguccac

SEQ ID NO: 2813389 - RNA, 19 nt, Artificial Sequence
  Description of Artificial Sequence: Synthetic oligonucleotide
auuaagauucuagaagaaa

SEQ ID NO: 2813390 - RNA, 19 nt, Artificial Sequence
  Description of Artificial Sequence: Synthetic oligonucleotide
uuguuaaaacaaccaacua

SEQ ID NO: 2813391 - RNA, 19 nt, Artificial Sequence
  Description of Artificial Sequence: Synthetic oligonucleotide
aaucucucacugcucuucu

SEQ ID NO: 2813392 - RNA, 19 nt, Artificial Sequence
  Description of Artificial Sequence: Synthetic oligonucleotide
uaucagaaucucucacugc

SEQ ID NO: 2813393 - RNA, 19 nt, Artificial Sequence
  Description of Artificial Sequence: Synthetic oligonucleotide
accaacagccauuuucucu

SEQ ID NO: 2813394 - RNA, 19 nt, Artificial Sequence
  Description of Artificial Sequence: Synthetic oligonucleotide
ucaucuccuguccuguugu

SEQ ID NO: 2813395 - RNA, 19 nt, Artificial Sequence
  Description of Artificial Sequence: Synthetic oligonucleotide
aggcuugaacuucaaaacu

SEQ ID NO: 2813396 - RNA, 19 nt, Artificial Sequence
  Description of Artificial Sequence: Synthetic oligonucleotide
uucaucuccuguccuguug

SEQ ID NO: 2813397 - RNA, 19 nt, Artificial Sequence
  Description of Artificial Sequence: Synthetic oligonucleotide
uucgaugaauuuucucucu

SEQ ID NO: 2813398 - RNA, 19 nt, Artificial Sequence
  Description of Artificial Sequence: Synthetic oligonucleotide
aacuucacuuuuccacuca

SEQ ID NO: 2813399 - RNA, 19 nt, Artificial Sequence
  Description of Artificial Sequence: Synthetic oligonucleotide
gucauguauaugaugacca

SEQ ID NO: 2813400 - RNA, 19 nt, Artificial Sequence
  Description of Artificial Sequence: Synthetic oligonucleotide
ucuccuuuugaguucucgu

SEQ ID NO: 2813401 - RNA, 19 nt, Artificial Sequence
  Description of Artificial Sequence: Synthetic oligonucleotide
ucgaauucuaguguuucgu

SEQ ID NO: 2813402 - RNA, 19 nt, Artificial Sequence
  Description of Artificial Sequence: Synthetic oligonucleotide
uuugaguucucguggcccu

SEQ ID NO: 2813403 - RNA, 19 nt, Artificial Sequence
  Description of Artificial Sequence: Synthetic oligonucleotide
cuucaaaacuucacuuuuc

SEQ ID NO: 2813404 - RNA, 19 nt, Artificial Sequence
  Description of Artificial Sequence: Synthetic oligonucleotide
cuugauugaccucuucauc

SEQ ID NO: 2813405 - RNA, 19 nt, Artificial Sequence
  Description of Artificial Sequence: Synthetic oligonucleotide
gaugaacucuugauugacc

SEQ ID NO: 2813406 - RNA, 19 nt, Artificial Sequence
  Description of Artificial Sequence: Synthetic oligonucleotide
  modified_base (15)..(15): a, c, u, g, unknown or other
guacaguaucaauunaaca

SEQ ID NO: 2813407 - RNA, 19 nt, Artificial Sequence
  Description of Artificial Sequence: Synthetic oligonucleotide
uugguugauuuucccaggu

SEQ ID NO: 2813408 - RNA, 19 nt, Artificial Sequence
  Description of Artificial Sequence: Synthetic oligonucleotide
cauauugaugaacucuuga

SEQ ID NO: 2813409 - RNA, 19 nt, Artificial Sequence
  Description of Artificial Sequence: Synthetic oligonucleotide
accaugacucuuuuguuaa

SEQ ID NO: 2813410 - RNA, 19 nt, Artificial Sequence
  Description of Artificial Sequence: Synthetic oligonucleotide
cuccuuuugaguucucgug

SEQ ID NO: 2813411 - RNA, 19 nt, Artificial Sequence
  Description of Artificial Sequence: Synthetic oligonucleotide
gauuuggucuuuuguauua

SEQ ID NO: 2813412 - RNA, 19 nt, Artificial Sequence
  Description of Artificial Sequence: Synthetic oligonucleotide
uugucgucuuccauucuca

SEQ ID NO: 2813413 - RNA, 19 nt, Artificial Sequence
  Description of Artificial Sequence: Synthetic oligonucleotide
acuaaacaaaugaaaugca

SEQ ID NO: 2813414 - RNA, 19 nt, Artificial Sequence
  Description of Artificial Sequence: Synthetic oligonucleotide
acaaccaacuaaacaaaug

SEQ ID NO: 2813415 - RNA, 19 nt, Artificial Sequence
  Description of Artificial Sequence: Synthetic oligonucleotide
gaagaaaguuagcuaagua

SEQ ID NO: 2813416 - RNA, 19 nt, Artificial Sequence
  Description of Artificial Sequence: Synthetic oligonucleotide
gaugaauuuucucucuccu

SEQ ID NO: 2813417 - RNA, 19 nt, Artificial Sequence
  Description of Artificial Sequence: Synthetic oligonucleotide
cauguauaugaugaccaac

SEQ ID NO: 2813418 - RNA, 19 nt, Artificial Sequence
  Description of Artificial Sequence: Synthetic oligonucleotide
ucccaggugauccuuugac

SEQ ID NO: 2813419 - RNA, 19 nt, Artificial Sequence
  Description of Artificial Sequence: Synthetic oligonucleotide
cuuccauucucaagggcug

SEQ ID NO: 2813420 - RNA, 19 nt, Artificial Sequence
  Description of Artificial Sequence: Synthetic oligonucleotide
acauucauucauauugaug

SEQ ID NO: 2813421 - RNA, 19 nt, Artificial Sequence
  Description of Artificial Sequence: Synthetic oligonucleotide
uuaucaugacccacacuuc

SEQ ID NO: 2813422 - RNA, 19 nt, Artificial Sequence
  Description of Artificial Sequence: Synthetic oligonucleotide
caagggcugaacuucgaug

SEQ ID NO: 2813423 - RNA, 19 nt, Artificial Sequence
  Description of Artificial Sequence: Synthetic oligonucleotide
guuucguccacuaggcuug

SEQ ID NO: 2813424 - RNA, 19 nt, Artificial Sequence
  Description of Artificial Sequence: Synthetic oligonucleotide
ucauguauaugaugaccaa

SEQ ID NO: 2813425 - RNA, 19 nt, Artificial Sequence
  Description of Artificial Sequence: Synthetic oligonucleotide
acacuucgaauucuagugu

SEQ ID NO: 2813426 - RNA, 19 nt, Artificial Sequence
  Description of Artificial Sequence: Synthetic oligonucleotide
accaacuaaacaaaugaaa

SEQ ID NO: 2813427 - RNA, 19 nt, Artificial Sequence
  Description of Artificial Sequence: Synthetic oligonucleotide
uauuaccuagcaccaugac

SEQ ID NO: 2813428 - RNA, 19 nt, Artificial Sequence
  Description of Artificial Sequence: Synthetic oligonucleotide
agaaugagcaucacauuca

SEQ ID NO: 2813429 - RNA, 19 nt, Artificial Sequence
  Description of Artificial Sequence: Synthetic oligonucleotide
aggugauccuuugacauug

SEQ ID NO: 2813430 - RNA, 19 nt, Artificial Sequence
  Description of Artificial Sequence: Synthetic oligonucleotide
gguugauuuucccagguga

SEQ ID NO: 2813431 - RNA, 19 nt, Artificial Sequence
  Description of Artificial Sequence: Synthetic oligonucleotide
ugaugaacucuugauugac

SEQ ID NO: 2813432 - RNA, 19 nt, Artificial Sequence
  Description of Artificial Sequence: Synthetic oligonucleotide
aacguaacgagaacauuaa

SEQ ID NO: 2813433 - RNA, 19 nt, Artificial Sequence
  Description of Artificial Sequence: Synthetic oligonucleotide
agaagaaaguuagcuaagu

SEQ ID NO: 2813434 - RNA, 19 nt, Artificial Sequence
  Description of Artificial Sequence: Synthetic oligonucleotide
caaaagaaugagcaucaca

SEQ ID NO: 2813435 - RNA, 19 nt, Artificial Sequence
  Description of Artificial Sequence: Synthetic oligonucleotide
uucucaagggcugaacuuc

SEQ ID NO: 2813436 - RNA, 19 nt, Artificial Sequence
  Description of Artificial Sequence: Synthetic oligonucleotide
ucuaguguuucguccacua

SEQ ID NO: 2813437 - RNA, 19 nt, Artificial Sequence
  Description of Artificial Sequence: Synthetic oligonucleotide
ucaugacccacacuucgaa

SEQ ID NO: 2813438 - RNA, 19 nt, Artificial Sequence
  Description of Artificial Sequence: Synthetic oligonucleotide
ucgaugaauuuucucucuc

SEQ ID NO: 2813439 - RNA, 19 nt, Artificial Sequence
  Description of Artificial Sequence: Synthetic oligonucleotide
aaccaacuaaacaaaugaa

SEQ ID NO: 2813440 - RNA, 19 nt, Artificial Sequence
  Description of Artificial Sequence: Synthetic oligonucleotide
ugguugauuuucccaggug

SEQ ID NO: 2813441 - RNA, 19 nt, Artificial Sequence
  Description of Artificial Sequence: Synthetic oligonucleotide
uaacgagaacauuaagauu

SEQ ID NO: 2813442 - RNA, 19 nt, Artificial Sequence
  Description of Artificial Sequence: Synthetic oligonucleotide
ucguccacuaggcuugaac

SEQ ID NO: 2813443 - RNA, 19 nt, Artificial Sequence
  Description of Artificial Sequence: Synthetic oligonucleotide
uggucuuuuguauuauguu

SEQ ID NO: 2813444 - RNA, 19 nt, Artificial Sequence
  Description of Artificial Sequence: Synthetic oligonucleotide
aacaaccaacuaaacaaau

SEQ ID NO: 2813445 - RNA, 19 nt, Artificial Sequence
  Description of Artificial Sequence: Synthetic oligonucleotide
guggcccugaauuaucaug

SEQ ID NO: 2813446 - RNA, 19 nt, Artificial Sequence
  Description of Artificial Sequence: Synthetic oligonucleotide
augacccacacuucgaauu

SEQ ID NO: 2813447 - RNA, 19 nt, Artificial Sequence
  Description of Artificial Sequence: Synthetic oligonucleotide
  modified_base (12)..(12): a, c, u, g, unknown or other
caguaucaauunaacaaca

SEQ ID NO: 2813448 - RNA, 19 nt, Artificial Sequence
  Description of Artificial Sequence: Synthetic oligonucleotide
cacuaucagaaucucucac

SEQ ID NO: 2813449 - RNA, 19 nt, Artificial Sequence
  Description of Artificial Sequence: Synthetic oligonucleotide
ugauugaccucuucaucuc

SEQ ID NO: 2813450 - RNA, 19 nt, Artificial Sequence
  Description of Artificial Sequence: Synthetic oligonucleotide
ucacuuuuccacucauuau

SEQ ID NO: 2813451 - RNA, 19 nt, Artificial Sequence
  Description of Artificial Sequence: Synthetic oligonucleotide
ugacauugaguuuguccac

SEQ ID NO: 2813452 - RNA, 19 nt, Artificial Sequence
  Description of Artificial Sequence: Synthetic oligonucleotide
ugacccacacuucgaauuc

SEQ ID NO: 2813453 - RNA, 19 nt, Artificial Sequence
  Description of Artificial Sequence: Synthetic oligonucleotide
cuuuugaguucucguggcc

SEQ ID NO: 2813454 - RNA, 19 nt, Artificial Sequence
  Description of Artificial Sequence: Synthetic oligonucleotide
auuuucucuagaccacuau

SEQ ID NO: 2813455 - RNA, 19 nt, Artificial Sequence
  Description of Artificial Sequence: Synthetic oligonucleotide
aaugaaaugcauggcuauu

SEQ ID NO: 2813456 - RNA, 19 nt, Artificial Sequence
  Description of Artificial Sequence: Synthetic oligonucleotide
cagccauuuucucuagacc

SEQ ID NO: 2813457 - RNA, 19 nt, Artificial Sequence
  Description of Artificial Sequence: Synthetic oligonucleotide
  modified_base (8)..(8): a, c, u, g, unknown or other
aucaauunaacaacagauu

SEQ ID NO: 2813458 - RNA, 19 nt, Artificial Sequence
  Description of Artificial Sequence: Synthetic oligonucleotide
aaaacguaacgagaacauu

SEQ ID NO: 2813459 - RNA, 19 nt, Artificial Sequence
  Description of Artificial Sequence: Synthetic oligonucleotide
acuuuuccacucauuauca

SEQ ID NO: 2813460 - RNA, 19 nt, Artificial Sequence
  Description of Artificial Sequence: Synthetic oligonucleotide
acguaacgagaacauuaag

SEQ ID NO: 2813461 - RNA, 19 nt, Artificial Sequence
  Description of Artificial Sequence: Synthetic oligonucleotide
auucauucauauugaugaa

SEQ ID NO: 2813462 - RNA, 19 nt, Artificial Sequence
  Description of Artificial Sequence: Synthetic oligonucleotide
ucagaaucucucacugcuc

SEQ ID NO: 2813463 - RNA, 19 nt, Artificial Sequence
  Description of Artificial Sequence: Synthetic oligonucleotide
uccacuaggcuugaacuuc

SEQ ID NO: 2813464 - RNA, 19 nt, Artificial Sequence
  Description of Artificial Sequence: Synthetic oligonucleotide
cugaauuaucaugacccac

SEQ ID NO: 2813465 - RNA, 19 nt, Artificial Sequence
  Description of Artificial Sequence: Synthetic oligonucleotide
agcuaaguacaguaucaau

SEQ ID NO: 2813466 - RNA, 19 nt, Artificial Sequence
  Description of Artificial Sequence: Synthetic oligonucleotide
agauucuagaagaaaguua

SEQ ID NO: 2813467 - RNA, 19 nt, Artificial Sequence
  Description of Artificial Sequence: Synthetic oligonucleotide
auucucaagggcugaacuu

SEQ ID NO: 2813468 - RNA, 19 nt, Artificial Sequence
  Description of Artificial Sequence: Synthetic oligonucleotide
ggucauguauaugaugacc

SEQ ID NO: 2813469 - RNA, 19 nt, Artificial Sequence
  Description of Artificial Sequence: Synthetic oligonucleotide
cucuugauugaccucuuca

SEQ ID NO: 2813470 - RNA, 19 nt, Artificial Sequence
  Description of Artificial Sequence: Synthetic oligonucleotide
cuucgaauucuaguguuuc

SEQ ID NO: 2813471 - RNA, 19 nt, Artificial Sequence
  Description of Artificial Sequence: Synthetic oligonucleotide
ucaagggcugaacuucgau

SEQ ID NO: 2813472 - RNA, 19 nt, Artificial Sequence
  Description of Artificial Sequence: Synthetic oligonucleotide
gaacuucaaaacuucacuu

SEQ ID NO: 2813473 - RNA, 19 nt, Artificial Sequence
  Description of Artificial Sequence: Synthetic oligonucleotide
ugaacucuugauugaccuc

SEQ ID NO: 2813474 - RNA, 19 nt, Artificial Sequence
  Description of Artificial Sequence: Synthetic oligonucleotide
cucggucauguauaugaug

SEQ ID NO: 2813475 - RNA, 19 nt, Artificial Sequence
  Description of Artificial Sequence: Synthetic oligonucleotide
cuaguguuucguccacuag

SEQ ID NO: 2813476 - RNA, 19 nt, Artificial Sequence
  Description of Artificial Sequence: Synthetic oligonucleotide
gaacucuugauugaccucu

SEQ ID NO: 2813477 - RNA, 19 nt, Artificial Sequence
  Description of Artificial Sequence: Synthetic oligonucleotide
ucuucaucuccuguccugu

SEQ ID NO: 2813478 - RNA, 19 nt, Artificial Sequence
  Description of Artificial Sequence: Synthetic oligonucleotide
cuaaacaaaugaaaugcau

SEQ ID NO: 2813479 - RNA, 19 nt, Artificial Sequence
  Description of Artificial Sequence: Synthetic oligonucleotide
acucuugauugaccucuuc

SEQ ID NO: 2813480 - RNA, 19 nt, Artificial Sequence
  Description of Artificial Sequence: Synthetic oligonucleotide
gucgucuuccauucucaag

SEQ ID NO: 2813481 - RNA, 19 nt, Artificial Sequence
  Description of Artificial Sequence: Synthetic oligonucleotide
aacagccauuuucucuaga

SEQ ID NO: 2813482 - RNA, 19 nt, Artificial Sequence
  Description of Artificial Sequence: Synthetic oligonucleotide
auguuauuaccuagcacca

SEQ ID NO: 2813483 - RNA, 19 nt, Artificial Sequence
  Description of Artificial Sequence: Synthetic oligonucleotide
ggucuuuuguauuauguua

SEQ ID NO: 2813484 - RNA, 19 nt, Artificial Sequence
  Description of Artificial Sequence: Synthetic oligonucleotide
ugaccucuucaucuccugu

SEQ ID NO: 2813485 - RNA, 19 nt, Artificial Sequence
  Description of Artificial Sequence: Synthetic oligonucleotide
uuaaugacaugagcucggu

SEQ ID NO: 2813486 - RNA, 19 nt, Artificial Sequence
  Description of Artificial Sequence: Synthetic oligonucleotide
cauuaagauucuagaagaa

SEQ ID NO: 2813487 - RNA, 19 nt, Artificial Sequence
  Description of Artificial Sequence: Synthetic oligonucleotide
ucguggcccugaauuauca

SEQ ID NO: 2813488 - RNA, 19 nt, Artificial Sequence
  Description of Artificial Sequence: Synthetic oligonucleotide
augaauuuucucucuccuu

SEQ ID NO: 2813489 - RNA, 19 nt, Artificial Sequence
  Description of Artificial Sequence: Synthetic oligonucleotide
uaaugacaugagcucgguc

SEQ ID NO: 2813490 - RNA, 19 nt, Artificial Sequence
  Description of Artificial Sequence: Synthetic oligonucleotide
augacaugagcucggucau

SEQ ID NO: 2813491 - RNA, 19 nt, Artificial Sequence
  Description of Artificial Sequence: Synthetic oligonucleotide
gacauugaguuuguccaca

SEQ ID NO: 2813492 - RNA, 19 nt, Artificial Sequence
  Description of Artificial Sequence: Synthetic oligonucleotide
cucuccuuuugaguucucg

SEQ ID NO: 2813493 - RNA, 19 nt, Artificial Sequence
  Description of Artificial Sequence: Synthetic oligonucleotide
ucaaaagaaugagcaucac

SEQ ID NO: 2813494 - RNA, 19 nt, Artificial Sequence
  Description of Artificial Sequence: Synthetic oligonucleotide
gugauccuuugacauugag

SEQ ID NO: 2813495 - RNA, 19 nt, Artificial Sequence
  Description of Artificial Sequence: Synthetic oligonucleotide
uugauuuucccaggugauc

SEQ ID NO: 2813496 - RNA, 19 nt, Artificial Sequence
  Description of Artificial Sequence: Synthetic oligonucleotide
caacagauuuggucuuuug

SEQ ID NO: 2813497 - RNA, 19 nt, Artificial Sequence
  Description of Artificial Sequence: Synthetic oligonucleotide
  modified_base (4)..(4): a, c, u, g, unknown or other
auunaacaacagauuuggu

SEQ ID NO: 2813498 - RNA, 19 nt, Artificial Sequence
  Description of Artificial Sequence: Synthetic oligonucleotide
uuuugucgucuuccauucu

SEQ ID NO: 2813499 - RNA, 19 nt, Artificial Sequence
  Description of Artificial Sequence: Synthetic oligonucleotide
cguaacgagaacauuaaga

SEQ ID NO: 2813500 - RNA, 19 nt, Artificial Sequence
  Description of Artificial Sequence: Synthetic oligonucleotide
uagcuaaguacaguaucaa

SEQ ID NO: 2813501 - RNA, 19 nt, Artificial Sequence
  Description of Artificial Sequence: Synthetic oligonucleotide
uccuguuguucuuggacuu

SEQ ID NO: 2813502 - RNA, 19 nt, Artificial Sequence
  Description of Artificial Sequence: Synthetic oligonucleotide
acuucacuuuuccacucau

SEQ ID NO: 2813503 - RNA, 19 nt, Artificial Sequence
  Description of Artificial Sequence: Synthetic oligonucleotide
agaccacuaucagaaucuc

SEQ ID NO: 2813504 - RNA, 19 nt, Artificial Sequence
  Description of Artificial Sequence: Synthetic oligonucleotide
ugagcucggucauguauau

SEQ ID NO: 2813505 - RNA, 19 nt, Artificial Sequence
  Description of Artificial Sequence: Synthetic oligonucleotide
aucuccuguccuguuguuc

SEQ ID NO: 2813506 - RNA, 19 nt, Artificial Sequence
  Description of Artificial Sequence: Synthetic oligonucleotide
acauugaguuuguccacaa

SEQ ID NO: 2813507 - RNA, 19 nt, Artificial Sequence
  Description of Artificial Sequence: Synthetic oligonucleotide
gcuaaaacguaacgagaac

SEQ ID NO: 2813508 - RNA, 19 nt, Artificial Sequence
  Description of Artificial Sequence: Synthetic oligonucleotide
augcauggcuauuuauuuu

SEQ ID NO: 2813509 - RNA, 19 nt, Artificial Sequence
  Description of Artificial Sequence: Synthetic oligonucleotide
gaaaugcauggcuauuuau

SEQ ID NO: 2813510 - RNA, 19 nt, Artificial Sequence
  Description of Artificial Sequence: Synthetic oligonucleotide
ccuuuugaguucucguggc

SEQ ID NO: 2813511 - RNA, 19 nt, Artificial Sequence
  Description of Artificial Sequence: Synthetic oligonucleotide
uucucguggcccugaauua

SEQ ID NO: 2813512 - RNA, 19 nt, Artificial Sequence
  Description of Artificial Sequence: Synthetic oligonucleotide
acuaggcuugaacuucaaa

SEQ ID NO: 2813513 - RNA, 19 nt, Artificial Sequence
  Description of Artificial Sequence: Synthetic oligonucleotide
cuuuuguauuauguuauua

SEQ ID NO: 2813514 - RNA, 19 nt, Artificial Sequence
  Description of Artificial Sequence: Synthetic oligonucleotide
uguuauuaccuagcaccau

SEQ ID NO: 2813515 - RNA, 19 nt, Artificial Sequence
  Description of Artificial Sequence: Synthetic oligonucleotide
aguuagcuaaguacaguau

SEQ ID NO: 2813516 - RNA, 19 nt, Artificial Sequence
  Description of Artificial Sequence: Synthetic oligonucleotide
ugaugaccaacagccauuu

SEQ ID NO: 2813517 - RNA, 19 nt, Artificial Sequence
  Description of Artificial Sequence: Synthetic oligonucleotide
ugucgucuuccauucucaa

SEQ ID NO: 2813518 - RNA, 19 nt, Artificial Sequence
  Description of Artificial Sequence: Synthetic oligonucleotide
gaaugagcaucacauucau

SEQ ID NO: 2813519 - RNA, 19 nt, Artificial Sequence
  Description of Artificial Sequence: Synthetic oligonucleotide
aacaacagauuuggucuuu

SEQ ID NO: 2813520 - RNA, 19 nt, Artificial Sequence
  Description of Artificial Sequence: Synthetic oligonucleotide
ccaacuaaacaaaugaaau

SEQ ID NO: 2813521 - RNA, 19 nt, Artificial Sequence
  Description of Artificial Sequence: Synthetic oligonucleotide
gucuuuuguauuauguuau

SEQ ID NO: 2813522 - RNA, 19 nt, Artificial Sequence
  Description of Artificial Sequence: Synthetic oligonucleotide
guucucguggcccugaauu

SEQ ID NO: 2813523 - RNA, 19 nt, Artificial Sequence
  Description of Artificial Sequence: Synthetic oligonucleotide
uaccuagcaccaugacucu

SEQ ID NO: 2813524 - RNA, 19 nt, Artificial Sequence
  Description of Artificial Sequence: Synthetic oligonucleotide
auuuggucuuuuguauuau

SEQ ID NO: 2813525 - RNA, 19 nt, Artificial Sequence
  Description of Artificial Sequence: Synthetic oligonucleotide
caugacucuuuuguuaaaa

SEQ ID NO: 2813526 - RNA, 19 nt, Artificial Sequence
  Description of Artificial Sequence: Synthetic oligonucleotide
caacagccauuuucucuag

SEQ ID NO: 2813527 - RNA, 19 nt, Artificial Sequence
  Description of Artificial Sequence: Synthetic oligonucleotide
cauucucaagggcugaacu

SEQ ID NO: 2813528 - RNA, 19 nt, Artificial Sequence
  Description of Artificial Sequence: Synthetic oligonucleotide
auaugaugaccaacagcca

SEQ ID NO: 2813529 - RNA, 19 nt, Artificial Sequence
  Description of Artificial Sequence: Synthetic oligonucleotide
aucucucacugcucuucug

SEQ ID NO: 2813530 - RNA, 19 nt, Artificial Sequence
  Description of Artificial Sequence: Synthetic oligonucleotide
caccaugacucuuuuguua

SEQ ID NO: 2813531 - RNA, 19 nt, Artificial Sequence
  Description of Artificial Sequence: Synthetic oligonucleotide
cagauuuggucuuuuguau

SEQ ID NO: 2813532 - RNA, 19 nt, Artificial Sequence
  Description of Artificial Sequence: Synthetic oligonucleotide
ucucguggcccugaauuau

SEQ ID NO: 2813533 - RNA, 19 nt, Artificial Sequence
  Description of Artificial Sequence: Synthetic oligonucleotide
uucuaguguuucguccacu

SEQ ID NO: 2813534 - RNA, 19 nt, Artificial Sequence
  Description of Artificial Sequence: Synthetic oligonucleotide
gaccaacagccauuuucuc

SEQ ID NO: 2813535 - RNA, 19 nt, Artificial Sequence
  Description of Artificial Sequence: Synthetic oligonucleotide
gacaugagcucggucaugu

SEQ ID NO: 2813536 - RNA, 19 nt, Artificial Sequence
  Description of Artificial Sequence: Synthetic oligonucleotide
guccuguuguucuuggacu

SEQ ID NO: 2813537 - RNA, 19 nt, Artificial Sequence
  Description of Artificial Sequence: Synthetic oligonucleotide
gcccugaauuaucaugacc

SEQ ID NO: 2813538 - RNA, 19 nt, Artificial Sequence
  Description of Artificial Sequence: Synthetic oligonucleotide
uuccauucucaagggcuga

SEQ ID NO: 2813539 - RNA, 19 nt, Artificial Sequence
  Description of Artificial Sequence: Synthetic oligonucleotide
gagcaucacauucauucau

SEQ ID NO: 2813540 - RNA, 19 nt, Artificial Sequence
  Description of Artificial Sequence: Synthetic oligonucleotide
gcuugaacuucaaaacuuc

SEQ ID NO: 2813541 - RNA, 19 nt, Artificial Sequence
  Description of Artificial Sequence: Synthetic oligonucleotide
acgagaacauuaagauucu

SEQ ID NO: 2813542 - RNA, 19 nt, Artificial Sequence
  Description of Artificial Sequence: Synthetic oligonucleotide
uagcaccaugacucuuuug

SEQ ID NO: 2813543 - RNA, 19 nt, Artificial Sequence
  Description of Artificial Sequence: Synthetic oligonucleotide
cucguggcccugaauuauc

SEQ ID NO: 2813544 - RNA, 19 nt, Artificial Sequence
  Description of Artificial Sequence: Synthetic oligonucleotide
auccuuugacauugaguuu

SEQ ID NO: 2813545 - RNA, 19 nt, Artificial Sequence
  Description of Artificial Sequence: Synthetic oligonucleotide
augagcucggucauguaua

SEQ ID NO: 2813546 - RNA, 19 nt, Artificial Sequence
  Description of Artificial Sequence: Synthetic oligonucleotide
ugaguucucguggcccuga

SEQ ID NO: 2813547 - RNA, 19 nt, Artificial Sequence
  Description of Artificial Sequence: Synthetic oligonucleotide
cagaaucucucacugcucu

SEQ ID NO: 2813548 - RNA, 19 nt, Artificial Sequence
  Description of Artificial Sequence: Synthetic oligonucleotide
agaaucucucacugcucuu

SEQ ID NO: 2813549 - RNA, 19 nt, Artificial Sequence
  Description of Artificial Sequence: Synthetic oligonucleotide
aaugagcaucacauucauu

SEQ ID NO: 2813550 - RNA, 19 nt, Artificial Sequence
  Description of Artificial Sequence: Synthetic oligonucleotide
gauuuucccaggugauccu

SEQ ID NO: 2813551 - RNA, 19 nt, Artificial Sequence
  Description of Artificial Sequence: Synthetic oligonucleotide
cuuuuccacucauuaucaa

SEQ ID NO: 2813552 - RNA, 19 nt, Artificial Sequence
  Description of Artificial Sequence: Synthetic oligonucleotide
aucaugacccacacuucga

SEQ ID NO: 2813553 - RNA, 19 nt, Artificial Sequence
  Description of Artificial Sequence: Synthetic oligonucleotide
ugacaugagcucggucaug

SEQ ID NO: 2813554 - RNA, 19 nt, Artificial Sequence
  Description of Artificial Sequence: Synthetic oligonucleotide
gcuaaguacaguaucaauu

SEQ ID NO: 2813555 - RNA, 19 nt, Artificial Sequence
  Description of Artificial Sequence: Synthetic oligonucleotide
augaugaccaacagccauu

SEQ ID NO: 2813556 - RNA, 19 nt, Artificial Sequence
  Description of Artificial Sequence: Synthetic oligonucleotide
cauuuucucuagaccacua

SEQ ID NO: 2813557 - RNA, 19 nt, Artificial Sequence
  Description of Artificial Sequence: Synthetic oligonucleotide
uugaguucucguggcccug

SEQ ID NO: 2813558 - RNA, 19 nt, Artificial Sequence
  Description of Artificial Sequence: Synthetic oligonucleotide
uccauucucaagggcugaa

SEQ ID NO: 2813559 - RNA, 19 nt, Artificial Sequence
  Description of Artificial Sequence: Synthetic oligonucleotide
ccaacagccauuuucucua

SEQ ID NO: 2813560 - RNA, 19 nt, Artificial Sequence
  Description of Artificial Sequence: Synthetic oligonucleotide
acuucgaauucuaguguuu

SEQ ID NO: 2813561 - RNA, 19 nt, Artificial Sequence
  Description of Artificial Sequence: Synthetic oligonucleotide
acaacagauuuggucuuuu

SEQ ID NO: 2813562 - RNA, 19 nt, Artificial Sequence
  Description of Artificial Sequence: Synthetic oligonucleotide
aguucucguggcccugaau

SEQ ID NO: 2813563 - RNA, 19 nt, Artificial Sequence
  Description of Artificial Sequence: Synthetic oligonucleotide
agggcugaacuucgaugaa

SEQ ID NO: 2813564 - RNA, 19 nt, Artificial Sequence
  Description of Artificial Sequence: Synthetic oligonucleotide
guugauuuucccaggugau

SEQ ID NO: 2813565 - RNA, 19 nt, Artificial Sequence
  Description of Artificial Sequence: Synthetic oligonucleotide
cugaacuucgaugaauuuu

SEQ ID NO: 2813566 - RNA, 19 nt, Artificial Sequence
  Description of Artificial Sequence: Synthetic oligonucleotide
cgaauucuaguguuucguc

SEQ ID NO: 2813567 - RNA, 19 nt, Artificial Sequence
  Description of Artificial Sequence: Synthetic oligonucleotide
cuuugacauugaguuuguc

SEQ ID NO: 2813568 - RNA, 19 nt, Artificial Sequence
  Description of Artificial Sequence: Synthetic oligonucleotide
ccugaauuaucaugaccca

SEQ ID NO: 2813569 - RNA, 19 nt, Artificial Sequence
  Description of Artificial Sequence: Synthetic oligonucleotide
cauugaguuuguccacaaa

SEQ ID NO: 2813570 - RNA, 19 nt, Artificial Sequence
  Description of Artificial Sequence: Synthetic oligonucleotide
cgucuuccauucucaaggg

SEQ ID NO: 2813571 - RNA, 19 nt, Artificial Sequence
  Description of Artificial Sequence: Synthetic oligonucleotide
aacucuugauugaccucuu

SEQ ID NO: 2813572 - RNA, 19 nt, Artificial Sequence
  Description of Artificial Sequence: Synthetic oligonucleotide
gccauuuucucuagaccac

SEQ ID NO: 2813573 - RNA, 19 nt, Artificial Sequence
  Description of Artificial Sequence: Synthetic oligonucleotide
cccacacuucgaauucuag

SEQ ID NO: 2813574 - RNA, 19 nt, Artificial Sequence
  Description of Artificial Sequence: Synthetic oligonucleotide
cucaagggcugaacuucga

SEQ ID NO: 2813575 - RNA, 19 nt, Artificial Sequence
  Description of Artificial Sequence: Synthetic oligonucleotide
uuucguccacuaggcuuga

SEQ ID NO: 2813576 - RNA, 19 nt, Artificial Sequence
  Description of Artificial Sequence: Synthetic oligonucleotide
cacuucgaauucuaguguu

SEQ ID NO: 2813577 - RNA, 19 nt, Artificial Sequence
  Description of Artificial Sequence: Synthetic oligonucleotide
gaacuucgaugaauuuucu

SEQ ID NO: 2813578 - RNA, 19 nt, Artificial Sequence
  Description of Artificial Sequence: Synthetic oligonucleotide
gaccacuaucagaaucucu

SEQ ID NO: 2813579 - RNA, 19 nt, Artificial Sequence
  Description of Artificial Sequence: Synthetic oligonucleotide
ccacuaucagaaucucuca

SEQ ID NO: 2813580 - RNA, 19 nt, Artificial Sequence
  Description of Artificial Sequence: Synthetic oligonucleotide
ggcccugaauuaucaugac

SEQ ID NO: 2813581 - RNA, 19 nt, Artificial Sequence
  Description of Artificial Sequence: Synthetic oligonucleotide
cuguccuguuguucuugga

SEQ ID NO: 2813582 - RNA, 19 nt, Artificial Sequence
  Description of Artificial Sequence: Synthetic oligonucleotide
acaugagcucggucaugua

SEQ ID NO: 2813583 - RNA, 19 nt, Artificial Sequence
  Description of Artificial Sequence: Synthetic oligonucleotide
guccacuaggcuugaacuu

SEQ ID NO: 2813584 - RNA, 19 nt, Artificial Sequence
  Description of Artificial Sequence: Synthetic oligonucleotide
caucacauucauucauauu

SEQ ID NO: 2813585 - RNA, 19 nt, Artificial Sequence
  Description of Artificial Sequence: Synthetic oligonucleotide
ggcuugaacuucaaaacuu

SEQ ID NO: 2813586 - RNA, 19 nt, Artificial Sequence
  Description of Artificial Sequence: Synthetic oligonucleotide
ccaggugauccuuugacau

SEQ ID NO: 2813587 - RNA, 19 nt, Artificial Sequence
  Description of Artificial Sequence: Synthetic oligonucleotide
gaguucucguggcccugaa

SEQ ID NO: 2813588 - RNA, 19 nt, Artificial Sequence
  Description of Artificial Sequence: Synthetic oligonucleotide
caugacccacacuucgaau

SEQ ID NO: 2813589 - RNA, 19 nt, Artificial Sequence
  Description of Artificial Sequence: Synthetic oligonucleotide
cccaggugauccuuugaca

SEQ ID NO: 2813590 - RNA, 19 nt, Artificial Sequence
  Description of Artificial Sequence: Synthetic oligonucleotide
gacccacacuucgaauucu

SEQ ID NO: 2813591 - RNA, 19 nt, Artificial Sequence
  Description of Artificial Sequence: Synthetic oligonucleotide
guguuucguccacuaggcu

SEQ ID NO: 2813592 - RNA, 19 nt, Artificial Sequence
  Description of Artificial Sequence: Synthetic oligonucleotide
ccauucucaagggcugaac

SEQ ID NO: 2813593 - RNA, 19 nt, Artificial Sequence
  Description of Artificial Sequence: Synthetic oligonucleotide
acccacacuucgaauucua

SEQ ID NO: 2813594 - RNA, 19 nt, Artificial Sequence
  Description of Artificial Sequence: Synthetic oligonucleotide
ccacuaggcuugaacuuca

SEQ ID NO: 2813595 - RNA, 19 nt, Artificial Sequence
  Description of Artificial Sequence: Synthetic oligonucleotide
ccacacuucgaauucuagu

SEQ ID NO: 2813596 - RNA, 19 nt, Artificial Sequence
  Description of Artificial Sequence: Synthetic oligonucleotide
cuucacuuuuccacucauu

SEQ ID NO: 2813597 - RNA, 19 nt, Artificial Sequence
  Description of Artificial Sequence: Synthetic oligonucleotide
cggucauguauaugaugac

SEQ ID NO: 2813598 - RNA, 19 nt, Artificial Sequence
  Description of Artificial Sequence: Synthetic oligonucleotide
cacuaggcuugaacuucaa

SEQ ID NO: 2813599 - RNA, 19 nt, Artificial Sequence
  Description of Artificial Sequence: Synthetic oligonucleotide
accuagcaccaugacucuu

SEQ ID NO: 2813600 - RNA, 19 nt, Artificial Sequence
  Description of Artificial Sequence: Synthetic oligonucleotide
cguccacuaggcuugaacu

SEQ ID NO: 2813601 - RNA, 19 nt, Artificial Sequence
  Description of Artificial Sequence: Synthetic oligonucleotide
ggcugaacuucgaugaauu

SEQ ID NO: 2813602 - RNA, 19 nt, Artificial Sequence
  Description of Artificial Sequence: Synthetic oligonucleotide
gaugaccaacagccauuuu

SEQ ID NO: 2813603 - RNA, 19 nt, Artificial Sequence
  Description of Artificial Sequence: Synthetic oligonucleotide
caggugauccuuugacauu

SEQ ID NO: 2813604 - RNA, 19 nt, Artificial Sequence
  Description of Artificial Sequence: Synthetic oligonucleotide
cuagcaccaugacucuuuu

SEQ ID NO: 2813605 - RNA, 19 nt, Artificial Sequence
  Description of Artificial Sequence: Synthetic oligonucleotide
uucguccacuaggcuugaa

SEQ ID NO: 2813606 - RNA, 19 nt, Artificial Sequence
  Description of Artificial Sequence: Synthetic oligonucleotide
ggugauccuuugacauuga

SEQ ID NO: 2813607 - RNA, 19 nt, Artificial Sequence
  Description of Artificial Sequence: Synthetic oligonucleotide
gcugaacuucgaugaauuu

SEQ ID NO: 2813608 - RNA, 19 nt, Artificial Sequence
  Description of Artificial Sequence: Synthetic oligonucleotide
ccuagcaccaugacucuuu

SEQ ID NO: 2813609 - RNA, 19 nt, Artificial Sequence
  Description of Artificial Sequence: Synthetic oligonucleotide
cuucaucuccuguccuguu

SEQ ID NO: 2813610 - RNA, 19 nt, Artificial Sequence
  Description of Artificial Sequence: Synthetic oligonucleotide
gcaccaugacucuuuuguu

SEQ ID NO: 2813611 - RNA, 19 nt, Artificial Sequence
  Description of Artificial Sequence: Synthetic oligonucleotide
ccaugacucuuuuguuaaa

SEQ ID NO: 2813612 - RNA, 19 nt, Artificial Sequence
  Description of Artificial Sequence: Synthetic oligonucleotide
ccuuugacauugaguuugu

SEQ ID NO: 2813613 - RNA, 19 nt, Artificial Sequence
  Description of Artificial Sequence: Synthetic oligonucleotide
ccauuuucucuagaccacu

SEQ ID NO: 2813614 - RNA, 19 nt, Artificial Sequence
  Description of Artificial Sequence: Synthetic oligonucleotide
gggcugaacuucgaugaau

SEQ ID NO: 2813615 - RNA, 19 nt, Artificial Sequence
  Description of Artificial Sequence: Synthetic oligonucleotide
caucuccuguccuguuguu

SEQ ID NO: 2813616 - RNA, 19 nt, Artificial Sequence
  Description of Artificial Sequence: Synthetic oligonucleotide
ccucuucaucuccuguccu

SEQ ID NO: 2813617 - RNA, 19 nt, Artificial Sequence
  Description of Artificial Sequence: Synthetic oligonucleotide
gcucggucauguauaugau

SEQ ID NO: 2813618 - RNA, 19 nt, Artificial Sequence
  Description of Artificial Sequence: Synthetic oligonucleotide
cgagaacauuaagauucua

SEQ ID NO: 2813619 - RNA, 19 nt, Artificial Sequence
  Description of Artificial Sequence: Synthetic oligonucleotide
ccuguuguucuuggacuuu

SEQ ID NO: 2813620 - RNA, 19 nt, Artificial Sequence
  Description of Artificial Sequence: Synthetic oligonucleotide
cguggcccugaauuaucau

SEQ ID NO: 2813621 - RNA, 19 nt, Artificial Sequence
  Description of Artificial Sequence: Synthetic oligonucleotide
  modified_base (1)..(1): a, c, u, g, unknown or other
naacaacagauuuggucuu

SEQ ID NO: 2813622 - RNA, 19 nt, Artificial Sequence
  Description of Artificial Sequence: Synthetic oligonucleotide
uguucuuucuccuucaugc

SEQ ID NO: 2813623 - RNA, 19 nt, Artificial Sequence
  Description of Artificial Sequence: Synthetic oligonucleotide
agggaugagauauagggac

SEQ ID NO: 2813624 - RNA, 19 nt, Artificial Sequence
  Description of Artificial Sequence: Synthetic oligonucleotide
caugcggucaaucagagcc

SEQ ID NO: 2813625 - RNA, 19 nt, Artificial Sequence
  Description of Artificial Sequence: Synthetic oligonucleotide
ucugacuggaaucuggaga

SEQ ID NO: 2813626 - RNA, 19 nt, Artificial Sequence
  Description of Artificial Sequence: Synthetic oligonucleotide
acuuguugcagauuuacca

SEQ ID NO: 2813627 - RNA, 19 nt, Artificial Sequence
  Description of Artificial Sequence: Synthetic oligonucleotide
ugcagauuuaccaugcggu

SEQ ID NO: 2813628 - RNA, 19 nt, Artificial Sequence
  Description of Artificial Sequence: Synthetic oligonucleotide
auaccaggcuuccagcucc

SEQ ID NO: 2813629 - RNA, 19 nt, Artificial Sequence
  Description of Artificial Sequence: Synthetic oligonucleotide
gagucuaggguagugaagg

SEQ ID NO: 2813630 - RNA, 19 nt, Artificial Sequence
  Description of Artificial Sequence: Synthetic oligonucleotide
uugcagauuuaccaugcgg

SEQ ID NO: 2813631 - RNA, 19 nt, Artificial Sequence
  Description of Artificial Sequence: Synthetic oligonucleotide
ugccaugucuaguaguugg

SEQ ID NO: 2813632 - RNA, 19 nt, Artificial Sequence
  Description of Artificial Sequence: Synthetic oligonucleotide
uucaucugaggacagcacc

SEQ ID NO: 2813633 - RNA, 19 nt, Artificial Sequence
  Description of Artificial Sequence: Synthetic oligonucleotide
agccauagagcucugacug

SEQ ID NO: 2813634 - RNA, 19 nt, Artificial Sequence
  Description of Artificial Sequence: Synthetic oligonucleotide
ugcagauccucauaccagg

SEQ ID NO: 2813635 - RNA, 19 nt, Artificial Sequence
  Description of Artificial Sequence: Synthetic oligonucleotide
ucauacuuguugcagauuu

SEQ ID NO: 2813636 - RNA, 19 nt, Artificial Sequence
  Description of Artificial Sequence: Synthetic oligonucleotide
augucuaguaguuggacug

SEQ ID NO: 2813637 - RNA, 19 nt, Artificial Sequence
  Description of Artificial Sequence: Synthetic oligonucleotide
uguugcagauuuaccaugc

SEQ ID NO: 2813638 - RNA, 19 nt, Artificial Sequence
  Description of Artificial Sequence: Synthetic oligonucleotide
uuuccaagggaugagauau

SEQ ID NO: 2813639 - RNA, 19 nt, Artificial Sequence
  Description of Artificial Sequence: Synthetic oligonucleotide
uuccuccugagccauagag

SEQ ID NO: 2813640 - RNA, 19 nt, Artificial Sequence
  Description of Artificial Sequence: Synthetic oligonucleotide
uccuugaucuuccucuucc

SEQ ID NO: 2813641 - RNA, 19 nt, Artificial Sequence
  Description of Artificial Sequence: Synthetic oligonucleotide
auacuuguugcagauuuac

SEQ ID NO: 2813642 - RNA, 19 nt, Artificial Sequence
  Description of Artificial Sequence: Synthetic oligonucleotide
ugcguugcuucccagcccg

SEQ ID NO: 2813643 - RNA, 19 nt, Artificial Sequence
  Description of Artificial Sequence: Synthetic oligonucleotide
ucaaucagagcccggcgag

SEQ ID NO: 2813644 - RNA, 19 nt, Artificial Sequence
  Description of Artificial Sequence: Synthetic oligonucleotide
uuuucaucugaggacagca

SEQ ID NO: 2813645 - RNA, 19 nt, Artificial Sequence
  Description of Artificial Sequence: Synthetic oligonucleotide
ugcuugugaccucugcugg

SEQ ID NO: 2813646 - RNA, 19 nt, Artificial Sequence
  Description of Artificial Sequence: Synthetic oligonucleotide
uguucauacuuguugcaga

SEQ ID NO: 2813647 - RNA, 19 nt, Artificial Sequence
  Description of Artificial Sequence: Synthetic oligonucleotide
ucuaggguagugaagguuu

SEQ ID NO: 2813648 - RNA, 19 nt, Artificial Sequence
  Description of Artificial Sequence: Synthetic oligonucleotide
ucuucauuuccaagggaug

SEQ ID NO: 2813649 - RNA, 19 nt, Artificial Sequence
  Description of Artificial Sequence: Synthetic oligonucleotide
aagcuagggaugcggaguc

SEQ ID NO: 2813650 - RNA, 19 nt, Artificial Sequence
  Description of Artificial Sequence: Synthetic oligonucleotide
cuggacaccgucuccaagg

SEQ ID NO: 2813651 - RNA, 19 nt, Artificial Sequence
  Description of Artificial Sequence: Synthetic oligonucleotide
guucguucucuucagcuag

SEQ ID NO: 2813652 - RNA, 19 nt, Artificial Sequence
  Description of Artificial Sequence: Synthetic oligonucleotide
ugagccauagagcucugac

SEQ ID NO: 2813653 - RNA, 19 nt, Artificial Sequence
  Description of Artificial Sequence: Synthetic oligonucleotide
cucuguuuccguuuccuag

SEQ ID NO: 2813654 - RNA, 19 nt, Artificial Sequence
  Description of Artificial Sequence: Synthetic oligonucleotide
ugugcuacuuuccucucgu

SEQ ID NO: 2813655 - RNA, 19 nt, Artificial Sequence
  Description of Artificial Sequence: Synthetic oligonucleotide
uuguugcagauuuaccaug

SEQ ID NO: 2813656 - RNA, 19 nt, Artificial Sequence
  Description of Artificial Sequence: Synthetic oligonucleotide
uuuccucucguucuccugu

SEQ ID NO: 2813657 - RNA, 19 nt, Artificial Sequence
  Description of Artificial Sequence: Synthetic oligonucleotide
agggaugcggagucuaggg

SEQ ID NO: 2813658 - RNA, 19 nt, Artificial Sequence
  Description of Artificial Sequence: Synthetic oligonucleotide
uacuuguugcagauuuacc

SEQ ID NO: 2813659 - RNA, 19 nt, Artificial Sequence
  Description of Artificial Sequence: Synthetic oligonucleotide
uccucagucagccaagcua

SEQ ID NO: 2813660 - RNA, 19 nt, Artificial Sequence
  Description of Artificial Sequence: Synthetic oligonucleotide
uccaagggaugagauauag

SEQ ID NO: 2813661 - RNA, 19 nt, Artificial Sequence
  Description of Artificial Sequence: Synthetic oligonucleotide
uaccaugcggucaaucaga

SEQ ID NO: 2813662 - RNA, 19 nt, Artificial Sequence
  Description of Artificial Sequence: Synthetic oligonucleotide
agcugugcuacuuuccucu

SEQ ID NO: 2813663 - RNA, 19 nt, Artificial Sequence
  Description of Artificial Sequence: Synthetic oligonucleotide
uucuuucuccuucaugcgu

SEQ ID NO: 2813664 - RNA, 19 nt, Artificial Sequence
  Description of Artificial Sequence: Synthetic oligonucleotide
uucucuucagcuagcugug

SEQ ID NO: 2813665 - RNA, 19 nt, Artificial Sequence
  Description of Artificial Sequence: Synthetic oligonucleotide
uccguuuccuaguucuucc

SEQ ID NO: 2813666 - RNA, 19 nt, Artificial Sequence
  Description of Artificial Sequence: Synthetic oligonucleotide
auuuucaucugaggacagc

SEQ ID NO: 2813667 - RNA, 19 nt, Artificial Sequence
  Description of Artificial Sequence: Synthetic oligonucleotide
caugcguugcuucccagcc

SEQ ID NO: 2813668 - RNA, 19 nt, Artificial Sequence
  Description of Artificial Sequence: Synthetic oligonucleotide
uccuccugagccauagagc

SEQ ID NO: 2813669 - RNA, 19 nt, Artificial Sequence
  Description of Artificial Sequence: Synthetic oligonucleotide
uaguaguuggacuggguuc

SEQ ID NO: 2813670 - RNA, 19 nt, Artificial Sequence
  Description of Artificial Sequence: Synthetic oligonucleotide
guucucuucagcuagcugu

SEQ ID NO: 2813671 - RNA, 19 nt, Artificial Sequence
  Description of Artificial Sequence: Synthetic oligonucleotide
agauuuaccaugcggucaa

SEQ ID NO: 2813672 - RNA, 19 nt, Artificial Sequence
  Description of Artificial Sequence: Synthetic oligonucleotide
ucagucagccaagcuaggg

SEQ ID NO: 2813673 - RNA, 19 nt, Artificial Sequence
  Description of Artificial Sequence: Synthetic oligonucleotide
ugucuaguaguuggacugg

SEQ ID NO: 2813674 - RNA, 19 nt, Artificial Sequence
  Description of Artificial Sequence: Synthetic oligonucleotide
aguaguuggacuggguucu

SEQ ID NO: 2813675 - RNA, 19 nt, Artificial Sequence
  Description of Artificial Sequence: Synthetic oligonucleotide
uucauuuccaagggaugag

SEQ ID NO: 2813676 - RNA, 19 nt, Artificial Sequence
  Description of Artificial Sequence: Synthetic oligonucleotide
gacuggaaucuggagauug

SEQ ID NO: 2813677 - RNA, 19 nt, Artificial Sequence
  Description of Artificial Sequence: Synthetic oligonucleotide
uccuaguucuuccuugauc

SEQ ID NO: 2813678 - RNA, 19 nt, Artificial Sequence
  Description of Artificial Sequence: Synthetic oligonucleotide
ucagccaagcuagggaugc

SEQ ID NO: 2813679 - RNA, 19 nt, Artificial Sequence
  Description of Artificial Sequence: Synthetic oligonucleotide
uccugagccauagagcucu

SEQ ID NO: 2813680 - RNA, 19 nt, Artificial Sequence
  Description of Artificial Sequence: Synthetic oligonucleotide
uuucaucugaggacagcac

SEQ ID NO: 2813681 - RNA, 19 nt, Artificial Sequence
  Description of Artificial Sequence: Synthetic oligonucleotide
agcuagcugugcuacuuuc

SEQ ID NO: 2813682 - RNA, 19 nt, Artificial Sequence
  Description of Artificial Sequence: Synthetic oligonucleotide
accacucuguuuccguuuc

SEQ ID NO: 2813683 - RNA, 19 nt, Artificial Sequence
  Description of Artificial Sequence: Synthetic oligonucleotide
gcuuccagcucccagcugg

SEQ ID NO: 2813684 - RNA, 19 nt, Artificial Sequence
  Description of Artificial Sequence: Synthetic oligonucleotide
uagagcucugacuggaauc

SEQ ID NO: 2813685 - RNA, 19 nt, Artificial Sequence
  Description of Artificial Sequence: Synthetic oligonucleotide
uccuucaugcguugcuucc

SEQ ID NO: 2813686 - RNA, 19 nt, Artificial Sequence
  Description of Artificial Sequence: Synthetic oligonucleotide
agucagccaagcuagggau

SEQ ID NO: 2813687 - RNA, 19 nt, Artificial Sequence
  Description of Artificial Sequence: Synthetic oligonucleotide
aaucagagcccggcgagug

SEQ ID NO: 2813688 - RNA, 19 nt, Artificial Sequence
  Description of Artificial Sequence: Synthetic oligonucleotide
guugcagauuuaccaugcg

SEQ ID NO: 2813689 - RNA, 19 nt, Artificial Sequence
  Description of Artificial Sequence: Synthetic oligonucleotide
gaugcggagucuaggguag

SEQ ID NO: 2813690 - RNA, 19 nt, Artificial Sequence
  Description of Artificial Sequence: Synthetic oligonucleotide
agcugcuugugaccucugc

SEQ ID NO: 2813691 - RNA, 19 nt, Artificial Sequence
  Description of Artificial Sequence: Synthetic oligonucleotide
ucuaguaguuggacugggu

SEQ ID NO: 2813692 - RNA, 19 nt, Artificial Sequence
  Description of Artificial Sequence: Synthetic oligonucleotide
ucaugcguugcuucccagc

SEQ ID NO: 2813693 - RNA, 19 nt, Artificial Sequence
  Description of Artificial Sequence: Synthetic oligonucleotide
cucauaccaggcuuccagc

SEQ ID NO: 2813694 - RNA, 19 nt, Artificial Sequence
  Description of Artificial Sequence: Synthetic oligonucleotide
cugcagauccucauaccag

SEQ ID NO: 2813695 - RNA, 19 nt, Artificial Sequence
  Description of Artificial Sequence: Synthetic oligonucleotide
ucuuccuccugagccauag

SEQ ID NO: 2813696 - RNA, 19 nt, Artificial Sequence
  Description of Artificial Sequence: Synthetic oligonucleotide
agauccucauaccaggcuu

SEQ ID NO: 2813697 - RNA, 19 nt, Artificial Sequence
  Description of Artificial Sequence: Synthetic oligonucleotide
agagcucugacuggaaucu

SEQ ID NO: 2813698 - RNA, 19 nt, Artificial Sequence
  Description of Artificial Sequence: Synthetic oligonucleotide
ucauuuccaagggaugaga

SEQ ID NO: 2813699 - RNA, 19 nt, Artificial Sequence
  Description of Artificial Sequence: Synthetic oligonucleotide
uuggacuggguucugcuuu

SEQ ID NO: 2813700 - RNA, 19 nt, Artificial Sequence
  Description of Artificial Sequence: Synthetic oligonucleotide
auuuaccaugcggucaauc

SEQ ID NO: 2813701 - RNA, 19 nt, Artificial Sequence
  Description of Artificial Sequence: Synthetic oligonucleotide
caggcuuccagcucccagc

SEQ ID NO: 2813702 - RNA, 19 nt, Artificial Sequence
  Description of Artificial Sequence: Synthetic oligonucleotide
uggacaccgucuccaaggc

SEQ ID NO: 2813703 - RNA, 19 nt, Artificial Sequence
  Description of Artificial Sequence: Synthetic oligonucleotide
cauuuucaucugaggacag

SEQ ID NO: 2813704 - RNA, 19 nt, Artificial Sequence
  Description of Artificial Sequence: Synthetic oligonucleotide
gaggacagcaccuccugca

SEQ ID NO: 2813705 - RNA, 19 nt, Artificial Sequence
  Description of Artificial Sequence: Synthetic oligonucleotide
guuuccguuuccuaguucu

SEQ ID NO: 2813706 - RNA, 19 nt, Artificial Sequence
  Description of Artificial Sequence: Synthetic oligonucleotide
aguuggacuggguucugcu

SEQ ID NO: 2813707 - RNA, 19 nt, Artificial Sequence
  Description of Artificial Sequence: Synthetic oligonucleotide
ugaggacagcaccuccugc

SEQ ID NO: 2813708 - RNA, 19 nt, Artificial Sequence
  Description of Artificial Sequence: Synthetic oligonucleotide
augcguugcuucccagccc

SEQ ID NO: 2813709 - RNA, 19 nt, Artificial Sequence
  Description of Artificial Sequence: Synthetic oligonucleotide
guucuccuguucuuucucc

SEQ ID NO: 2813710 - RNA, 19 nt, Artificial Sequence
  Description of Artificial Sequence: Synthetic oligonucleotide
ugcggucaaucagagcccg

SEQ ID NO: 2813711 - RNA, 19 nt, Artificial Sequence
  Description of Artificial Sequence: Synthetic oligonucleotide
auagagcucugacuggaau

SEQ ID NO: 2813712 - RNA, 19 nt, Artificial Sequence
  Description of Artificial Sequence: Synthetic oligonucleotide
uagggaugcggagucuagg

SEQ ID NO: 2813713 - RNA, 19 nt, Artificial Sequence
  Description of Artificial Sequence: Synthetic oligonucleotide
uaguucuuccuugaucuuc

SEQ ID NO: 2813714 - RNA, 19 nt, Artificial Sequence
  Description of Artificial Sequence: Synthetic oligonucleotide
ccucagucagccaagcuag

SEQ ID NO: 2813715 - RNA, 19 nt, Artificial Sequence
  Description of Artificial Sequence: Synthetic oligonucleotide
uucguucucuucagcuagc

SEQ ID NO: 2813716 - RNA, 19 nt, Artificial Sequence
  Description of Artificial Sequence: Synthetic oligonucleotide
cuucauuuccaagggauga

SEQ ID NO: 2813717 - RNA, 19 nt, Artificial Sequence
  Description of Artificial Sequence: Synthetic oligonucleotide
cuugugaccucugcuggcc

SEQ ID NO: 2813718 - RNA, 19 nt, Artificial Sequence
  Description of Artificial Sequence: Synthetic oligonucleotide
acuggaaucuggagauugg

SEQ ID NO: 2813719 - RNA, 19 nt, Artificial Sequence
  Description of Artificial Sequence: Synthetic oligonucleotide
gacaccgucuccaaggcaa

SEQ ID NO: 2813720 - RNA, 19 nt, Artificial Sequence
  Description of Artificial Sequence: Synthetic oligonucleotide
ugggcacugaccacucugu

SEQ ID NO: 2813721 - RNA, 19 nt, Artificial Sequence
  Description of Artificial Sequence: Synthetic oligonucleotide
gaugagauauagggacccc

SEQ ID NO: 2813722 - RNA, 19 nt, Artificial Sequence
  Description of Artificial Sequence: Synthetic oligonucleotide
ucuucagcuagcugugcua

SEQ ID NO: 2813723 - RNA, 19 nt, Artificial Sequence
  Description of Artificial Sequence: Synthetic oligonucleotide
auccucauaccaggcuucc

SEQ ID NO: 2813724 - RNA, 19 nt, Artificial Sequence
  Description of Artificial Sequence: Synthetic oligonucleotide
agcucugacuggaaucugg

SEQ ID NO: 2813725 - RNA, 19 nt, Artificial Sequence
  Description of Artificial Sequence: Synthetic oligonucleotide
uccuguucuuucuccuuca

SEQ ID NO: 2813726 - RNA, 19 nt, Artificial Sequence
  Description of Artificial Sequence: Synthetic oligonucleotide
accgucuccaaggcaaagg

SEQ ID NO: 2813727 - RNA, 19 nt, Artificial Sequence
  Description of Artificial Sequence: Synthetic oligonucleotide
uggcuccucagucagccaa

SEQ ID NO: 2813728 - RNA, 19 nt, Artificial Sequence
  Description of Artificial Sequence: Synthetic oligonucleotide
gcacugaccacucuguuuc

SEQ ID NO: 2813729 - RNA, 19 nt, Artificial Sequence
  Description of Artificial Sequence: Synthetic oligonucleotide
caggcgcucgauuuccugc

SEQ ID NO: 2813730 - RNA, 19 nt, Artificial Sequence
  Description of Artificial Sequence: Synthetic oligonucleotide
ccccucuucauuuccaagg

SEQ ID NO: 2813731 - RNA, 19 nt, Artificial Sequence
  Description of Artificial Sequence: Synthetic oligonucleotide
uuccugcuugagccguucg

SEQ ID NO: 2813732 - RNA, 19 nt, Artificial Sequence
  Description of Artificial Sequence: Synthetic oligonucleotide
uccugcagauccucauacc

SEQ ID NO: 2813733 - RNA, 19 nt, Artificial Sequence
  Description of Artificial Sequence: Synthetic oligonucleotide
cugugcuacuuuccucucg

SEQ ID NO: 2813734 - RNA, 19 nt, Artificial Sequence
  Description of Artificial Sequence: Synthetic oligonucleotide
caaaggcagggacucgagc

SEQ ID NO: 2813735 - RNA, 19 nt, Artificial Sequence
  Description of Artificial Sequence: Synthetic oligonucleotide
uaccucccuggucaggcgc

SEQ ID NO: 2813736 - RNA, 19 nt, Artificial Sequence
  Description of Artificial Sequence: Synthetic oligonucleotide
cucugacuggaaucuggag

SEQ ID NO: 2813737 - RNA, 19 nt, Artificial Sequence
  Description of Artificial Sequence: Synthetic oligonucleotide
cuagggaugcggagucuag

SEQ ID NO: 2813738 - RNA, 19 nt, Artificial Sequence
  Description of Artificial Sequence: Synthetic oligonucleotide
uccugcuugagccguucgu

SEQ ID NO: 2813739 - RNA, 19 nt, Artificial Sequence
  Description of Artificial Sequence: Synthetic oligonucleotide
augcggucaaucagagccc

SEQ ID NO: 2813740 - RNA, 19 nt, Artificial Sequence
  Description of Artificial Sequence: Synthetic oligonucleotide
ggaugagauauagggaccc

SEQ ID NO: 2813741 - RNA, 19 nt, Artificial Sequence
  Description of Artificial Sequence: Synthetic oligonucleotide
cuccaaggcaaaggcaggg

SEQ ID NO: 2813742 - RNA, 19 nt, Artificial Sequence
  Description of Artificial Sequence: Synthetic oligonucleotide
acugaccacucuguuuccg

SEQ ID NO: 2813743 - RNA, 19 nt, Artificial Sequence
  Description of Artificial Sequence: Synthetic oligonucleotide
gucaaucagagcccggcga

SEQ ID NO: 2813744 - RNA, 19 nt, Artificial Sequence
  Description of Artificial Sequence: Synthetic oligonucleotide
ucagagcccggcgaguggc

SEQ ID NO: 2813745 - RNA, 19 nt, Artificial Sequence
  Description of Artificial Sequence: Synthetic oligonucleotide
agccaagcuagggaugcgg

SEQ ID NO: 2813746 - RNA, 19 nt, Artificial Sequence
  Description of Artificial Sequence: Synthetic oligonucleotide
aucagagcccggcgagugg

SEQ ID NO: 2813747 - RNA, 19 nt, Artificial Sequence
  Description of Artificial Sequence: Synthetic oligonucleotide
gucuaguaguuggacuggg

SEQ ID NO: 2813748 - RNA, 19 nt, Artificial Sequence
  Description of Artificial Sequence: Synthetic oligonucleotide
cugggagcugcuugugacc

SEQ ID NO: 2813749 - RNA, 19 nt, Artificial Sequence
  Description of Artificial Sequence: Synthetic oligonucleotide
uucaugcguugcuucccag

SEQ ID NO: 2813750 - RNA, 19 nt, Artificial Sequence
  Description of Artificial Sequence: Synthetic oligonucleotide
ucguucuccuguucuuucu

SEQ ID NO: 2813751 - RNA, 19 nt, Artificial Sequence
  Description of Artificial Sequence: Synthetic oligonucleotide
agggacucgagcugccaug

SEQ ID NO: 2813752 - RNA, 19 nt, Artificial Sequence
  Description of Artificial Sequence: Synthetic oligonucleotide
uguuuccguuuccuaguuc

SEQ ID NO: 2813753 - RNA, 19 nt, Artificial Sequence
  Description of Artificial Sequence: Synthetic oligonucleotide
cugggcacugaccacucug

SEQ ID NO: 2813754 - RNA, 19 nt, Artificial Sequence
  Description of Artificial Sequence: Synthetic oligonucleotide
uugugaccucugcuggccc

SEQ ID NO: 2813755 - RNA, 19 nt, Artificial Sequence
  Description of Artificial Sequence: Synthetic oligonucleotide
guugcuucccagcccgggc

SEQ ID NO: 2813756 - RNA, 19 nt, Artificial Sequence
  Description of Artificial Sequence: Synthetic oligonucleotide
cauaccaggcuuccagcuc

SEQ ID NO: 2813757 - RNA, 19 nt, Artificial Sequence
  Description of Artificial Sequence: Synthetic oligonucleotide
ggucaaucagagcccggcg

SEQ ID NO: 2813758 - RNA, 19 nt, Artificial Sequence
  Description of Artificial Sequence: Synthetic oligonucleotide
agcugccaugucuaguagu

SEQ ID NO: 2813759 - RNA, 19 nt, Artificial Sequence
  Description of Artificial Sequence: Synthetic oligonucleotide
ugggagcugcuugugaccu

SEQ ID NO: 2813760 - RNA, 19 nt, Artificial Sequence
  Description of Artificial Sequence: Synthetic oligonucleotide
agucuaggguagugaaggu

SEQ ID NO: 2813761 - RNA, 19 nt, Artificial Sequence
  Description of Artificial Sequence: Synthetic oligonucleotide
cucuucauuuccaagggau

SEQ ID NO: 2813762 - RNA, 19 nt, Artificial Sequence
  Description of Artificial Sequence: Synthetic oligonucleotide
ugugaccucugcuggcccu

SEQ ID NO: 2813763 - RNA, 19 nt, Artificial Sequence
  Description of Artificial Sequence: Synthetic oligonucleotide
ccucauaccaggcuuccag

SEQ ID NO: 2813764 - RNA, 19 nt, Artificial Sequence
  Description of Artificial Sequence: Synthetic oligonucleotide
ucagcuagcugugcuacuu

SEQ ID NO: 2813765 - RNA, 19 nt, Artificial Sequence
  Description of Artificial Sequence: Synthetic oligonucleotide
aguggccucuaccucccug

SEQ ID NO: 2813766 - RNA, 19 nt, Artificial Sequence
  Description of Artificial Sequence: Synthetic oligonucleotide
gauccucauaccaggcuuc

SEQ ID NO: 2813767 - RNA, 19 nt, Artificial Sequence
  Description of Artificial Sequence: Synthetic oligonucleotide
cugacuggaaucuggagau

SEQ ID NO: 2813768 - RNA, 19 nt, Artificial Sequence
  Description of Artificial Sequence: Synthetic oligonucleotide
uuccguuuccuaguucuuc

SEQ ID NO: 2813769 - RNA, 19 nt, Artificial Sequence
  Description of Artificial Sequence: Synthetic oligonucleotide
cucagucagccaagcuagg

SEQ ID NO: 2813770 - RNA, 19 nt, Artificial Sequence
  Description of Artificial Sequence: Synthetic oligonucleotide
cugaggacagcaccuccug

SEQ ID NO: 2813771 - RNA, 19 nt, Artificial Sequence
  Description of Artificial Sequence: Synthetic oligonucleotide
gagcugccaugucuaguag

SEQ ID NO: 2813772 - RNA, 19 nt, Artificial Sequence
  Description of Artificial Sequence: Synthetic oligonucleotide
agccguucguucucuucag

SEQ ID NO: 2813773 - RNA, 19 nt, Artificial Sequence
  Description of Artificial Sequence: Synthetic oligonucleotide
gacucgagcugccaugucu

SEQ ID NO: 2813774 - RNA, 19 nt, Artificial Sequence
  Description of Artificial Sequence: Synthetic oligonucleotide
cuuguugcagauuuaccau

SEQ ID NO: 2813775 - RNA, 19 nt, Artificial Sequence
  Description of Artificial Sequence: Synthetic oligonucleotide
ccuaguucuuccuugaucu

SEQ ID NO: 2813776 - RNA, 19 nt, Artificial Sequence
  Description of Artificial Sequence: Synthetic oligonucleotide
cucguucuccuguucuuuc

SEQ ID NO: 2813777 - RNA, 19 nt, Artificial Sequence
  Description of Artificial Sequence: Synthetic oligonucleotide
uccaaggcaaaggcaggga

SEQ ID NO: 2813778 - RNA, 19 nt, Artificial Sequence
  Description of Artificial Sequence: Synthetic oligonucleotide
cagauuuaccaugcgguca

SEQ ID NO: 2813779 - RNA, 19 nt, Artificial Sequence
  Description of Artificial Sequence: Synthetic oligonucleotide
cugcuugagccguucguuc

SEQ ID NO: 2813780 - RNA, 19 nt, Artificial Sequence
  Description of Artificial Sequence: Synthetic oligonucleotide
caugucuaguaguuggacu

SEQ ID NO: 2813781 - RNA, 19 nt, Artificial Sequence
  Description of Artificial Sequence: Synthetic oligonucleotide
uuuccguuuccuaguucuu

SEQ ID NO: 2813782 - RNA, 19 nt, Artificial Sequence
  Description of Artificial Sequence: Synthetic oligonucleotide
cuccuucaugcguugcuuc

SEQ ID NO: 2813783 - RNA, 19 nt, Artificial Sequence
  Description of Artificial Sequence: Synthetic oligonucleotide
uggucaggcgcucgauuuc

SEQ ID NO: 2813784 - RNA, 19 nt, Artificial Sequence
  Description of Artificial Sequence: Synthetic oligonucleotide
uucagcuagcugugcuacu

SEQ ID NO: 2813785 - RNA, 19 nt, Artificial Sequence
  Description of Artificial Sequence: Synthetic oligonucleotide
gcuacuuuccucucguucu

SEQ ID NO: 2813786 - RNA, 19 nt, Artificial Sequence
  Description of Artificial Sequence: Synthetic oligonucleotide
cagucagccaagcuaggga

SEQ ID NO: 2813787 - RNA, 19 nt, Artificial Sequence
  Description of Artificial Sequence: Synthetic oligonucleotide
guucauacuuguugcagau

SEQ ID NO: 2813788 - RNA, 19 nt, Artificial Sequence
  Description of Artificial Sequence: Synthetic oligonucleotide
uuccuaguucuuccuugau

SEQ ID NO: 2813789 - RNA, 19 nt, Artificial Sequence
  Description of Artificial Sequence: Synthetic oligonucleotide
ccaagggaugagauauagg

SEQ ID NO: 2813790 - RNA, 19 nt, Artificial Sequence
  Description of Artificial Sequence: Synthetic oligonucleotide
gagccauagagcucugacu

SEQ ID NO: 2813791 - RNA, 19 nt, Artificial Sequence
  Description of Artificial Sequence: Synthetic oligonucleotide
accaugcggucaaucagag

SEQ ID NO: 2813792 - RNA, 19 nt, Artificial Sequence
  Description of Artificial Sequence: Synthetic oligonucleotide
aggcuuccagcucccagcu

SEQ ID NO: 2813793 - RNA, 19 nt, Artificial Sequence
  Description of Artificial Sequence: Synthetic oligonucleotide
aggcgcucgauuuccugcu

SEQ ID NO: 2813794 - RNA, 19 nt, Artificial Sequence
  Description of Artificial Sequence: Synthetic oligonucleotide
gccauagagcucugacugg

SEQ ID NO: 2813795 - RNA, 19 nt, Artificial Sequence
  Description of Artificial Sequence: Synthetic oligonucleotide
cuaccucccuggucaggcg

SEQ ID NO: 2813796 - RNA, 19 nt, Artificial Sequence
  Description of Artificial Sequence: Synthetic oligonucleotide
ugcuucccagcccgggcug

SEQ ID NO: 2813797 - RNA, 19 nt, Artificial Sequence
  Description of Artificial Sequence: Synthetic oligonucleotide
gcagauuuaccaugcgguc

SEQ ID NO: 2813798 - RNA, 19 nt, Artificial Sequence
  Description of Artificial Sequence: Synthetic oligonucleotide
ucuccuguucuuucuccuu

SEQ ID NO: 2813799 - RNA, 19 nt, Artificial Sequence
  Description of Artificial Sequence: Synthetic oligonucleotide
gcgaguggccucuaccucc

SEQ ID NO: 2813800 - RNA, 19 nt, Artificial Sequence
  Description of Artificial Sequence: Synthetic oligonucleotide
ugaccacucuguuuccguu

SEQ ID NO: 2813801 - RNA, 19 nt, Artificial Sequence
  Description of Artificial Sequence: Synthetic oligonucleotide
uaguuggacuggguucugc

SEQ ID NO: 2813802 - RNA, 19 nt, Artificial Sequence
  Description of Artificial Sequence: Synthetic oligonucleotide
ucccagcuggacaccgucu

SEQ ID NO: 2813803 - RNA, 19 nt, Artificial Sequence
  Description of Artificial Sequence: Synthetic oligonucleotide
ucguucucuucagcuagcu

SEQ ID NO: 2813804 - RNA, 19 nt, Artificial Sequence
  Description of Artificial Sequence: Synthetic oligonucleotide
ugcggagucuaggguagug

SEQ ID NO: 2813805 - RNA, 19 nt, Artificial Sequence
  Description of Artificial Sequence: Synthetic oligonucleotide
uuccaagggaugagauaua

SEQ ID NO: 2813806 - RNA, 19 nt, Artificial Sequence
  Description of Artificial Sequence: Synthetic oligonucleotide
ucucuucagcuagcugugc

SEQ ID NO: 2813807 - RNA, 19 nt, Artificial Sequence
  Description of Artificial Sequence: Synthetic oligonucleotide
cucgagcugccaugucuag

SEQ ID NO: 2813808 - RNA, 19 nt, Artificial Sequence
  Description of Artificial Sequence: Synthetic oligonucleotide
cuucaugcguugcuuccca

SEQ ID NO: 2813809 - RNA, 19 nt, Artificial Sequence
  Description of Artificial Sequence: Synthetic oligonucleotide
ccgucuccaaggcaaaggc

SEQ ID NO: 2813810 - RNA, 19 nt, Artificial Sequence
  Description of Artificial Sequence: Synthetic oligonucleotide
uaccaggcuuccagcuccc

SEQ ID NO: 2813811 - RNA, 19 nt, Artificial Sequence
  Description of Artificial Sequence: Synthetic oligonucleotide
acucuguuuccguuuccua

SEQ ID NO: 2813812 - RNA, 19 nt, Artificial Sequence
  Description of Artificial Sequence: Synthetic oligonucleotide
cacugaccacucuguuucc

SEQ ID NO: 2813813 - RNA, 19 nt, Artificial Sequence
  Description of Artificial Sequence: Synthetic oligonucleotide
ccauuuucaucugaggaca

SEQ ID NO: 2813814 - RNA, 19 nt, Artificial Sequence
  Description of Artificial Sequence: Synthetic oligonucleotide
ucucguucuccuguucuuu

SEQ ID NO: 2813815 - RNA, 19 nt, Artificial Sequence
  Description of Artificial Sequence: Synthetic oligonucleotide
ggagucuaggguagugaag

SEQ ID NO: 2813816 - RNA, 19 nt, Artificial Sequence
  Description of Artificial Sequence: Synthetic oligonucleotide
accuccugcagauccucau

SEQ ID NO: 2813817 - RNA, 19 nt, Artificial Sequence
  Description of Artificial Sequence: Synthetic oligonucleotide
cuaguaguuggacuggguu

SEQ ID NO: 2813818 - RNA, 19 nt, Artificial Sequence
  Description of Artificial Sequence: Synthetic oligonucleotide
ggaugcggagucuagggua

SEQ ID NO: 2813819 - RNA, 19 nt, Artificial Sequence
  Description of Artificial Sequence: Synthetic oligonucleotide
ccaaggcaaaggcagggac

SEQ ID NO: 2813820 - RNA, 19 nt, Artificial Sequence
  Description of Artificial Sequence: Synthetic oligonucleotide
ccugcagauccucauacca

SEQ ID NO: 2813821 - RNA, 19 nt, Artificial Sequence
  Description of Artificial Sequence: Synthetic oligonucleotide
cauacuuguugcagauuua

SEQ ID NO: 2813822 - RNA, 19 nt, Artificial Sequence
  Description of Artificial Sequence: Synthetic oligonucleotide
caaggcaaaggcagggacu

SEQ ID NO: 2813823 - RNA, 19 nt, Artificial Sequence
  Description of Artificial Sequence: Synthetic oligonucleotide
uucauacuuguugcagauu

SEQ ID NO: 2813824 - RNA, 19 nt, Artificial Sequence
  Description of Artificial Sequence: Synthetic oligonucleotide
ucgagcugccaugucuagu

SEQ ID NO: 2813825 - RNA, 19 nt, Artificial Sequence
  Description of Artificial Sequence: Synthetic oligonucleotide
gauuuccugcuugagccgu

SEQ ID NO: 2813826 - RNA, 19 nt, Artificial Sequence
  Description of Artificial Sequence: Synthetic oligonucleotide
ucccagcccgggcugggca

SEQ ID NO: 2813827 - RNA, 19 nt, Artificial Sequence
  Description of Artificial Sequence: Synthetic oligonucleotide
cauuuccaagggaugagau

SEQ ID NO: 2813828 - RNA, 19 nt, Artificial Sequence
  Description of Artificial Sequence: Synthetic oligonucleotide
ucccuggucaggcgcucga

SEQ ID NO: 2813829 - RNA, 19 nt, Artificial Sequence
  Description of Artificial Sequence: Synthetic oligonucleotide
caucugaggacagcaccuc

SEQ ID NO: 2813830 - RNA, 19 nt, Artificial Sequence
  Description of Artificial Sequence: Synthetic oligonucleotide
uccucucguucuccuguuc

SEQ ID NO: 2813831 - RNA, 19 nt, Artificial Sequence
  Description of Artificial Sequence: Synthetic oligonucleotide
gucagccaagcuagggaug

SEQ ID NO: 2813832 - RNA, 19 nt, Artificial Sequence
  Description of Artificial Sequence: Synthetic oligonucleotide
ugaccucugcuggcccugg

SEQ ID NO: 2813833 - RNA, 19 nt, Artificial Sequence
  Description of Artificial Sequence: Synthetic oligonucleotide
ccaagcuagggaugcggag

SEQ ID NO: 2813834 - RNA, 19 nt, Artificial Sequence
  Description of Artificial Sequence: Synthetic oligonucleotide
cucccagcuggacaccguc

SEQ ID NO: 2813835 - RNA, 19 nt, Artificial Sequence
  Description of Artificial Sequence: Synthetic oligonucleotide
gcuugugaccucugcuggc

SEQ ID NO: 2813836 - RNA, 19 nt, Artificial Sequence
  Description of Artificial Sequence: Synthetic oligonucleotide
ccuggcuccucagucagcc

SEQ ID NO: 2813837 - RNA, 19 nt, Artificial Sequence
  Description of Artificial Sequence: Synthetic oligonucleotide
ucugcuggcccuggcuccu

SEQ ID NO: 2813838 - RNA, 19 nt, Artificial Sequence
  Description of Artificial Sequence: Synthetic oligonucleotide
ggucaggcgcucgauuucc

SEQ ID NO: 2813839 - RNA, 19 nt, Artificial Sequence
  Description of Artificial Sequence: Synthetic oligonucleotide
uccucauaccaggcuucca

SEQ ID NO: 2813840 - RNA, 19 nt, Artificial Sequence
  Description of Artificial Sequence: Synthetic oligonucleotide
cugccaugucuaguaguug

SEQ ID NO: 2813841 - RNA, 19 nt, Artificial Sequence
  Description of Artificial Sequence: Synthetic oligonucleotide
cauagagcucugacuggaa

SEQ ID NO: 2813842 - RNA, 19 nt, Artificial Sequence
  Description of Artificial Sequence: Synthetic oligonucleotide
aggcaaaggcagggacucg

SEQ ID NO: 2813843 - RNA, 19 nt, Artificial Sequence
  Description of Artificial Sequence: Synthetic oligonucleotide
acucgagcugccaugucua

SEQ ID NO: 2813844 - RNA, 19 nt, Artificial Sequence
  Description of Artificial Sequence: Synthetic oligonucleotide
uuccucucguucuccuguu

SEQ ID NO: 2813845 - RNA, 19 nt, Artificial Sequence
  Description of Artificial Sequence: Synthetic oligonucleotide
gagcucugacuggaaucug

SEQ ID NO: 2813846 - RNA, 19 nt, Artificial Sequence
  Description of Artificial Sequence: Synthetic oligonucleotide
caagcuagggaugcggagu

SEQ ID NO: 2813847 - RNA, 19 nt, Artificial Sequence
  Description of Artificial Sequence: Synthetic oligonucleotide
gcuggacaccgucuccaag

SEQ ID NO: 2813848 - RNA, 19 nt, Artificial Sequence
  Description of Artificial Sequence: Synthetic oligonucleotide
cgauuuccugcuugagccg

SEQ ID NO: 2813849 - RNA, 19 nt, Artificial Sequence
  Description of Artificial Sequence: Synthetic oligonucleotide
cagagcccggcgaguggcc

SEQ ID NO: 2813850 - RNA, 19 nt, Artificial Sequence
  Description of Artificial Sequence: Synthetic oligonucleotide
cucuucagcuagcugugcu

SEQ ID NO: 2813851 - RNA, 19 nt, Artificial Sequence
  Description of Artificial Sequence: Synthetic oligonucleotide
ccaugucuaguaguuggac

SEQ ID NO: 2813852 - RNA, 19 nt, Artificial Sequence
  Description of Artificial Sequence: Synthetic oligonucleotide
guaguuggacuggguucug

SEQ ID NO: 2813853 - RNA, 19 nt, Artificial Sequence
  Description of Artificial Sequence: Synthetic oligonucleotide
cuuccagcucccagcugga

SEQ ID NO: 2813854 - RNA, 19 nt, Artificial Sequence
  Description of Artificial Sequence: Synthetic oligonucleotide
gugaccucugcuggcccug

SEQ ID NO: 2813855 - RNA, 19 nt, Artificial Sequence
  Description of Artificial Sequence: Synthetic oligonucleotide
cagauccucauaccaggcu

SEQ ID NO: 2813856 - RNA, 19 nt, Artificial Sequence
  Description of Artificial Sequence: Synthetic oligonucleotide
cugaccacucuguuuccgu

SEQ ID NO: 2813857 - RNA, 19 nt, Artificial Sequence
  Description of Artificial Sequence: Synthetic oligonucleotide
caccgucuccaaggcaaag

SEQ ID NO: 2813858 - RNA, 19 nt, Artificial Sequence
  Description of Artificial Sequence: Synthetic oligonucleotide
gaccacucuguuuccguuu

SEQ ID NO: 2813859 - RNA, 19 nt, Artificial Sequence
  Description of Artificial Sequence: Synthetic oligonucleotide
cagccaagcuagggaugcg

SEQ ID NO: 2813860 - RNA, 19 nt, Artificial Sequence
  Description of Artificial Sequence: Synthetic oligonucleotide
ccaggcuuccagcucccag

SEQ ID NO: 2813861 - RNA, 19 nt, Artificial Sequence
  Description of Artificial Sequence: Synthetic oligonucleotide
cuggucaggcgcucgauuu

SEQ ID NO: 2813862 - RNA, 19 nt, Artificial Sequence
  Description of Artificial Sequence: Synthetic oligonucleotide
ugacuggaaucuggagauu

SEQ ID NO: 2813863 - RNA, 19 nt, Artificial Sequence
  Description of Artificial Sequence: Synthetic oligonucleotide
cucccuggucaggcgcucg

SEQ ID NO: 2813864 - RNA, 19 nt, Artificial Sequence
  Description of Artificial Sequence: Synthetic oligonucleotide
gcgcucgauuuccugcuug

SEQ ID NO: 2813865 - RNA, 19 nt, Artificial Sequence
  Description of Artificial Sequence: Synthetic oligonucleotide
uuccagcucccagcuggac

SEQ ID NO: 2813866 - RNA, 19 nt, Artificial Sequence
  Description of Artificial Sequence: Synthetic oligonucleotide
uugagccguucguucucuu

SEQ ID NO: 2813867 - RNA, 19 nt, Artificial Sequence
  Description of Artificial Sequence: Synthetic oligonucleotide
agagcccggcgaguggccu

SEQ ID NO: 2813868 - RNA, 19 nt, Artificial Sequence
  Description of Artificial Sequence: Synthetic oligonucleotide
ggcgaguggccucuaccuc

SEQ ID NO: 2813869 - RNA, 19 nt, Artificial Sequence
  Description of Artificial Sequence: Synthetic oligonucleotide
ggcuccucagucagccaag

SEQ ID NO: 2813870 - RNA, 19 nt, Artificial Sequence
  Description of Artificial Sequence: Synthetic oligonucleotide
guuggacuggguucugcuu

SEQ ID NO: 2813871 - RNA, 19 nt, Artificial Sequence
  Description of Artificial Sequence: Synthetic oligonucleotide
agcuagggaugcggagucu

SEQ ID NO: 2813872 - RNA, 19 nt, Artificial Sequence
  Description of Artificial Sequence: Synthetic oligonucleotide
gccguucguucucuucagc

SEQ ID NO: 2813873 - RNA, 19 nt, Artificial Sequence
  Description of Artificial Sequence: Synthetic oligonucleotide
ccauagagcucugacugga

SEQ ID NO: 2813874 - RNA, 19 nt, Artificial Sequence
  Description of Artificial Sequence: Synthetic oligonucleotide
uucccagcccgggcugggc

SEQ ID NO: 2813875 - RNA, 19 nt, Artificial Sequence
  Description of Artificial Sequence: Synthetic oligonucleotide
ccggcgaguggccucuacc

SEQ ID NO: 2813876 - RNA, 19 nt, Artificial Sequence
  Description of Artificial Sequence: Synthetic oligonucleotide
ccaugcggucaaucagagc

SEQ ID NO: 2813877 - RNA, 19 nt, Artificial Sequence
  Description of Artificial Sequence: Synthetic oligonucleotide
cccagcuggacaccgucuc

SEQ ID NO: 2813878 - RNA, 19 nt, Artificial Sequence
  Description of Artificial Sequence: Synthetic oligonucleotide
gagcccggcgaguggccuc

SEQ ID NO: 2813879 - RNA, 19 nt, Artificial Sequence
  Description of Artificial Sequence: Synthetic oligonucleotide
cuuccuugaucuuccucuu

SEQ ID NO: 2813880 - RNA, 19 nt, Artificial Sequence
  Description of Artificial Sequence: Synthetic oligonucleotide
cacucuguuuccguuuccu

SEQ ID NO: 2813881 - RNA, 19 nt, Artificial Sequence
  Description of Artificial Sequence: Synthetic oligonucleotide
caccuccugcagauccuca

SEQ ID NO: 2813882 - RNA, 19 nt, Artificial Sequence
  Description of Artificial Sequence: Synthetic oligonucleotide
gcugugcuacuuuccucuc

SEQ ID NO: 2813883 - RNA, 19 nt, Artificial Sequence
  Description of Artificial Sequence: Synthetic oligonucleotide
cgaguggccucuaccuccc

SEQ ID NO: 2813884 - RNA, 19 nt, Artificial Sequence
  Description of Artificial Sequence: Synthetic oligonucleotide
ccgggcugggcacugacca

SEQ ID NO: 2813885 - RNA, 19 nt, Artificial Sequence
  Description of Artificial Sequence: Synthetic oligonucleotide
cuaggguagugaagguuuu

SEQ ID NO: 2813886 - RNA, 19 nt, Artificial Sequence
  Description of Artificial Sequence: Synthetic oligonucleotide
gucuaggguagugaagguu

SEQ ID NO: 2813887 - RNA, 19 nt, Artificial Sequence
  Description of Artificial Sequence: Synthetic oligonucleotide
gccaugucuaguaguugga

SEQ ID NO: 2813888 - RNA, 19 nt, Artificial Sequence
  Description of Artificial Sequence: Synthetic oligonucleotide
cuuccuccugagccauaga

SEQ ID NO: 2813889 - RNA, 19 nt, Artificial Sequence
  Description of Artificial Sequence: Synthetic oligonucleotide
gcuccucagucagccaagc

SEQ ID NO: 2813890 - RNA, 19 nt, Artificial Sequence
  Description of Artificial Sequence: Synthetic oligonucleotide
cgagcugccaugucuagua

SEQ ID NO: 2813891 - RNA, 19 nt, Artificial Sequence
  Description of Artificial Sequence: Synthetic oligonucleotide
ggacaccgucuccaaggca

SEQ ID NO: 2813892 - RNA, 19 nt, Artificial Sequence
  Description of Artificial Sequence: Synthetic oligonucleotide
ccucuucauuuccaaggga

SEQ ID NO: 2813893 - RNA, 19 nt, Artificial Sequence
  Description of Artificial Sequence: Synthetic oligonucleotide
auuuccugcuugagccguu

SEQ ID NO: 2813894 - RNA, 19 nt, Artificial Sequence
  Description of Artificial Sequence: Synthetic oligonucleotide
ccacucuguuuccguuucc

SEQ ID NO: 2813895 - RNA, 19 nt, Artificial Sequence
  Description of Artificial Sequence: Synthetic oligonucleotide
gcggagucuaggguaguga

SEQ ID NO: 2813896 - RNA, 19 nt, Artificial Sequence
  Description of Artificial Sequence: Synthetic oligonucleotide
gccaagcuagggaugcgga

SEQ ID NO: 2813897 - RNA, 19 nt, Artificial Sequence
  Description of Artificial Sequence: Synthetic oligonucleotide
acaccgucuccaaggcaaa

SEQ ID NO: 2813898 - RNA, 19 nt, Artificial Sequence
  Description of Artificial Sequence: Synthetic oligonucleotide
gggaugcggagucuagggu

SEQ ID NO: 2813899 - RNA, 19 nt, Artificial Sequence
  Description of Artificial Sequence: Synthetic oligonucleotide
cguucucuucagcuagcug

SEQ ID NO: 2813900 - RNA, 19 nt, Artificial Sequence
  Description of Artificial Sequence: Synthetic oligonucleotide
cuaguucuuccuugaucuu

SEQ ID NO: 2813901 - RNA, 19 nt, Artificial Sequence
  Description of Artificial Sequence: Synthetic oligonucleotide
ggcacugaccacucuguuu

SEQ ID NO: 2813902 - RNA, 19 nt, Artificial Sequence
  Description of Artificial Sequence: Synthetic oligonucleotide
cugagccauagagcucuga

SEQ ID NO: 2813903 - RNA, 19 nt, Artificial Sequence
  Description of Artificial Sequence: Synthetic oligonucleotide
gcuucccagcccgggcugg

SEQ ID NO: 2813904 - RNA, 19 nt, Artificial Sequence
  Description of Artificial Sequence: Synthetic oligonucleotide
cuugagccguucguucucu

SEQ ID NO: 2813905 - RNA, 19 nt, Artificial Sequence
  Description of Artificial Sequence: Synthetic oligonucleotide
augcggagucuaggguagu

SEQ ID NO: 2813906 - RNA, 19 nt, Artificial Sequence
  Description of Artificial Sequence: Synthetic oligonucleotide
gcuagggaugcggagucua

SEQ ID NO: 2813907 - RNA, 19 nt, Artificial Sequence
  Description of Artificial Sequence: Synthetic oligonucleotide
gcugccaugucuaguaguu

SEQ ID NO: 2813908 - RNA, 19 nt, Artificial Sequence
  Description of Artificial Sequence: Synthetic oligonucleotide
ccguucguucucuucagcu

SEQ ID NO: 2813909 - RNA, 19 nt, Artificial Sequence
  Description of Artificial Sequence: Synthetic oligonucleotide
cucucguucuccuguucuu

SEQ ID NO: 2813910 - RNA, 19 nt, Artificial Sequence
  Description of Artificial Sequence: Synthetic oligonucleotide
ggcuuccagcucccagcug

SEQ ID NO: 2813911 - RNA, 19 nt, Artificial Sequence
  Description of Artificial Sequence: Synthetic oligonucleotide
cggagucuaggguagugaa

SEQ ID NO: 2813912 - RNA, 19 nt, Artificial Sequence
  Description of Artificial Sequence: Synthetic oligonucleotide
cguugcuucccagcccggg

SEQ ID NO: 2813913 - RNA, 19 nt, Artificial Sequence
  Description of Artificial Sequence: Synthetic oligonucleotide
gcggucaaucagagcccgg

SEQ ID NO: 2813914 - RNA, 19 nt, Artificial Sequence
  Description of Artificial Sequence: Synthetic oligonucleotide
cgucuccaaggcaaaggca

SEQ ID NO: 2813915 - RNA, 19 nt, Artificial Sequence
  Description of Artificial Sequence: Synthetic oligonucleotide
cccgggcugggcacugacc

SEQ ID NO: 2813916 - RNA, 19 nt, Artificial Sequence
  Description of Artificial Sequence: Synthetic oligonucleotide
ggcagggacucgagcugcc

SEQ ID NO: 2813917 - RNA, 19 nt, Artificial Sequence
  Description of Artificial Sequence: Synthetic oligonucleotide
accaggcuuccagcuccca

SEQ ID NO: 2813918 - RNA, 19 nt, Artificial Sequence
  Description of Artificial Sequence: Synthetic oligonucleotide
cuccucagucagccaagcu

SEQ ID NO: 2813919 - RNA, 19 nt, Artificial Sequence
  Description of Artificial Sequence: Synthetic oligonucleotide
gauuuaccaugcggucaau

SEQ ID NO: 2813920 - RNA, 19 nt, Artificial Sequence
  Description of Artificial Sequence: Synthetic oligonucleotide
cguucguucucuucagcua

SEQ ID NO: 2813921 - RNA, 19 nt, Artificial Sequence
  Description of Artificial Sequence: Synthetic oligonucleotide
caaucagagcccggcgagu

SEQ ID NO: 2813922 - RNA, 19 nt, Artificial Sequence
  Description of Artificial Sequence: Synthetic oligonucleotide
cagggacucgagcugccau

SEQ ID NO: 2813923 - RNA, 19 nt, Artificial Sequence
  Description of Artificial Sequence: Synthetic oligonucleotide
ggacucgagcugccauguc

SEQ ID NO: 2813924 - RNA, 19 nt, Artificial Sequence
  Description of Artificial Sequence: Synthetic oligonucleotide
ccucucguucuccuguucu

SEQ ID NO: 2813925 - RNA, 19 nt, Artificial Sequence
  Description of Artificial Sequence: Synthetic oligonucleotide
gggacucgagcugccaugu

SEQ ID NO: 2813926 - RNA, 19 nt, Artificial Sequence
  Description of Artificial Sequence: Synthetic oligonucleotide
gcaccuccugcagauccuc

SEQ ID NO: 2813927 - RNA, 19 nt, Artificial Sequence
  Description of Artificial Sequence: Synthetic oligonucleotide
cgcucgauuuccugcuuga

SEQ ID NO: 2813928 - RNA, 19 nt, Artificial Sequence
  Description of Artificial Sequence: Synthetic oligonucleotide
cccagcccgggcugggcac

SEQ ID NO: 2813929 - RNA, 19 nt, Artificial Sequence
  Description of Artificial Sequence: Synthetic oligonucleotide
cccuggcuccucagucagc

SEQ ID NO: 2813930 - RNA, 19 nt, Artificial Sequence
  Description of Artificial Sequence: Synthetic oligonucleotide
ggcugggcacugaccacuc

SEQ ID NO: 2813931 - RNA, 19 nt, Artificial Sequence
  Description of Artificial Sequence: Synthetic oligonucleotide
gggcugggcacugaccacu

SEQ ID NO: 2813932 - RNA, 19 nt, Artificial Sequence
  Description of Artificial Sequence: Synthetic oligonucleotide
cucuuccuccugagccaua

SEQ ID NO: 2813933 - RNA, 19 nt, Artificial Sequence
  Description of Artificial Sequence: Synthetic oligonucleotide
gcguugcuucccagcccgg

SEQ ID NO: 2813934 - RNA, 19 nt, Artificial Sequence
  Description of Artificial Sequence: Synthetic oligonucleotide
cagcuagcugugcuacuuu

SEQ ID NO: 2813935 - RNA, 19 nt, Artificial Sequence
  Description of Artificial Sequence: Synthetic oligonucleotide
gcagggacucgagcugcca

SEQ ID NO: 2813936 - RNA, 19 nt, Artificial Sequence
  Description of Artificial Sequence: Synthetic oligonucleotide
gcccgggcugggcacugac

SEQ ID NO: 2813937 - RNA, 19 nt, Artificial Sequence
  Description of Artificial Sequence: Synthetic oligonucleotide
gaguggccucuaccucccu

SEQ ID NO: 2813938 - RNA, 19 nt, Artificial Sequence
  Description of Artificial Sequence: Synthetic oligonucleotide
gugcuacuuuccucucguu

SEQ ID NO: 2813939 - RNA, 19 nt, Artificial Sequence
  Description of Artificial Sequence: Synthetic oligonucleotide
gucaggcgcucgauuuccu

SEQ ID NO: 2813940 - RNA, 19 nt, Artificial Sequence
  Description of Artificial Sequence: Synthetic oligonucleotide
cagcccgggcugggcacug

SEQ ID NO: 2813941 - RNA, 19 nt, Artificial Sequence
  Description of Artificial Sequence: Synthetic oligonucleotide
ccguuuccuaguucuuccu

SEQ ID NO: 2813942 - RNA, 19 nt, Artificial Sequence
  Description of Artificial Sequence: Synthetic oligonucleotide
cugcuggcccuggcuccuc

SEQ ID NO: 2813943 - RNA, 19 nt, Artificial Sequence
  Description of Artificial Sequence: Synthetic oligonucleotide
cgggcugggcacugaccac

SEQ ID NO: 2813944 - RNA, 19 nt, Artificial Sequence
  Description of Artificial Sequence: Synthetic oligonucleotide
agcccgggcugggcacuga

SEQ ID NO: 2813945 - RNA, 19 nt, Artificial Sequence
  Description of Artificial Sequence: Synthetic oligonucleotide
ccugcuugagccguucguu

SEQ ID NO: 2813946 - RNA, 19 nt, Artificial Sequence
  Description of Artificial Sequence: Synthetic oligonucleotide
cggcgaguggccucuaccu

SEQ ID NO: 2813947 - RNA, 19 nt, Artificial Sequence
  Description of Artificial Sequence: Synthetic oligonucleotide
gggcacugaccacucuguu

SEQ ID NO: 2813948 - RNA, 19 nt, Artificial Sequence
  Description of Artificial Sequence: Synthetic oligonucleotide
cccggcgaguggccucuac

SEQ ID NO: 2813949 - RNA, 19 nt, Artificial Sequence
  Description of Artificial Sequence: Synthetic oligonucleotide
gcugggcacugaccacucu

SEQ ID NO: 2813950 - RNA, 19 nt, Artificial Sequence
  Description of Artificial Sequence: Synthetic oligonucleotide
ccuggucaggcgcucgauu

SEQ ID NO: 2813951 - RNA, 19 nt, Artificial Sequence
  Description of Artificial Sequence: Synthetic oligonucleotide
ggcgcucgauuuccugcuu

SEQ ID NO: 2813952 - RNA, 19 nt, Artificial Sequence
  Description of Artificial Sequence: Synthetic oligonucleotide
ccucuuccuccugagccau

SEQ ID NO: 2813953 - RNA, 19 nt, Artificial Sequence
  Description of Artificial Sequence: Synthetic oligonucleotide
gcucccagcuggacaccgu

SEQ ID NO: 2813954 - RNA, 19 nt, Artificial Sequence
  Description of Artificial Sequence: Synthetic oligonucleotide
ccagcccgggcugggcacu

SEQ ID NO: 2813955 - RNA, 19 nt, Artificial Sequence
  Description of Artificial Sequence: Synthetic oligonucleotide
cccuggucaggcgcucgau

SEQ ID NO: 2813956 - RNA, 19 nt, Artificial Sequence
  Description of Artificial Sequence: Synthetic oligonucleotide
gcccggcgaguggccucua

SEQ ID NO: 2813957 - RNA, 19 nt, Artificial Sequence
  Description of Artificial Sequence: Synthetic oligonucleotide
aguaagaagaaccugaagu

SEQ ID NO: 2813958 - RNA, 19 nt, Artificial Sequence
  Description of Artificial Sequence: Synthetic oligonucleotide
aaugucaaagcagaugagc

SEQ ID NO: 2813959 - RNA, 19 nt, Artificial Sequence
  Description of Artificial Sequence: Synthetic oligonucleotide
ugaaguaucccacauguug

SEQ ID NO: 2813960 - RNA, 19 nt, Artificial Sequence
  Description of Artificial Sequence: Synthetic oligonucleotide
ugucguaguaagaagaacc

SEQ ID NO: 2813961 - RNA, 19 nt, Artificial Sequence
  Description of Artificial Sequence: Synthetic oligonucleotide
uuugcagccaaccagcacc

SEQ ID NO: 2813962 - RNA, 19 nt, Artificial Sequence
  Description of Artificial Sequence: Synthetic oligonucleotide
uuggauagcucccucagcg

SEQ ID NO: 2813963 - RNA, 19 nt, Artificial Sequence
  Description of Artificial Sequence: Synthetic oligonucleotide
accaccuuggcauuggggc

SEQ ID NO: 2813964 - RNA, 19 nt, Artificial Sequence
  Description of Artificial Sequence: Synthetic oligonucleotide
aagagaagccacuguggcc

SEQ ID NO: 2813965 - RNA, 19 nt, Artificial Sequence
  Description of Artificial Sequence: Synthetic oligonucleotide
uaagucucugcuuggauag

SEQ ID NO: 2813966 - RNA, 19 nt, Artificial Sequence
  Description of Artificial Sequence: Synthetic oligonucleotide
aaagcagaugagcacagca

SEQ ID NO: 2813967 - RNA, 19 nt, Artificial Sequence
  Description of Artificial Sequence: Synthetic oligonucleotide
aaaacuccugagucucucc

SEQ ID NO: 2813968 - RNA, 19 nt, Artificial Sequence
  Description of Artificial Sequence: Synthetic oligonucleotide
cuugaggacacuauccagg

SEQ ID NO: 2813969 - RNA, 19 nt, Artificial Sequence
  Description of Artificial Sequence: Synthetic oligonucleotide
acauguugagcucaaugcg

SEQ ID NO: 2813970 - RNA, 19 nt, Artificial Sequence
  Description of Artificial Sequence: Synthetic oligonucleotide
aacagggauaagucucugc

SEQ ID NO: 2813971 - RNA, 19 nt, Artificial Sequence
  Description of Artificial Sequence: Synthetic oligonucleotide
cuaaugucaaagcagauga

SEQ ID NO: 2813972 - RNA, 19 nt, Artificial Sequence
  Description of Artificial Sequence: Synthetic oligonucleotide
ucgggaggaacacucaacg

SEQ ID NO: 2813973 - RNA, 19 nt, Artificial Sequence
  Description of Artificial Sequence: Synthetic oligonucleotide
cacauguugagcucaaugc

SEQ ID NO: 2813974 - RNA, 19 nt, Artificial Sequence
  Description of Artificial Sequence: Synthetic oligonucleotide
uggaagacaucccugacac

SEQ ID NO: 2813975 - RNA, 19 nt, Artificial Sequence
  Description of Artificial Sequence: Synthetic oligonucleotide
cucauguccaguuugcagc

SEQ ID NO: 2813976 - RNA, 19 nt, Artificial Sequence
  Description of Artificial Sequence: Synthetic oligonucleotide
gaagacaucccugacacug

SEQ ID NO: 2813977 - RNA, 19 nt, Artificial Sequence
  Description of Artificial Sequence: Synthetic oligonucleotide
cucaacguaggacacagcc

SEQ ID NO: 2813978 - RNA, 19 nt, Artificial Sequence
  Description of Artificial Sequence: Synthetic oligonucleotide
aagaagaaccugaaguauc

SEQ ID NO: 2813979 - RNA, 19 nt, Artificial Sequence
  Description of Artificial Sequence: Synthetic oligonucleotide
cauguugagcucaaugcgg

SEQ ID NO: 2813980 - RNA, 19 nt, Artificial Sequence
  Description of Artificial Sequence: Synthetic oligonucleotide
uauccagggucucuggccg

SEQ ID NO: 2813981 - RNA, 19 nt, Artificial Sequence
  Description of Artificial Sequence: Synthetic oligonucleotide
caacguaggacacagcccc

SEQ ID NO: 2813982 - RNA, 19 nt, Artificial Sequence
  Description of Artificial Sequence: Synthetic oligonucleotide
aguggagucucuguagucc

SEQ ID NO: 2813983 - RNA, 19 nt, Artificial Sequence
  Description of Artificial Sequence: Synthetic oligonucleotide
acuucuugaggacacuauc

SEQ ID NO: 2813984 - RNA, 19 nt, Artificial Sequence
  Description of Artificial Sequence: Synthetic oligonucleotide
ugcgguguaguucucaaac

SEQ ID NO: 2813985 - RNA, 19 nt, Artificial Sequence
  Description of Artificial Sequence: Synthetic oligonucleotide
agggauaagucucugcuug

SEQ ID NO: 2813986 - RNA, 19 nt, Artificial Sequence
  Description of Artificial Sequence: Synthetic oligonucleotide
cugcucaugcguaacaggg

SEQ ID NO: 2813987 - RNA, 19 nt, Artificial Sequence
  Description of Artificial Sequence: Synthetic oligonucleotide
aagaucgggaggaacacuc

SEQ ID NO: 2813988 - RNA, 19 nt, Artificial Sequence
  Description of Artificial Sequence: Synthetic oligonucleotide
aagcuugcgguguaguucu

SEQ ID NO: 2813989 - RNA, 19 nt, Artificial Sequence
  Description of Artificial Sequence: Synthetic oligonucleotide
gaggacacuauccaggguc

SEQ ID NO: 2813990 - RNA, 19 nt, Artificial Sequence
  Description of Artificial Sequence: Synthetic oligonucleotide
aaguaucccacauguugag

SEQ ID NO: 2813991 - RNA, 19 nt, Artificial Sequence
  Description of Artificial Sequence: Synthetic oligonucleotide
acagggauaagucucugcu

SEQ ID NO: 2813992 - RNA, 19 nt, Artificial Sequence
  Description of Artificial Sequence: Synthetic oligonucleotide
aguucucaaacacgguggg

SEQ ID NO: 2813993 - RNA, 19 nt, Artificial Sequence
  Description of Artificial Sequence: Synthetic oligonucleotide
gucaguacggcgcagcugc

SEQ ID NO: 2813994 - RNA, 19 nt, Artificial Sequence
  Description of Artificial Sequence: Synthetic oligonucleotide
acuauccagggucucuggc

SEQ ID NO: 2813995 - RNA, 19 nt, Artificial Sequence
  Description of Artificial Sequence: Synthetic oligonucleotide
cucaaugcggcgcuugucg

SEQ ID NO: 2813996 - RNA, 19 nt, Artificial Sequence
  Description of Artificial Sequence: Synthetic oligonucleotide
ucaacguaggacacagccc

SEQ ID NO: 2813997 - RNA, 19 nt, Artificial Sequence
  Description of Artificial Sequence: Synthetic oligonucleotide
uaguaagaagaaccugaag

SEQ ID NO: 2813998 - RNA, 19 nt, Artificial Sequence
  Description of Artificial Sequence: Synthetic oligonucleotide
ugcguaacagggauaaguc

SEQ ID NO: 2813999 - RNA, 19 nt, Artificial Sequence
  Description of Artificial Sequence: Synthetic oligonucleotide
uaaugucaaagcagaugag

SEQ ID NO: 2814000 - RNA, 19 nt, Artificial Sequence
  Description of Artificial Sequence: Synthetic oligonucleotide
aaacuccugagucucuccu

SEQ ID NO: 2814001 - RNA, 19 nt, Artificial Sequence
  Description of Artificial Sequence: Synthetic oligonucleotide
agcguggccaggucggucc

SEQ ID NO: 2814002 - RNA, 19 nt, Artificial Sequence
  Description of Artificial Sequence: Synthetic oligonucleotide
caguuugcagccaaccagc

SEQ ID NO: 2814003 - RNA, 19 nt, Artificial Sequence
  Description of Artificial Sequence: Synthetic oligonucleotide
ucucugcuuggauagcucc

SEQ ID NO: 2814004 - RNA, 19 nt, Artificial Sequence
  Description of Artificial Sequence: Synthetic oligonucleotide
cacugcgcucagaagaucg

SEQ ID NO: 2814005 - RNA, 19 nt, Artificial Sequence
  Description of Artificial Sequence: Synthetic oligonucleotide
aagacaucccugacacugc

SEQ ID NO: 2814006 - RNA, 19 nt, Artificial Sequence
  Description of Artificial Sequence: Synthetic oligonucleotide
auguugagcucaaugcggc

SEQ ID NO: 2814007 - RNA, 19 nt, Artificial Sequence
  Description of Artificial Sequence: Synthetic oligonucleotide
ugaguggagucucuguagu

SEQ ID NO: 2814008 - RNA, 19 nt, Artificial Sequence
  Description of Artificial Sequence: Synthetic oligonucleotide
cuauccagggucucuggcc

SEQ ID NO: 2814009 - RNA, 19 nt, Artificial Sequence
  Description of Artificial Sequence: Synthetic oligonucleotide
gaaguaucccacauguuga

SEQ ID NO: 2814010 - RNA, 19 nt, Artificial Sequence
  Description of Artificial Sequence: Synthetic oligonucleotide
uaagaagaaccugaaguau

SEQ ID NO: 2814011 - RNA, 19 nt, Artificial Sequence
  Description of Artificial Sequence: Synthetic oligonucleotide
uccaguuugcagccaacca

SEQ ID NO: 2814012 - RNA, 19 nt, Artificial Sequence
  Description of Artificial Sequence: Synthetic oligonucleotide
agaagaucgggaggaacac

SEQ ID NO: 2814013 - RNA, 19 nt, Artificial Sequence
  Description of Artificial Sequence: Synthetic oligonucleotide
uggccuuccggacagcuga

SEQ ID NO: 2814014 - RNA, 19 nt, Artificial Sequence
  Description of Artificial Sequence: Synthetic oligonucleotide
ucaugcguaacagggauaa

SEQ ID NO: 2814015 - RNA, 19 nt, Artificial Sequence
  Description of Artificial Sequence: Synthetic oligonucleotide
acuguggccacguggaaga

SEQ ID NO: 2814016 - RNA, 19 nt, Artificial Sequence
  Description of Artificial Sequence: Synthetic oligonucleotide
aaugcggcgcuugucgauc

SEQ ID NO: 2814017 - RNA, 19 nt, Artificial Sequence
  Description of Artificial Sequence: Synthetic oligonucleotide
auaagucucugcuuggaua

SEQ ID NO: 2814018 - RNA, 19 nt, Artificial Sequence
  Description of Artificial Sequence: Synthetic oligonucleotide
cuuccggacagcugagugg

SEQ ID NO: 2814019 - RNA, 19 nt, Artificial Sequence
  Description of Artificial Sequence: Synthetic oligonucleotide
ugucgaucucggaagcuug

SEQ ID NO: 2814020 - RNA, 19 nt, Artificial Sequence
  Description of Artificial Sequence: Synthetic oligonucleotide
ucuccuugccacuucuuga

SEQ ID NO: 2814021 - RNA, 19 nt, Artificial Sequence
  Description of Artificial Sequence: Synthetic oligonucleotide
gucucuguaguccccggcg

SEQ ID NO: 2814022 - RNA, 19 nt, Artificial Sequence
  Description of Artificial Sequence: Synthetic oligonucleotide
uguugagcucaaugcggcg

SEQ ID NO: 2814023 - RNA, 19 nt, Artificial Sequence
  Description of Artificial Sequence: Synthetic oligonucleotide
acaucccugacacugcgcu

SEQ ID NO: 2814024 - RNA, 19 nt, Artificial Sequence
  Description of Artificial Sequence: Synthetic oligonucleotide
aguaucccacauguugagc

SEQ ID NO: 2814025 - RNA, 19 nt, Artificial Sequence
  Description of Artificial Sequence: Synthetic oligonucleotide
uggggcaaaacuccugagu

SEQ ID NO: 2814026 - RNA, 19 nt, Artificial Sequence
  Description of Artificial Sequence: Synthetic oligonucleotide
gauagcucccucagcgugg

SEQ ID NO: 2814027 - RNA, 19 nt, Artificial Sequence
  Description of Artificial Sequence: Synthetic oligonucleotide
agacaucccugacacugcg

SEQ ID NO: 2814028 - RNA, 19 nt, Artificial Sequence
  Description of Artificial Sequence: Synthetic oligonucleotide
cacagugcccugcucaugc

SEQ ID NO: 2814029 - RNA, 19 nt, Artificial Sequence
  Description of Artificial Sequence: Synthetic oligonucleotide
agagucaguacggcgcagc

SEQ ID NO: 2814030 - RNA, 19 nt, Artificial Sequence
  Description of Artificial Sequence: Synthetic oligonucleotide
cugaguggagucucuguag

SEQ ID NO: 2814031 - RNA, 19 nt, Artificial Sequence
  Description of Artificial Sequence: Synthetic oligonucleotide
aucagaguccggguaggcc

SEQ ID NO: 2814032 - RNA, 19 nt, Artificial Sequence
  Description of Artificial Sequence: Synthetic oligonucleotide
uauggccacggccaagaga

SEQ ID NO: 2814033 - RNA, 19 nt, Artificial Sequence
  Description of Artificial Sequence: Synthetic oligonucleotide
augcguaacagggauaagu

SEQ ID NO: 2814034 - RNA, 19 nt, Artificial Sequence
  Description of Artificial Sequence: Synthetic oligonucleotide
acuccugagucucuccuug

SEQ ID NO: 2814035 - RNA, 19 nt, Artificial Sequence
  Description of Artificial Sequence: Synthetic oligonucleotide
cuccuugccacuucuugag

SEQ ID NO: 2814036 - RNA, 19 nt, Artificial Sequence
  Description of Artificial Sequence: Synthetic oligonucleotide
acguugucguaguaagaag

SEQ ID NO: 2814037 - RNA, 19 nt, Artificial Sequence
  Description of Artificial Sequence: Synthetic oligonucleotide
cugagucucuccuugccac

SEQ ID NO: 2814038 - RNA, 19 nt, Artificial Sequence
  Description of Artificial Sequence: Synthetic oligonucleotide
cagaagaucgggaggaaca

SEQ ID NO: 2814039 - RNA, 19 nt, Artificial Sequence
  Description of Artificial Sequence: Synthetic oligonucleotide
gaagcuugcgguguaguuc

SEQ ID NO: 2814040 - RNA, 19 nt, Artificial Sequence
  Description of Artificial Sequence: Synthetic oligonucleotide
auggccacggccaagagaa

SEQ ID NO: 2814041 - RNA, 19 nt, Artificial Sequence
  Description of Artificial Sequence: Synthetic oligonucleotide
uccuugccacuucuugagg

SEQ ID NO: 2814042 - RNA, 19 nt, Artificial Sequence
  Description of Artificial Sequence: Synthetic oligonucleotide
cucagcguggccaggucgg

SEQ ID NO: 2814043 - RNA, 19 nt, Artificial Sequence
  Description of Artificial Sequence: Synthetic oligonucleotide
gguguaguucucaaacacg

SEQ ID NO: 2814044 - RNA, 19 nt, Artificial Sequence
  Description of Artificial Sequence: Synthetic oligonucleotide
uccugagucucuccuugcc

SEQ ID NO: 2814045 - RNA, 19 nt, Artificial Sequence
  Description of Artificial Sequence: Synthetic oligonucleotide
ugcgcucagaagaucggga

SEQ ID NO: 2814046 - RNA, 19 nt, Artificial Sequence
  Description of Artificial Sequence: Synthetic oligonucleotide
aacacgguggggacauaac

SEQ ID NO: 2814047 - RNA, 19 nt, Artificial Sequence
  Description of Artificial Sequence: Synthetic oligonucleotide
acacgguggggacauaacu

SEQ ID NO: 2814048 - RNA, 19 nt, Artificial Sequence
  Description of Artificial Sequence: Synthetic oligonucleotide
gacguugucguaguaagaa

SEQ ID NO: 2814049 - RNA, 19 nt, Artificial Sequence
  Description of Artificial Sequence: Synthetic oligonucleotide
ggaggaacacucaacguag

SEQ ID NO: 2814050 - RNA, 19 nt, Artificial Sequence
  Description of Artificial Sequence: Synthetic oligonucleotide
uaggccagaggccggacgu

SEQ ID NO: 2814051 - RNA, 19 nt, Artificial Sequence
  Description of Artificial Sequence: Synthetic oligonucleotide
cacucaacguaggacacag

SEQ ID NO: 2814052 - RNA, 19 nt, Artificial Sequence
  Description of Artificial Sequence: Synthetic oligonucleotide
ucguaguaagaagaaccug

SEQ ID NO: 2814053 - RNA, 19 nt, Artificial Sequence
  Description of Artificial Sequence: Synthetic oligonucleotide
cuugccacuucuugaggac

SEQ ID NO: 2814054 - RNA, 19 nt, Artificial Sequence
  Description of Artificial Sequence: Synthetic oligonucleotide
ugcucaugcguaacaggga

SEQ ID NO: 2814055 - RNA, 19 nt, Artificial Sequence
  Description of Artificial Sequence: Synthetic oligonucleotide
ucucuguaguccccggcga

SEQ ID NO: 2814056 - RNA, 19 nt, Artificial Sequence
  Description of Artificial Sequence: Synthetic oligonucleotide
uuccggacagcugagugga

SEQ ID NO: 2814057 - RNA, 19 nt, Artificial Sequence
  Description of Artificial Sequence: Synthetic oligonucleotide
cacgguggggacauaacuc

SEQ ID NO: 2814058 - RNA, 19 nt, Artificial Sequence
  Description of Artificial Sequence: Synthetic oligonucleotide
ccaaccagcaccaccuugg

SEQ ID NO: 2814059 - RNA, 19 nt, Artificial Sequence
  Description of Artificial Sequence: Synthetic oligonucleotide
ucaaacacgguggggacau

SEQ ID NO: 2814060 - RNA, 19 nt, Artificial Sequence
  Description of Artificial Sequence: Synthetic oligonucleotide
acguggaagacaucccuga

SEQ ID NO: 2814061 - RNA, 19 nt, Artificial Sequence
  Description of Artificial Sequence: Synthetic oligonucleotide
uggccggcuaaugucaaag

SEQ ID NO: 2814062 - RNA, 19 nt, Artificial Sequence
  Description of Artificial Sequence: Synthetic oligonucleotide
aggaacacucaacguagga

SEQ ID NO: 2814063 - RNA, 19 nt, Artificial Sequence
  Description of Artificial Sequence: Synthetic oligonucleotide
ugccacuucuugaggacac

SEQ ID NO: 2814064 - RNA, 19 nt, Artificial Sequence
  Description of Artificial Sequence: Synthetic oligonucleotide
ugcuuggauagcucccuca

SEQ ID NO: 2814065 - RNA, 19 nt, Artificial Sequence
  Description of Artificial Sequence: Synthetic oligonucleotide
ucucuggccggcuaauguc

SEQ ID NO: 2814066 - RNA, 19 nt, Artificial Sequence
  Description of Artificial Sequence: Synthetic oligonucleotide
guaucccacauguugagcu

SEQ ID NO: 2814067 - RNA, 19 nt, Artificial Sequence
  Description of Artificial Sequence: Synthetic oligonucleotide
guggagucucuguaguccc

SEQ ID NO: 2814068 - RNA, 19 nt, Artificial Sequence
  Description of Artificial Sequence: Synthetic oligonucleotide
cuuggauagcucccucagc

SEQ ID NO: 2814069 - RNA, 19 nt, Artificial Sequence
  Description of Artificial Sequence: Synthetic oligonucleotide
gcuaaugucaaagcagaug

SEQ ID NO: 2814070 - RNA, 19 nt, Artificial Sequence
  Description of Artificial Sequence: Synthetic oligonucleotide
guugagcucaaugcggcgc

SEQ ID NO: 2814071 - RNA, 19 nt, Artificial Sequence
  Description of Artificial Sequence: Synthetic oligonucleotide
ccaagagaagccacugugg

SEQ ID NO: 2814072 - RNA, 19 nt, Artificial Sequence
  Description of Artificial Sequence: Synthetic oligonucleotide
auagcucccucagcguggc

SEQ ID NO: 2814073 - RNA, 19 nt, Artificial Sequence
  Description of Artificial Sequence: Synthetic oligonucleotide
accugaaguaucccacaug

SEQ ID NO: 2814074 - RNA, 19 nt, Artificial Sequence
  Description of Artificial Sequence: Synthetic oligonucleotide
ucgaucucggaagcuugcg

SEQ ID NO: 2814075 - RNA, 19 nt, Artificial Sequence
  Description of Artificial Sequence: Synthetic oligonucleotide
ucagaagaucgggaggaac

SEQ ID NO: 2814076 - RNA, 19 nt, Artificial Sequence
  Description of Artificial Sequence: Synthetic oligonucleotide
uugcagccaaccagcacca

SEQ ID NO: 2814077 - RNA, 19 nt, Artificial Sequence
  Description of Artificial Sequence: Synthetic oligonucleotide
cucuccuugccacuucuug

SEQ ID NO: 2814078 - RNA, 19 nt, Artificial Sequence
  Description of Artificial Sequence: Synthetic oligonucleotide
ggggcaaaacuccugaguc

SEQ ID NO: 2814079 - RNA, 19 nt, Artificial Sequence
  Description of Artificial Sequence: Synthetic oligonucleotide
agaugagcacagcaucaga

SEQ ID NO: 2814080 - RNA, 19 nt, Artificial Sequence
  Description of Artificial Sequence: Synthetic oligonucleotide
uugucguaguaagaagaac

SEQ ID NO: 2814081 - RNA, 19 nt, Artificial Sequence
  Description of Artificial Sequence: Synthetic oligonucleotide
uuggggcaaaacuccugag

SEQ ID NO: 2814082 - RNA, 19 nt, Artificial Sequence
  Description of Artificial Sequence: Synthetic oligonucleotide
ucaaugcggcgcuugucga

SEQ ID NO: 2814083 - RNA, 19 nt, Artificial Sequence
  Description of Artificial Sequence: Synthetic oligonucleotide
aagcagaugagcacagcau

SEQ ID NO: 2814084 - RNA, 19 nt, Artificial Sequence
  Description of Artificial Sequence: Synthetic oligonucleotide
ucugcuuggauagcucccu

SEQ ID NO: 2814085 - RNA, 19 nt, Artificial Sequence
  Description of Artificial Sequence: Synthetic oligonucleotide
aaacacgguggggacauaa

SEQ ID NO: 2814086 - RNA, 19 nt, Artificial Sequence
  Description of Artificial Sequence: Synthetic oligonucleotide
aucucggaagcuugcggug

SEQ ID NO: 2814087 - RNA, 19 nt, Artificial Sequence
  Description of Artificial Sequence: Synthetic oligonucleotide
aucgggaggaacacucaac

SEQ ID NO: 2814088 - RNA, 19 nt, Artificial Sequence
  Description of Artificial Sequence: Synthetic oligonucleotide
gaggaacacucaacguagg

SEQ ID NO: 2814089 - RNA, 19 nt, Artificial Sequence
  Description of Artificial Sequence: Synthetic oligonucleotide
ccaguuugcagccaaccag

SEQ ID NO: 2814090 - RNA, 19 nt, Artificial Sequence
  Description of Artificial Sequence: Synthetic oligonucleotide
gaucucggaagcuugcggu

SEQ ID NO: 2814091 - RNA, 19 nt, Artificial Sequence
  Description of Artificial Sequence: Synthetic oligonucleotide
cauuggggcaaaacuccug

SEQ ID NO: 2814092 - RNA, 19 nt, Artificial Sequence
  Description of Artificial Sequence: Synthetic oligonucleotide
guggaagacaucccugaca

SEQ ID NO: 2814093 - RNA, 19 nt, Artificial Sequence
  Description of Artificial Sequence: Synthetic oligonucleotide
cugccuauggccacggcca

SEQ ID NO: 2814094 - RNA, 19 nt, Artificial Sequence
  Description of Artificial Sequence: Synthetic oligonucleotide
cguaacagggauaagucuc

SEQ ID NO: 2814095 - RNA, 19 nt, Artificial Sequence
  Description of Artificial Sequence: Synthetic oligonucleotide
ccggcuaaugucaaagcag

SEQ ID NO: 2814096 - RNA, 19 nt, Artificial Sequence
  Description of Artificial Sequence: Synthetic oligonucleotide
uaucccacauguugagcuc

SEQ ID NO: 2814097 - RNA, 19 nt, Artificial Sequence
  Description of Artificial Sequence: Synthetic oligonucleotide
aaccagcaccaccuuggca

SEQ ID NO: 2814098 - RNA, 19 nt, Artificial Sequence
  Description of Artificial Sequence: Synthetic oligonucleotide
caggucgguccucaugucc

SEQ ID NO: 2814099 - RNA, 19 nt, Artificial Sequence
  Description of Artificial Sequence: Synthetic oligonucleotide
uggagucucuguagucccc

SEQ ID NO: 2814100 - RNA, 19 nt, Artificial Sequence
  Description of Artificial Sequence: Synthetic oligonucleotide
guaggccagaggccggacg

SEQ ID NO: 2814101 - RNA, 19 nt, Artificial Sequence
  Description of Artificial Sequence: Synthetic oligonucleotide
ggauagcucccucagcgug

SEQ ID NO: 2814102 - RNA, 19 nt, Artificial Sequence
  Description of Artificial Sequence: Synthetic oligonucleotide
ggaacacucaacguaggac

SEQ ID NO: 2814103 - RNA, 19 nt, Artificial Sequence
  Description of Artificial Sequence: Synthetic oligonucleotide
gggauaagucucugcuugg

SEQ ID NO: 2814104 - RNA, 19 nt, Artificial Sequence
  Description of Artificial Sequence: Synthetic oligonucleotide
cguaguaagaagaaccuga

SEQ ID NO: 2814105 - RNA, 19 nt, Artificial Sequence
  Description of Artificial Sequence: Synthetic oligonucleotide
ggcgcagcugccuauggcc

SEQ ID NO: 2814106 - RNA, 19 nt, Artificial Sequence
  Description of Artificial Sequence: Synthetic oligonucleotide
gcuuggauagcucccucag

SEQ ID NO: 2814107 - RNA, 19 nt, Artificial Sequence
  Description of Artificial Sequence: Synthetic oligonucleotide
aacuccugagucucuccuu

SEQ ID NO: 2814108 - RNA, 19 nt, Artificial Sequence
  Description of Artificial Sequence: Synthetic oligonucleotide
cacuauccagggucucugg

SEQ ID NO: 2814109 - RNA, 19 nt, Artificial Sequence
  Description of Artificial Sequence: Synthetic oligonucleotide
uggauagcucccucagcgu

SEQ ID NO: 2814110 - RNA, 19 nt, Artificial Sequence
  Description of Artificial Sequence: Synthetic oligonucleotide
ggcgagagucaguacggcg

SEQ ID NO: 2814111 - RNA, 19 nt, Artificial Sequence
  Description of Artificial Sequence: Synthetic oligonucleotide
gguccucauguccaguuug

SEQ ID NO: 2814112 - RNA, 19 nt, Artificial Sequence
  Description of Artificial Sequence: Synthetic oligonucleotide
ugagucucuccuugccacu

SEQ ID NO: 2814113 - RNA, 19 nt, Artificial Sequence
  Description of Artificial Sequence: Synthetic oligonucleotide
aucccugacacugcgcuca

SEQ ID NO: 2814114 - RNA, 19 nt, Artificial Sequence
  Description of Artificial Sequence: Synthetic oligonucleotide
agaggccggacguugucgu

SEQ ID NO: 2814115 - RNA, 19 nt, Artificial Sequence
  Description of Artificial Sequence: Synthetic oligonucleotide
guaguaagaagaaccugaa

SEQ ID NO: 2814116 - RNA, 19 nt, Artificial Sequence
  Description of Artificial Sequence: Synthetic oligonucleotide
agcugaguggagucucugu

SEQ ID NO: 2814117 - RNA, 19 nt, Artificial Sequence
  Description of Artificial Sequence: Synthetic oligonucleotide
acacuauccagggucucug

SEQ ID NO: 2814118 - RNA, 19 nt, Artificial Sequence
  Description of Artificial Sequence: Synthetic oligonucleotide
acagugcccugcucaugcg

SEQ ID NO: 2814119 - RNA, 19 nt, Artificial Sequence
  Description of Artificial Sequence: Synthetic oligonucleotide
uguccaguuugcagccaac

SEQ ID NO: 2814120 - RNA, 19 nt, Artificial Sequence
  Description of Artificial Sequence: Synthetic oligonucleotide
guugucguaguaagaagaa

SEQ ID NO: 2814121 - RNA, 19 nt, Artificial Sequence
  Description of Artificial Sequence: Synthetic oligonucleotide
ucuguaguccccggcgaga

SEQ ID NO: 2814122 - RNA, 19 nt, Artificial Sequence
  Description of Artificial Sequence: Synthetic oligonucleotide
gaucgggaggaacacucaa

SEQ ID NO: 2814123 - RNA, 19 nt, Artificial Sequence
  Description of Artificial Sequence: Synthetic oligonucleotide
gaguggagucucuguaguc

SEQ ID NO: 2814124 - RNA, 19 nt, Artificial Sequence
  Description of Artificial Sequence: Synthetic oligonucleotide
caaaacuccugagucucuc

SEQ ID NO: 2814125 - RNA, 19 nt, Artificial Sequence
  Description of Artificial Sequence: Synthetic oligonucleotide
gcugccuauggccacggcc

SEQ ID NO: 2814126 - RNA, 19 nt, Artificial Sequence
  Description of Artificial Sequence: Synthetic oligonucleotide
ucucggaagcuugcggugu

SEQ ID NO: 2814127 - RNA, 19 nt, Artificial Sequence
  Description of Artificial Sequence: Synthetic oligonucleotide
accugcuuggccagcacag

SEQ ID NO: 2814128 - RNA, 19 nt, Artificial Sequence
  Description of Artificial Sequence: Synthetic oligonucleotide
guaguccccggcgagaguc

SEQ ID NO: 2814129 - RNA, 19 nt, Artificial Sequence
  Description of Artificial Sequence: Synthetic oligonucleotide
guuugcagccaaccagcac

SEQ ID NO: 2814130 - RNA, 19 nt, Artificial Sequence
  Description of Artificial Sequence: Synthetic oligonucleotide
ggccacguggaagacaucc

SEQ ID NO: 2814131 - RNA, 19 nt, Artificial Sequence
  Description of Artificial Sequence: Synthetic oligonucleotide
uaacagggauaagucucug

SEQ ID NO: 2814132 - RNA, 19 nt, Artificial Sequence
  Description of Artificial Sequence: Synthetic oligonucleotide
cucuguaguccccggcgag

SEQ ID NO: 2814133 - RNA, 19 nt, Artificial Sequence
  Description of Artificial Sequence: Synthetic oligonucleotide
auguccaguuugcagccaa

SEQ ID NO: 2814134 - RNA, 19 nt, Artificial Sequence
  Description of Artificial Sequence: Synthetic oligonucleotide
guccaguuugcagccaacc

SEQ ID NO: 2814135 - RNA, 19 nt, Artificial Sequence
  Description of Artificial Sequence: Synthetic oligonucleotide
uugucgaucucggaagcuu

SEQ ID NO: 2814136 - RNA, 19 nt, Artificial Sequence
  Description of Artificial Sequence: Synthetic oligonucleotide
cccggcgagagucaguacg

SEQ ID NO: 2814137 - RNA, 19 nt, Artificial Sequence
  Description of Artificial Sequence: Synthetic oligonucleotide
gggaggaacacucaacgua

SEQ ID NO: 2814138 - RNA, 19 nt, Artificial Sequence
  Description of Artificial Sequence: Synthetic oligonucleotide
gacagcugaguggagucuc

SEQ ID NO: 2814139 - RNA, 19 nt, Artificial Sequence
  Description of Artificial Sequence: Synthetic oligonucleotide
agcaccaccuuggcauugg

SEQ ID NO: 2814140 - RNA, 19 nt, Artificial Sequence
  Description of Artificial Sequence: Synthetic oligonucleotide
gauaagucucugcuuggau

SEQ ID NO: 2814141 - RNA, 19 nt, Artificial Sequence
  Description of Artificial Sequence: Synthetic oligonucleotide
acugcgcucagaagaucgg

SEQ ID NO: 2814142 - RNA, 19 nt, Artificial Sequence
  Description of Artificial Sequence: Synthetic oligonucleotide
ccucauguccaguuugcag

SEQ ID NO: 2814143 - RNA, 19 nt, Artificial Sequence
  Description of Artificial Sequence: Synthetic oligonucleotide
ccacauguugagcucaaug

SEQ ID NO: 2814144 - RNA, 19 nt, Artificial Sequence
  Description of Artificial Sequence: Synthetic oligonucleotide
ggcaaaacuccugagucuc

SEQ ID NO: 2814145 - RNA, 19 nt, Artificial Sequence
  Description of Artificial Sequence: Synthetic oligonucleotide
cugcgcucagaagaucggg

SEQ ID NO: 2814146 - RNA, 19 nt, Artificial Sequence
  Description of Artificial Sequence: Synthetic oligonucleotide
cacuguggccacguggaag

SEQ ID NO: 2814147 - RNA, 19 nt, Artificial Sequence
  Description of Artificial Sequence: Synthetic oligonucleotide
caaagcagaugagcacagc

SEQ ID NO: 2814148 - RNA, 19 nt, Artificial Sequence
  Description of Artificial Sequence: Synthetic oligonucleotide
caaccagcaccaccuuggc

SEQ ID NO: 2814149 - RNA, 19 nt, Artificial Sequence
  Description of Artificial Sequence: Synthetic oligonucleotide
ucuggccggcuaaugucaa

SEQ ID NO: 2814150 - RNA, 19 nt, Artificial Sequence
  Description of Artificial Sequence: Synthetic oligonucleotide
cagaguccggguaggccag

SEQ ID NO: 2814151 - RNA, 19 nt, Artificial Sequence
  Description of Artificial Sequence: Synthetic oligonucleotide
agcucaaugcggcgcuugu

SEQ ID NO: 2814152 - RNA, 19 nt, Artificial Sequence
  Description of Artificial Sequence: Synthetic oligonucleotide
uccucauguccaguuugca

SEQ ID NO: 2814153 - RNA, 19 nt, Artificial Sequence
  Description of Artificial Sequence: Synthetic oligonucleotide
cucuggccggcuaauguca

SEQ ID NO: 2814154 - RNA, 19 nt, Artificial Sequence
  Description of Artificial Sequence: Synthetic oligonucleotide
ucuggccuuccggacagcu

SEQ ID NO: 2814155 - RNA, 19 nt, Artificial Sequence
  Description of Artificial Sequence: Synthetic oligonucleotide
cuguaguccccggcgagag

SEQ ID NO: 2814156 - RNA, 19 nt, Artificial Sequence
  Description of Artificial Sequence: Synthetic oligonucleotide
ccugcucaugcguaacagg

SEQ ID NO: 2814157 - RNA, 19 nt, Artificial Sequence
  Description of Artificial Sequence: Synthetic oligonucleotide
uguggccacguggaagaca

SEQ ID NO: 2814158 - RNA, 19 nt, Artificial Sequence
  Description of Artificial Sequence: Synthetic oligonucleotide
aguacggcgcagcugccua

SEQ ID NO: 2814159 - RNA, 19 nt, Artificial Sequence
  Description of Artificial Sequence: Synthetic oligonucleotide
gcgagagucaguacggcgc

SEQ ID NO: 2814160 - RNA, 19 nt, Artificial Sequence
  Description of Artificial Sequence: Synthetic oligonucleotide
agcacagugcccugcucau

SEQ ID NO: 2814161 - RNA, 19 nt, Artificial Sequence
  Description of Artificial Sequence: Synthetic oligonucleotide
ggagucucuguaguccccg

SEQ ID NO: 2814162 - RNA, 19 nt, Artificial Sequence
  Description of Artificial Sequence: Synthetic oligonucleotide
ucgguccucauguccaguu

SEQ ID NO: 2814163 - RNA, 19 nt, Artificial Sequence
  Description of Artificial Sequence: Synthetic oligonucleotide
cagaggccggacguugucg

SEQ ID NO: 2814164 - RNA, 19 nt, Artificial Sequence
  Description of Artificial Sequence: Synthetic oligonucleotide
agcucccucagcguggcca

SEQ ID NO: 2814165 - RNA, 19 nt, Artificial Sequence
  Description of Artificial Sequence: Synthetic oligonucleotide
gucguaguaagaagaaccu

SEQ ID NO: 2814166 - RNA, 19 nt, Artificial Sequence
  Description of Artificial Sequence: Synthetic oligonucleotide
cacggccaagagaagccac

SEQ ID NO: 2814167 - RNA, 19 nt, Artificial Sequence
  Description of Artificial Sequence: Synthetic oligonucleotide
ucaguacggcgcagcugcc

SEQ ID NO: 2814168 - RNA, 19 nt, Artificial Sequence
  Description of Artificial Sequence: Synthetic oligonucleotide
gcagccaaccagcaccacc

SEQ ID NO: 2814169 - RNA, 19 nt, Artificial Sequence
  Description of Artificial Sequence: Synthetic oligonucleotide
aucccacauguugagcuca

SEQ ID NO: 2814170 - RNA, 19 nt, Artificial Sequence
  Description of Artificial Sequence: Synthetic oligonucleotide
ggucuggccuuccggacag

SEQ ID NO: 2814171 - RNA, 19 nt, Artificial Sequence
  Description of Artificial Sequence: Synthetic oligonucleotide
gcgcucagaagaucgggag

SEQ ID NO: 2814172 - RNA, 19 nt, Artificial Sequence
  Description of Artificial Sequence: Synthetic oligonucleotide
acucaacguaggacacagc

SEQ ID NO: 2814173 - RNA, 19 nt, Artificial Sequence
  Description of Artificial Sequence: Synthetic oligonucleotide
cuugcgguguaguucucaa

SEQ ID NO: 2814174 - RNA, 19 nt, Artificial Sequence
  Description of Artificial Sequence: Synthetic oligonucleotide
aggccggacguugucguag

SEQ ID NO: 2814175 - RNA, 19 nt, Artificial Sequence
  Description of Artificial Sequence: Synthetic oligonucleotide
aggacacuauccagggucu

SEQ ID NO: 2814176 - RNA, 19 nt, Artificial Sequence
  Description of Artificial Sequence: Synthetic oligonucleotide
uguaguccccggcgagagu

SEQ ID NO: 2814177 - RNA, 19 nt, Artificial Sequence
  Description of Artificial Sequence: Synthetic oligonucleotide
aggucgguccucaugucca

SEQ ID NO: 2814178 - RNA, 19 nt, Artificial Sequence
  Description of Artificial Sequence: Synthetic oligonucleotide
gcuugucgaucucggaagc

SEQ ID NO: 2814179 - RNA, 19 nt, Artificial Sequence
  Description of Artificial Sequence: Synthetic oligonucleotide
uugcgguguaguucucaaa

SEQ ID NO: 2814180 - RNA, 19 nt, Artificial Sequence
  Description of Artificial Sequence: Synthetic oligonucleotide
ccugaaguaucccacaugu

SEQ ID NO: 2814181 - RNA, 19 nt, Artificial Sequence
  Description of Artificial Sequence: Synthetic oligonucleotide
uccccggucuggccuuccg

SEQ ID NO: 2814182 - RNA, 19 nt, Artificial Sequence
  Description of Artificial Sequence: Synthetic oligonucleotide
agucaguacggcgcagcug

SEQ ID NO: 2814183 - RNA, 19 nt, Artificial Sequence
  Description of Artificial Sequence: Synthetic oligonucleotide
gucgaucucggaagcuugc

SEQ ID NO: 2814184 - RNA, 19 nt, Artificial Sequence
  Description of Artificial Sequence: Synthetic oligonucleotide
gcucagaagaucgggagga

SEQ ID NO: 2814185 - RNA, 19 nt, Artificial Sequence
  Description of Artificial Sequence: Synthetic oligonucleotide
acggcgcagcugccuaugg

SEQ ID NO: 2814186 - RNA, 19 nt, Artificial Sequence
  Description of Artificial Sequence: Synthetic oligonucleotide
gacaucccugacacugcgc

SEQ ID NO: 2814187 - RNA, 19 nt, Artificial Sequence
  Description of Artificial Sequence: Synthetic oligonucleotide
cguugucguaguaagaaga

SEQ ID NO: 2814188 - RNA, 19 nt, Artificial Sequence
  Description of Artificial Sequence: Synthetic oligonucleotide
guaacagggauaagucucu

SEQ ID NO: 2814189 - RNA, 19 nt, Artificial Sequence
  Description of Artificial Sequence: Synthetic oligonucleotide
ucggaagcuugcgguguag

SEQ ID NO: 2814190 - RNA, 19 nt, Artificial Sequence
  Description of Artificial Sequence: Synthetic oligonucleotide
gccggcuaaugucaaagca

SEQ ID NO: 2814191 - RNA, 19 nt, Artificial Sequence
  Description of Artificial Sequence: Synthetic oligonucleotide
agcugccuauggccacggc

SEQ ID NO: 2814192 - RNA, 19 nt, Artificial Sequence
  Description of Artificial Sequence: Synthetic oligonucleotide
ucccacauguugagcucaa

SEQ ID NO: 2814193 - RNA, 19 nt, Artificial Sequence
  Description of Artificial Sequence: Synthetic oligonucleotide
cggacguugucguaguaag

SEQ ID NO: 2814194 - RNA, 19 nt, Artificial Sequence
  Description of Artificial Sequence: Synthetic oligonucleotide
ucccugacacugcgcucag

SEQ ID NO: 2814195 - RNA, 19 nt, Artificial Sequence
  Description of Artificial Sequence: Synthetic oligonucleotide
aguuugcagccaaccagca

SEQ ID NO: 2814196 - RNA, 19 nt, Artificial Sequence
  Description of Artificial Sequence: Synthetic oligonucleotide
caucagaguccggguaggc

SEQ ID NO: 2814197 - RNA, 19 nt, Artificial Sequence
  Description of Artificial Sequence: Synthetic oligonucleotide
uaguccccggcgagaguca

SEQ ID NO: 2814198 - RNA, 19 nt, Artificial Sequence
  Description of Artificial Sequence: Synthetic oligonucleotide
acacugcgcucagaagauc

SEQ ID NO: 2814199 - RNA, 19 nt, Artificial Sequence
  Description of Artificial Sequence: Synthetic oligonucleotide
ccggcgagagucaguacgg

SEQ ID NO: 2814200 - RNA, 19 nt, Artificial Sequence
  Description of Artificial Sequence: Synthetic oligonucleotide
aagccacuguggccacgug

SEQ ID NO: 2814201 - RNA, 19 nt, Artificial Sequence
  Description of Artificial Sequence: Synthetic oligonucleotide
cgguguaguucucaaacac

SEQ ID NO: 2814202 - RNA, 19 nt, Artificial Sequence
  Description of Artificial Sequence: Synthetic oligonucleotide
uccccggcgagagucagua

SEQ ID NO: 2814203 - RNA, 19 nt, Artificial Sequence
  Description of Artificial Sequence: Synthetic oligonucleotide
uccagggucucuggccggc

SEQ ID NO: 2814204 - RNA, 19 nt, Artificial Sequence
  Description of Artificial Sequence: Synthetic oligonucleotide
acacucaacguaggacaca

SEQ ID NO: 2814205 - RNA, 19 nt, Artificial Sequence
  Description of Artificial Sequence: Synthetic oligonucleotide
uccggacagcugaguggag

SEQ ID NO: 2814206 - RNA, 19 nt, Artificial Sequence
  Description of Artificial Sequence: Synthetic oligonucleotide
gagagucaguacggcgcag

SEQ ID NO: 2814207 - RNA, 19 nt, Artificial Sequence
  Description of Artificial Sequence: Synthetic oligonucleotide
ugccuauggccacggccaa

SEQ ID NO: 2814208 - RNA, 19 nt, Artificial Sequence
  Description of Artificial Sequence: Synthetic oligonucleotide
uacggcgcagcugccuaug

SEQ ID NO: 2814209 - RNA, 19 nt, Artificial Sequence
  Description of Artificial Sequence: Synthetic oligonucleotide
ccuuccggacagcugagug

SEQ ID NO: 2814210 - RNA, 19 nt, Artificial Sequence
  Description of Artificial Sequence: Synthetic oligonucleotide
agaagccacuguggccacg

SEQ ID NO: 2814211 - RNA, 19 nt, Artificial Sequence
  Description of Artificial Sequence: Synthetic oligonucleotide
ucucuccuugccacuucuu

SEQ ID NO: 2814212 - RNA, 19 nt, Artificial Sequence
  Description of Artificial Sequence: Synthetic oligonucleotide
agaucgggaggaacacuca

SEQ ID NO: 2814213 - RNA, 19 nt, Artificial Sequence
  Description of Artificial Sequence: Synthetic oligonucleotide
caucccugacacugcgcuc

SEQ ID NO: 2814214 - RNA, 19 nt, Artificial Sequence
  Description of Artificial Sequence: Synthetic oligonucleotide
agggucucuggccggcuaa

SEQ ID NO: 2814215 - RNA, 19 nt, Artificial Sequence
  Description of Artificial Sequence: Synthetic oligonucleotide
gucucuggccggcuaaugu

SEQ ID NO: 2814216 - RNA, 19 nt, Artificial Sequence
  Description of Artificial Sequence: Synthetic oligonucleotide
gcaucagaguccggguagg

SEQ ID NO: 2814217 - RNA, 19 nt, Artificial Sequence
  Description of Artificial Sequence: Synthetic oligonucleotide
acggccaagagaagccacu

SEQ ID NO: 2814218 - RNA, 19 nt, Artificial Sequence
  Description of Artificial Sequence: Synthetic oligonucleotide
gaguccggguaggccagag

SEQ ID NO: 2814219 - RNA, 19 nt, Artificial Sequence
  Description of Artificial Sequence: Synthetic oligonucleotide
caugcguaacagggauaag

SEQ ID NO: 2814220 - RNA, 19 nt, Artificial Sequence
  Description of Artificial Sequence: Synthetic oligonucleotide
ggccggcuaaugucaaagc

SEQ ID NO: 2814221 - RNA, 19 nt, Artificial Sequence
  Description of Artificial Sequence: Synthetic oligonucleotide
gagucaguacggcgcagcu

SEQ ID NO: 2814222 - RNA, 19 nt, Artificial Sequence
  Description of Artificial Sequence: Synthetic oligonucleotide
ggccacggccaagagaagc

SEQ ID NO: 2814223 - RNA, 19 nt, Artificial Sequence
  Description of Artificial Sequence: Synthetic oligonucleotide
gcugaguggagucucugua

SEQ ID NO: 2814224 - RNA, 19 nt, Artificial Sequence
  Description of Artificial Sequence: Synthetic oligonucleotide
ccuugccacuucuugagga

SEQ ID NO: 2814225 - RNA, 19 nt, Artificial Sequence
  Description of Artificial Sequence: Synthetic oligonucleotide
ggauaagucucugcuugga

SEQ ID NO: 2814226 - RNA, 19 nt, Artificial Sequence
  Description of Artificial Sequence: Synthetic oligonucleotide
augcggcgcuugucgaucu

SEQ ID NO: 2814227 - RNA, 19 nt, Artificial Sequence
  Description of Artificial Sequence: Synthetic oligonucleotide
uggccacggccaagagaag

SEQ ID NO: 2814228 - RNA, 19 nt, Artificial Sequence
  Description of Artificial Sequence: Synthetic oligonucleotide
gccacggccaagagaagcc

SEQ ID NO: 2814229 - RNA, 19 nt, Artificial Sequence
  Description of Artificial Sequence: Synthetic oligonucleotide
ucccucagcguggccaggu

SEQ ID NO: 2814230 - RNA, 19 nt, Artificial Sequence
  Description of Artificial Sequence: Synthetic oligonucleotide
gcgguguaguucucaaaca

SEQ ID NO: 2814231 - RNA, 19 nt, Artificial Sequence
  Description of Artificial Sequence: Synthetic oligonucleotide
gaagaucgggaggaacacu

SEQ ID NO: 2814232 - RNA, 19 nt, Artificial Sequence
  Description of Artificial Sequence: Synthetic oligonucleotide
gacacugcgcucagaagau

SEQ ID NO: 2814233 - RNA, 19 nt, Artificial Sequence
  Description of Artificial Sequence: Synthetic oligonucleotide
gaagccacuguggccacgu

SEQ ID NO: 2814234 - RNA, 19 nt, Artificial Sequence
  Description of Artificial Sequence: Synthetic oligonucleotide
cgaucucggaagcuugcgg

SEQ ID NO: 2814235 - RNA, 19 nt, Artificial Sequence
  Description of Artificial Sequence: Synthetic oligonucleotide
ggucgguccucauguccag

SEQ ID NO: 2814236 - RNA, 19 nt, Artificial Sequence
  Description of Artificial Sequence: Synthetic oligonucleotide
cugcuuggauagcucccuc

SEQ ID NO: 2814237 - RNA, 19 nt, Artificial Sequence
  Description of Artificial Sequence: Synthetic oligonucleotide
acagcugaguggagucucu

SEQ ID NO: 2814238 - RNA, 19 nt, Artificial Sequence
  Description of Artificial Sequence: Synthetic oligonucleotide
ccugacacugcgcucagaa

SEQ ID NO: 2814239 - RNA, 19 nt, Artificial Sequence
  Description of Artificial Sequence: Synthetic oligonucleotide
ugcccugcucaugcguaac

SEQ ID NO: 2814240 - RNA, 19 nt, Artificial Sequence
  Description of Artificial Sequence: Synthetic oligonucleotide
agugcccugcucaugcgua

SEQ ID NO: 2814241 - RNA, 19 nt, Artificial Sequence
  Description of Artificial Sequence: Synthetic oligonucleotide
guggccacguggaagacau

SEQ ID NO: 2814242 - RNA, 19 nt, Artificial Sequence
  Description of Artificial Sequence: Synthetic oligonucleotide
gcucccucagcguggccag

SEQ ID NO: 2814243 - RNA, 19 nt, Artificial Sequence
  Description of Artificial Sequence: Synthetic oligonucleotide
gccaggucgguccucaugu

SEQ ID NO: 2814244 - RNA, 19 nt, Artificial Sequence
  Description of Artificial Sequence: Synthetic oligonucleotide
caccugcuuggccagcaca

SEQ ID NO: 2814245 - RNA, 19 nt, Artificial Sequence
  Description of Artificial Sequence: Synthetic oligonucleotide
cucaugcguaacagggaua

SEQ ID NO: 2814246 - RNA, 19 nt, Artificial Sequence
  Description of Artificial Sequence: Synthetic oligonucleotide
gcgcuugucgaucucggaa

SEQ ID NO: 2814247 - RNA, 19 nt, Artificial Sequence
  Description of Artificial Sequence: Synthetic oligonucleotide
uggccagcacagugcccug

SEQ ID NO: 2814248 - RNA, 19 nt, Artificial Sequence
  Description of Artificial Sequence: Synthetic oligonucleotide
gcucaugcguaacagggau

SEQ ID NO: 2814249 - RNA, 19 nt, Artificial Sequence
  Description of Artificial Sequence: Synthetic oligonucleotide
cacuucuugaggacacuau

SEQ ID NO: 2814250 - RNA, 19 nt, Artificial Sequence
  Description of Artificial Sequence: Synthetic oligonucleotide
cagcugaguggagucucug

SEQ ID NO: 2814251 - RNA, 19 nt, Artificial Sequence
  Description of Artificial Sequence: Synthetic oligonucleotide
ucagcguggccaggucggu

SEQ ID NO: 2814252 - RNA, 19 nt, Artificial Sequence
  Description of Artificial Sequence: Synthetic oligonucleotide
gcguaacagggauaagucu

SEQ ID NO: 2814253 - RNA, 19 nt, Artificial Sequence
  Description of Artificial Sequence: Synthetic oligonucleotide
gcaccaccuuggcauuggg

SEQ ID NO: 2814254 - RNA, 19 nt, Artificial Sequence
  Description of Artificial Sequence: Synthetic oligonucleotide
gcggcgcuugucgaucucg

SEQ ID NO: 2814255 - RNA, 19 nt, Artificial Sequence
  Description of Artificial Sequence: Synthetic oligonucleotide
cagcugccuauggccacgg

SEQ ID NO: 2814256 - RNA, 19 nt, Artificial Sequence
  Description of Artificial Sequence: Synthetic oligonucleotide
ggccaggucgguccucaug

SEQ ID NO: 2814257 - RNA, 19 nt, Artificial Sequence
  Description of Artificial Sequence: Synthetic oligonucleotide
gggcaaaacuccugagucu

SEQ ID NO: 2814258 - RNA, 19 nt, Artificial Sequence
  Description of Artificial Sequence: Synthetic oligonucleotide
ugcggcgcuugucgaucuc

SEQ ID NO: 2814259 - RNA, 19 nt, Artificial Sequence
  Description of Artificial Sequence: Synthetic oligonucleotide
cccugcucaugcguaacag

SEQ ID NO: 2814260 - RNA, 19 nt, Artificial Sequence
  Description of Artificial Sequence: Synthetic oligonucleotide
gccacguggaagacauccc

SEQ ID NO: 2814261 - RNA, 19 nt, Artificial Sequence
  Description of Artificial Sequence: Synthetic oligonucleotide
ccugagucucuccuugcca

SEQ ID NO: 2814262 - RNA, 19 nt, Artificial Sequence
  Description of Artificial Sequence: Synthetic oligonucleotide
guggccaggucgguccuca

SEQ ID NO: 2814263 - RNA, 19 nt, Artificial Sequence
  Description of Artificial Sequence: Synthetic oligonucleotide
caccuuggcauuggggcaa

SEQ ID NO: 2814264 - RNA, 19 nt, Artificial Sequence
  Description of Artificial Sequence: Synthetic oligonucleotide
uagcucccucagcguggcc

SEQ ID NO: 2814265 - RNA, 19 nt, Artificial Sequence
  Description of Artificial Sequence: Synthetic oligonucleotide
cggacagcugaguggaguc

SEQ ID NO: 2814266 - RNA, 19 nt, Artificial Sequence
  Description of Artificial Sequence: Synthetic oligonucleotide
ccuauggccacggccaaga

SEQ ID NO: 2814267 - RNA, 19 nt, Artificial Sequence
  Description of Artificial Sequence: Synthetic oligonucleotide
ugagcucaaugcggcgcuu

SEQ ID NO: 2814268 - RNA, 19 nt, Artificial Sequence
  Description of Artificial Sequence: Synthetic oligonucleotide
ggacguugucguaguaaga

SEQ ID NO: 2814269 - RNA, 19 nt, Artificial Sequence
  Description of Artificial Sequence: Synthetic oligonucleotide
cagcaccaccuuggcauug

SEQ ID NO: 2814270 - RNA, 19 nt, Artificial Sequence
  Description of Artificial Sequence: Synthetic oligonucleotide
cguggaagacaucccugac

SEQ ID NO: 2814271 - RNA, 19 nt, Artificial Sequence
  Description of Artificial Sequence: Synthetic oligonucleotide
ggccagaggccggacguug

SEQ ID NO: 2814272 - RNA, 19 nt, Artificial Sequence
  Description of Artificial Sequence: Synthetic oligonucleotide
gugcccugcucaugcguaa

SEQ ID NO: 2814273 - RNA, 19 nt, Artificial Sequence
  Description of Artificial Sequence: Synthetic oligonucleotide
cagggauaagucucugcuu

SEQ ID NO: 2814274 - RNA, 19 nt, Artificial Sequence
  Description of Artificial Sequence: Synthetic oligonucleotide
ccaccuuggcauuggggca

SEQ ID NO: 2814275 - RNA, 19 nt, Artificial Sequence
  Description of Artificial Sequence: Synthetic oligonucleotide
ugcagccaaccagcaccac

SEQ ID NO: 2814276 - RNA, 19 nt, Artificial Sequence
  Description of Artificial Sequence: Synthetic oligonucleotide
cauguccaguuugcagcca

SEQ ID NO: 2814277 - RNA, 19 nt, Artificial Sequence
  Description of Artificial Sequence: Synthetic oligonucleotide
cuugucgaucucggaagcu

SEQ ID NO: 2814278 - RNA, 19 nt, Artificial Sequence
  Description of Artificial Sequence: Synthetic oligonucleotide
cucagaagaucgggaggaa

SEQ ID NO: 2814279 - RNA, 19 nt, Artificial Sequence
  Description of Artificial Sequence: Synthetic oligonucleotide
ggucucuggccggcuaaug

SEQ ID NO: 2814280 - RNA, 19 nt, Artificial Sequence
  Description of Artificial Sequence: Synthetic oligonucleotide
cugaaguaucccacauguu

SEQ ID NO: 2814281 - RNA, 19 nt, Artificial Sequence
  Description of Artificial Sequence: Synthetic oligonucleotide
cuguggccacguggaagac

SEQ ID NO: 2814282 - RNA, 19 nt, Artificial Sequence
  Description of Artificial Sequence: Synthetic oligonucleotide
agcuugcgguguaguucuc

SEQ ID NO: 2814283 - RNA, 19 nt, Artificial Sequence
  Description of Artificial Sequence: Synthetic oligonucleotide
cucggaagcuugcggugua

SEQ ID NO: 2814284 - RNA, 19 nt, Artificial Sequence
  Description of Artificial Sequence: Synthetic oligonucleotide
gaggccggacguugucgua

SEQ ID NO: 2814285 - RNA, 19 nt, Artificial Sequence
  Description of Artificial Sequence: Synthetic oligonucleotide
ggaagcuugcgguguaguu

SEQ ID NO: 2814286 - RNA, 19 nt, Artificial Sequence
  Description of Artificial Sequence: Synthetic oligonucleotide
ggcgcuugucgaucucgga

SEQ ID NO: 2814287 - RNA, 19 nt, Artificial Sequence
  Description of Artificial Sequence: Synthetic oligonucleotide
gcuugcgguguaguucuca

SEQ ID NO: 2814288 - RNA, 19 nt, Artificial Sequence
  Description of Artificial Sequence: Synthetic oligonucleotide
uuccccggucuggccuucc

SEQ ID NO: 2814289 - RNA, 19 nt, Artificial Sequence
  Description of Artificial Sequence: Synthetic oligonucleotide
gagucucuccuugccacuu

SEQ ID NO: 2814290 - RNA, 19 nt, Artificial Sequence
  Description of Artificial Sequence: Synthetic oligonucleotide
caaugcggcgcuugucgau

SEQ ID NO: 2814291 - RNA, 19 nt, Artificial Sequence
  Description of Artificial Sequence: Synthetic oligonucleotide
cuggccggcuaaugucaaa

SEQ ID NO: 2814292 - RNA, 19 nt, Artificial Sequence
  Description of Artificial Sequence: Synthetic oligonucleotide
agaguccggguaggccaga

SEQ ID NO: 2814293 - RNA, 19 nt, Artificial Sequence
  Description of Artificial Sequence: Synthetic oligonucleotide
ccccggucuggccuuccgg

SEQ ID NO: 2814294 - RNA, 19 nt, Artificial Sequence
  Description of Artificial Sequence: Synthetic oligonucleotide
gcccugcucaugcguaaca

SEQ ID NO: 2814295 - RNA, 19 nt, Artificial Sequence
  Description of Artificial Sequence: Synthetic oligonucleotide
ccggucuggccuuccggac

SEQ ID NO: 2814296 - RNA, 19 nt, Artificial Sequence
  Description of Artificial Sequence: Synthetic oligonucleotide
cggcgcuugucgaucucgg

SEQ ID NO: 2814297 - RNA, 19 nt, Artificial Sequence
  Description of Artificial Sequence: Synthetic oligonucleotide
cccggucuggccuuccgga

SEQ ID NO: 2814298 - RNA, 19 nt, Artificial Sequence
  Description of Artificial Sequence: Synthetic oligonucleotide
ggccaagagaagccacugu

SEQ ID NO: 2814299 - RNA, 19 nt, Artificial Sequence
  Description of Artificial Sequence: Synthetic oligonucleotide
ccagaggccggacguuguc

SEQ ID NO: 2814300 - RNA, 19 nt, Artificial Sequence
  Description of Artificial Sequence: Synthetic oligonucleotide
gcucaaugcggcgcuuguc

SEQ ID NO: 2814301 - RNA, 19 nt, Artificial Sequence
  Description of Artificial Sequence: Synthetic oligonucleotide
cagcguggccaggucgguc

SEQ ID NO: 2814302 - RNA, 19 nt, Artificial Sequence
  Description of Artificial Sequence: Synthetic oligonucleotide
ggacacuauccagggucuc

SEQ ID NO: 2814303 - RNA, 19 nt, Artificial Sequence
  Description of Artificial Sequence: Synthetic oligonucleotide
cgagagucaguacggcgca

SEQ ID NO: 2814304 - RNA, 19 nt, Artificial Sequence
  Description of Artificial Sequence: Synthetic oligonucleotide
ggaagacaucccugacacu

SEQ ID NO: 2814305 - RNA, 19 nt, Artificial Sequence
  Description of Artificial Sequence: Synthetic oligonucleotide
ccacguggaagacaucccu

SEQ ID NO: 2814306 - RNA, 19 nt, Artificial Sequence
  Description of Artificial Sequence: Synthetic oligonucleotide
uggccaggucgguccucau

SEQ ID NO: 2814307 - RNA, 19 nt, Artificial Sequence
  Description of Artificial Sequence: Synthetic oligonucleotide
ggccuuccggacagcugag

SEQ ID NO: 2814308 - RNA, 19 nt, Artificial Sequence
  Description of Artificial Sequence: Synthetic oligonucleotide
gccuauggccacggccaag

SEQ ID NO: 2814309 - RNA, 19 nt, Artificial Sequence
  Description of Artificial Sequence: Synthetic oligonucleotide
ccaggucgguccucauguc

SEQ ID NO: 2814310 - RNA, 19 nt, Artificial Sequence
  Description of Artificial Sequence: Synthetic oligonucleotide
gcacagugcccugcucaug

SEQ ID NO: 2814311 - RNA, 19 nt, Artificial Sequence
  Description of Artificial Sequence: Synthetic oligonucleotide
gguaggccagaggccggac

SEQ ID NO: 2814312 - RNA, 19 nt, Artificial Sequence
  Description of Artificial Sequence: Synthetic oligonucleotide
aggccagaggccggacguu

SEQ ID NO: 2814313 - RNA, 19 nt, Artificial Sequence
  Description of Artificial Sequence: Synthetic oligonucleotide
cagggucucuggccggcua

SEQ ID NO: 2814314 - RNA, 19 nt, Artificial Sequence
  Description of Artificial Sequence: Synthetic oligonucleotide
ggcuaaugucaaagcagau

SEQ ID NO: 2814315 - RNA, 19 nt, Artificial Sequence
  Description of Artificial Sequence: Synthetic oligonucleotide
guacggcgcagcugccuau

SEQ ID NO: 2814316 - RNA, 19 nt, Artificial Sequence
  Description of Artificial Sequence: Synthetic oligonucleotide
ggacagcugaguggagucu

SEQ ID NO: 2814317 - RNA, 19 nt, Artificial Sequence
  Description of Artificial Sequence: Synthetic oligonucleotide
cggccaagagaagccacug

SEQ ID NO: 2814318 - RNA, 19 nt, Artificial Sequence
  Description of Artificial Sequence: Synthetic oligonucleotide
cggguaggccagaggccgg

SEQ ID NO: 2814319 - RNA, 19 nt, Artificial Sequence
  Description of Artificial Sequence: Synthetic oligonucleotide
gucuggccuuccggacagc

SEQ ID NO: 2814320 - RNA, 19 nt, Artificial Sequence
  Description of Artificial Sequence: Synthetic oligonucleotide
ccggacguugucguaguaa

SEQ ID NO: 2814321 - RNA, 19 nt, Artificial Sequence
  Description of Artificial Sequence: Synthetic oligonucleotide
gcaaaacuccugagucucu

SEQ ID NO: 2814322 - RNA, 19 nt, Artificial Sequence
  Description of Artificial Sequence: Synthetic oligonucleotide
gccagcacagugcccugcu

SEQ ID NO: 2814323 - RNA, 19 nt, Artificial Sequence
  Description of Artificial Sequence: Synthetic oligonucleotide
ccacuucuugaggacacua

SEQ ID NO: 2814324 - RNA, 19 nt, Artificial Sequence
  Description of Artificial Sequence: Synthetic oligonucleotide
cggcgcagcugccuauggc

SEQ ID NO: 2814325 - RNA, 19 nt, Artificial Sequence
  Description of Artificial Sequence: Synthetic oligonucleotide
gucgguccucauguccagu

SEQ ID NO: 2814326 - RNA, 19 nt, Artificial Sequence
  Description of Artificial Sequence: Synthetic oligonucleotide
caguacggcgcagcugccu

SEQ ID NO: 2814327 - RNA, 19 nt, Artificial Sequence
  Description of Artificial Sequence: Synthetic oligonucleotide
ccacggccaagagaagcca

SEQ ID NO: 2814328 - RNA, 19 nt, Artificial Sequence
  Description of Artificial Sequence: Synthetic oligonucleotide
ggccggacguugucguagu

SEQ ID NO: 2814329 - RNA, 19 nt, Artificial Sequence
  Description of Artificial Sequence: Synthetic oligonucleotide
cggucuggccuuccggaca

SEQ ID NO: 2814330 - RNA, 19 nt, Artificial Sequence
  Description of Artificial Sequence: Synthetic oligonucleotide
cggcgagagucaguacggc

SEQ ID NO: 2814331 - RNA, 19 nt, Artificial Sequence
  Description of Artificial Sequence: Synthetic oligonucleotide
caaacacgguggggacaua

SEQ ID NO: 2814332 - RNA, 19 nt, Artificial Sequence
  Description of Artificial Sequence: Synthetic oligonucleotide
cgggaggaacacucaacgu

SEQ ID NO: 2814333 - RNA, 19 nt, Artificial Sequence
  Description of Artificial Sequence: Synthetic oligonucleotide
ccggacagcugaguggagu

SEQ ID NO: 2814334 - RNA, 19 nt, Artificial Sequence
  Description of Artificial Sequence: Synthetic oligonucleotide
gccacuucuugaggacacu

SEQ ID NO: 2814335 - RNA, 19 nt, Artificial Sequence
  Description of Artificial Sequence: Synthetic oligonucleotide
ccccggcgagagucaguac

SEQ ID NO: 2814336 - RNA, 19 nt, Artificial Sequence
  Description of Artificial Sequence: Synthetic oligonucleotide
ccacuguggccacguggaa

SEQ ID NO: 2814337 - RNA, 19 nt, Artificial Sequence
  Description of Artificial Sequence: Synthetic oligonucleotide
gccggacguugucguagua

SEQ ID NO: 2814338 - RNA, 19 nt, Artificial Sequence
  Description of Artificial Sequence: Synthetic oligonucleotide
gccagaggccggacguugu

SEQ ID NO: 2814339 - RNA, 19 nt, Artificial Sequence
  Description of Artificial Sequence: Synthetic oligonucleotide
guccccggcgagagucagu

SEQ ID NO: 2814340 - RNA, 19 nt, Artificial Sequence
  Description of Artificial Sequence: Synthetic oligonucleotide
ccccaccugcuuggccagc

SEQ ID NO: 2814341 - RNA, 19 nt, Artificial Sequence
  Description of Artificial Sequence: Synthetic oligonucleotide
ccagcaccaccuuggcauu

SEQ ID NO: 2814342 - RNA, 19 nt, Artificial Sequence
  Description of Artificial Sequence: Synthetic oligonucleotide
gggucucuggccggcuaau

SEQ ID NO: 2814343 - RNA, 19 nt, Artificial Sequence
  Description of Artificial Sequence: Synthetic oligonucleotide
gccuuccggacagcugagu

SEQ ID NO: 2814344 - RNA, 19 nt, Artificial Sequence
  Description of Artificial Sequence: Synthetic oligonucleotide
gcguggccaggucgguccu

SEQ ID NO: 2814345 - RNA, 19 nt, Artificial Sequence
  Description of Artificial Sequence: Synthetic oligonucleotide
cggaagcuugcgguguagu

SEQ ID NO: 2814346 - RNA, 19 nt, Artificial Sequence
  Description of Artificial Sequence: Synthetic oligonucleotide
cguggccaggucgguccuc

SEQ ID NO: 2814347 - RNA, 19 nt, Artificial Sequence
  Description of Artificial Sequence: Synthetic oligonucleotide
cccugacacugcgcucaga

SEQ ID NO: 2814348 - RNA, 19 nt, Artificial Sequence
  Description of Artificial Sequence: Synthetic oligonucleotide
cccacauguugagcucaau

SEQ ID NO: 2814349 - RNA, 19 nt, Artificial Sequence
  Description of Artificial Sequence: Synthetic oligonucleotide
cgguccucauguccaguuu

SEQ ID NO: 2814350 - RNA, 19 nt, Artificial Sequence
  Description of Artificial Sequence: Synthetic oligonucleotide
ccagggucucuggccggcu

SEQ ID NO: 2814351 - RNA, 19 nt, Artificial Sequence
  Description of Artificial Sequence: Synthetic oligonucleotide
aagaguaugacccaaguuc

SEQ ID NO: 2814352 - RNA, 19 nt, Artificial Sequence
  Description of Artificial Sequence: Synthetic oligonucleotide
uauacguucacucaagaag

SEQ ID NO: 2814353 - RNA, 19 nt, Artificial Sequence
  Description of Artificial Sequence: Synthetic oligonucleotide
aacaauagggcuucucacc

SEQ ID NO: 2814354 - RNA, 19 nt, Artificial Sequence
  Description of Artificial Sequence: Synthetic oligonucleotide
cucaagaagaguaugaccc

SEQ ID NO: 2814355 - RNA, 19 nt, Artificial Sequence
  Description of Artificial Sequence: Synthetic oligonucleotide
aacauuuucccacacuggg

SEQ ID NO: 2814356 - RNA, 19 nt, Artificial Sequence
  Description of Artificial Sequence: Synthetic oligonucleotide
ugaguguucugccugaagg

SEQ ID NO: 2814357 - RNA, 19 nt, Artificial Sequence
  Description of Artificial Sequence: Synthetic oligonucleotide
acugguuacaacaauaggg

SEQ ID NO: 2814358 - RNA, 19 nt, Artificial Sequence
  Description of Artificial Sequence: Synthetic oligonucleotide
aagucgcugguguacaacc

SEQ ID NO: 2814359 - RNA, 19 nt, Artificial Sequence
  Description of Artificial Sequence: Synthetic oligonucleotide
acauuucagacacugguac

SEQ ID NO: 2814360 - RNA, 19 nt, Artificial Sequence
  Description of Artificial Sequence: Synthetic oligonucleotide
acucguaaggucuuucgcc

SEQ ID NO: 2814361 - RNA, 19 nt, Artificial Sequence
  Description of Artificial Sequence: Synthetic oligonucleotide
acucaagaagaguaugacc

SEQ ID NO: 2814362 - RNA, 19 nt, Artificial Sequence
  Description of Artificial Sequence: Synthetic oligonucleotide
aaguucguuacguuuccac

SEQ ID NO: 2814363 - RNA, 19 nt, Artificial Sequence
  Description of Artificial Sequence: Synthetic oligonucleotide
cucaauguaacguuuuccc

SEQ ID NO: 2814364 - RNA, 19 nt, Artificial Sequence
  Description of Artificial Sequence: Synthetic oligonucleotide
ucugaugucggacaagaca

SEQ ID NO: 2814365 - RNA, 19 nt, Artificial Sequence
  Description of Artificial Sequence: Synthetic oligonucleotide
cugguuacaacaauagggc

SEQ ID NO: 2814366 - RNA, 19 nt, Artificial Sequence
  Description of Artificial Sequence: Synthetic oligonucleotide
aauucucuggugcuugguc

SEQ ID NO: 2814367 - RNA, 19 nt, Artificial Sequence
  Description of Artificial Sequence: Synthetic oligonucleotide
cuucuaaacauuuucccac

SEQ ID NO: 2814368 - RNA, 19 nt, Artificial Sequence
  Description of Artificial Sequence: Synthetic oligonucleotide
uacgacacugguuacaaca

SEQ ID NO: 2814369 - RNA, 19 nt, Artificial Sequence
  Description of Artificial Sequence: Synthetic oligonucleotide
ugcuuggucagacaggagc

SEQ ID NO: 2814370 - RNA, 19 nt, Artificial Sequence
  Description of Artificial Sequence: Synthetic oligonucleotide
cugaugucggacaagacac

SEQ ID NO: 2814371 - RNA, 19 nt, Artificial Sequence
  Description of Artificial Sequence: Synthetic oligonucleotide
aacguuuucccacuacucu

SEQ ID NO: 2814372 - RNA, 19 nt, Artificial Sequence
  Description of Artificial Sequence: Synthetic oligonucleotide
aauguaacguuuucccacu

SEQ ID NO: 2814373 - RNA, 19 nt, Artificial Sequence
  Description of Artificial Sequence: Synthetic oligonucleotide
ucuggugccggauaagucc

SEQ ID NO: 2814374 - RNA, 19 nt, Artificial Sequence
  Description of Artificial Sequence: Synthetic oligonucleotide
aaccaggugaguguucugc

SEQ ID NO: 2814375 - RNA, 19 nt, Artificial Sequence
  Description of Artificial Sequence: Synthetic oligonucleotide
aagaguuuacgacacuggu

SEQ ID NO: 2814376 - RNA, 19 nt, Artificial Sequence
  Description of Artificial Sequence: Synthetic oligonucleotide
uuucccacuacucuuuaca

SEQ ID NO: 2814377 - RNA, 19 nt, Artificial Sequence
  Description of Artificial Sequence: Synthetic oligonucleotide
aguucguuacguuuccacg

SEQ ID NO: 2814378 - RNA, 19 nt, Artificial Sequence
  Description of Artificial Sequence: Synthetic oligonucleotide
ugguguacaaccaggugag

SEQ ID NO: 2814379 - RNA, 19 nt, Artificial Sequence
  Description of Artificial Sequence: Synthetic oligonucleotide
aagguguguucucugaugu

SEQ ID NO: 2814380 - RNA, 19 nt, Artificial Sequence
  Description of Artificial Sequence: Synthetic oligonucleotide
uccuucuaaacauuuuccc

SEQ ID NO: 2814381 - RNA, 19 nt, Artificial Sequence
  Description of Artificial Sequence: Synthetic oligonucleotide
guucguuacguuuccacgg

SEQ ID NO: 2814382 - RNA, 19 nt, Artificial Sequence
  Description of Artificial Sequence: Synthetic oligonucleotide
auuucagacacugguacgg

SEQ ID NO: 2814383 - RNA, 19 nt, Artificial Sequence
  Description of Artificial Sequence: Synthetic oligonucleotide
uguguauacguucacucaa

SEQ ID NO: 2814384 - RNA, 19 nt, Artificial Sequence
  Description of Artificial Sequence: Synthetic oligonucleotide
caauguaacguuuucccac

SEQ ID NO: 2814385 - RNA, 19 nt, Artificial Sequence
  Description of Artificial Sequence: Synthetic oligonucleotide
acaacaauagggcuucuca

SEQ ID NO: 2814386 - RNA, 19 nt, Artificial Sequence
  Description of Artificial Sequence: Synthetic oligonucleotide
gauaaguccagcgauguuc

SEQ ID NO: 2814387 - RNA, 19 nt, Artificial Sequence
  Description of Artificial Sequence: Synthetic oligonucleotide
uguguguauacguucacuc

SEQ ID NO: 2814388 - RNA, 19 nt, Artificial Sequence
  Description of Artificial Sequence: Synthetic oligonucleotide
uguacaaccaggugagugu

SEQ ID NO: 2814389 - RNA, 19 nt, Artificial Sequence
  Description of Artificial Sequence: Synthetic oligonucleotide
aaggacuuuccacauuuca

SEQ ID NO: 2814390 - RNA, 19 nt, Artificial Sequence
  Description of Artificial Sequence: Synthetic oligonucleotide
agaguaugacccaaguucg

SEQ ID NO: 2814391 - RNA, 19 nt, Artificial Sequence
  Description of Artificial Sequence: Synthetic oligonucleotide
uccugaagaguuuacgaca

SEQ ID NO: 2814392 - RNA, 19 nt, Artificial Sequence
  Description of Artificial Sequence: Synthetic oligonucleotide
uucguuacguuuccacggg

SEQ ID NO: 2814393 - RNA, 19 nt, Artificial Sequence
  Description of Artificial Sequence: Synthetic oligonucleotide
cuacucuuuacacucguag

SEQ ID NO: 2814394 - RNA, 19 nt, Artificial Sequence
  Description of Artificial Sequence: Synthetic oligonucleotide
ugucggacaagacaccagc

SEQ ID NO: 2814395 - RNA, 19 nt, Artificial Sequence
  Description of Artificial Sequence: Synthetic oligonucleotide
ugaagaguuuacgacacug

SEQ ID NO: 2814396 - RNA, 19 nt, Artificial Sequence
  Description of Artificial Sequence: Synthetic oligonucleotide
auaaguccagcgauguucc

SEQ ID NO: 2814397 - RNA, 19 nt, Artificial Sequence
  Description of Artificial Sequence: Synthetic oligonucleotide
aaggucuuucgccaguaug

SEQ ID NO: 2814398 - RNA, 19 nt, Artificial Sequence
  Description of Artificial Sequence: Synthetic oligonucleotide
gaguuuacgacacugguua

SEQ ID NO: 2814399 - RNA, 19 nt, Artificial Sequence
  Description of Artificial Sequence: Synthetic oligonucleotide
aaagccuuaccacacugau

SEQ ID NO: 2814400 - RNA, 19 nt, Artificial Sequence
  Description of Artificial Sequence: Synthetic oligonucleotide
ucacucaagaagaguauga

SEQ ID NO: 2814401 - RNA, 19 nt, Artificial Sequence
  Description of Artificial Sequence: Synthetic oligonucleotide
aaacauuuucccacacugg

SEQ ID NO: 2814402 - RNA, 19 nt, Artificial Sequence
  Description of Artificial Sequence: Synthetic oligonucleotide
gaagaguuuacgacacugg

SEQ ID NO: 2814403 - RNA, 19 nt, Artificial Sequence
  Description of Artificial Sequence: Synthetic oligonucleotide
acaucauguacucaacaga

SEQ ID NO: 2814404 - RNA, 19 nt, Artificial Sequence
  Description of Artificial Sequence: Synthetic oligonucleotide
uguuccugaagaguuuacg

SEQ ID NO: 2814405 - RNA, 19 nt, Artificial Sequence
  Description of Artificial Sequence: Synthetic oligonucleotide
uaugcacucucaauguaac

SEQ ID NO: 2814406 - RNA, 19 nt, Artificial Sequence
  Description of Artificial Sequence: Synthetic oligonucleotide
ucaauguaacguuuuccca

SEQ ID NO: 2814407 - RNA, 19 nt, Artificial Sequence
  Description of Artificial Sequence: Synthetic oligonucleotide
cauguacucaacagacugg

SEQ ID NO: 2814408 - RNA, 19 nt, Artificial Sequence
  Description of Artificial Sequence: Synthetic oligonucleotide
cuccuucuaaacauuuucc

SEQ ID NO: 2814409 - RNA, 19 nt, Artificial Sequence
  Description of Artificial Sequence: Synthetic oligonucleotide
uacggagucuccuuggugu

SEQ ID NO: 2814410 - RNA, 19 nt, Artificial Sequence
  Description of Artificial Sequence: Synthetic oligonucleotide
uguauacguucacucaaga

SEQ ID NO: 2814411 - RNA, 19 nt, Artificial Sequence
  Description of Artificial Sequence: Synthetic oligonucleotide
uguucucugaugucggaca

SEQ ID NO: 2814412 - RNA, 19 nt, Artificial Sequence
  Description of Artificial Sequence: Synthetic oligonucleotide
uguguguguguguauacgu

SEQ ID NO: 2814413 - RNA, 19 nt, Artificial Sequence
  Description of Artificial Sequence: Synthetic oligonucleotide
aucccugaaagccuuacca

SEQ ID NO: 2814414 - RNA, 19 nt, Artificial Sequence
  Description of Artificial Sequence: Synthetic oligonucleotide
uacucaacagacuggugug

SEQ ID NO: 2814415 - RNA, 19 nt, Artificial Sequence
  Description of Artificial Sequence: Synthetic oligonucleotide
cucccuguuaugaagucgc

SEQ ID NO: 2814416 - RNA, 19 nt, Artificial Sequence
  Description of Artificial Sequence: Synthetic oligonucleotide
acaauagggcuucucacca

SEQ ID NO: 2814417 - RNA, 19 nt, Artificial Sequence
  Description of Artificial Sequence: Synthetic oligonucleotide
ccuguuaugaagucgcugg

SEQ ID NO: 2814418 - RNA, 19 nt, Artificial Sequence
  Description of Artificial Sequence: Synthetic oligonucleotide
uuccugaagaguuuacgac

SEQ ID NO: 2814419 - RNA, 19 nt, Artificial Sequence
  Description of Artificial Sequence: Synthetic oligonucleotide
aggagcuaucccugaaagc

SEQ ID NO: 2814420 - RNA, 19 nt, Artificial Sequence
  Description of Artificial Sequence: Synthetic oligonucleotide
ugcacucucaauguaacgu

SEQ ID NO: 2814421 - RNA, 19 nt, Artificial Sequence
  Description of Artificial Sequence: Synthetic oligonucleotide
ucucaauguaacguuuucc

SEQ ID NO: 2814422 - RNA, 19 nt, Artificial Sequence
  Description of Artificial Sequence: Synthetic oligonucleotide
ggagcuaucccugaaagcc

SEQ ID NO: 2814423 - RNA, 19 nt, Artificial Sequence
  Description of Artificial Sequence: Synthetic oligonucleotide
cauuucagacacugguacg

SEQ ID NO: 2814424 - RNA, 19 nt, Artificial Sequence
  Description of Artificial Sequence: Synthetic oligonucleotide
uucuaaacauuuucccaca

SEQ ID NO: 2814425 - RNA, 19 nt, Artificial Sequence
  Description of Artificial Sequence: Synthetic oligonucleotide
ucagacacugguacggagu

SEQ ID NO: 2814426 - RNA, 19 nt, Artificial Sequence
  Description of Artificial Sequence: Synthetic oligonucleotide
aauccucugaugccugaug

SEQ ID NO: 2814427 - RNA, 19 nt, Artificial Sequence
  Description of Artificial Sequence: Synthetic oligonucleotide
uaugacccaaguucguuac

SEQ ID NO: 2814428 - RNA, 19 nt, Artificial Sequence
  Description of Artificial Sequence: Synthetic oligonucleotide
ugugaauccucugaugccu

SEQ ID NO: 2814429 - RNA, 19 nt, Artificial Sequence
  Description of Artificial Sequence: Synthetic oligonucleotide
accaggugaguguucugcc

SEQ ID NO: 2814430 - RNA, 19 nt, Artificial Sequence
  Description of Artificial Sequence: Synthetic oligonucleotide
uuggugugaauucucuggu

SEQ ID NO: 2814431 - RNA, 19 nt, Artificial Sequence
  Description of Artificial Sequence: Synthetic oligonucleotide
ucaagaagaguaugaccca

SEQ ID NO: 2814432 - RNA, 19 nt, Artificial Sequence
  Description of Artificial Sequence: Synthetic oligonucleotide
ucuaaacauuuucccacac

SEQ ID NO: 2814433 - RNA, 19 nt, Artificial Sequence
  Description of Artificial Sequence: Synthetic oligonucleotide
gacuuuccacauuucagac

SEQ ID NO: 2814434 - RNA, 19 nt, Artificial Sequence
  Description of Artificial Sequence: Synthetic oligonucleotide
acacucguaaggucuuucg

SEQ ID NO: 2814435 - RNA, 19 nt, Artificial Sequence
  Description of Artificial Sequence: Synthetic oligonucleotide
ugccugaugagguaugcac

SEQ ID NO: 2814436 - RNA, 19 nt, Artificial Sequence
  Description of Artificial Sequence: Synthetic oligonucleotide
uuccacauuucagacacug

SEQ ID NO: 2814437 - RNA, 19 nt, Artificial Sequence
  Description of Artificial Sequence: Synthetic oligonucleotide
auacguucacucaagaaga

SEQ ID NO: 2814438 - RNA, 19 nt, Artificial Sequence
  Description of Artificial Sequence: Synthetic oligonucleotide
aguguucugccugaaggac

SEQ ID NO: 2814439 - RNA, 19 nt, Artificial Sequence
  Description of Artificial Sequence: Synthetic oligonucleotide
uucacucaagaagaguaug

SEQ ID NO: 2814440 - RNA, 19 nt, Artificial Sequence
  Description of Artificial Sequence: Synthetic oligonucleotide
uguaacguuuucccacuac

SEQ ID NO: 2814441 - RNA, 19 nt, Artificial Sequence
  Description of Artificial Sequence: Synthetic oligonucleotide
uaacguuuucccacuacuc

SEQ ID NO: 2814442 - RNA, 19 nt, Artificial Sequence
  Description of Artificial Sequence: Synthetic oligonucleotide
auucucuggugcuugguca

SEQ ID NO: 2814443 - RNA, 19 nt, Artificial Sequence
  Description of Artificial Sequence: Synthetic oligonucleotide
uuuacgacacugguuacaa

SEQ ID NO: 2814444 - RNA, 19 nt, Artificial Sequence
  Description of Artificial Sequence: Synthetic oligonucleotide
uacguucacucaagaagag

SEQ ID NO: 2814445 - RNA, 19 nt, Artificial Sequence
  Description of Artificial Sequence: Synthetic oligonucleotide
caacaauagggcuucucac

SEQ ID NO: 2814446 - RNA, 19 nt, Artificial Sequence
  Description of Artificial Sequence: Synthetic oligonucleotide
cugguguacaaccagguga

SEQ ID NO: 2814447 - RNA, 19 nt, Artificial Sequence
  Description of Artificial Sequence: Synthetic oligonucleotide
uaugaagucgcugguguac

SEQ ID NO: 2814448 - RNA, 19 nt, Artificial Sequence
  Description of Artificial Sequence: Synthetic oligonucleotide
aguuuacgacacugguuac

SEQ ID NO: 2814449 - RNA, 19 nt, Artificial Sequence
  Description of Artificial Sequence: Synthetic oligonucleotide
guuacaacaauagggcuuc

SEQ ID NO: 2814450 - RNA, 19 nt, Artificial Sequence
  Description of Artificial Sequence: Synthetic oligonucleotide
auuuucccacacuggggac

SEQ ID NO: 2814451 - RNA, 19 nt, Artificial Sequence
  Description of Artificial Sequence: Synthetic oligonucleotide
guuccugaagaguuuacga

SEQ ID NO: 2814452 - RNA, 19 nt, Artificial Sequence
  Description of Artificial Sequence: Synthetic oligonucleotide
cacugguuacaacaauagg

SEQ ID NO: 2814453 - RNA, 19 nt, Artificial Sequence
  Description of Artificial Sequence: Synthetic oligonucleotide
uucaagguguguucucuga

SEQ ID NO: 2814454 - RNA, 19 nt, Artificial Sequence
  Description of Artificial Sequence: Synthetic oligonucleotide
ugguuacaacaauagggcu

SEQ ID NO: 2814455 - RNA, 19 nt, Artificial Sequence
  Description of Artificial Sequence: Synthetic oligonucleotide
uguuaugaagucgcuggug

SEQ ID NO: 2814456 - RNA, 19 nt, Artificial Sequence
  Description of Artificial Sequence: Synthetic oligonucleotide
agguaugcacucucaaugu

SEQ ID NO: 2814457 - RNA, 19 nt, Artificial Sequence
  Description of Artificial Sequence: Synthetic oligonucleotide
aagaagaguaugacccaag

SEQ ID NO: 2814458 - RNA, 19 nt, Artificial Sequence
  Description of Artificial Sequence: Synthetic oligonucleotide
guaugaguccucuggugcc

SEQ ID NO: 2814459 - RNA, 19 nt, Artificial Sequence
  Description of Artificial Sequence: Synthetic oligonucleotide
acacugguuacaacaauag

SEQ ID NO: 2814460 - RNA, 19 nt, Artificial Sequence
  Description of Artificial Sequence: Synthetic oligonucleotide
cauuuucccacacugggga

SEQ ID NO: 2814461 - RNA, 19 nt, Artificial Sequence
  Description of Artificial Sequence: Synthetic oligonucleotide
uggugcuuggucagacagg

SEQ ID NO: 2814462 - RNA, 19 nt, Artificial Sequence
  Description of Artificial Sequence: Synthetic oligonucleotide
aguccagcgauguuccuga

SEQ ID NO: 2814463 - RNA, 19 nt, Artificial Sequence
  Description of Artificial Sequence: Synthetic oligonucleotide
aggacuuuccacauuucag

SEQ ID NO: 2814464 - RNA, 19 nt, Artificial Sequence
  Description of Artificial Sequence: Synthetic oligonucleotide
uaucccugaaagccuuacc

SEQ ID NO: 2814465 - RNA, 19 nt, Artificial Sequence
  Description of Artificial Sequence: Synthetic oligonucleotide
caggagcuaucccugaaag

SEQ ID NO: 2814466 - RNA, 19 nt, Artificial Sequence
  Description of Artificial Sequence: Synthetic oligonucleotide
ugaugagguaugcacucuc

SEQ ID NO: 2814467 - RNA, 19 nt, Artificial Sequence
  Description of Artificial Sequence: Synthetic oligonucleotide
ugagguaugcacucucaau

SEQ ID NO: 2814468 - RNA, 19 nt, Artificial Sequence
  Description of Artificial Sequence: Synthetic oligonucleotide
augcacucucaauguaacg

SEQ ID NO: 2814469 - RNA, 19 nt, Artificial Sequence
  Description of Artificial Sequence: Synthetic oligonucleotide
auccucugaugccugauga

SEQ ID NO: 2814470 - RNA, 19 nt, Artificial Sequence
  Description of Artificial Sequence: Synthetic oligonucleotide
ucuucaagguguguucucu

SEQ ID NO: 2814471 - RNA, 19 nt, Artificial Sequence
  Description of Artificial Sequence: Synthetic oligonucleotide
uucccacuacucuuuacac

SEQ ID NO: 2814472 - RNA, 19 nt, Artificial Sequence
  Description of Artificial Sequence: Synthetic oligonucleotide
ugguacggagucuccuugg

SEQ ID NO: 2814473 - RNA, 19 nt, Artificial Sequence
  Description of Artificial Sequence: Synthetic oligonucleotide
uguucugccugaaggacuu

SEQ ID NO: 2814474 - RNA, 19 nt, Artificial Sequence
  Description of Artificial Sequence: Synthetic oligonucleotide
uguguguguguguguauac

SEQ ID NO: 2814475 - RNA, 19 nt, Artificial Sequence
  Description of Artificial Sequence: Synthetic oligonucleotide
aacagacuggugugugugu

SEQ ID NO: 2814476 - RNA, 19 nt, Artificial Sequence
  Description of Artificial Sequence: Synthetic oligonucleotide
ucggacaagacaccagcuc

SEQ ID NO: 2814477 - RNA, 19 nt, Artificial Sequence
  Description of Artificial Sequence: Synthetic oligonucleotide
ugaugucggacaagacacc

SEQ ID NO: 2814478 - RNA, 19 nt, Artificial Sequence
  Description of Artificial Sequence: Synthetic oligonucleotide
guuacguuuccacgggcug

SEQ ID NO: 2814479 - RNA, 19 nt, Artificial Sequence
  Description of Artificial Sequence: Synthetic oligonucleotide
aaguccagcgauguuccug

SEQ ID NO: 2814480 - RNA, 19 nt, Artificial Sequence
  Description of Artificial Sequence: Synthetic oligonucleotide
uguacucaacagacuggug

SEQ ID NO: 2814481 - RNA, 19 nt, Artificial Sequence
  Description of Artificial Sequence: Synthetic oligonucleotide
guacucaacagacuggugu

SEQ ID NO: 2814482 - RNA, 19 nt, Artificial Sequence
  Description of Artificial Sequence: Synthetic oligonucleotide
caagguguguucucugaug

SEQ ID NO: 2814483 - RNA, 19 nt, Artificial Sequence
  Description of Artificial Sequence: Synthetic oligonucleotide
acauuuucccacacugggg

SEQ ID NO: 2814484 - RNA, 19 nt, Artificial Sequence
  Description of Artificial Sequence: Synthetic oligonucleotide
ucccugaaagccuuaccac

SEQ ID NO: 2814485 - RNA, 19 nt, Artificial Sequence
  Description of Artificial Sequence: Synthetic oligonucleotide
ugccggauaaguccagcga

SEQ ID NO: 2814486 - RNA, 19 nt, Artificial Sequence
  Description of Artificial Sequence: Synthetic oligonucleotide
ucaagguguguucucugau

SEQ ID NO: 2814487 - RNA, 19 nt, Artificial Sequence
  Description of Artificial Sequence: Synthetic oligonucleotide
gaguguucugccugaagga

SEQ ID NO: 2814488 - RNA, 19 nt, Artificial Sequence
  Description of Artificial Sequence: Synthetic oligonucleotide
guuaugaagucgcuggugu

SEQ ID NO: 2814489 - RNA, 19 nt, Artificial Sequence
  Description of Artificial Sequence: Synthetic oligonucleotide
auguacucaacagacuggu

SEQ ID NO: 2814490 - RNA, 19 nt, Artificial Sequence
  Description of Artificial Sequence: Synthetic oligonucleotide
gacccucccuguuaugaag

SEQ ID NO: 2814491 - RNA, 19 nt, Artificial Sequence
  Description of Artificial Sequence: Synthetic oligonucleotide
uccagcgauguuccugaag

SEQ ID NO: 2814492 - RNA, 19 nt, Artificial Sequence
  Description of Artificial Sequence: Synthetic oligonucleotide
cagacaggagcuaucccug

SEQ ID NO: 2814493 - RNA, 19 nt, Artificial Sequence
  Description of Artificial Sequence: Synthetic oligonucleotide
ugacccaaguucguuacgu

SEQ ID NO: 2814494 - RNA, 19 nt, Artificial Sequence
  Description of Artificial Sequence: Synthetic oligonucleotide
acaagacaccagcuccuuc

SEQ ID NO: 2814495 - RNA, 19 nt, Artificial Sequence
  Description of Artificial Sequence: Synthetic oligonucleotide
cacucguaaggucuuucgc

SEQ ID NO: 2814496 - RNA, 19 nt, Artificial Sequence
  Description of Artificial Sequence: Synthetic oligonucleotide
guguacaaccaggugagug

SEQ ID NO: 2814497 - RNA, 19 nt, Artificial Sequence
  Description of Artificial Sequence: Synthetic oligonucleotide
uuacguuuccacgggcugc

SEQ ID NO: 2814498 - RNA, 19 nt, Artificial Sequence
  Description of Artificial Sequence: Synthetic oligonucleotide
ugcucuucaagguguguuc

SEQ ID NO: 2814499 - RNA, 19 nt, Artificial Sequence
  Description of Artificial Sequence: Synthetic oligonucleotide
ucaacagacuggugugugu

SEQ ID NO: 2814500 - RNA, 19 nt, Artificial Sequence
  Description of Artificial Sequence: Synthetic oligonucleotide
acuggugugugugugugug

SEQ ID NO: 2814501 - RNA, 19 nt, Artificial Sequence
  Description of Artificial Sequence: Synthetic oligonucleotide
ggacuuuccacauuucaga

SEQ ID NO: 2814502 - RNA, 19 nt, Artificial Sequence
  Description of Artificial Sequence: Synthetic oligonucleotide
cacgggcugcucuucaagg

SEQ ID NO: 2814503 - RNA, 19 nt, Artificial Sequence
  Description of Artificial Sequence: Synthetic oligonucleotide
ucccacuacucuuuacacu

SEQ ID NO: 2814504 - RNA, 19 nt, Artificial Sequence
  Description of Artificial Sequence: Synthetic oligonucleotide
cuuucgccaguaugagucc

SEQ ID NO: 2814505 - RNA, 19 nt, Artificial Sequence
  Description of Artificial Sequence: Synthetic oligonucleotide
cacucaagaagaguaugac

SEQ ID NO: 2814506 - RNA, 19 nt, Artificial Sequence
  Description of Artificial Sequence: Synthetic oligonucleotide
cucguaaggucuuucgcca

SEQ ID NO: 2814507 - RNA, 19 nt, Artificial Sequence
  Description of Artificial Sequence: Synthetic oligonucleotide
gugccggauaaguccagcg

SEQ ID NO: 2814508 - RNA, 19 nt, Artificial Sequence
  Description of Artificial Sequence: Synthetic oligonucleotide
ucguaaggucuuucgccag

SEQ ID NO: 2814509 - RNA, 19 nt, Artificial Sequence
  Description of Artificial Sequence: Synthetic oligonucleotide
gaugucggacaagacacca

SEQ ID NO: 2814510 - RNA, 19 nt, Artificial Sequence
  Description of Artificial Sequence: Synthetic oligonucleotide
uggugugugugugugugug

SEQ ID NO: 2814511 - RNA, 19 nt, Artificial Sequence
  Description of Artificial Sequence: Synthetic oligonucleotide
guguguauacguucacuca

SEQ ID NO: 2814512 - RNA, 19 nt, Artificial Sequence
  Description of Artificial Sequence: Synthetic oligonucleotide
guguguguguguguauacg

SEQ ID NO: 2814513 - RNA, 19 nt, Artificial Sequence
  Description of Artificial Sequence: Synthetic oligonucleotide
gacaccagcuccuucuaaa

SEQ ID NO: 2814514 - RNA, 19 nt, Artificial Sequence
  Description of Artificial Sequence: Synthetic oligonucleotide
gacacugguacggagucuc

SEQ ID NO: 2814515 - RNA, 19 nt, Artificial Sequence
  Description of Artificial Sequence: Synthetic oligonucleotide
gucgcugguguacaaccag

SEQ ID NO: 2814516 - RNA, 19 nt, Artificial Sequence
  Description of Artificial Sequence: Synthetic oligonucleotide
cccacuacucuuuacacuc

SEQ ID NO: 2814517 - RNA, 19 nt, Artificial Sequence
  Description of Artificial Sequence: Synthetic oligonucleotide
augacccaaguucguuacg

SEQ ID NO: 2814518 - RNA, 19 nt, Artificial Sequence
  Description of Artificial Sequence: Synthetic oligonucleotide
gaugccugaugagguaugc

SEQ ID NO: 2814519 - RNA, 19 nt, Artificial Sequence
  Description of Artificial Sequence: Synthetic oligonucleotide
guauacguucacucaagaa

SEQ ID NO: 2814520 - RNA, 19 nt, Artificial Sequence
  Description of Artificial Sequence: Synthetic oligonucleotide
guguauacguucacucaag

SEQ ID NO: 2814521 - RNA, 19 nt, Artificial Sequence
  Description of Artificial Sequence: Synthetic oligonucleotide
cuucaagguguguucucug

SEQ ID NO: 2814522 - RNA, 19 nt, Artificial Sequence
  Description of Artificial Sequence: Synthetic oligonucleotide
ccugaagaguuuacgacac

SEQ ID NO: 2814523 - RNA, 19 nt, Artificial Sequence
  Description of Artificial Sequence: Synthetic oligonucleotide
agguguguucucugauguc

SEQ ID NO: 2814524 - RNA, 19 nt, Artificial Sequence
  Description of Artificial Sequence: Synthetic oligonucleotide
uuaugaagucgcuggugua

SEQ ID NO: 2814525 - RNA, 19 nt, Artificial Sequence
  Description of Artificial Sequence: Synthetic oligonucleotide
cucucaauguaacguuuuc

SEQ ID NO: 2814526 - RNA, 19 nt, Artificial Sequence
  Description of Artificial Sequence: Synthetic oligonucleotide
guaacguuuucccacuacu

SEQ ID NO: 2814527 - RNA, 19 nt, Artificial Sequence
  Description of Artificial Sequence: Synthetic oligonucleotide
ucguuacguuuccacgggc

SEQ ID NO: 2814528 - RNA, 19 nt, Artificial Sequence
  Description of Artificial Sequence: Synthetic oligonucleotide
gacacugguuacaacaaua

SEQ ID NO: 2814529 - RNA, 19 nt, Artificial Sequence
  Description of Artificial Sequence: Synthetic oligonucleotide
agcgauguuccugaagagu

SEQ ID NO: 2814530 - RNA, 19 nt, Artificial Sequence
  Description of Artificial Sequence: Synthetic oligonucleotide
acguuuucccacuacucuu

SEQ ID NO: 2814531 - RNA, 19 nt, Artificial Sequence
  Description of Artificial Sequence: Synthetic oligonucleotide
caacagacuggugugugug

SEQ ID NO: 2814532 - RNA, 19 nt, Artificial Sequence
  Description of Artificial Sequence: Synthetic oligonucleotide
gcuccuucuaaacauuuuc

SEQ ID NO: 2814533 - RNA, 19 nt, Artificial Sequence
  Description of Artificial Sequence: Synthetic oligonucleotide
uuucagacacugguacgga

SEQ ID NO: 2814534 - RNA, 19 nt, Artificial Sequence
  Description of Artificial Sequence: Synthetic oligonucleotide
cuggcugggacccucccug

SEQ ID NO: 2814535 - RNA, 19 nt, Artificial Sequence
  Description of Artificial Sequence: Synthetic oligonucleotide
cagacacugguacggaguc

SEQ ID NO: 2814536 - RNA, 19 nt, Artificial Sequence
  Description of Artificial Sequence: Synthetic oligonucleotide
caauagggcuucucaccag

SEQ ID NO: 2814537 - RNA, 19 nt, Artificial Sequence
  Description of Artificial Sequence: Synthetic oligonucleotide
augagguaugcacucucaa

SEQ ID NO: 2814538 - RNA, 19 nt, Artificial Sequence
  Description of Artificial Sequence: Synthetic oligonucleotide
ugugugugugugugugugu

SEQ ID NO: 2814539 - RNA, 19 nt, Artificial Sequence
  Description of Artificial Sequence: Synthetic oligonucleotide
gaugagguaugcacucuca

SEQ ID NO: 2814540 - RNA, 19 nt, Artificial Sequence
  Description of Artificial Sequence: Synthetic oligonucleotide
acaggagcuaucccugaaa

SEQ ID NO: 2814541 - RNA, 19 nt, Artificial Sequence
  Description of Artificial Sequence: Synthetic oligonucleotide
ucccacacuggggacacug

SEQ ID NO: 2814542 - RNA, 19 nt, Artificial Sequence
  Description of Artificial Sequence: Synthetic oligonucleotide
acccaaguucguuacguuu

SEQ ID NO: 2814543 - RNA, 19 nt, Artificial Sequence
  Description of Artificial Sequence: Synthetic oligonucleotide
gugugugugugugugugug

SEQ ID NO: 2814544 - RNA, 19 nt, Artificial Sequence
  Description of Artificial Sequence: Synthetic oligonucleotide
gauguuccugaagaguuua

SEQ ID NO: 2814545 - RNA, 19 nt, Artificial Sequence
  Description of Artificial Sequence: Synthetic oligonucleotide
uucucugaugucggacaag

SEQ ID NO: 2814546 - RNA, 19 nt, Artificial Sequence
  Description of Artificial Sequence: Synthetic oligonucleotide
cugguacggagucuccuug

SEQ ID NO: 2814547 - RNA, 19 nt, Artificial Sequence
  Description of Artificial Sequence: Synthetic oligonucleotide
cucaacagacuggugugug

SEQ ID NO: 2814548 - RNA, 19 nt, Artificial Sequence
  Description of Artificial Sequence: Synthetic oligonucleotide
guaugcacucucaauguaa

SEQ ID NO: 2814549 - RNA, 19 nt, Artificial Sequence
  Description of Artificial Sequence: Synthetic oligonucleotide
gaagucgcugguguacaac

SEQ ID NO: 2814550 - RNA, 19 nt, Artificial Sequence
  Description of Artificial Sequence: Synthetic oligonucleotide
gugaguguucugccugaag

SEQ ID NO: 2814551 - RNA, 19 nt, Artificial Sequence
  Description of Artificial Sequence: Synthetic oligonucleotide
agacuggugugugugugug

SEQ ID NO: 2814552 - RNA, 19 nt, Artificial Sequence
  Description of Artificial Sequence: Synthetic oligonucleotide
uacaacaauagggcuucuc

SEQ ID NO: 2814553 - RNA, 19 nt, Artificial Sequence
  Description of Artificial Sequence: Synthetic oligonucleotide
guaugacccaaguucguua

SEQ ID NO: 2814554 - RNA, 19 nt, Artificial Sequence
  Description of Artificial Sequence: Synthetic oligonucleotide
guacggagucuccuuggug

SEQ ID NO: 2814555 - RNA, 19 nt, Artificial Sequence
  Description of Artificial Sequence: Synthetic oligonucleotide
gucagacaggagcuauccc

SEQ ID NO: 2814556 - RNA, 19 nt, Artificial Sequence
  Description of Artificial Sequence: Synthetic oligonucleotide
ccuucuaaacauuuuccca

SEQ ID NO: 2814557 - RNA, 19 nt, Artificial Sequence
  Description of Artificial Sequence: Synthetic oligonucleotide
guuuacgacacugguuaca

SEQ ID NO: 2814558 - RNA, 19 nt, Artificial Sequence
  Description of Artificial Sequence: Synthetic oligonucleotide
ggucagacaggagcuaucc

SEQ ID NO: 2814559 - RNA, 19 nt, Artificial Sequence
  Description of Artificial Sequence: Synthetic oligonucleotide
aguaugacccaaguucguu

SEQ ID NO: 2814560 - RNA, 19 nt, Artificial Sequence
  Description of Artificial Sequence: Synthetic oligonucleotide
auguuccugaagaguuuac

SEQ ID NO: 2814561 - RNA, 19 nt, Artificial Sequence
  Description of Artificial Sequence: Synthetic oligonucleotide
acugguacggagucuccuu

SEQ ID NO: 2814562 - RNA, 19 nt, Artificial Sequence
  Description of Artificial Sequence: Synthetic oligonucleotide
uacguuuccacgggcugcu

SEQ ID NO: 2814563 - RNA, 19 nt, Artificial Sequence
  Description of Artificial Sequence: Synthetic oligonucleotide
uaaggucuuucgccaguau

SEQ ID NO: 2814564 - RNA, 19 nt, Artificial Sequence
  Description of Artificial Sequence: Synthetic oligonucleotide
aucauguacucaacagacu

SEQ ID NO: 2814565 - RNA, 19 nt, Artificial Sequence
  Description of Artificial Sequence: Synthetic oligonucleotide
acgggcugcucuucaaggu

SEQ ID NO: 2814566 - RNA, 19 nt, Artificial Sequence
  Description of Artificial Sequence: Synthetic oligonucleotide
uuggucagacaggagcuau

SEQ ID NO: 2814567 - RNA, 19 nt, Artificial Sequence
  Description of Artificial Sequence: Synthetic oligonucleotide
uguguguguguguguguau

SEQ ID NO: 2814568 - RNA, 19 nt, Artificial Sequence
  Description of Artificial Sequence: Synthetic oligonucleotide
acggagucuccuuggugug

SEQ ID NO: 2814569 - RNA, 19 nt, Artificial Sequence
  Description of Artificial Sequence: Synthetic oligonucleotide
ccagcgauguuccugaaga

SEQ ID NO: 2814570 - RNA, 19 nt, Artificial Sequence
  Description of Artificial Sequence: Synthetic oligonucleotide
uuacgacacugguuacaac

SEQ ID NO: 2814571 - RNA, 19 nt, Artificial Sequence
  Description of Artificial Sequence: Synthetic oligonucleotide
uggucagacaggagcuauc

SEQ ID NO: 2814572 - RNA, 19 nt, Artificial Sequence
  Description of Artificial Sequence: Synthetic oligonucleotide
cagcgauguuccugaagag

SEQ ID NO: 2814573 - RNA, 19 nt, Artificial Sequence
  Description of Artificial Sequence: Synthetic oligonucleotide
agaguuuacgacacugguu

SEQ ID NO: 2814574 - RNA, 19 nt, Artificial Sequence
  Description of Artificial Sequence: Synthetic oligonucleotide
uuucgccaguaugaguccu

SEQ ID NO: 2814575 - RNA, 19 nt, Artificial Sequence
  Description of Artificial Sequence: Synthetic oligonucleotide
augaagucgcugguguaca

SEQ ID NO: 2814576 - RNA, 19 nt, Artificial Sequence
  Description of Artificial Sequence: Synthetic oligonucleotide
cucuggugccggauaaguc

SEQ ID NO: 2814577 - RNA, 19 nt, Artificial Sequence
  Description of Artificial Sequence: Synthetic oligonucleotide
aggugaguguucugccuga

SEQ ID NO: 2814578 - RNA, 19 nt, Artificial Sequence
  Description of Artificial Sequence: Synthetic oligonucleotide
cccaaguucguuacguuuc

SEQ ID NO: 2814579 - RNA, 19 nt, Artificial Sequence
  Description of Artificial Sequence: Synthetic oligonucleotide
ugaagucgcugguguacaa

SEQ ID NO: 2814580 - RNA, 19 nt, Artificial Sequence
  Description of Artificial Sequence: Synthetic oligonucleotide
cacuggggacacuggcugg

SEQ ID NO: 2814581 - RNA, 19 nt, Artificial Sequence
  Description of Artificial Sequence: Synthetic oligonucleotide
cuaucccugaaagccuuac

SEQ ID NO: 2814582 - RNA, 19 nt, Artificial Sequence
  Description of Artificial Sequence: Synthetic oligonucleotide
ggugcuuggucagacagga

SEQ ID NO: 2814583 - RNA, 19 nt, Artificial Sequence
  Description of Artificial Sequence: Synthetic oligonucleotide
ccugaugagguaugcacuc

SEQ ID NO: 2814584 - RNA, 19 nt, Artificial Sequence
  Description of Artificial Sequence: Synthetic oligonucleotide
uucugccugaaggacuuuc

SEQ ID NO: 2814585 - RNA, 19 nt, Artificial Sequence
  Description of Artificial Sequence: Synthetic oligonucleotide
agacaggagcuaucccuga

SEQ ID NO: 2814586 - RNA, 19 nt, Artificial Sequence
  Description of Artificial Sequence: Synthetic oligonucleotide
cucugaugucggacaagac

SEQ ID NO: 2814587 - RNA, 19 nt, Artificial Sequence
  Description of Artificial Sequence: Synthetic oligonucleotide
cuaaacauuuucccacacu

SEQ ID NO: 2814588 - RNA, 19 nt, Artificial Sequence
  Description of Artificial Sequence: Synthetic oligonucleotide
ucccuguuaugaagucgcu

SEQ ID NO: 2814589 - RNA, 19 nt, Artificial Sequence
  Description of Artificial Sequence: Synthetic oligonucleotide
cuggugccggauaagucca

SEQ ID NO: 2814590 - RNA, 19 nt, Artificial Sequence
  Description of Artificial Sequence: Synthetic oligonucleotide
acguucacucaagaagagu

SEQ ID NO: 2814591 - RNA, 19 nt, Artificial Sequence
  Description of Artificial Sequence: Synthetic oligonucleotide
acucaacagacuggugugu

SEQ ID NO: 2814592 - RNA, 19 nt, Artificial Sequence
  Description of Artificial Sequence: Synthetic oligonucleotide
uggggacacuggcugggac

SEQ ID NO: 2814593 - RNA, 19 nt, Artificial Sequence
  Description of Artificial Sequence: Synthetic oligonucleotide
guguucucugaugucggac

SEQ ID NO: 2814594 - RNA, 19 nt, Artificial Sequence
  Description of Artificial Sequence: Synthetic oligonucleotide
guucucugaugucggacaa

SEQ ID NO: 2814595 - RNA, 19 nt, Artificial Sequence
  Description of Artificial Sequence: Synthetic oligonucleotide
ccgaacaucauguacucaa

SEQ ID NO: 2814596 - RNA, 19 nt, Artificial Sequence
  Description of Artificial Sequence: Synthetic oligonucleotide
acacugguacggagucucc

SEQ ID NO: 2814597 - RNA, 19 nt, Artificial Sequence
  Description of Artificial Sequence: Synthetic oligonucleotide
ccaaguucguuacguuucc

SEQ ID NO: 2814598 - RNA, 19 nt, Artificial Sequence
  Description of Artificial Sequence: Synthetic oligonucleotide
uggugccggauaaguccag

SEQ ID NO: 2814599 - RNA, 19 nt, Artificial Sequence
  Description of Artificial Sequence: Synthetic oligonucleotide
acuggcugggacccucccu

SEQ ID NO: 2814600 - RNA, 19 nt, Artificial Sequence
  Description of Artificial Sequence: Synthetic oligonucleotide
ggucuuucgccaguaugag

SEQ ID NO: 2814601 - RNA, 19 nt, Artificial Sequence
  Description of Artificial Sequence: Synthetic oligonucleotide
gacaggagcuaucccugaa

SEQ ID NO: 2814602 - RNA, 19 nt, Artificial Sequence
  Description of Artificial Sequence: Synthetic oligonucleotide
augucggacaagacaccag

SEQ ID NO: 2814603 - RNA, 19 nt, Artificial Sequence
  Description of Artificial Sequence: Synthetic oligonucleotide
agucuccuuggugugaauu

SEQ ID NO: 2814604 - RNA, 19 nt, Artificial Sequence
  Description of Artificial Sequence: Synthetic oligonucleotide
caagaagaguaugacccaa

SEQ ID NO: 2814605 - RNA, 19 nt, Artificial Sequence
  Description of Artificial Sequence: Synthetic oligonucleotide
uaaguccagcgauguuccu

SEQ ID NO: 2814606 - RNA, 19 nt, Artificial Sequence
  Description of Artificial Sequence: Synthetic oligonucleotide
acgacacugguuacaacaa

SEQ ID NO: 2814607 - RNA, 19 nt, Artificial Sequence
  Description of Artificial Sequence: Synthetic oligonucleotide
uccucuggugccggauaag

SEQ ID NO: 2814608 - RNA, 19 nt, Artificial Sequence
  Description of Artificial Sequence: Synthetic oligonucleotide
acucucaauguaacguuuu

SEQ ID NO: 2814609 - RNA, 19 nt, Artificial Sequence
  Description of Artificial Sequence: Synthetic oligonucleotide
aagccuuaccacacugauu

SEQ ID NO: 2814610 - RNA, 19 nt, Artificial Sequence
  Description of Artificial Sequence: Synthetic oligonucleotide
agacaccagcuccuucuaa

SEQ ID NO: 2814611 - RNA, 19 nt, Artificial Sequence
  Description of Artificial Sequence: Synthetic oligonucleotide
ccacuacucuuuacacucg

SEQ ID NO: 2814612 - RNA, 19 nt, Artificial Sequence
  Description of Artificial Sequence: Synthetic oligonucleotide
gggacacuggcugggaccc

SEQ ID NO: 2814613 - RNA, 19 nt, Artificial Sequence
  Description of Artificial Sequence: Synthetic oligonucleotide
cguucacucaagaagagua

SEQ ID NO: 2814614 - RNA, 19 nt, Artificial Sequence
  Description of Artificial Sequence: Synthetic oligonucleotide
acacuggcugggacccucc

SEQ ID NO: 2814615 - RNA, 19 nt, Artificial Sequence
  Description of Artificial Sequence: Synthetic oligonucleotide
acccucccuguuaugaagu

SEQ ID NO: 2814616 - RNA, 19 nt, Artificial Sequence
  Description of Artificial Sequence: Synthetic oligonucleotide
gacacuggcugggacccuc

SEQ ID NO: 2814617 - RNA, 19 nt, Artificial Sequence
  Description of Artificial Sequence: Synthetic oligonucleotide
auguaacguuuucccacua

SEQ ID NO: 2814618 - RNA, 19 nt, Artificial Sequence
  Description of Artificial Sequence: Synthetic oligonucleotide
ugaguccucuggugccgga

SEQ ID NO: 2814619 - RNA, 19 nt, Artificial Sequence
  Description of Artificial Sequence: Synthetic oligonucleotide
agucgcugguguacaacca

SEQ ID NO: 2814620 - RNA, 19 nt, Artificial Sequence
  Description of Artificial Sequence: Synthetic oligonucleotide
caaccaggugaguguucug

SEQ ID NO: 2814621 - RNA, 19 nt, Artificial Sequence
  Description of Artificial Sequence: Synthetic oligonucleotide
ccggauaaguccagcgaug

SEQ ID NO: 2814622 - RNA, 19 nt, Artificial Sequence
  Description of Artificial Sequence: Synthetic oligonucleotide
gguaugcacucucaaugua

SEQ ID NO: 2814623 - RNA, 19 nt, Artificial Sequence
  Description of Artificial Sequence: Synthetic oligonucleotide
ccucccuguuaugaagucg

SEQ ID NO: 2814624 - RNA, 19 nt, Artificial Sequence
  Description of Artificial Sequence: Synthetic oligonucleotide
augccugaugagguaugca

SEQ ID NO: 2814625 - RNA, 19 nt, Artificial Sequence
  Description of Artificial Sequence: Synthetic oligonucleotide
uuacaacaauagggcuucu

SEQ ID NO: 2814626 - RNA, 19 nt, Artificial Sequence
  Description of Artificial Sequence: Synthetic oligonucleotide
cgaacaucauguacucaac

SEQ ID NO: 2814627 - RNA, 19 nt, Artificial Sequence
  Description of Artificial Sequence: Synthetic oligonucleotide
guguguguguguguguaua

SEQ ID NO: 2814628 - RNA, 19 nt, Artificial Sequence
  Description of Artificial Sequence: Synthetic oligonucleotide
gugugugugugugugugua

SEQ ID NO: 2814629 - RNA, 19 nt, Artificial Sequence
  Description of Artificial Sequence: Synthetic oligonucleotide
agcuaucccugaaagccuu

SEQ ID NO: 2814630 - RNA, 19 nt, Artificial Sequence
  Description of Artificial Sequence: Synthetic oligonucleotide
agacacugguacggagucu

SEQ ID NO: 2814631 - RNA, 19 nt, Artificial Sequence
  Description of Artificial Sequence: Synthetic oligonucleotide
gagcuaucccugaaagccu

SEQ ID NO: 2814632 - RNA, 19 nt, Artificial Sequence
  Description of Artificial Sequence: Synthetic oligonucleotide
guccucuggugccggauaa

SEQ ID NO: 2814633 - RNA, 19 nt, Artificial Sequence
  Description of Artificial Sequence: Synthetic oligonucleotide
acuacucuuuacacucgua

SEQ ID NO: 2814634 - RNA, 19 nt, Artificial Sequence
  Description of Artificial Sequence: Synthetic oligonucleotide
ugggacccucccuguuaug

SEQ ID NO: 2814635 - RNA, 19 nt, Artificial Sequence
  Description of Artificial Sequence: Synthetic oligonucleotide
guucacucaagaagaguau

SEQ ID NO: 2814636 - RNA, 19 nt, Artificial Sequence
  Description of Artificial Sequence: Synthetic oligonucleotide
gaauucucuggugcuuggu

SEQ ID NO: 2814637 - RNA, 19 nt, Artificial Sequence
  Description of Artificial Sequence: Synthetic oligonucleotide
cacuggcugggacccuccc

SEQ ID NO: 2814638 - RNA, 19 nt, Artificial Sequence
  Description of Artificial Sequence: Synthetic oligonucleotide
uggcugggacccucccugu

SEQ ID NO: 2814639 - RNA, 19 nt, Artificial Sequence
  Description of Artificial Sequence: Synthetic oligonucleotide
cuguuaugaagucgcuggu

SEQ ID NO: 2814640 - RNA, 19 nt, Artificial Sequence
  Description of Artificial Sequence: Synthetic oligonucleotide
gggacccucccuguuauga

SEQ ID NO: 2814641 - RNA, 19 nt, Artificial Sequence
  Description of Artificial Sequence: Synthetic oligonucleotide
gucuuucgccaguaugagu

SEQ ID NO: 2814642 - RNA, 19 nt, Artificial Sequence
  Description of Artificial Sequence: Synthetic oligonucleotide
cacuacucuuuacacucgu

SEQ ID NO: 2814643 - RNA, 19 nt, Artificial Sequence
  Description of Artificial Sequence: Synthetic oligonucleotide
guguucugccugaaggacu

SEQ ID NO: 2814644 - RNA, 19 nt, Artificial Sequence
  Description of Artificial Sequence: Synthetic oligonucleotide
ggugccggauaaguccagc

SEQ ID NO: 2814645 - RNA, 19 nt, Artificial Sequence
  Description of Artificial Sequence: Synthetic oligonucleotide
gaguaugacccaaguucgu

SEQ ID NO: 2814646 - RNA, 19 nt, Artificial Sequence
  Description of Artificial Sequence: Synthetic oligonucleotide
cacucucaauguaacguuu

SEQ ID NO: 2814647 - RNA, 19 nt, Artificial Sequence
  Description of Artificial Sequence: Synthetic oligonucleotide
caaguucguuacguuucca

SEQ ID NO: 2814648 - RNA, 19 nt, Artificial Sequence
  Description of Artificial Sequence: Synthetic oligonucleotide
gacuggugugugugugugu

SEQ ID NO: 2814649 - RNA, 19 nt, Artificial Sequence
  Description of Artificial Sequence: Synthetic oligonucleotide
cccuguuaugaagucgcug

SEQ ID NO: 2814650 - RNA, 19 nt, Artificial Sequence
  Description of Artificial Sequence: Synthetic oligonucleotide
gacccaaguucguuacguu

SEQ ID NO: 2814651 - RNA, 19 nt, Artificial Sequence
  Description of Artificial Sequence: Synthetic oligonucleotide
gugcuuggucagacaggag

SEQ ID NO: 2814652 - RNA, 19 nt, Artificial Sequence
  Description of Artificial Sequence: Synthetic oligonucleotide
gccggauaaguccagcgau

SEQ ID NO: 2814653 - RNA, 19 nt, Artificial Sequence
  Description of Artificial Sequence: Synthetic oligonucleotide
cuuggucagacaggagcua

SEQ ID NO: 2814654 - RNA, 19 nt, Artificial Sequence
  Description of Artificial Sequence: Synthetic oligonucleotide
cagacuggugugugugugu

SEQ ID NO: 2814655 - RNA, 19 nt, Artificial Sequence
  Description of Artificial Sequence: Synthetic oligonucleotide
gguacggagucuccuuggu

SEQ ID NO: 2814656 - RNA, 19 nt, Artificial Sequence
  Description of Artificial Sequence: Synthetic oligonucleotide
gucggacaagacaccagcu

SEQ ID NO: 2814657 - RNA, 19 nt, Artificial Sequence
  Description of Artificial Sequence: Synthetic oligonucleotide
gcgauguuccugaagaguu

SEQ ID NO: 2814658 - RNA, 19 nt, Artificial Sequence
  Description of Artificial Sequence: Synthetic oligonucleotide
acguuuccacgggcugcuc

SEQ ID NO: 2814659 - RNA, 19 nt, Artificial Sequence
  Description of Artificial Sequence: Synthetic oligonucleotide
cugaagaguuuacgacacu

SEQ ID NO: 2814660 - RNA, 19 nt, Artificial Sequence
  Description of Artificial Sequence: Synthetic oligonucleotide
ggagucuccuuggugugaa

SEQ ID NO: 2814661 - RNA, 19 nt, Artificial Sequence
  Description of Artificial Sequence: Synthetic oligonucleotide
cugaugccugaugagguau

SEQ ID NO: 2814662 - RNA, 19 nt, Artificial Sequence
  Description of Artificial Sequence: Synthetic oligonucleotide
gcacucucaauguaacguu

SEQ ID NO: 2814663 - RNA, 19 nt, Artificial Sequence
  Description of Artificial Sequence: Synthetic oligonucleotide
guguguguguguauacguu

SEQ ID NO: 2814664 - RNA, 19 nt, Artificial Sequence
  Description of Artificial Sequence: Synthetic oligonucleotide
gacaagacaccagcuccuu

SEQ ID NO: 2814665 - RNA, 19 nt, Artificial Sequence
  Description of Artificial Sequence: Synthetic oligonucleotide
ggacaagacaccagcuccu

SEQ ID NO: 2814666 - RNA, 19 nt, Artificial Sequence
  Description of Artificial Sequence: Synthetic oligonucleotide
cugaugagguaugcacucu

SEQ ID NO: 2814667 - RNA, 19 nt, Artificial Sequence
  Description of Artificial Sequence: Synthetic oligonucleotide
cgggcugcucuucaaggug

SEQ ID NO: 2814668 - RNA, 19 nt, Artificial Sequence
  Description of Artificial Sequence: Synthetic oligonucleotide
ggcugcucuucaaggugug

SEQ ID NO: 2814669 - RNA, 19 nt, Artificial Sequence
  Description of Artificial Sequence: Synthetic oligonucleotide
ggugugugugugugugugu

SEQ ID NO: 2814670 - RNA, 19 nt, Artificial Sequence
  Description of Artificial Sequence: Synthetic oligonucleotide
gcugggacccucccuguua

SEQ ID NO: 2814671 - RNA, 19 nt, Artificial Sequence
  Description of Artificial Sequence: Synthetic oligonucleotide
gccugaugagguaugcacu

SEQ ID NO: 2814672 - RNA, 19 nt, Artificial Sequence
  Description of Artificial Sequence: Synthetic oligonucleotide
cugcucuucaagguguguu

SEQ ID NO: 2814673 - RNA, 19 nt, Artificial Sequence
  Description of Artificial Sequence: Synthetic oligonucleotide
cccucccuguuaugaaguc

SEQ ID NO: 2814674 - RNA, 19 nt, Artificial Sequence
  Description of Artificial Sequence: Synthetic oligonucleotide
gcucuucaagguguguucu

SEQ ID NO: 2814675 - RNA, 19 nt, Artificial Sequence
  Description of Artificial Sequence: Synthetic oligonucleotide
cuggugugugugugugugu

SEQ ID NO: 2814676 - RNA, 19 nt, Artificial Sequence
  Description of Artificial Sequence: Synthetic oligonucleotide
cugggacccucccuguuau

SEQ ID NO: 2814677 - RNA, 19 nt, Artificial Sequence
  Description of Artificial Sequence: Synthetic oligonucleotide
cacugguacggagucuccu

SEQ ID NO: 2814678 - RNA, 19 nt, Artificial Sequence
  Description of Artificial Sequence: Synthetic oligonucleotide
ggugaguguucugccugaa

SEQ ID NO: 2814679 - RNA, 19 nt, Artificial Sequence
  Description of Artificial Sequence: Synthetic oligonucleotide
gggcugcucuucaaggugu

SEQ ID NO: 2814680 - RNA, 19 nt, Artificial Sequence
  Description of Artificial Sequence: Synthetic oligonucleotide
guccagcgauguuccugaa

SEQ ID NO: 2814681 - RNA, 19 nt, Artificial Sequence
  Description of Artificial Sequence: Synthetic oligonucleotide
cguuacguuuccacgggcu

SEQ ID NO: 2814682 - RNA, 19 nt, Artificial Sequence
  Description of Artificial Sequence: Synthetic oligonucleotide
gagucuccuuggugugaau

SEQ ID NO: 2814683 - RNA, 19 nt, Artificial Sequence
  Description of Artificial Sequence: Synthetic oligonucleotide
ggauaaguccagcgauguu

SEQ ID NO: 2814684 - RNA, 19 nt, Artificial Sequence
  Description of Artificial Sequence: Synthetic oligonucleotide
ccaggugaguguucugccu

SEQ ID NO: 2814685 - RNA, 19 nt, Artificial Sequence
  Description of Artificial Sequence: Synthetic oligonucleotide
ccucuggugccggauaagu

SEQ ID NO: 2814686 - RNA, 19 nt, Artificial Sequence
  Description of Artificial Sequence: Synthetic oligonucleotide
gcuaucccugaaagccuua

SEQ ID NO: 2814687 - RNA, 19 nt, Artificial Sequence
  Description of Artificial Sequence: Synthetic oligonucleotide
gguguacaaccaggugagu

SEQ ID NO: 2814688 - RNA, 19 nt, Artificial Sequence
  Description of Artificial Sequence: Synthetic oligonucleotide
cggauaaguccagcgaugu

SEQ ID NO: 2814689 - RNA, 19 nt, Artificial Sequence
  Description of Artificial Sequence: Synthetic oligonucleotide
gcugcucuucaaggugugu

SEQ ID NO: 2814690 - RNA, 19 nt, Artificial Sequence
  Description of Artificial Sequence: Synthetic oligonucleotide
cguuuccacgggcugcucu

SEQ ID NO: 2814691 - RNA, 19 nt, Artificial Sequence
  Description of Artificial Sequence: Synthetic oligonucleotide
cgacacugguuacaacaau

SEQ ID NO: 2814692 - RNA, 19 nt, Artificial Sequence
  Description of Artificial Sequence: Synthetic oligonucleotide
guucugccugaaggacuuu

SEQ ID NO: 2814693 - RNA, 19 nt, Artificial Sequence
  Description of Artificial Sequence: Synthetic oligonucleotide
ggcugggacccucccuguu

SEQ ID NO: 2814694 - RNA, 19 nt, Artificial Sequence
  Description of Artificial Sequence: Synthetic oligonucleotide
cggagucuccuugguguga

SEQ ID NO: 2814695 - RNA, 19 nt, Artificial Sequence
  Description of Artificial Sequence: Synthetic oligonucleotide
ggacacuggcugggacccu

SEQ ID NO: 2814696 - RNA, 19 nt, Artificial Sequence
  Description of Artificial Sequence: Synthetic oligonucleotide
aauucuguaaguuaucacc

SEQ ID NO: 2814697 - RNA, 19 nt, Artificial Sequence
  Description of Artificial Sequence: Synthetic oligonucleotide
uugauuuuggaucacaugg

SEQ ID NO: 2814698 - RNA, 19 nt, Artificial Sequence
  Description of Artificial Sequence: Synthetic oligonucleotide
aaaccaauuacucuuuuac

SEQ ID NO: 2814699 - RNA, 19 nt, Artificial Sequence
  Description of Artificial Sequence: Synthetic oligonucleotide
caaaucuugaagaagaucc

SEQ ID NO: 2814700 - RNA, 19 nt, Artificial Sequence
  Description of Artificial Sequence: Synthetic oligonucleotide
aacacauuacaauaccacc

SEQ ID NO: 2814701 - RNA, 19 nt, Artificial Sequence
  Description of Artificial Sequence: Synthetic oligonucleotide
aauccaaaaucacugaaag

SEQ ID NO: 2814702 - RNA, 19 nt, Artificial Sequence
  Description of Artificial Sequence: Synthetic oligonucleotide
aauaucugaauuuugaauu

SEQ ID NO: 2814703 - RNA, 19 nt, Artificial Sequence
  Description of Artificial Sequence: Synthetic oligonucleotide
aauauuugauuuuggauca

SEQ ID NO: 2814704 - RNA, 19 nt, Artificial Sequence
  Description of Artificial Sequence: Synthetic oligonucleotide
aaguuaucaccuucuaacc

SEQ ID NO: 2814705 - RNA, 19 nt, Artificial Sequence
  Description of Artificial Sequence: Synthetic oligonucleotide
uauacacccauacugaaug

SEQ ID NO: 2814706 - RNA, 19 nt, Artificial Sequence
  Description of Artificial Sequence: Synthetic oligonucleotide
uacaauaccaccaacguau

SEQ ID NO: 2814707 - RNA, 19 nt, Artificial Sequence
  Description of Artificial Sequence: Synthetic oligonucleotide
uacaaugucaccucuuugg

SEQ ID NO: 2814708 - RNA, 19 nt, Artificial Sequence
  Description of Artificial Sequence: Synthetic oligonucleotide
aaagauaucugauguacca

SEQ ID NO: 2814709 - RNA, 19 nt, Artificial Sequence
  Description of Artificial Sequence: Synthetic oligonucleotide
ucugaauuuugaauugugg

SEQ ID NO: 2814710 - RNA, 19 nt, Artificial Sequence
  Description of Artificial Sequence: Synthetic oligonucleotide
uauucaaaagcacaaugug

SEQ ID NO: 2814711 - RNA, 19 nt, Artificial Sequence
  Description of Artificial Sequence: Synthetic oligonucleotide
cauuacaauaccaccaacg

SEQ ID NO: 2814712 - RNA, 19 nt, Artificial Sequence
  Description of Artificial Sequence: Synthetic oligonucleotide
cucguauuaguccauaugg

SEQ ID NO: 2814713 - RNA, 19 nt, Artificial Sequence
  Description of Artificial Sequence: Synthetic oligonucleotide
cugaauuuugaauuguggg

SEQ ID NO: 2814714 - RNA, 19 nt, Artificial Sequence
  Description of Artificial Sequence: Synthetic oligonucleotide
cuaaucaucagaaaaucug

SEQ ID NO: 2814715 - RNA, 19 nt, Artificial Sequence
  Description of Artificial Sequence: Synthetic oligonucleotide
aaacaugaccuguuggcac

SEQ ID NO: 2814716 - RNA, 19 nt, Artificial Sequence
  Description of Artificial Sequence: Synthetic oligonucleotide
aagucgaaaggccuuuccc

SEQ ID NO: 2814717 - RNA, 19 nt, Artificial Sequence
  Description of Artificial Sequence: Synthetic oligonucleotide
uacugaaugguauagccag

SEQ ID NO: 2814718 - RNA, 19 nt, Artificial Sequence
  Description of Artificial Sequence: Synthetic oligonucleotide
ucaucagaaaaucugucgc

SEQ ID NO: 2814719 - RNA, 19 nt, Artificial Sequence
  Description of Artificial Sequence: Synthetic oligonucleotide
uacucuuuuacaaauauuu

SEQ ID NO: 2814720 - RNA, 19 nt, Artificial Sequence
  Description of Artificial Sequence: Synthetic oligonucleotide
ugaauuguggguuccauug

SEQ ID NO: 2814721 - RNA, 19 nt, Artificial Sequence
  Description of Artificial Sequence: Synthetic oligonucleotide
aauuuugaauuguggguuc

SEQ ID NO: 2814722 - RNA, 19 nt, Artificial Sequence
  Description of Artificial Sequence: Synthetic oligonucleotide
cauaguucgacguugacuc

SEQ ID NO: 2814723 - RNA, 19 nt, Artificial Sequence
  Description of Artificial Sequence: Synthetic oligonucleotide
cuucuaaccaaacaugacc

SEQ ID NO: 2814724 - RNA, 19 nt, Artificial Sequence
  Description of Artificial Sequence: Synthetic oligonucleotide
uaagauuuucugcaaagac

SEQ ID NO: 2814725 - RNA, 19 nt, Artificial Sequence
  Description of Artificial Sequence: Synthetic oligonucleotide
ugaauuuugaauugugggu

SEQ ID NO: 2814726 - RNA, 19 nt, Artificial Sequence
  Description of Artificial Sequence: Synthetic oligonucleotide
cacaaugugcuauacaccc

SEQ ID NO: 2814727 - RNA, 19 nt, Artificial Sequence
  Description of Artificial Sequence: Synthetic oligonucleotide
uuaaagauaucugauguac

SEQ ID NO: 2814728 - RNA, 19 nt, Artificial Sequence
  Description of Artificial Sequence: Synthetic oligonucleotide
aaaaugucggcuaagauuu

SEQ ID NO: 2814729 - RNA, 19 nt, Artificial Sequence
  Description of Artificial Sequence: Synthetic oligonucleotide
auucaaaagcacaaugugc

SEQ ID NO: 2814730 - RNA, 19 nt, Artificial Sequence
  Description of Artificial Sequence: Synthetic oligonucleotide
ugauuuuggaucacauggg

SEQ ID NO: 2814731 - RNA, 19 nt, Artificial Sequence
  Description of Artificial Sequence: Synthetic oligonucleotide
ugauguaccaguguugagg

SEQ ID NO: 2814732 - RNA, 19 nt, Artificial Sequence
  Description of Artificial Sequence: Synthetic oligonucleotide
aaaucugucgccguuuggg

SEQ ID NO: 2814733 - RNA, 19 nt, Artificial Sequence
  Description of Artificial Sequence: Synthetic oligonucleotide
uucuaaccaaacaugaccu

SEQ ID NO: 2814734 - RNA, 19 nt, Artificial Sequence
  Description of Artificial Sequence: Synthetic oligonucleotide
uaaucaucagaaaaucugu

SEQ ID NO: 2814735 - RNA, 19 nt, Artificial Sequence
  Description of Artificial Sequence: Synthetic oligonucleotide
aaucugucgccguuugggc

SEQ ID NO: 2814736 - RNA, 19 nt, Artificial Sequence
  Description of Artificial Sequence: Synthetic oligonucleotide
guccauaugguauaggccc

SEQ ID NO: 2814737 - RNA, 19 nt, Artificial Sequence
  Description of Artificial Sequence: Synthetic oligonucleotide
ugcaauuacaaugucaccu

SEQ ID NO: 2814738 - RNA, 19 nt, Artificial Sequence
  Description of Artificial Sequence: Synthetic oligonucleotide
gaaugguauagccagcaag

SEQ ID NO: 2814739 - RNA, 19 nt, Artificial Sequence
  Description of Artificial Sequence: Synthetic oligonucleotide
aacaccacgaagcauaguu

SEQ ID NO: 2814740 - RNA, 19 nt, Artificial Sequence
  Description of Artificial Sequence: Synthetic oligonucleotide
auuacaauaccaccaacgu

SEQ ID NO: 2814741 - RNA, 19 nt, Artificial Sequence
  Description of Artificial Sequence: Synthetic oligonucleotide
ugguauagccagcaagucg

SEQ ID NO: 2814742 - RNA, 19 nt, Artificial Sequence
  Description of Artificial Sequence: Synthetic oligonucleotide
ucuugaagaagauccgucc

SEQ ID NO: 2814743 - RNA, 19 nt, Artificial Sequence
  Description of Artificial Sequence: Synthetic oligonucleotide
uaaagauaucugauguacc

SEQ ID NO: 2814744 - RNA, 19 nt, Artificial Sequence
  Description of Artificial Sequence: Synthetic oligonucleotide
uaguccauaugguauaggc

SEQ ID NO: 2814745 - RNA, 19 nt, Artificial Sequence
  Description of Artificial Sequence: Synthetic oligonucleotide
ucggcuaagauuuucugca

SEQ ID NO: 2814746 - RNA, 19 nt, Artificial Sequence
  Description of Artificial Sequence: Synthetic oligonucleotide
aaugguauagccagcaagu

SEQ ID NO: 2814747 - RNA, 19 nt, Artificial Sequence
  Description of Artificial Sequence: Synthetic oligonucleotide
aguguugaggauuuugucu

SEQ ID NO: 2814748 - RNA, 19 nt, Artificial Sequence
  Description of Artificial Sequence: Synthetic oligonucleotide
gucuguagaauucuguaag

SEQ ID NO: 2814749 - RNA, 19 nt, Artificial Sequence
  Description of Artificial Sequence: Synthetic oligonucleotide
gauuuuggaucacaugggc

SEQ ID NO: 2814750 - RNA, 19 nt, Artificial Sequence
  Description of Artificial Sequence: Synthetic oligonucleotide
aaaggccuuucccagaaca

SEQ ID NO: 2814751 - RNA, 19 nt, Artificial Sequence
  Description of Artificial Sequence: Synthetic oligonucleotide
ucaccuucuaaccaaacau

SEQ ID NO: 2814752 - RNA, 19 nt, Artificial Sequence
  Description of Artificial Sequence: Synthetic oligonucleotide
aaugcuugcuaaucaucag

SEQ ID NO: 2814753 - RNA, 19 nt, Artificial Sequence
  Description of Artificial Sequence: Synthetic oligonucleotide
auaucugaauuuugaauug

SEQ ID NO: 2814754 - RNA, 19 nt, Artificial Sequence
  Description of Artificial Sequence: Synthetic oligonucleotide
uuugauuuuggaucacaug

SEQ ID NO: 2814755 - RNA, 19 nt, Artificial Sequence
  Description of Artificial Sequence: Synthetic oligonucleotide
aaaucuugaagaagauccg

SEQ ID NO: 2814756 - RNA, 19 nt, Artificial Sequence
  Description of Artificial Sequence: Synthetic oligonucleotide
ucgacguugacucugccac

SEQ ID NO: 2814757 - RNA, 19 nt, Artificial Sequence
  Description of Artificial Sequence: Synthetic oligonucleotide
uguuggcacauaacuacgg

SEQ ID NO: 2814758 - RNA, 19 nt, Artificial Sequence
  Description of Artificial Sequence: Synthetic oligonucleotide
augugcuauacacccauac

SEQ ID NO: 2814759 - RNA, 19 nt, Artificial Sequence
  Description of Artificial Sequence: Synthetic oligonucleotide
aaaugcuugcuaaucauca

SEQ ID NO: 2814760 - RNA, 19 nt, Artificial Sequence
  Description of Artificial Sequence: Synthetic oligonucleotide
aaccaauuacucuuuuaca

SEQ ID NO: 2814761 - RNA, 19 nt, Artificial Sequence
  Description of Artificial Sequence: Synthetic oligonucleotide
aaucaucagaaaaucuguc

SEQ ID NO: 2814762 - RNA, 19 nt, Artificial Sequence
  Description of Artificial Sequence: Synthetic oligonucleotide
ugaagaagauccguccucg

SEQ ID NO: 2814763 - RNA, 19 nt, Artificial Sequence
  Description of Artificial Sequence: Synthetic oligonucleotide
ugcuauacacccauacuga

SEQ ID NO: 2814764 - RNA, 19 nt, Artificial Sequence
  Description of Artificial Sequence: Synthetic oligonucleotide
gugcuauacacccauacug

SEQ ID NO: 2814765 - RNA, 19 nt, Artificial Sequence
  Description of Artificial Sequence: Synthetic oligonucleotide
uguagaauucuguaaguua

SEQ ID NO: 2814766 - RNA, 19 nt, Artificial Sequence
  Description of Artificial Sequence: Synthetic oligonucleotide
uccagaacacauuacaaua

SEQ ID NO: 2814767 - RNA, 19 nt, Artificial Sequence
  Description of Artificial Sequence: Synthetic oligonucleotide
cucuuuuacaaauauuuga

SEQ ID NO: 2814768 - RNA, 19 nt, Artificial Sequence
  Description of Artificial Sequence: Synthetic oligonucleotide
uugcuaaucaucagaaaau

SEQ ID NO: 2814769 - RNA, 19 nt, Artificial Sequence
  Description of Artificial Sequence: Synthetic oligonucleotide
aguaccuggagucuguaga

SEQ ID NO: 2814770 - RNA, 19 nt, Artificial Sequence
  Description of Artificial Sequence: Synthetic oligonucleotide
ugguccagaacacauuaca

SEQ ID NO: 2814771 - RNA, 19 nt, Artificial Sequence
  Description of Artificial Sequence: Synthetic oligonucleotide
aaaaucugucgccguuugg

SEQ ID NO: 2814772 - RNA, 19 nt, Artificial Sequence
  Description of Artificial Sequence: Synthetic oligonucleotide
cuugcuaaucaucagaaaa

SEQ ID NO: 2814773 - RNA, 19 nt, Artificial Sequence
  Description of Artificial Sequence: Synthetic oligonucleotide
gaggauuuugucuccuucc

SEQ ID NO: 2814774 - RNA, 19 nt, Artificial Sequence
  Description of Artificial Sequence: Synthetic oligonucleotide
caccacgaagcauaguucg

SEQ ID NO: 2814775 - RNA, 19 nt, Artificial Sequence
  Description of Artificial Sequence: Synthetic oligonucleotide
auccaaaaucacugaaagg

SEQ ID NO: 2814776 - RNA, 19 nt, Artificial Sequence
  Description of Artificial Sequence: Synthetic oligonucleotide
ucuguaaguuaucaccuuc

SEQ ID NO: 2814777 - RNA, 19 nt, Artificial Sequence
  Description of Artificial Sequence: Synthetic oligonucleotide
aucagaaaaucugucgccg

SEQ ID NO: 2814778 - RNA, 19 nt, Artificial Sequence
  Description of Artificial Sequence: Synthetic oligonucleotide
agauaucugauguaccagu

SEQ ID NO: 2814779 - RNA, 19 nt, Artificial Sequence
  Description of Artificial Sequence: Synthetic oligonucleotide
aaagcacaaugugcuauac

SEQ ID NO: 2814780 - RNA, 19 nt, Artificial Sequence
  Description of Artificial Sequence: Synthetic oligonucleotide
uccauaugguauaggcccg

SEQ ID NO: 2814781 - RNA, 19 nt, Artificial Sequence
  Description of Artificial Sequence: Synthetic oligonucleotide
gacaauaucugaauuuuga

SEQ ID NO: 2814782 - RNA, 19 nt, Artificial Sequence
  Description of Artificial Sequence: Synthetic oligonucleotide
ugugcuauacacccauacu

SEQ ID NO: 2814783 - RNA, 19 nt, Artificial Sequence
  Description of Artificial Sequence: Synthetic oligonucleotide
aacaugaccuguuggcaca

SEQ ID NO: 2814784 - RNA, 19 nt, Artificial Sequence
  Description of Artificial Sequence: Synthetic oligonucleotide
uuuaaagauaucugaugua

SEQ ID NO: 2814785 - RNA, 19 nt, Artificial Sequence
  Description of Artificial Sequence: Synthetic oligonucleotide
auuuugaauuguggguucc

SEQ ID NO: 2814786 - RNA, 19 nt, Artificial Sequence
  Description of Artificial Sequence: Synthetic oligonucleotide
caucagaaaaucugucgcc

SEQ ID NO: 2814787 - RNA, 19 nt, Artificial Sequence
  Description of Artificial Sequence: Synthetic oligonucleotide
agauuuucugcaaagacaa

SEQ ID NO: 2814788 - RNA, 19 nt, Artificial Sequence
  Description of Artificial Sequence: Synthetic oligonucleotide
gauguaccaguguugagga

SEQ ID NO: 2814789 - RNA, 19 nt, Artificial Sequence
  Description of Artificial Sequence: Synthetic oligonucleotide
aguuaucaccuucuaacca

SEQ ID NO: 2814790 - RNA, 19 nt, Artificial Sequence
  Description of Artificial Sequence: Synthetic oligonucleotide
aguccauaugguauaggcc

SEQ ID NO: 2814791 - RNA, 19 nt, Artificial Sequence
  Description of Artificial Sequence: Synthetic oligonucleotide
acgaagaaauccaaaauca

SEQ ID NO: 2814792 - RNA, 19 nt, Artificial Sequence
  Description of Artificial Sequence: Synthetic oligonucleotide
uaucugauguaccaguguu

SEQ ID NO: 2814793 - RNA, 19 nt, Artificial Sequence
  Description of Artificial Sequence: Synthetic oligonucleotide
acauuacaauaccaccaac

SEQ ID NO: 2814794 - RNA, 19 nt, Artificial Sequence
  Description of Artificial Sequence: Synthetic oligonucleotide
ucacgaagaaauccaaaau

SEQ ID NO: 2814795 - RNA, 19 nt, Artificial Sequence
  Description of Artificial Sequence: Synthetic oligonucleotide
accaccaacguauucaaaa

SEQ ID NO: 2814796 - RNA, 19 nt, Artificial Sequence
  Description of Artificial Sequence: Synthetic oligonucleotide
agaaauccaaaaucacuga

SEQ ID NO: 2814797 - RNA, 19 nt, Artificial Sequence
  Description of Artificial Sequence: Synthetic oligonucleotide
ugcuugcuaaucaucagaa

SEQ ID NO: 2814798 - RNA, 19 nt, Artificial Sequence
  Description of Artificial Sequence: Synthetic oligonucleotide
aaccaaacaugaccuguug

SEQ ID NO: 2814799 - RNA, 19 nt, Artificial Sequence
  Description of Artificial Sequence: Synthetic oligonucleotide
aaggccaaaucuugaagaa

SEQ ID NO: 2814800 - RNA, 19 nt, Artificial Sequence
  Description of Artificial Sequence: Synthetic oligonucleotide
gaauucuguaaguuaucac

SEQ ID NO: 2814801 - RNA, 19 nt, Artificial Sequence
  Description of Artificial Sequence: Synthetic oligonucleotide
aacguauucaaaagcacaa

SEQ ID NO: 2814802 - RNA, 19 nt, Artificial Sequence
  Description of Artificial Sequence: Synthetic oligonucleotide
aaauccaaaaucacugaaa

SEQ ID NO: 2814803 - RNA, 19 nt, Artificial Sequence
  Description of Artificial Sequence: Synthetic oligonucleotide
uauuaguccauaugguaua

SEQ ID NO: 2814804 - RNA, 19 nt, Artificial Sequence
  Description of Artificial Sequence: Synthetic oligonucleotide
uuacaaugucaccucuuug

SEQ ID NO: 2814805 - RNA, 19 nt, Artificial Sequence
  Description of Artificial Sequence: Synthetic oligonucleotide
aaucuugaagaagauccgu

SEQ ID NO: 2814806 - RNA, 19 nt, Artificial Sequence
  Description of Artificial Sequence: Synthetic oligonucleotide
ucguauuaguccauauggu

SEQ ID NO: 2814807 - RNA, 19 nt, Artificial Sequence
  Description of Artificial Sequence: Synthetic oligonucleotide
gaagcauaguucgacguug

SEQ ID NO: 2814808 - RNA, 19 nt, Artificial Sequence
  Description of Artificial Sequence: Synthetic oligonucleotide
aaaagcacaaugugcuaua

SEQ ID NO: 2814809 - RNA, 19 nt, Artificial Sequence
  Description of Artificial Sequence: Synthetic oligonucleotide
agaagauccguccucguau

SEQ ID NO: 2814810 - RNA, 19 nt, Artificial Sequence
  Description of Artificial Sequence: Synthetic oligonucleotide
uugaugguccagaacacau

SEQ ID NO: 2814811 - RNA, 19 nt, Artificial Sequence
  Description of Artificial Sequence: Synthetic oligonucleotide
gaaaaucugucgccguuug

SEQ ID NO: 2814812 - RNA, 19 nt, Artificial Sequence
  Description of Artificial Sequence: Synthetic oligonucleotide
agucgaaaggccuuuccca

SEQ ID NO: 2814813 - RNA, 19 nt, Artificial Sequence
  Description of Artificial Sequence: Synthetic oligonucleotide
uucccagaacaccacgaag

SEQ ID NO: 2814814 - RNA, 19 nt, Artificial Sequence
  Description of Artificial Sequence: Synthetic oligonucleotide
auuacaaugucaccucuuu

SEQ ID NO: 2814815 - RNA, 19 nt, Artificial Sequence
  Description of Artificial Sequence: Synthetic oligonucleotide
gauaucugauguaccagug

SEQ ID NO: 2814816 - RNA, 19 nt, Artificial Sequence
  Description of Artificial Sequence: Synthetic oligonucleotide
uuacaauaccaccaacgua

SEQ ID NO: 2814817 - RNA, 19 nt, Artificial Sequence
  Description of Artificial Sequence: Synthetic oligonucleotide
aucaccuucuaaccaaaca

SEQ ID NO: 2814818 - RNA, 19 nt, Artificial Sequence
  Description of Artificial Sequence: Synthetic oligonucleotide
uugaagaagauccguccuc

SEQ ID NO: 2814819 - RNA, 19 nt, Artificial Sequence
  Description of Artificial Sequence: Synthetic oligonucleotide
ucuaaccaaacaugaccug

SEQ ID NO: 2814820 - RNA, 19 nt, Artificial Sequence
  Description of Artificial Sequence: Synthetic oligonucleotide
acacauuacaauaccacca

SEQ ID NO: 2814821 - RNA, 19 nt, Artificial Sequence
  Description of Artificial Sequence: Synthetic oligonucleotide
caaaaucacugaaaggcca

SEQ ID NO: 2814822 - RNA, 19 nt, Artificial Sequence
  Description of Artificial Sequence: Synthetic oligonucleotide
gcuaagauuuucugcaaag

SEQ ID NO: 2814823 - RNA, 19 nt, Artificial Sequence
  Description of Artificial Sequence: Synthetic oligonucleotide
cuguuggcacauaacuacg

SEQ ID NO: 2814824 - RNA, 19 nt, Artificial Sequence
  Description of Artificial Sequence: Synthetic oligonucleotide
uauuugauuuuggaucaca

SEQ ID NO: 2814825 - RNA, 19 nt, Artificial Sequence
  Description of Artificial Sequence: Synthetic oligonucleotide
guuaucaccuucuaaccaa

SEQ ID NO: 2814826 - RNA, 19 nt, Artificial Sequence
  Description of Artificial Sequence: Synthetic oligonucleotide
auucuguaaguuaucaccu

SEQ ID NO: 2814827 - RNA, 19 nt, Artificial Sequence
  Description of Artificial Sequence: Synthetic oligonucleotide
ugcuaaucaucagaaaauc

SEQ ID NO: 2814828 - RNA, 19 nt, Artificial Sequence
  Description of Artificial Sequence: Synthetic oligonucleotide
acaaugucaccucuuugga

SEQ ID NO: 2814829 - RNA, 19 nt, Artificial Sequence
  Description of Artificial Sequence: Synthetic oligonucleotide
auacacccauacugaaugg

SEQ ID NO: 2814830 - RNA, 19 nt, Artificial Sequence
  Description of Artificial Sequence: Synthetic oligonucleotide
caacguauucaaaagcaca

SEQ ID NO: 2814831 - RNA, 19 nt, Artificial Sequence
  Description of Artificial Sequence: Synthetic oligonucleotide
gucacgaagaaauccaaaa

SEQ ID NO: 2814832 - RNA, 19 nt, Artificial Sequence
  Description of Artificial Sequence: Synthetic oligonucleotide
gucgaaaggccuuucccag

SEQ ID NO: 2814833 - RNA, 19 nt, Artificial Sequence
  Description of Artificial Sequence: Synthetic oligonucleotide
auaugguauaggcccguag

SEQ ID NO: 2814834 - RNA, 19 nt, Artificial Sequence
  Description of Artificial Sequence: Synthetic oligonucleotide
accaacguauucaaaagca

SEQ ID NO: 2814835 - RNA, 19 nt, Artificial Sequence
  Description of Artificial Sequence: Synthetic oligonucleotide
auaucugauguaccagugu

SEQ ID NO: 2814836 - RNA, 19 nt, Artificial Sequence
  Description of Artificial Sequence: Synthetic oligonucleotide
gucggcuaagauuuucugc

SEQ ID NO: 2814837 - RNA, 19 nt, Artificial Sequence
  Description of Artificial Sequence: Synthetic oligonucleotide
cacgaagcauaguucgacg

SEQ ID NO: 2814838 - RNA, 19 nt, Artificial Sequence
  Description of Artificial Sequence: Synthetic oligonucleotide
caccaacguauucaaaagc

SEQ ID NO: 2814839 - RNA, 19 nt, Artificial Sequence
  Description of Artificial Sequence: Synthetic oligonucleotide
uguaaguuaucaccuucua

SEQ ID NO: 2814840 - RNA, 19 nt, Artificial Sequence
  Description of Artificial Sequence: Synthetic oligonucleotide
augcuugcuaaucaucaga

SEQ ID NO: 2814841 - RNA, 19 nt, Artificial Sequence
  Description of Artificial Sequence: Synthetic oligonucleotide
uccguccucguauuagucc

SEQ ID NO: 2814842 - RNA, 19 nt, Artificial Sequence
  Description of Artificial Sequence: Synthetic oligonucleotide
aagcacaaugugcuauaca

SEQ ID NO: 2814843 - RNA, 19 nt, Artificial Sequence
  Description of Artificial Sequence: Synthetic oligonucleotide
gaugguccagaacacauua

SEQ ID NO: 2814844 - RNA, 19 nt, Artificial Sequence
  Description of Artificial Sequence: Synthetic oligonucleotide
caccuucuaaccaaacaug

SEQ ID NO: 2814845 - RNA, 19 nt, Artificial Sequence
  Description of Artificial Sequence: Synthetic oligonucleotide
ccaaacaugaccuguuggc

SEQ ID NO: 2814846 - RNA, 19 nt, Artificial Sequence
  Description of Artificial Sequence: Synthetic oligonucleotide
ucugucgccguuugggcug

SEQ ID NO: 2814847 - RNA, 19 nt, Artificial Sequence
  Description of Artificial Sequence: Synthetic oligonucleotide
uggguuccauugauggucc

SEQ ID NO: 2814848 - RNA, 19 nt, Artificial Sequence
  Description of Artificial Sequence: Synthetic oligonucleotide
uuacucuuuuacaaauauu

SEQ ID NO: 2814849 - RNA, 19 nt, Artificial Sequence
  Description of Artificial Sequence: Synthetic oligonucleotide
uguaccaguguugaggauu

SEQ ID NO: 2814850 - RNA, 19 nt, Artificial Sequence
  Description of Artificial Sequence: Synthetic oligonucleotide
aggccuuucccagaacacc

SEQ ID NO: 2814851 - RNA, 19 nt, Artificial Sequence
  Description of Artificial Sequence: Synthetic oligonucleotide
gguauaggcccguaguacc

SEQ ID NO: 2814852 - RNA, 19 nt, Artificial Sequence
  Description of Artificial Sequence: Synthetic oligonucleotide
uagaauucuguaaguuauc

SEQ ID NO: 2814853 - RNA, 19 nt, Artificial Sequence
  Description of Artificial Sequence: Synthetic oligonucleotide
uuucccagaacaccacgaa

SEQ ID NO: 2814854 - RNA, 19 nt, Artificial Sequence
  Description of Artificial Sequence: Synthetic oligonucleotide
uuaucaccuucuaaccaaa

SEQ ID NO: 2814855 - RNA, 19 nt, Artificial Sequence
  Description of Artificial Sequence: Synthetic oligonucleotide
aggauuuugucuccuucca

SEQ ID NO: 2814856 - RNA, 19 nt, Artificial Sequence
  Description of Artificial Sequence: Synthetic oligonucleotide
acucuuuuacaaauauuug

SEQ ID NO: 2814857 - RNA, 19 nt, Artificial Sequence
  Description of Artificial Sequence: Synthetic oligonucleotide
ucagaaaaucugucgccgu

SEQ ID NO: 2814858 - RNA, 19 nt, Artificial Sequence
  Description of Artificial Sequence: Synthetic oligonucleotide
aaaaucacugaaaggccaa

SEQ ID NO: 2814859 - RNA, 19 nt, Artificial Sequence
  Description of Artificial Sequence: Synthetic oligonucleotide
ugucggcuaagauuuucug

SEQ ID NO: 2814860 - RNA, 19 nt, Artificial Sequence
  Description of Artificial Sequence: Synthetic oligonucleotide
ugucacgaagaaauccaaa

SEQ ID NO: 2814861 - RNA, 19 nt, Artificial Sequence
  Description of Artificial Sequence: Synthetic oligonucleotide
aagaagauccguccucgua

SEQ ID NO: 2814862 - RNA, 19 nt, Artificial Sequence
  Description of Artificial Sequence: Synthetic oligonucleotide
uccauugaugguccagaac

SEQ ID NO: 2814863 - RNA, 19 nt, Artificial Sequence
  Description of Artificial Sequence: Synthetic oligonucleotide
auuaguccauaugguauag

SEQ ID NO: 2814864 - RNA, 19 nt, Artificial Sequence
  Description of Artificial Sequence: Synthetic oligonucleotide
acgaagcauaguucgacgu

SEQ ID NO: 2814865 - RNA, 19 nt, Artificial Sequence
  Description of Artificial Sequence: Synthetic oligonucleotide
uggagucuguagaauucug

SEQ ID NO: 2814866 - RNA, 19 nt, Artificial Sequence
  Description of Artificial Sequence: Synthetic oligonucleotide
ccuguuggcacauaacuac

SEQ ID NO: 2814867 - RNA, 19 nt, Artificial Sequence
  Description of Artificial Sequence: Synthetic oligonucleotide
agaacacauuacaauacca

SEQ ID NO: 2814868 - RNA, 19 nt, Artificial Sequence
  Description of Artificial Sequence: Synthetic oligonucleotide
uaaccaaacaugaccuguu

SEQ ID NO: 2814869 - RNA, 19 nt, Artificial Sequence
  Description of Artificial Sequence: Synthetic oligonucleotide
aauuacucuuuuacaaaua

SEQ ID NO: 2814870 - RNA, 19 nt, Artificial Sequence
  Description of Artificial Sequence: Synthetic oligonucleotide
uucgacguugacucugcca

SEQ ID NO: 2814871 - RNA, 19 nt, Artificial Sequence
  Description of Artificial Sequence: Synthetic oligonucleotide
ccauugaugguccagaaca

SEQ ID NO: 2814872 - RNA, 19 nt, Artificial Sequence
  Description of Artificial Sequence: Synthetic oligonucleotide
agccagcaagucgaaaggc

SEQ ID NO: 2814873 - RNA, 19 nt, Artificial Sequence
  Description of Artificial Sequence: Synthetic oligonucleotide
agcauaguucgacguugac

SEQ ID NO: 2814874 - RNA, 19 nt, Artificial Sequence
  Description of Artificial Sequence: Synthetic oligonucleotide
gguauagccagcaagucga

SEQ ID NO: 2814875 - RNA, 19 nt, Artificial Sequence
  Description of Artificial Sequence: Synthetic oligonucleotide
auaggcccguaguaccugg

SEQ ID NO: 2814876 - RNA, 19 nt, Artificial Sequence
  Description of Artificial Sequence: Synthetic oligonucleotide
acugaaugguauagccagc

SEQ ID NO: 2814877 - RNA, 19 nt, Artificial Sequence
  Description of Artificial Sequence: Synthetic oligonucleotide
gagucuguagaauucugua

SEQ ID NO: 2814878 - RNA, 19 nt, Artificial Sequence
  Description of Artificial Sequence: Synthetic oligonucleotide
gaccuguuggcacauaacu

SEQ ID NO: 2814879 - RNA, 19 nt, Artificial Sequence
  Description of Artificial Sequence: Synthetic oligonucleotide
caagucgaaaggccuuucc

SEQ ID NO: 2814880 - RNA, 19 nt, Artificial Sequence
  Description of Artificial Sequence: Synthetic oligonucleotide
guaaguuaucaccuucuaa

SEQ ID NO: 2814881 - RNA, 19 nt, Artificial Sequence
  Description of Artificial Sequence: Synthetic oligonucleotide
auauuugauuuuggaucac

SEQ ID NO: 2814882 - RNA, 19 nt, Artificial Sequence
  Description of Artificial Sequence: Synthetic oligonucleotide
accuucuaaccaaacauga

SEQ ID NO: 2814883 - RNA, 19 nt, Artificial Sequence
  Description of Artificial Sequence: Synthetic oligonucleotide
aguucgacguugacucugc

SEQ ID NO: 2814884 - RNA, 19 nt, Artificial Sequence
  Description of Artificial Sequence: Synthetic oligonucleotide
augguauagccagcaaguc

SEQ ID NO: 2814885 - RNA, 19 nt, Artificial Sequence
  Description of Artificial Sequence: Synthetic oligonucleotide
gaauuuugaauuguggguu

SEQ ID NO: 2814886 - RNA, 19 nt, Artificial Sequence
  Description of Artificial Sequence: Synthetic oligonucleotide
gaauuguggguuccauuga

SEQ ID NO: 2814887 - RNA, 19 nt, Artificial Sequence
  Description of Artificial Sequence: Synthetic oligonucleotide
uuuugaauuguggguucca

SEQ ID NO: 2814888 - RNA, 19 nt, Artificial Sequence
  Description of Artificial Sequence: Synthetic oligonucleotide
ugaaugguauagccagcaa

SEQ ID NO: 2814889 - RNA, 19 nt, Artificial Sequence
  Description of Artificial Sequence: Synthetic oligonucleotide
auuuuggaucacaugggcu

SEQ ID NO: 2814890 - RNA, 19 nt, Artificial Sequence
  Description of Artificial Sequence: Synthetic oligonucleotide
uaucaccuucuaaccaaac

SEQ ID NO: 2814891 - RNA, 19 nt, Artificial Sequence
  Description of Artificial Sequence: Synthetic oligonucleotide
uaguaccuggagucuguag

SEQ ID NO: 2814892 - RNA, 19 nt, Artificial Sequence
  Description of Artificial Sequence: Synthetic oligonucleotide
uaguucgacguugacucug

SEQ ID NO: 2814893 - RNA, 19 nt, Artificial Sequence
  Description of Artificial Sequence: Synthetic oligonucleotide
aauuacaaugucaccucuu

SEQ ID NO: 2814894 - RNA, 19 nt, Artificial Sequence
  Description of Artificial Sequence: Synthetic oligonucleotide
agauccguccucguauuag

SEQ ID NO: 2814895 - RNA, 19 nt, Artificial Sequence
  Description of Artificial Sequence: Synthetic oligonucleotide
auaccaccaacguauucaa

SEQ ID NO: 2814896 - RNA, 19 nt, Artificial Sequence
  Description of Artificial Sequence: Synthetic oligonucleotide
guagaauucuguaaguuau

SEQ ID NO: 2814897 - RNA, 19 nt, Artificial Sequence
  Description of Artificial Sequence: Synthetic oligonucleotide
auacugaaugguauagcca

SEQ ID NO: 2814898 - RNA, 19 nt, Artificial Sequence
  Description of Artificial Sequence: Synthetic oligonucleotide
auuugauuuuggaucacau

SEQ ID NO: 2814899 - RNA, 19 nt, Artificial Sequence
  Description of Artificial Sequence: Synthetic oligonucleotide
caauaucugaauuuugaau

SEQ ID NO: 2814900 - RNA, 19 nt, Artificial Sequence
  Description of Artificial Sequence: Synthetic oligonucleotide
ccagaacacauuacaauac

SEQ ID NO: 2814901 - RNA, 19 nt, Artificial Sequence
  Description of Artificial Sequence: Synthetic oligonucleotide
cuaagauuuucugcaaaga

SEQ ID NO: 2814902 - RNA, 19 nt, Artificial Sequence
  Description of Artificial Sequence: Synthetic oligonucleotide
uugaauuguggguuccauu

SEQ ID NO: 2814903 - RNA, 19 nt, Artificial Sequence
  Description of Artificial Sequence: Synthetic oligonucleotide
guggguuccauugaugguc

SEQ ID NO: 2814904 - RNA, 19 nt, Artificial Sequence
  Description of Artificial Sequence: Synthetic oligonucleotide
accucuuuggauaccauaa

SEQ ID NO: 2814905 - RNA, 19 nt, Artificial Sequence
  Description of Artificial Sequence: Synthetic oligonucleotide
caguguugaggauuuuguc

SEQ ID NO: 2814906 - RNA, 19 nt, Artificial Sequence
  Description of Artificial Sequence: Synthetic oligonucleotide
gcaauuacaaugucaccuc

SEQ ID NO: 2814907 - RNA, 19 nt, Artificial Sequence
  Description of Artificial Sequence: Synthetic oligonucleotide
auugaugguccagaacaca

SEQ ID NO: 2814908 - RNA, 19 nt, Artificial Sequence
  Description of Artificial Sequence: Synthetic oligonucleotide
cucuuuggauaccauaaaa

SEQ ID NO: 2814909 - RNA, 19 nt, Artificial Sequence
  Description of Artificial Sequence: Synthetic oligonucleotide
augguauaggcccguagua

SEQ ID NO: 2814910 - RNA, 19 nt, Artificial Sequence
  Description of Artificial Sequence: Synthetic oligonucleotide
ccuuccaaaccaauuacuc

SEQ ID NO: 2814911 - RNA, 19 nt, Artificial Sequence
  Description of Artificial Sequence: Synthetic oligonucleotide
cuuucccagaacaccacga

SEQ ID NO: 2814912 - RNA, 19 nt, Artificial Sequence
  Description of Artificial Sequence: Synthetic oligonucleotide
cacauuacaauaccaccaa

SEQ ID NO: 2814913 - RNA, 19 nt, Artificial Sequence
  Description of Artificial Sequence: Synthetic oligonucleotide
cguauucaaaagcacaaug

SEQ ID NO: 2814914 - RNA, 19 nt, Artificial Sequence
  Description of Artificial Sequence: Synthetic oligonucleotide
ugaugguccagaacacauu

SEQ ID NO: 2814915 - RNA, 19 nt, Artificial Sequence
  Description of Artificial Sequence: Synthetic oligonucleotide
acaccacgaagcauaguuc

SEQ ID NO: 2814916 - RNA, 19 nt, Artificial Sequence
  Description of Artificial Sequence: Synthetic oligonucleotide
aggccaaaucuugaagaag

SEQ ID NO: 2814917 - RNA, 19 nt, Artificial Sequence
  Description of Artificial Sequence: Synthetic oligonucleotide
ucgaaaggccuuucccaga

SEQ ID NO: 2814918 - RNA, 19 nt, Artificial Sequence
  Description of Artificial Sequence: Synthetic oligonucleotide
aaaucacugaaaggccaaa

SEQ ID NO: 2814919 - RNA, 19 nt, Artificial Sequence
  Description of Artificial Sequence: Synthetic oligonucleotide
caauuacucuuuuacaaau

SEQ ID NO: 2814920 - RNA, 19 nt, Artificial Sequence
  Description of Artificial Sequence: Synthetic oligonucleotide
uucuguaaguuaucaccuu

SEQ ID NO: 2814921 - RNA, 19 nt, Artificial Sequence
  Description of Artificial Sequence: Synthetic oligonucleotide
aucugucgccguuugggcu

SEQ ID NO: 2814922 - RNA, 19 nt, Artificial Sequence
  Description of Artificial Sequence: Synthetic oligonucleotide
ggccaaaucuugaagaaga

SEQ ID NO: 2814923 - RNA, 19 nt, Artificial Sequence
  Description of Artificial Sequence: Synthetic oligonucleotide
guauuaguccauaugguau

SEQ ID NO: 2814924 - RNA, 19 nt, Artificial Sequence
  Description of Artificial Sequence: Synthetic oligonucleotide
cuuccaaaccaauuacucu

SEQ ID NO: 2814925 - RNA, 19 nt, Artificial Sequence
  Description of Artificial Sequence: Synthetic oligonucleotide
uauaggcccguaguaccug

SEQ ID NO: 2814926 - RNA, 19 nt, Artificial Sequence
  Description of Artificial Sequence: Synthetic oligonucleotide
agaacaccacgaagcauag

SEQ ID NO: 2814927 - RNA, 19 nt, Artificial Sequence
  Description of Artificial Sequence: Synthetic oligonucleotide
ccaacguauucaaaagcac

SEQ ID NO: 2814928 - RNA, 19 nt, Artificial Sequence
  Description of Artificial Sequence: Synthetic oligonucleotide
aucugauguaccaguguug

SEQ ID NO: 2814929 - RNA, 19 nt, Artificial Sequence
  Description of Artificial Sequence: Synthetic oligonucleotide
aagcauaguucgacguuga

SEQ ID NO: 2814930 - RNA, 19 nt, Artificial Sequence
  Description of Artificial Sequence: Synthetic oligonucleotide
augguccagaacacauuac

SEQ ID NO: 2814931 - RNA, 19 nt, Artificial Sequence
  Description of Artificial Sequence: Synthetic oligonucleotide
cugauguaccaguguugag

SEQ ID NO: 2814932 - RNA, 19 nt, Artificial Sequence
  Description of Artificial Sequence: Synthetic oligonucleotide
auaguucgacguugacucu

SEQ ID NO: 2814933 - RNA, 19 nt, Artificial Sequence
  Description of Artificial Sequence: Synthetic oligonucleotide
cugaaugguauagccagca

SEQ ID NO: 2814934 - RNA, 19 nt, Artificial Sequence
  Description of Artificial Sequence: Synthetic oligonucleotide
gacguugacucugccacca

SEQ ID NO: 2814935 - RNA, 19 nt, Artificial Sequence
  Description of Artificial Sequence: Synthetic oligonucleotide
uccucguauuaguccauau

SEQ ID NO: 2814936 - RNA, 19 nt, Artificial Sequence
  Description of Artificial Sequence: Synthetic oligonucleotide
ggcugucacgaagaaaucc

SEQ ID NO: 2814937 - RNA, 19 nt, Artificial Sequence
  Description of Artificial Sequence: Synthetic oligonucleotide
agaaaaucugucgccguuu

SEQ ID NO: 2814938 - RNA, 19 nt, Artificial Sequence
  Description of Artificial Sequence: Synthetic oligonucleotide
ucgccguuugggcugucac

SEQ ID NO: 2814939 - RNA, 19 nt, Artificial Sequence
  Description of Artificial Sequence: Synthetic oligonucleotide
caauaccaccaacguauuc

SEQ ID NO: 2814940 - RNA, 19 nt, Artificial Sequence
  Description of Artificial Sequence: Synthetic oligonucleotide
cuuuuacaaauauuugauu

SEQ ID NO: 2814941 - RNA, 19 nt, Artificial Sequence
  Description of Artificial Sequence: Synthetic oligonucleotide
cuugaagaagauccguccu

SEQ ID NO: 2814942 - RNA, 19 nt, Artificial Sequence
  Description of Artificial Sequence: Synthetic oligonucleotide
aggcccguaguaccuggag

SEQ ID NO: 2814943 - RNA, 19 nt, Artificial Sequence
  Description of Artificial Sequence: Synthetic oligonucleotide
acccauacugaaugguaua

SEQ ID NO: 2814944 - RNA, 19 nt, Artificial Sequence
  Description of Artificial Sequence: Synthetic oligonucleotide
aagauccguccucguauua

SEQ ID NO: 2814945 - RNA, 19 nt, Artificial Sequence
  Description of Artificial Sequence: Synthetic oligonucleotide
ccuucuaaccaaacaugac

SEQ ID NO: 2814946 - RNA, 19 nt, Artificial Sequence
  Description of Artificial Sequence: Synthetic oligonucleotide
guccagaacacauuacaau

SEQ ID NO: 2814947 - RNA, 19 nt, Artificial Sequence
  Description of Artificial Sequence: Synthetic oligonucleotide
acguugacucugccaccac

SEQ ID NO: 2814948 - RNA, 19 nt, Artificial Sequence
  Description of Artificial Sequence: Synthetic oligonucleotide
gauccguccucguauuagu

SEQ ID NO: 2814949 - RNA, 19 nt, Artificial Sequence
  Description of Artificial Sequence: Synthetic oligonucleotide
acguauucaaaagcacaau

SEQ ID NO: 2814950 - RNA, 19 nt, Artificial Sequence
  Description of Artificial Sequence: Synthetic oligonucleotide
gcugucacgaagaaaucca

SEQ ID NO: 2814951 - RNA, 19 nt, Artificial Sequence
  Description of Artificial Sequence: Synthetic oligonucleotide
uugaggauuuugucuccuu

SEQ ID NO: 2814952 - RNA, 19 nt, Artificial Sequence
  Description of Artificial Sequence: Synthetic oligonucleotide
gaaaggccuuucccagaac

SEQ ID NO: 2814953 - RNA, 19 nt, Artificial Sequence
  Description of Artificial Sequence: Synthetic oligonucleotide
gucaccucuuuggauacca

SEQ ID NO: 2814954 - RNA, 19 nt, Artificial Sequence
  Description of Artificial Sequence: Synthetic oligonucleotide
ccucguauuaguccauaug

SEQ ID NO: 2814955 - RNA, 19 nt, Artificial Sequence
  Description of Artificial Sequence: Synthetic oligonucleotide
auccguccucguauuaguc

SEQ ID NO: 2814956 - RNA, 19 nt, Artificial Sequence
  Description of Artificial Sequence: Synthetic oligonucleotide
guuggcacauaacuacggu

SEQ ID NO: 2814957 - RNA, 19 nt, Artificial Sequence
  Description of Artificial Sequence: Synthetic oligonucleotide
acaaugugcuauacaccca

SEQ ID NO: 2814958 - RNA, 19 nt, Artificial Sequence
  Description of Artificial Sequence: Synthetic oligonucleotide
caaagacaauaucugaauu

SEQ ID NO: 2814959 - RNA, 19 nt, Artificial Sequence
  Description of Artificial Sequence: Synthetic oligonucleotide
ccuggagucuguagaauuc

SEQ ID NO: 2814960 - RNA, 19 nt, Artificial Sequence
  Description of Artificial Sequence: Synthetic oligonucleotide
gcacaaugugcuauacacc

SEQ ID NO: 2814961 - RNA, 19 nt, Artificial Sequence
  Description of Artificial Sequence: Synthetic oligonucleotide
uaccaccaacguauucaaa

SEQ ID NO: 2814962 - RNA, 19 nt, Artificial Sequence
  Description of Artificial Sequence: Synthetic oligonucleotide
gcccguaguaccuggaguc

SEQ ID NO: 2814963 - RNA, 19 nt, Artificial Sequence
  Description of Artificial Sequence: Synthetic oligonucleotide
ucaccucuuuggauaccau

SEQ ID NO: 2814964 - RNA, 19 nt, Artificial Sequence
  Description of Artificial Sequence: Synthetic oligonucleotide
cugucacgaagaaauccaa

SEQ ID NO: 2814965 - RNA, 19 nt, Artificial Sequence
  Description of Artificial Sequence: Synthetic oligonucleotide
uaggcccguaguaccugga

SEQ ID NO: 2814966 - RNA, 19 nt, Artificial Sequence
  Description of Artificial Sequence: Synthetic oligonucleotide
caaugugcuauacacccau

SEQ ID NO: 2814967 - RNA, 19 nt, Artificial Sequence
  Description of Artificial Sequence: Synthetic oligonucleotide
gcuauacacccauacugaa

SEQ ID NO: 2814968 - RNA, 19 nt, Artificial Sequence
  Description of Artificial Sequence: Synthetic oligonucleotide
gccagcaagucgaaaggcc

SEQ ID NO: 2814969 - RNA, 19 nt, Artificial Sequence
  Description of Artificial Sequence: Synthetic oligonucleotide
aaugugcuauacacccaua

SEQ ID NO: 2814970 - RNA, 19 nt, Artificial Sequence
  Description of Artificial Sequence: Synthetic oligonucleotide
cuauacacccauacugaau

SEQ ID NO: 2814971 - RNA, 19 nt, Artificial Sequence
  Description of Artificial Sequence: Synthetic oligonucleotide
ugucaccucuuuggauacc

SEQ ID NO: 2814972 - RNA, 19 nt, Artificial Sequence
  Description of Artificial Sequence: Synthetic oligonucleotide
caauuacaaugucaccucu

SEQ ID NO: 2814973 - RNA, 19 nt, Artificial Sequence
  Description of Artificial Sequence: Synthetic oligonucleotide
caaaagcacaaugugcuau

SEQ ID NO: 2814974 - RNA, 19 nt, Artificial Sequence
  Description of Artificial Sequence: Synthetic oligonucleotide
guucgacguugacucugcc

SEQ ID NO: 2814975 - RNA, 19 nt, Artificial Sequence
  Description of Artificial Sequence: Synthetic oligonucleotide
gaagaagauccguccucgu

SEQ ID NO: 2814976 - RNA, 19 nt, Artificial Sequence
  Description of Artificial Sequence: Synthetic oligonucleotide
agcaagucgaaaggccuuu

SEQ ID NO: 2814977 - RNA, 19 nt, Artificial Sequence
  Description of Artificial Sequence: Synthetic oligonucleotide
gguccagaacacauuacaa

SEQ ID NO: 2814978 - RNA, 19 nt, Artificial Sequence
  Description of Artificial Sequence: Synthetic oligonucleotide
gaagauccguccucguauu

SEQ ID NO: 2814979 - RNA, 19 nt, Artificial Sequence
  Description of Artificial Sequence: Synthetic oligonucleotide
caccucuuuggauaccaua

SEQ ID NO: 2814980 - RNA, 19 nt, Artificial Sequence
  Description of Artificial Sequence: Synthetic oligonucleotide
accacgaagcauaguucga

SEQ ID NO: 2814981 - RNA, 19 nt, Artificial Sequence
  Description of Artificial Sequence: Synthetic oligonucleotide
gcuaaucaucagaaaaucu

SEQ ID NO: 2814982 - RNA, 19 nt, Artificial Sequence
  Description of Artificial Sequence: Synthetic oligonucleotide
cguauuaguccauauggua

SEQ ID NO: 2814983 - RNA, 19 nt, Artificial Sequence
  Description of Artificial Sequence: Synthetic oligonucleotide
auguaccaguguugaggau

SEQ ID NO: 2814984 - RNA, 19 nt, Artificial Sequence
  Description of Artificial Sequence: Synthetic oligonucleotide
cacccauacugaaugguau

SEQ ID NO: 2814985 - RNA, 19 nt, Artificial Sequence
  Description of Artificial Sequence: Synthetic oligonucleotide
ggccuuucccagaacacca

SEQ ID NO: 2814986 - RNA, 19 nt, Artificial Sequence
  Description of Artificial Sequence: Synthetic oligonucleotide
ccacgaagcauaguucgac

SEQ ID NO: 2814987 - RNA, 19 nt, Artificial Sequence
  Description of Artificial Sequence: Synthetic oligonucleotide
aaaugucggcuaagauuuu

SEQ ID NO: 2814988 - RNA, 19 nt, Artificial Sequence
  Description of Artificial Sequence: Synthetic oligonucleotide
gccguuugggcugucacga

SEQ ID NO: 2814989 - RNA, 19 nt, Artificial Sequence
  Description of Artificial Sequence: Synthetic oligonucleotide
acaauaccaccaacguauu

SEQ ID NO: 2814990 - RNA, 19 nt, Artificial Sequence
  Description of Artificial Sequence: Synthetic oligonucleotide
uuggaucacaugggcuuuu

SEQ ID NO: 2814991 - RNA, 19 nt, Artificial Sequence
  Description of Artificial Sequence: Synthetic oligonucleotide
caaugucaccucuuuggau

SEQ ID NO: 2814992 - RNA, 19 nt, Artificial Sequence
  Description of Artificial Sequence: Synthetic oligonucleotide
guauaggcccguaguaccu

SEQ ID NO: 2814993 - RNA, 19 nt, Artificial Sequence
  Description of Artificial Sequence: Synthetic oligonucleotide
cguuugggcugucacgaag

SEQ ID NO: 2814994 - RNA, 19 nt, Artificial Sequence
  Description of Artificial Sequence: Synthetic oligonucleotide
ccguccucguauuagucca

SEQ ID NO: 2814995 - RNA, 19 nt, Artificial Sequence
  Description of Artificial Sequence: Synthetic oligonucleotide
guugaggauuuugucuccu

SEQ ID NO: 2814996 - RNA, 19 nt, Artificial Sequence
  Description of Artificial Sequence: Synthetic oligonucleotide
gcuugcuaaucaucagaaa

SEQ ID NO: 2814997 - RNA, 19 nt, Artificial Sequence
  Description of Artificial Sequence: Synthetic oligonucleotide
gcauaguucgacguugacu

SEQ ID NO: 2814998 - RNA, 19 nt, Artificial Sequence
  Description of Artificial Sequence: Synthetic oligonucleotide
acaugaccuguuggcacau

SEQ ID NO: 2814999 - RNA, 19 nt, Artificial Sequence
  Description of Artificial Sequence: Synthetic oligonucleotide
ggagucuguagaauucugu

SEQ ID NO: 2815000 - RNA, 19 nt, Artificial Sequence
  Description of Artificial Sequence: Synthetic oligonucleotide
cuggagucuguagaauucu

SEQ ID NO: 2815001 - RNA, 19 nt, Artificial Sequence
  Description of Artificial Sequence: Synthetic oligonucleotide
cccagaacaccacgaagca

SEQ ID NO: 2815002 - RNA, 19 nt, Artificial Sequence
  Description of Artificial Sequence: Synthetic oligonucleotide
gauuuucugcaaagacaau

SEQ ID NO: 2815003 - RNA, 19 nt, Artificial Sequence
  Description of Artificial Sequence: Synthetic oligonucleotide
cagaaaaucugucgccguu

SEQ ID NO: 2815004 - RNA, 19 nt, Artificial Sequence
  Description of Artificial Sequence: Synthetic oligonucleotide
ccagcaagucgaaaggccu

SEQ ID NO: 2815005 - RNA, 19 nt, Artificial Sequence
  Description of Artificial Sequence: Synthetic oligonucleotide
guaccaguguugaggauuu

SEQ ID NO: 2815006 - RNA, 19 nt, Artificial Sequence
  Description of Artificial Sequence: Synthetic oligonucleotide
guauagccagcaagucgaa

SEQ ID NO: 2815007 - RNA, 19 nt, Artificial Sequence
  Description of Artificial Sequence: Synthetic oligonucleotide
cgccguuugggcugucacg

SEQ ID NO: 2815008 - RNA, 19 nt, Artificial Sequence
  Description of Artificial Sequence: Synthetic oligonucleotide
guaguaccuggagucugua

SEQ ID NO: 2815009 - RNA, 19 nt, Artificial Sequence
  Description of Artificial Sequence: Synthetic oligonucleotide
cauaugguauaggcccgua

SEQ ID NO: 2815010 - RNA, 19 nt, Artificial Sequence
  Description of Artificial Sequence: Synthetic oligonucleotide
ccucuuuggauaccauaaa

SEQ ID NO: 2815011 - RNA, 19 nt, Artificial Sequence
  Description of Artificial Sequence: Synthetic oligonucleotide
ccguaguaccuggagucug

SEQ ID NO: 2815012 - RNA, 19 nt, Artificial Sequence
  Description of Artificial Sequence: Synthetic oligonucleotide
ggcccguaguaccuggagu

SEQ ID NO: 2815013 - RNA, 19 nt, Artificial Sequence
  Description of Artificial Sequence: Synthetic oligonucleotide
ggcacauaacuacgguuuu

SEQ ID NO: 2815014 - RNA, 19 nt, Artificial Sequence
  Description of Artificial Sequence: Synthetic oligonucleotide
cagcaagucgaaaggccuu

SEQ ID NO: 2815015 - RNA, 19 nt, Artificial Sequence
  Description of Artificial Sequence: Synthetic oligonucleotide
guccucguauuaguccaua

SEQ ID NO: 2815016 - RNA, 19 nt, Artificial Sequence
  Description of Artificial Sequence: Synthetic oligonucleotide
cgacguugacucugccacc

SEQ ID NO: 2815017 - RNA, 19 nt, Artificial Sequence
  Description of Artificial Sequence: Synthetic oligonucleotide
gccuuucccagaacaccac

SEQ ID NO: 2815018 - RNA, 19 nt, Artificial Sequence
  Description of Artificial Sequence: Synthetic oligonucleotide
cgaaaggccuuucccagaa

SEQ ID NO: 2815019 - RNA, 19 nt, Artificial Sequence
  Description of Artificial Sequence: Synthetic oligonucleotide
gaacaccacgaagcauagu

SEQ ID NO: 2815020 - RNA, 19 nt, Artificial Sequence
  Description of Artificial Sequence: Synthetic oligonucleotide
gucgccguuugggcuguca

SEQ ID NO: 2815021 - RNA, 19 nt, Artificial Sequence
  Description of Artificial Sequence: Synthetic oligonucleotide
uaccaguguugaggauuuu

SEQ ID NO: 2815022 - RNA, 19 nt, Artificial Sequence
  Description of Artificial Sequence: Synthetic oligonucleotide
gggcugucacgaagaaauc

SEQ ID NO: 2815023 - RNA, 19 nt, Artificial Sequence
  Description of Artificial Sequence: Synthetic oligonucleotide
ggguuccauugauggucca

SEQ ID NO: 2815024 - RNA, 19 nt, Artificial Sequence
  Description of Artificial Sequence: Synthetic oligonucleotide
cguaguaccuggagucugu

SEQ ID NO: 2815025 - RNA, 19 nt, Artificial Sequence
  Description of Artificial Sequence: Synthetic oligonucleotide
caugaccuguuggcacaua

SEQ ID NO: 2815026 - RNA, 19 nt, Artificial Sequence
  Description of Artificial Sequence: Synthetic oligonucleotide
ccaaaccaauuacucuuuu

SEQ ID NO: 2815027 - RNA, 19 nt, Artificial Sequence
  Description of Artificial Sequence: Synthetic oligonucleotide
cgaagcauaguucgacguu

SEQ ID NO: 2815028 - RNA, 19 nt, Artificial Sequence
  Description of Artificial Sequence: Synthetic oligonucleotide
ccauaugguauaggcccgu

SEQ ID NO: 2815029 - RNA, 19 nt, Artificial Sequence
  Description of Artificial Sequence: Synthetic oligonucleotide
ugucgccguuugggcuguc

SEQ ID NO: 2815030 - RNA, 19 nt, Artificial Sequence
  Description of Artificial Sequence: Synthetic oligonucleotide
ccguuugggcugucacgaa

SEQ ID NO: 2815031 - RNA, 19 nt, Artificial Sequence
  Description of Artificial Sequence: Synthetic oligonucleotide
cugucgccguuugggcugu

SEQ ID NO: 2815032 - RNA, 19 nt, Artificial Sequence
  Description of Artificial Sequence: Synthetic oligonucleotide
cccguaguaccuggagucu

SEQ ID NO: 2815033 - RNA, 19 nt, Artificial Sequence
  Description of Artificial Sequence: Synthetic oligonucleotide
cguccucguauuaguccau

SEQ ID NO: 2815034 - RNA, 19 nt, Artificial Sequence
  Description of Artificial Sequence: Synthetic oligonucleotide
aauagguucaucugcagug

SEQ ID NO: 2815035 - RNA, 19 nt, Artificial Sequence
  Description of Artificial Sequence: Synthetic oligonucleotide
aaucuugcgguccauugcc

SEQ ID NO: 2815036 - RNA, 19 nt, Artificial Sequence
  Description of Artificial Sequence: Synthetic oligonucleotide
ugcacgaucucgaacaccg

SEQ ID NO: 2815037 - RNA, 19 nt, Artificial Sequence
  Description of Artificial Sequence: Synthetic oligonucleotide
uuccagaacaaucuugcgg

SEQ ID NO: 2815038 - RNA, 19 nt, Artificial Sequence
  Description of Artificial Sequence: Synthetic oligonucleotide
aauggaggacagcagggac

SEQ ID NO: 2815039 - RNA, 19 nt, Artificial Sequence
  Description of Artificial Sequence: Synthetic oligonucleotide
uucguggucacguagaaac

SEQ ID NO: 2815040 - RNA, 19 nt, Artificial Sequence
  Description of Artificial Sequence: Synthetic oligonucleotide
gauucgauguuccauggcc

SEQ ID NO: 2815041 - RNA, 19 nt, Artificial Sequence
  Description of Artificial Sequence: Synthetic oligonucleotide
ucacguagaaaccagcuac

SEQ ID NO: 2815042 - RNA, 19 nt, Artificial Sequence
  Description of Artificial Sequence: Synthetic oligonucleotide
gaugaguuccaauagguuc

SEQ ID NO: 2815043 - RNA, 19 nt, Artificial Sequence
  Description of Artificial Sequence: Synthetic oligonucleotide
ugagcgugguguaagacag

SEQ ID NO: 2815044 - RNA, 19 nt, Artificial Sequence
  Description of Artificial Sequence: Synthetic oligonucleotide
aguuccaauagguucaucu

SEQ ID NO: 2815045 - RNA, 19 nt, Artificial Sequence
  Description of Artificial Sequence: Synthetic oligonucleotide
uccagaacaaucuugcggu

SEQ ID NO: 2815046 - RNA, 19 nt, Artificial Sequence
  Description of Artificial Sequence: Synthetic oligonucleotide
aguuccagaacaaucuugc

SEQ ID NO: 2815047 - RNA, 19 nt, Artificial Sequence
  Description of Artificial Sequence: Synthetic oligonucleotide
uccaguuccagaacaaucu

SEQ ID NO: 2815048 - RNA, 19 nt, Artificial Sequence
  Description of Artificial Sequence: Synthetic oligonucleotide
agcacuggcaaguuguggg

SEQ ID NO: 2815049 - RNA, 19 nt, Artificial Sequence
  Description of Artificial Sequence: Synthetic oligonucleotide
uuccaauagguucaucugc

SEQ ID NO: 2815050 - RNA, 19 nt, Artificial Sequence
  Description of Artificial Sequence: Synthetic oligonucleotide
uccaauagguucaucugca

SEQ ID NO: 2815051 - RNA, 19 nt, Artificial Sequence
  Description of Artificial Sequence: Synthetic oligonucleotide
agucgcugguuguacaggc

SEQ ID NO: 2815052 - RNA, 19 nt, Artificial Sequence
  Description of Artificial Sequence: Synthetic oligonucleotide
cucaagaagccccugcacg

SEQ ID NO: 2815053 - RNA, 19 nt, Artificial Sequence
  Description of Artificial Sequence: Synthetic oligonucleotide
uccugaugaguuccaauag

SEQ ID NO: 2815054 - RNA, 19 nt, Artificial Sequence
  Description of Artificial Sequence: Synthetic oligonucleotide
cuggaucucaagaagcccc

SEQ ID NO: 2815055 - RNA, 19 nt, Artificial Sequence
  Description of Artificial Sequence: Synthetic oligonucleotide
agggccaagucgcugagcg

SEQ ID NO: 2815056 - RNA, 19 nt, Artificial Sequence
  Description of Artificial Sequence: Synthetic oligonucleotide
cacuuagucacaaggcugc

SEQ ID NO: 2815057 - RNA, 19 nt, Artificial Sequence
  Description of Artificial Sequence: Synthetic oligonucleotide
ucgguguucguucugcagc

SEQ ID NO: 2815058 - RNA, 19 nt, Artificial Sequence
  Description of Artificial Sequence: Synthetic oligonucleotide
ugcagugucagcuccugag

SEQ ID NO: 2815059 - RNA, 19 nt, Artificial Sequence
  Description of Artificial Sequence: Synthetic oligonucleotide
guuguacaggcucuucucg

SEQ ID NO: 2815060 - RNA, 19 nt, Artificial Sequence
  Description of Artificial Sequence: Synthetic oligonucleotide
uuguacaggcucuucucgg

SEQ ID NO: 2815061 - RNA, 19 nt, Artificial Sequence
  Description of Artificial Sequence: Synthetic oligonucleotide
aacaccgugccgucgagca

SEQ ID NO: 2815062 - RNA, 19 nt, Artificial Sequence
  Description of Artificial Sequence: Synthetic oligonucleotide
uuucccacuugccagcccc

SEQ ID NO: 2815063 - RNA, 19 nt, Artificial Sequence
  Description of Artificial Sequence: Synthetic oligonucleotide
uaggcaauggaggacagca

SEQ ID NO: 2815064 - RNA, 19 nt, Artificial Sequence
  Description of Artificial Sequence: Synthetic oligonucleotide
ugcaguuuccugaugaguu

SEQ ID NO: 2815065 - RNA, 19 nt, Artificial Sequence
  Description of Artificial Sequence: Synthetic oligonucleotide
uggagcacuggcaaguugu

SEQ ID NO: 2815066 - RNA, 19 nt, Artificial Sequence
  Description of Artificial Sequence: Synthetic oligonucleotide
acuggcaaguuguggggcc

SEQ ID NO: 2815067 - RNA, 19 nt, Artificial Sequence
  Description of Artificial Sequence: Synthetic oligonucleotide
uucaucugcagugucagcu

SEQ ID NO: 2815068 - RNA, 19 nt, Artificial Sequence
  Description of Artificial Sequence: Synthetic oligonucleotide
ugcugcaguuuccugauga

SEQ ID NO: 2815069 - RNA, 19 nt, Artificial Sequence
  Description of Artificial Sequence: Synthetic oligonucleotide
ucggauucgauguuccaug

SEQ ID NO: 2815070 - RNA, 19 nt, Artificial Sequence
  Description of Artificial Sequence: Synthetic oligonucleotide
ucaagaagccccugcacga

SEQ ID NO: 2815071 - RNA, 19 nt, Artificial Sequence
  Description of Artificial Sequence: Synthetic oligonucleotide
uuagucacaaggcugccuu

SEQ ID NO: 2815072 - RNA, 19 nt, Artificial Sequence
  Description of Artificial Sequence: Synthetic oligonucleotide
agcgugguguaagacaggc

SEQ ID NO: 2815073 - RNA, 19 nt, Artificial Sequence
  Description of Artificial Sequence: Synthetic oligonucleotide
acaaucuugcgguccauug

SEQ ID NO: 2815074 - RNA, 19 nt, Artificial Sequence
  Description of Artificial Sequence: Synthetic oligonucleotide
uguggggccggcaagucug

SEQ ID NO: 2815075 - RNA, 19 nt, Artificial Sequence
  Description of Artificial Sequence: Synthetic oligonucleotide
aaaccagcuaccccugccu

SEQ ID NO: 2815076 - RNA, 19 nt, Artificial Sequence
  Description of Artificial Sequence: Synthetic oligonucleotide
ugcugaguugccuggagca

SEQ ID NO: 2815077 - RNA, 19 nt, Artificial Sequence
  Description of Artificial Sequence: Synthetic oligonucleotide
aguugccuggagcacuggc

SEQ ID NO: 2815078 - RNA, 19 nt, Artificial Sequence
  Description of Artificial Sequence: Synthetic oligonucleotide
guagaaaccagcuaccccu

SEQ ID NO: 2815079 - RNA, 19 nt, Artificial Sequence
  Description of Artificial Sequence: Synthetic oligonucleotide
guuccaauagguucaucug

SEQ ID NO: 2815080 - RNA, 19 nt, Artificial Sequence
  Description of Artificial Sequence: Synthetic oligonucleotide
gaucucaagaagccccugc

SEQ ID NO: 2815081 - RNA, 19 nt, Artificial Sequence
  Description of Artificial Sequence: Synthetic oligonucleotide
ugccuuucccacuugccag

SEQ ID NO: 2815082 - RNA, 19 nt, Artificial Sequence
  Description of Artificial Sequence: Synthetic oligonucleotide
agaacaaucuugcggucca

SEQ ID NO: 2815083 - RNA, 19 nt, Artificial Sequence
  Description of Artificial Sequence: Synthetic oligonucleotide
acgaucucgaacaccgugc

SEQ ID NO: 2815084 - RNA, 19 nt, Artificial Sequence
  Description of Artificial Sequence: Synthetic oligonucleotide
ugcucugcuggucagcaac

SEQ ID NO: 2815085 - RNA, 19 nt, Artificial Sequence
  Description of Artificial Sequence: Synthetic oligonucleotide
ucagcaaccuuccggucca

SEQ ID NO: 2815086 - RNA, 19 nt, Artificial Sequence
  Description of Artificial Sequence: Synthetic oligonucleotide
uggucagcaaccuuccggu

SEQ ID NO: 2815087 - RNA, 19 nt, Artificial Sequence
  Description of Artificial Sequence: Synthetic oligonucleotide
ggcaauggaggacagcagg

SEQ ID NO: 2815088 - RNA, 19 nt, Artificial Sequence
  Description of Artificial Sequence: Synthetic oligonucleotide
aagucugcugggcuuccag

SEQ ID NO: 2815089 - RNA, 19 nt, Artificial Sequence
  Description of Artificial Sequence: Synthetic oligonucleotide
gaaaccagcuaccccugcc

SEQ ID NO: 2815090 - RNA, 19 nt, Artificial Sequence
  Description of Artificial Sequence: Synthetic oligonucleotide
acguagaaaccagcuaccc

SEQ ID NO: 2815091 - RNA, 19 nt, Artificial Sequence
  Description of Artificial Sequence: Synthetic oligonucleotide
agcgccagggccaagucgc

SEQ ID NO: 2815092 - RNA, 19 nt, Artificial Sequence
  Description of Artificial Sequence: Synthetic oligonucleotide
ugaggauucguggucacgu

SEQ ID NO: 2815093 - RNA, 19 nt, Artificial Sequence
  Description of Artificial Sequence: Synthetic oligonucleotide
ugguuguacaggcucuucu

SEQ ID NO: 2815094 - RNA, 19 nt, Artificial Sequence
  Description of Artificial Sequence: Synthetic oligonucleotide
agaaaccagcuaccccugc

SEQ ID NO: 2815095 - RNA, 19 nt, Artificial Sequence
  Description of Artificial Sequence: Synthetic oligonucleotide
aggauucguggucacguag

SEQ ID NO: 2815096 - RNA, 19 nt, Artificial Sequence
  Description of Artificial Sequence: Synthetic oligonucleotide
cacguagaaaccagcuacc

SEQ ID NO: 2815097 - RNA, 19 nt, Artificial Sequence
  Description of Artificial Sequence: Synthetic oligonucleotide
uugccugcugcuccucucg

SEQ ID NO: 2815098 - RNA, 19 nt, Artificial Sequence
  Description of Artificial Sequence: Synthetic oligonucleotide
caaucuugcgguccauugc

SEQ ID NO: 2815099 - RNA, 19 nt, Artificial Sequence
  Description of Artificial Sequence: Synthetic oligonucleotide
uguaagacaggcgcugcug

SEQ ID NO: 2815100 - RNA, 19 nt, Artificial Sequence
  Description of Artificial Sequence: Synthetic oligonucleotide
gucagcaaccuuccggucc

SEQ ID NO: 2815101 - RNA, 19 nt, Artificial Sequence
  Description of Artificial Sequence: Synthetic oligonucleotide
augaguuccaauagguuca

SEQ ID NO: 2815102 - RNA, 19 nt, Artificial Sequence
  Description of Artificial Sequence: Synthetic oligonucleotide
uuccaggugcuucugccug

SEQ ID NO: 2815103 - RNA, 19 nt, Artificial Sequence
  Description of Artificial Sequence: Synthetic oligonucleotide
guuccagaacaaucuugcg

SEQ ID NO: 2815104 - RNA, 19 nt, Artificial Sequence
  Description of Artificial Sequence: Synthetic oligonucleotide
aaguuguggggccggcaag

SEQ ID NO: 2815105 - RNA, 19 nt, Artificial Sequence
  Description of Artificial Sequence: Synthetic oligonucleotide
ucucaagaagccccugcac

SEQ ID NO: 2815106 - RNA, 19 nt, Artificial Sequence
  Description of Artificial Sequence: Synthetic oligonucleotide
ugaguugccuggagcacug

SEQ ID NO: 2815107 - RNA, 19 nt, Artificial Sequence
  Description of Artificial Sequence: Synthetic oligonucleotide
uccuaggcaauggaggaca

SEQ ID NO: 2815108 - RNA, 19 nt, Artificial Sequence
  Description of Artificial Sequence: Synthetic oligonucleotide
ucacaaggcugccuuuccc

SEQ ID NO: 2815109 - RNA, 19 nt, Artificial Sequence
  Description of Artificial Sequence: Synthetic oligonucleotide
aucucaagaagccccugca

SEQ ID NO: 2815110 - RNA, 19 nt, Artificial Sequence
  Description of Artificial Sequence: Synthetic oligonucleotide
uguacaggcucuucucggu

SEQ ID NO: 2815111 - RNA, 19 nt, Artificial Sequence
  Description of Artificial Sequence: Synthetic oligonucleotide
ugaugaguuccaauagguu

SEQ ID NO: 2815112 - RNA, 19 nt, Artificial Sequence
  Description of Artificial Sequence: Synthetic oligonucleotide
aagucgcugagcguggugu

SEQ ID NO: 2815113 - RNA, 19 nt, Artificial Sequence
  Description of Artificial Sequence: Synthetic oligonucleotide
ggugcuggaucucaagaag

SEQ ID NO: 2815114 - RNA, 19 nt, Artificial Sequence
  Description of Artificial Sequence: Synthetic oligonucleotide
agucugcugggcuuccagg

SEQ ID NO: 2815115 - RNA, 19 nt, Artificial Sequence
  Description of Artificial Sequence: Synthetic oligonucleotide
ugaggugcuggaucucaag

SEQ ID NO: 2815116 - RNA, 19 nt, Artificial Sequence
  Description of Artificial Sequence: Synthetic oligonucleotide
aucucgaacaccgugccgu

SEQ ID NO: 2815117 - RNA, 19 nt, Artificial Sequence
  Description of Artificial Sequence: Synthetic oligonucleotide
ccauccuaggcaauggagg

SEQ ID NO: 2815118 - RNA, 19 nt, Artificial Sequence
  Description of Artificial Sequence: Synthetic oligonucleotide
caguuccagaacaaucuug

SEQ ID NO: 2815119 - RNA, 19 nt, Artificial Sequence
  Description of Artificial Sequence: Synthetic oligonucleotide
uagaaaccagcuaccccug

SEQ ID NO: 2815120 - RNA, 19 nt, Artificial Sequence
  Description of Artificial Sequence: Synthetic oligonucleotide
uggucacguagaaaccagc

SEQ ID NO: 2815121 - RNA, 19 nt, Artificial Sequence
  Description of Artificial Sequence: Synthetic oligonucleotide
ucgaacaccgugccgucga

SEQ ID NO: 2815122 - RNA, 19 nt, Artificial Sequence
  Description of Artificial Sequence: Synthetic oligonucleotide
agcuaccccugccuucucc

SEQ ID NO: 2815123 - RNA, 19 nt, Artificial Sequence
  Description of Artificial Sequence: Synthetic oligonucleotide
uguucguucugcagccgca

SEQ ID NO: 2815124 - RNA, 19 nt, Artificial Sequence
  Description of Artificial Sequence: Synthetic oligonucleotide
ugcuggucagcaaccuucc

SEQ ID NO: 2815125 - RNA, 19 nt, Artificial Sequence
  Description of Artificial Sequence: Synthetic oligonucleotide
cuugcgguccauugccugc

SEQ ID NO: 2815126 - RNA, 19 nt, Artificial Sequence
  Description of Artificial Sequence: Synthetic oligonucleotide
gaucucgaacaccgugccg

SEQ ID NO: 2815127 - RNA, 19 nt, Artificial Sequence
  Description of Artificial Sequence: Synthetic oligonucleotide
uggaucucaagaagccccu

SEQ ID NO: 2815128 - RNA, 19 nt, Artificial Sequence
  Description of Artificial Sequence: Synthetic oligonucleotide
cucucggauucgauguucc

SEQ ID NO: 2815129 - RNA, 19 nt, Artificial Sequence
  Description of Artificial Sequence: Synthetic oligonucleotide
auguuccauggccuccagc

SEQ ID NO: 2815130 - RNA, 19 nt, Artificial Sequence
  Description of Artificial Sequence: Synthetic oligonucleotide
ucuugcgguccauugccug

SEQ ID NO: 2815131 - RNA, 19 nt, Artificial Sequence
  Description of Artificial Sequence: Synthetic oligonucleotide
ucgagcagcgccagggcca

SEQ ID NO: 2815132 - RNA, 19 nt, Artificial Sequence
  Description of Artificial Sequence: Synthetic oligonucleotide
ucguggucacguagaaacc

SEQ ID NO: 2815133 - RNA, 19 nt, Artificial Sequence
  Description of Artificial Sequence: Synthetic oligonucleotide
agucacaaggcugccuuuc

SEQ ID NO: 2815134 - RNA, 19 nt, Artificial Sequence
  Description of Artificial Sequence: Synthetic oligonucleotide
cagaacaaucuugcggucc

SEQ ID NO: 2815135 - RNA, 19 nt, Artificial Sequence
  Description of Artificial Sequence: Synthetic oligonucleotide
ucuccagugugcucugcug

SEQ ID NO: 2815136 - RNA, 19 nt, Artificial Sequence
  Description of Artificial Sequence: Synthetic oligonucleotide
uuuccugaugaguuccaau

SEQ ID NO: 2815137 - RNA, 19 nt, Artificial Sequence
  Description of Artificial Sequence: Synthetic oligonucleotide
gaggugcuggaucucaaga

SEQ ID NO: 2815138 - RNA, 19 nt, Artificial Sequence
  Description of Artificial Sequence: Synthetic oligonucleotide
cgugguguaagacaggcgc

SEQ ID NO: 2815139 - RNA, 19 nt, Artificial Sequence
  Description of Artificial Sequence: Synthetic oligonucleotide
caucugcagugucagcucc

SEQ ID NO: 2815140 - RNA, 19 nt, Artificial Sequence
  Description of Artificial Sequence: Synthetic oligonucleotide
ugguguaagacaggcgcug

SEQ ID NO: 2815141 - RNA, 19 nt, Artificial Sequence
  Description of Artificial Sequence: Synthetic oligonucleotide
ccugaugaguuccaauagg

SEQ ID NO: 2815142 - RNA, 19 nt, Artificial Sequence
  Description of Artificial Sequence: Synthetic oligonucleotide
acuuagucacaaggcugcc

SEQ ID NO: 2815143 - RNA, 19 nt, Artificial Sequence
  Description of Artificial Sequence: Synthetic oligonucleotide
cauccuaggcaauggagga

SEQ ID NO: 2815144 - RNA, 19 nt, Artificial Sequence
  Description of Artificial Sequence: Synthetic oligonucleotide
cacgaucucgaacaccgug

SEQ ID NO: 2815145 - RNA, 19 nt, Artificial Sequence
  Description of Artificial Sequence: Synthetic oligonucleotide
ucgcugguuguacaggcuc

SEQ ID NO: 2815146 - RNA, 19 nt, Artificial Sequence
  Description of Artificial Sequence: Synthetic oligonucleotide
caguuuccugaugaguucc

SEQ ID NO: 2815147 - RNA, 19 nt, Artificial Sequence
  Description of Artificial Sequence: Synthetic oligonucleotide
cugagagccugccugagca

SEQ ID NO: 2815148 - RNA, 19 nt, Artificial Sequence
  Description of Artificial Sequence: Synthetic oligonucleotide
uucgauguuccauggccuc

SEQ ID NO: 2815149 - RNA, 19 nt, Artificial Sequence
  Description of Artificial Sequence: Synthetic oligonucleotide
cugccugagagccugccug

SEQ ID NO: 2815150 - RNA, 19 nt, Artificial Sequence
  Description of Artificial Sequence: Synthetic oligonucleotide
ucaucugcagugucagcuc

SEQ ID NO: 2815151 - RNA, 19 nt, Artificial Sequence
  Description of Artificial Sequence: Synthetic oligonucleotide
ugugcucugcuggucagca

SEQ ID NO: 2815152 - RNA, 19 nt, Artificial Sequence
  Description of Artificial Sequence: Synthetic oligonucleotide
ucguucugcagccgcaguc

SEQ ID NO: 2815153 - RNA, 19 nt, Artificial Sequence
  Description of Artificial Sequence: Synthetic oligonucleotide
accagcuaccccugccuuc

SEQ ID NO: 2815154 - RNA, 19 nt, Artificial Sequence
  Description of Artificial Sequence: Synthetic oligonucleotide
guaagacaggcgcugcuga

SEQ ID NO: 2815155 - RNA, 19 nt, Artificial Sequence
  Description of Artificial Sequence: Synthetic oligonucleotide
acaggcgcugcugaaaaga

SEQ ID NO: 2815156 - RNA, 19 nt, Artificial Sequence
  Description of Artificial Sequence: Synthetic oligonucleotide
agugugcucugcuggucag

SEQ ID NO: 2815157 - RNA, 19 nt, Artificial Sequence
  Description of Artificial Sequence: Synthetic oligonucleotide
cugagcgugguguaagaca

SEQ ID NO: 2815158 - RNA, 19 nt, Artificial Sequence
  Description of Artificial Sequence: Synthetic oligonucleotide
aagccccugcacgaucucg

SEQ ID NO: 2815159 - RNA, 19 nt, Artificial Sequence
  Description of Artificial Sequence: Synthetic oligonucleotide
auagguucaucugcagugu

SEQ ID NO: 2815160 - RNA, 19 nt, Artificial Sequence
  Description of Artificial Sequence: Synthetic oligonucleotide
gugcuggaucucaagaagc

SEQ ID NO: 2815161 - RNA, 19 nt, Artificial Sequence
  Description of Artificial Sequence: Synthetic oligonucleotide
gguucaucugcagugucag

SEQ ID NO: 2815162 - RNA, 19 nt, Artificial Sequence
  Description of Artificial Sequence: Synthetic oligonucleotide
cugaugaguuccaauaggu

SEQ ID NO: 2815163 - RNA, 19 nt, Artificial Sequence
  Description of Artificial Sequence: Synthetic oligonucleotide
uccugaggauucgugguca

SEQ ID NO: 2815164 - RNA, 19 nt, Artificial Sequence
  Description of Artificial Sequence: Synthetic oligonucleotide
caggcgcugcugaaaagag

SEQ ID NO: 2815165 - RNA, 19 nt, Artificial Sequence
  Description of Artificial Sequence: Synthetic oligonucleotide
uucucggugaggugcugga

SEQ ID NO: 2815166 - RNA, 19 nt, Artificial Sequence
  Description of Artificial Sequence: Synthetic oligonucleotide
cucgguguucguucugcag

SEQ ID NO: 2815167 - RNA, 19 nt, Artificial Sequence
  Description of Artificial Sequence: Synthetic oligonucleotide
agacaggcgcugcugaaaa

SEQ ID NO: 2815168 - RNA, 19 nt, Artificial Sequence
  Description of Artificial Sequence: Synthetic oligonucleotide
ugucagcuccugaggauuc

SEQ ID NO: 2815169 - RNA, 19 nt, Artificial Sequence
  Description of Artificial Sequence: Synthetic oligonucleotide
auccuaggcaauggaggac

SEQ ID NO: 2815170 - RNA, 19 nt, Artificial Sequence
  Description of Artificial Sequence: Synthetic oligonucleotide
gagcacuggcaaguugugg

SEQ ID NO: 2815171 - RNA, 19 nt, Artificial Sequence
  Description of Artificial Sequence: Synthetic oligonucleotide
gucacaaggcugccuuucc

SEQ ID NO: 2815172 - RNA, 19 nt, Artificial Sequence
  Description of Artificial Sequence: Synthetic oligonucleotide
gauucguggucacguagaa

SEQ ID NO: 2815173 - RNA, 19 nt, Artificial Sequence
  Description of Artificial Sequence: Synthetic oligonucleotide
agugucagcuccugaggau

SEQ ID NO: 2815174 - RNA, 19 nt, Artificial Sequence
  Description of Artificial Sequence: Synthetic oligonucleotide
caaccuuccgguccaguuc

SEQ ID NO: 2815175 - RNA, 19 nt, Artificial Sequence
  Description of Artificial Sequence: Synthetic oligonucleotide
auucgauguuccauggccu

SEQ ID NO: 2815176 - RNA, 19 nt, Artificial Sequence
  Description of Artificial Sequence: Synthetic oligonucleotide
guguucguucugcagccgc

SEQ ID NO: 2815177 - RNA, 19 nt, Artificial Sequence
  Description of Artificial Sequence: Synthetic oligonucleotide
ucugccugagagccugccu

SEQ ID NO: 2815178 - RNA, 19 nt, Artificial Sequence
  Description of Artificial Sequence: Synthetic oligonucleotide
cucggugaggugcuggauc

SEQ ID NO: 2815179 - RNA, 19 nt, Artificial Sequence
  Description of Artificial Sequence: Synthetic oligonucleotide
uaagacaggcgcugcugaa

SEQ ID NO: 2815180 - RNA, 19 nt, Artificial Sequence
  Description of Artificial Sequence: Synthetic oligonucleotide
cugcugaguugccuggagc

SEQ ID NO: 2815181 - RNA, 19 nt, Artificial Sequence
  Description of Artificial Sequence: Synthetic oligonucleotide
uagguucaucugcaguguc

SEQ ID NO: 2815182 - RNA, 19 nt, Artificial Sequence
  Description of Artificial Sequence: Synthetic oligonucleotide
accccugccuucuccagug

SEQ ID NO: 2815183 - RNA, 19 nt, Artificial Sequence
  Description of Artificial Sequence: Synthetic oligonucleotide
gcagugucagcuccugagg

SEQ ID NO: 2815184 - RNA, 19 nt, Artificial Sequence
  Description of Artificial Sequence: Synthetic oligonucleotide
gcaauggaggacagcaggg

SEQ ID NO: 2815185 - RNA, 19 nt, Artificial Sequence
  Description of Artificial Sequence: Synthetic oligonucleotide
ucgauguuccauggccucc

SEQ ID NO: 2815186 - RNA, 19 nt, Artificial Sequence
  Description of Artificial Sequence: Synthetic oligonucleotide
ucucggauucgauguucca

SEQ ID NO: 2815187 - RNA, 19 nt, Artificial Sequence
  Description of Artificial Sequence: Synthetic oligonucleotide
guacaggcucuucucggug

SEQ ID NO: 2815188 - RNA, 19 nt, Artificial Sequence
  Description of Artificial Sequence: Synthetic oligonucleotide
gggccggcaagucugcugg

SEQ ID NO: 2815189 - RNA, 19 nt, Artificial Sequence
  Description of Artificial Sequence: Synthetic oligonucleotide
gacaggcgcugcugaaaag

SEQ ID NO: 2815190 - RNA, 19 nt, Artificial Sequence
  Description of Artificial Sequence: Synthetic oligonucleotide
ccacuuagucacaaggcug

SEQ ID NO: 2815191 - RNA, 19 nt, Artificial Sequence
  Description of Artificial Sequence: Synthetic oligonucleotide
uccagcucgugcugcugag

SEQ ID NO: 2815192 - RNA, 19 nt, Artificial Sequence
  Description of Artificial Sequence: Synthetic oligonucleotide
ugccugcugcuccucucgg

SEQ ID NO: 2815193 - RNA, 19 nt, Artificial Sequence
  Description of Artificial Sequence: Synthetic oligonucleotide
aagacaggcgcugcugaaa

SEQ ID NO: 2815194 - RNA, 19 nt, Artificial Sequence
  Description of Artificial Sequence: Synthetic oligonucleotide
guggucacguagaaaccag

SEQ ID NO: 2815195 - RNA, 19 nt, Artificial Sequence
  Description of Artificial Sequence: Synthetic oligonucleotide
agcacucgguguucguucu

SEQ ID NO: 2815196 - RNA, 19 nt, Artificial Sequence
  Description of Artificial Sequence: Synthetic oligonucleotide
cacaaggcugccuuuccca

SEQ ID NO: 2815197 - RNA, 19 nt, Artificial Sequence
  Description of Artificial Sequence: Synthetic oligonucleotide
uuguggggccggcaagucu

SEQ ID NO: 2815198 - RNA, 19 nt, Artificial Sequence
  Description of Artificial Sequence: Synthetic oligonucleotide
gucgagcagcgccagggcc

SEQ ID NO: 2815199 - RNA, 19 nt, Artificial Sequence
  Description of Artificial Sequence: Synthetic oligonucleotide
aacaaucuugcgguccauu

SEQ ID NO: 2815200 - RNA, 19 nt, Artificial Sequence
  Description of Artificial Sequence: Synthetic oligonucleotide
ugccugagcacucgguguu

SEQ ID NO: 2815201 - RNA, 19 nt, Artificial Sequence
  Description of Artificial Sequence: Synthetic oligonucleotide
aggcgcugcugaaaagagc

SEQ ID NO: 2815202 - RNA, 19 nt, Artificial Sequence
  Description of Artificial Sequence: Synthetic oligonucleotide
ucgcugagcgugguguaag

SEQ ID NO: 2815203 - RNA, 19 nt, Artificial Sequence
  Description of Artificial Sequence: Synthetic oligonucleotide
ugccugagagccugccuga

SEQ ID NO: 2815204 - RNA, 19 nt, Artificial Sequence
  Description of Artificial Sequence: Synthetic oligonucleotide
uucguucugcagccgcagu

SEQ ID NO: 2815205 - RNA, 19 nt, Artificial Sequence
  Description of Artificial Sequence: Synthetic oligonucleotide
gcacuggcaaguugugggg

SEQ ID NO: 2815206 - RNA, 19 nt, Artificial Sequence
  Description of Artificial Sequence: Synthetic oligonucleotide
ucugcuggucagcaaccuu

SEQ ID NO: 2815207 - RNA, 19 nt, Artificial Sequence
  Description of Artificial Sequence: Synthetic oligonucleotide
caccgugccgucgagcagc

SEQ ID NO: 2815208 - RNA, 19 nt, Artificial Sequence
  Description of Artificial Sequence: Synthetic oligonucleotide
cacucgguguucguucugc

SEQ ID NO: 2815209 - RNA, 19 nt, Artificial Sequence
  Description of Artificial Sequence: Synthetic oligonucleotide
uccgguccaguuccagaac

SEQ ID NO: 2815210 - RNA, 19 nt, Artificial Sequence
  Description of Artificial Sequence: Synthetic oligonucleotide
cugccuuucccacuugcca

SEQ ID NO: 2815211 - RNA, 19 nt, Artificial Sequence
  Description of Artificial Sequence: Synthetic oligonucleotide
aguuguggggccggcaagu

SEQ ID NO: 2815212 - RNA, 19 nt, Artificial Sequence
  Description of Artificial Sequence: Synthetic oligonucleotide
uaccccugccuucuccagu

SEQ ID NO: 2815213 - RNA, 19 nt, Artificial Sequence
  Description of Artificial Sequence: Synthetic oligonucleotide
agccauccuaggcaaugga

SEQ ID NO: 2815214 - RNA, 19 nt, Artificial Sequence
  Description of Artificial Sequence: Synthetic oligonucleotide
ugccuggagcacuggcaag

SEQ ID NO: 2815215 - RNA, 19 nt, Artificial Sequence
  Description of Artificial Sequence: Synthetic oligonucleotide
agcucgugcugcugaguug

SEQ ID NO: 2815216 - RNA, 19 nt, Artificial Sequence
  Description of Artificial Sequence: Synthetic oligonucleotide
cugaggauucguggucacg

SEQ ID NO: 2815217 - RNA, 19 nt, Artificial Sequence
  Description of Artificial Sequence: Synthetic oligonucleotide
uccauggccuccagcucgu

SEQ ID NO: 2815218 - RNA, 19 nt, Artificial Sequence
  Description of Artificial Sequence: Synthetic oligonucleotide
cuggcaaguuguggggccg

SEQ ID NO: 2815219 - RNA, 19 nt, Artificial Sequence
  Description of Artificial Sequence: Synthetic oligonucleotide
guucugcagccgcagucgc

SEQ ID NO: 2815220 - RNA, 19 nt, Artificial Sequence
  Description of Artificial Sequence: Synthetic oligonucleotide
ccccacuuagucacaaggc

SEQ ID NO: 2815221 - RNA, 19 nt, Artificial Sequence
  Description of Artificial Sequence: Synthetic oligonucleotide
ugagagccugccugagcac

SEQ ID NO: 2815222 - RNA, 19 nt, Artificial Sequence
  Description of Artificial Sequence: Synthetic oligonucleotide
gcagucgcugguuguacag

SEQ ID NO: 2815223 - RNA, 19 nt, Artificial Sequence
  Description of Artificial Sequence: Synthetic oligonucleotide
cuccugaggauucgugguc

SEQ ID NO: 2815224 - RNA, 19 nt, Artificial Sequence
  Description of Artificial Sequence: Synthetic oligonucleotide
gucacguagaaaccagcua

SEQ ID NO: 2815225 - RNA, 19 nt, Artificial Sequence
  Description of Artificial Sequence: Synthetic oligonucleotide
guucaucugcagugucagc

SEQ ID NO: 2815226 - RNA, 19 nt, Artificial Sequence
  Description of Artificial Sequence: Synthetic oligonucleotide
cagugucagcuccugagga

SEQ ID NO: 2815227 - RNA, 19 nt, Artificial Sequence
  Description of Artificial Sequence: Synthetic oligonucleotide
ggccaagucgcugagcgug

SEQ ID NO: 2815228 - RNA, 19 nt, Artificial Sequence
  Description of Artificial Sequence: Synthetic oligonucleotide
guugccuggagcacuggca

SEQ ID NO: 2815229 - RNA, 19 nt, Artificial Sequence
  Description of Artificial Sequence: Synthetic oligonucleotide
gcugcaguuuccugaugag

SEQ ID NO: 2815230 - RNA, 19 nt, Artificial Sequence
  Description of Artificial Sequence: Synthetic oligonucleotide
cacuggcaaguuguggggc

SEQ ID NO: 2815231 - RNA, 19 nt, Artificial Sequence
  Description of Artificial Sequence: Synthetic oligonucleotide
ggauucgauguuccauggc

SEQ ID NO: 2815232 - RNA, 19 nt, Artificial Sequence
  Description of Artificial Sequence: Synthetic oligonucleotide
ccugccuucuccagugugc

SEQ ID NO: 2815233 - RNA, 19 nt, Artificial Sequence
  Description of Artificial Sequence: Synthetic oligonucleotide
agguucaucugcaguguca

SEQ ID NO: 2815234 - RNA, 19 nt, Artificial Sequence
  Description of Artificial Sequence: Synthetic oligonucleotide
uggcaaguuguggggccgg

SEQ ID NO: 2815235 - RNA, 19 nt, Artificial Sequence
  Description of Artificial Sequence: Synthetic oligonucleotide
gcuccucucggauucgaug

SEQ ID NO: 2815236 - RNA, 19 nt, Artificial Sequence
  Description of Artificial Sequence: Synthetic oligonucleotide
cuaggcaauggaggacagc

SEQ ID NO: 2815237 - RNA, 19 nt, Artificial Sequence
  Description of Artificial Sequence: Synthetic oligonucleotide
cagucgcugguuguacagg

SEQ ID NO: 2815238 - RNA, 19 nt, Artificial Sequence
  Description of Artificial Sequence: Synthetic oligonucleotide
acuugccagccccucugcu

SEQ ID NO: 2815239 - RNA, 19 nt, Artificial Sequence
  Description of Artificial Sequence: Synthetic oligonucleotide
caauagguucaucugcagu

SEQ ID NO: 2815240 - RNA, 19 nt, Artificial Sequence
  Description of Artificial Sequence: Synthetic oligonucleotide
gcucgugcugcugaguugc

SEQ ID NO: 2815241 - RNA, 19 nt, Artificial Sequence
  Description of Artificial Sequence: Synthetic oligonucleotide
ucucgaacaccgugccguc

SEQ ID NO: 2815242 - RNA, 19 nt, Artificial Sequence
  Description of Artificial Sequence: Synthetic oligonucleotide
cuccucucggauucgaugu

SEQ ID NO: 2815243 - RNA, 19 nt, Artificial Sequence
  Description of Artificial Sequence: Synthetic oligonucleotide
acucgguguucguucugca

SEQ ID NO: 2815244 - RNA, 19 nt, Artificial Sequence
  Description of Artificial Sequence: Synthetic oligonucleotide
uucugccugagagccugcc

SEQ ID NO: 2815245 - RNA, 19 nt, Artificial Sequence
  Description of Artificial Sequence: Synthetic oligonucleotide
ugaguuccaauagguucau

SEQ ID NO: 2815246 - RNA, 19 nt, Artificial Sequence
  Description of Artificial Sequence: Synthetic oligonucleotide
cuaccccugccuucuccag

SEQ ID NO: 2815247 - RNA, 19 nt, Artificial Sequence
  Description of Artificial Sequence: Synthetic oligonucleotide
gagccugccugagcacucg

SEQ ID NO: 2815248 - RNA, 19 nt, Artificial Sequence
  Description of Artificial Sequence: Synthetic oligonucleotide
cccugcacgaucucgaaca

SEQ ID NO: 2815249 - RNA, 19 nt, Artificial Sequence
  Description of Artificial Sequence: Synthetic oligonucleotide
caaguuguggggccggcaa

SEQ ID NO: 2815250 - RNA, 19 nt, Artificial Sequence
  Description of Artificial Sequence: Synthetic oligonucleotide
cguagaaaccagcuacccc

SEQ ID NO: 2815251 - RNA, 19 nt, Artificial Sequence
  Description of Artificial Sequence: Synthetic oligonucleotide
cuuucccacuugccagccc

SEQ ID NO: 2815252 - RNA, 19 nt, Artificial Sequence
  Description of Artificial Sequence: Synthetic oligonucleotide
agagccugccugagcacuc

SEQ ID NO: 2815253 - RNA, 19 nt, Artificial Sequence
  Description of Artificial Sequence: Synthetic oligonucleotide
cuggagcacuggcaaguug

SEQ ID NO: 2815254 - RNA, 19 nt, Artificial Sequence
  Description of Artificial Sequence: Synthetic oligonucleotide
cagcuccugaggauucgug

SEQ ID NO: 2815255 - RNA, 19 nt, Artificial Sequence
  Description of Artificial Sequence: Synthetic oligonucleotide
guuccauggccuccagcuc

SEQ ID NO: 2815256 - RNA, 19 nt, Artificial Sequence
  Description of Artificial Sequence: Synthetic oligonucleotide
cuuccgguccaguuccaga

SEQ ID NO: 2815257 - RNA, 19 nt, Artificial Sequence
  Description of Artificial Sequence: Synthetic oligonucleotide
gccauccuaggcaauggag

SEQ ID NO: 2815258 - RNA, 19 nt, Artificial Sequence
  Description of Artificial Sequence: Synthetic oligonucleotide
gaacaccgugccgucgagc

SEQ ID NO: 2815259 - RNA, 19 nt, Artificial Sequence
  Description of Artificial Sequence: Synthetic oligonucleotide
caauggaggacagcaggga

SEQ ID NO: 2815260 - RNA, 19 nt, Artificial Sequence
  Description of Artificial Sequence: Synthetic oligonucleotide
agccugccugagcacucgg

SEQ ID NO: 2815261 - RNA, 19 nt, Artificial Sequence
  Description of Artificial Sequence: Synthetic oligonucleotide
gagcgugguguaagacagg

SEQ ID NO: 2815262 - RNA, 19 nt, Artificial Sequence
  Description of Artificial Sequence: Synthetic oligonucleotide
cucgaacaccgugccgucg

SEQ ID NO: 2815263 - RNA, 19 nt, Artificial Sequence
  Description of Artificial Sequence: Synthetic oligonucleotide
gcuucugccugagagccug

SEQ ID NO: 2815264 - RNA, 19 nt, Artificial Sequence
  Description of Artificial Sequence: Synthetic oligonucleotide
uucccacuugccagccccu

SEQ ID NO: 2815265 - RNA, 19 nt, Artificial Sequence
  Description of Artificial Sequence: Synthetic oligonucleotide
gcaguuuccugaugaguuc

SEQ ID NO: 2815266 - RNA, 19 nt, Artificial Sequence
  Description of Artificial Sequence: Synthetic oligonucleotide
uugcgguccauugccugcu

SEQ ID NO: 2815267 - RNA, 19 nt, Artificial Sequence
  Description of Artificial Sequence: Synthetic oligonucleotide
acaccgugccgucgagcag

SEQ ID NO: 2815268 - RNA, 19 nt, Artificial Sequence
  Description of Artificial Sequence: Synthetic oligonucleotide
gcuggaucucaagaagccc

SEQ ID NO: 2815269 - RNA, 19 nt, Artificial Sequence
  Description of Artificial Sequence: Synthetic oligonucleotide
aggcaauggaggacagcag

SEQ ID NO: 2815270 - RNA, 19 nt, Artificial Sequence
  Description of Artificial Sequence: Synthetic oligonucleotide
ugcuccucucggauucgau

SEQ ID NO: 2815271 - RNA, 19 nt, Artificial Sequence
  Description of Artificial Sequence: Synthetic oligonucleotide
cagugugcucugcugguca

SEQ ID NO: 2815272 - RNA, 19 nt, Artificial Sequence
  Description of Artificial Sequence: Synthetic oligonucleotide
cugcacgaucucgaacacc

SEQ ID NO: 2815273 - RNA, 19 nt, Artificial Sequence
  Description of Artificial Sequence: Synthetic oligonucleotide
gguguaagacaggcgcugc

SEQ ID NO: 2815274 - RNA, 19 nt, Artificial Sequence
  Description of Artificial Sequence: Synthetic oligonucleotide
uccucucggauucgauguu

SEQ ID NO: 2815275 - RNA, 19 nt, Artificial Sequence
  Description of Artificial Sequence: Synthetic oligonucleotide
caagucgcugagcguggug

SEQ ID NO: 2815276 - RNA, 19 nt, Artificial Sequence
  Description of Artificial Sequence: Synthetic oligonucleotide
ggcgcugcugaaaagagcu

SEQ ID NO: 2815277 - RNA, 19 nt, Artificial Sequence
  Description of Artificial Sequence: Synthetic oligonucleotide
ugcgguccauugccugcug

SEQ ID NO: 2815278 - RNA, 19 nt, Artificial Sequence
  Description of Artificial Sequence: Synthetic oligonucleotide
cugggcuuccaggugcuuc

SEQ ID NO: 2815279 - RNA, 19 nt, Artificial Sequence
  Description of Artificial Sequence: Synthetic oligonucleotide
gaggauucguggucacgua

SEQ ID NO: 2815280 - RNA, 19 nt, Artificial Sequence
  Description of Artificial Sequence: Synthetic oligonucleotide
ggauucguggucacguaga

SEQ ID NO: 2815281 - RNA, 19 nt, Artificial Sequence
  Description of Artificial Sequence: Synthetic oligonucleotide
uagucacaaggcugccuuu

SEQ ID NO: 2815282 - RNA, 19 nt, Artificial Sequence
  Description of Artificial Sequence: Synthetic oligonucleotide
cgcugcugaaaagagcugg

SEQ ID NO: 2815283 - RNA, 19 nt, Artificial Sequence
  Description of Artificial Sequence: Synthetic oligonucleotide
gccuuucccacuugccagc

SEQ ID NO: 2815284 - RNA, 19 nt, Artificial Sequence
  Description of Artificial Sequence: Synthetic oligonucleotide
ccugccugagcacucggug

SEQ ID NO: 2815285 - RNA, 19 nt, Artificial Sequence
  Description of Artificial Sequence: Synthetic oligonucleotide
auucguggucacguagaaa

SEQ ID NO: 2815286 - RNA, 19 nt, Artificial Sequence
  Description of Artificial Sequence: Synthetic oligonucleotide
ucgugcugcugaguugccu

SEQ ID NO: 2815287 - RNA, 19 nt, Artificial Sequence
  Description of Artificial Sequence: Synthetic oligonucleotide
cggauucgauguuccaugg

SEQ ID NO: 2815288 - RNA, 19 nt, Artificial Sequence
  Description of Artificial Sequence: Synthetic oligonucleotide
ucuucucggugaggugcug

SEQ ID NO: 2815289 - RNA, 19 nt, Artificial Sequence
  Description of Artificial Sequence: Synthetic oligonucleotide
cugcagccgcagucgcugg

SEQ ID NO: 2815290 - RNA, 19 nt, Artificial Sequence
  Description of Artificial Sequence: Synthetic oligonucleotide
cucgugcugcugaguugcc

SEQ ID NO: 2815291 - RNA, 19 nt, Artificial Sequence
  Description of Artificial Sequence: Synthetic oligonucleotide
gcuggucagcaaccuuccg

SEQ ID NO: 2815292 - RNA, 19 nt, Artificial Sequence
  Description of Artificial Sequence: Synthetic oligonucleotide
agucgcugagcguggugua

SEQ ID NO: 2815293 - RNA, 19 nt, Artificial Sequence
  Description of Artificial Sequence: Synthetic oligonucleotide
cgugcugcugaguugccug

SEQ ID NO: 2815294 - RNA, 19 nt, Artificial Sequence
  Description of Artificial Sequence: Synthetic oligonucleotide
agccgcagucgcugguugu

SEQ ID NO: 2815295 - RNA, 19 nt, Artificial Sequence
  Description of Artificial Sequence: Synthetic oligonucleotide
gaagccccugcacgaucuc

SEQ ID NO: 2815296 - RNA, 19 nt, Artificial Sequence
  Description of Artificial Sequence: Synthetic oligonucleotide
cgaucucgaacaccgugcc

SEQ ID NO: 2815297 - RNA, 19 nt, Artificial Sequence
  Description of Artificial Sequence: Synthetic oligonucleotide
ggugaggugcuggaucuca

SEQ ID NO: 2815298 - RNA, 19 nt, Artificial Sequence
  Description of Artificial Sequence: Synthetic oligonucleotide
cugguuguacaggcucuuc

SEQ ID NO: 2815299 - RNA, 19 nt, Artificial Sequence
  Description of Artificial Sequence: Synthetic oligonucleotide
guuuccugaugaguuccaa

SEQ ID NO: 2815300 - RNA, 19 nt, Artificial Sequence
  Description of Artificial Sequence: Synthetic oligonucleotide
ccuaggcaauggaggacag

SEQ ID NO: 2815301 - RNA, 19 nt, Artificial Sequence
  Description of Artificial Sequence: Synthetic oligonucleotide
cguucugcagccgcagucg

SEQ ID NO: 2815302 - RNA, 19 nt, Artificial Sequence
  Description of Artificial Sequence: Synthetic oligonucleotide
cgguguucguucugcagcc

SEQ ID NO: 2815303 - RNA, 19 nt, Artificial Sequence
  Description of Artificial Sequence: Synthetic oligonucleotide
gguguucguucugcagccg

SEQ ID NO: 2815304 - RNA, 19 nt, Artificial Sequence
  Description of Artificial Sequence: Synthetic oligonucleotide
gagagccugccugagcacu

SEQ ID NO: 2815305 - RNA, 19 nt, Artificial Sequence
  Description of Artificial Sequence: Synthetic oligonucleotide
ccgucgagcagcgccaggg

SEQ ID NO: 2815306 - RNA, 19 nt, Artificial Sequence
  Description of Artificial Sequence: Synthetic oligonucleotide
aucuugcgguccauugccu

SEQ ID NO: 2815307 - RNA, 19 nt, Artificial Sequence
  Description of Artificial Sequence: Synthetic oligonucleotide
agccccugcacgaucucga

SEQ ID NO: 2815308 - RNA, 19 nt, Artificial Sequence
  Description of Artificial Sequence: Synthetic oligonucleotide
ucucggugaggugcuggau

SEQ ID NO: 2815309 - RNA, 19 nt, Artificial Sequence
  Description of Artificial Sequence: Synthetic oligonucleotide
caggcucuucucggugagg

SEQ ID NO: 2815310 - RNA, 19 nt, Artificial Sequence
  Description of Artificial Sequence: Synthetic oligonucleotide
guguaagacaggcgcugcu

SEQ ID NO: 2815311 - RNA, 19 nt, Artificial Sequence
  Description of Artificial Sequence: Synthetic oligonucleotide
cagccgcagucgcugguug

SEQ ID NO: 2815312 - RNA, 19 nt, Artificial Sequence
  Description of Artificial Sequence: Synthetic oligonucleotide
ggagcacuggcaaguugug

SEQ ID NO: 2815313 - RNA, 19 nt, Artificial Sequence
  Description of Artificial Sequence: Synthetic oligonucleotide
ccugagcacucgguguucg

SEQ ID NO: 2815314 - RNA, 19 nt, Artificial Sequence
  Description of Artificial Sequence: Synthetic oligonucleotide
gccagggccaagucgcuga

SEQ ID NO: 2815315 - RNA, 19 nt, Artificial Sequence
  Description of Artificial Sequence: Synthetic oligonucleotide
gugugcucugcuggucagc

SEQ ID NO: 2815316 - RNA, 19 nt, Artificial Sequence
  Description of Artificial Sequence: Synthetic oligonucleotide
ggucacguagaaaccagcu

SEQ ID NO: 2815317 - RNA, 19 nt, Artificial Sequence
  Description of Artificial Sequence: Synthetic oligonucleotide
ccacuugccagccccucug

SEQ ID NO: 2815318 - RNA, 19 nt, Artificial Sequence
  Description of Artificial Sequence: Synthetic oligonucleotide
guuguggggccggcaaguc

SEQ ID NO: 2815319 - RNA, 19 nt, Artificial Sequence
  Description of Artificial Sequence: Synthetic oligonucleotide
gccaagucgcugagcgugg

SEQ ID NO: 2815320 - RNA, 19 nt, Artificial Sequence
  Description of Artificial Sequence: Synthetic oligonucleotide
ggcucuucucggugaggug

SEQ ID NO: 2815321 - RNA, 19 nt, Artificial Sequence
  Description of Artificial Sequence: Synthetic oligonucleotide
ggggccggcaagucugcug

SEQ ID NO: 2815322 - RNA, 19 nt, Artificial Sequence
  Description of Artificial Sequence: Synthetic oligonucleotide
cugccugagcacucggugu

SEQ ID NO: 2815323 - RNA, 19 nt, Artificial Sequence
  Description of Artificial Sequence: Synthetic oligonucleotide
ccagaacaaucuugcgguc

SEQ ID NO: 2815324 - RNA, 19 nt, Artificial Sequence
  Description of Artificial Sequence: Synthetic oligonucleotide
accgugccgucgagcagcg

SEQ ID NO: 2815325 - RNA, 19 nt, Artificial Sequence
  Description of Artificial Sequence: Synthetic oligonucleotide
cuuagucacaaggcugccu

SEQ ID NO: 2815326 - RNA, 19 nt, Artificial Sequence
  Description of Artificial Sequence: Synthetic oligonucleotide
gcgugguguaagacaggcg

SEQ ID NO: 2815327 - RNA, 19 nt, Artificial Sequence
  Description of Artificial Sequence: Synthetic oligonucleotide
gaguuccaauagguucauc

SEQ ID NO: 2815328 - RNA, 19 nt, Artificial Sequence
  Description of Artificial Sequence: Synthetic oligonucleotide
ggcaagucugcugggcuuc

SEQ ID NO: 2815329 - RNA, 19 nt, Artificial Sequence
  Description of Artificial Sequence: Synthetic oligonucleotide
agcaaccuuccgguccagu

SEQ ID NO: 2815330 - RNA, 19 nt, Artificial Sequence
  Description of Artificial Sequence: Synthetic oligonucleotide
gcugagcgugguguaagac

SEQ ID NO: 2815331 - RNA, 19 nt, Artificial Sequence
  Description of Artificial Sequence: Synthetic oligonucleotide
ggaucucaagaagccccug

SEQ ID NO: 2815332 - RNA, 19 nt, Artificial Sequence
  Description of Artificial Sequence: Synthetic oligonucleotide
gcugaguugccuggagcac

SEQ ID NO: 2815333 - RNA, 19 nt, Artificial Sequence
  Description of Artificial Sequence: Synthetic oligonucleotide
ugccagccccucugcugca

SEQ ID NO: 2815334 - RNA, 19 nt, Artificial Sequence
  Description of Artificial Sequence: Synthetic oligonucleotide
ccugaggauucguggucac

SEQ ID NO: 2815335 - RNA, 19 nt, Artificial Sequence
  Description of Artificial Sequence: Synthetic oligonucleotide
cugaguugccuggagcacu

SEQ ID NO: 2815336 - RNA, 19 nt, Artificial Sequence
  Description of Artificial Sequence: Synthetic oligonucleotide
gguccauugccugcugcuc

SEQ ID NO: 2815337 - RNA, 19 nt, Artificial Sequence
  Description of Artificial Sequence: Synthetic oligonucleotide
cucggauucgauguuccau

SEQ ID NO: 2815338 - RNA, 19 nt, Artificial Sequence
  Description of Artificial Sequence: Synthetic oligonucleotide
cccacuuagucacaaggcu

SEQ ID NO: 2815339 - RNA, 19 nt, Artificial Sequence
  Description of Artificial Sequence: Synthetic oligonucleotide
gugguguaagacaggcgcu

SEQ ID NO: 2815340 - RNA, 19 nt, Artificial Sequence
  Description of Artificial Sequence: Synthetic oligonucleotide
cucuucucggugaggugcu

SEQ ID NO: 2815341 - RNA, 19 nt, Artificial Sequence
  Description of Artificial Sequence: Synthetic oligonucleotide
ccugcacgaucucgaacac

SEQ ID NO: 2815342 - RNA, 19 nt, Artificial Sequence
  Description of Artificial Sequence: Synthetic oligonucleotide
ucccacuugccagccccuc

SEQ ID NO: 2815343 - RNA, 19 nt, Artificial Sequence
  Description of Artificial Sequence: Synthetic oligonucleotide
ggucagcaaccuuccgguc

SEQ ID NO: 2815344 - RNA, 19 nt, Artificial Sequence
  Description of Artificial Sequence: Synthetic oligonucleotide
cagggccaagucgcugagc

SEQ ID NO: 2815345 - RNA, 19 nt, Artificial Sequence
  Description of Artificial Sequence: Synthetic oligonucleotide
cugcaguuuccugaugagu

SEQ ID NO: 2815346 - RNA, 19 nt, Artificial Sequence
  Description of Artificial Sequence: Synthetic oligonucleotide
ccgguccaguuccagaaca

SEQ ID NO: 2815347 - RNA, 19 nt, Artificial Sequence
  Description of Artificial Sequence: Synthetic oligonucleotide
aggcugccuuucccacuug

SEQ ID NO: 2815348 - RNA, 19 nt, Artificial Sequence
  Description of Artificial Sequence: Synthetic oligonucleotide
caaggcugccuuucccacu

SEQ ID NO: 2815349 - RNA, 19 nt, Artificial Sequence
  Description of Artificial Sequence: Synthetic oligonucleotide
ccuuucccacuugccagcc

SEQ ID NO: 2815350 - RNA, 19 nt, Artificial Sequence
  Description of Artificial Sequence: Synthetic oligonucleotide
gugucagcuccugaggauu

SEQ ID NO: 2815351 - RNA, 19 nt, Artificial Sequence
  Description of Artificial Sequence: Synthetic oligonucleotide
gucgcugagcgugguguaa

SEQ ID NO: 2815352 - RNA, 19 nt, Artificial Sequence
  Description of Artificial Sequence: Synthetic oligonucleotide
gugaggugcuggaucucaa

SEQ ID NO: 2815353 - RNA, 19 nt, Artificial Sequence
  Description of Artificial Sequence: Synthetic oligonucleotide
ggccggcaagucugcuggg

SEQ ID NO: 2815354 - RNA, 19 nt, Artificial Sequence
  Description of Artificial Sequence: Synthetic oligonucleotide
cguggucacguagaaacca

SEQ ID NO: 2815355 - RNA, 19 nt, Artificial Sequence
  Description of Artificial Sequence: Synthetic oligonucleotide
ccucucggauucgauguuc

SEQ ID NO: 2815356 - RNA, 19 nt, Artificial Sequence
  Description of Artificial Sequence: Synthetic oligonucleotide
guggggccggcaagucugc

SEQ ID NO: 2815357 - RNA, 19 nt, Artificial Sequence
  Description of Artificial Sequence: Synthetic oligonucleotide
cccugccuucuccagugug

SEQ ID NO: 2815358 - RNA, 19 nt, Artificial Sequence
  Description of Artificial Sequence: Synthetic oligonucleotide
gccggcaagucugcugggc

SEQ ID NO: 2815359 - RNA, 19 nt, Artificial Sequence
  Description of Artificial Sequence: Synthetic oligonucleotide
ggcaaguuguggggccggc

SEQ ID NO: 2815360 - RNA, 19 nt, Artificial Sequence
  Description of Artificial Sequence: Synthetic oligonucleotide
gcaaccuuccgguccaguu

SEQ ID NO: 2815361 - RNA, 19 nt, Artificial Sequence
  Description of Artificial Sequence: Synthetic oligonucleotide
gcacucgguguucguucug

SEQ ID NO: 2815362 - RNA, 19 nt, Artificial Sequence
  Description of Artificial Sequence: Synthetic oligonucleotide
cagcucgugcugcugaguu

SEQ ID NO: 2815363 - RNA, 19 nt, Artificial Sequence
  Description of Artificial Sequence: Synthetic oligonucleotide
uggggccggcaagucugcu

SEQ ID NO: 2815364 - RNA, 19 nt, Artificial Sequence
  Description of Artificial Sequence: Synthetic oligonucleotide
ccccucugcugcaguuucc

SEQ ID NO: 2815365 - RNA, 19 nt, Artificial Sequence
  Description of Artificial Sequence: Synthetic oligonucleotide
caagucugcugggcuucca

SEQ ID NO: 2815366 - RNA, 19 nt, Artificial Sequence
  Description of Artificial Sequence: Synthetic oligonucleotide
gaacaaucuugcgguccau

SEQ ID NO: 2815367 - RNA, 19 nt, Artificial Sequence
  Description of Artificial Sequence: Synthetic oligonucleotide
gccugagagccugccugag

SEQ ID NO: 2815368 - RNA, 19 nt, Artificial Sequence
  Description of Artificial Sequence: Synthetic oligonucleotide
gugcucugcuggucagcaa

SEQ ID NO: 2815369 - RNA, 19 nt, Artificial Sequence
  Description of Artificial Sequence: Synthetic oligonucleotide
ccccugcacgaucucgaac

SEQ ID NO: 2815370 - RNA, 19 nt, Artificial Sequence
  Description of Artificial Sequence: Synthetic oligonucleotide
gucgcugguuguacaggcu

SEQ ID NO: 2815371 - RNA, 19 nt, Artificial Sequence
  Description of Artificial Sequence: Synthetic oligonucleotide
gcaaguuguggggccggca

SEQ ID NO: 2815372 - RNA, 19 nt, Artificial Sequence
  Description of Artificial Sequence: Synthetic oligonucleotide
gccgucgagcagcgccagg

SEQ ID NO: 2815373 - RNA, 19 nt, Artificial Sequence
  Description of Artificial Sequence: Synthetic oligonucleotide
cgucgagcagcgccagggc

SEQ ID NO: 2815374 - RNA, 19 nt, Artificial Sequence
  Description of Artificial Sequence: Synthetic oligonucleotide
cucugcuggucagcaaccu

SEQ ID NO: 2815375 - RNA, 19 nt, Artificial Sequence
  Description of Artificial Sequence: Synthetic oligonucleotide
cagcaaccuuccgguccag

SEQ ID NO: 2815376 - RNA, 19 nt, Artificial Sequence
  Description of Artificial Sequence: Synthetic oligonucleotide
caagaagccccugcacgau

SEQ ID NO: 2815377 - RNA, 19 nt, Artificial Sequence
  Description of Artificial Sequence: Synthetic oligonucleotide
cugagcacucgguguucgu

SEQ ID NO: 2815378 - RNA, 19 nt, Artificial Sequence
  Description of Artificial Sequence: Synthetic oligonucleotide
cugcuccucucggauucga

SEQ ID NO: 2815379 - RNA, 19 nt, Artificial Sequence
  Description of Artificial Sequence: Synthetic oligonucleotide
gccugcugcuccucucgga

SEQ ID NO: 2815380 - RNA, 19 nt, Artificial Sequence
  Description of Artificial Sequence: Synthetic oligonucleotide
gcgcugcugaaaagagcug

SEQ ID NO: 2815381 - RNA, 19 nt, Artificial Sequence
  Description of Artificial Sequence: Synthetic oligonucleotide
gccuggagcacuggcaagu

SEQ ID NO: 2815382 - RNA, 19 nt, Artificial Sequence
  Description of Artificial Sequence: Synthetic oligonucleotide
gguccaguuccagaacaau

SEQ ID NO: 2815383 - RNA, 19 nt, Artificial Sequence
  Description of Artificial Sequence: Synthetic oligonucleotide
cagcuaccccugccuucuc

SEQ ID NO: 2815384 - RNA, 19 nt, Artificial Sequence
  Description of Artificial Sequence: Synthetic oligonucleotide
accuuccgguccaguucca

SEQ ID NO: 2815385 - RNA, 19 nt, Artificial Sequence
  Description of Artificial Sequence: Synthetic oligonucleotide
cgaacaccgugccgucgag

SEQ ID NO: 2815386 - RNA, 19 nt, Artificial Sequence
  Description of Artificial Sequence: Synthetic oligonucleotide
ccugcugcuccucucggau

SEQ ID NO: 2815387 - RNA, 19 nt, Artificial Sequence
  Description of Artificial Sequence: Synthetic oligonucleotide
gccagccccucugcugcag

SEQ ID NO: 2815388 - RNA, 19 nt, Artificial Sequence
  Description of Artificial Sequence: Synthetic oligonucleotide
ccgcagucgcugguuguac

SEQ ID NO: 2815389 - RNA, 19 nt, Artificial Sequence
  Description of Artificial Sequence: Synthetic oligonucleotide
ccaguuccagaacaaucuu

SEQ ID NO: 2815390 - RNA, 19 nt, Artificial Sequence
  Description of Artificial Sequence: Synthetic oligonucleotide
gccugagcacucgguguuc

SEQ ID NO: 2815391 - RNA, 19 nt, Artificial Sequence
  Description of Artificial Sequence: Synthetic oligonucleotide
ccagcuaccccugccuucu

SEQ ID NO: 2815392 - RNA, 19 nt, Artificial Sequence
  Description of Artificial Sequence: Synthetic oligonucleotide
cgcagucgcugguuguaca

SEQ ID NO: 2815393 - RNA, 19 nt, Artificial Sequence
  Description of Artificial Sequence: Synthetic oligonucleotide
gccccugcacgaucucgaa

SEQ ID NO: 2815394 - RNA, 19 nt, Artificial Sequence
  Description of Artificial Sequence: Synthetic oligonucleotide
cugcugcuccucucggauu

SEQ ID NO: 2815395 - RNA, 19 nt, Artificial Sequence
  Description of Artificial Sequence: Synthetic oligonucleotide
gccgcagucgcugguugua

SEQ ID NO: 2815396 - RNA, 19 nt, Artificial Sequence
  Description of Artificial Sequence: Synthetic oligonucleotide
ccggcaagucugcugggcu

SEQ ID NO: 2815397 - RNA, 19 nt, Artificial Sequence
  Description of Artificial Sequence: Synthetic oligonucleotide
cgguccaguuccagaacaa

SEQ ID NO: 2815398 - RNA, 19 nt, Artificial Sequence
  Description of Artificial Sequence: Synthetic oligonucleotide
gggccaagucgcugagcgu

SEQ ID NO: 2815399 - RNA, 19 nt, Artificial Sequence
  Description of Artificial Sequence: Synthetic oligonucleotide
cgcugagcgugguguaaga

SEQ ID NO: 2815400 - RNA, 19 nt, Artificial Sequence
  Description of Artificial Sequence: Synthetic oligonucleotide
cgcugguuguacaggcucu

SEQ ID NO: 2815401 - RNA, 19 nt, Artificial Sequence
  Description of Artificial Sequence: Synthetic oligonucleotide
cgguccauugccugcugcu

SEQ ID NO: 2815402 - RNA, 19 nt, Artificial Sequence
  Description of Artificial Sequence: Synthetic oligonucleotide
cccacuugccagccccucu

SEQ ID NO: 2815403 - RNA, 19 nt, Artificial Sequence
  Description of Artificial Sequence: Synthetic oligonucleotide
gccugccugagcacucggu

SEQ ID NO: 2815404 - RNA, 19 nt, Artificial Sequence
  Description of Artificial Sequence: Synthetic oligonucleotide
gcacgaucucgaacaccgu

SEQ ID NO: 2815405 - RNA, 19 nt, Artificial Sequence
  Description of Artificial Sequence: Synthetic oligonucleotide
ccauggccuccagcucgug

SEQ ID NO: 2815406 - RNA, 19 nt, Artificial Sequence
  Description of Artificial Sequence: Synthetic oligonucleotide
cgccagggccaagucgcug

SEQ ID NO: 2815407 - RNA, 19 nt, Artificial Sequence
  Description of Artificial Sequence: Synthetic oligonucleotide
gcagccgcagucgcugguu

SEQ ID NO: 2815408 - RNA, 19 nt, Artificial Sequence
  Description of Artificial Sequence: Synthetic oligonucleotide
ccaagucgcugagcguggu

SEQ ID NO: 2815409 - RNA, 19 nt, Artificial Sequence
  Description of Artificial Sequence: Synthetic oligonucleotide
ccagccccucugcugcagu

SEQ ID NO: 2815410 - RNA, 19 nt, Artificial Sequence
  Description of Artificial Sequence: Synthetic oligonucleotide
ccagcucgugcugcugagu

SEQ ID NO: 2815411 - RNA, 19 nt, Artificial Sequence
  Description of Artificial Sequence: Synthetic oligonucleotide
cgagcagcgccagggccaa

SEQ ID NO: 2815412 - RNA, 19 nt, Artificial Sequence
  Description of Artificial Sequence: Synthetic oligonucleotide
ccuggagcacuggcaaguu

SEQ ID NO: 2815413 - RNA, 19 nt, Artificial Sequence
  Description of Artificial Sequence: Synthetic oligonucleotide
cggcaagucugcugggcuu

SEQ ID NO: 2815414 - RNA, 19 nt, Artificial Sequence
  Description of Artificial Sequence: Synthetic oligonucleotide
ccgugccgucgagcagcgc

SEQ ID NO: 2815415 - RNA, 19 nt, Artificial Sequence
  Description of Artificial Sequence: Synthetic oligonucleotide
gcgccagggccaagucgcu

SEQ ID NO: 2815416 - RNA, 19 nt, Artificial Sequence
  Description of Artificial Sequence: Synthetic oligonucleotide
aagauuuuccagcagaugc

SEQ ID NO: 2815417 - RNA, 19 nt, Artificial Sequence
  Description of Artificial Sequence: Synthetic oligonucleotide
uucaagaucacacacauag

SEQ ID NO: 2815418 - RNA, 19 nt, Artificial Sequence
  Description of Artificial Sequence: Synthetic oligonucleotide
acaaugaucuccuugaagg

SEQ ID NO: 2815419 - RNA, 19 nt, Artificial Sequence
  Description of Artificial Sequence: Synthetic oligonucleotide
gacagaagcugauagaugg

SEQ ID NO: 2815420 - RNA, 19 nt, Artificial Sequence
  Description of Artificial Sequence: Synthetic oligonucleotide
aguagcuacucuuaagggc

SEQ ID NO: 2815421 - RNA, 19 nt, Artificial Sequence
  Description of Artificial Sequence: Synthetic oligonucleotide
agauggugggaccagagcc

SEQ ID NO: 2815422 - RNA, 19 nt, Artificial Sequence
  Description of Artificial Sequence: Synthetic oligonucleotide
guaguagcuacucuuaagg

SEQ ID NO: 2815423 - RNA, 19 nt, Artificial Sequence
  Description of Artificial Sequence: Synthetic oligonucleotide
cuucacaccaccaaggcag

SEQ ID NO: 2815424 - RNA, 19 nt, Artificial Sequence
  Description of Artificial Sequence: Synthetic oligonucleotide
uucagcaccuguuugauug

SEQ ID NO: 2815425 - RNA, 19 nt, Artificial Sequence
  Description of Artificial Sequence: Synthetic oligonucleotide
uagucacugacaaugaucu

SEQ ID NO: 2815426 - RNA, 19 nt, Artificial Sequence
  Description of Artificial Sequence: Synthetic oligonucleotide
auaggugacuacuggagac

SEQ ID NO: 2815427 - RNA, 19 nt, Artificial Sequence
  Description of Artificial Sequence: Synthetic oligonucleotide
cucacaggcagacagaagc

SEQ ID NO: 2815428 - RNA, 19 nt, Artificial Sequence
  Description of Artificial Sequence: Synthetic oligonucleotide
cuggagaccagucaaaggc

SEQ ID NO: 2815429 - RNA, 19 nt, Artificial Sequence
  Description of Artificial Sequence: Synthetic oligonucleotide
gccaaugucaaucaggagg

SEQ ID NO: 2815430 - RNA, 19 nt, Artificial Sequence
  Description of Artificial Sequence: Synthetic oligonucleotide
uugaaggacucacaggcag

SEQ ID NO: 2815431 - RNA, 19 nt, Artificial Sequence
  Description of Artificial Sequence: Synthetic oligonucleotide
agaucacacacauagguga

SEQ ID NO: 2815432 - RNA, 19 nt, Artificial Sequence
  Description of Artificial Sequence: Synthetic oligonucleotide
gaagcugauagaugguggg

SEQ ID NO: 2815433 - RNA, 19 nt, Artificial Sequence
  Description of Artificial Sequence: Synthetic oligonucleotide
uuucguuuucugcacagug

SEQ ID NO: 2815434 - RNA, 19 nt, Artificial Sequence
  Description of Artificial Sequence: Synthetic oligonucleotide
uaguagcuacucuuaaggg

SEQ ID NO: 2815435 - RNA, 19 nt, Artificial Sequence
  Description of Artificial Sequence: Synthetic oligonucleotide
agggcauccacccacucac

SEQ ID NO: 2815436 - RNA, 19 nt, Artificial Sequence
  Description of Artificial Sequence: Synthetic oligonucleotide
aggacucacaggcagacag

SEQ ID NO: 2815437 - RNA, 19 nt, Artificial Sequence
  Description of Artificial Sequence: Synthetic oligonucleotide
ucaagaucacacacauagg

SEQ ID NO: 2815438 - RNA, 19 nt, Artificial Sequence
  Description of Artificial Sequence: Synthetic oligonucleotide
ucuguguagucacugacaa

SEQ ID NO: 2815439 - RNA, 19 nt, Artificial Sequence
  Description of Artificial Sequence: Synthetic oligonucleotide
uguaguagcuacucuuaag

SEQ ID NO: 2815440 - RNA, 19 nt, Artificial Sequence
  Description of Artificial Sequence: Synthetic oligonucleotide
aaucaggaggucucccuuc

SEQ ID NO: 2815441 - RNA, 19 nt, Artificial Sequence
  Description of Artificial Sequence: Synthetic oligonucleotide
gaggauuucguuuucugca

SEQ ID NO: 2815442 - RNA, 19 nt, Artificial Sequence
  Description of Artificial Sequence: Synthetic oligonucleotide
ugaggauuucguuuucugc

SEQ ID NO: 2815443 - RNA, 19 nt, Artificial Sequence
  Description of Artificial Sequence: Synthetic oligonucleotide
aaggcagaauaucuuaaaa

SEQ ID NO: 2815444 - RNA, 19 nt, Artificial Sequence
  Description of Artificial Sequence: Synthetic oligonucleotide
agagagaccgcacccagag

SEQ ID NO: 2815445 - RNA, 19 nt, Artificial Sequence
  Description of Artificial Sequence: Synthetic oligonucleotide
gacaaugaucuccuugaag

SEQ ID NO: 2815446 - RNA, 19 nt, Artificial Sequence
  Description of Artificial Sequence: Synthetic oligonucleotide
acugacaaugaucuccuug

SEQ ID NO: 2815447 - RNA, 19 nt, Artificial Sequence
  Description of Artificial Sequence: Synthetic oligonucleotide
agggcagugcaguaggugg

SEQ ID NO: 2815448 - RNA, 19 nt, Artificial Sequence
  Description of Artificial Sequence: Synthetic oligonucleotide
aaugucaaucaggaggucu

SEQ ID NO: 2815449 - RNA, 19 nt, Artificial Sequence
  Description of Artificial Sequence: Synthetic oligonucleotide
uugauugcccgccucaacu

SEQ ID NO: 2815450 - RNA, 19 nt, Artificial Sequence
  Description of Artificial Sequence: Synthetic oligonucleotide
aggauuucguuuucugcac

SEQ ID NO: 2815451 - RNA, 19 nt, Artificial Sequence
  Description of Artificial Sequence: Synthetic oligonucleotide
acucuuaagggcauccacc

SEQ ID NO: 2815452 - RNA, 19 nt, Artificial Sequence
  Description of Artificial Sequence: Synthetic oligonucleotide
cacaucacacuucagcacc

SEQ ID NO: 2815453 - RNA, 19 nt, Artificial Sequence
  Description of Artificial Sequence: Synthetic oligonucleotide
acacauaggugacuacugg

SEQ ID NO: 2815454 - RNA, 19 nt, Artificial Sequence
  Description of Artificial Sequence: Synthetic oligonucleotide
uccagcagaugccugagga

SEQ ID NO: 2815455 - RNA, 19 nt, Artificial Sequence
  Description of Artificial Sequence: Synthetic oligonucleotide
cucuuaagggcauccaccc

SEQ ID NO: 2815456 - RNA, 19 nt, Artificial Sequence
  Description of Artificial Sequence: Synthetic oligonucleotide
agagaccgcacccagaggu

SEQ ID NO: 2815457 - RNA, 19 nt, Artificial Sequence
  Description of Artificial Sequence: Synthetic oligonucleotide
uuggcucugcgucacauca

SEQ ID NO: 2815458 - RNA, 19 nt, Artificial Sequence
  Description of Artificial Sequence: Synthetic oligonucleotide
uucugcagcucccaaaggu

SEQ ID NO: 2815459 - RNA, 19 nt, Artificial Sequence
  Description of Artificial Sequence: Synthetic oligonucleotide
aggaggucucccuucacac

SEQ ID NO: 2815460 - RNA, 19 nt, Artificial Sequence
  Description of Artificial Sequence: Synthetic oligonucleotide
ucccuucacaccaccaagg

SEQ ID NO: 2815461 - RNA, 19 nt, Artificial Sequence
  Description of Artificial Sequence: Synthetic oligonucleotide
cuuaagggcauccacccac

SEQ ID NO: 2815462 - RNA, 19 nt, Artificial Sequence
  Description of Artificial Sequence: Synthetic oligonucleotide
caggcagucagcaggaggc

SEQ ID NO: 2815463 - RNA, 19 nt, Artificial Sequence
  Description of Artificial Sequence: Synthetic oligonucleotide
ccuugaaggacucacaggc

SEQ ID NO: 2815464 - RNA, 19 nt, Artificial Sequence
  Description of Artificial Sequence: Synthetic oligonucleotide
uuuuccagcagaugccuga

SEQ ID NO: 2815465 - RNA, 19 nt, Artificial Sequence
  Description of Artificial Sequence: Synthetic oligonucleotide
ucuccuccuucucaggucc

SEQ ID NO: 2815466 - RNA, 19 nt, Artificial Sequence
  Description of Artificial Sequence: Synthetic oligonucleotide
aagaucacacacauaggug

SEQ ID NO: 2815467 - RNA, 19 nt, Artificial Sequence
  Description of Artificial Sequence: Synthetic oligonucleotide
uguuugauugcccgccuca

SEQ ID NO: 2815468 - RNA, 19 nt, Artificial Sequence
  Description of Artificial Sequence: Synthetic oligonucleotide
acuacuggagaccagucaa

SEQ ID NO: 2815469 - RNA, 19 nt, Artificial Sequence
  Description of Artificial Sequence: Synthetic oligonucleotide
aaagauuuuccagcagaug

SEQ ID NO: 2815470 - RNA, 19 nt, Artificial Sequence
  Description of Artificial Sequence: Synthetic oligonucleotide
ucauguaguagcuacucuu

SEQ ID NO: 2815471 - RNA, 19 nt, Artificial Sequence
  Description of Artificial Sequence: Synthetic oligonucleotide
ucguuuucugcacaguguc

SEQ ID NO: 2815472 - RNA, 19 nt, Artificial Sequence
  Description of Artificial Sequence: Synthetic oligonucleotide
ugcgucacaucacacuuca

SEQ ID NO: 2815473 - RNA, 19 nt, Artificial Sequence
  Description of Artificial Sequence: Synthetic oligonucleotide
uccuugaaggacucacagg

SEQ ID NO: 2815474 - RNA, 19 nt, Artificial Sequence
  Description of Artificial Sequence: Synthetic oligonucleotide
uucguuuucugcacagugu

SEQ ID NO: 2815475 - RNA, 19 nt, Artificial Sequence
  Description of Artificial Sequence: Synthetic oligonucleotide
agagccaaugucaaucagg

SEQ ID NO: 2815476 - RNA, 19 nt, Artificial Sequence
  Description of Artificial Sequence: Synthetic oligonucleotide
uggagaccagucaaaggcc

SEQ ID NO: 2815477 - RNA, 19 nt, Artificial Sequence
  Description of Artificial Sequence: Synthetic oligonucleotide
gucacaucacacuucagca

SEQ ID NO: 2815478 - RNA, 19 nt, Artificial Sequence
  Description of Artificial Sequence: Synthetic oligonucleotide
aaaagauuuuccagcagau

SEQ ID NO: 2815479 - RNA, 19 nt, Artificial Sequence
  Description of Artificial Sequence: Synthetic oligonucleotide
acuggagaccagucaaagg

SEQ ID NO: 2815480 - RNA, 19 nt, Artificial Sequence
  Description of Artificial Sequence: Synthetic oligonucleotide
agcugauagauggugggac

SEQ ID NO: 2815481 - RNA, 19 nt, Artificial Sequence
  Description of Artificial Sequence: Synthetic oligonucleotide
uacucuuaagggcauccac

SEQ ID NO: 2815482 - RNA, 19 nt, Artificial Sequence
  Description of Artificial Sequence: Synthetic oligonucleotide
accuguuugauugcccgcc

SEQ ID NO: 2815483 - RNA, 19 nt, Artificial Sequence
  Description of Artificial Sequence: Synthetic oligonucleotide
aucuccuugaaggacucac

SEQ ID NO: 2815484 - RNA, 19 nt, Artificial Sequence
  Description of Artificial Sequence: Synthetic oligonucleotide
ucugcgucacaucacacuu

SEQ ID NO: 2815485 - RNA, 19 nt, Artificial Sequence
  Description of Artificial Sequence: Synthetic oligonucleotide
ucccuucaagaucacacac

SEQ ID NO: 2815486 - RNA, 19 nt, Artificial Sequence
  Description of Artificial Sequence: Synthetic oligonucleotide
cacccacucaccaggaagg

SEQ ID NO: 2815487 - RNA, 19 nt, Artificial Sequence
  Description of Artificial Sequence: Synthetic oligonucleotide
aaggucagggcaggcagcg

SEQ ID NO: 2815488 - RNA, 19 nt, Artificial Sequence
  Description of Artificial Sequence: Synthetic oligonucleotide
guagcuacucuuaagggca

SEQ ID NO: 2815489 - RNA, 19 nt, Artificial Sequence
  Description of Artificial Sequence: Synthetic oligonucleotide
aggcagagagaccgcaccc

SEQ ID NO: 2815490 - RNA, 19 nt, Artificial Sequence
  Description of Artificial Sequence: Synthetic oligonucleotide
uccuucucaggucccuugg

SEQ ID NO: 2815491 - RNA, 19 nt, Artificial Sequence
  Description of Artificial Sequence: Synthetic oligonucleotide
agaagcugauagauggugg

SEQ ID NO: 2815492 - RNA, 19 nt, Artificial Sequence
  Description of Artificial Sequence: Synthetic oligonucleotide
cauccacccacucaccagg

SEQ ID NO: 2815493 - RNA, 19 nt, Artificial Sequence
  Description of Artificial Sequence: Synthetic oligonucleotide
acauaggugacuacuggag

SEQ ID NO: 2815494 - RNA, 19 nt, Artificial Sequence
  Description of Artificial Sequence: Synthetic oligonucleotide
uucuucagccacuucugca

SEQ ID NO: 2815495 - RNA, 19 nt, Artificial Sequence
  Description of Artificial Sequence: Synthetic oligonucleotide
ucaaucaggaggucucccu

SEQ ID NO: 2815496 - RNA, 19 nt, Artificial Sequence
  Description of Artificial Sequence: Synthetic oligonucleotide
uagauggugggaccagagc

SEQ ID NO: 2815497 - RNA, 19 nt, Artificial Sequence
  Description of Artificial Sequence: Synthetic oligonucleotide
ucacaucacacuucagcac

SEQ ID NO: 2815498 - RNA, 19 nt, Artificial Sequence
  Description of Artificial Sequence: Synthetic oligonucleotide
accaccaaggcagaauauc

SEQ ID NO: 2815499 - RNA, 19 nt, Artificial Sequence
  Description of Artificial Sequence: Synthetic oligonucleotide
ggcagacagaagcugauag

SEQ ID NO: 2815500 - RNA, 19 nt, Artificial Sequence
  Description of Artificial Sequence: Synthetic oligonucleotide
cacacauaggugacuacug

SEQ ID NO: 2815501 - RNA, 19 nt, Artificial Sequence
  Description of Artificial Sequence: Synthetic oligonucleotide
uucccuucaagaucacaca

SEQ ID NO: 2815502 - RNA, 19 nt, Artificial Sequence
  Description of Artificial Sequence: Synthetic oligonucleotide
gaggucucccuucacacca

SEQ ID NO: 2815503 - RNA, 19 nt, Artificial Sequence
  Description of Artificial Sequence: Synthetic oligonucleotide
gaggcagagagaccgcacc

SEQ ID NO: 2815504 - RNA, 19 nt, Artificial Sequence
  Description of Artificial Sequence: Synthetic oligonucleotide
uacuggagaccagucaaag

SEQ ID NO: 2815505 - RNA, 19 nt, Artificial Sequence
  Description of Artificial Sequence: Synthetic oligonucleotide
cucggcuugagcaggcugc

SEQ ID NO: 2815506 - RNA, 19 nt, Artificial Sequence
  Description of Artificial Sequence: Synthetic oligonucleotide
aagggcauccacccacuca

SEQ ID NO: 2815507 - RNA, 19 nt, Artificial Sequence
  Description of Artificial Sequence: Synthetic oligonucleotide
augucaaucaggaggucuc

SEQ ID NO: 2815508 - RNA, 19 nt, Artificial Sequence
  Description of Artificial Sequence: Synthetic oligonucleotide
ugaaggacucacaggcaga

SEQ ID NO: 2815509 - RNA, 19 nt, Artificial Sequence
  Description of Artificial Sequence: Synthetic oligonucleotide
gcagcguccaggcacaggg

SEQ ID NO: 2815510 - RNA, 19 nt, Artificial Sequence
  Description of Artificial Sequence: Synthetic oligonucleotide
cugagggcagugcaguagg

SEQ ID NO: 2815511 - RNA, 19 nt, Artificial Sequence
  Description of Artificial Sequence: Synthetic oligonucleotide
uguagucacugacaaugau

SEQ ID NO: 2815512 - RNA, 19 nt, Artificial Sequence
  Description of Artificial Sequence: Synthetic oligonucleotide
uucuggucuguguagucac

SEQ ID NO: 2815513 - RNA, 19 nt, Artificial Sequence
  Description of Artificial Sequence: Synthetic oligonucleotide
ggucccuugguucuguucc

SEQ ID NO: 2815514 - RNA, 19 nt, Artificial Sequence
  Description of Artificial Sequence: Synthetic oligonucleotide
uucucaggucccuugguuc

SEQ ID NO: 2815515 - RNA, 19 nt, Artificial Sequence
  Description of Artificial Sequence: Synthetic oligonucleotide
gcaggaggcagagagaccg

SEQ ID NO: 2815516 - RNA, 19 nt, Artificial Sequence
  Description of Artificial Sequence: Synthetic oligonucleotide
ucuccuugaaggacucaca

SEQ ID NO: 2815517 - RNA, 19 nt, Artificial Sequence
  Description of Artificial Sequence: Synthetic oligonucleotide
gguucuguucccuucaaga

SEQ ID NO: 2815518 - RNA, 19 nt, Artificial Sequence
  Description of Artificial Sequence: Synthetic oligonucleotide
ucucaggucccuugguucu

SEQ ID NO: 2815519 - RNA, 19 nt, Artificial Sequence
  Description of Artificial Sequence: Synthetic oligonucleotide
uuugauugcccgccucaac

SEQ ID NO: 2815520 - RNA, 19 nt, Artificial Sequence
  Description of Artificial Sequence: Synthetic oligonucleotide
caagaucacacacauaggu

SEQ ID NO: 2815521 - RNA, 19 nt, Artificial Sequence
  Description of Artificial Sequence: Synthetic oligonucleotide
guagucacugacaaugauc

SEQ ID NO: 2815522 - RNA, 19 nt, Artificial Sequence
  Description of Artificial Sequence: Synthetic oligonucleotide
ucucccuucacaccaccaa

SEQ ID NO: 2815523 - RNA, 19 nt, Artificial Sequence
  Description of Artificial Sequence: Synthetic oligonucleotide
uuaagggcauccacccacu

SEQ ID NO: 2815524 - RNA, 19 nt, Artificial Sequence
  Description of Artificial Sequence: Synthetic oligonucleotide
acacacauaggugacuacu

SEQ ID NO: 2815525 - RNA, 19 nt, Artificial Sequence
  Description of Artificial Sequence: Synthetic oligonucleotide
cugaggauuucguuuucug

SEQ ID NO: 2815526 - RNA, 19 nt, Artificial Sequence
  Description of Artificial Sequence: Synthetic oligonucleotide
ucugcagcucccaaagguu

SEQ ID NO: 2815527 - RNA, 19 nt, Artificial Sequence
  Description of Artificial Sequence: Synthetic oligonucleotide
cagagguuggcucugcguc

SEQ ID NO: 2815528 - RNA, 19 nt, Artificial Sequence
  Description of Artificial Sequence: Synthetic oligonucleotide
ucuuaagggcauccaccca

SEQ ID NO: 2815529 - RNA, 19 nt, Artificial Sequence
  Description of Artificial Sequence: Synthetic oligonucleotide
agugcaguagguggggaag

SEQ ID NO: 2815530 - RNA, 19 nt, Artificial Sequence
  Description of Artificial Sequence: Synthetic oligonucleotide
ugguucuguucccuucaag

SEQ ID NO: 2815531 - RNA, 19 nt, Artificial Sequence
  Description of Artificial Sequence: Synthetic oligonucleotide
accaaggcagaauaucuua

SEQ ID NO: 2815532 - RNA, 19 nt, Artificial Sequence
  Description of Artificial Sequence: Synthetic oligonucleotide
aggcacagggugcugagca

SEQ ID NO: 2815533 - RNA, 19 nt, Artificial Sequence
  Description of Artificial Sequence: Synthetic oligonucleotide
ggaaggucagggcaggcag

SEQ ID NO: 2815534 - RNA, 19 nt, Artificial Sequence
  Description of Artificial Sequence: Synthetic oligonucleotide
acacuucagcaccuguuug

SEQ ID NO: 2815535 - RNA, 19 nt, Artificial Sequence
  Description of Artificial Sequence: Synthetic oligonucleotide
uaggugacuacuggagacc

SEQ ID NO: 2815536 - RNA, 19 nt, Artificial Sequence
  Description of Artificial Sequence: Synthetic oligonucleotide
gaaggacucacaggcagac

SEQ ID NO: 2815537 - RNA, 19 nt, Artificial Sequence
  Description of Artificial Sequence: Synthetic oligonucleotide
ucacacuucagcaccuguu

SEQ ID NO: 2815538 - RNA, 19 nt, Artificial Sequence
  Description of Artificial Sequence: Synthetic oligonucleotide
agguggggaaggucagggc

SEQ ID NO: 2815539 - RNA, 19 nt, Artificial Sequence
  Description of Artificial Sequence: Synthetic oligonucleotide
ugauagauggugggaccag

SEQ ID NO: 2815540 - RNA, 19 nt, Artificial Sequence
  Description of Artificial Sequence: Synthetic oligonucleotide
gacuacuggagaccaguca

SEQ ID NO: 2815541 - RNA, 19 nt, Artificial Sequence
  Description of Artificial Sequence: Synthetic oligonucleotide
caguagguggggaagguca

SEQ ID NO: 2815542 - RNA, 19 nt, Artificial Sequence
  Description of Artificial Sequence: Synthetic oligonucleotide
ccacucaccaggaaggccc

SEQ ID NO: 2815543 - RNA, 19 nt, Artificial Sequence
  Description of Artificial Sequence: Synthetic oligonucleotide
cagaagcugauagauggug

SEQ ID NO: 2815544 - RNA, 19 nt, Artificial Sequence
  Description of Artificial Sequence: Synthetic oligonucleotide
gaucacacacauaggugac

SEQ ID NO: 2815545 - RNA, 19 nt, Artificial Sequence
  Description of Artificial Sequence: Synthetic oligonucleotide
gcaccuguuugauugcccg

SEQ ID NO: 2815546 - RNA, 19 nt, Artificial Sequence
  Description of Artificial Sequence: Synthetic oligonucleotide
ugcagcucccaaagguucu

SEQ ID NO: 2815547 - RNA, 19 nt, Artificial Sequence
  Description of Artificial Sequence: Synthetic oligonucleotide
ucagcaccuguuugauugc

SEQ ID NO: 2815548 - RNA, 19 nt, Artificial Sequence
  Description of Artificial Sequence: Synthetic oligonucleotide
ugacaaugaucuccuugaa

SEQ ID NO: 2815549 - RNA, 19 nt, Artificial Sequence
  Description of Artificial Sequence: Synthetic oligonucleotide
gagcaggcugcccagguuc

SEQ ID NO: 2815550 - RNA, 19 nt, Artificial Sequence
  Description of Artificial Sequence: Synthetic oligonucleotide
ugaucuccuugaaggacuc

SEQ ID NO: 2815551 - RNA, 19 nt, Artificial Sequence
  Description of Artificial Sequence: Synthetic oligonucleotide
cucccuucacaccaccaag

SEQ ID NO: 2815552 - RNA, 19 nt, Artificial Sequence
  Description of Artificial Sequence: Synthetic oligonucleotide
auagauggugggaccagag

SEQ ID NO: 2815553 - RNA, 19 nt, Artificial Sequence
  Description of Artificial Sequence: Synthetic oligonucleotide
augccugaggauuucguuu

SEQ ID NO: 2815554 - RNA, 19 nt, Artificial Sequence
  Description of Artificial Sequence: Synthetic oligonucleotide
ucacacacauaggugacua

SEQ ID NO: 2815555 - RNA, 19 nt, Artificial Sequence
  Description of Artificial Sequence: Synthetic oligonucleotide
agucacugacaaugaucuc

SEQ ID NO: 2815556 - RNA, 19 nt, Artificial Sequence
  Description of Artificial Sequence: Synthetic oligonucleotide
aagcugauagaugguggga

SEQ ID NO: 2815557 - RNA, 19 nt, Artificial Sequence
  Description of Artificial Sequence: Synthetic oligonucleotide
cacauaggugacuacugga

SEQ ID NO: 2815558 - RNA, 19 nt, Artificial Sequence
  Description of Artificial Sequence: Synthetic oligonucleotide
agcaccuguuugauugccc

SEQ ID NO: 2815559 - RNA, 19 nt, Artificial Sequence
  Description of Artificial Sequence: Synthetic oligonucleotide
cauaggugacuacuggaga

SEQ ID NO: 2815560 - RNA, 19 nt, Artificial Sequence
  Description of Artificial Sequence: Synthetic oligonucleotide
cagggugcugagcaggcag

SEQ ID NO: 2815561 - RNA, 19 nt, Artificial Sequence
  Description of Artificial Sequence: Synthetic oligonucleotide
auguaguagcuacucuuaa

SEQ ID NO: 2815562 - RNA, 19 nt, Artificial Sequence
  Description of Artificial Sequence: Synthetic oligonucleotide
caaugaucuccuugaagga

SEQ ID NO: 2815563 - RNA, 19 nt, Artificial Sequence
  Description of Artificial Sequence: Synthetic oligonucleotide
ugacuacuggagaccaguc

SEQ ID NO: 2815564 - RNA, 19 nt, Artificial Sequence
  Description of Artificial Sequence: Synthetic oligonucleotide
agagguuggcucugcguca

SEQ ID NO: 2815565 - RNA, 19 nt, Artificial Sequence
  Description of Artificial Sequence: Synthetic oligonucleotide
ugggaccagagccaauguc

SEQ ID NO: 2815566 - RNA, 19 nt, Artificial Sequence
  Description of Artificial Sequence: Synthetic oligonucleotide
ugccugaggauuucguuuu

SEQ ID NO: 2815567 - RNA, 19 nt, Artificial Sequence
  Description of Artificial Sequence: Synthetic oligonucleotide
uugagcaggcugcccaggu

SEQ ID NO: 2815568 - RNA, 19 nt, Artificial Sequence
  Description of Artificial Sequence: Synthetic oligonucleotide
uggucuguguagucacuga

SEQ ID NO: 2815569 - RNA, 19 nt, Artificial Sequence
  Description of Artificial Sequence: Synthetic oligonucleotide
uucacaccaccaaggcaga

SEQ ID NO: 2815570 - RNA, 19 nt, Artificial Sequence
  Description of Artificial Sequence: Synthetic oligonucleotide
aucacacuucagcaccugu

SEQ ID NO: 2815571 - RNA, 19 nt, Artificial Sequence
  Description of Artificial Sequence: Synthetic oligonucleotide
cauguaguagcuacucuua

SEQ ID NO: 2815572 - RNA, 19 nt, Artificial Sequence
  Description of Artificial Sequence: Synthetic oligonucleotide
gauggugggaccagagcca

SEQ ID NO: 2815573 - RNA, 19 nt, Artificial Sequence
  Description of Artificial Sequence: Synthetic oligonucleotide
aggucccuugguucuguuc

SEQ ID NO: 2815574 - RNA, 19 nt, Artificial Sequence
  Description of Artificial Sequence: Synthetic oligonucleotide
gauugcccgccucaacuuc

SEQ ID NO: 2815575 - RNA, 19 nt, Artificial Sequence
  Description of Artificial Sequence: Synthetic oligonucleotide
ucuggucuguguagucacu

SEQ ID NO: 2815576 - RNA, 19 nt, Artificial Sequence
  Description of Artificial Sequence: Synthetic oligonucleotide
gagagaccgcacccagagg

SEQ ID NO: 2815577 - RNA, 19 nt, Artificial Sequence
  Description of Artificial Sequence: Synthetic oligonucleotide
ugcugagcaggcagucagc

SEQ ID NO: 2815578 - RNA, 19 nt, Artificial Sequence
  Description of Artificial Sequence: Synthetic oligonucleotide
cgucacaucacacuucagc

SEQ ID NO: 2815579 - RNA, 19 nt, Artificial Sequence
  Description of Artificial Sequence: Synthetic oligonucleotide
cacuucagcaccuguuuga

SEQ ID NO: 2815580 - RNA, 19 nt, Artificial Sequence
  Description of Artificial Sequence: Synthetic oligonucleotide
agccaaugucaaucaggag

SEQ ID NO: 2815581 - RNA, 19 nt, Artificial Sequence
  Description of Artificial Sequence: Synthetic oligonucleotide
gcugauagauggugggacc

SEQ ID NO: 2815582 - RNA, 19 nt, Artificial Sequence
  Description of Artificial Sequence: Synthetic oligonucleotide
cacagggugcugagcaggc

SEQ ID NO: 2815583 - RNA, 19 nt, Artificial Sequence
  Description of Artificial Sequence: Synthetic oligonucleotide
cuugaaggacucacaggca

SEQ ID NO: 2815584 - RNA, 19 nt, Artificial Sequence
  Description of Artificial Sequence: Synthetic oligonucleotide
gguggggaaggucagggca

SEQ ID NO: 2815585 - RNA, 19 nt, Artificial Sequence
  Description of Artificial Sequence: Synthetic oligonucleotide
agacagaagcugauagaug

SEQ ID NO: 2815586 - RNA, 19 nt, Artificial Sequence
  Description of Artificial Sequence: Synthetic oligonucleotide
caaggcagaauaucuuaaa

SEQ ID NO: 2815587 - RNA, 19 nt, Artificial Sequence
  Description of Artificial Sequence: Synthetic oligonucleotide
uuccugagggcagugcagu

SEQ ID NO: 2815588 - RNA, 19 nt, Artificial Sequence
  Description of Artificial Sequence: Synthetic oligonucleotide
ugauugcccgccucaacuu

SEQ ID NO: 2815589 - RNA, 19 nt, Artificial Sequence
  Description of Artificial Sequence: Synthetic oligonucleotide
cucccaaagguucuggucu

SEQ ID NO: 2815590 - RNA, 19 nt, Artificial Sequence
  Description of Artificial Sequence: Synthetic oligonucleotide
acccacucaccaggaaggc

SEQ ID NO: 2815591 - RNA, 19 nt, Artificial Sequence
  Description of Artificial Sequence: Synthetic oligonucleotide
uguucccuucaagaucaca

SEQ ID NO: 2815592 - RNA, 19 nt, Artificial Sequence
  Description of Artificial Sequence: Synthetic oligonucleotide
aguagguggggaaggucag

SEQ ID NO: 2815593 - RNA, 19 nt, Artificial Sequence
  Description of Artificial Sequence: Synthetic oligonucleotide
acaggcagacagaagcuga

SEQ ID NO: 2815594 - RNA, 19 nt, Artificial Sequence
  Description of Artificial Sequence: Synthetic oligonucleotide
uggggaaggucagggcagg

SEQ ID NO: 2815595 - RNA, 19 nt, Artificial Sequence
  Description of Artificial Sequence: Synthetic oligonucleotide
caccuguuugauugcccgc

SEQ ID NO: 2815596 - RNA, 19 nt, Artificial Sequence
  Description of Artificial Sequence: Synthetic oligonucleotide
gaaggucagggcaggcagc

SEQ ID NO: 2815597 - RNA, 19 nt, Artificial Sequence
  Description of Artificial Sequence: Synthetic oligonucleotide
gacucacaggcagacagaa

SEQ ID NO: 2815598 - RNA, 19 nt, Artificial Sequence
  Description of Artificial Sequence: Synthetic oligonucleotide
agguuccugagggcagugc

SEQ ID NO: 2815599 - RNA, 19 nt, Artificial Sequence
  Description of Artificial Sequence: Synthetic oligonucleotide
gagggcagugcaguaggug

SEQ ID NO: 2815600 - RNA, 19 nt, Artificial Sequence
  Description of Artificial Sequence: Synthetic oligonucleotide
auuucguuuucugcacagu

SEQ ID NO: 2815601 - RNA, 19 nt, Artificial Sequence
  Description of Artificial Sequence: Synthetic oligonucleotide
cagagccaaugucaaucag

SEQ ID NO: 2815602 - RNA, 19 nt, Artificial Sequence
  Description of Artificial Sequence: Synthetic oligonucleotide
cuggucuguguagucacug

SEQ ID NO: 2815603 - RNA, 19 nt, Artificial Sequence
  Description of Artificial Sequence: Synthetic oligonucleotide
cugagcaggcagucagcag

SEQ ID NO: 2815604 - RNA, 19 nt, Artificial Sequence
  Description of Artificial Sequence: Synthetic oligonucleotide
gugcaguagguggggaagg

SEQ ID NO: 2815605 - RNA, 19 nt, Artificial Sequence
  Description of Artificial Sequence: Synthetic oligonucleotide
ugagggcagugcaguaggu

SEQ ID NO: 2815606 - RNA, 19 nt, Artificial Sequence
  Description of Artificial Sequence: Synthetic oligonucleotide
guuccugagggcagugcag

SEQ ID NO: 2815607 - RNA, 19 nt, Artificial Sequence
  Description of Artificial Sequence: Synthetic oligonucleotide
guggggaaggucagggcag

SEQ ID NO: 2815608 - RNA, 19 nt, Artificial Sequence
  Description of Artificial Sequence: Synthetic oligonucleotide
aggugacuacuggagacca

SEQ ID NO: 2815609 - RNA, 19 nt, Artificial Sequence
  Description of Artificial Sequence: Synthetic oligonucleotide
agcucccaaagguucuggu

SEQ ID NO: 2815610 - RNA, 19 nt, Artificial Sequence
  Description of Artificial Sequence: Synthetic oligonucleotide
cacaggcagacagaagcug

SEQ ID NO: 2815611 - RNA, 19 nt, Artificial Sequence
  Description of Artificial Sequence: Synthetic oligonucleotide
gggaccagagccaauguca

SEQ ID NO: 2815612 - RNA, 19 nt, Artificial Sequence
  Description of Artificial Sequence: Synthetic oligonucleotide
gcuacucuuaagggcaucc

SEQ ID NO: 2815613 - RNA, 19 nt, Artificial Sequence
  Description of Artificial Sequence: Synthetic oligonucleotide
cacacacauaggugacuac

SEQ ID NO: 2815614 - RNA, 19 nt, Artificial Sequence
  Description of Artificial Sequence: Synthetic oligonucleotide
ggagaccagucaaaggccc

SEQ ID NO: 2815615 - RNA, 19 nt, Artificial Sequence
  Description of Artificial Sequence: Synthetic oligonucleotide
guucuggucuguguaguca

SEQ ID NO: 2815616 - RNA, 19 nt, Artificial Sequence
  Description of Artificial Sequence: Synthetic oligonucleotide
gucaaucaggaggucuccc

SEQ ID NO: 2815617 - RNA, 19 nt, Artificial Sequence
  Description of Artificial Sequence: Synthetic oligonucleotide
cugauagauggugggacca

SEQ ID NO: 2815618 - RNA, 19 nt, Artificial Sequence
  Description of Artificial Sequence: Synthetic oligonucleotide
aucacacacauaggugacu

SEQ ID NO: 2815619 - RNA, 19 nt, Artificial Sequence
  Description of Artificial Sequence: Synthetic oligonucleotide
guagguggggaaggucagg

SEQ ID NO: 2815620 - RNA, 19 nt, Artificial Sequence
  Description of Artificial Sequence: Synthetic oligonucleotide
uaagggcauccacccacuc

SEQ ID NO: 2815621 - RNA, 19 nt, Artificial Sequence
  Description of Artificial Sequence: Synthetic oligonucleotide
cacucaccaggaaggcccc

SEQ ID NO: 2815622 - RNA, 19 nt, Artificial Sequence
  Description of Artificial Sequence: Synthetic oligonucleotide
ugcaguagguggggaaggu

SEQ ID NO: 2815623 - RNA, 19 nt, Artificial Sequence
  Description of Artificial Sequence: Synthetic oligonucleotide
gaccgcacccagagguugg

SEQ ID NO: 2815624 - RNA, 19 nt, Artificial Sequence
  Description of Artificial Sequence: Synthetic oligonucleotide
gguuccugagggcagugca

SEQ ID NO: 2815625 - RNA, 19 nt, Artificial Sequence
  Description of Artificial Sequence: Synthetic oligonucleotide
auuuuccagcagaugccug

SEQ ID NO: 2815626 - RNA, 19 nt, Artificial Sequence
  Description of Artificial Sequence: Synthetic oligonucleotide
gcagagagaccgcacccag

SEQ ID NO: 2815627 - RNA, 19 nt, Artificial Sequence
  Description of Artificial Sequence: Synthetic oligonucleotide
cccggcuccuucuucagcc

SEQ ID NO: 2815628 - RNA, 19 nt, Artificial Sequence
  Description of Artificial Sequence: Synthetic oligonucleotide
uagcuacucuuaagggcau

SEQ ID NO: 2815629 - RNA, 19 nt, Artificial Sequence
  Description of Artificial Sequence: Synthetic oligonucleotide
aaggacucacaggcagaca

SEQ ID NO: 2815630 - RNA, 19 nt, Artificial Sequence
  Description of Artificial Sequence: Synthetic oligonucleotide
agaccgcacccagagguug

SEQ ID NO: 2815631 - RNA, 19 nt, Artificial Sequence
  Description of Artificial Sequence: Synthetic oligonucleotide
acagaagcugauagauggu

SEQ ID NO: 2815632 - RNA, 19 nt, Artificial Sequence
  Description of Artificial Sequence: Synthetic oligonucleotide
gucccuugguucuguuccc

SEQ ID NO: 2815633 - RNA, 19 nt, Artificial Sequence
  Description of Artificial Sequence: Synthetic oligonucleotide
ucggcuugagcaggcugcc

SEQ ID NO: 2815634 - RNA, 19 nt, Artificial Sequence
  Description of Artificial Sequence: Synthetic oligonucleotide
ggaggucucccuucacacc

SEQ ID NO: 2815635 - RNA, 19 nt, Artificial Sequence
  Description of Artificial Sequence: Synthetic oligonucleotide
uggcucugcgucacaucac

SEQ ID NO: 2815636 - RNA, 19 nt, Artificial Sequence
  Description of Artificial Sequence: Synthetic oligonucleotide
cugcgucacaucacacuuc

SEQ ID NO: 2815637 - RNA, 19 nt, Artificial Sequence
  Description of Artificial Sequence: Synthetic oligonucleotide
agcuacucuuaagggcauc

SEQ ID NO: 2815638 - RNA, 19 nt, Artificial Sequence
  Description of Artificial Sequence: Synthetic oligonucleotide
gcauccacccacucaccag

SEQ ID NO: 2815639 - RNA, 19 nt, Artificial Sequence
  Description of Artificial Sequence: Synthetic oligonucleotide
cagacagaagcugauagau

SEQ ID NO: 2815640 - RNA, 19 nt, Artificial Sequence
  Description of Artificial Sequence: Synthetic oligonucleotide
cuguuugauugcccgccuc

SEQ ID NO: 2815641 - RNA, 19 nt, Artificial Sequence
  Description of Artificial Sequence: Synthetic oligonucleotide
ccacccacucaccaggaag

SEQ ID NO: 2815642 - RNA, 19 nt, Artificial Sequence
  Description of Artificial Sequence: Synthetic oligonucleotide
gcagacagaagcugauaga

SEQ ID NO: 2815643 - RNA, 19 nt, Artificial Sequence
  Description of Artificial Sequence: Synthetic oligonucleotide
ugagcaggcugcccagguu

SEQ ID NO: 2815644 - RNA, 19 nt, Artificial Sequence
  Description of Artificial Sequence: Synthetic oligonucleotide
caggaggucucccuucaca

SEQ ID NO: 2815645 - RNA, 19 nt, Artificial Sequence
  Description of Artificial Sequence: Synthetic oligonucleotide
accgcacccagagguuggc

SEQ ID NO: 2815646 - RNA, 19 nt, Artificial Sequence
  Description of Artificial Sequence: Synthetic oligonucleotide
ccaaugucaaucaggaggu

SEQ ID NO: 2815647 - RNA, 19 nt, Artificial Sequence
  Description of Artificial Sequence: Synthetic oligonucleotide
agaugccugaggauuucgu

SEQ ID NO: 2815648 - RNA, 19 nt, Artificial Sequence
  Description of Artificial Sequence: Synthetic oligonucleotide
auugcccgccucaacuucu

SEQ ID NO: 2815649 - RNA, 19 nt, Artificial Sequence
  Description of Artificial Sequence: Synthetic oligonucleotide
acaucacacuucagcaccu

SEQ ID NO: 2815650 - RNA, 19 nt, Artificial Sequence
  Description of Artificial Sequence: Synthetic oligonucleotide
guuggcucugcgucacauc

SEQ ID NO: 2815651 - RNA, 19 nt, Artificial Sequence
  Description of Artificial Sequence: Synthetic oligonucleotide
cuacuggagaccagucaaa

SEQ ID NO: 2815652 - RNA, 19 nt, Artificial Sequence
  Description of Artificial Sequence: Synthetic oligonucleotide
ugcccagguuccugagggc

SEQ ID NO: 2815653 - RNA, 19 nt, Artificial Sequence
  Description of Artificial Sequence: Synthetic oligonucleotide
guguagucacugacaauga

SEQ ID NO: 2815654 - RNA, 19 nt, Artificial Sequence
  Description of Artificial Sequence: Synthetic oligonucleotide
caggaggcagagagaccgc

SEQ ID NO: 2815655 - RNA, 19 nt, Artificial Sequence
  Description of Artificial Sequence: Synthetic oligonucleotide
uccacccacucaccaggaa

SEQ ID NO: 2815656 - RNA, 19 nt, Artificial Sequence
  Description of Artificial Sequence: Synthetic oligonucleotide
gucagggcaggcagcgucc

SEQ ID NO: 2815657 - RNA, 19 nt, Artificial Sequence
  Description of Artificial Sequence: Synthetic oligonucleotide
gcacagggugcugagcagg

SEQ ID NO: 2815658 - RNA, 19 nt, Artificial Sequence
  Description of Artificial Sequence: Synthetic oligonucleotide
cagcaccuguuugauugcc

SEQ ID NO: 2815659 - RNA, 19 nt, Artificial Sequence
  Description of Artificial Sequence: Synthetic oligonucleotide
ggucagggcaggcagcguc

SEQ ID NO: 2815660 - RNA, 19 nt, Artificial Sequence
  Description of Artificial Sequence: Synthetic oligonucleotide
ugcccgccucaacuucucc

SEQ ID NO: 2815661 - RNA, 19 nt, Artificial Sequence
  Description of Artificial Sequence: Synthetic oligonucleotide
gugacuacuggagaccagu

SEQ ID NO: 2815662 - RNA, 19 nt, Artificial Sequence
  Description of Artificial Sequence: Synthetic oligonucleotide
ggcucugcgucacaucaca

SEQ ID NO: 2815663 - RNA, 19 nt, Artificial Sequence
  Description of Artificial Sequence: Synthetic oligonucleotide
aggaggcagagagaccgca

SEQ ID NO: 2815664 - RNA, 19 nt, Artificial Sequence
  Description of Artificial Sequence: Synthetic oligonucleotide
ucaggucccuugguucugu

SEQ ID NO: 2815665 - RNA, 19 nt, Artificial Sequence
  Description of Artificial Sequence: Synthetic oligonucleotide
acccagagguuggcucugc

SEQ ID NO: 2815666 - RNA, 19 nt, Artificial Sequence
  Description of Artificial Sequence: Synthetic oligonucleotide
caaagguucuggucugugu

SEQ ID NO: 2815667 - RNA, 19 nt, Artificial Sequence
  Description of Artificial Sequence: Synthetic oligonucleotide
ggcagugcaguaggugggg

SEQ ID NO: 2815668 - RNA, 19 nt, Artificial Sequence
  Description of Artificial Sequence: Synthetic oligonucleotide
gcucccaaagguucugguc

SEQ ID NO: 2815669 - RNA, 19 nt, Artificial Sequence
  Description of Artificial Sequence: Synthetic oligonucleotide
ucccuugguucuguucccu

SEQ ID NO: 2815670 - RNA, 19 nt, Artificial Sequence
  Description of Artificial Sequence: Synthetic oligonucleotide
gggcagugcaguagguggg

SEQ ID NO: 2815671 - RNA, 19 nt, Artificial Sequence
  Description of Artificial Sequence: Synthetic oligonucleotide
cucugcgucacaucacacu

SEQ ID NO: 2815672 - RNA, 19 nt, Artificial Sequence
  Description of Artificial Sequence: Synthetic oligonucleotide
cacuucugcagcucccaaa

SEQ ID NO: 2815673 - RNA, 19 nt, Artificial Sequence
  Description of Artificial Sequence: Synthetic oligonucleotide
aggucucccuucacaccac

SEQ ID NO: 2815674 - RNA, 19 nt, Artificial Sequence
  Description of Artificial Sequence: Synthetic oligonucleotide
ggcacagggugcugagcag

SEQ ID NO: 2815675 - RNA, 19 nt, Artificial Sequence
  Description of Artificial Sequence: Synthetic oligonucleotide
agcagaugccugaggauuu

SEQ ID NO: 2815676 - RNA, 19 nt, Artificial Sequence
  Description of Artificial Sequence: Synthetic oligonucleotide
cuacucuuaagggcaucca

SEQ ID NO: 2815677 - RNA, 19 nt, Artificial Sequence
  Description of Artificial Sequence: Synthetic oligonucleotide
ggcauccacccacucacca

SEQ ID NO: 2815678 - RNA, 19 nt, Artificial Sequence
  Description of Artificial Sequence: Synthetic oligonucleotide
cuucuccuccuucucaggu

SEQ ID NO: 2815679 - RNA, 19 nt, Artificial Sequence
  Description of Artificial Sequence: Synthetic oligonucleotide
uccugagggcagugcagua

SEQ ID NO: 2815680 - RNA, 19 nt, Artificial Sequence
  Description of Artificial Sequence: Synthetic oligonucleotide
guuugauugcccgccucaa

SEQ ID NO: 2815681 - RNA, 19 nt, Artificial Sequence
  Description of Artificial Sequence: Synthetic oligonucleotide
auggugggaccagagccaa

SEQ ID NO: 2815682 - RNA, 19 nt, Artificial Sequence
  Description of Artificial Sequence: Synthetic oligonucleotide
ccuugguucuguucccuuc

SEQ ID NO: 2815683 - RNA, 19 nt, Artificial Sequence
  Description of Artificial Sequence: Synthetic oligonucleotide
caggcagcguccaggcaca

SEQ ID NO: 2815684 - RNA, 19 nt, Artificial Sequence
  Description of Artificial Sequence: Synthetic oligonucleotide
ggucucccuucacaccacc

SEQ ID NO: 2815685 - RNA, 19 nt, Artificial Sequence
  Description of Artificial Sequence: Synthetic oligonucleotide
ggcagucagcaggaggcag

SEQ ID NO: 2815686 - RNA, 19 nt, Artificial Sequence
  Description of Artificial Sequence: Synthetic oligonucleotide
cagugcaguagguggggaa

SEQ ID NO: 2815687 - RNA, 19 nt, Artificial Sequence
  Description of Artificial Sequence: Synthetic oligonucleotide
cagagagaccgcacccaga

SEQ ID NO: 2815688 - RNA, 19 nt, Artificial Sequence
  Description of Artificial Sequence: Synthetic oligonucleotide
ccaaggcagaauaucuuaa

SEQ ID NO: 2815689 - RNA, 19 nt, Artificial Sequence
  Description of Artificial Sequence: Synthetic oligonucleotide
cccuucaagaucacacaca

SEQ ID NO: 2815690 - RNA, 19 nt, Artificial Sequence
  Description of Artificial Sequence: Synthetic oligonucleotide
caaugucaaucaggagguc

SEQ ID NO: 2815691 - RNA, 19 nt, Artificial Sequence
  Description of Artificial Sequence: Synthetic oligonucleotide
ccugagggcagugcaguag

SEQ ID NO: 2815692 - RNA, 19 nt, Artificial Sequence
  Description of Artificial Sequence: Synthetic oligonucleotide
cacacuucagcaccuguuu

SEQ ID NO: 2815693 - RNA, 19 nt, Artificial Sequence
  Description of Artificial Sequence: Synthetic oligonucleotide
cucaggucccuugguucug

SEQ ID NO: 2815694 - RNA, 19 nt, Artificial Sequence
  Description of Artificial Sequence: Synthetic oligonucleotide
ucacaccaccaaggcagaa

SEQ ID NO: 2815695 - RNA, 19 nt, Artificial Sequence
  Description of Artificial Sequence: Synthetic oligonucleotide
caggcacagggugcugagc

SEQ ID NO: 2815696 - RNA, 19 nt, Artificial Sequence
  Description of Artificial Sequence: Synthetic oligonucleotide
agggugcugagcaggcagu

SEQ ID NO: 2815697 - RNA, 19 nt, Artificial Sequence
  Description of Artificial Sequence: Synthetic oligonucleotide
gcugagcaggcagucagca

SEQ ID NO: 2815698 - RNA, 19 nt, Artificial Sequence
  Description of Artificial Sequence: Synthetic oligonucleotide
ggugacuacuggagaccag

SEQ ID NO: 2815699 - RNA, 19 nt, Artificial Sequence
  Description of Artificial Sequence: Synthetic oligonucleotide
cuguucccuucaagaucac

SEQ ID NO: 2815700 - RNA, 19 nt, Artificial Sequence
  Description of Artificial Sequence: Synthetic oligonucleotide
cccgccucaacuucuccuc

SEQ ID NO: 2815701 - RNA, 19 nt, Artificial Sequence
  Description of Artificial Sequence: Synthetic oligonucleotide
cccagguuccugagggcag

SEQ ID NO: 2815702 - RNA, 19 nt, Artificial Sequence
  Description of Artificial Sequence: Synthetic oligonucleotide
agcaggcagucagcaggag

SEQ ID NO: 2815703 - RNA, 19 nt, Artificial Sequence
  Description of Artificial Sequence: Synthetic oligonucleotide
ccaccaaggcagaauaucu

SEQ ID NO: 2815704 - RNA, 19 nt, Artificial Sequence
  Description of Artificial Sequence: Synthetic oligonucleotide
acagggugcugagcaggca

SEQ ID NO: 2815705 - RNA, 19 nt, Artificial Sequence
  Description of Artificial Sequence: Synthetic oligonucleotide
aggcagucagcaggaggca

SEQ ID NO: 2815706 - RNA, 19 nt, Artificial Sequence
  Description of Artificial Sequence: Synthetic oligonucleotide
ccaggcacagggugcugag

SEQ ID NO: 2815707 - RNA, 19 nt, Artificial Sequence
  Description of Artificial Sequence: Synthetic oligonucleotide
ccuucacaccaccaaggca

SEQ ID NO: 2815708 - RNA, 19 nt, Artificial Sequence
  Description of Artificial Sequence: Synthetic oligonucleotide
ggaccagagccaaugucaa

SEQ ID NO: 2815709 - RNA, 19 nt, Artificial Sequence
  Description of Artificial Sequence: Synthetic oligonucleotide
gucucccuucacaccacca

SEQ ID NO: 2815710 - RNA, 19 nt, Artificial Sequence
  Description of Artificial Sequence: Synthetic oligonucleotide
cuucucaggucccuugguu

SEQ ID NO: 2815711 - RNA, 19 nt, Artificial Sequence
  Description of Artificial Sequence: Synthetic oligonucleotide
aggcagacagaagcugaua

SEQ ID NO: 2815712 - RNA, 19 nt, Artificial Sequence
  Description of Artificial Sequence: Synthetic oligonucleotide
ggcagagagaccgcaccca

SEQ ID NO: 2815713 - RNA, 19 nt, Artificial Sequence
  Description of Artificial Sequence: Synthetic oligonucleotide
caccaaggcagaauaucuu

SEQ ID NO: 2815714 - RNA, 19 nt, Artificial Sequence
  Description of Artificial Sequence: Synthetic oligonucleotide
caaucaggaggucucccuu

SEQ ID NO: 2815715 - RNA, 19 nt, Artificial Sequence
  Description of Artificial Sequence: Synthetic oligonucleotide
gggaaggucagggcaggca

SEQ ID NO: 2815716 - RNA, 19 nt, Artificial Sequence
  Description of Artificial Sequence: Synthetic oligonucleotide
auccacccacucaccagga

SEQ ID NO: 2815717 - RNA, 19 nt, Artificial Sequence
  Description of Artificial Sequence: Synthetic oligonucleotide
ccaaagguucuggucugug

SEQ ID NO: 2815718 - RNA, 19 nt, Artificial Sequence
  Description of Artificial Sequence: Synthetic oligonucleotide
cacccagagguuggcucug

SEQ ID NO: 2815719 - RNA, 19 nt, Artificial Sequence
  Description of Artificial Sequence: Synthetic oligonucleotide
cccagagguuggcucugcg

SEQ ID NO: 2815720 - RNA, 19 nt, Artificial Sequence
  Description of Artificial Sequence: Synthetic oligonucleotide
ggcugcccagguuccugag

SEQ ID NO: 2815721 - RNA, 19 nt, Artificial Sequence
  Description of Artificial Sequence: Synthetic oligonucleotide
cagggcaggcagcguccag

SEQ ID NO: 2815722 - RNA, 19 nt, Artificial Sequence
  Description of Artificial Sequence: Synthetic oligonucleotide
gcguccaggcacagggugc

SEQ ID NO: 2815723 - RNA, 19 nt, Artificial Sequence
  Description of Artificial Sequence: Synthetic oligonucleotide
cagcagaugccugaggauu

SEQ ID NO: 2815724 - RNA, 19 nt, Artificial Sequence
  Description of Artificial Sequence: Synthetic oligonucleotide
gugggaccagagccaaugu

SEQ ID NO: 2815725 - RNA, 19 nt, Artificial Sequence
  Description of Artificial Sequence: Synthetic oligonucleotide
gaccagagccaaugucaau

SEQ ID NO: 2815726 - RNA, 19 nt, Artificial Sequence
  Description of Artificial Sequence: Synthetic oligonucleotide
gcagcucccaaagguucug

SEQ ID NO: 2815727 - RNA, 19 nt, Artificial Sequence
  Description of Artificial Sequence: Synthetic oligonucleotide
caggcagacagaagcugau

SEQ ID NO: 2815728 - RNA, 19 nt, Artificial Sequence
  Description of Artificial Sequence: Synthetic oligonucleotide
cccacucaccaggaaggcc

SEQ ID NO: 2815729 - RNA, 19 nt, Artificial Sequence
  Description of Artificial Sequence: Synthetic oligonucleotide
ccucggcuugagcaggcug

SEQ ID NO: 2815730 - RNA, 19 nt, Artificial Sequence
  Description of Artificial Sequence: Synthetic oligonucleotide
ggugcugagcaggcaguca

SEQ ID NO: 2815731 - RNA, 19 nt, Artificial Sequence
  Description of Artificial Sequence: Synthetic oligonucleotide
ccgccucaacuucuccucc

SEQ ID NO: 2815732 - RNA, 19 nt, Artificial Sequence
  Description of Artificial Sequence: Synthetic oligonucleotide
ggacucacaggcagacaga

SEQ ID NO: 2815733 - RNA, 19 nt, Artificial Sequence
  Description of Artificial Sequence: Synthetic oligonucleotide
gcaguagguggggaagguc

SEQ ID NO: 2815734 - RNA, 19 nt, Artificial Sequence
  Description of Artificial Sequence: Synthetic oligonucleotide
ggcagcguccaggcacagg

SEQ ID NO: 2815735 - RNA, 19 nt, Artificial Sequence
  Description of Artificial Sequence: Synthetic oligonucleotide
gcccagguuccugagggca

SEQ ID NO: 2815736 - RNA, 19 nt, Artificial Sequence
  Description of Artificial Sequence: Synthetic oligonucleotide
cgcacccagagguuggcuc

SEQ ID NO: 2815737 - RNA, 19 nt, Artificial Sequence
  Description of Artificial Sequence: Synthetic oligonucleotide
cacaccaccaaggcagaau

SEQ ID NO: 2815738 - RNA, 19 nt, Artificial Sequence
  Description of Artificial Sequence: Synthetic oligonucleotide
gcagaugccugaggauuuc

SEQ ID NO: 2815739 - RNA, 19 nt, Artificial Sequence
  Description of Artificial Sequence: Synthetic oligonucleotide
cuguguagucacugacaau

SEQ ID NO: 2815740 - RNA, 19 nt, Artificial Sequence
  Description of Artificial Sequence: Synthetic oligonucleotide
gccacuucugcagcuccca

SEQ ID NO: 2815741 - RNA, 19 nt, Artificial Sequence
  Description of Artificial Sequence: Synthetic oligonucleotide
gccugaggauuucguuuuc

SEQ ID NO: 2815742 - RNA, 19 nt, Artificial Sequence
  Description of Artificial Sequence: Synthetic oligonucleotide
gcucugcgucacaucacac

SEQ ID NO: 2815743 - RNA, 19 nt, Artificial Sequence
  Description of Artificial Sequence: Synthetic oligonucleotide
aggucagggcaggcagcgu

SEQ ID NO: 2815744 - RNA, 19 nt, Artificial Sequence
  Description of Artificial Sequence: Synthetic oligonucleotide
gggugcugagcaggcaguc

SEQ ID NO: 2815745 - RNA, 19 nt, Artificial Sequence
  Description of Artificial Sequence: Synthetic oligonucleotide
caccaccaaggcagaauau

SEQ ID NO: 2815746 - RNA, 19 nt, Artificial Sequence
  Description of Artificial Sequence: Synthetic oligonucleotide
cuucagcaccuguuugauu

SEQ ID NO: 2815747 - RNA, 19 nt, Artificial Sequence
  Description of Artificial Sequence: Synthetic oligonucleotide
ggggaaggucagggcaggc

SEQ ID NO: 2815748 - RNA, 19 nt, Artificial Sequence
  Description of Artificial Sequence: Synthetic oligonucleotide
aggcagcguccaggcacag

SEQ ID NO: 2815749 - RNA, 19 nt, Artificial Sequence
  Description of Artificial Sequence: Synthetic oligonucleotide
gggcauccacccacucacc

SEQ ID NO: 2815750 - RNA, 19 nt, Artificial Sequence
  Description of Artificial Sequence: Synthetic oligonucleotide
gagaccgcacccagagguu

SEQ ID NO: 2815751 - RNA, 19 nt, Artificial Sequence
  Description of Artificial Sequence: Synthetic oligonucleotide
gcagugcaguaggugggga

SEQ ID NO: 2815752 - RNA, 19 nt, Artificial Sequence
  Description of Artificial Sequence: Synthetic oligonucleotide
ccccucggcuugagcaggc

SEQ ID NO: 2815753 - RNA, 19 nt, Artificial Sequence
  Description of Artificial Sequence: Synthetic oligonucleotide
gcgucacaucacacuucag

SEQ ID NO: 2815754 - RNA, 19 nt, Artificial Sequence
  Description of Artificial Sequence: Synthetic oligonucleotide
ccccggcuccuucuucagc

SEQ ID NO: 2815755 - RNA, 19 nt, Artificial Sequence
  Description of Artificial Sequence: Synthetic oligonucleotide
gcccgccucaacuucuccu

SEQ ID NO: 2815756 - RNA, 19 nt, Artificial Sequence
  Description of Artificial Sequence: Synthetic oligonucleotide
ccagagguuggcucugcgu

SEQ ID NO: 2815757 - RNA, 19 nt, Artificial Sequence
  Description of Artificial Sequence: Synthetic oligonucleotide
gguuggcucugcgucacau

SEQ ID NO: 2815758 - RNA, 19 nt, Artificial Sequence
  Description of Artificial Sequence: Synthetic oligonucleotide
cagcguccaggcacagggu

SEQ ID NO: 2815759 - RNA, 19 nt, Artificial Sequence
  Description of Artificial Sequence: Synthetic oligonucleotide
cguuuucugcacagugucu

SEQ ID NO: 2815760 - RNA, 19 nt, Artificial Sequence
  Description of Artificial Sequence: Synthetic oligonucleotide
ccugaggauuucguuuucu

SEQ ID NO: 2815761 - RNA, 19 nt, Artificial Sequence
  Description of Artificial Sequence: Synthetic oligonucleotide
ccuguuugauugcccgccu

SEQ ID NO: 2815762 - RNA, 19 nt, Artificial Sequence
  Description of Artificial Sequence: Synthetic oligonucleotide
ccggcuccuucuucagcca

SEQ ID NO: 2815763 - RNA, 19 nt, Artificial Sequence
  Description of Artificial Sequence: Synthetic oligonucleotide
ccuucucaggucccuuggu

SEQ ID NO: 2815764 - RNA, 19 nt, Artificial Sequence
  Description of Artificial Sequence: Synthetic oligonucleotide
ccacuucugcagcucccaa

SEQ ID NO: 2815765 - RNA, 19 nt, Artificial Sequence
  Description of Artificial Sequence: Synthetic oligonucleotide
caggucccuugguucuguu

SEQ ID NO: 2815766 - RNA, 19 nt, Artificial Sequence
  Description of Artificial Sequence: Synthetic oligonucleotide
cgccucaacuucuccuccu

SEQ ID NO: 2815767 - RNA, 19 nt, Artificial Sequence
  Description of Artificial Sequence: Synthetic oligonucleotide
cccaaagguucuggucugu

SEQ ID NO: 2815768 - RNA, 19 nt, Artificial Sequence
  Description of Artificial Sequence: Synthetic oligonucleotide
cguccaggcacagggugcu

SEQ ID NO: 2815769 - RNA, 19 nt, Artificial Sequence
  Description of Artificial Sequence: Synthetic oligonucleotide
cccuugguucuguucccuu

SEQ ID NO: 2815770 - RNA, 19 nt, Artificial Sequence
  Description of Artificial Sequence: Synthetic oligonucleotide
ccgcacccagagguuggcu

SEQ ID NO: 2815771 - RNA, 19 nt, Artificial Sequence
  Description of Artificial Sequence: Synthetic oligonucleotide
cccucggcuugagcaggcu

SEQ ID NO: 2815772 - RNA, 19 nt, Artificial Sequence
  Description of Artificial Sequence: Synthetic oligonucleotide
gauagaacucugcagaugg

SEQ ID NO: 2815773 - RNA, 19 nt, Artificial Sequence
  Description of Artificial Sequence: Synthetic oligonucleotide
aucugaaucaucuuucugg

SEQ ID NO: 2815774 - RNA, 19 nt, Artificial Sequence
  Description of Artificial Sequence: Synthetic oligonucleotide
aauagaagccuguccaugg

SEQ ID NO: 2815775 - RNA, 19 nt, Artificial Sequence
  Description of Artificial Sequence: Synthetic oligonucleotide
ugggacauaaaauacacug

SEQ ID NO: 2815776 - RNA, 19 nt, Artificial Sequence
  Description of Artificial Sequence: Synthetic oligonucleotide
auacacuguggauaaaugc

SEQ ID NO: 2815777 - RNA, 19 nt, Artificial Sequence
  Description of Artificial Sequence: Synthetic oligonucleotide
uaaugauugcccacgauag

SEQ ID NO: 2815778 - RNA, 19 nt, Artificial Sequence
  Description of Artificial Sequence: Synthetic oligonucleotide
agaacaucucaucugaauc

SEQ ID NO: 2815779 - RNA, 19 nt, Artificial Sequence
  Description of Artificial Sequence: Synthetic oligonucleotide
ugaaucaucuuucugggac

SEQ ID NO: 2815780 - RNA, 19 nt, Artificial Sequence
  Description of Artificial Sequence: Synthetic oligonucleotide
uacacuguggauaaaugcc

SEQ ID NO: 2815781 - RNA, 19 nt, Artificial Sequence
  Description of Artificial Sequence: Synthetic oligonucleotide
acaggcugcaaacuaaggc

SEQ ID NO: 2815782 - RNA, 19 nt, Artificial Sequence
  Description of Artificial Sequence: Synthetic oligonucleotide
ucuggaauccauaaggcac

SEQ ID NO: 2815783 - RNA, 19 nt, Artificial Sequence
  Description of Artificial Sequence: Synthetic oligonucleotide
aauacaagccccugucuuc

SEQ ID NO: 2815784 - RNA, 19 nt, Artificial Sequence
  Description of Artificial Sequence: Synthetic oligonucleotide
aagaauguccuucuguaca

SEQ ID NO: 2815785 - RNA, 19 nt, Artificial Sequence
  Description of Artificial Sequence: Synthetic oligonucleotide
uggauaaaugcccaggaca

SEQ ID NO: 2815786 - RNA, 19 nt, Artificial Sequence
  Description of Artificial Sequence: Synthetic oligonucleotide
uguaauaggguucccauuc

SEQ ID NO: 2815787 - RNA, 19 nt, Artificial Sequence
  Description of Artificial Sequence: Synthetic oligonucleotide
uguccuucuguacagagca

SEQ ID NO: 2815788 - RNA, 19 nt, Artificial Sequence
  Description of Artificial Sequence: Synthetic oligonucleotide
accucuggaauccauaagg

SEQ ID NO: 2815789 - RNA, 19 nt, Artificial Sequence
  Description of Artificial Sequence: Synthetic oligonucleotide
acauaaaauacacugugga

SEQ ID NO: 2815790 - RNA, 19 nt, Artificial Sequence
  Description of Artificial Sequence: Synthetic oligonucleotide
agccugaagggccagaggc

SEQ ID NO: 2815791 - RNA, 19 nt, Artificial Sequence
  Description of Artificial Sequence: Synthetic oligonucleotide
uaaaauacacuguggauaa

SEQ ID NO: 2815792 - RNA, 19 nt, Artificial Sequence
  Description of Artificial Sequence: Synthetic oligonucleotide
ucccauuaccaauagaagc

SEQ ID NO: 2815793 - RNA, 19 nt, Artificial Sequence
  Description of Artificial Sequence: Synthetic oligonucleotide
caaacuaaggcccaccggc

SEQ ID NO: 2815794 - RNA, 19 nt, Artificial Sequence
  Description of Artificial Sequence: Synthetic oligonucleotide
augcccaggacacaggagc

SEQ ID NO: 2815795 - RNA, 19 nt, Artificial Sequence
  Description of Artificial Sequence: Synthetic oligonucleotide
uuucuugggacauaaaaua

SEQ ID NO: 2815796 - RNA, 19 nt, Artificial Sequence
  Description of Artificial Sequence: Synthetic oligonucleotide
aucuuucugggacacauuc

SEQ ID NO: 2815797 - RNA, 19 nt, Artificial Sequence
  Description of Artificial Sequence: Synthetic oligonucleotide
ucaaagaauguccuucugu

SEQ ID NO: 2815798 - RNA, 19 nt, Artificial Sequence
  Description of Artificial Sequence: Synthetic oligonucleotide
caugagcccaucuaguucc

SEQ ID NO: 2815799 - RNA, 19 nt, Artificial Sequence
  Description of Artificial Sequence: Synthetic oligonucleotide
ucuugggacauaaaauaca

SEQ ID NO: 2815800 - RNA, 19 nt, Artificial Sequence
  Description of Artificial Sequence: Synthetic oligonucleotide
cuugggacauaaaauacac

SEQ ID NO: 2815801 - RNA, 19 nt, Artificial Sequence
  Description of Artificial Sequence: Synthetic oligonucleotide
accaauagaagccugucca

SEQ ID NO: 2815802 - RNA, 19 nt, Artificial Sequence
  Description of Artificial Sequence: Synthetic oligonucleotide
acauucccagaccaguugc

SEQ ID NO: 2815803 - RNA, 19 nt, Artificial Sequence
  Description of Artificial Sequence: Synthetic oligonucleotide
cuuucugggacacauuccc

SEQ ID NO: 2815804 - RNA, 19 nt, Artificial Sequence
  Description of Artificial Sequence: Synthetic oligonucleotide
uaaggcacagcugacauga

SEQ ID NO: 2815805 - RNA, 19 nt, Artificial Sequence
  Description of Artificial Sequence: Synthetic oligonucleotide
ugcaaacuaaggcccaccg

SEQ ID NO: 2815806 - RNA, 19 nt, Artificial Sequence
  Description of Artificial Sequence: Synthetic oligonucleotide
gacauaaaauacacugugg

SEQ ID NO: 2815807 - RNA, 19 nt, Artificial Sequence
  Description of Artificial Sequence: Synthetic oligonucleotide
agagcacugaauacaagcc

SEQ ID NO: 2815808 - RNA, 19 nt, Artificial Sequence
  Description of Artificial Sequence: Synthetic oligonucleotide
caggcugcaaacuaaggcc

SEQ ID NO: 2815809 - RNA, 19 nt, Artificial Sequence
  Description of Artificial Sequence: Synthetic oligonucleotide
acacaggagcgacacaacc

SEQ ID NO: 2815810 - RNA, 19 nt, Artificial Sequence
  Description of Artificial Sequence: Synthetic oligonucleotide
auaaaauacacuguggaua

SEQ ID NO: 2815811 - RNA, 19 nt, Artificial Sequence
  Description of Artificial Sequence: Synthetic oligonucleotide
uguggauaaaugcccagga

SEQ ID NO: 2815812 - RNA, 19 nt, Artificial Sequence
  Description of Artificial Sequence: Synthetic oligonucleotide
gauuccuggucacagaaca

SEQ ID NO: 2815813 - RNA, 19 nt, Artificial Sequence
  Description of Artificial Sequence: Synthetic oligonucleotide
agcacugaauacaagcccc

SEQ ID NO: 2815814 - RNA, 19 nt, Artificial Sequence
  Description of Artificial Sequence: Synthetic oligonucleotide
gaauccauaaggcacagcu

SEQ ID NO: 2815815 - RNA, 19 nt, Artificial Sequence
  Description of Artificial Sequence: Synthetic oligonucleotide
uucuugggacauaaaauac

SEQ ID NO: 2815816 - RNA, 19 nt, Artificial Sequence
  Description of Artificial Sequence: Synthetic oligonucleotide
uucccauuaccaauagaag

SEQ ID NO: 2815817 - RNA, 19 nt, Artificial Sequence
  Description of Artificial Sequence: Synthetic oligonucleotide
agauggagcucucugagca

SEQ ID NO: 2815818 - RNA, 19 nt, Artificial Sequence
  Description of Artificial Sequence: Synthetic oligonucleotide
cuucccauuaccaauagaa

SEQ ID NO: 2815819 - RNA, 19 nt, Artificial Sequence
  Description of Artificial Sequence: Synthetic oligonucleotide
uuuguaauaggguucccau

SEQ ID NO: 2815820 - RNA, 19 nt, Artificial Sequence
  Description of Artificial Sequence: Synthetic oligonucleotide
gaacaucucaucugaauca

SEQ ID NO: 2815821 - RNA, 19 nt, Artificial Sequence
  Description of Artificial Sequence: Synthetic oligonucleotide
ucucucaggacaagcaaug

SEQ ID NO: 2815822 - RNA, 19 nt, Artificial Sequence
  Description of Artificial Sequence: Synthetic oligonucleotide
agaauguccuucuguacag

SEQ ID NO: 2815823 - RNA, 19 nt, Artificial Sequence
  Description of Artificial Sequence: Synthetic oligonucleotide
aaauacacuguggauaaau

SEQ ID NO: 2815824 - RNA, 19 nt, Artificial Sequence
  Description of Artificial Sequence: Synthetic oligonucleotide
auaaaugcccaggacacag

SEQ ID NO: 2815825 - RNA, 19 nt, Artificial Sequence
  Description of Artificial Sequence: Synthetic oligonucleotide
aggacaagcaaugcugacc

SEQ ID NO: 2815826 - RNA, 19 nt, Artificial Sequence
  Description of Artificial Sequence: Synthetic oligonucleotide
guccugguggucuucaugg

SEQ ID NO: 2815827 - RNA, 19 nt, Artificial Sequence
  Description of Artificial Sequence: Synthetic oligonucleotide
auaggguucccauucucuc

SEQ ID NO: 2815828 - RNA, 19 nt, Artificial Sequence
  Description of Artificial Sequence: Synthetic oligonucleotide
aaaugcccaggacacagga

SEQ ID NO: 2815829 - RNA, 19 nt, Artificial Sequence
  Description of Artificial Sequence: Synthetic oligonucleotide
aauacacuguggauaaaug

SEQ ID NO: 2815830 - RNA, 19 nt, Artificial Sequence
  Description of Artificial Sequence: Synthetic oligonucleotide
gaggcuucccuaaugauug

SEQ ID NO: 2815831 - RNA, 19 nt, Artificial Sequence
  Description of Artificial Sequence: Synthetic oligonucleotide
acaggagcgacacaaccag

SEQ ID NO: 2815832 - RNA, 19 nt, Artificial Sequence
  Description of Artificial Sequence: Synthetic oligonucleotide
ggacauaaaauacacugug

SEQ ID NO: 2815833 - RNA, 19 nt, Artificial Sequence
  Description of Artificial Sequence: Synthetic oligonucleotide
gaagccuguccauggaggg

SEQ ID NO: 2815834 - RNA, 19 nt, Artificial Sequence
  Description of Artificial Sequence: Synthetic oligonucleotide
aggcccaccggcuaggugg

SEQ ID NO: 2815835 - RNA, 19 nt, Artificial Sequence
  Description of Artificial Sequence: Synthetic oligonucleotide
cauggcuccaccuuucuug

SEQ ID NO: 2815836 - RNA, 19 nt, Artificial Sequence
  Description of Artificial Sequence: Synthetic oligonucleotide
acacuguggauaaaugccc

SEQ ID NO: 2815837 - RNA, 19 nt, Artificial Sequence
  Description of Artificial Sequence: Synthetic oligonucleotide
uucugggacacauucccag

SEQ ID NO: 2815838 - RNA, 19 nt, Artificial Sequence
  Description of Artificial Sequence: Synthetic oligonucleotide
cuaguuccuguccuggugg

SEQ ID NO: 2815839 - RNA, 19 nt, Artificial Sequence
  Description of Artificial Sequence: Synthetic oligonucleotide
ucacagaacaucucaucug

SEQ ID NO: 2815840 - RNA, 19 nt, Artificial Sequence
  Description of Artificial Sequence: Synthetic oligonucleotide
acaugagcccaucuaguuc

SEQ ID NO: 2815841 - RNA, 19 nt, Artificial Sequence
  Description of Artificial Sequence: Synthetic oligonucleotide
ucuaguuccuguccuggug

SEQ ID NO: 2815842 - RNA, 19 nt, Artificial Sequence
  Description of Artificial Sequence: Synthetic oligonucleotide
aggacuggaacucuuggcu

SEQ ID NO: 2815843 - RNA, 19 nt, Artificial Sequence
  Description of Artificial Sequence: Synthetic oligonucleotide
ucucaucugaaucaucuuu

SEQ ID NO: 2815844 - RNA, 19 nt, Artificial Sequence
  Description of Artificial Sequence: Synthetic oligonucleotide
uuuuguaauaggguuccca

SEQ ID NO: 2815845 - RNA, 19 nt, Artificial Sequence
  Description of Artificial Sequence: Synthetic oligonucleotide
cugacaugagcccaucuag

SEQ ID NO: 2815846 - RNA, 19 nt, Artificial Sequence
  Description of Artificial Sequence: Synthetic oligonucleotide
accaguugcccuccagucc

SEQ ID NO: 2815847 - RNA, 19 nt, Artificial Sequence
  Description of Artificial Sequence: Synthetic oligonucleotide
uaccaauagaagccugucc

SEQ ID NO: 2815848 - RNA, 19 nt, Artificial Sequence
  Description of Artificial Sequence: Synthetic oligonucleotide
gagcacugaauacaagccc

SEQ ID NO: 2815849 - RNA, 19 nt, Artificial Sequence
  Description of Artificial Sequence: Synthetic oligonucleotide
gcuucuuugucaaagaaug

SEQ ID NO: 2815850 - RNA, 19 nt, Artificial Sequence
  Description of Artificial Sequence: Synthetic oligonucleotide
ucaggacaagcaaugcuga

SEQ ID NO: 2815851 - RNA, 19 nt, Artificial Sequence
  Description of Artificial Sequence: Synthetic oligonucleotide
ucuuucugggacacauucc

SEQ ID NO: 2815852 - RNA, 19 nt, Artificial Sequence
  Description of Artificial Sequence: Synthetic oligonucleotide
cugucuucagcuugcacag

SEQ ID NO: 2815853 - RNA, 19 nt, Artificial Sequence
  Description of Artificial Sequence: Synthetic oligonucleotide
aaugauugcccacgauaga

SEQ ID NO: 2815854 - RNA, 19 nt, Artificial Sequence
  Description of Artificial Sequence: Synthetic oligonucleotide
ucucaggacaagcaaugcu

SEQ ID NO: 2815855 - RNA, 19 nt, Artificial Sequence
  Description of Artificial Sequence: Synthetic oligonucleotide
uagaacucugcagauggag

SEQ ID NO: 2815856 - RNA, 19 nt, Artificial Sequence
  Description of Artificial Sequence: Synthetic oligonucleotide
cccauuaccaauagaagcc

SEQ ID NO: 2815857 - RNA, 19 nt, Artificial Sequence
  Description of Artificial Sequence: Synthetic oligonucleotide
uucuguacagagcacugaa

SEQ ID NO: 2815858 - RNA, 19 nt, Artificial Sequence
  Description of Artificial Sequence: Synthetic oligonucleotide
uugucaaagaauguccuuc

SEQ ID NO: 2815859 - RNA, 19 nt, Artificial Sequence
  Description of Artificial Sequence: Synthetic oligonucleotide
uaaaugcccaggacacagg

SEQ ID NO: 2815860 - RNA, 19 nt, Artificial Sequence
  Description of Artificial Sequence: Synthetic oligonucleotide
aggcacagcugacaugagc

SEQ ID NO: 2815861 - RNA, 19 nt, Artificial Sequence
  Description of Artificial Sequence: Synthetic oligonucleotide
cuuggcuucuuugucaaag

SEQ ID NO: 2815862 - RNA, 19 nt, Artificial Sequence
  Description of Artificial Sequence: Synthetic oligonucleotide
aauaggguucccauucucu

SEQ ID NO: 2815863 - RNA, 19 nt, Artificial Sequence
  Description of Artificial Sequence: Synthetic oligonucleotide
uagaagccuguccauggag

SEQ ID NO: 2815864 - RNA, 19 nt, Artificial Sequence
  Description of Artificial Sequence: Synthetic oligonucleotide
ucccuaaugauugcccacg

SEQ ID NO: 2815865 - RNA, 19 nt, Artificial Sequence
  Description of Artificial Sequence: Synthetic oligonucleotide
uucagcuugcacaggcugc

SEQ ID NO: 2815866 - RNA, 19 nt, Artificial Sequence
  Description of Artificial Sequence: Synthetic oligonucleotide
gacacaaccagcugccuuc

SEQ ID NO: 2815867 - RNA, 19 nt, Artificial Sequence
  Description of Artificial Sequence: Synthetic oligonucleotide
aguccauuggaacuggcaa

SEQ ID NO: 2815868 - RNA, 19 nt, Artificial Sequence
  Description of Artificial Sequence: Synthetic oligonucleotide
cacgauagaacucugcaga

SEQ ID NO: 2815869 - RNA, 19 nt, Artificial Sequence
  Description of Artificial Sequence: Synthetic oligonucleotide
auuggaacuggcaagccug

SEQ ID NO: 2815870 - RNA, 19 nt, Artificial Sequence
  Description of Artificial Sequence: Synthetic oligonucleotide
uccauuggaacuggcaagc

SEQ ID NO: 2815871 - RNA, 19 nt, Artificial Sequence
  Description of Artificial Sequence: Synthetic oligonucleotide
uggauuccuggucacagaa

SEQ ID NO: 2815872 - RNA, 19 nt, Artificial Sequence
  Description of Artificial Sequence: Synthetic oligonucleotide
ucaucugaaucaucuuucu

SEQ ID NO: 2815873 - RNA, 19 nt, Artificial Sequence
  Description of Artificial Sequence: Synthetic oligonucleotide
uuggaacuggcaagccugg

SEQ ID NO: 2815874 - RNA, 19 nt, Artificial Sequence
  Description of Artificial Sequence: Synthetic oligonucleotide
ugagcauggauuccugguc

SEQ ID NO: 2815875 - RNA, 19 nt, Artificial Sequence
  Description of Artificial Sequence: Synthetic oligonucleotide
acugaauacaagccccugu

SEQ ID NO: 2815876 - RNA, 19 nt, Artificial Sequence
  Description of Artificial Sequence: Synthetic oligonucleotide
uccuggucacagaacaucu

SEQ ID NO: 2815877 - RNA, 19 nt, Artificial Sequence
  Description of Artificial Sequence: Synthetic oligonucleotide
gagcgacacaaccagcugc

SEQ ID NO: 2815878 - RNA, 19 nt, Artificial Sequence
  Description of Artificial Sequence: Synthetic oligonucleotide
auggcuccaccuuucuugg

SEQ ID NO: 2815879 - RNA, 19 nt, Artificial Sequence
  Description of Artificial Sequence: Synthetic oligonucleotide
aggcugcaaacuaaggccc

SEQ ID NO: 2815880 - RNA, 19 nt, Artificial Sequence
  Description of Artificial Sequence: Synthetic oligonucleotide
ugacaugagcccaucuagu

SEQ ID NO: 2815881 - RNA, 19 nt, Artificial Sequence
  Description of Artificial Sequence: Synthetic oligonucleotide
auucccagaccaguugccc

SEQ ID NO: 2815882 - RNA, 19 nt, Artificial Sequence
  Description of Artificial Sequence: Synthetic oligonucleotide
uucucucaggacaagcaau

SEQ ID NO: 2815883 - RNA, 19 nt, Artificial Sequence
  Description of Artificial Sequence: Synthetic oligonucleotide
agcgacacaaccagcugcc

SEQ ID NO: 2815884 - RNA, 19 nt, Artificial Sequence
  Description of Artificial Sequence: Synthetic oligonucleotide
ugauugcccacgauagaac

SEQ ID NO: 2815885 - RNA, 19 nt, Artificial Sequence
  Description of Artificial Sequence: Synthetic oligonucleotide
ugcccaggacacaggagcg

SEQ ID NO: 2815886 - RNA, 19 nt, Artificial Sequence
  Description of Artificial Sequence: Synthetic oligonucleotide
acaagccccugucuucagc

SEQ ID NO: 2815887 - RNA, 19 nt, Artificial Sequence
  Description of Artificial Sequence: Synthetic oligonucleotide
cuaaugauugcccacgaua

SEQ ID NO: 2815888 - RNA, 19 nt, Artificial Sequence
  Description of Artificial Sequence: Synthetic oligonucleotide
acaagcaaugcugaccucu

SEQ ID NO: 2815889 - RNA, 19 nt, Artificial Sequence
  Description of Artificial Sequence: Synthetic oligonucleotide
guccauuggaacuggcaag

SEQ ID NO: 2815890 - RNA, 19 nt, Artificial Sequence
  Description of Artificial Sequence: Synthetic oligonucleotide
aauccauaaggcacagcug

SEQ ID NO: 2815891 - RNA, 19 nt, Artificial Sequence
  Description of Artificial Sequence: Synthetic oligonucleotide
augcugaccucuggaaucc

SEQ ID NO: 2815892 - RNA, 19 nt, Artificial Sequence
  Description of Artificial Sequence: Synthetic oligonucleotide
aggguucccauucucucag

SEQ ID NO: 2815893 - RNA, 19 nt, Artificial Sequence
  Description of Artificial Sequence: Synthetic oligonucleotide
acuaaggcccaccggcuag

SEQ ID NO: 2815894 - RNA, 19 nt, Artificial Sequence
  Description of Artificial Sequence: Synthetic oligonucleotide
acuguggauaaaugcccag

SEQ ID NO: 2815895 - RNA, 19 nt, Artificial Sequence
  Description of Artificial Sequence: Synthetic oligonucleotide
agaagccuguccauggagg

SEQ ID NO: 2815896 - RNA, 19 nt, Artificial Sequence
  Description of Artificial Sequence: Synthetic oligonucleotide
aagccuguccauggagggc

SEQ ID NO: 2815897 - RNA, 19 nt, Artificial Sequence
  Description of Artificial Sequence: Synthetic oligonucleotide
caaagaauguccuucugua

SEQ ID NO: 2815898 - RNA, 19 nt, Artificial Sequence
  Description of Artificial Sequence: Synthetic oligonucleotide
agcauggauuccuggucac

SEQ ID NO: 2815899 - RNA, 19 nt, Artificial Sequence
  Description of Artificial Sequence: Synthetic oligonucleotide
uugggacauaaaauacacu

SEQ ID NO: 2815900 - RNA, 19 nt, Artificial Sequence
  Description of Artificial Sequence: Synthetic oligonucleotide
uaauaggguucccauucuc

SEQ ID NO: 2815901 - RNA, 19 nt, Artificial Sequence
  Description of Artificial Sequence: Synthetic oligonucleotide
aacaucucaucugaaucau

SEQ ID NO: 2815902 - RNA, 19 nt, Artificial Sequence
  Description of Artificial Sequence: Synthetic oligonucleotide
uguccugguggucuucaug

SEQ ID NO: 2815903 - RNA, 19 nt, Artificial Sequence
  Description of Artificial Sequence: Synthetic oligonucleotide
cauggauuccuggucacag

SEQ ID NO: 2815904 - RNA, 19 nt, Artificial Sequence
  Description of Artificial Sequence: Synthetic oligonucleotide
ugcacaggcugcaaacuaa

SEQ ID NO: 2815905 - RNA, 19 nt, Artificial Sequence
  Description of Artificial Sequence: Synthetic oligonucleotide
ugggacacauucccagacc

SEQ ID NO: 2815906 - RNA, 19 nt, Artificial Sequence
  Description of Artificial Sequence: Synthetic oligonucleotide
ugaccucuggaauccauaa

SEQ ID NO: 2815907 - RNA, 19 nt, Artificial Sequence
  Description of Artificial Sequence: Synthetic oligonucleotide
gcuagguggaauaugggag

SEQ ID NO: 2815908 - RNA, 19 nt, Artificial Sequence
  Description of Artificial Sequence: Synthetic oligonucleotide
ucuucauggcuccaccuuu

SEQ ID NO: 2815909 - RNA, 19 nt, Artificial Sequence
  Description of Artificial Sequence: Synthetic oligonucleotide
uuggcuucuuugucaaaga

SEQ ID NO: 2815910 - RNA, 19 nt, Artificial Sequence
  Description of Artificial Sequence: Synthetic oligonucleotide
cacagaacaucucaucuga

SEQ ID NO: 2815911 - RNA, 19 nt, Artificial Sequence
  Description of Artificial Sequence: Synthetic oligonucleotide
auucucucaggacaagcaa

SEQ ID NO: 2815912 - RNA, 19 nt, Artificial Sequence
  Description of Artificial Sequence: Synthetic oligonucleotide
uuugucaaagaauguccuu

SEQ ID NO: 2815913 - RNA, 19 nt, Artificial Sequence
  Description of Artificial Sequence: Synthetic oligonucleotide
uuucugggacacauuccca

SEQ ID NO: 2815914 - RNA, 19 nt, Artificial Sequence
  Description of Artificial Sequence: Synthetic oligonucleotide
cuguggauaaaugcccagg

SEQ ID NO: 2815915 - RNA, 19 nt, Artificial Sequence
  Description of Artificial Sequence: Synthetic oligonucleotide
auuaccaauagaagccugu

SEQ ID NO: 2815916 - RNA, 19 nt, Artificial Sequence
  Description of Artificial Sequence: Synthetic oligonucleotide
uugcccacgauagaacucu

SEQ ID NO: 2815917 - RNA, 19 nt, Artificial Sequence
  Description of Artificial Sequence: Synthetic oligonucleotide
ggauaaaugcccaggacac

SEQ ID NO: 2815918 - RNA, 19 nt, Artificial Sequence
  Description of Artificial Sequence: Synthetic oligonucleotide
cauuaccaauagaagccug

SEQ ID NO: 2815919 - RNA, 19 nt, Artificial Sequence
  Description of Artificial Sequence: Synthetic oligonucleotide
cauucucucaggacaagca

SEQ ID NO: 2815920 - RNA, 19 nt, Artificial Sequence
  Description of Artificial Sequence: Synthetic oligonucleotide
ugacucuucccauuaccaa

SEQ ID NO: 2815921 - RNA, 19 nt, Artificial Sequence
  Description of Artificial Sequence: Synthetic oligonucleotide
auguccuucuguacagagc

SEQ ID NO: 2815922 - RNA, 19 nt, Artificial Sequence
  Description of Artificial Sequence: Synthetic oligonucleotide
uccuucuguacagagcacu

SEQ ID NO: 2815923 - RNA, 19 nt, Artificial Sequence
  Description of Artificial Sequence: Synthetic oligonucleotide
gauggagcucucugagcag

SEQ ID NO: 2815924 - RNA, 19 nt, Artificial Sequence
  Description of Artificial Sequence: Synthetic oligonucleotide
augauugcccacgauagaa

SEQ ID NO: 2815925 - RNA, 19 nt, Artificial Sequence
  Description of Artificial Sequence: Synthetic oligonucleotide
gagcauggauuccugguca

SEQ ID NO: 2815926 - RNA, 19 nt, Artificial Sequence
  Description of Artificial Sequence: Synthetic oligonucleotide
ucuguacagagcacugaau

SEQ ID NO: 2815927 - RNA, 19 nt, Artificial Sequence
  Description of Artificial Sequence: Synthetic oligonucleotide
cuagguggaauaugggaga

SEQ ID NO: 2815928 - RNA, 19 nt, Artificial Sequence
  Description of Artificial Sequence: Synthetic oligonucleotide
caucuaguuccuguccugg

SEQ ID NO: 2815929 - RNA, 19 nt, Artificial Sequence
  Description of Artificial Sequence: Synthetic oligonucleotide
uggcuucuuugucaaagaa

SEQ ID NO: 2815930 - RNA, 19 nt, Artificial Sequence
  Description of Artificial Sequence: Synthetic oligonucleotide
caggacuggaacucuuggc

SEQ ID NO: 2815931 - RNA, 19 nt, Artificial Sequence
  Description of Artificial Sequence: Synthetic oligonucleotide
cucugagcaggacuggaac

SEQ ID NO: 2815932 - RNA, 19 nt, Artificial Sequence
  Description of Artificial Sequence: Synthetic oligonucleotide
ucuucccauuaccaauaga

SEQ ID NO: 2815933 - RNA, 19 nt, Artificial Sequence
  Description of Artificial Sequence: Synthetic oligonucleotide
guacagagcacugaauaca

SEQ ID NO: 2815934 - RNA, 19 nt, Artificial Sequence
  Description of Artificial Sequence: Synthetic oligonucleotide
ucugggacacauucccaga

SEQ ID NO: 2815935 - RNA, 19 nt, Artificial Sequence
  Description of Artificial Sequence: Synthetic oligonucleotide
ggcacagcugacaugagcc

SEQ ID NO: 2815936 - RNA, 19 nt, Artificial Sequence
  Description of Artificial Sequence: Synthetic oligonucleotide
aacuggcaagccugggcug

SEQ ID NO: 2815937 - RNA, 19 nt, Artificial Sequence
  Description of Artificial Sequence: Synthetic oligonucleotide
auaaggcacagcugacaug

SEQ ID NO: 2815938 - RNA, 19 nt, Artificial Sequence
  Description of Artificial Sequence: Synthetic oligonucleotide
gaccucuggaauccauaag

SEQ ID NO: 2815939 - RNA, 19 nt, Artificial Sequence
  Description of Artificial Sequence: Synthetic oligonucleotide
cugguggucuucauggcuc

SEQ ID NO: 2815940 - RNA, 19 nt, Artificial Sequence
  Description of Artificial Sequence: Synthetic oligonucleotide
uccauaaggcacagcugac

SEQ ID NO: 2815941 - RNA, 19 nt, Artificial Sequence
  Description of Artificial Sequence: Synthetic oligonucleotide
cuuucuugggacauaaaau

SEQ ID NO: 2815942 - RNA, 19 nt, Artificial Sequence
  Description of Artificial Sequence: Synthetic oligonucleotide
cauucccagaccaguugcc

SEQ ID NO: 2815943 - RNA, 19 nt, Artificial Sequence
  Description of Artificial Sequence: Synthetic oligonucleotide
agaccaguugcccuccagu

SEQ ID NO: 2815944 - RNA, 19 nt, Artificial Sequence
  Description of Artificial Sequence: Synthetic oligonucleotide
uucccuaaugauugcccac

SEQ ID NO: 2815945 - RNA, 19 nt, Artificial Sequence
  Description of Artificial Sequence: Synthetic oligonucleotide
gucacagaacaucucaucu

SEQ ID NO: 2815946 - RNA, 19 nt, Artificial Sequence
  Description of Artificial Sequence: Synthetic oligonucleotide
caucugaaucaucuuucug

SEQ ID NO: 2815947 - RNA, 19 nt, Artificial Sequence
  Description of Artificial Sequence: Synthetic oligonucleotide
cuggaauccauaaggcaca

SEQ ID NO: 2815948 - RNA, 19 nt, Artificial Sequence
  Description of Artificial Sequence: Synthetic oligonucleotide
cugacucuucccauuacca

SEQ ID NO: 2815949 - RNA, 19 nt, Artificial Sequence
  Description of Artificial Sequence: Synthetic oligonucleotide
gauugcccacgauagaacu

SEQ ID NO: 2815950 - RNA, 19 nt, Artificial Sequence
  Description of Artificial Sequence: Synthetic oligonucleotide
caagcaaugcugaccucug

SEQ ID NO: 2815951 - RNA, 19 nt, Artificial Sequence
  Description of Artificial Sequence: Synthetic oligonucleotide
ucccauucucucaggacaa

SEQ ID NO: 2815952 - RNA, 19 nt, Artificial Sequence
  Description of Artificial Sequence: Synthetic oligonucleotide
caauagaagccuguccaug

SEQ ID NO: 2815953 - RNA, 19 nt, Artificial Sequence
  Description of Artificial Sequence: Synthetic oligonucleotide
uuaccaauagaagccuguc

SEQ ID NO: 2815954 - RNA, 19 nt, Artificial Sequence
  Description of Artificial Sequence: Synthetic oligonucleotide
cuggucacagaacaucuca

SEQ ID NO: 2815955 - RNA, 19 nt, Artificial Sequence
  Description of Artificial Sequence: Synthetic oligonucleotide
aaacuaaggcccaccggcu

SEQ ID NO: 2815956 - RNA, 19 nt, Artificial Sequence
  Description of Artificial Sequence: Synthetic oligonucleotide
guggauaaaugcccaggac

SEQ ID NO: 2815957 - RNA, 19 nt, Artificial Sequence
  Description of Artificial Sequence: Synthetic oligonucleotide
uggucacagaacaucucau

SEQ ID NO: 2815958 - RNA, 19 nt, Artificial Sequence
  Description of Artificial Sequence: Synthetic oligonucleotide
agccugggcugacucuucc

SEQ ID NO: 2815959 - RNA, 19 nt, Artificial Sequence
  Description of Artificial Sequence: Synthetic oligonucleotide
aaugcccaggacacaggag

SEQ ID NO: 2815960 - RNA, 19 nt, Artificial Sequence
  Description of Artificial Sequence: Synthetic oligonucleotide
gaccaguugcccuccaguc

SEQ ID NO: 2815961 - RNA, 19 nt, Artificial Sequence
  Description of Artificial Sequence: Synthetic oligonucleotide
gucaaagaauguccuucug

SEQ ID NO: 2815962 - RNA, 19 nt, Artificial Sequence
  Description of Artificial Sequence: Synthetic oligonucleotide
ccggcuagguggaauaugg

SEQ ID NO: 2815963 - RNA, 19 nt, Artificial Sequence
  Description of Artificial Sequence: Synthetic oligonucleotide
acgauagaacucugcagau

SEQ ID NO: 2815964 - RNA, 19 nt, Artificial Sequence
  Description of Artificial Sequence: Synthetic oligonucleotide
uuguaauaggguucccauu

SEQ ID NO: 2815965 - RNA, 19 nt, Artificial Sequence
  Description of Artificial Sequence: Synthetic oligonucleotide
uuccuggucacagaacauc

SEQ ID NO: 2815966 - RNA, 19 nt, Artificial Sequence
  Description of Artificial Sequence: Synthetic oligonucleotide
cucuggaauccauaaggca

SEQ ID NO: 2815967 - RNA, 19 nt, Artificial Sequence
  Description of Artificial Sequence: Synthetic oligonucleotide
cacauucccagaccaguug

SEQ ID NO: 2815968 - RNA, 19 nt, Artificial Sequence
  Description of Artificial Sequence: Synthetic oligonucleotide
auugcccacgauagaacuc

SEQ ID NO: 2815969 - RNA, 19 nt, Artificial Sequence
  Description of Artificial Sequence: Synthetic oligonucleotide
aacuaaggcccaccggcua

SEQ ID NO: 2815970 - RNA, 19 nt, Artificial Sequence
  Description of Artificial Sequence: Synthetic oligonucleotide
gagggcagccugaagggcc

SEQ ID NO: 2815971 - RNA, 19 nt, Artificial Sequence
  Description of Artificial Sequence: Synthetic oligonucleotide
cugggacacauucccagac

SEQ ID NO: 2815972 - RNA, 19 nt, Artificial Sequence
  Description of Artificial Sequence: Synthetic oligonucleotide
cuucccuaaugauugccca

SEQ ID NO: 2815973 - RNA, 19 nt, Artificial Sequence
  Description of Artificial Sequence: Synthetic oligonucleotide
uucauggcuccaccuuucu

SEQ ID NO: 2815974 - RNA, 19 nt, Artificial Sequence
  Description of Artificial Sequence: Synthetic oligonucleotide
cauaaaauacacuguggau

SEQ ID NO: 2815975 - RNA, 19 nt, Artificial Sequence
  Description of Artificial Sequence: Synthetic oligonucleotide
agcucucugagcaggacug

SEQ ID NO: 2815976 - RNA, 19 nt, Artificial Sequence
  Description of Artificial Sequence: Synthetic oligonucleotide
cagauggagcucucugagc

SEQ ID NO: 2815977 - RNA, 19 nt, Artificial Sequence
  Description of Artificial Sequence: Synthetic oligonucleotide
aggcuucccuaaugauugc

SEQ ID NO: 2815978 - RNA, 19 nt, Artificial Sequence
  Description of Artificial Sequence: Synthetic oligonucleotide
gcaaacuaaggcccaccgg

SEQ ID NO: 2815979 - RNA, 19 nt, Artificial Sequence
  Description of Artificial Sequence: Synthetic oligonucleotide
ugcccuccaguccauugga

SEQ ID NO: 2815980 - RNA, 19 nt, Artificial Sequence
  Description of Artificial Sequence: Synthetic oligonucleotide
gaauacaagccccugucuu

SEQ ID NO: 2815981 - RNA, 19 nt, Artificial Sequence
  Description of Artificial Sequence: Synthetic oligonucleotide
uggaauccauaaggcacag

SEQ ID NO: 2815982 - RNA, 19 nt, Artificial Sequence
  Description of Artificial Sequence: Synthetic oligonucleotide
cacaggagcgacacaacca

SEQ ID NO: 2815983 - RNA, 19 nt, Artificial Sequence
  Description of Artificial Sequence: Synthetic oligonucleotide
ugguggucuucauggcucc

SEQ ID NO: 2815984 - RNA, 19 nt, Artificial Sequence
  Description of Artificial Sequence: Synthetic oligonucleotide
uccauggagggcagccuga

SEQ ID NO: 2815985 - RNA, 19 nt, Artificial Sequence
  Description of Artificial Sequence: Synthetic oligonucleotide
ccugucuucagcuugcaca

SEQ ID NO: 2815986 - RNA, 19 nt, Artificial Sequence
  Description of Artificial Sequence: Synthetic oligonucleotide
guugcccuccaguccauug

SEQ ID NO: 2815987 - RNA, 19 nt, Artificial Sequence
  Description of Artificial Sequence: Synthetic oligonucleotide
ggaacuggcaagccugggc

SEQ ID NO: 2815988 - RNA, 19 nt, Artificial Sequence
  Description of Artificial Sequence: Synthetic oligonucleotide
auacaagccccugucuuca

SEQ ID NO: 2815989 - RNA, 19 nt, Artificial Sequence
  Description of Artificial Sequence: Synthetic oligonucleotide
aggagcgacacaaccagcu

SEQ ID NO: 2815990 - RNA, 19 nt, Artificial Sequence
  Description of Artificial Sequence: Synthetic oligonucleotide
ccucuggaauccauaaggc

SEQ ID NO: 2815991 - RNA, 19 nt, Artificial Sequence
  Description of Artificial Sequence: Synthetic oligonucleotide
gcugacucuucccauuacc

SEQ ID NO: 2815992 - RNA, 19 nt, Artificial Sequence
  Description of Artificial Sequence: Synthetic oligonucleotide
gcaggacuggaacucuugg

SEQ ID NO: 2815993 - RNA, 19 nt, Artificial Sequence
  Description of Artificial Sequence: Synthetic oligonucleotide
ggcuagguggaauauggga

SEQ ID NO: 2815994 - RNA, 19 nt, Artificial Sequence
  Description of Artificial Sequence: Synthetic oligonucleotide
agccccugucuucagcuug

SEQ ID NO: 2815995 - RNA, 19 nt, Artificial Sequence
  Description of Artificial Sequence: Synthetic oligonucleotide
gauaaaugcccaggacaca

SEQ ID NO: 2815996 - RNA, 19 nt, Artificial Sequence
  Description of Artificial Sequence: Synthetic oligonucleotide
aucuaguuccuguccuggu

SEQ ID NO: 2815997 - RNA, 19 nt, Artificial Sequence
  Description of Artificial Sequence: Synthetic oligonucleotide
cuguccauggagggcagcc

SEQ ID NO: 2815998 - RNA, 19 nt, Artificial Sequence
  Description of Artificial Sequence: Synthetic oligonucleotide
guccauggagggcagccug

SEQ ID NO: 2815999 - RNA, 19 nt, Artificial Sequence
  Description of Artificial Sequence: Synthetic oligonucleotide
auggauuccuggucacaga

SEQ ID NO: 2816000 - RNA, 19 nt, Artificial Sequence
  Description of Artificial Sequence: Synthetic oligonucleotide
cucucaggacaagcaaugc

SEQ ID NO: 2816001 - RNA, 19 nt, Artificial Sequence
  Description of Artificial Sequence: Synthetic oligonucleotide
ggacaagcaaugcugaccu

SEQ ID NO: 2816002 - RNA, 19 nt, Artificial Sequence
  Description of Artificial Sequence: Synthetic oligonucleotide
uccugguggucuucauggc

SEQ ID NO: 2816003 - RNA, 19 nt, Artificial Sequence
  Description of Artificial Sequence: Synthetic oligonucleotide
agaggcuucccuaaugauu

SEQ ID NO: 2816004 - RNA, 19 nt, Artificial Sequence
  Description of Artificial Sequence: Synthetic oligonucleotide
uccaccuuucuugggacau

SEQ ID NO: 2816005 - RNA, 19 nt, Artificial Sequence
  Description of Artificial Sequence: Synthetic oligonucleotide
ucccagaccaguugcccuc

SEQ ID NO: 2816006 - RNA, 19 nt, Artificial Sequence
  Description of Artificial Sequence: Synthetic oligonucleotide
aaaauacacuguggauaaa

SEQ ID NO: 2816007 - RNA, 19 nt, Artificial Sequence
  Description of Artificial Sequence: Synthetic oligonucleotide
cacuguggauaaaugccca

SEQ ID NO: 2816008 - RNA, 19 nt, Artificial Sequence
  Description of Artificial Sequence: Synthetic oligonucleotide
gcugagcauggauuccugg

SEQ ID NO: 2816009 - RNA, 19 nt, Artificial Sequence
  Description of Artificial Sequence: Synthetic oligonucleotide
caggacaagcaaugcugac

SEQ ID NO: 2816010 - RNA, 19 nt, Artificial Sequence
  Description of Artificial Sequence: Synthetic oligonucleotide
uggaacuggcaagccuggg

SEQ ID NO: 2816011 - RNA, 19 nt, Artificial Sequence
  Description of Artificial Sequence: Synthetic oligonucleotide
acaucucaucugaaucauc

SEQ ID NO: 2816012 - RNA, 19 nt, Artificial Sequence
  Description of Artificial Sequence: Synthetic oligonucleotide
ggucacagaacaucucauc

SEQ ID NO: 2816013 - RNA, 19 nt, Artificial Sequence
  Description of Artificial Sequence: Synthetic oligonucleotide
gcuugcacaggcugcaaac

SEQ ID NO: 2816014 - RNA, 19 nt, Artificial Sequence
  Description of Artificial Sequence: Synthetic oligonucleotide
gggacacauucccagacca

SEQ ID NO: 2816015 - RNA, 19 nt, Artificial Sequence
  Description of Artificial Sequence: Synthetic oligonucleotide
gacacauucccagaccagu

SEQ ID NO: 2816016 - RNA, 19 nt, Artificial Sequence
  Description of Artificial Sequence: Synthetic oligonucleotide
ucugcagauggagcucucu

SEQ ID NO: 2816017 - RNA, 19 nt, Artificial Sequence
  Description of Artificial Sequence: Synthetic oligonucleotide
ccacgauagaacucugcag

SEQ ID NO: 2816018 - RNA, 19 nt, Artificial Sequence
  Description of Artificial Sequence: Synthetic oligonucleotide
aaggcccaccggcuaggug

SEQ ID NO: 2816019 - RNA, 19 nt, Artificial Sequence
  Description of Artificial Sequence: Synthetic oligonucleotide
gggagcugagcauggauuc

SEQ ID NO: 2816020 - RNA, 19 nt, Artificial Sequence
  Description of Artificial Sequence: Synthetic oligonucleotide
uacaagccccugucuucag

SEQ ID NO: 2816021 - RNA, 19 nt, Artificial Sequence
  Description of Artificial Sequence: Synthetic oligonucleotide
uagguggaauaugggagau

SEQ ID NO: 2816022 - RNA, 19 nt, Artificial Sequence
  Description of Artificial Sequence: Synthetic oligonucleotide
caguccauuggaacuggca

SEQ ID NO: 2816023 - RNA, 19 nt, Artificial Sequence
  Description of Artificial Sequence: Synthetic oligonucleotide
ccuuucuugggacauaaaa

SEQ ID NO: 2816024 - RNA, 19 nt, Artificial Sequence
  Description of Artificial Sequence: Synthetic oligonucleotide
cuaaggcccaccggcuagg

SEQ ID NO: 2816025 - RNA, 19 nt, Artificial Sequence
  Description of Artificial Sequence: Synthetic oligonucleotide
cugcaaacuaaggcccacc

SEQ ID NO: 2816026 - RNA, 19 nt, Artificial Sequence
  Description of Artificial Sequence: Synthetic oligonucleotide
caggagcgacacaaccagc

SEQ ID NO: 2816027 - RNA, 19 nt, Artificial Sequence
  Description of Artificial Sequence: Synthetic oligonucleotide
gacaugagcccaucuaguu

SEQ ID NO: 2816028 - RNA, 19 nt, Artificial Sequence
  Description of Artificial Sequence: Synthetic oligonucleotide
cauaaggcacagcugacau

SEQ ID NO: 2816029 - RNA, 19 nt, Artificial Sequence
  Description of Artificial Sequence: Synthetic oligonucleotide
agcugacaugagcccaucu

SEQ ID NO: 2816030 - RNA, 19 nt, Artificial Sequence
  Description of Artificial Sequence: Synthetic oligonucleotide
ucauggcuccaccuuucuu

SEQ ID NO: 2816031 - RNA, 19 nt, Artificial Sequence
  Description of Artificial Sequence: Synthetic oligonucleotide
agcuugcacaggcugcaaa

SEQ ID NO: 2816032 - RNA, 19 nt, Artificial Sequence
  Description of Artificial Sequence: Synthetic oligonucleotide
uggcuccaccuuucuuggg

SEQ ID NO: 2816033 - RNA, 19 nt, Artificial Sequence
  Description of Artificial Sequence: Synthetic oligonucleotide
gacacaggagcgacacaac

SEQ ID NO: 2816034 - RNA, 19 nt, Artificial Sequence
  Description of Artificial Sequence: Synthetic oligonucleotide
aguuccuguccuggugguc

SEQ ID NO: 2816035 - RNA, 19 nt, Artificial Sequence
  Description of Artificial Sequence: Synthetic oligonucleotide
acuggcaagccugggcuga

SEQ ID NO: 2816036 - RNA, 19 nt, Artificial Sequence
  Description of Artificial Sequence: Synthetic oligonucleotide
gcuucccuaaugauugccc

SEQ ID NO: 2816037 - RNA, 19 nt, Artificial Sequence
  Description of Artificial Sequence: Synthetic oligonucleotide
uguccauggagggcagccu

SEQ ID NO: 2816038 - RNA, 19 nt, Artificial Sequence
  Description of Artificial Sequence: Synthetic oligonucleotide
ugcccacgauagaacucug

SEQ ID NO: 2816039 - RNA, 19 nt, Artificial Sequence
  Description of Artificial Sequence: Synthetic oligonucleotide
cagccugaagggccagagg

SEQ ID NO: 2816040 - RNA, 19 nt, Artificial Sequence
  Description of Artificial Sequence: Synthetic oligonucleotide
guaauaggguucccauucu

SEQ ID NO: 2816041 - RNA, 19 nt, Artificial Sequence
  Description of Artificial Sequence: Synthetic oligonucleotide
gaauguccuucuguacaga

SEQ ID NO: 2816042 - RNA, 19 nt, Artificial Sequence
  Description of Artificial Sequence: Synthetic oligonucleotide
ccuucuguacagagcacug

SEQ ID NO: 2816043 - RNA, 19 nt, Artificial Sequence
  Description of Artificial Sequence: Synthetic oligonucleotide
agggccagaggcuucccua

SEQ ID NO: 2816044 - RNA, 19 nt, Artificial Sequence
  Description of Artificial Sequence: Synthetic oligonucleotide
agcaggacuggaacucuug

SEQ ID NO: 2816045 - RNA, 19 nt, Artificial Sequence
  Description of Artificial Sequence: Synthetic oligonucleotide
ugggcugacucuucccauu

SEQ ID NO: 2816046 - RNA, 19 nt, Artificial Sequence
  Description of Artificial Sequence: Synthetic oligonucleotide
cugagcauggauuccuggu

SEQ ID NO: 2816047 - RNA, 19 nt, Artificial Sequence
  Description of Artificial Sequence: Synthetic oligonucleotide
cacugaauacaagccccug

SEQ ID NO: 2816048 - RNA, 19 nt, Artificial Sequence
  Description of Artificial Sequence: Synthetic oligonucleotide
ggagcgacacaaccagcug

SEQ ID NO: 2816049 - RNA, 19 nt, Artificial Sequence
  Description of Artificial Sequence: Synthetic oligonucleotide
gagcucucugagcaggacu

SEQ ID NO: 2816050 - RNA, 19 nt, Artificial Sequence
  Description of Artificial Sequence: Synthetic oligonucleotide
aagccugggcugacucuuc

SEQ ID NO: 2816051 - RNA, 19 nt, Artificial Sequence
  Description of Artificial Sequence: Synthetic oligonucleotide
gguucccauucucucagga

SEQ ID NO: 2816052 - RNA, 19 nt, Artificial Sequence
  Description of Artificial Sequence: Synthetic oligonucleotide
cagaacaucucaucugaau

SEQ ID NO: 2816053 - RNA, 19 nt, Artificial Sequence
  Description of Artificial Sequence: Synthetic oligonucleotide
ggcuccaccuuucuuggga

SEQ ID NO: 2816054 - RNA, 19 nt, Artificial Sequence
  Description of Artificial Sequence: Synthetic oligonucleotide
auagaacucugcagaugga

SEQ ID NO: 2816055 - RNA, 19 nt, Artificial Sequence
  Description of Artificial Sequence: Synthetic oligonucleotide
gacaagcaaugcugaccuc

SEQ ID NO: 2816056 - RNA, 19 nt, Artificial Sequence
  Description of Artificial Sequence: Synthetic oligonucleotide
ucuuggcuucuuugucaaa

SEQ ID NO: 2816057 - RNA, 19 nt, Artificial Sequence
  Description of Artificial Sequence: Synthetic oligonucleotide
accggcuagguggaauaug

SEQ ID NO: 2816058 - RNA, 19 nt, Artificial Sequence
  Description of Artificial Sequence: Synthetic oligonucleotide
cauuggaacuggcaagccu

SEQ ID NO: 2816059 - RNA, 19 nt, Artificial Sequence
  Description of Artificial Sequence: Synthetic oligonucleotide
gguggaauaugggagauuu

SEQ ID NO: 2816060 - RNA, 19 nt, Artificial Sequence
  Description of Artificial Sequence: Synthetic oligonucleotide
gcacagcugacaugagccc

SEQ ID NO: 2816061 - RNA, 19 nt, Artificial Sequence
  Description of Artificial Sequence: Synthetic oligonucleotide
aagccccugucuucagcuu

SEQ ID NO: 2816062 - RNA, 19 nt, Artificial Sequence
  Description of Artificial Sequence: Synthetic oligonucleotide
aaggcacagcugacaugag

SEQ ID NO: 2816063 - RNA, 19 nt, Artificial Sequence
  Description of Artificial Sequence: Synthetic oligonucleotide
cacagcugacaugagccca

SEQ ID NO: 2816064 - RNA, 19 nt, Artificial Sequence
  Description of Artificial Sequence: Synthetic oligonucleotide
gcugacaugagcccaucua

SEQ ID NO: 2816065 - RNA, 19 nt, Artificial Sequence
  Description of Artificial Sequence: Synthetic oligonucleotide
ccauucucucaggacaagc

SEQ ID NO: 2816066 - RNA, 19 nt, Artificial Sequence
  Description of Artificial Sequence: Synthetic oligonucleotide
caagccccugucuucagcu

SEQ ID NO: 2816067 - RNA, 19 nt, Artificial Sequence
  Description of Artificial Sequence: Synthetic oligonucleotide
ugagcccaucuaguuccug

SEQ ID NO: 2816068 - RNA, 19 nt, Artificial Sequence
  Description of Artificial Sequence: Synthetic oligonucleotide
cugaccucuggaauccaua

SEQ ID NO: 2816069 - RNA, 19 nt, Artificial Sequence
  Description of Artificial Sequence: Synthetic oligonucleotide
guuccuguccugguggucu

SEQ ID NO: 2816070 - RNA, 19 nt, Artificial Sequence
  Description of Artificial Sequence: Synthetic oligonucleotide
cccacgauagaacucugca

SEQ ID NO: 2816071 - RNA, 19 nt, Artificial Sequence
  Description of Artificial Sequence: Synthetic oligonucleotide
gcccaucuaguuccugucc

SEQ ID NO: 2816072 - RNA, 19 nt, Artificial Sequence
  Description of Artificial Sequence: Synthetic oligonucleotide
gccagaggcuucccuaaug

SEQ ID NO: 2816073 - RNA, 19 nt, Artificial Sequence
  Description of Artificial Sequence: Synthetic oligonucleotide
ggcuucccuaaugauugcc

SEQ ID NO: 2816074 - RNA, 19 nt, Artificial Sequence
  Description of Artificial Sequence: Synthetic oligonucleotide
acagcugacaugagcccau

SEQ ID NO: 2816075 - RNA, 19 nt, Artificial Sequence
  Description of Artificial Sequence: Synthetic oligonucleotide
acacauucccagaccaguu

SEQ ID NO: 2816076 - RNA, 19 nt, Artificial Sequence
  Description of Artificial Sequence: Synthetic oligonucleotide
ggagcugagcauggauucc

SEQ ID NO: 2816077 - RNA, 19 nt, Artificial Sequence
  Description of Artificial Sequence: Synthetic oligonucleotide
acacaaccagcugccuucu

SEQ ID NO: 2816078 - RNA, 19 nt, Artificial Sequence
  Description of Artificial Sequence: Synthetic oligonucleotide
ggacacauucccagaccag

SEQ ID NO: 2816079 - RNA, 19 nt, Artificial Sequence
  Description of Artificial Sequence: Synthetic oligonucleotide
gggacauaaaauacacugu

SEQ ID NO: 2816080 - RNA, 19 nt, Artificial Sequence
  Description of Artificial Sequence: Synthetic oligonucleotide
ccaguugcccuccagucca

SEQ ID NO: 2816081 - RNA, 19 nt, Artificial Sequence
  Description of Artificial Sequence: Synthetic oligonucleotide
aggacacaggagcgacaca

SEQ ID NO: 2816082 - RNA, 19 nt, Artificial Sequence
  Description of Artificial Sequence: Synthetic oligonucleotide
ccaucuaguuccuguccug

SEQ ID NO: 2816083 - RNA, 19 nt, Artificial Sequence
  Description of Artificial Sequence: Synthetic oligonucleotide
acagaacaucucaucugaa

SEQ ID NO: 2816084 - RNA, 19 nt, Artificial Sequence
  Description of Artificial Sequence: Synthetic oligonucleotide
gcuccaccuuucuugggac

SEQ ID NO: 2816085 - RNA, 19 nt, Artificial Sequence
  Description of Artificial Sequence: Synthetic oligonucleotide
agcugagcauggauuccug

SEQ ID NO: 2816086 - RNA, 19 nt, Artificial Sequence
  Description of Artificial Sequence: Synthetic oligonucleotide
caaugcugaccucuggaau

SEQ ID NO: 2816087 - RNA, 19 nt, Artificial Sequence
  Description of Artificial Sequence: Synthetic oligonucleotide
gagcugagcauggauuccu

SEQ ID NO: 2816088 - RNA, 19 nt, Artificial Sequence
  Description of Artificial Sequence: Synthetic oligonucleotide
caccuuucuugggacauaa

SEQ ID NO: 2816089 - RNA, 19 nt, Artificial Sequence
  Description of Artificial Sequence: Synthetic oligonucleotide
uaaggcccaccggcuaggu

SEQ ID NO: 2816090 - RNA, 19 nt, Artificial Sequence
  Description of Artificial Sequence: Synthetic oligonucleotide
cuccaccuuucuugggaca

SEQ ID NO: 2816091 - RNA, 19 nt, Artificial Sequence
  Description of Artificial Sequence: Synthetic oligonucleotide
cucucugagcaggacugga

SEQ ID NO: 2816092 - RNA, 19 nt, Artificial Sequence
  Description of Artificial Sequence: Synthetic oligonucleotide
ggauuccuggucacagaac

SEQ ID NO: 2816093 - RNA, 19 nt, Artificial Sequence
  Description of Artificial Sequence: Synthetic oligonucleotide
gucuucauggcuccaccuu

SEQ ID NO: 2816094 - RNA, 19 nt, Artificial Sequence
  Description of Artificial Sequence: Synthetic oligonucleotide
ugcugaccucuggaaucca

SEQ ID NO: 2816095 - RNA, 19 nt, Artificial Sequence
  Description of Artificial Sequence: Synthetic oligonucleotide
cucugcagauggagcucuc

SEQ ID NO: 2816096 - RNA, 19 nt, Artificial Sequence
  Description of Artificial Sequence: Synthetic oligonucleotide
cuugcacaggcugcaaacu

SEQ ID NO: 2816097 - RNA, 19 nt, Artificial Sequence
  Description of Artificial Sequence: Synthetic oligonucleotide
ccuggucacagaacaucuc

SEQ ID NO: 2816098 - RNA, 19 nt, Artificial Sequence
  Description of Artificial Sequence: Synthetic oligonucleotide
ggaauccauaaggcacagc

SEQ ID NO: 2816099 - RNA, 19 nt, Artificial Sequence
  Description of Artificial Sequence: Synthetic oligonucleotide
gcucucugagcaggacugg

SEQ ID NO: 2816100 - RNA, 19 nt, Artificial Sequence
  Description of Artificial Sequence: Synthetic oligonucleotide
cacaaccagcugccuucug

SEQ ID NO: 2816101 - RNA, 19 nt, Artificial Sequence
  Description of Artificial Sequence: Synthetic oligonucleotide
guccuucuguacagagcac

SEQ ID NO: 2816102 - RNA, 19 nt, Artificial Sequence
  Description of Artificial Sequence: Synthetic oligonucleotide
ggcugacucuucccauuac

SEQ ID NO: 2816103 - RNA, 19 nt, Artificial Sequence
  Description of Artificial Sequence: Synthetic oligonucleotide
ccaguccauuggaacuggc

SEQ ID NO: 2816104 - RNA, 19 nt, Artificial Sequence
  Description of Artificial Sequence: Synthetic oligonucleotide
ccauuggaacuggcaagcc

SEQ ID NO: 2816105 - RNA, 19 nt, Artificial Sequence
  Description of Artificial Sequence: Synthetic oligonucleotide
gcugcaaacuaaggcccac

SEQ ID NO: 2816106 - RNA, 19 nt, Artificial Sequence
  Description of Artificial Sequence: Synthetic oligonucleotide
ggcuucuuugucaaagaau

SEQ ID NO: 2816107 - RNA, 19 nt, Artificial Sequence
  Description of Artificial Sequence: Synthetic oligonucleotide
agguggaauaugggagauu

SEQ ID NO: 2816108 - RNA, 19 nt, Artificial Sequence
  Description of Artificial Sequence: Synthetic oligonucleotide
cgauagaacucugcagaug

SEQ ID NO: 2816109 - RNA, 19 nt, Artificial Sequence
  Description of Artificial Sequence: Synthetic oligonucleotide
uggcaagccugggcugacu

SEQ ID NO: 2816110 - RNA, 19 nt, Artificial Sequence
  Description of Artificial Sequence: Synthetic oligonucleotide
ccauaaggcacagcugaca

SEQ ID NO: 2816111 - RNA, 19 nt, Artificial Sequence
  Description of Artificial Sequence: Synthetic oligonucleotide
gccugggcugacucuuccc

SEQ ID NO: 2816112 - RNA, 19 nt, Artificial Sequence
  Description of Artificial Sequence: Synthetic oligonucleotide
cccaggacacaggagcgac

SEQ ID NO: 2816113 - RNA, 19 nt, Artificial Sequence
  Description of Artificial Sequence: Synthetic oligonucleotide
augagcccaucuaguuccu

SEQ ID NO: 2816114 - RNA, 19 nt, Artificial Sequence
  Description of Artificial Sequence: Synthetic oligonucleotide
cuggcaagccugggcugac

SEQ ID NO: 2816115 - RNA, 19 nt, Artificial Sequence
  Description of Artificial Sequence: Synthetic oligonucleotide
cggcuagguggaauauggg

SEQ ID NO: 2816116 - RNA, 19 nt, Artificial Sequence
  Description of Artificial Sequence: Synthetic oligonucleotide
gcccacgauagaacucugc

SEQ ID NO: 2816117 - RNA, 19 nt, Artificial Sequence
  Description of Artificial Sequence: Synthetic oligonucleotide
ggagcucucugagcaggac

SEQ ID NO: 2816118 - RNA, 19 nt, Artificial Sequence
  Description of Artificial Sequence: Synthetic oligonucleotide
uccuguccugguggucuuc

SEQ ID NO: 2816119 - RNA, 19 nt, Artificial Sequence
  Description of Artificial Sequence: Synthetic oligonucleotide
cagaggcuucccuaaugau

SEQ ID NO: 2816120 - RNA, 19 nt, Artificial Sequence
  Description of Artificial Sequence: Synthetic oligonucleotide
ggacuggaacucuuggcuu

SEQ ID NO: 2816121 - RNA, 19 nt, Artificial Sequence
  Description of Artificial Sequence: Synthetic oligonucleotide
ggcugcaaacuaaggccca

SEQ ID NO: 2816122 - RNA, 19 nt, Artificial Sequence
  Description of Artificial Sequence: Synthetic oligonucleotide
gccccugucuucagcuugc

SEQ ID NO: 2816123 - RNA, 19 nt, Artificial Sequence
  Description of Artificial Sequence: Synthetic oligonucleotide
gggcugacucuucccauua

SEQ ID NO: 2816124 - RNA, 19 nt, Artificial Sequence
  Description of Artificial Sequence: Synthetic oligonucleotide
accuuucuugggacauaaa

SEQ ID NO: 2816125 - RNA, 19 nt, Artificial Sequence
  Description of Artificial Sequence: Synthetic oligonucleotide
cagcugacaugagcccauc

SEQ ID NO: 2816126 - RNA, 19 nt, Artificial Sequence
  Description of Artificial Sequence: Synthetic oligonucleotide
cccuaaugauugcccacga

SEQ ID NO: 2816127 - RNA, 19 nt, Artificial Sequence
  Description of Artificial Sequence: Synthetic oligonucleotide
ccauuaccaauagaagccu

SEQ ID NO: 2816128 - RNA, 19 nt, Artificial Sequence
  Description of Artificial Sequence: Synthetic oligonucleotide
caagccugggcugacucuu

SEQ ID NO: 2816129 - RNA, 19 nt, Artificial Sequence
  Description of Artificial Sequence: Synthetic oligonucleotide
cccaucuaguuccuguccu

SEQ ID NO: 2816130 - RNA, 19 nt, Artificial Sequence
  Description of Artificial Sequence: Synthetic oligonucleotide
aguugcccuccaguccauu

SEQ ID NO: 2816131 - RNA, 19 nt, Artificial Sequence
  Description of Artificial Sequence: Synthetic oligonucleotide
cugggcugacucuucccau

SEQ ID NO: 2816132 - RNA, 19 nt, Artificial Sequence
  Description of Artificial Sequence: Synthetic oligonucleotide
cccauucucucaggacaag

SEQ ID NO: 2816133 - RNA, 19 nt, Artificial Sequence
  Description of Artificial Sequence: Synthetic oligonucleotide
cccugucuucagcuugcac

SEQ ID NO: 2816134 - RNA, 19 nt, Artificial Sequence
  Description of Artificial Sequence: Synthetic oligonucleotide
ccaauagaagccuguccau

SEQ ID NO: 2816135 - RNA, 19 nt, Artificial Sequence
  Description of Artificial Sequence: Synthetic oligonucleotide
cccagaccaguugcccucc

SEQ ID NO: 2816136 - RNA, 19 nt, Artificial Sequence
  Description of Artificial Sequence: Synthetic oligonucleotide
gcacugaauacaagccccu

SEQ ID NO: 2816137 - RNA, 19 nt, Artificial Sequence
  Description of Artificial Sequence: Synthetic oligonucleotide
gcaagccugggcugacucu

SEQ ID NO: 2816138 - RNA, 19 nt, Artificial Sequence
  Description of Artificial Sequence: Synthetic oligonucleotide
ccaccggcuagguggaaua

SEQ ID NO: 2816139 - RNA, 19 nt, Artificial Sequence
  Description of Artificial Sequence: Synthetic oligonucleotide
gguggucuucauggcucca

SEQ ID NO: 2816140 - RNA, 19 nt, Artificial Sequence
  Description of Artificial Sequence: Synthetic oligonucleotide
guggaauaugggagauuuu

SEQ ID NO: 2816141 - RNA, 19 nt, Artificial Sequence
  Description of Artificial Sequence: Synthetic oligonucleotide
gagcaggacuggaacucuu

SEQ ID NO: 2816142 - RNA, 19 nt, Artificial Sequence
  Description of Artificial Sequence: Synthetic oligonucleotide
ccuguccugguggucuuca

SEQ ID NO: 2816143 - RNA, 19 nt, Artificial Sequence
  Description of Artificial Sequence: Synthetic oligonucleotide
ccuaaugauugcccacgau

SEQ ID NO: 2816144 - RNA, 19 nt, Artificial Sequence
  Description of Artificial Sequence: Synthetic oligonucleotide
gcccaggacacaggagcga

SEQ ID NO: 2816145 - RNA, 19 nt, Artificial Sequence
  Description of Artificial Sequence: Synthetic oligonucleotide
ggcccaccggcuaggugga

SEQ ID NO: 2816146 - RNA, 19 nt, Artificial Sequence
  Description of Artificial Sequence: Synthetic oligonucleotide
cagcuugcacaggcugcaa

SEQ ID NO: 2816147 - RNA, 19 nt, Artificial Sequence
  Description of Artificial Sequence: Synthetic oligonucleotide
cuguccugguggucuucau

SEQ ID NO: 2816148 - RNA, 19 nt, Artificial Sequence
  Description of Artificial Sequence: Synthetic oligonucleotide
ggcagccugaagggccaga

SEQ ID NO: 2816149 - RNA, 19 nt, Artificial Sequence
  Description of Artificial Sequence: Synthetic oligonucleotide
gggcagccugaagggccag

SEQ ID NO: 2816150 - RNA, 19 nt, Artificial Sequence
  Description of Artificial Sequence: Synthetic oligonucleotide
gcugaccucuggaauccau

SEQ ID NO: 2816151 - RNA, 19 nt, Artificial Sequence
  Description of Artificial Sequence: Synthetic oligonucleotide
ccauggagggcagccugaa

SEQ ID NO: 2816152 - RNA, 19 nt, Artificial Sequence
  Description of Artificial Sequence: Synthetic oligonucleotide
ggccagaggcuucccuaau

SEQ ID NO: 2816153 - RNA, 19 nt, Artificial Sequence
  Description of Artificial Sequence: Synthetic oligonucleotide
caguugcccuccaguccau

SEQ ID NO: 2816154 - RNA, 19 nt, Artificial Sequence
  Description of Artificial Sequence: Synthetic oligonucleotide
caccggcuagguggaauau

SEQ ID NO: 2816155 - RNA, 19 nt, Artificial Sequence
  Description of Artificial Sequence: Synthetic oligonucleotide
ccagaccaguugcccucca

SEQ ID NO: 2816156 - RNA, 19 nt, Artificial Sequence
  Description of Artificial Sequence: Synthetic oligonucleotide
gcgacacaaccagcugccu

SEQ ID NO: 2816157 - RNA, 19 nt, Artificial Sequence
  Description of Artificial Sequence: Synthetic oligonucleotide
cgacacaaccagcugccuu

SEQ ID NO: 2816158 - RNA, 19 nt, Artificial Sequence
  Description of Artificial Sequence: Synthetic oligonucleotide
ccccugucuucagcuugca

SEQ ID NO: 2816159 - RNA, 19 nt, Artificial Sequence
  Description of Artificial Sequence: Synthetic oligonucleotide
cccaccggcuagguggaau

SEQ ID NO: 2816160 - RNA, 19 nt, Artificial Sequence
  Description of Artificial Sequence: Synthetic oligonucleotide
gcccaccggcuagguggaa

SEQ ID NO: 2816161 - RNA, 19 nt, Artificial Sequence
  Description of Artificial Sequence: Synthetic oligonucleotide
aacacauaggauuagaaag

SEQ ID NO: 2816162 - RNA, 19 nt, Artificial Sequence
  Description of Artificial Sequence: Synthetic oligonucleotide
uuauguaauuuauaaauag

SEQ ID NO: 2816163 - RNA, 19 nt, Artificial Sequence
  Description of Artificial Sequence: Synthetic oligonucleotide
uauguaauuuauaaauagg

SEQ ID NO: 2816164 - RNA, 19 nt, Artificial Sequence
  Description of Artificial Sequence: Synthetic oligonucleotide
aggagaauaagacauggcc

SEQ ID NO: 2816165 - RNA, 19 nt, Artificial Sequence
  Description of Artificial Sequence: Synthetic oligonucleotide
auuuauguaauuuauaaau

SEQ ID NO: 2816166 - RNA, 19 nt, Artificial Sequence
  Description of Artificial Sequence: Synthetic oligonucleotide
uaaauaggacuucagaagc

SEQ ID NO: 2816167 - RNA, 19 nt, Artificial Sequence
  Description of Artificial Sequence: Synthetic oligonucleotide
auaaauaggacuucagaag

SEQ ID NO: 2816168 - RNA, 19 nt, Artificial Sequence
  Description of Artificial Sequence: Synthetic oligonucleotide
uucauuuggggucagauga

SEQ ID NO: 2816169 - RNA, 19 nt, Artificial Sequence
  Description of Artificial Sequence: Synthetic oligonucleotide
uccagaaugguuauuuugg

SEQ ID NO: 2816170 - RNA, 19 nt, Artificial Sequence
  Description of Artificial Sequence: Synthetic oligonucleotide
uauaaauaggacuucagaa

SEQ ID NO: 2816171 - RNA, 19 nt, Artificial Sequence
  Description of Artificial Sequence: Synthetic oligonucleotide
agaugaacaauauuuaugu

SEQ ID NO: 2816172 - RNA, 19 nt, Artificial Sequence
  Description of Artificial Sequence: Synthetic oligonucleotide
uuuacauaagcucaacaca

SEQ ID NO: 2816173 - RNA, 19 nt, Artificial Sequence
  Description of Artificial Sequence: Synthetic oligonucleotide
uuuuacauaagcucaacac

SEQ ID NO: 2816174 - RNA, 19 nt, Artificial Sequence
  Description of Artificial Sequence: Synthetic oligonucleotide
cugguuauaaggaagaaug

SEQ ID NO: 2816175 - RNA, 19 nt, Artificial Sequence
  Description of Artificial Sequence: Synthetic oligonucleotide
uguaauuuauaaauaggac

SEQ ID NO: 2816176 - RNA, 19 nt, Artificial Sequence
  Description of Artificial Sequence: Synthetic oligonucleotide
aacucucucaagaaaaggc

SEQ ID NO: 2816177 - RNA, 19 nt, Artificial Sequence
  Description of Artificial Sequence: Synthetic oligonucleotide
aagcuuucagcccagguag

SEQ ID NO: 2816178 - RNA, 19 nt, Artificial Sequence
  Description of Artificial Sequence: Synthetic oligonucleotide
uuauaaauaggacuucaga

SEQ ID NO: 2816179 - RNA, 19 nt, Artificial Sequence
  Description of Artificial Sequence: Synthetic oligonucleotide
auaagcucaacacauagga

SEQ ID NO: 2816180 - RNA, 19 nt, Artificial Sequence
  Description of Artificial Sequence: Synthetic oligonucleotide
uaaggcaccacauggaaag

SEQ ID NO: 2816181 - RNA, 19 nt, Artificial Sequence
  Description of Artificial Sequence: Synthetic oligonucleotide
uuuauaaauaggacuucag

SEQ ID NO: 2816182 - RNA, 19 nt, Artificial Sequence
  Description of Artificial Sequence: Synthetic oligonucleotide
uguuggauuacuucuacug

SEQ ID NO: 2816183 - RNA, 19 nt, Artificial Sequence
  Description of Artificial Sequence: Synthetic oligonucleotide
ugaacaauauuuauguaau

SEQ ID NO: 2816184 - RNA, 19 nt, Artificial Sequence
  Description of Artificial Sequence: Synthetic oligonucleotide
uuggauuacuucuacugcg

SEQ ID NO: 2816185 - RNA, 19 nt, Artificial Sequence
  Description of Artificial Sequence: Synthetic oligonucleotide
auuagaaagggcuaucuga

SEQ ID NO: 2816186 - RNA, 19 nt, Artificial Sequence
  Description of Artificial Sequence: Synthetic oligonucleotide
aagacauggccacagaccu

SEQ ID NO: 2816187 - RNA, 19 nt, Artificial Sequence
  Description of Artificial Sequence: Synthetic oligonucleotide
agaaugguuauuuuggggu

SEQ ID NO: 2816188 - RNA, 19 nt, Artificial Sequence
  Description of Artificial Sequence: Synthetic oligonucleotide
uuauaaggaagaauggguc

SEQ ID NO: 2816189 - RNA, 19 nt, Artificial Sequence
  Description of Artificial Sequence: Synthetic oligonucleotide
uuuauguaauuuauaaaua

SEQ ID NO: 2816190 - RNA, 19 nt, Artificial Sequence
  Description of Artificial Sequence: Synthetic oligonucleotide
ggaagaaugggucucaggg

SEQ ID NO: 2816191 - RNA, 19 nt, Artificial Sequence
  Description of Artificial Sequence: Synthetic oligonucleotide
ucaaacucucucaagaaaa

SEQ ID NO: 2816192 - RNA, 19 nt, Artificial Sequence
  Description of Artificial Sequence: Synthetic oligonucleotide
uaucugaccagcuacuuca

SEQ ID NO: 2816193 - RNA, 19 nt, Artificial Sequence
  Description of Artificial Sequence: Synthetic oligonucleotide
uuagaaagggcuaucugac

SEQ ID NO: 2816194 - RNA, 19 nt, Artificial Sequence
  Description of Artificial Sequence: Synthetic oligonucleotide
uaagacauggccacagacc

SEQ ID NO: 2816195 - RNA, 19 nt, Artificial Sequence
  Description of Artificial Sequence: Synthetic oligonucleotide
ugguuauaaggaagaaugg

SEQ ID NO: 2816196 - RNA, 19 nt, Artificial Sequence
  Description of Artificial Sequence: Synthetic oligonucleotide
gagaauaagacauggccac

SEQ ID NO: 2816197 - RNA, 19 nt, Artificial Sequence
  Description of Artificial Sequence: Synthetic oligonucleotide
ucaagaaaaggcaggagaa

SEQ ID NO: 2816198 - RNA, 19 nt, Artificial Sequence
  Description of Artificial Sequence: Synthetic oligonucleotide
uagguggaggccaagaaug

SEQ ID NO: 2816199 - RNA, 19 nt, Artificial Sequence
  Description of Artificial Sequence: Synthetic oligonucleotide
acaaguguuggauuacuuc

SEQ ID NO: 2816200 - RNA, 19 nt, Artificial Sequence
  Description of Artificial Sequence: Synthetic oligonucleotide
guaauuuauaaauaggacu

SEQ ID NO: 2816201 - RNA, 19 nt, Artificial Sequence
  Description of Artificial Sequence: Synthetic oligonucleotide
uaguccuucauucacuucu

SEQ ID NO: 2816202 - RNA, 19 nt, Artificial Sequence
  Description of Artificial Sequence: Synthetic oligonucleotide
acauaagcucaacacauag

SEQ ID NO: 2816203 - RNA, 19 nt, Artificial Sequence
  Description of Artificial Sequence: Synthetic oligonucleotide
aagcucaacacauaggauu

SEQ ID NO: 2816204 - RNA, 19 nt, Artificial Sequence
  Description of Artificial Sequence: Synthetic oligonucleotide
aaggugauaaggcaccaca

SEQ ID NO: 2816205 - RNA, 19 nt, Artificial Sequence
  Description of Artificial Sequence: Synthetic oligonucleotide
uauuuauguaauuuauaaa

SEQ ID NO: 2816206 - RNA, 19 nt, Artificial Sequence
  Description of Artificial Sequence: Synthetic oligonucleotide
agcuacuucauuugggguc

SEQ ID NO: 2816207 - RNA, 19 nt, Artificial Sequence
  Description of Artificial Sequence: Synthetic oligonucleotide
caggcauccaccuauguag

SEQ ID NO: 2816208 - RNA, 19 nt, Artificial Sequence
  Description of Artificial Sequence: Synthetic oligonucleotide
auguaauuuauaaauagga

SEQ ID NO: 2816209 - RNA, 19 nt, Artificial Sequence
  Description of Artificial Sequence: Synthetic oligonucleotide
uggauuacuucuacugcgg

SEQ ID NO: 2816210 - RNA, 19 nt, Artificial Sequence
  Description of Artificial Sequence: Synthetic oligonucleotide
uauaaggaagaaugggucu

SEQ ID NO: 2816211 - RNA, 19 nt, Artificial Sequence
  Description of Artificial Sequence: Synthetic oligonucleotide
aaacucucucaagaaaagg

SEQ ID NO: 2816212 - RNA, 19 nt, Artificial Sequence
  Description of Artificial Sequence: Synthetic oligonucleotide
auuacuucuacugcggcag

SEQ ID NO: 2816213 - RNA, 19 nt, Artificial Sequence
  Description of Artificial Sequence: Synthetic oligonucleotide
aguguuggauuacuucuac

SEQ ID NO: 2816214 - RNA, 19 nt, Artificial Sequence
  Description of Artificial Sequence: Synthetic oligonucleotide
agaaagggcuaucugacca

SEQ ID NO: 2816215 - RNA, 19 nt, Artificial Sequence
  Description of Artificial Sequence: Synthetic oligonucleotide
ucucucaccaagcuuucag

SEQ ID NO: 2816216 - RNA, 19 nt, Artificial Sequence
  Description of Artificial Sequence: Synthetic oligonucleotide
cauaagcucaacacauagg

SEQ ID NO: 2816217 - RNA, 19 nt, Artificial Sequence
  Description of Artificial Sequence: Synthetic oligonucleotide
acacauaggauuagaaagg

SEQ ID NO: 2816218 - RNA, 19 nt, Artificial Sequence
  Description of Artificial Sequence: Synthetic oligonucleotide
cacuucugaaccaucaaac

SEQ ID NO: 2816219 - RNA, 19 nt, Artificial Sequence
  Description of Artificial Sequence: Synthetic oligonucleotide
gauuagaaagggcuaucug

SEQ ID NO: 2816220 - RNA, 19 nt, Artificial Sequence
  Description of Artificial Sequence: Synthetic oligonucleotide
guuggauuacuucuacugc

SEQ ID NO: 2816221 - RNA, 19 nt, Artificial Sequence
  Description of Artificial Sequence: Synthetic oligonucleotide
ucucaccaagcuuucagcc

SEQ ID NO: 2816222 - RNA, 19 nt, Artificial Sequence
  Description of Artificial Sequence: Synthetic oligonucleotide
ugguaucugggauuggcag

SEQ ID NO: 2816223 - RNA, 19 nt, Artificial Sequence
  Description of Artificial Sequence: Synthetic oligonucleotide
ucagaugaacaauauuuau

SEQ ID NO: 2816224 - RNA, 19 nt, Artificial Sequence
  Description of Artificial Sequence: Synthetic oligonucleotide
cauccaccuauguaggugg

SEQ ID NO: 2816225 - RNA, 19 nt, Artificial Sequence
  Description of Artificial Sequence: Synthetic oligonucleotide
gaagaaugggucucagggc

SEQ ID NO: 2816226 - RNA, 19 nt, Artificial Sequence
  Description of Artificial Sequence: Synthetic oligonucleotide
cagaaugguuauuuugggg

SEQ ID NO: 2816227 - RNA, 19 nt, Artificial Sequence
  Description of Artificial Sequence: Synthetic oligonucleotide
gguuauaaggaagaauggg

SEQ ID NO: 2816228 - RNA, 19 nt, Artificial Sequence
  Description of Artificial Sequence: Synthetic oligonucleotide
gaauaagacauggccacag

SEQ ID NO: 2816229 - RNA, 19 nt, Artificial Sequence
  Description of Artificial Sequence: Synthetic oligonucleotide
cauaggauuagaaagggcu

SEQ ID NO: 2816230 - RNA, 19 nt, Artificial Sequence
  Description of Artificial Sequence: Synthetic oligonucleotide
uuuggggucagaugaacaa

SEQ ID NO: 2816231 - RNA, 19 nt, Artificial Sequence
  Description of Artificial Sequence: Synthetic oligonucleotide
caaacucucucaagaaaag

SEQ ID NO: 2816232 - RNA, 19 nt, Artificial Sequence
  Description of Artificial Sequence: Synthetic oligonucleotide
auuuuggggucuuggagug

SEQ ID NO: 2816233 - RNA, 19 nt, Artificial Sequence
  Description of Artificial Sequence: Synthetic oligonucleotide
cucaagaaaaggcaggaga

SEQ ID NO: 2816234 - RNA, 19 nt, Artificial Sequence
  Description of Artificial Sequence: Synthetic oligonucleotide
ucacuucugaaccaucaaa

SEQ ID NO: 2816235 - RNA, 19 nt, Artificial Sequence
  Description of Artificial Sequence: Synthetic oligonucleotide
cacauaggauuagaaaggg

SEQ ID NO: 2816236 - RNA, 19 nt, Artificial Sequence
  Description of Artificial Sequence: Synthetic oligonucleotide
aggacuucagaagcagugc

SEQ ID NO: 2816237 - RNA, 19 nt, Artificial Sequence
  Description of Artificial Sequence: Synthetic oligonucleotide
aaugguuauuuuggggucu

SEQ ID NO: 2816238 - RNA, 19 nt, Artificial Sequence
  Description of Artificial Sequence: Synthetic oligonucleotide
guaucugggauuggcaggg

SEQ ID NO: 2816239 - RNA, 19 nt, Artificial Sequence
  Description of Artificial Sequence: Synthetic oligonucleotide
ugaccagcuacuucauuug

SEQ ID NO: 2816240 - RNA, 19 nt, Artificial Sequence
  Description of Artificial Sequence: Synthetic oligonucleotide
gacauggccacagaccugc

SEQ ID NO: 2816241 - RNA, 19 nt, Artificial Sequence
  Description of Artificial Sequence: Synthetic oligonucleotide
aaccaucaaacucucucaa

SEQ ID NO: 2816242 - RNA, 19 nt, Artificial Sequence
  Description of Artificial Sequence: Synthetic oligonucleotide
gaaugguuauuuugggguc

SEQ ID NO: 2816243 - RNA, 19 nt, Artificial Sequence
  Description of Artificial Sequence: Synthetic oligonucleotide
gauuacuucuacugcggca

SEQ ID NO: 2816244 - RNA, 19 nt, Artificial Sequence
  Description of Artificial Sequence: Synthetic oligonucleotide
guccagaaugguuauuuug

SEQ ID NO: 2816245 - RNA, 19 nt, Artificial Sequence
  Description of Artificial Sequence: Synthetic oligonucleotide
acauaggauuagaaagggc

SEQ ID NO: 2816246 - RNA, 19 nt, Artificial Sequence
  Description of Artificial Sequence: Synthetic oligonucleotide
aucaaacucucucaagaaa

SEQ ID NO: 2816247 - RNA, 19 nt, Artificial Sequence
  Description of Artificial Sequence: Synthetic oligonucleotide
gaccagcuacuucauuugg

SEQ ID NO: 2816248 - RNA, 19 nt, Artificial Sequence
  Description of Artificial Sequence: Synthetic oligonucleotide
uguagguggaggccaagaa

SEQ ID NO: 2816249 - RNA, 19 nt, Artificial Sequence
  Description of Artificial Sequence: Synthetic oligonucleotide
agggucgugaguugggcag

SEQ ID NO: 2816250 - RNA, 19 nt, Artificial Sequence
  Description of Artificial Sequence: Synthetic oligonucleotide
cucaccaagcuuucagccc

SEQ ID NO: 2816251 - RNA, 19 nt, Artificial Sequence
  Description of Artificial Sequence: Synthetic oligonucleotide
guuauuuuggggucuugga

SEQ ID NO: 2816252 - RNA, 19 nt, Artificial Sequence
  Description of Artificial Sequence: Synthetic oligonucleotide
auggccacagaccugcaca

SEQ ID NO: 2816253 - RNA, 19 nt, Artificial Sequence
  Description of Artificial Sequence: Synthetic oligonucleotide
cuucauuuggggucagaug

SEQ ID NO: 2816254 - RNA, 19 nt, Artificial Sequence
  Description of Artificial Sequence: Synthetic oligonucleotide
accuauguagguggaggcc

SEQ ID NO: 2816255 - RNA, 19 nt, Artificial Sequence
  Description of Artificial Sequence: Synthetic oligonucleotide
accaucaaacucucucaag

SEQ ID NO: 2816256 - RNA, 19 nt, Artificial Sequence
  Description of Artificial Sequence: Synthetic oligonucleotide
ucugguuauaaggaagaau

SEQ ID NO: 2816257 - RNA, 19 nt, Artificial Sequence
  Description of Artificial Sequence: Synthetic oligonucleotide
agaauggcuaggguugggg

SEQ ID NO: 2816258 - RNA, 19 nt, Artificial Sequence
  Description of Artificial Sequence: Synthetic oligonucleotide
ucccuucuugguuucagga

SEQ ID NO: 2816259 - RNA, 19 nt, Artificial Sequence
  Description of Artificial Sequence: Synthetic oligonucleotide
uggaaagucccuucuuggu

SEQ ID NO: 2816260 - RNA, 19 nt, Artificial Sequence
  Description of Artificial Sequence: Synthetic oligonucleotide
cucucaccaagcuuucagc

SEQ ID NO: 2816261 - RNA, 19 nt, Artificial Sequence
  Description of Artificial Sequence: Synthetic oligonucleotide
uggggugggucucucacca

SEQ ID NO: 2816262 - RNA, 19 nt, Artificial Sequence
  Description of Artificial Sequence: Synthetic oligonucleotide
gguaucugggauuggcagg

SEQ ID NO: 2816263 - RNA, 19 nt, Artificial Sequence
  Description of Artificial Sequence: Synthetic oligonucleotide
ucgugcuguuucuucuugg

SEQ ID NO: 2816264 - RNA, 19 nt, Artificial Sequence
  Description of Artificial Sequence: Synthetic oligonucleotide
uuuggggucuuggaguggc

SEQ ID NO: 2816265 - RNA, 19 nt, Artificial Sequence
  Description of Artificial Sequence: Synthetic oligonucleotide
uaagcucaacacauaggau

SEQ ID NO: 2816266 - RNA, 19 nt, Artificial Sequence
  Description of Artificial Sequence: Synthetic oligonucleotide
ugggauaguccuucauuca

SEQ ID NO: 2816267 - RNA, 19 nt, Artificial Sequence
  Description of Artificial Sequence: Synthetic oligonucleotide
ccaagaauggcuaggguug

SEQ ID NO: 2816268 - RNA, 19 nt, Artificial Sequence
  Description of Artificial Sequence: Synthetic oligonucleotide
guagacaaguguuggauua

SEQ ID NO: 2816269 - RNA, 19 nt, Artificial Sequence
  Description of Artificial Sequence: Synthetic oligonucleotide
uucagaagcagugcaggcu

SEQ ID NO: 2816270 - RNA, 19 nt, Artificial Sequence
  Description of Artificial Sequence: Synthetic oligonucleotide
auggcuaggguuggggugg

SEQ ID NO: 2816271 - RNA, 19 nt, Artificial Sequence
  Description of Artificial Sequence: Synthetic oligonucleotide
uggggucagaugaacaaua

SEQ ID NO: 2816272 - RNA, 19 nt, Artificial Sequence
  Description of Artificial Sequence: Synthetic oligonucleotide
cuucuacugcggcagcugg

SEQ ID NO: 2816273 - RNA, 19 nt, Artificial Sequence
  Description of Artificial Sequence: Synthetic oligonucleotide
auaguccuucauucacuuc

SEQ ID NO: 2816274 - RNA, 19 nt, Artificial Sequence
  Description of Artificial Sequence: Synthetic oligonucleotide
acagaccugcacaccaugc

SEQ ID NO: 2816275 - RNA, 19 nt, Artificial Sequence
  Description of Artificial Sequence: Synthetic oligonucleotide
caggagaauaagacauggc

SEQ ID NO: 2816276 - RNA, 19 nt, Artificial Sequence
  Description of Artificial Sequence: Synthetic oligonucleotide
ccagcuacuucauuugggg

SEQ ID NO: 2816277 - RNA, 19 nt, Artificial Sequence
  Description of Artificial Sequence: Synthetic oligonucleotide
gguuauuuuggggucuugg

SEQ ID NO: 2816278 - RNA, 19 nt, Artificial Sequence
  Description of Artificial Sequence: Synthetic oligonucleotide
caccuauguagguggaggc

SEQ ID NO: 2816279 - RNA, 19 nt, Artificial Sequence
  Description of Artificial Sequence: Synthetic oligonucleotide
gaggccaagaauggcuagg

SEQ ID NO: 2816280 - RNA, 19 nt, Artificial Sequence
  Description of Artificial Sequence: Synthetic oligonucleotide
gacuucagaagcagugcag

SEQ ID NO: 2816281 - RNA, 19 nt, Artificial Sequence
  Description of Artificial Sequence: Synthetic oligonucleotide
caacacauaggauuagaaa

SEQ ID NO: 2816282 - RNA, 19 nt, Artificial Sequence
  Description of Artificial Sequence: Synthetic oligonucleotide
caaguguuggauuacuucu

SEQ ID NO: 2816283 - RNA, 19 nt, Artificial Sequence
  Description of Artificial Sequence: Synthetic oligonucleotide
uuggaguggccugugggag

SEQ ID NO: 2816284 - RNA, 19 nt, Artificial Sequence
  Description of Artificial Sequence: Synthetic oligonucleotide
aagcagugcaggcucuggu

SEQ ID NO: 2816285 - RNA, 19 nt, Artificial Sequence
  Description of Artificial Sequence: Synthetic oligonucleotide
gcaggagaauaagacaugg

SEQ ID NO: 2816286 - RNA, 19 nt, Artificial Sequence
  Description of Artificial Sequence: Synthetic oligonucleotide
ggugauaaggcaccacaug

SEQ ID NO: 2816287 - RNA, 19 nt, Artificial Sequence
  Description of Artificial Sequence: Synthetic oligonucleotide
aucugggauuggcaggguc

SEQ ID NO: 2816288 - RNA, 19 nt, Artificial Sequence
  Description of Artificial Sequence: Synthetic oligonucleotide
aggcaggagaauaagacau

SEQ ID NO: 2816289 - RNA, 19 nt, Artificial Sequence
  Description of Artificial Sequence: Synthetic oligonucleotide
uaggauuagaaagggcuau

SEQ ID NO: 2816290 - RNA, 19 nt, Artificial Sequence
  Description of Artificial Sequence: Synthetic oligonucleotide
ggagaauaagacauggcca

SEQ ID NO: 2816291 - RNA, 19 nt, Artificial Sequence
  Description of Artificial Sequence: Synthetic oligonucleotide
aggauuagaaagggcuauc

SEQ ID NO: 2816292 - RNA, 19 nt, Artificial Sequence
  Description of Artificial Sequence: Synthetic oligonucleotide
aagaauggcuaggguuggg

SEQ ID NO: 2816293 - RNA, 19 nt, Artificial Sequence
  Description of Artificial Sequence: Synthetic oligonucleotide
ucauuuggggucagaugaa

SEQ ID NO: 2816294 - RNA, 19 nt, Artificial Sequence
  Description of Artificial Sequence: Synthetic oligonucleotide
uacugcggcagcugguagc

SEQ ID NO: 2816295 - RNA, 19 nt, Artificial Sequence
  Description of Artificial Sequence: Synthetic oligonucleotide
ucgugaguugggcaggcau

SEQ ID NO: 2816296 - RNA, 19 nt, Artificial Sequence
  Description of Artificial Sequence: Synthetic oligonucleotide
cuaucugaccagcuacuuc

SEQ ID NO: 2816297 - RNA, 19 nt, Artificial Sequence
  Description of Artificial Sequence: Synthetic oligonucleotide
accagcuacuucauuuggg

SEQ ID NO: 2816298 - RNA, 19 nt, Artificial Sequence
  Description of Artificial Sequence: Synthetic oligonucleotide
aggccaagaauggcuaggg

SEQ ID NO: 2816299 - RNA, 19 nt, Artificial Sequence
  Description of Artificial Sequence: Synthetic oligonucleotide
agcccagguagacaagugu

SEQ ID NO: 2816300 - RNA, 19 nt, Artificial Sequence
  Description of Artificial Sequence: Synthetic oligonucleotide
ggcgaggaaggugauaagg

SEQ ID NO: 2816301 - RNA, 19 nt, Artificial Sequence
  Description of Artificial Sequence: Synthetic oligonucleotide
acuucauuuggggucagau

SEQ ID NO: 2816302 - RNA, 19 nt, Artificial Sequence
  Description of Artificial Sequence: Synthetic oligonucleotide
ccagaaugguuauuuuggg

SEQ ID NO: 2816303 - RNA, 19 nt, Artificial Sequence
  Description of Artificial Sequence: Synthetic oligonucleotide
ugugggaggcaucgugcug

SEQ ID NO: 2816304 - RNA, 19 nt, Artificial Sequence
  Description of Artificial Sequence: Synthetic oligonucleotide
ugggagggucgugaguugg

SEQ ID NO: 2816305 - RNA, 19 nt, Artificial Sequence
  Description of Artificial Sequence: Synthetic oligonucleotide
gaagcagugcaggcucugg

SEQ ID NO: 2816306 - RNA, 19 nt, Artificial Sequence
  Description of Artificial Sequence: Synthetic oligonucleotide
caagaauggcuaggguugg

SEQ ID NO: 2816307 - RNA, 19 nt, Artificial Sequence
  Description of Artificial Sequence: Synthetic oligonucleotide
uggaggccaagaauggcua

SEQ ID NO: 2816308 - RNA, 19 nt, Artificial Sequence
  Description of Artificial Sequence: Synthetic oligonucleotide
agguagacaaguguuggau

SEQ ID NO: 2816309 - RNA, 19 nt, Artificial Sequence
  Description of Artificial Sequence: Synthetic oligonucleotide
acagcugguaucugggauu

SEQ ID NO: 2816310 - RNA, 19 nt, Artificial Sequence
  Description of Artificial Sequence: Synthetic oligonucleotide
ucuugggauaguccuucau

SEQ ID NO: 2816311 - RNA, 19 nt, Artificial Sequence
  Description of Artificial Sequence: Synthetic oligonucleotide
agggcgaggaaggugauaa

SEQ ID NO: 2816312 - RNA, 19 nt, Artificial Sequence
  Description of Artificial Sequence: Synthetic oligonucleotide
caucaaacucucucaagaa

SEQ ID NO: 2816313 - RNA, 19 nt, Artificial Sequence
  Description of Artificial Sequence: Synthetic oligonucleotide
gaguugggcaggcauccac

SEQ ID NO: 2816314 - RNA, 19 nt, Artificial Sequence
  Description of Artificial Sequence: Synthetic oligonucleotide
gggauaguccuucauucac

SEQ ID NO: 2816315 - RNA, 19 nt, Artificial Sequence
  Description of Artificial Sequence: Synthetic oligonucleotide
gucccuucuugguuucagg

SEQ ID NO: 2816316 - RNA, 19 nt, Artificial Sequence
  Description of Artificial Sequence: Synthetic oligonucleotide
uagacaaguguuggauuac

SEQ ID NO: 2816317 - RNA, 19 nt, Artificial Sequence
  Description of Artificial Sequence: Synthetic oligonucleotide
ugcaggcucugguuauaag

SEQ ID NO: 2816318 - RNA, 19 nt, Artificial Sequence
  Description of Artificial Sequence: Synthetic oligonucleotide
cuuggaguggccuguggga

SEQ ID NO: 2816319 - RNA, 19 nt, Artificial Sequence
  Description of Artificial Sequence: Synthetic oligonucleotide
ggaggcaucgugcuguuuc

SEQ ID NO: 2816320 - RNA, 19 nt, Artificial Sequence
  Description of Artificial Sequence: Synthetic oligonucleotide
gaaugggucucagggcgag

SEQ ID NO: 2816321 - RNA, 19 nt, Artificial Sequence
  Description of Artificial Sequence: Synthetic oligonucleotide
uuggggugggucucucacc

SEQ ID NO: 2816322 - RNA, 19 nt, Artificial Sequence
  Description of Artificial Sequence: Synthetic oligonucleotide
gucagaugaacaauauuua

SEQ ID NO: 2816323 - RNA, 19 nt, Artificial Sequence
  Description of Artificial Sequence: Synthetic oligonucleotide
caagcuuucagcccaggua

SEQ ID NO: 2816324 - RNA, 19 nt, Artificial Sequence
  Description of Artificial Sequence: Synthetic oligonucleotide
cauucacuucugaaccauc

SEQ ID NO: 2816325 - RNA, 19 nt, Artificial Sequence
  Description of Artificial Sequence: Synthetic oligonucleotide
uucuacugcggcagcuggu

SEQ ID NO: 2816326 - RNA, 19 nt, Artificial Sequence
  Description of Artificial Sequence: Synthetic oligonucleotide
aaguguuggauuacuucua

SEQ ID NO: 2816327 - RNA, 19 nt, Artificial Sequence
  Description of Artificial Sequence: Synthetic oligonucleotide
ggauuacuucuacugcggc

SEQ ID NO: 2816328 - RNA, 19 nt, Artificial Sequence
  Description of Artificial Sequence: Synthetic oligonucleotide
cauuuggggucagaugaac

SEQ ID NO: 2816329 - RNA, 19 nt, Artificial Sequence
  Description of Artificial Sequence: Synthetic oligonucleotide
uggccacagaccugcacac

SEQ ID NO: 2816330 - RNA, 19 nt, Artificial Sequence
  Description of Artificial Sequence: Synthetic oligonucleotide
agacaaguguuggauuacu

SEQ ID NO: 2816331 - RNA, 19 nt, Artificial Sequence
  Description of Artificial Sequence: Synthetic oligonucleotide
agguggaggccaagaaugg

SEQ ID NO: 2816332 - RNA, 19 nt, Artificial Sequence
  Description of Artificial Sequence: Synthetic oligonucleotide
acugcugggagggucguga

SEQ ID NO: 2816333 - RNA, 19 nt, Artificial Sequence
  Description of Artificial Sequence: Synthetic oligonucleotide
uccaccuauguagguggag

SEQ ID NO: 2816334 - RNA, 19 nt, Artificial Sequence
  Description of Artificial Sequence: Synthetic oligonucleotide
ucuacugcggcagcuggua

SEQ ID NO: 2816335 - RNA, 19 nt, Artificial Sequence
  Description of Artificial Sequence: Synthetic oligonucleotide
ggcucugguuauaaggaag

SEQ ID NO: 2816336 - RNA, 19 nt, Artificial Sequence
  Description of Artificial Sequence: Synthetic oligonucleotide
acuucuacugcggcagcug

SEQ ID NO: 2816337 - RNA, 19 nt, Artificial Sequence
  Description of Artificial Sequence: Synthetic oligonucleotide
aggcauccaccuauguagg

SEQ ID NO: 2816338 - RNA, 19 nt, Artificial Sequence
  Description of Artificial Sequence: Synthetic oligonucleotide
uauguagguggaggccaag

SEQ ID NO: 2816339 - RNA, 19 nt, Artificial Sequence
  Description of Artificial Sequence: Synthetic oligonucleotide
gaaggugauaaggcaccac

SEQ ID NO: 2816340 - RNA, 19 nt, Artificial Sequence
  Description of Artificial Sequence: Synthetic oligonucleotide
ccagguagacaaguguugg

SEQ ID NO: 2816341 - RNA, 19 nt, Artificial Sequence
  Description of Artificial Sequence: Synthetic oligonucleotide
caggaggcacugcugggag

SEQ ID NO: 2816342 - RNA, 19 nt, Artificial Sequence
  Description of Artificial Sequence: Synthetic oligonucleotide
uuggggucagaugaacaau

SEQ ID NO: 2816343 - RNA, 19 nt, Artificial Sequence
  Description of Artificial Sequence: Synthetic oligonucleotide
ggucucagggcgaggaagg

SEQ ID NO: 2816344 - RNA, 19 nt, Artificial Sequence
  Description of Artificial Sequence: Synthetic oligonucleotide
uacuucuacugcggcagcu

SEQ ID NO: 2816345 - RNA, 19 nt, Artificial Sequence
  Description of Artificial Sequence: Synthetic oligonucleotide
gggcuaucugaccagcuac

SEQ ID NO: 2816346 - RNA, 19 nt, Artificial Sequence
  Description of Artificial Sequence: Synthetic oligonucleotide
gaauggcuaggguuggggu

SEQ ID NO: 2816347 - RNA, 19 nt, Artificial Sequence
  Description of Artificial Sequence: Synthetic oligonucleotide
ugggucucucaccaagcuu

SEQ ID NO: 2816348 - RNA, 19 nt, Artificial Sequence
  Description of Artificial Sequence: Synthetic oligonucleotide
ggacuucagaagcagugca

SEQ ID NO: 2816349 - RNA, 19 nt, Artificial Sequence
  Description of Artificial Sequence: Synthetic oligonucleotide
gucuuggaguggccugugg

SEQ ID NO: 2816350 - RNA, 19 nt, Artificial Sequence
  Description of Artificial Sequence: Synthetic oligonucleotide
agggcuaucugaccagcua

SEQ ID NO: 2816351 - RNA, 19 nt, Artificial Sequence
  Description of Artificial Sequence: Synthetic oligonucleotide
gaacaauauuuauguaauu

SEQ ID NO: 2816352 - RNA, 19 nt, Artificial Sequence
  Description of Artificial Sequence: Synthetic oligonucleotide
gagggucgugaguugggca

SEQ ID NO: 2816353 - RNA, 19 nt, Artificial Sequence
  Description of Artificial Sequence: Synthetic oligonucleotide
auaaggcaccacauggaaa

SEQ ID NO: 2816354 - RNA, 19 nt, Artificial Sequence
  Description of Artificial Sequence: Synthetic oligonucleotide
gggugggucucucaccaag

SEQ ID NO: 2816355 - RNA, 19 nt, Artificial Sequence
  Description of Artificial Sequence: Synthetic oligonucleotide
augggucucagggcgagga

SEQ ID NO: 2816356 - RNA, 19 nt, Artificial Sequence
  Description of Artificial Sequence: Synthetic oligonucleotide
cucaacacauaggauuaga

SEQ ID NO: 2816357 - RNA, 19 nt, Artificial Sequence
  Description of Artificial Sequence: Synthetic oligonucleotide
aguccuucauucacuucug

SEQ ID NO: 2816358 - RNA, 19 nt, Artificial Sequence
  Description of Artificial Sequence: Synthetic oligonucleotide
aaggcaccacauggaaagu

SEQ ID NO: 2816359 - RNA, 19 nt, Artificial Sequence
  Description of Artificial Sequence: Synthetic oligonucleotide
cugaccagcuacuucauuu

SEQ ID NO: 2816360 - RNA, 19 nt, Artificial Sequence
  Description of Artificial Sequence: Synthetic oligonucleotide
aagggcuaucugaccagcu

SEQ ID NO: 2816361 - RNA, 19 nt, Artificial Sequence
  Description of Artificial Sequence: Synthetic oligonucleotide
auguagguggaggccaaga

SEQ ID NO: 2816362 - RNA, 19 nt, Artificial Sequence
  Description of Artificial Sequence: Synthetic oligonucleotide
uucuugguuucaggaggca

SEQ ID NO: 2816363 - RNA, 19 nt, Artificial Sequence
  Description of Artificial Sequence: Synthetic oligonucleotide
uuggggucuuggaguggcc

SEQ ID NO: 2816364 - RNA, 19 nt, Artificial Sequence
  Description of Artificial Sequence: Synthetic oligonucleotide
accacauggaaagucccuu

SEQ ID NO: 2816365 - RNA, 19 nt, Artificial Sequence
  Description of Artificial Sequence: Synthetic oligonucleotide
cuacugcggcagcugguag

SEQ ID NO: 2816366 - RNA, 19 nt, Artificial Sequence
  Description of Artificial Sequence: Synthetic oligonucleotide
cagguagacaaguguugga

SEQ ID NO: 2816367 - RNA, 19 nt, Artificial Sequence
  Description of Artificial Sequence: Synthetic oligonucleotide
aggugauaaggcaccacau

SEQ ID NO: 2816368 - RNA, 19 nt, Artificial Sequence
  Description of Artificial Sequence: Synthetic oligonucleotide
agaagcagugcaggcucug

SEQ ID NO: 2816369 - RNA, 19 nt, Artificial Sequence
  Description of Artificial Sequence: Synthetic oligonucleotide
gcauccaccuauguaggug

SEQ ID NO: 2816370 - RNA, 19 nt, Artificial Sequence
  Description of Artificial Sequence: Synthetic oligonucleotide
ggaggccaagaauggcuag

SEQ ID NO: 2816371 - RNA, 19 nt, Artificial Sequence
  Description of Artificial Sequence: Synthetic oligonucleotide
gcuacuucauuugggguca

SEQ ID NO: 2816372 - RNA, 19 nt, Artificial Sequence
  Description of Artificial Sequence: Synthetic oligonucleotide
cccagguagacaaguguug

SEQ ID NO: 2816373 - RNA, 19 nt, Artificial Sequence
  Description of Artificial Sequence: Synthetic oligonucleotide
gguuucaggaggcacugcu

SEQ ID NO: 2816374 - RNA, 19 nt, Artificial Sequence
  Description of Artificial Sequence: Synthetic oligonucleotide
ggcaucgugcuguuucuuc

SEQ ID NO: 2816375 - RNA, 19 nt, Artificial Sequence
  Description of Artificial Sequence: Synthetic oligonucleotide
gcucugguuauaaggaaga

SEQ ID NO: 2816376 - RNA, 19 nt, Artificial Sequence
  Description of Artificial Sequence: Synthetic oligonucleotide
cuauguagguggaggccaa

SEQ ID NO: 2816377 - RNA, 19 nt, Artificial Sequence
  Description of Artificial Sequence: Synthetic oligonucleotide
gggucucagggcgaggaag

SEQ ID NO: 2816378 - RNA, 19 nt, Artificial Sequence
  Description of Artificial Sequence: Synthetic oligonucleotide
ugggucucagggcgaggaa

SEQ ID NO: 2816379 - RNA, 19 nt, Artificial Sequence
  Description of Artificial Sequence: Synthetic oligonucleotide
caccaagcuuucagcccag

SEQ ID NO: 2816380 - RNA, 19 nt, Artificial Sequence
  Description of Artificial Sequence: Synthetic oligonucleotide
uugggcaggcauccaccua

SEQ ID NO: 2816381 - RNA, 19 nt, Artificial Sequence
  Description of Artificial Sequence: Synthetic oligonucleotide
ggcaggagaauaagacaug

SEQ ID NO: 2816382 - RNA, 19 nt, Artificial Sequence
  Description of Artificial Sequence: Synthetic oligonucleotide
cuaggguuggggugggucu

SEQ ID NO: 2816383 - RNA, 19 nt, Artificial Sequence
  Description of Artificial Sequence: Synthetic oligonucleotide
ugaguugggcaggcaucca

SEQ ID NO: 2816384 - RNA, 19 nt, Artificial Sequence
  Description of Artificial Sequence: Synthetic oligonucleotide
gguggaggccaagaauggc

SEQ ID NO: 2816385 - RNA, 19 nt, Artificial Sequence
  Description of Artificial Sequence: Synthetic oligonucleotide
ugguuucaggaggcacugc

SEQ ID NO: 2816386 - RNA, 19 nt, Artificial Sequence
  Description of Artificial Sequence: Synthetic oligonucleotide
agaaugggucucagggcga

SEQ ID NO: 2816387 - RNA, 19 nt, Artificial Sequence
  Description of Artificial Sequence: Synthetic oligonucleotide
cacauggaaagucccuucu

SEQ ID NO: 2816388 - RNA, 19 nt, Artificial Sequence
  Description of Artificial Sequence: Synthetic oligonucleotide
accaagcuuucagcccagg

SEQ ID NO: 2816389 - RNA, 19 nt, Artificial Sequence
  Description of Artificial Sequence: Synthetic oligonucleotide
guggaggccaagaauggcu

SEQ ID NO: 2816390 - RNA, 19 nt, Artificial Sequence
  Description of Artificial Sequence: Synthetic oligonucleotide
gcuguuucuucuugggaua

SEQ ID NO: 2816391 - RNA, 19 nt, Artificial Sequence
  Description of Artificial Sequence: Synthetic oligonucleotide
gccaagaauggcuaggguu

SEQ ID NO: 2816392 - RNA, 19 nt, Artificial Sequence
  Description of Artificial Sequence: Synthetic oligonucleotide
guguuggauuacuucuacu

SEQ ID NO: 2816393 - RNA, 19 nt, Artificial Sequence
  Description of Artificial Sequence: Synthetic oligonucleotide
ugggauuggcaggguccag

SEQ ID NO: 2816394 - RNA, 19 nt, Artificial Sequence
  Description of Artificial Sequence: Synthetic oligonucleotide
ggauuagaaagggcuaucu

SEQ ID NO: 2816395 - RNA, 19 nt, Artificial Sequence
  Description of Artificial Sequence: Synthetic oligonucleotide
ccuauguagguggaggcca

SEQ ID NO: 2816396 - RNA, 19 nt, Artificial Sequence
  Description of Artificial Sequence: Synthetic oligonucleotide
guagcacagcugguaucug

SEQ ID NO: 2816397 - RNA, 19 nt, Artificial Sequence
  Description of Artificial Sequence: Synthetic oligonucleotide
ccacauggaaagucccuuc

SEQ ID NO: 2816398 - RNA, 19 nt, Artificial Sequence
  Description of Artificial Sequence: Synthetic oligonucleotide
uggcuaggguugggguggg

SEQ ID NO: 2816399 - RNA, 19 nt, Artificial Sequence
  Description of Artificial Sequence: Synthetic oligonucleotide
ggagggucgugaguugggc

SEQ ID NO: 2816400 - RNA, 19 nt, Artificial Sequence
  Description of Artificial Sequence: Synthetic oligonucleotide
gcucaacacauaggauuag

SEQ ID NO: 2816401 - RNA, 19 nt, Artificial Sequence
  Description of Artificial Sequence: Synthetic oligonucleotide
ggaaagucccuucuugguu

SEQ ID NO: 2816402 - RNA, 19 nt, Artificial Sequence
  Description of Artificial Sequence: Synthetic oligonucleotide
cgaggaaggugauaaggca

SEQ ID NO: 2816403 - RNA, 19 nt, Artificial Sequence
  Description of Artificial Sequence: Synthetic oligonucleotide
uaucugggauuggcagggu

SEQ ID NO: 2816404 - RNA, 19 nt, Artificial Sequence
  Description of Artificial Sequence: Synthetic oligonucleotide
gcaggcauccaccuaugua

SEQ ID NO: 2816405 - RNA, 19 nt, Artificial Sequence
  Description of Artificial Sequence: Synthetic oligonucleotide
gacaaguguuggauuacuu

SEQ ID NO: 2816406 - RNA, 19 nt, Artificial Sequence
  Description of Artificial Sequence: Synthetic oligonucleotide
cucugguuauaaggaagaa

SEQ ID NO: 2816407 - RNA, 19 nt, Artificial Sequence
  Description of Artificial Sequence: Synthetic oligonucleotide
gguagacaaguguuggauu

SEQ ID NO: 2816408 - RNA, 19 nt, Artificial Sequence
  Description of Artificial Sequence: Synthetic oligonucleotide
gggucgugaguugggcagg

SEQ ID NO: 2816409 - RNA, 19 nt, Artificial Sequence
  Description of Artificial Sequence: Synthetic oligonucleotide
gggagggucgugaguuggg

SEQ ID NO: 2816410 - RNA, 19 nt, Artificial Sequence
  Description of Artificial Sequence: Synthetic oligonucleotide
gcagugcaggcucugguua

SEQ ID NO: 2816411 - RNA, 19 nt, Artificial Sequence
  Description of Artificial Sequence: Synthetic oligonucleotide
cagcuacuucauuuggggu

SEQ ID NO: 2816412 - RNA, 19 nt, Artificial Sequence
  Description of Artificial Sequence: Synthetic oligonucleotide
agcuuucagcccagguaga

SEQ ID NO: 2816413 - RNA, 19 nt, Artificial Sequence
  Description of Artificial Sequence: Synthetic oligonucleotide
cacagcugguaucugggau

SEQ ID NO: 2816414 - RNA, 19 nt, Artificial Sequence
  Description of Artificial Sequence: Synthetic oligonucleotide
ggaaggugauaaggcacca

SEQ ID NO: 2816415 - RNA, 19 nt, Artificial Sequence
  Description of Artificial Sequence: Synthetic oligonucleotide
caccacauggaaagucccu

SEQ ID NO: 2816416 - RNA, 19 nt, Artificial Sequence
  Description of Artificial Sequence: Synthetic oligonucleotide
ggauaguccuucauucacu

SEQ ID NO: 2816417 - RNA, 19 nt, Artificial Sequence
  Description of Artificial Sequence: Synthetic oligonucleotide
gcuaggguugggguggguc

SEQ ID NO: 2816418 - RNA, 19 nt, Artificial Sequence
  Description of Artificial Sequence: Synthetic oligonucleotide
gcaucgugcuguuucuucu

SEQ ID NO: 2816419 - RNA, 19 nt, Artificial Sequence
  Description of Artificial Sequence: Synthetic oligonucleotide
cugguagcacagcugguau

SEQ ID NO: 2816420 - RNA, 19 nt, Artificial Sequence
  Description of Artificial Sequence: Synthetic oligonucleotide
gggauuggcaggguccaga

SEQ ID NO: 2816421 - RNA, 19 nt, Artificial Sequence
  Description of Artificial Sequence: Synthetic oligonucleotide
gggcgaggaaggugauaag

SEQ ID NO: 2816422 - RNA, 19 nt, Artificial Sequence
  Description of Artificial Sequence: Synthetic oligonucleotide
agugcaggcucugguuaua

SEQ ID NO: 2816423 - RNA, 19 nt, Artificial Sequence
  Description of Artificial Sequence: Synthetic oligonucleotide
auccaccuauguaggugga

SEQ ID NO: 2816424 - RNA, 19 nt, Artificial Sequence
  Description of Artificial Sequence: Synthetic oligonucleotide
ggucgugaguugggcaggc

SEQ ID NO: 2816425 - RNA, 19 nt, Artificial Sequence
  Description of Artificial Sequence: Synthetic oligonucleotide
gucucucaccaagcuuuca

SEQ ID NO: 2816426 - RNA, 19 nt, Artificial Sequence
  Description of Artificial Sequence: Synthetic oligonucleotide
gugcaggcucugguuauaa

SEQ ID NO: 2816427 - RNA, 19 nt, Artificial Sequence
  Description of Artificial Sequence: Synthetic oligonucleotide
ggguccagaaugguuauuu

SEQ ID NO: 2816428 - RNA, 19 nt, Artificial Sequence
  Description of Artificial Sequence: Synthetic oligonucleotide
ggucuuggaguggccugug

SEQ ID NO: 2816429 - RNA, 19 nt, Artificial Sequence
  Description of Artificial Sequence: Synthetic oligonucleotide
ggucucucaccaagcuuuc

SEQ ID NO: 2816430 - RNA, 19 nt, Artificial Sequence
  Description of Artificial Sequence: Synthetic oligonucleotide
caucgugcuguuucuucuu

SEQ ID NO: 2816431 - RNA, 19 nt, Artificial Sequence
  Description of Artificial Sequence: Synthetic oligonucleotide
gcugggagggucgugaguu

SEQ ID NO: 2816432 - RNA, 19 nt, Artificial Sequence
  Description of Artificial Sequence: Synthetic oligonucleotide
cagugcaggcucugguuau

SEQ ID NO: 2816433 - RNA, 19 nt, Artificial Sequence
  Description of Artificial Sequence: Synthetic oligonucleotide
caggguccagaaugguuau

SEQ ID NO: 2816434 - RNA, 19 nt, Artificial Sequence
  Description of Artificial Sequence: Synthetic oligonucleotide
gucgugaguugggcaggca

SEQ ID NO: 2816435 - RNA, 19 nt, Artificial Sequence
  Description of Artificial Sequence: Synthetic oligonucleotide
acauggccacagaccugca

SEQ ID NO: 2816436 - RNA, 19 nt, Artificial Sequence
  Description of Artificial Sequence: Synthetic oligonucleotide
ggccaagaauggcuagggu

SEQ ID NO: 2816437 - RNA, 19 nt, Artificial Sequence
  Description of Artificial Sequence: Synthetic oligonucleotide
gucucagggcgaggaaggu

SEQ ID NO: 2816438 - RNA, 19 nt, Artificial Sequence
  Description of Artificial Sequence: Synthetic oligonucleotide
ggcaggcauccaccuaugu

SEQ ID NO: 2816439 - RNA, 19 nt, Artificial Sequence
  Description of Artificial Sequence: Synthetic oligonucleotide
ccaagcuuucagcccaggu

SEQ ID NO: 2816440 - RNA, 19 nt, Artificial Sequence
  Description of Artificial Sequence: Synthetic oligonucleotide
gggucuuggaguggccugu

SEQ ID NO: 2816441 - RNA, 19 nt, Artificial Sequence
  Description of Artificial Sequence: Synthetic oligonucleotide
gcuaucugaccagcuacuu

SEQ ID NO: 2816442 - RNA, 19 nt, Artificial Sequence
  Description of Artificial Sequence: Synthetic oligonucleotide
gaguggccugugggaggca

SEQ ID NO: 2816443 - RNA, 19 nt, Artificial Sequence
  Description of Artificial Sequence: Synthetic oligonucleotide
ggggugggucucucaccaa

SEQ ID NO: 2816444 - RNA, 19 nt, Artificial Sequence
  Description of Artificial Sequence: Synthetic oligonucleotide
cagggcgaggaaggugaua

SEQ ID NO: 2816445 - RNA, 19 nt, Artificial Sequence
  Description of Artificial Sequence: Synthetic oligonucleotide
ggccugugggaggcaucgu

SEQ ID NO: 2816446 - RNA, 19 nt, Artificial Sequence
  Description of Artificial Sequence: Synthetic oligonucleotide
ggcuaggguuggggugggu

SEQ ID NO: 2816447 - RNA, 19 nt, Artificial Sequence
  Description of Artificial Sequence: Synthetic oligonucleotide
gggaggcaucgugcuguuu

SEQ ID NO: 2816448 - RNA, 19 nt, Artificial Sequence
  Description of Artificial Sequence: Synthetic oligonucleotide
aauaaguucgguucuuggc

SEQ ID NO: 2816449 - RNA, 19 nt, Artificial Sequence
  Description of Artificial Sequence: Synthetic oligonucleotide
auaguaauaaguucgguuc

SEQ ID NO: 2816450 - RNA, 19 nt, Artificial Sequence
  Description of Artificial Sequence: Synthetic oligonucleotide
aauaaacucucucacgagg

SEQ ID NO: 2816451 - RNA, 19 nt, Artificial Sequence
  Description of Artificial Sequence: Synthetic oligonucleotide
aauaauaggcucccaaguc

SEQ ID NO: 2816452 - RNA, 19 nt, Artificial Sequence
  Description of Artificial Sequence: Synthetic oligonucleotide
uucauaaaguaggugaugg

SEQ ID NO: 2816453 - RNA, 19 nt, Artificial Sequence
  Description of Artificial Sequence: Synthetic oligonucleotide
uccacgacgagaucgaagg

SEQ ID NO: 2816454 - RNA, 19 nt, Artificial Sequence
  Description of Artificial Sequence: Synthetic oligonucleotide
aaggccuucauaaaguagg

SEQ ID NO: 2816455 - RNA, 19 nt, Artificial Sequence
  Description of Artificial Sequence: Synthetic oligonucleotide
uucuuggucaacuuuguag

SEQ ID NO: 2816456 - RNA, 19 nt, Artificial Sequence
  Description of Artificial Sequence: Synthetic oligonucleotide
auguuguacaauuucuugg

SEQ ID NO: 2816457 - RNA, 19 nt, Artificial Sequence
  Description of Artificial Sequence: Synthetic oligonucleotide
aaagauacacaggauauca

SEQ ID NO: 2816458 - RNA, 19 nt, Artificial Sequence
  Description of Artificial Sequence: Synthetic oligonucleotide
ggugauaguaauaaguucg

SEQ ID NO: 2816459 - RNA, 19 nt, Artificial Sequence
  Description of Artificial Sequence: Synthetic oligonucleotide
agauacacaggauaucauc

SEQ ID NO: 2816460 - RNA, 19 nt, Artificial Sequence
  Description of Artificial Sequence: Synthetic oligonucleotide
ucccaagucauaauagcgg

SEQ ID NO: 2816461 - RNA, 19 nt, Artificial Sequence
  Description of Artificial Sequence: Synthetic oligonucleotide
ucaaagauacacaggauau

SEQ ID NO: 2816462 - RNA, 19 nt, Artificial Sequence
  Description of Artificial Sequence: Synthetic oligonucleotide
uucaaagauacacaggaua

SEQ ID NO: 2816463 - RNA, 19 nt, Artificial Sequence
  Description of Artificial Sequence: Synthetic oligonucleotide
gauguuguacaauuucuug

SEQ ID NO: 2816464 - RNA, 19 nt, Artificial Sequence
  Description of Artificial Sequence: Synthetic oligonucleotide
gucauaauagcggucaugg

SEQ ID NO: 2816465 - RNA, 19 nt, Artificial Sequence
  Description of Artificial Sequence: Synthetic oligonucleotide
acuuuguagucccuucucc

SEQ ID NO: 2816466 - RNA, 19 nt, Artificial Sequence
  Description of Artificial Sequence: Synthetic oligonucleotide
gauacacaggauaucaucc

SEQ ID NO: 2816467 - RNA, 19 nt, Artificial Sequence
  Description of Artificial Sequence: Synthetic oligonucleotide
uuucuggcagaauaauagg

SEQ ID NO: 2816468 - RNA, 19 nt, Artificial Sequence
  Description of Artificial Sequence: Synthetic oligonucleotide
uaauaaguucgguucuugg

SEQ ID NO: 2816469 - RNA, 19 nt, Artificial Sequence
  Description of Artificial Sequence: Synthetic oligonucleotide
ucuuggucaacuuuguagu

SEQ ID NO: 2816470 - RNA, 19 nt, Artificial Sequence
  Description of Artificial Sequence: Synthetic oligonucleotide
uucuggcagaauaauaggc

SEQ ID NO: 2816471 - RNA, 19 nt, Artificial Sequence
  Description of Artificial Sequence: Synthetic oligonucleotide
gaugauguuguacaauuuc

SEQ ID NO: 2816472 - RNA, 19 nt, Artificial Sequence
  Description of Artificial Sequence: Synthetic oligonucleotide
auaaguucgguucuuggca

SEQ ID NO: 2816473 - RNA, 19 nt, Artificial Sequence
  Description of Artificial Sequence: Synthetic oligonucleotide
ugcucaauaaacucucuca

SEQ ID NO: 2816474 - RNA, 19 nt, Artificial Sequence
  Description of Artificial Sequence: Synthetic oligonucleotide
uuguacaauuucuugguca

SEQ ID NO: 2816475 - RNA, 19 nt, Artificial Sequence
  Description of Artificial Sequence: Synthetic oligonucleotide
guaggcuuuagccaccugg

SEQ ID NO: 2816476 - RNA, 19 nt, Artificial Sequence
  Description of Artificial Sequence: Synthetic oligonucleotide
caggauaucauccucuuug

SEQ ID NO: 2816477 - RNA, 19 nt, Artificial Sequence
  Description of Artificial Sequence: Synthetic oligonucleotide
auaauagcggucaugguag

SEQ ID NO: 2816478 - RNA, 19 nt, Artificial Sequence
  Description of Artificial Sequence: Synthetic oligonucleotide
ugugaugucuggcacacgu

SEQ ID NO: 2816479 - RNA, 19 nt, Artificial Sequence
  Description of Artificial Sequence: Synthetic oligonucleotide
ucuggcagaauaauaggcu

SEQ ID NO: 2816480 - RNA, 19 nt, Artificial Sequence
  Description of Artificial Sequence: Synthetic oligonucleotide
agaucgaaggccuucauaa

SEQ ID NO: 2816481 - RNA, 19 nt, Artificial Sequence
  Description of Artificial Sequence: Synthetic oligonucleotide
gucaugguaggcuuuagcc

SEQ ID NO: 2816482 - RNA, 19 nt, Artificial Sequence
  Description of Artificial Sequence: Synthetic oligonucleotide
cucaauaaacucucucacg

SEQ ID NO: 2816483 - RNA, 19 nt, Artificial Sequence
  Description of Artificial Sequence: Synthetic oligonucleotide
ucuccauugcaucucagcu

SEQ ID NO: 2816484 - RNA, 19 nt, Artificial Sequence
  Description of Artificial Sequence: Synthetic oligonucleotide
auaauaggcucccaaguca

SEQ ID NO: 2816485 - RNA, 19 nt, Artificial Sequence
  Description of Artificial Sequence: Synthetic oligonucleotide
uaggcuuuagccaccuggg

SEQ ID NO: 2816486 - RNA, 19 nt, Artificial Sequence
  Description of Artificial Sequence: Synthetic oligonucleotide
cucccaagucauaauagcg

SEQ ID NO: 2816487 - RNA, 19 nt, Artificial Sequence
  Description of Artificial Sequence: Synthetic oligonucleotide
aucgaaggccuucauaaag

SEQ ID NO: 2816488 - RNA, 19 nt, Artificial Sequence
  Description of Artificial Sequence: Synthetic oligonucleotide
uuugcauucugugaugucu

SEQ ID NO: 2816489 - RNA, 19 nt, Artificial Sequence
  Description of Artificial Sequence: Synthetic oligonucleotide
uguugcucaauaaacucuc

SEQ ID NO: 2816490 - RNA, 19 nt, Artificial Sequence
  Description of Artificial Sequence: Synthetic oligonucleotide
uguacaauuucuuggucaa

SEQ ID NO: 2816491 - RNA, 19 nt, Artificial Sequence
  Description of Artificial Sequence: Synthetic oligonucleotide
uccauugcaucucagcuuc

SEQ ID NO: 2816492 - RNA, 19 nt, Artificial Sequence
  Description of Artificial Sequence: Synthetic oligonucleotide
caugguaggcuuuagccac

SEQ ID NO: 2816493 - RNA, 19 nt, Artificial Sequence
  Description of Artificial Sequence: Synthetic oligonucleotide
auaaacucucucacgaggg

SEQ ID NO: 2816494 - RNA, 19 nt, Artificial Sequence
  Description of Artificial Sequence: Synthetic oligonucleotide
ucaugguaggcuuuagcca

SEQ ID NO: 2816495 - RNA, 19 nt, Artificial Sequence
  Description of Artificial Sequence: Synthetic oligonucleotide
uacaauuucuuggucaacu

SEQ ID NO: 2816496 - RNA, 19 nt, Artificial Sequence
  Description of Artificial Sequence: Synthetic oligonucleotide
uaguaauaaguucgguucu

SEQ ID NO: 2816497 - RNA, 19 nt, Artificial Sequence
  Description of Artificial Sequence: Synthetic oligonucleotide
aauagcggucaugguaggc

SEQ ID NO: 2816498 - RNA, 19 nt, Artificial Sequence
  Description of Artificial Sequence: Synthetic oligonucleotide
uuaagccucuccuggauga

SEQ ID NO: 2816499 - RNA, 19 nt, Artificial Sequence
  Description of Artificial Sequence: Synthetic oligonucleotide
ucucucacgagggucacgg

SEQ ID NO: 2816500 - RNA, 19 nt, Artificial Sequence
  Description of Artificial Sequence: Synthetic oligonucleotide
ugcuguugcucaauaaacu

SEQ ID NO: 2816501 - RNA, 19 nt, Artificial Sequence
  Description of Artificial Sequence: Synthetic oligonucleotide
uuuguggcgagggagccgg

SEQ ID NO: 2816502 - RNA, 19 nt, Artificial Sequence
  Description of Artificial Sequence: Synthetic oligonucleotide
aaacucucucacgaggguc

SEQ ID NO: 2816503 - RNA, 19 nt, Artificial Sequence
  Description of Artificial Sequence: Synthetic oligonucleotide
uuuaagccucuccuggaug

SEQ ID NO: 2816504 - RNA, 19 nt, Artificial Sequence
  Description of Artificial Sequence: Synthetic oligonucleotide
uggcagaauaauaggcucc

SEQ ID NO: 2816505 - RNA, 19 nt, Artificial Sequence
  Description of Artificial Sequence: Synthetic oligonucleotide
ugcugacaggcuuuaagcc

SEQ ID NO: 2816506 - RNA, 19 nt, Artificial Sequence
  Description of Artificial Sequence: Synthetic oligonucleotide
guagcaaucgcucccugcc

SEQ ID NO: 2816507 - RNA, 19 nt, Artificial Sequence
  Description of Artificial Sequence: Synthetic oligonucleotide
uggggagcgagguuugugg

SEQ ID NO: 2816508 - RNA, 19 nt, Artificial Sequence
  Description of Artificial Sequence: Synthetic oligonucleotide
uggucaacuuuguaguccc

SEQ ID NO: 2816509 - RNA, 19 nt, Artificial Sequence
  Description of Artificial Sequence: Synthetic oligonucleotide
uguagucccuucuccauug

SEQ ID NO: 2816510 - RNA, 19 nt, Artificial Sequence
  Description of Artificial Sequence: Synthetic oligonucleotide
ugcuccauuuccuuggcac

SEQ ID NO: 2816511 - RNA, 19 nt, Artificial Sequence
  Description of Artificial Sequence: Synthetic oligonucleotide
uggaugauguuguacaauu

SEQ ID NO: 2816512 - RNA, 19 nt, Artificial Sequence
  Description of Artificial Sequence: Synthetic oligonucleotide
ucucacgagggucacgggc

SEQ ID NO: 2816513 - RNA, 19 nt, Artificial Sequence
  Description of Artificial Sequence: Synthetic oligonucleotide
aaguaggugaugggguugg

SEQ ID NO: 2816514 - RNA, 19 nt, Artificial Sequence
  Description of Artificial Sequence: Synthetic oligonucleotide
auaucauccucuuugcauu

SEQ ID NO: 2816515 - RNA, 19 nt, Artificial Sequence
  Description of Artificial Sequence: Synthetic oligonucleotide
caagaguccggcauggcug

SEQ ID NO: 2816516 - RNA, 19 nt, Artificial Sequence
  Description of Artificial Sequence: Synthetic oligonucleotide
uugcauucugugaugucug

SEQ ID NO: 2816517 - RNA, 19 nt, Artificial Sequence
  Description of Artificial Sequence: Synthetic oligonucleotide
augcuguugcucaauaaac

SEQ ID NO: 2816518 - RNA, 19 nt, Artificial Sequence
  Description of Artificial Sequence: Synthetic oligonucleotide
aauucugcuuugcguucuc

SEQ ID NO: 2816519 - RNA, 19 nt, Artificial Sequence
  Description of Artificial Sequence: Synthetic oligonucleotide
uucuccauugcaucucagc

SEQ ID NO: 2816520 - RNA, 19 nt, Artificial Sequence
  Description of Artificial Sequence: Synthetic oligonucleotide
gugauaguaauaaguucgg

SEQ ID NO: 2816521 - RNA, 19 nt, Artificial Sequence
  Description of Artificial Sequence: Synthetic oligonucleotide
uuggucaacuuuguagucc

SEQ ID NO: 2816522 - RNA, 19 nt, Artificial Sequence
  Description of Artificial Sequence: Synthetic oligonucleotide
uaauaggcucccaagucau

SEQ ID NO: 2816523 - RNA, 19 nt, Artificial Sequence
  Description of Artificial Sequence: Synthetic oligonucleotide
gauaguaauaaguucgguu

SEQ ID NO: 2816524 - RNA, 19 nt, Artificial Sequence
  Description of Artificial Sequence: Synthetic oligonucleotide
caauaaacucucucacgag

SEQ ID NO: 2816525 - RNA, 19 nt, Artificial Sequence
  Description of Artificial Sequence: Synthetic oligonucleotide
cauaauagcggucauggua

SEQ ID NO: 2816526 - RNA, 19 nt, Artificial Sequence
  Description of Artificial Sequence: Synthetic oligonucleotide
auaaaguaggugauggggu

SEQ ID NO: 2816527 - RNA, 19 nt, Artificial Sequence
  Description of Artificial Sequence: Synthetic oligonucleotide
gaauaauaggcucccaagu

SEQ ID NO: 2816528 - RNA, 19 nt, Artificial Sequence
  Description of Artificial Sequence: Synthetic oligonucleotide
gauaucauccucuuugcau

SEQ ID NO: 2816529 - RNA, 19 nt, Artificial Sequence
  Description of Artificial Sequence: Synthetic oligonucleotide
cuucucucugcugacaggc

SEQ ID NO: 2816530 - RNA, 19 nt, Artificial Sequence
  Description of Artificial Sequence: Synthetic oligonucleotide
uuagccaccugggugaacu

SEQ ID NO: 2816531 - RNA, 19 nt, Artificial Sequence
  Description of Artificial Sequence: Synthetic oligonucleotide
aaaguaggugaugggguug

SEQ ID NO: 2816532 - RNA, 19 nt, Artificial Sequence
  Description of Artificial Sequence: Synthetic oligonucleotide
ucaacuuuguagucccuuc

SEQ ID NO: 2816533 - RNA, 19 nt, Artificial Sequence
  Description of Artificial Sequence: Synthetic oligonucleotide
auacacaggauaucauccu

SEQ ID NO: 2816534 - RNA, 19 nt, Artificial Sequence
  Description of Artificial Sequence: Synthetic oligonucleotide
uguagcaaucgcucccugc

SEQ ID NO: 2816535 - RNA, 19 nt, Artificial Sequence
  Description of Artificial Sequence: Synthetic oligonucleotide
aguucgguucuuggcaugc

SEQ ID NO: 2816536 - RNA, 19 nt, Artificial Sequence
  Description of Artificial Sequence: Synthetic oligonucleotide
cacacgucgguacugccgg

SEQ ID NO: 2816537 - RNA, 19 nt, Artificial Sequence
  Description of Artificial Sequence: Synthetic oligonucleotide
ggcuuuaagccucuccugg

SEQ ID NO: 2816538 - RNA, 19 nt, Artificial Sequence
  Description of Artificial Sequence: Synthetic oligonucleotide
cuggcagaauaauaggcuc

SEQ ID NO: 2816539 - RNA, 19 nt, Artificial Sequence
  Description of Artificial Sequence: Synthetic oligonucleotide
uacacaggauaucauccuc

SEQ ID NO: 2816540 - RNA, 19 nt, Artificial Sequence
  Description of Artificial Sequence: Synthetic oligonucleotide
uucgcucgcguccggaucc

SEQ ID NO: 2816541 - RNA, 19 nt, Artificial Sequence
  Description of Artificial Sequence: Synthetic oligonucleotide
ugcauucugugaugucugg

SEQ ID NO: 2816542 - RNA, 19 nt, Artificial Sequence
  Description of Artificial Sequence: Synthetic oligonucleotide
uccuugucccaagaguccg

SEQ ID NO: 2816543 - RNA, 19 nt, Artificial Sequence
  Description of Artificial Sequence: Synthetic oligonucleotide
auggcuguagcaaucgcuc

SEQ ID NO: 2816544 - RNA, 19 nt, Artificial Sequence
  Description of Artificial Sequence: Synthetic oligonucleotide
uugcucaauaaacucucuc

SEQ ID NO: 2816545 - RNA, 19 nt, Artificial Sequence
  Description of Artificial Sequence: Synthetic oligonucleotide
uccaauucgcucgcguccg

SEQ ID NO: 2816546 - RNA, 19 nt, Artificial Sequence
  Description of Artificial Sequence: Synthetic oligonucleotide
gccuucauaaaguagguga

SEQ ID NO: 2816547 - RNA, 19 nt, Artificial Sequence
  Description of Artificial Sequence: Synthetic oligonucleotide
uaaacucucucacgagggu

SEQ ID NO: 2816548 - RNA, 19 nt, Artificial Sequence
  Description of Artificial Sequence: Synthetic oligonucleotide
uuuguagucccuucuccau

SEQ ID NO: 2816549 - RNA, 19 nt, Artificial Sequence
  Description of Artificial Sequence: Synthetic oligonucleotide
aaucgcucccugccgaccu

SEQ ID NO: 2816550 - RNA, 19 nt, Artificial Sequence
  Description of Artificial Sequence: Synthetic oligonucleotide
uuugcguucucuccuucuc

SEQ ID NO: 2816551 - RNA, 19 nt, Artificial Sequence
  Description of Artificial Sequence: Synthetic oligonucleotide
uagcaaucgcucccugccg

SEQ ID NO: 2816552 - RNA, 19 nt, Artificial Sequence
  Description of Artificial Sequence: Synthetic oligonucleotide
caagucauaauagcgguca

SEQ ID NO: 2816553 - RNA, 19 nt, Artificial Sequence
  Description of Artificial Sequence: Synthetic oligonucleotide
gaaggccuucauaaaguag

SEQ ID NO: 2816554 - RNA, 19 nt, Artificial Sequence
  Description of Artificial Sequence: Synthetic oligonucleotide
uaauagcggucaugguagg

SEQ ID NO: 2816555 - RNA, 19 nt, Artificial Sequence
  Description of Artificial Sequence: Synthetic oligonucleotide
cugacaggcuuuaagccuc

SEQ ID NO: 2816556 - RNA, 19 nt, Artificial Sequence
  Description of Artificial Sequence: Synthetic oligonucleotide
uucgguucuuggcaugcug

SEQ ID NO: 2816557 - RNA, 19 nt, Artificial Sequence
  Description of Artificial Sequence: Synthetic oligonucleotide
cuccaauucgcucgcgucc

SEQ ID NO: 2816558 - RNA, 19 nt, Artificial Sequence
  Description of Artificial Sequence: Synthetic oligonucleotide
ucgguucuuggcaugcugu

SEQ ID NO: 2816559 - RNA, 19 nt, Artificial Sequence
  Description of Artificial Sequence: Synthetic oligonucleotide
cuuggcaugcuguugcuca

SEQ ID NO: 2816560 - RNA, 19 nt, Artificial Sequence
  Description of Artificial Sequence: Synthetic oligonucleotide
uaaguucgguucuuggcau

SEQ ID NO: 2816561 - RNA, 19 nt, Artificial Sequence
  Description of Artificial Sequence: Synthetic oligonucleotide
cacgacgagaucgaaggcc

SEQ ID NO: 2816562 - RNA, 19 nt, Artificial Sequence
  Description of Artificial Sequence: Synthetic oligonucleotide
gaugucuggcacacgucgg

SEQ ID NO: 2816563 - RNA, 19 nt, Artificial Sequence
  Description of Artificial Sequence: Synthetic oligonucleotide
aacucucucacgaggguca

SEQ ID NO: 2816564 - RNA, 19 nt, Artificial Sequence
  Description of Artificial Sequence: Synthetic oligonucleotide
agguuuguggcgagggagc

SEQ ID NO: 2816565 - RNA, 19 nt, Artificial Sequence
  Description of Artificial Sequence: Synthetic oligonucleotide
aaguucgguucuuggcaug

SEQ ID NO: 2816566 - RNA, 19 nt, Artificial Sequence
  Description of Artificial Sequence: Synthetic oligonucleotide
auccuugucccaagagucc

SEQ ID NO: 2816567 - RNA, 19 nt, Artificial Sequence
  Description of Artificial Sequence: Synthetic oligonucleotide
guaauaaguucgguucuug

SEQ ID NO: 2816568 - RNA, 19 nt, Artificial Sequence
  Description of Artificial Sequence: Synthetic oligonucleotide
gcucaauaaacucucucac

SEQ ID NO: 2816569 - RNA, 19 nt, Artificial Sequence
  Description of Artificial Sequence: Synthetic oligonucleotide
agcuucaaagauacacagg

SEQ ID NO: 2816570 - RNA, 19 nt, Artificial Sequence
  Description of Artificial Sequence: Synthetic oligonucleotide
ucgguacugccggugauag

SEQ ID NO: 2816571 - RNA, 19 nt, Artificial Sequence
  Description of Artificial Sequence: Synthetic oligonucleotide
caugcuguugcucaauaaa

SEQ ID NO: 2816572 - RNA, 19 nt, Artificial Sequence
  Description of Artificial Sequence: Synthetic oligonucleotide
cugccgaccuccaauucgc

SEQ ID NO: 2816573 - RNA, 19 nt, Artificial Sequence
  Description of Artificial Sequence: Synthetic oligonucleotide
auagcggucaugguaggcu

SEQ ID NO: 2816574 - RNA, 19 nt, Artificial Sequence
  Description of Artificial Sequence: Synthetic oligonucleotide
ggugaacugcuccauuucc

SEQ ID NO: 2816575 - RNA, 19 nt, Artificial Sequence
  Description of Artificial Sequence: Synthetic oligonucleotide
cuucauaaaguaggugaug

SEQ ID NO: 2816576 - RNA, 19 nt, Artificial Sequence
  Description of Artificial Sequence: Synthetic oligonucleotide
ucuggcacacgucgguacu

SEQ ID NO: 2816577 - RNA, 19 nt, Artificial Sequence
  Description of Artificial Sequence: Synthetic oligonucleotide
ucauaauagcggucauggu

SEQ ID NO: 2816578 - RNA, 19 nt, Artificial Sequence
  Description of Artificial Sequence: Synthetic oligonucleotide
auucgcucgcguccggauc

SEQ ID NO: 2816579 - RNA, 19 nt, Artificial Sequence
  Description of Artificial Sequence: Synthetic oligonucleotide
aauucgcucgcguccggau

SEQ ID NO: 2816580 - RNA, 19 nt, Artificial Sequence
  Description of Artificial Sequence: Synthetic oligonucleotide
cuuggucaacuuuguaguc

SEQ ID NO: 2816581 - RNA, 19 nt, Artificial Sequence
  Description of Artificial Sequence: Synthetic oligonucleotide
guuguacaauuucuugguc

SEQ ID NO: 2816582 - RNA, 19 nt, Artificial Sequence
  Description of Artificial Sequence: Synthetic oligonucleotide
ccgaccuccaauucgcucg

SEQ ID NO: 2816583 - RNA, 19 nt, Artificial Sequence
  Description of Artificial Sequence: Synthetic oligonucleotide
uugcguucucuccuucucu

SEQ ID NO: 2816584 - RNA, 19 nt, Artificial Sequence
  Description of Artificial Sequence: Synthetic oligonucleotide
caaagauacacaggauauc

SEQ ID NO: 2816585 - RNA, 19 nt, Artificial Sequence
  Description of Artificial Sequence: Synthetic oligonucleotide
gggcucaggguacacaucc

SEQ ID NO: 2816586 - RNA, 19 nt, Artificial Sequence
  Description of Artificial Sequence: Synthetic oligonucleotide
ggcuuuagccaccugggug

SEQ ID NO: 2816587 - RNA, 19 nt, Artificial Sequence
  Description of Artificial Sequence: Synthetic oligonucleotide
gcuguugcucaauaaacuc

SEQ ID NO: 2816588 - RNA, 19 nt, Artificial Sequence
  Description of Artificial Sequence: Synthetic oligonucleotide
ucccaagaguccggcaugg

SEQ ID NO: 2816589 - RNA, 19 nt, Artificial Sequence
  Description of Artificial Sequence: Synthetic oligonucleotide
cacauccuugucccaagag

SEQ ID NO: 2816590 - RNA, 19 nt, Artificial Sequence
  Description of Artificial Sequence: Synthetic oligonucleotide
guaggugaugggguugggg

SEQ ID NO: 2816591 - RNA, 19 nt, Artificial Sequence
  Description of Artificial Sequence: Synthetic oligonucleotide
ugggugaacugcuccauuu

SEQ ID NO: 2816592 - RNA, 19 nt, Artificial Sequence
  Description of Artificial Sequence: Synthetic oligonucleotide
gcuuuagccaccuggguga

SEQ ID NO: 2816593 - RNA, 19 nt, Artificial Sequence
  Description of Artificial Sequence: Synthetic oligonucleotide
gcucccaagucauaauagc

SEQ ID NO: 2816594 - RNA, 19 nt, Artificial Sequence
  Description of Artificial Sequence: Synthetic oligonucleotide
agcaaucgcucccugccga

SEQ ID NO: 2816595 - RNA, 19 nt, Artificial Sequence
  Description of Artificial Sequence: Synthetic oligonucleotide
auugcaucucagcuucaaa

SEQ ID NO: 2816596 - RNA, 19 nt, Artificial Sequence
  Description of Artificial Sequence: Synthetic oligonucleotide
ugcguucucuccuucucuc

SEQ ID NO: 2816597 - RNA, 19 nt, Artificial Sequence
  Description of Artificial Sequence: Synthetic oligonucleotide
auaggcucccaagucauaa

SEQ ID NO: 2816598 - RNA, 19 nt, Artificial Sequence
  Description of Artificial Sequence: Synthetic oligonucleotide
uccggcauggcuguagcaa

SEQ ID NO: 2816599 - RNA, 19 nt, Artificial Sequence
  Description of Artificial Sequence: Synthetic oligonucleotide
augucuggcacacgucggu

SEQ ID NO: 2816600 - RNA, 19 nt, Artificial Sequence
  Description of Artificial Sequence: Synthetic oligonucleotide
cuuggcacaauucugcuuu

SEQ ID NO: 2816601 - RNA, 19 nt, Artificial Sequence
  Description of Artificial Sequence: Synthetic oligonucleotide
uguggcgagggagccggcg

SEQ ID NO: 2816602 - RNA, 19 nt, Artificial Sequence
  Description of Artificial Sequence: Synthetic oligonucleotide
cuuugccaggcacuuucug

SEQ ID NO: 2816603 - RNA, 19 nt, Artificial Sequence
  Description of Artificial Sequence: Synthetic oligonucleotide
augguaggcuuuagccacc

SEQ ID NO: 2816604 - RNA, 19 nt, Artificial Sequence
  Description of Artificial Sequence: Synthetic oligonucleotide
gaucgaaggccuucauaaa

SEQ ID NO: 2816605 - RNA, 19 nt, Artificial Sequence
  Description of Artificial Sequence: Synthetic oligonucleotide
aguaauaaguucgguucuu

SEQ ID NO: 2816606 - RNA, 19 nt, Artificial Sequence
  Description of Artificial Sequence: Synthetic oligonucleotide
accugggugaacugcucca

SEQ ID NO: 2816607 - RNA, 19 nt, Artificial Sequence
  Description of Artificial Sequence: Synthetic oligonucleotide
ggcagaauaauaggcuccc

SEQ ID NO: 2816608 - RNA, 19 nt, Artificial Sequence
  Description of Artificial Sequence: Synthetic oligonucleotide
uuggcacaauucugcuuug

SEQ ID NO: 2816609 - RNA, 19 nt, Artificial Sequence
  Description of Artificial Sequence: Synthetic oligonucleotide
acgacgagaucgaaggccu

SEQ ID NO: 2816610 - RNA, 19 nt, Artificial Sequence
  Description of Artificial Sequence: Synthetic oligonucleotide
caccugggugaacugcucc

SEQ ID NO: 2816611 - RNA, 19 nt, Artificial Sequence
  Description of Artificial Sequence: Synthetic oligonucleotide
uucucucugcugacaggcu

SEQ ID NO: 2816612 - RNA, 19 nt, Artificial Sequence
  Description of Artificial Sequence: Synthetic oligonucleotide
cuguugcucaauaaacucu

SEQ ID NO: 2816613 - RNA, 19 nt, Artificial Sequence
  Description of Artificial Sequence: Synthetic oligonucleotide
ggucaugguaggcuuuagc

SEQ ID NO: 2816614 - RNA, 19 nt, Artificial Sequence
  Description of Artificial Sequence: Synthetic oligonucleotide
ggcuguagcaaucgcuccc

SEQ ID NO: 2816615 - RNA, 19 nt, Artificial Sequence
  Description of Artificial Sequence: Synthetic oligonucleotide
aggcucccaagucauaaua

SEQ ID NO: 2816616 - RNA, 19 nt, Artificial Sequence
  Description of Artificial Sequence: Synthetic oligonucleotide
gagaucgaaggccuucaua

SEQ ID NO: 2816617 - RNA, 19 nt, Artificial Sequence
  Description of Artificial Sequence: Synthetic oligonucleotide
cacaauucugcuuugcguu

SEQ ID NO: 2816618 - RNA, 19 nt, Artificial Sequence
  Description of Artificial Sequence: Synthetic oligonucleotide
gguacugccggugauagua

SEQ ID NO: 2816619 - RNA, 19 nt, Artificial Sequence
  Description of Artificial Sequence: Synthetic oligonucleotide
aagccucuccuggaugaug

SEQ ID NO: 2816620 - RNA, 19 nt, Artificial Sequence
  Description of Artificial Sequence: Synthetic oligonucleotide
gagggagccggcgugcggc

SEQ ID NO: 2816621 - RNA, 19 nt, Artificial Sequence
  Description of Artificial Sequence: Synthetic oligonucleotide
accuccaauucgcucgcgu

SEQ ID NO: 2816622 - RNA, 19 nt, Artificial Sequence
  Description of Artificial Sequence: Synthetic oligonucleotide
gagggucacgggccggucc

SEQ ID NO: 2816623 - RNA, 19 nt, Artificial Sequence
  Description of Artificial Sequence: Synthetic oligonucleotide
ccugccgaccuccaauucg

SEQ ID NO: 2816624 - RNA, 19 nt, Artificial Sequence
  Description of Artificial Sequence: Synthetic oligonucleotide
gucccaagaguccggcaug

SEQ ID NO: 2816625 - RNA, 19 nt, Artificial Sequence
  Description of Artificial Sequence: Synthetic oligonucleotide
gacgagaucgaaggccuuc

SEQ ID NO: 2816626 - RNA, 19 nt, Artificial Sequence
  Description of Artificial Sequence: Synthetic oligonucleotide
ugacaggcuuuaagccucu

SEQ ID NO: 2816627 - RNA, 19 nt, Artificial Sequence
  Description of Artificial Sequence: Synthetic oligonucleotide
acacauccuugucccaaga

SEQ ID NO: 2816628 - RNA, 19 nt, Artificial Sequence
  Description of Artificial Sequence: Synthetic oligonucleotide
ggcauggcuguagcaaucg

SEQ ID NO: 2816629 - RNA, 19 nt, Artificial Sequence
  Description of Artificial Sequence: Synthetic oligonucleotide
uuggggagcgagguuugug

SEQ ID NO: 2816630 - RNA, 19 nt, Artificial Sequence
  Description of Artificial Sequence: Synthetic oligonucleotide
caggcuuuaagccucuccu

SEQ ID NO: 2816631 - RNA, 19 nt, Artificial Sequence
  Description of Artificial Sequence: Synthetic oligonucleotide
cacgggccgguccacgacg

SEQ ID NO: 2816632 - RNA, 19 nt, Artificial Sequence
  Description of Artificial Sequence: Synthetic oligonucleotide
acuuucuggcagaauaaua

SEQ ID NO: 2816633 - RNA, 19 nt, Artificial Sequence
  Description of Artificial Sequence: Synthetic oligonucleotide
guuuguggcgagggagccg

SEQ ID NO: 2816634 - RNA, 19 nt, Artificial Sequence
  Description of Artificial Sequence: Synthetic oligonucleotide
ggcucccaagucauaauag

SEQ ID NO: 2816635 - RNA, 19 nt, Artificial Sequence
  Description of Artificial Sequence: Synthetic oligonucleotide
ugccaggcacuuucuggca

SEQ ID NO: 2816636 - RNA, 19 nt, Artificial Sequence
  Description of Artificial Sequence: Synthetic oligonucleotide
gucuggcacacgucgguac

SEQ ID NO: 2816637 - RNA, 19 nt, Artificial Sequence
  Description of Artificial Sequence: Synthetic oligonucleotide
ucucagcuucaaagauaca

SEQ ID NO: 2816638 - RNA, 19 nt, Artificial Sequence
  Description of Artificial Sequence: Synthetic oligonucleotide
cauggcuguagcaaucgcu

SEQ ID NO: 2816639 - RNA, 19 nt, Artificial Sequence
  Description of Artificial Sequence: Synthetic oligonucleotide
uggcacaauucugcuuugc

SEQ ID NO: 2816640 - RNA, 19 nt, Artificial Sequence
  Description of Artificial Sequence: Synthetic oligonucleotide
agggucacgggccggucca

SEQ ID NO: 2816641 - RNA, 19 nt, Artificial Sequence
  Description of Artificial Sequence: Synthetic oligonucleotide
aggcuuuagccaccugggu

SEQ ID NO: 2816642 - RNA, 19 nt, Artificial Sequence
  Description of Artificial Sequence: Synthetic oligonucleotide
acaggauaucauccucuuu

SEQ ID NO: 2816643 - RNA, 19 nt, Artificial Sequence
  Description of Artificial Sequence: Synthetic oligonucleotide
gaguccggcauggcuguag

SEQ ID NO: 2816644 - RNA, 19 nt, Artificial Sequence
  Description of Artificial Sequence: Synthetic oligonucleotide
uuggcaugcuguugcucaa

SEQ ID NO: 2816645 - RNA, 19 nt, Artificial Sequence
  Description of Artificial Sequence: Synthetic oligonucleotide
agccucuccuggaugaugu

SEQ ID NO: 2816646 - RNA, 19 nt, Artificial Sequence
  Description of Artificial Sequence: Synthetic oligonucleotide
uggcgagggagccggcgug

SEQ ID NO: 2816647 - RNA, 19 nt, Artificial Sequence
  Description of Artificial Sequence: Synthetic oligonucleotide
uaggcucccaagucauaau

SEQ ID NO: 2816648 - RNA, 19 nt, Artificial Sequence
  Description of Artificial Sequence: Synthetic oligonucleotide
uggcacacgucgguacugc

SEQ ID NO: 2816649 - RNA, 19 nt, Artificial Sequence
  Description of Artificial Sequence: Synthetic oligonucleotide
guccacgacgagaucgaag

SEQ ID NO: 2816650 - RNA, 19 nt, Artificial Sequence
  Description of Artificial Sequence: Synthetic oligonucleotide
guagucccuucuccauugc

SEQ ID NO: 2816651 - RNA, 19 nt, Artificial Sequence
  Description of Artificial Sequence: Synthetic oligonucleotide
cugccggugauaguaauaa

SEQ ID NO: 2816652 - RNA, 19 nt, Artificial Sequence
  Description of Artificial Sequence: Synthetic oligonucleotide
uacugccggugauaguaau

SEQ ID NO: 2816653 - RNA, 19 nt, Artificial Sequence
  Description of Artificial Sequence: Synthetic oligonucleotide
acgagaucgaaggccuuca

SEQ ID NO: 2816654 - RNA, 19 nt, Artificial Sequence
  Description of Artificial Sequence: Synthetic oligonucleotide
uagcggucaugguaggcuu

SEQ ID NO: 2816655 - RNA, 19 nt, Artificial Sequence
  Description of Artificial Sequence: Synthetic oligonucleotide
acgucgguacugccgguga

SEQ ID NO: 2816656 - RNA, 19 nt, Artificial Sequence
  Description of Artificial Sequence: Synthetic oligonucleotide
ggauaucauccucuuugca

SEQ ID NO: 2816657 - RNA, 19 nt, Artificial Sequence
  Description of Artificial Sequence: Synthetic oligonucleotide
ugcuuugcguucucuccuu

SEQ ID NO: 2816658 - RNA, 19 nt, Artificial Sequence
  Description of Artificial Sequence: Synthetic oligonucleotide
guacacauccuugucccaa

SEQ ID NO: 2816659 - RNA, 19 nt, Artificial Sequence
  Description of Artificial Sequence: Synthetic oligonucleotide
guacaauuucuuggucaac

SEQ ID NO: 2816660 - RNA, 19 nt, Artificial Sequence
  Description of Artificial Sequence: Synthetic oligonucleotide
ucacgggccgguccacgac

SEQ ID NO: 2816661 - RNA, 19 nt, Artificial Sequence
  Description of Artificial Sequence: Synthetic oligonucleotide
ccgguccacgacgagaucg

SEQ ID NO: 2816662 - RNA, 19 nt, Artificial Sequence
  Description of Artificial Sequence: Synthetic oligonucleotide
cucucacgagggucacggg

SEQ ID NO: 2816663 - RNA, 19 nt, Artificial Sequence
  Description of Artificial Sequence: Synthetic oligonucleotide
aggccuucauaaaguaggu

SEQ ID NO: 2816664 - RNA, 19 nt, Artificial Sequence
  Description of Artificial Sequence: Synthetic oligonucleotide
gguucuuggcaugcuguug

SEQ ID NO: 2816665 - RNA, 19 nt, Artificial Sequence
  Description of Artificial Sequence: Synthetic oligonucleotide
gcgagguuuguggcgaggg

SEQ ID NO: 2816666 - RNA, 19 nt, Artificial Sequence
  Description of Artificial Sequence: Synthetic oligonucleotide
ugguaggcuuuagccaccu

SEQ ID NO: 2816667 - RNA, 19 nt, Artificial Sequence
  Description of Artificial Sequence: Synthetic oligonucleotide
gcacacgucgguacugccg

SEQ ID NO: 2816668 - RNA, 19 nt, Artificial Sequence
  Description of Artificial Sequence: Synthetic oligonucleotide
gcuuuaagccucuccugga

SEQ ID NO: 2816669 - RNA, 19 nt, Artificial Sequence
  Description of Artificial Sequence: Synthetic oligonucleotide
ucccugccgaccuccaauu

SEQ ID NO: 2816670 - RNA, 19 nt, Artificial Sequence
  Description of Artificial Sequence: Synthetic oligonucleotide
aauaggcucccaagucaua

SEQ ID NO: 2816671 - RNA, 19 nt, Artificial Sequence
  Description of Artificial Sequence: Synthetic oligonucleotide
uagccaccugggugaacug

SEQ ID NO: 2816672 - RNA, 19 nt, Artificial Sequence
  Description of Artificial Sequence: Synthetic oligonucleotide
caaucgcucccugccgacc

SEQ ID NO: 2816673 - RNA, 19 nt, Artificial Sequence
  Description of Artificial Sequence: Synthetic oligonucleotide
gguuuguggcgagggagcc

SEQ ID NO: 2816674 - RNA, 19 nt, Artificial Sequence
  Description of Artificial Sequence: Synthetic oligonucleotide
cuucaaagauacacaggau

SEQ ID NO: 2816675 - RNA, 19 nt, Artificial Sequence
  Description of Artificial Sequence: Synthetic oligonucleotide
ccaagucauaauagcgguc

SEQ ID NO: 2816676 - RNA, 19 nt, Artificial Sequence
  Description of Artificial Sequence: Synthetic oligonucleotide
uccauuuccuuggcacaau

SEQ ID NO: 2816677 - RNA, 19 nt, Artificial Sequence
  Description of Artificial Sequence: Synthetic oligonucleotide
ugccgaccuccaauucgcu

SEQ ID NO: 2816678 - RNA, 19 nt, Artificial Sequence
  Description of Artificial Sequence: Synthetic oligonucleotide
caacuuuguagucccuucu

SEQ ID NO: 2816679 - RNA, 19 nt, Artificial Sequence
  Description of Artificial Sequence: Synthetic oligonucleotide
ugucuggcacacgucggua

SEQ ID NO: 2816680 - RNA, 19 nt, Artificial Sequence
  Description of Artificial Sequence: Synthetic oligonucleotide
cggugauaguaauaaguuc

SEQ ID NO: 2816681 - RNA, 19 nt, Artificial Sequence
  Description of Artificial Sequence: Synthetic oligonucleotide
gcacaauucugcuuugcgu

SEQ ID NO: 2816682 - RNA, 19 nt, Artificial Sequence
  Description of Artificial Sequence: Synthetic oligonucleotide
gcauucugugaugucuggc

SEQ ID NO: 2816683 - RNA, 19 nt, Artificial Sequence
  Description of Artificial Sequence: Synthetic oligonucleotide
cuguagcaaucgcucccug

SEQ ID NO: 2816684 - RNA, 19 nt, Artificial Sequence
  Description of Artificial Sequence: Synthetic oligonucleotide
cuuuaagccucuccuggau

SEQ ID NO: 2816685 - RNA, 19 nt, Artificial Sequence
  Description of Artificial Sequence: Synthetic oligonucleotide
gccggugauaguaauaagu

SEQ ID NO: 2816686 - RNA, 19 nt, Artificial Sequence
  Description of Artificial Sequence: Synthetic oligonucleotide
uaagccucuccuggaugau

SEQ ID NO: 2816687 - RNA, 19 nt, Artificial Sequence
  Description of Artificial Sequence: Synthetic oligonucleotide
ccuccaauucgcucgcguc

SEQ ID NO: 2816688 - RNA, 19 nt, Artificial Sequence
  Description of Artificial Sequence: Synthetic oligonucleotide
ucucugcugacaggcuuua

SEQ ID NO: 2816689 - RNA, 19 nt, Artificial Sequence
  Description of Artificial Sequence: Synthetic oligonucleotide
cuuugcguucucuccuucu

SEQ ID NO: 2816690 - RNA, 19 nt, Artificial Sequence
  Description of Artificial Sequence: Synthetic oligonucleotide
ucgcucccugccgaccucc

SEQ ID NO: 2816691 - RNA, 19 nt, Artificial Sequence
  Description of Artificial Sequence: Synthetic oligonucleotide
cuccauuuccuuggcacaa

SEQ ID NO: 2816692 - RNA, 19 nt, Artificial Sequence
  Description of Artificial Sequence: Synthetic oligonucleotide
cucucucacgagggucacg

SEQ ID NO: 2816693 - RNA, 19 nt, Artificial Sequence
  Description of Artificial Sequence: Synthetic oligonucleotide
cacgucgguacugccggug

SEQ ID NO: 2816694 - RNA, 19 nt, Artificial Sequence
  Description of Artificial Sequence: Synthetic oligonucleotide
ggagccggcgugcggcgcg

SEQ ID NO: 2816695 - RNA, 19 nt, Artificial Sequence
  Description of Artificial Sequence: Synthetic oligonucleotide
gugaugucuggcacacguc

SEQ ID NO: 2816696 - RNA, 19 nt, Artificial Sequence
  Description of Artificial Sequence: Synthetic oligonucleotide
gaccuccaauucgcucgcg

SEQ ID NO: 2816697 - RNA, 19 nt, Artificial Sequence
  Description of Artificial Sequence: Synthetic oligonucleotide
gucacgggccgguccacga

SEQ ID NO: 2816698 - RNA, 19 nt, Artificial Sequence
  Description of Artificial Sequence: Synthetic oligonucleotide
gcauggcuguagcaaucgc

SEQ ID NO: 2816699 - RNA, 19 nt, Artificial Sequence
  Description of Artificial Sequence: Synthetic oligonucleotide
ggccuucauaaaguaggug

SEQ ID NO: 2816700 - RNA, 19 nt, Artificial Sequence
  Description of Artificial Sequence: Synthetic oligonucleotide
cugcuuugcguucucuccu

SEQ ID NO: 2816701 - RNA, 19 nt, Artificial Sequence
  Description of Artificial Sequence: Synthetic oligonucleotide
cuccauugcaucucagcuu

SEQ ID NO: 2816702 - RNA, 19 nt, Artificial Sequence
  Description of Artificial Sequence: Synthetic oligonucleotide
uggcaugcuguugcucaau

SEQ ID NO: 2816703 - RNA, 19 nt, Artificial Sequence
  Description of Artificial Sequence: Synthetic oligonucleotide
gcaugcuguugcucaauaa

SEQ ID NO: 2816704 - RNA, 19 nt, Artificial Sequence
  Description of Artificial Sequence: Synthetic oligonucleotide
guugcucaauaaacucucu

SEQ ID NO: 2816705 - RNA, 19 nt, Artificial Sequence
  Description of Artificial Sequence: Synthetic oligonucleotide
cccaagucauaauagcggu

SEQ ID NO: 2816706 - RNA, 19 nt, Artificial Sequence
  Description of Artificial Sequence: Synthetic oligonucleotide
acgagggucacgggccggu

SEQ ID NO: 2816707 - RNA, 19 nt, Artificial Sequence
  Description of Artificial Sequence: Synthetic oligonucleotide
ccuucauaaaguaggugau

SEQ ID NO: 2816708 - RNA, 19 nt, Artificial Sequence
  Description of Artificial Sequence: Synthetic oligonucleotide
gguuggggagcgagguuug

SEQ ID NO: 2816709 - RNA, 19 nt, Artificial Sequence
  Description of Artificial Sequence: Synthetic oligonucleotide
acacgucgguacugccggu

SEQ ID NO: 2816710 - RNA, 19 nt, Artificial Sequence
  Description of Artificial Sequence: Synthetic oligonucleotide
gcaaucgcucccugccgac

SEQ ID NO: 2816711 - RNA, 19 nt, Artificial Sequence
  Description of Artificial Sequence: Synthetic oligonucleotide
cacaggauaucauccucuu

SEQ ID NO: 2816712 - RNA, 19 nt, Artificial Sequence
  Description of Artificial Sequence: Synthetic oligonucleotide
gucaacuuuguagucccuu

SEQ ID NO: 2816713 - RNA, 19 nt, Artificial Sequence
  Description of Artificial Sequence: Synthetic oligonucleotide
cacgagggucacgggccgg

SEQ ID NO: 2816714 - RNA, 19 nt, Artificial Sequence
  Description of Artificial Sequence: Synthetic oligonucleotide
ccggugauaguaauaaguu

SEQ ID NO: 2816715 - RNA, 19 nt, Artificial Sequence
  Description of Artificial Sequence: Synthetic oligonucleotide
guacugccggugauaguaa

SEQ ID NO: 2816716 - RNA, 19 nt, Artificial Sequence
  Description of Artificial Sequence: Synthetic oligonucleotide
ggcaugcuguugcucaaua

SEQ ID NO: 2816717 - RNA, 19 nt, Artificial Sequence
  Description of Artificial Sequence: Synthetic oligonucleotide
caauucgcucgcguccgga

SEQ ID NO: 2816718 - RNA, 19 nt, Artificial Sequence
  Description of Artificial Sequence: Synthetic oligonucleotide
ccacgacgagaucgaaggc

SEQ ID NO: 2816719 - RNA, 19 nt, Artificial Sequence
  Description of Artificial Sequence: Synthetic oligonucleotide
gguaggcuuuagccaccug

SEQ ID NO: 2816720 - RNA, 19 nt, Artificial Sequence
  Description of Artificial Sequence: Synthetic oligonucleotide
guccggcauggcuguagca

SEQ ID NO: 2816721 - RNA, 19 nt, Artificial Sequence
  Description of Artificial Sequence: Synthetic oligonucleotide
ggucacgggccgguccacg

SEQ ID NO: 2816722 - RNA, 19 nt, Artificial Sequence
  Description of Artificial Sequence: Synthetic oligonucleotide
gccgaccuccaauucgcuc

SEQ ID NO: 2816723 - RNA, 19 nt, Artificial Sequence
  Description of Artificial Sequence: Synthetic oligonucleotide
gcuuugcguucucuccuuc

SEQ ID NO: 2816724 - RNA, 19 nt, Artificial Sequence
  Description of Artificial Sequence: Synthetic oligonucleotide
gucgguacugccggugaua

SEQ ID NO: 2816725 - RNA, 19 nt, Artificial Sequence
  Description of Artificial Sequence: Synthetic oligonucleotide
cuggaugauguuguacaau

SEQ ID NO: 2816726 - RNA, 19 nt, Artificial Sequence
  Description of Artificial Sequence: Synthetic oligonucleotide
gacaggcuuuaagccucuc

SEQ ID NO: 2816727 - RNA, 19 nt, Artificial Sequence
  Description of Artificial Sequence: Synthetic oligonucleotide
gagccggcgugcggcgcgg

SEQ ID NO: 2816728 - RNA, 19 nt, Artificial Sequence
  Description of Artificial Sequence: Synthetic oligonucleotide
cacuuucuggcagaauaau

SEQ ID NO: 2816729 - RNA, 19 nt, Artificial Sequence
  Description of Artificial Sequence: Synthetic oligonucleotide
ccaauucgcucgcguccgg

SEQ ID NO: 2816730 - RNA, 19 nt, Artificial Sequence
  Description of Artificial Sequence: Synthetic oligonucleotide
cuuuagccaccugggugaa

SEQ ID NO: 2816731 - RNA, 19 nt, Artificial Sequence
  Description of Artificial Sequence: Synthetic oligonucleotide
guggcgagggagccggcgu

SEQ ID NO: 2816732 - RNA, 19 nt, Artificial Sequence
  Description of Artificial Sequence: Synthetic oligonucleotide
gcagaauaauaggcuccca

SEQ ID NO: 2816733 - RNA, 19 nt, Artificial Sequence
  Description of Artificial Sequence: Synthetic oligonucleotide
ccaagaguccggcauggcu

SEQ ID NO: 2816734 - RNA, 19 nt, Artificial Sequence
  Description of Artificial Sequence: Synthetic oligonucleotide
cucccugccgaccuccaau

SEQ ID NO: 2816735 - RNA, 19 nt, Artificial Sequence
  Description of Artificial Sequence: Synthetic oligonucleotide
cgaccuccaauucgcucgc

SEQ ID NO: 2816736 - RNA, 19 nt, Artificial Sequence
  Description of Artificial Sequence: Synthetic oligonucleotide
agcggucaugguaggcuuu

SEQ ID NO: 2816737 - RNA, 19 nt, Artificial Sequence
  Description of Artificial Sequence: Synthetic oligonucleotide
acgggccgguccacgacga

SEQ ID NO: 2816738 - RNA, 19 nt, Artificial Sequence
  Description of Artificial Sequence: Synthetic oligonucleotide
cccuucuccauugcaucuc

SEQ ID NO: 2816739 - RNA, 19 nt, Artificial Sequence
  Description of Artificial Sequence: Synthetic oligonucleotide
gcuguagcaaucgcucccu

SEQ ID NO: 2816740 - RNA, 19 nt, Artificial Sequence
  Description of Artificial Sequence: Synthetic oligonucleotide
ggcgagggagccggcgugc

SEQ ID NO: 2816741 - RNA, 19 nt, Artificial Sequence
  Description of Artificial Sequence: Synthetic oligonucleotide
ggaugauguuguacaauuu

SEQ ID NO: 2816742 - RNA, 19 nt, Artificial Sequence
  Description of Artificial Sequence: Synthetic oligonucleotide
aggcacuuucuggcagaau

SEQ ID NO: 2816743 - RNA, 19 nt, Artificial Sequence
  Description of Artificial Sequence: Synthetic oligonucleotide
ccaccugggugaacugcuc

SEQ ID NO: 2816744 - RNA, 19 nt, Artificial Sequence
  Description of Artificial Sequence: Synthetic oligonucleotide
gcgagggagccggcgugcg

SEQ ID NO: 2816745 - RNA, 19 nt, Artificial Sequence
  Description of Artificial Sequence: Synthetic oligonucleotide
guucgguucuuggcaugcu

SEQ ID NO: 2816746 - RNA, 19 nt, Artificial Sequence
  Description of Artificial Sequence: Synthetic oligonucleotide
gggccgguccacgacgaga

SEQ ID NO: 2816747 - RNA, 19 nt, Artificial Sequence
  Description of Artificial Sequence: Synthetic oligonucleotide
gccggcgugcggcgcgggg

SEQ ID NO: 2816748 - RNA, 19 nt, Artificial Sequence
  Description of Artificial Sequence: Synthetic oligonucleotide
ggccgguccacgacgagau

SEQ ID NO: 2816749 - RNA, 19 nt, Artificial Sequence
  Description of Artificial Sequence: Synthetic oligonucleotide
cccugccgaccuccaauuc

SEQ ID NO: 2816750 - RNA, 19 nt, Artificial Sequence
  Description of Artificial Sequence: Synthetic oligonucleotide
gcggucaugguaggcuuua

SEQ ID NO: 2816751 - RNA, 19 nt, Artificial Sequence
  Description of Artificial Sequence: Synthetic oligonucleotide
cucugcugacaggcuuuaa

SEQ ID NO: 2816752 - RNA, 19 nt, Artificial Sequence
  Description of Artificial Sequence: Synthetic oligonucleotide
ccauugcaucucagcuuca

SEQ ID NO: 2816753 - RNA, 19 nt, Artificial Sequence
  Description of Artificial Sequence: Synthetic oligonucleotide
agccggcgugcggcgcggg

SEQ ID NO: 2816754 - RNA, 19 nt, Artificial Sequence
  Description of Artificial Sequence: Synthetic oligonucleotide
cgguccacgacgagaucga

SEQ ID NO: 2816755 - RNA, 19 nt, Artificial Sequence
  Description of Artificial Sequence: Synthetic oligonucleotide
agaguccggcauggcugua

SEQ ID NO: 2816756 - RNA, 19 nt, Artificial Sequence
  Description of Artificial Sequence: Synthetic oligonucleotide
gguccacgacgagaucgaa

SEQ ID NO: 2816757 - RNA, 19 nt, Artificial Sequence
  Description of Artificial Sequence: Synthetic oligonucleotide
gcuuugccaggcacuuucu

SEQ ID NO: 2816758 - RNA, 19 nt, Artificial Sequence
  Description of Artificial Sequence: Synthetic oligonucleotide
ggucaacuuuguagucccu

SEQ ID NO: 2816759 - RNA, 19 nt, Artificial Sequence
  Description of Artificial Sequence: Synthetic oligonucleotide
ccggcauggcuguagcaau

SEQ ID NO: 2816760 - RNA, 19 nt, Artificial Sequence
  Description of Artificial Sequence: Synthetic oligonucleotide
ccuuggcacaauucugcuu

SEQ ID NO: 2816761 - RNA, 19 nt, Artificial Sequence
  Description of Artificial Sequence: Synthetic oligonucleotide
gggagccggcgugcggcgc

SEQ ID NO: 2816762 - RNA, 19 nt, Artificial Sequence
  Description of Artificial Sequence: Synthetic oligonucleotide
ggcucaggguacacauccu

SEQ ID NO: 2816763 - RNA, 19 nt, Artificial Sequence
  Description of Artificial Sequence: Synthetic oligonucleotide
gccgguccacgacgagauc

SEQ ID NO: 2816764 - RNA, 19 nt, Artificial Sequence
  Description of Artificial Sequence: Synthetic oligonucleotide
cggucaugguaggcuuuag

SEQ ID NO: 2816765 - RNA, 19 nt, Artificial Sequence
  Description of Artificial Sequence: Synthetic oligonucleotide
gcucccugccgaccuccaa

SEQ ID NO: 2816766 - RNA, 19 nt, Artificial Sequence
  Description of Artificial Sequence: Synthetic oligonucleotide
gggucacgggccgguccac

SEQ ID NO: 2816767 - RNA, 19 nt, Artificial Sequence
  Description of Artificial Sequence: Synthetic oligonucleotide
ccugggugaacugcuccau

SEQ ID NO: 2816768 - RNA, 19 nt, Artificial Sequence
  Description of Artificial Sequence: Synthetic oligonucleotide
cgggccgguccacgacgag

SEQ ID NO: 2816769 - RNA, 19 nt, Artificial Sequence
  Description of Artificial Sequence: Synthetic oligonucleotide
gccucuccuggaugauguu

SEQ ID NO: 2816770 - RNA, 19 nt, Artificial Sequence
  Description of Artificial Sequence: Synthetic oligonucleotide
cgagggucacgggccgguc

SEQ ID NO: 2816771 - RNA, 19 nt, Artificial Sequence
  Description of Artificial Sequence: Synthetic oligonucleotide
cgagaucgaaggccuucau

SEQ ID NO: 2816772 - RNA, 19 nt, Artificial Sequence
  Description of Artificial Sequence: Synthetic oligonucleotide
cgucgguacugccggugau

SEQ ID NO: 2816773 - RNA, 19 nt, Artificial Sequence
  Description of Artificial Sequence: Synthetic oligonucleotide
cgguacugccggugauagu

SEQ ID NO: 2816774 - RNA, 19 nt, Artificial Sequence
  Description of Artificial Sequence: Synthetic oligonucleotide
cgacgagaucgaaggccuu

SEQ ID NO: 2816775 - RNA, 19 nt, Artificial Sequence
  Description of Artificial Sequence: Synthetic oligonucleotide
uuuauucacagcucgaacg

SEQ ID NO: 2816776 - RNA, 19 nt, Artificial Sequence
  Description of Artificial Sequence: Synthetic oligonucleotide
ucuacaaaguacauaaugc

SEQ ID NO: 2816777 - RNA, 19 nt, Artificial Sequence
  Description of Artificial Sequence: Synthetic oligonucleotide
ucgaaacagagcaaaagcg

SEQ ID NO: 2816778 - RNA, 19 nt, Artificial Sequence
  Description of Artificial Sequence: Synthetic oligonucleotide
ugaaggacgacuuuuaagu

SEQ ID NO: 2816779 - RNA, 19 nt, Artificial Sequence
  Description of Artificial Sequence: Synthetic oligonucleotide
uucuacaaaguacauaaug

SEQ ID NO: 2816780 - RNA, 19 nt, Artificial Sequence
  Description of Artificial Sequence: Synthetic oligonucleotide
aaaccagugacuggaaacc

SEQ ID NO: 2816781 - RNA, 19 nt, Artificial Sequence
  Description of Artificial Sequence: Synthetic oligonucleotide
uguaucguugcacugagac

SEQ ID NO: 2816782 - RNA, 19 nt, Artificial Sequence
  Description of Artificial Sequence: Synthetic oligonucleotide
uuuaagucuagcuuucuca

SEQ ID NO: 2816783 - RNA, 19 nt, Artificial Sequence
  Description of Artificial Sequence: Synthetic oligonucleotide
aaccgagcaaacuucacag

SEQ ID NO: 2816784 - RNA, 19 nt, Artificial Sequence
  Description of Artificial Sequence: Synthetic oligonucleotide
acaaugaucuguccagucc

SEQ ID NO: 2816785 - RNA, 19 nt, Artificial Sequence
  Description of Artificial Sequence: Synthetic oligonucleotide
uguguugacacguugccag

SEQ ID NO: 2816786 - RNA, 19 nt, Artificial Sequence
  Description of Artificial Sequence: Synthetic oligonucleotide
aaacuucacagguguaucg

SEQ ID NO: 2816787 - RNA, 19 nt, Artificial Sequence
  Description of Artificial Sequence: Synthetic oligonucleotide
accaagucgaaacagagca

SEQ ID NO: 2816788 - RNA, 19 nt, Artificial Sequence
  Description of Artificial Sequence: Synthetic oligonucleotide
aagucuagcuuucucagcu

SEQ ID NO: 2816789 - RNA, 19 nt, Artificial Sequence
  Description of Artificial Sequence: Synthetic oligonucleotide
uuaagucuagcuuucucag

SEQ ID NO: 2816790 - RNA, 19 nt, Artificial Sequence
  Description of Artificial Sequence: Synthetic oligonucleotide
cugaauuugagcaucggac

SEQ ID NO: 2816791 - RNA, 19 nt, Artificial Sequence
  Description of Artificial Sequence: Synthetic oligonucleotide
uaagauucccuccaccaag

SEQ ID NO: 2816792 - RNA, 19 nt, Artificial Sequence
  Description of Artificial Sequence: Synthetic oligonucleotide
uuauucacagcucgaacgc

SEQ ID NO: 2816793 - RNA, 19 nt, Artificial Sequence
  Description of Artificial Sequence: Synthetic oligonucleotide
agaaacucgagauggcagg

SEQ ID NO: 2816794 - RNA, 19 nt, Artificial Sequence
  Description of Artificial Sequence: Synthetic oligonucleotide
ugaauuugagcaucggaca

SEQ ID NO: 2816795 - RNA, 19 nt, Artificial Sequence
  Description of Artificial Sequence: Synthetic oligonucleotide
aaugacacccucuguaggu

SEQ ID NO: 2816796 - RNA, 19 nt, Artificial Sequence
  Description of Artificial Sequence: Synthetic oligonucleotide
aaagcgaggagacuuuacu

SEQ ID NO: 2816797 - RNA, 19 nt, Artificial Sequence
  Description of Artificial Sequence: Synthetic oligonucleotide
cucagcacuacguagcucc

SEQ ID NO: 2816798 - RNA, 19 nt, Artificial Sequence
  Description of Artificial Sequence: Synthetic oligonucleotide
aacgaccuucuaucaaacc

SEQ ID NO: 2816799 - RNA, 19 nt, Artificial Sequence
  Description of Artificial Sequence: Synthetic oligonucleotide
aaggacgacuuuuaagucu

SEQ ID NO: 2816800 - RNA, 19 nt, Artificial Sequence
  Description of Artificial Sequence: Synthetic oligonucleotide
agcgaggagacuuuacugg

SEQ ID NO: 2816801 - RNA, 19 nt, Artificial Sequence
  Description of Artificial Sequence: Synthetic oligonucleotide
gaaacagagcaaaagcgag

SEQ ID NO: 2816802 - RNA, 19 nt, Artificial Sequence
  Description of Artificial Sequence: Synthetic oligonucleotide
aaaccgagcaaacuucaca

SEQ ID NO: 2816803 - RNA, 19 nt, Artificial Sequence
  Description of Artificial Sequence: Synthetic oligonucleotide
gucgaaacagagcaaaagc

SEQ ID NO: 2816804 - RNA, 19 nt, Artificial Sequence
  Description of Artificial Sequence: Synthetic oligonucleotide
ucgaacgcggaauauguag

SEQ ID NO: 2816805 - RNA, 19 nt, Artificial Sequence
  Description of Artificial Sequence: Synthetic oligonucleotide
aagcgguaagauucccucc

SEQ ID NO: 2816806 - RNA, 19 nt, Artificial Sequence
  Description of Artificial Sequence: Synthetic oligonucleotide
aauuugagcaucggacacg

SEQ ID NO: 2816807 - RNA, 19 nt, Artificial Sequence
  Description of Artificial Sequence: Synthetic oligonucleotide
gauucccuccaccaagucg

SEQ ID NO: 2816808 - RNA, 19 nt, Artificial Sequence
  Description of Artificial Sequence: Synthetic oligonucleotide
acacuuuucuacaaaguac

SEQ ID NO: 2816809 - RNA, 19 nt, Artificial Sequence
  Description of Artificial Sequence: Synthetic oligonucleotide
ugagcaucggacacggaag

SEQ ID NO: 2816810 - RNA, 19 nt, Artificial Sequence
  Description of Artificial Sequence: Synthetic oligonucleotide
caguuuuauucacagcucg

SEQ ID NO: 2816811 - RNA, 19 nt, Artificial Sequence
  Description of Artificial Sequence: Synthetic oligonucleotide
uuuuauucacagcucgaac

SEQ ID NO: 2816812 - RNA, 19 nt, Artificial Sequence
  Description of Artificial Sequence: Synthetic oligonucleotide
uaucaaaccagugacugga

SEQ ID NO: 2816813 - RNA, 19 nt, Artificial Sequence
  Description of Artificial Sequence: Synthetic oligonucleotide
cacggaagcgguaagauuc

SEQ ID NO: 2816814 - RNA, 19 nt, Artificial Sequence
  Description of Artificial Sequence: Synthetic oligonucleotide
uacauaaugcccucgugac

SEQ ID NO: 2816815 - RNA, 19 nt, Artificial Sequence
  Description of Artificial Sequence: Synthetic oligonucleotide
uccagggugcugaaggacg

SEQ ID NO: 2816816 - RNA, 19 nt, Artificial Sequence
  Description of Artificial Sequence: Synthetic oligonucleotide
agugacuggaaaccgagca

SEQ ID NO: 2816817 - RNA, 19 nt, Artificial Sequence
  Description of Artificial Sequence: Synthetic oligonucleotide
ucuguguugacacguugcc

SEQ ID NO: 2816818 - RNA, 19 nt, Artificial Sequence
  Description of Artificial Sequence: Synthetic oligonucleotide
gugacaaugaucuguccag

SEQ ID NO: 2816819 - RNA, 19 nt, Artificial Sequence
  Description of Artificial Sequence: Synthetic oligonucleotide
uguaggaacgaccuucuau

SEQ ID NO: 2816820 - RNA, 19 nt, Artificial Sequence
  Description of Artificial Sequence: Synthetic oligonucleotide
acgacuuuuaagucuagcu

SEQ ID NO: 2816821 - RNA, 19 nt, Artificial Sequence
  Description of Artificial Sequence: Synthetic oligonucleotide
aagcgaggagacuuuacug

SEQ ID NO: 2816822 - RNA, 19 nt, Artificial Sequence
  Description of Artificial Sequence: Synthetic oligonucleotide
acgcggaauauguaggaac

SEQ ID NO: 2816823 - RNA, 19 nt, Artificial Sequence
  Description of Artificial Sequence: Synthetic oligonucleotide
acauaaugcccucgugacc

SEQ ID NO: 2816824 - RNA, 19 nt, Artificial Sequence
  Description of Artificial Sequence: Synthetic oligonucleotide
acgaccuucuaucaaacca

SEQ ID NO: 2816825 - RNA, 19 nt, Artificial Sequence
  Description of Artificial Sequence: Synthetic oligonucleotide
agagcaaaagcgaggagac

SEQ ID NO: 2816826 - RNA, 19 nt, Artificial Sequence
  Description of Artificial Sequence: Synthetic oligonucleotide
aaacagagcaaaagcgagg

SEQ ID NO: 2816827 - RNA, 19 nt, Artificial Sequence
  Description of Artificial Sequence: Synthetic oligonucleotide
uucuguguugacacguugc

SEQ ID NO: 2816828 - RNA, 19 nt, Artificial Sequence
  Description of Artificial Sequence: Synthetic oligonucleotide
uuuucuguccccacgucac

SEQ ID NO: 2816829 - RNA, 19 nt, Artificial Sequence
  Description of Artificial Sequence: Synthetic oligonucleotide
gaaugacacccucuguagg

SEQ ID NO: 2816830 - RNA, 19 nt, Artificial Sequence
  Description of Artificial Sequence: Synthetic oligonucleotide
gaauuugagcaucggacac

SEQ ID NO: 2816831 - RNA, 19 nt, Artificial Sequence
  Description of Artificial Sequence: Synthetic oligonucleotide
uugagcaucggacacggaa

SEQ ID NO: 2816832 - RNA, 19 nt, Artificial Sequence
  Description of Artificial Sequence: Synthetic oligonucleotide
gucacacuuuucuacaaag

SEQ ID NO: 2816833 - RNA, 19 nt, Artificial Sequence
  Description of Artificial Sequence: Synthetic oligonucleotide
aaguacauaaugcccucgu

SEQ ID NO: 2816834 - RNA, 19 nt, Artificial Sequence
  Description of Artificial Sequence: Synthetic oligonucleotide
aaaguacauaaugcccucg

SEQ ID NO: 2816835 - RNA, 19 nt, Artificial Sequence
  Description of Artificial Sequence: Synthetic oligonucleotide
guaggaacgaccuucuauc

SEQ ID NO: 2816836 - RNA, 19 nt, Artificial Sequence
  Description of Artificial Sequence: Synthetic oligonucleotide
acaaaguacauaaugcccu

SEQ ID NO: 2816837 - RNA, 19 nt, Artificial Sequence
  Description of Artificial Sequence: Synthetic oligonucleotide
uuuuaagucuagcuuucuc

SEQ ID NO: 2816838 - RNA, 19 nt, Artificial Sequence
  Description of Artificial Sequence: Synthetic oligonucleotide
cacuuuucuacaaaguaca

SEQ ID NO: 2816839 - RNA, 19 nt, Artificial Sequence
  Description of Artificial Sequence: Synthetic oligonucleotide
acuacguagcuccgggugg

SEQ ID NO: 2816840 - RNA, 19 nt, Artificial Sequence
  Description of Artificial Sequence: Synthetic oligonucleotide
auuugagcaucggacacgg

SEQ ID NO: 2816841 - RNA, 19 nt, Artificial Sequence
  Description of Artificial Sequence: Synthetic oligonucleotide
uuuccagcucagcacuacg

SEQ ID NO: 2816842 - RNA, 19 nt, Artificial Sequence
  Description of Artificial Sequence: Synthetic oligonucleotide
aaacucgagauggcaggcc

SEQ ID NO: 2816843 - RNA, 19 nt, Artificial Sequence
  Description of Artificial Sequence: Synthetic oligonucleotide
gaagcgguaagauucccuc

SEQ ID NO: 2816844 - RNA, 19 nt, Artificial Sequence
  Description of Artificial Sequence: Synthetic oligonucleotide
agcacuacguagcuccggg

SEQ ID NO: 2816845 - RNA, 19 nt, Artificial Sequence
  Description of Artificial Sequence: Synthetic oligonucleotide
cugaaggacgacuuuuaag

SEQ ID NO: 2816846 - RNA, 19 nt, Artificial Sequence
  Description of Artificial Sequence: Synthetic oligonucleotide
aacucgagauggcaggccu

SEQ ID NO: 2816847 - RNA, 19 nt, Artificial Sequence
  Description of Artificial Sequence: Synthetic oligonucleotide
cuaucaaaccagugacugg

SEQ ID NO: 2816848 - RNA, 19 nt, Artificial Sequence
  Description of Artificial Sequence: Synthetic oligonucleotide
aaaagcgaggagacuuuac

SEQ ID NO: 2816849 - RNA, 19 nt, Artificial Sequence
  Description of Artificial Sequence: Synthetic oligonucleotide
cucagcuggauccagagca

SEQ ID NO: 2816850 - RNA, 19 nt, Artificial Sequence
  Description of Artificial Sequence: Synthetic oligonucleotide
ucacacuuuucuacaaagu

SEQ ID NO: 2816851 - RNA, 19 nt, Artificial Sequence
  Description of Artificial Sequence: Synthetic oligonucleotide
gugacagagaggucugugg

SEQ ID NO: 2816852 - RNA, 19 nt, Artificial Sequence
  Description of Artificial Sequence: Synthetic oligonucleotide
uucacagguguaucguugc

SEQ ID NO: 2816853 - RNA, 19 nt, Artificial Sequence
  Description of Artificial Sequence: Synthetic oligonucleotide
ugaugguucaccgacuccu

SEQ ID NO: 2816854 - RNA, 19 nt, Artificial Sequence
  Description of Artificial Sequence: Synthetic oligonucleotide
uggaaaccgagcaaacuuc

SEQ ID NO: 2816855 - RNA, 19 nt, Artificial Sequence
  Description of Artificial Sequence: Synthetic oligonucleotide
guacauaaugcccucguga

SEQ ID NO: 2816856 - RNA, 19 nt, Artificial Sequence
  Description of Artificial Sequence: Synthetic oligonucleotide
agucgaaacagagcaaaag

SEQ ID NO: 2816857 - RNA, 19 nt, Artificial Sequence
  Description of Artificial Sequence: Synthetic oligonucleotide
cagaaacucgagauggcag

SEQ ID NO: 2816858 - RNA, 19 nt, Artificial Sequence
  Description of Artificial Sequence: Synthetic oligonucleotide
gccuauuccaguuuuauuc

SEQ ID NO: 2816859 - RNA, 19 nt, Artificial Sequence
  Description of Artificial Sequence: Synthetic oligonucleotide
acagguguaucguugcacu

SEQ ID NO: 2816860 - RNA, 19 nt, Artificial Sequence
  Description of Artificial Sequence: Synthetic oligonucleotide
ucugaugguucaccgacuc

SEQ ID NO: 2816861 - RNA, 19 nt, Artificial Sequence
  Description of Artificial Sequence: Synthetic oligonucleotide
guugccaguuuucuguccc

SEQ ID NO: 2816862 - RNA, 19 nt, Artificial Sequence
  Description of Artificial Sequence: Synthetic oligonucleotide
acuuuuaagucuagcuuuc

SEQ ID NO: 2816863 - RNA, 19 nt, Artificial Sequence
  Description of Artificial Sequence: Synthetic oligonucleotide
uaagucuagcuuucucagc

SEQ ID NO: 2816864 - RNA, 19 nt, Artificial Sequence
  Description of Artificial Sequence: Synthetic oligonucleotide
ucagaaacucgagauggca

SEQ ID NO: 2816865 - RNA, 19 nt, Artificial Sequence
  Description of Artificial Sequence: Synthetic oligonucleotide
cuucacagguguaucguug

SEQ ID NO: 2816866 - RNA, 19 nt, Artificial Sequence
  Description of Artificial Sequence: Synthetic oligonucleotide
uauucacagcucgaacgcg

SEQ ID NO: 2816867 - RNA, 19 nt, Artificial Sequence
  Description of Artificial Sequence: Synthetic oligonucleotide
aauauguaggaacgaccuu

SEQ ID NO: 2816868 - RNA, 19 nt, Artificial Sequence
  Description of Artificial Sequence: Synthetic oligonucleotide
aguacauaaugcccucgug

SEQ ID NO: 2816869 - RNA, 19 nt, Artificial Sequence
  Description of Artificial Sequence: Synthetic oligonucleotide
gaauauguaggaacgaccu

SEQ ID NO: 2816870 - RNA, 19 nt, Artificial Sequence
  Description of Artificial Sequence: Synthetic oligonucleotide
aggaaugacacccucugua

SEQ ID NO: 2816871 - RNA, 19 nt, Artificial Sequence
  Description of Artificial Sequence: Synthetic oligonucleotide
augguucaccgacuccugc

SEQ ID NO: 2816872 - RNA, 19 nt, Artificial Sequence
  Description of Artificial Sequence: Synthetic oligonucleotide
auucccuccaccaagucga

SEQ ID NO: 2816873 - RNA, 19 nt, Artificial Sequence
  Description of Artificial Sequence: Synthetic oligonucleotide
gaaggacgacuuuuaaguc

SEQ ID NO: 2816874 - RNA, 19 nt, Artificial Sequence
  Description of Artificial Sequence: Synthetic oligonucleotide
aacuucacagguguaucgu

SEQ ID NO: 2816875 - RNA, 19 nt, Artificial Sequence
  Description of Artificial Sequence: Synthetic oligonucleotide
ugccucugaugguucaccg

SEQ ID NO: 2816876 - RNA, 19 nt, Artificial Sequence
  Description of Artificial Sequence: Synthetic oligonucleotide
ucaaaccagugacuggaaa

SEQ ID NO: 2816877 - RNA, 19 nt, Artificial Sequence
  Description of Artificial Sequence: Synthetic oligonucleotide
ggaaugacacccucuguag

SEQ ID NO: 2816878 - RNA, 19 nt, Artificial Sequence
  Description of Artificial Sequence: Synthetic oligonucleotide
agcgguaagauucccucca

SEQ ID NO: 2816879 - RNA, 19 nt, Artificial Sequence
  Description of Artificial Sequence: Synthetic oligonucleotide
aguuuucuguccccacguc

SEQ ID NO: 2816880 - RNA, 19 nt, Artificial Sequence
  Description of Artificial Sequence: Synthetic oligonucleotide
gauggcaggccuauuccag

SEQ ID NO: 2816881 - RNA, 19 nt, Artificial Sequence
  Description of Artificial Sequence: Synthetic oligonucleotide
auucacagcucgaacgcgg

SEQ ID NO: 2816882 - RNA, 19 nt, Artificial Sequence
  Description of Artificial Sequence: Synthetic oligonucleotide
ucagcacuacguagcuccg

SEQ ID NO: 2816883 - RNA, 19 nt, Artificial Sequence
  Description of Artificial Sequence: Synthetic oligonucleotide
cagcucagcacuacguagc

SEQ ID NO: 2816884 - RNA, 19 nt, Artificial Sequence
  Description of Artificial Sequence: Synthetic oligonucleotide
guaucguugcacugagacc

SEQ ID NO: 2816885 - RNA, 19 nt, Artificial Sequence
  Description of Artificial Sequence: Synthetic oligonucleotide
agcaaaagcgaggagacuu

SEQ ID NO: 2816886 - RNA, 19 nt, Artificial Sequence
  Description of Artificial Sequence: Synthetic oligonucleotide
gguaagauucccuccacca

SEQ ID NO: 2816887 - RNA, 19 nt, Artificial Sequence
  Description of Artificial Sequence: Synthetic oligonucleotide
ggaauauguaggaacgacc

SEQ ID NO: 2816888 - RNA, 19 nt, Artificial Sequence
  Description of Artificial Sequence: Synthetic oligonucleotide
ucuguagguuccucuucag

SEQ ID NO: 2816889 - RNA, 19 nt, Artificial Sequence
  Description of Artificial Sequence: Synthetic oligonucleotide
ugacuggaaaccgagcaaa

SEQ ID NO: 2816890 - RNA, 19 nt, Artificial Sequence
  Description of Artificial Sequence: Synthetic oligonucleotide
gagcaucggacacggaagc

SEQ ID NO: 2816891 - RNA, 19 nt, Artificial Sequence
  Description of Artificial Sequence: Synthetic oligonucleotide
accgagcaaacuucacagg

SEQ ID NO: 2816892 - RNA, 19 nt, Artificial Sequence
  Description of Artificial Sequence: Synthetic oligonucleotide
ucuagcuuucucagcugga

SEQ ID NO: 2816893 - RNA, 19 nt, Artificial Sequence
  Description of Artificial Sequence: Synthetic oligonucleotide
uaggaacgaccuucuauca

SEQ ID NO: 2816894 - RNA, 19 nt, Artificial Sequence
  Description of Artificial Sequence: Synthetic oligonucleotide
uggauccagagcagccacg

SEQ ID NO: 2816895 - RNA, 19 nt, Artificial Sequence
  Description of Artificial Sequence: Synthetic oligonucleotide
aaugcccucgugaccucgc

SEQ ID NO: 2816896 - RNA, 19 nt, Artificial Sequence
  Description of Artificial Sequence: Synthetic oligonucleotide
gaaacucgagauggcaggc

SEQ ID NO: 2816897 - RNA, 19 nt, Artificial Sequence
  Description of Artificial Sequence: Synthetic oligonucleotide
uuccagcucagcacuacgu

SEQ ID NO: 2816898 - RNA, 19 nt, Artificial Sequence
  Description of Artificial Sequence: Synthetic oligonucleotide
caccaagucgaaacagagc

SEQ ID NO: 2816899 - RNA, 19 nt, Artificial Sequence
  Description of Artificial Sequence: Synthetic oligonucleotide
gggaguucuguguugacac

SEQ ID NO: 2816900 - RNA, 19 nt, Artificial Sequence
  Description of Artificial Sequence: Synthetic oligonucleotide
cucagaaacucgagauggc

SEQ ID NO: 2816901 - RNA, 19 nt, Artificial Sequence
  Description of Artificial Sequence: Synthetic oligonucleotide
ucuguccaguccagggugc

SEQ ID NO: 2816902 - RNA, 19 nt, Artificial Sequence
  Description of Artificial Sequence: Synthetic oligonucleotide
cugcugaauuugagcaucg

SEQ ID NO: 2816903 - RNA, 19 nt, Artificial Sequence
  Description of Artificial Sequence: Synthetic oligonucleotide
gaacgcggaauauguagga

SEQ ID NO: 2816904 - RNA, 19 nt, Artificial Sequence
  Description of Artificial Sequence: Synthetic oligonucleotide
guuuucuguccccacguca

SEQ ID NO: 2816905 - RNA, 19 nt, Artificial Sequence
  Description of Artificial Sequence: Synthetic oligonucleotide
uuacugggaguucuguguu

SEQ ID NO: 2816906 - RNA, 19 nt, Artificial Sequence
  Description of Artificial Sequence: Synthetic oligonucleotide
ucugaugccucugaugguu

SEQ ID NO: 2816907 - RNA, 19 nt, Artificial Sequence
  Description of Artificial Sequence: Synthetic oligonucleotide
gagcaaacuucacaggugu

SEQ ID NO: 2816908 - RNA, 19 nt, Artificial Sequence
  Description of Artificial Sequence: Synthetic oligonucleotide
cacuacguagcuccgggug

SEQ ID NO: 2816909 - RNA, 19 nt, Artificial Sequence
  Description of Artificial Sequence: Synthetic oligonucleotide
agcuggauccagagcagcc

SEQ ID NO: 2816910 - RNA, 19 nt, Artificial Sequence
  Description of Artificial Sequence: Synthetic oligonucleotide
augccucugaugguucacc

SEQ ID NO: 2816911 - RNA, 19 nt, Artificial Sequence
  Description of Artificial Sequence: Synthetic oligonucleotide
aagauucccuccaccaagu

SEQ ID NO: 2816912 - RNA, 19 nt, Artificial Sequence
  Description of Artificial Sequence: Synthetic oligonucleotide
acguugccaguuuucuguc

SEQ ID NO: 2816913 - RNA, 19 nt, Artificial Sequence
  Description of Artificial Sequence: Synthetic oligonucleotide
ugguucaccgacuccugcu

SEQ ID NO: 2816914 - RNA, 19 nt, Artificial Sequence
  Description of Artificial Sequence: Synthetic oligonucleotide
agacuuuacugggaguucu

SEQ ID NO: 2816915 - RNA, 19 nt, Artificial Sequence
  Description of Artificial Sequence: Synthetic oligonucleotide
gacgacuuuuaagucuagc

SEQ ID NO: 2816916 - RNA, 19 nt, Artificial Sequence
  Description of Artificial Sequence: Synthetic oligonucleotide
gguguaucguugcacugag

SEQ ID NO: 2816917 - RNA, 19 nt, Artificial Sequence
  Description of Artificial Sequence: Synthetic oligonucleotide
ugcugaauuugagcaucgg

SEQ ID NO: 2816918 - RNA, 19 nt, Artificial Sequence
  Description of Artificial Sequence: Synthetic oligonucleotide
uccggguggccucagugac

SEQ ID NO: 2816919 - RNA, 19 nt, Artificial Sequence
  Description of Artificial Sequence: Synthetic oligonucleotide
ugcugaaggacgacuuuua

SEQ ID NO: 2816920 - RNA, 19 nt, Artificial Sequence
  Description of Artificial Sequence: Synthetic oligonucleotide
ugggaguucuguguugaca

SEQ ID NO: 2816921 - RNA, 19 nt, Artificial Sequence
  Description of Artificial Sequence: Synthetic oligonucleotide
agauucccuccaccaaguc

SEQ ID NO: 2816922 - RNA, 19 nt, Artificial Sequence
  Description of Artificial Sequence: Synthetic oligonucleotide
ucacagguguaucguugca

SEQ ID NO: 2816923 - RNA, 19 nt, Artificial Sequence
  Description of Artificial Sequence: Synthetic oligonucleotide
gacagucacuucugaugcc

SEQ ID NO: 2816924 - RNA, 19 nt, Artificial Sequence
  Description of Artificial Sequence: Synthetic oligonucleotide
acggaagcgguaagauucc

SEQ ID NO: 2816925 - RNA, 19 nt, Artificial Sequence
  Description of Artificial Sequence: Synthetic oligonucleotide
agucacuucugaugccucu

SEQ ID NO: 2816926 - RNA, 19 nt, Artificial Sequence
  Description of Artificial Sequence: Synthetic oligonucleotide
guuuuauucacagcucgaa

SEQ ID NO: 2816927 - RNA, 19 nt, Artificial Sequence
  Description of Artificial Sequence: Synthetic oligonucleotide
gguggccucagugacagag

SEQ ID NO: 2816928 - RNA, 19 nt, Artificial Sequence
  Description of Artificial Sequence: Synthetic oligonucleotide
gcgaggagacuuuacuggg

SEQ ID NO: 2816929 - RNA, 19 nt, Artificial Sequence
  Description of Artificial Sequence: Synthetic oligonucleotide
ugacacguugccaguuuuc

SEQ ID NO: 2816930 - RNA, 19 nt, Artificial Sequence
  Description of Artificial Sequence: Synthetic oligonucleotide
acagagcaaaagcgaggag

SEQ ID NO: 2816931 - RNA, 19 nt, Artificial Sequence
  Description of Artificial Sequence: Synthetic oligonucleotide
uaaugcccucgugaccucg

SEQ ID NO: 2816932 - RNA, 19 nt, Artificial Sequence
  Description of Artificial Sequence: Synthetic oligonucleotide
agucuagcuuucucagcug

SEQ ID NO: 2816933 - RNA, 19 nt, Artificial Sequence
  Description of Artificial Sequence: Synthetic oligonucleotide
acuggaaaccgagcaaacu

SEQ ID NO: 2816934 - RNA, 19 nt, Artificial Sequence
  Description of Artificial Sequence: Synthetic oligonucleotide
ugacaaugaucuguccagu

SEQ ID NO: 2816935 - RNA, 19 nt, Artificial Sequence
  Description of Artificial Sequence: Synthetic oligonucleotide
ugaugccucugaugguuca

SEQ ID NO: 2816936 - RNA, 19 nt, Artificial Sequence
  Description of Artificial Sequence: Synthetic oligonucleotide
aguuuuauucacagcucga

SEQ ID NO: 2816937 - RNA, 19 nt, Artificial Sequence
  Description of Artificial Sequence: Synthetic oligonucleotide
cagccacgggcucagaaac

SEQ ID NO: 2816938 - RNA, 19 nt, Artificial Sequence
  Description of Artificial Sequence: Synthetic oligonucleotide
cauaaugcccucgugaccu

SEQ ID NO: 2816939 - RNA, 19 nt, Artificial Sequence
  Description of Artificial Sequence: Synthetic oligonucleotide
uacugggaguucuguguug

SEQ ID NO: 2816940 - RNA, 19 nt, Artificial Sequence
  Description of Artificial Sequence: Synthetic oligonucleotide
acacguugccaguuuucug

SEQ ID NO: 2816941 - RNA, 19 nt, Artificial Sequence
  Description of Artificial Sequence: Synthetic oligonucleotide
gaacgaccuucuaucaaac

SEQ ID NO: 2816942 - RNA, 19 nt, Artificial Sequence
  Description of Artificial Sequence: Synthetic oligonucleotide
ggaacgaccuucuaucaaa

SEQ ID NO: 2816943 - RNA, 19 nt, Artificial Sequence
  Description of Artificial Sequence: Synthetic oligonucleotide
guaagauucccuccaccaa

SEQ ID NO: 2816944 - RNA, 19 nt, Artificial Sequence
  Description of Artificial Sequence: Synthetic oligonucleotide
caagucgaaacagagcaaa

SEQ ID NO: 2816945 - RNA, 19 nt, Artificial Sequence
  Description of Artificial Sequence: Synthetic oligonucleotide
uugacacguugccaguuuu

SEQ ID NO: 2816946 - RNA, 19 nt, Artificial Sequence
  Description of Artificial Sequence: Synthetic oligonucleotide
cacgucacacuuuucuaca

SEQ ID NO: 2816947 - RNA, 19 nt, Artificial Sequence
  Description of Artificial Sequence: Synthetic oligonucleotide
auaaugcccucgugaccuc

SEQ ID NO: 2816948 - RNA, 19 nt, Artificial Sequence
  Description of Artificial Sequence: Synthetic oligonucleotide
agcucagcacuacguagcu

SEQ ID NO: 2816949 - RNA, 19 nt, Artificial Sequence
  Description of Artificial Sequence: Synthetic oligonucleotide
cgcggaauauguaggaacg

SEQ ID NO: 2816950 - RNA, 19 nt, Artificial Sequence
  Description of Artificial Sequence: Synthetic oligonucleotide
aggaacgaccuucuaucaa

SEQ ID NO: 2816951 - RNA, 19 nt, Artificial Sequence
  Description of Artificial Sequence: Synthetic oligonucleotide
ccaccaagucgaaacagag

SEQ ID NO: 2816952 - RNA, 19 nt, Artificial Sequence
  Description of Artificial Sequence: Synthetic oligonucleotide
aacgcggaauauguaggaa

SEQ ID NO: 2816953 - RNA, 19 nt, Artificial Sequence
  Description of Artificial Sequence: Synthetic oligonucleotide
uugccaguuuucugucccc

SEQ ID NO: 2816954 - RNA, 19 nt, Artificial Sequence
  Description of Artificial Sequence: Synthetic oligonucleotide
agcucgaacgcggaauaug

SEQ ID NO: 2816955 - RNA, 19 nt, Artificial Sequence
  Description of Artificial Sequence: Synthetic oligonucleotide
ggaguucuguguugacacg

SEQ ID NO: 2816956 - RNA, 19 nt, Artificial Sequence
  Description of Artificial Sequence: Synthetic oligonucleotide
gaaaccgagcaaacuucac

SEQ ID NO: 2816957 - RNA, 19 nt, Artificial Sequence
  Description of Artificial Sequence: Synthetic oligonucleotide
gaugguucaccgacuccug

SEQ ID NO: 2816958 - RNA, 19 nt, Artificial Sequence
  Description of Artificial Sequence: Synthetic oligonucleotide
gcugaauuugagcaucgga

SEQ ID NO: 2816959 - RNA, 19 nt, Artificial Sequence
  Description of Artificial Sequence: Synthetic oligonucleotide
cacguugccaguuuucugu

SEQ ID NO: 2816960 - RNA, 19 nt, Artificial Sequence
  Description of Artificial Sequence: Synthetic oligonucleotide
agcaucggacacggaagcg

SEQ ID NO: 2816961 - RNA, 19 nt, Artificial Sequence
  Description of Artificial Sequence: Synthetic oligonucleotide
cacagguguaucguugcac

SEQ ID NO: 2816962 - RNA, 19 nt, Artificial Sequence
  Description of Artificial Sequence: Synthetic oligonucleotide
uucugaugccucugauggu

SEQ ID NO: 2816963 - RNA, 19 nt, Artificial Sequence
  Description of Artificial Sequence: Synthetic oligonucleotide
gcccucgugaccucgcugg

SEQ ID NO: 2816964 - RNA, 19 nt, Artificial Sequence
  Description of Artificial Sequence: Synthetic oligonucleotide
acagcucgaacgcggaaua

SEQ ID NO: 2816965 - RNA, 19 nt, Artificial Sequence
  Description of Artificial Sequence: Synthetic oligonucleotide
cagugacaaugaucugucc

SEQ ID NO: 2816966 - RNA, 19 nt, Artificial Sequence
  Description of Artificial Sequence: Synthetic oligonucleotide
gacuuuacugggaguucug

SEQ ID NO: 2816967 - RNA, 19 nt, Artificial Sequence
  Description of Artificial Sequence: Synthetic oligonucleotide
ucggacacggaagcgguaa

SEQ ID NO: 2816968 - RNA, 19 nt, Artificial Sequence
  Description of Artificial Sequence: Synthetic oligonucleotide
uucaccgacuccugcugaa

SEQ ID NO: 2816969 - RNA, 19 nt, Artificial Sequence
  Description of Artificial Sequence: Synthetic oligonucleotide
aagucgaaacagagcaaaa

SEQ ID NO: 2816970 - RNA, 19 nt, Artificial Sequence
  Description of Artificial Sequence: Synthetic oligonucleotide
aggagacuuuacugggagu

SEQ ID NO: 2816971 - RNA, 19 nt, Artificial Sequence
  Description of Artificial Sequence: Synthetic oligonucleotide
cuuuucuacaaaguacaua

SEQ ID NO: 2816972 - RNA, 19 nt, Artificial Sequence
  Description of Artificial Sequence: Synthetic oligonucleotide
gcaucggacacggaagcgg

SEQ ID NO: 2816973 - RNA, 19 nt, Artificial Sequence
  Description of Artificial Sequence: Synthetic oligonucleotide
cgaacgcggaauauguagg

SEQ ID NO: 2816974 - RNA, 19 nt, Artificial Sequence
  Description of Artificial Sequence: Synthetic oligonucleotide
cagguguaucguugcacug

SEQ ID NO: 2816975 - RNA, 19 nt, Artificial Sequence
  Description of Artificial Sequence: Synthetic oligonucleotide
ccucugaugguucaccgac

SEQ ID NO: 2816976 - RNA, 19 nt, Artificial Sequence
  Description of Artificial Sequence: Synthetic oligonucleotide
ccaguuuucuguccccacg

SEQ ID NO: 2816977 - RNA, 19 nt, Artificial Sequence
  Description of Artificial Sequence: Synthetic oligonucleotide
cgaccuucuaucaaaccag

SEQ ID NO: 2816978 - RNA, 19 nt, Artificial Sequence
  Description of Artificial Sequence: Synthetic oligonucleotide
gggguuuccagcucagcac

SEQ ID NO: 2816979 - RNA, 19 nt, Artificial Sequence
  Description of Artificial Sequence: Synthetic oligonucleotide
gacuggaaaccgagcaaac

SEQ ID NO: 2816980 - RNA, 19 nt, Artificial Sequence
  Description of Artificial Sequence: Synthetic oligonucleotide
gagacuuuacugggaguuc

SEQ ID NO: 2816981 - RNA, 19 nt, Artificial Sequence
  Description of Artificial Sequence: Synthetic oligonucleotide
cuacguagcuccggguggc

SEQ ID NO: 2816982 - RNA, 19 nt, Artificial Sequence
  Description of Artificial Sequence: Synthetic oligonucleotide
ccuauuccaguuuuauuca

SEQ ID NO: 2816983 - RNA, 19 nt, Artificial Sequence
  Description of Artificial Sequence: Synthetic oligonucleotide
aggacgacuuuuaagucua

SEQ ID NO: 2816984 - RNA, 19 nt, Artificial Sequence
  Description of Artificial Sequence: Synthetic oligonucleotide
gguucaccgacuccugcug

SEQ ID NO: 2816985 - RNA, 19 nt, Artificial Sequence
  Description of Artificial Sequence: Synthetic oligonucleotide
ugccaguuuucugucccca

SEQ ID NO: 2816986 - RNA, 19 nt, Artificial Sequence
  Description of Artificial Sequence: Synthetic oligonucleotide
ccacgucacacuuuucuac

SEQ ID NO: 2816987 - RNA, 19 nt, Artificial Sequence
  Description of Artificial Sequence: Synthetic oligonucleotide
cucgugaccucgcuggcca

SEQ ID NO: 2816988 - RNA, 19 nt, Artificial Sequence
  Description of Artificial Sequence: Synthetic oligonucleotide
acgucacacuuuucuacaa

SEQ ID NO: 2816989 - RNA, 19 nt, Artificial Sequence
  Description of Artificial Sequence: Synthetic oligonucleotide
acacggaagcgguaagauu

SEQ ID NO: 2816990 - RNA, 19 nt, Artificial Sequence
  Description of Artificial Sequence: Synthetic oligonucleotide
acuuuucuacaaaguacau

SEQ ID NO: 2816991 - RNA, 19 nt, Artificial Sequence
  Description of Artificial Sequence: Synthetic oligonucleotide
ugaccucgcuggccagggg

SEQ ID NO: 2816992 - RNA, 19 nt, Artificial Sequence
  Description of Artificial Sequence: Synthetic oligonucleotide
gaugccucugaugguucac

SEQ ID NO: 2816993 - RNA, 19 nt, Artificial Sequence
  Description of Artificial Sequence: Synthetic oligonucleotide
agagcagccacgggcucag

SEQ ID NO: 2816994 - RNA, 19 nt, Artificial Sequence
  Description of Artificial Sequence: Synthetic oligonucleotide
ugcccucgugaccucgcug

SEQ ID NO: 2816995 - RNA, 19 nt, Artificial Sequence
  Description of Artificial Sequence: Synthetic oligonucleotide
accuucuaucaaaccagug

SEQ ID NO: 2816996 - RNA, 19 nt, Artificial Sequence
  Description of Artificial Sequence: Synthetic oligonucleotide
uguugacacguugccaguu

SEQ ID NO: 2816997 - RNA, 19 nt, Artificial Sequence
  Description of Artificial Sequence: Synthetic oligonucleotide
uuugagcaucggacacgga

SEQ ID NO: 2816998 - RNA, 19 nt, Artificial Sequence
  Description of Artificial Sequence: Synthetic oligonucleotide
cuggaaaccgagcaaacuu

SEQ ID NO: 2816999 - RNA, 19 nt, Artificial Sequence
  Description of Artificial Sequence: Synthetic oligonucleotide
gugaccucgcuggccaggg

SEQ ID NO: 2817000 - RNA, 19 nt, Artificial Sequence
  Description of Artificial Sequence: Synthetic oligonucleotide
guuuccagcucagcacuac

SEQ ID NO: 2817001 - RNA, 19 nt, Artificial Sequence
  Description of Artificial Sequence: Synthetic oligonucleotide
gacacguugccaguuuucu

SEQ ID NO: 2817002 - RNA, 19 nt, Artificial Sequence
  Description of Artificial Sequence: Synthetic oligonucleotide
cacgggcucagaaacucga

SEQ ID NO: 2817003 - RNA, 19 nt, Artificial Sequence
  Description of Artificial Sequence: Synthetic oligonucleotide
aggccuauuccaguuuuau

SEQ ID NO: 2817004 - RNA, 19 nt, Artificial Sequence
  Description of Artificial Sequence: Synthetic oligonucleotide
gccucagugacagagaggu

SEQ ID NO: 2817005 - RNA, 19 nt, Artificial Sequence
  Description of Artificial Sequence: Synthetic oligonucleotide
uggcaggccuauuccaguu

SEQ ID NO: 2817006 - RNA, 19 nt, Artificial Sequence
  Description of Artificial Sequence: Synthetic oligonucleotide
agggugcugaaggacgacu

SEQ ID NO: 2817007 - RNA, 19 nt, Artificial Sequence
  Description of Artificial Sequence: Synthetic oligonucleotide
accagugacuggaaaccga

SEQ ID NO: 2817008 - RNA, 19 nt, Artificial Sequence
  Description of Artificial Sequence: Synthetic oligonucleotide
cagucacuucugaugccuc

SEQ ID NO: 2817009 - RNA, 19 nt, Artificial Sequence
  Description of Artificial Sequence: Synthetic oligonucleotide
ggaaaccgagcaaacuuca

SEQ ID NO: 2817010 - RNA, 19 nt, Artificial Sequence
  Description of Artificial Sequence: Synthetic oligonucleotide
cugggaguucuguguugac

SEQ ID NO: 2817011 - RNA, 19 nt, Artificial Sequence
  Description of Artificial Sequence: Synthetic oligonucleotide
gacacggaagcgguaagau

SEQ ID NO: 2817012 - RNA, 19 nt, Artificial Sequence
  Description of Artificial Sequence: Synthetic oligonucleotide
cagcacuacguagcuccgg

SEQ ID NO: 2817013 - RNA, 19 nt, Artificial Sequence
  Description of Artificial Sequence: Synthetic oligonucleotide
cgagcaaacuucacaggug

SEQ ID NO: 2817014 - RNA, 19 nt, Artificial Sequence
  Description of Artificial Sequence: Synthetic oligonucleotide
ucgugaccucgcuggccag

SEQ ID NO: 2817015 - RNA, 19 nt, Artificial Sequence
  Description of Artificial Sequence: Synthetic oligonucleotide
uguccccacgucacacuuu

SEQ ID NO: 2817016 - RNA, 19 nt, Artificial Sequence
  Description of Artificial Sequence: Synthetic oligonucleotide
caguuuucuguccccacgu

SEQ ID NO: 2817017 - RNA, 19 nt, Artificial Sequence
  Description of Artificial Sequence: Synthetic oligonucleotide
acgggcucagaaacucgag

SEQ ID NO: 2817018 - RNA, 19 nt, Artificial Sequence
  Description of Artificial Sequence: Synthetic oligonucleotide
cuguguugacacguugcca

SEQ ID NO: 2817019 - RNA, 19 nt, Artificial Sequence
  Description of Artificial Sequence: Synthetic oligonucleotide
cuccggguggccucaguga

SEQ ID NO: 2817020 - RNA, 19 nt, Artificial Sequence
  Description of Artificial Sequence: Synthetic oligonucleotide
aucguugcacugagaccag

SEQ ID NO: 2817021 - RNA, 19 nt, Artificial Sequence
  Description of Artificial Sequence: Synthetic oligonucleotide
gaccuucuaucaaaccagu

SEQ ID NO: 2817022 - RNA, 19 nt, Artificial Sequence
  Description of Artificial Sequence: Synthetic oligonucleotide
gcuccggguggccucagug

SEQ ID NO: 2817023 - RNA, 19 nt, Artificial Sequence
  Description of Artificial Sequence: Synthetic oligonucleotide
augacacccucuguagguu

SEQ ID NO: 2817024 - RNA, 19 nt, Artificial Sequence
  Description of Artificial Sequence: Synthetic oligonucleotide
aguucuguguugacacguu

SEQ ID NO: 2817025 - RNA, 19 nt, Artificial Sequence
  Description of Artificial Sequence: Synthetic oligonucleotide
cggaauauguaggaacgac

SEQ ID NO: 2817026 - RNA, 19 nt, Artificial Sequence
  Description of Artificial Sequence: Synthetic oligonucleotide
cgagauggcaggccuauuc

SEQ ID NO: 2817027 - RNA, 19 nt, Artificial Sequence
  Description of Artificial Sequence: Synthetic oligonucleotide
caucggacacggaagcggu

SEQ ID NO: 2817028 - RNA, 19 nt, Artificial Sequence
  Description of Artificial Sequence: Synthetic oligonucleotide
ucaccgacuccugcugaau

SEQ ID NO: 2817029 - RNA, 19 nt, Artificial Sequence
  Description of Artificial Sequence: Synthetic oligonucleotide
uucccuccaccaagucgaa

SEQ ID NO: 2817030 - RNA, 19 nt, Artificial Sequence
  Description of Artificial Sequence: Synthetic oligonucleotide
auguaggaacgaccuucua

SEQ ID NO: 2817031 - RNA, 19 nt, Artificial Sequence
  Description of Artificial Sequence: Synthetic oligonucleotide
gcugaaggacgacuuuuaa

SEQ ID NO: 2817032 - RNA, 19 nt, Artificial Sequence
  Description of Artificial Sequence: Synthetic oligonucleotide
aucaaaccagugacuggaa

SEQ ID NO: 2817033 - RNA, 19 nt, Artificial Sequence
  Description of Artificial Sequence: Synthetic oligonucleotide
ggagacuuuacugggaguu

SEQ ID NO: 2817034 - RNA, 19 nt, Artificial Sequence
  Description of Artificial Sequence: Synthetic oligonucleotide
augcccucgugaccucgcu

SEQ ID NO: 2817035 - RNA, 19 nt, Artificial Sequence
  Description of Artificial Sequence: Synthetic oligonucleotide
ccacgggcucagaaacucg

SEQ ID NO: 2817036 - RNA, 19 nt, Artificial Sequence
  Description of Artificial Sequence: Synthetic oligonucleotide
cucgaacgcggaauaugua

SEQ ID NO: 2817037 - RNA, 19 nt, Artificial Sequence
  Description of Artificial Sequence: Synthetic oligonucleotide
cuguagguuccucuucagu

SEQ ID NO: 2817038 - RNA, 19 nt, Artificial Sequence
  Description of Artificial Sequence: Synthetic oligonucleotide
guugacacguugccaguuu

SEQ ID NO: 2817039 - RNA, 19 nt, Artificial Sequence
  Description of Artificial Sequence: Synthetic oligonucleotide
cuuuuaagucuagcuuucu

SEQ ID NO: 2817040 - RNA, 19 nt, Artificial Sequence
  Description of Artificial Sequence: Synthetic oligonucleotide
caaaagcgaggagacuuua

SEQ ID NO: 2817041 - RNA, 19 nt, Artificial Sequence
  Description of Artificial Sequence: Synthetic oligonucleotide
ggccucagugacagagagg

SEQ ID NO: 2817042 - RNA, 19 nt, Artificial Sequence
  Description of Artificial Sequence: Synthetic oligonucleotide
gccaguuuucuguccccac

SEQ ID NO: 2817043 - RNA, 19 nt, Artificial Sequence
  Description of Artificial Sequence: Synthetic oligonucleotide
gcaaacuucacagguguau

SEQ ID NO: 2817044 - RNA, 19 nt, Artificial Sequence
  Description of Artificial Sequence: Synthetic oligonucleotide
gcuggauccagagcagcca

SEQ ID NO: 2817045 - RNA, 19 nt, Artificial Sequence
  Description of Artificial Sequence: Synthetic oligonucleotide
cuagcuuucucagcuggau

SEQ ID NO: 2817046 - RNA, 19 nt, Artificial Sequence
  Description of Artificial Sequence: Synthetic oligonucleotide
cgguaagauucccuccacc

SEQ ID NO: 2817047 - RNA, 19 nt, Artificial Sequence
  Description of Artificial Sequence: Synthetic oligonucleotide
agcaaacuucacaggugua

SEQ ID NO: 2817048 - RNA, 19 nt, Artificial Sequence
  Description of Artificial Sequence: Synthetic oligonucleotide
guguugacacguugccagu

SEQ ID NO: 2817049 - RNA, 19 nt, Artificial Sequence
  Description of Artificial Sequence: Synthetic oligonucleotide
gcgguaagauucccuccac

SEQ ID NO: 2817050 - RNA, 19 nt, Artificial Sequence
  Description of Artificial Sequence: Synthetic oligonucleotide
ccgagcaaacuucacaggu

SEQ ID NO: 2817051 - RNA, 19 nt, Artificial Sequence
  Description of Artificial Sequence: Synthetic oligonucleotide
acguagcuccggguggccu

SEQ ID NO: 2817052 - RNA, 19 nt, Artificial Sequence
  Description of Artificial Sequence: Synthetic oligonucleotide
cucugaugguucaccgacu

SEQ ID NO: 2817053 - RNA, 19 nt, Artificial Sequence
  Description of Artificial Sequence: Synthetic oligonucleotide
gcucgaacgcggaauaugu

SEQ ID NO: 2817054 - RNA, 19 nt, Artificial Sequence
  Description of Artificial Sequence: Synthetic oligonucleotide
ggacacggaagcgguaaga

SEQ ID NO: 2817055 - RNA, 19 nt, Artificial Sequence
  Description of Artificial Sequence: Synthetic oligonucleotide
gccacgggcucagaaacuc

SEQ ID NO: 2817056 - RNA, 19 nt, Artificial Sequence
  Description of Artificial Sequence: Synthetic oligonucleotide
uccccacgucacacuuuuc

SEQ ID NO: 2817057 - RNA, 19 nt, Artificial Sequence
  Description of Artificial Sequence: Synthetic oligonucleotide
cguugccaguuuucugucc

SEQ ID NO: 2817058 - RNA, 19 nt, Artificial Sequence
  Description of Artificial Sequence: Synthetic oligonucleotide
ccgacuccugcugaauuug

SEQ ID NO: 2817059 - RNA, 19 nt, Artificial Sequence
  Description of Artificial Sequence: Synthetic oligonucleotide
guccccacgucacacuuuu

SEQ ID NO: 2817060 - RNA, 19 nt, Artificial Sequence
  Description of Artificial Sequence: Synthetic oligonucleotide
agccacgggcucagaaacu

SEQ ID NO: 2817061 - RNA, 19 nt, Artificial Sequence
  Description of Artificial Sequence: Synthetic oligonucleotide
gccucugaugguucaccga

SEQ ID NO: 2817062 - RNA, 19 nt, Artificial Sequence
  Description of Artificial Sequence: Synthetic oligonucleotide
gagcaaaagcgaggagacu

SEQ ID NO: 2817063 - RNA, 19 nt, Artificial Sequence
  Description of Artificial Sequence: Synthetic oligonucleotide
gcggaauauguaggaacga

SEQ ID NO: 2817064 - RNA, 19 nt, Artificial Sequence
  Description of Artificial Sequence: Synthetic oligonucleotide
ggacgacuuuuaagucuag

SEQ ID NO: 2817065 - RNA, 19 nt, Artificial Sequence
  Description of Artificial Sequence: Synthetic oligonucleotide
caggccuauuccaguuuua

SEQ ID NO: 2817066 - RNA, 19 nt, Artificial Sequence
  Description of Artificial Sequence: Synthetic oligonucleotide
ccuccaccaagucgaaaca

SEQ ID NO: 2817067 - RNA, 19 nt, Artificial Sequence
  Description of Artificial Sequence: Synthetic oligonucleotide
ucccuccaccaagucgaaa

SEQ ID NO: 2817068 - RNA, 19 nt, Artificial Sequence
  Description of Artificial Sequence: Synthetic oligonucleotide
ccaagucgaaacagagcaa

SEQ ID NO: 2817069 - RNA, 19 nt, Artificial Sequence
  Description of Artificial Sequence: Synthetic oligonucleotide
cacagcucgaacgcggaau

SEQ ID NO: 2817070 - RNA, 19 nt, Artificial Sequence
  Description of Artificial Sequence: Synthetic oligonucleotide
acucgagauggcaggccua

SEQ ID NO: 2817071 - RNA, 19 nt, Artificial Sequence
  Description of Artificial Sequence: Synthetic oligonucleotide
guguaucguugcacugaga

SEQ ID NO: 2817072 - RNA, 19 nt, Artificial Sequence
  Description of Artificial Sequence: Synthetic oligonucleotide
ggaagcgguaagauucccu

SEQ ID NO: 2817073 - RNA, 19 nt, Artificial Sequence
  Description of Artificial Sequence: Synthetic oligonucleotide
ucgagauggcaggccuauu

SEQ ID NO: 2817074 - RNA, 19 nt, Artificial Sequence
  Description of Artificial Sequence: Synthetic oligonucleotide
cacccucuguagguuccuc

SEQ ID NO: 2817075 - RNA, 19 nt, Artificial Sequence
  Description of Artificial Sequence: Synthetic oligonucleotide
ccucgugaccucgcuggcc

SEQ ID NO: 2817076 - RNA, 19 nt, Artificial Sequence
  Description of Artificial Sequence: Synthetic oligonucleotide
cgacuuuuaagucuagcuu

SEQ ID NO: 2817077 - RNA, 19 nt, Artificial Sequence
  Description of Artificial Sequence: Synthetic oligonucleotide
cucgagauggcaggccuau

SEQ ID NO: 2817078 - RNA, 19 nt, Artificial Sequence
  Description of Artificial Sequence: Synthetic oligonucleotide
cccacgucacacuuuucua

SEQ ID NO: 2817079 - RNA, 19 nt, Artificial Sequence
  Description of Artificial Sequence: Synthetic oligonucleotide
gcaggccuauuccaguuuu

SEQ ID NO: 2817080 - RNA, 19 nt, Artificial Sequence
  Description of Artificial Sequence: Synthetic oligonucleotide
ggccuauuccaguuuuauu

SEQ ID NO: 2817081 - RNA, 19 nt, Artificial Sequence
  Description of Artificial Sequence: Synthetic oligonucleotide
uagcuccggguggccucag

SEQ ID NO: 2817082 - RNA, 19 nt, Artificial Sequence
  Description of Artificial Sequence: Synthetic oligonucleotide
aucggacacggaagcggua

SEQ ID NO: 2817083 - RNA, 19 nt, Artificial Sequence
  Description of Artificial Sequence: Synthetic oligonucleotide
cccucgugaccucgcuggc

SEQ ID NO: 2817084 - RNA, 19 nt, Artificial Sequence
  Description of Artificial Sequence: Synthetic oligonucleotide
cgggcucagaaacucgaga

SEQ ID NO: 2817085 - RNA, 19 nt, Artificial Sequence
  Description of Artificial Sequence: Synthetic oligonucleotide
caccgacuccugcugaauu

SEQ ID NO: 2817086 - RNA, 19 nt, Artificial Sequence
  Description of Artificial Sequence: Synthetic oligonucleotide
cgucacacuuuucuacaaa

SEQ ID NO: 2817087 - RNA, 19 nt, Artificial Sequence
  Description of Artificial Sequence: Synthetic oligonucleotide
cggacacggaagcgguaag

SEQ ID NO: 2817088 - RNA, 19 nt, Artificial Sequence
  Description of Artificial Sequence: Synthetic oligonucleotide
cgugaccucgcuggccagg

SEQ ID NO: 2817089 - RNA, 19 nt, Artificial Sequence
  Description of Artificial Sequence: Synthetic oligonucleotide
gcucagcacuacguagcuc

SEQ ID NO: 2817090 - RNA, 19 nt, Artificial Sequence
  Description of Artificial Sequence: Synthetic oligonucleotide
gguuuccagcucagcacua

SEQ ID NO: 2817091 - RNA, 19 nt, Artificial Sequence
  Description of Artificial Sequence: Synthetic oligonucleotide
gcaaaagcgaggagacuuu

SEQ ID NO: 2817092 - RNA, 19 nt, Artificial Sequence
  Description of Artificial Sequence: Synthetic oligonucleotide
cggaagcgguaagauuccc

SEQ ID NO: 2817093 - RNA, 19 nt, Artificial Sequence
  Description of Artificial Sequence: Synthetic oligonucleotide
gcacuacguagcuccgggu

SEQ ID NO: 2817094 - RNA, 19 nt, Artificial Sequence
  Description of Artificial Sequence: Synthetic oligonucleotide
cuguccaguccagggugcu

SEQ ID NO: 2817095 - RNA, 19 nt, Artificial Sequence
  Description of Artificial Sequence: Synthetic oligonucleotide
ggcaggccuauuccaguuu

SEQ ID NO: 2817096 - RNA, 19 nt, Artificial Sequence
  Description of Artificial Sequence: Synthetic oligonucleotide
ccggguggccucagugaca

SEQ ID NO: 2817097 - RNA, 19 nt, Artificial Sequence
  Description of Artificial Sequence: Synthetic oligonucleotide
cccucuguagguuccucuu

SEQ ID NO: 2817098 - RNA, 19 nt, Artificial Sequence
  Description of Artificial Sequence: Synthetic oligonucleotide
gagcagccacgggcucaga

SEQ ID NO: 2817099 - RNA, 19 nt, Artificial Sequence
  Description of Artificial Sequence: Synthetic oligonucleotide
cagcucgaacgcggaauau

SEQ ID NO: 2817100 - RNA, 19 nt, Artificial Sequence
  Description of Artificial Sequence: Synthetic oligonucleotide
gggccaggaaugacacccu

SEQ ID NO: 2817101 - RNA, 19 nt, Artificial Sequence
  Description of Artificial Sequence: Synthetic oligonucleotide
uuuguuuuaagccauccac

SEQ ID NO: 2817102 - RNA, 19 nt, Artificial Sequence
  Description of Artificial Sequence: Synthetic oligonucleotide
uuuuaagccauccaccacc

SEQ ID NO: 2817103 - RNA, 19 nt, Artificial Sequence
  Description of Artificial Sequence: Synthetic oligonucleotide
ugagcagcuggaaagacag

SEQ ID NO: 2817104 - RNA, 19 nt, Artificial Sequence
  Description of Artificial Sequence: Synthetic oligonucleotide
acugccaccaccuugguga

SEQ ID NO: 2817105 - RNA, 19 nt, Artificial Sequence
  Description of Artificial Sequence: Synthetic oligonucleotide
uuguuuuaagccauccacc

SEQ ID NO: 2817106 - RNA, 19 nt, Artificial Sequence
  Description of Artificial Sequence: Synthetic oligonucleotide
uguuuuaagccauccacca

SEQ ID NO: 2817107 - RNA, 19 nt, Artificial Sequence
  Description of Artificial Sequence: Synthetic oligonucleotide
uccacugccaccaccuugg

SEQ ID NO: 2817108 - RNA, 19 nt, Artificial Sequence
  Description of Artificial Sequence: Synthetic oligonucleotide
agcagcuggaaagacagcc

SEQ ID NO: 2817109 - RNA, 19 nt, Artificial Sequence
  Description of Artificial Sequence: Synthetic oligonucleotide
aagccauccaccaccacgc

SEQ ID NO: 2817110 - RNA, 19 nt, Artificial Sequence
  Description of Artificial Sequence: Synthetic oligonucleotide
aagacagccaggcauucug

SEQ ID NO: 2817111 - RNA, 19 nt, Artificial Sequence
  Description of Artificial Sequence: Synthetic oligonucleotide
aggcauucuggccagaguc

SEQ ID NO: 2817112 - RNA, 19 nt, Artificial Sequence
  Description of Artificial Sequence: Synthetic oligonucleotide
gaagggagcauugucauug

SEQ ID NO: 2817113 - RNA, 19 nt, Artificial Sequence
  Description of Artificial Sequence: Synthetic oligonucleotide
agagucgcgguccacugcc

SEQ ID NO: 2817114 - RNA, 19 nt, Artificial Sequence
  Description of Artificial Sequence: Synthetic oligonucleotide
uuuuguuuuaagccaucca

SEQ ID NO: 2817115 - RNA, 19 nt, Artificial Sequence
  Description of Artificial Sequence: Synthetic oligonucleotide
uucugcaguggguagagca

SEQ ID NO: 2817116 - RNA, 19 nt, Artificial Sequence
  Description of Artificial Sequence: Synthetic oligonucleotide
ugaagagugacgaguggca

SEQ ID NO: 2817117 - RNA, 19 nt, Artificial Sequence
  Description of Artificial Sequence: Synthetic oligonucleotide
aguggguagagcacgaagg

SEQ ID NO: 2817118 - RNA, 19 nt, Artificial Sequence
  Description of Artificial Sequence: Synthetic oligonucleotide
auugugagcccacacggug

SEQ ID NO: 2817119 - RNA, 19 nt, Artificial Sequence
  Description of Artificial Sequence: Synthetic oligonucleotide
ugugcagggagcagacgcg

SEQ ID NO: 2817120 - RNA, 19 nt, Artificial Sequence
  Description of Artificial Sequence: Synthetic oligonucleotide
uugaagagugacgaguggc

SEQ ID NO: 2817121 - RNA, 19 nt, Artificial Sequence
  Description of Artificial Sequence: Synthetic oligonucleotide
uuuaagccauccaccacca

SEQ ID NO: 2817122 - RNA, 19 nt, Artificial Sequence
  Description of Artificial Sequence: Synthetic oligonucleotide
agagugacgaguggcagac

SEQ ID NO: 2817123 - RNA, 19 nt, Artificial Sequence
  Description of Artificial Sequence: Synthetic oligonucleotide
agugacgaguggcagaccu

SEQ ID NO: 2817124 - RNA, 19 nt, Artificial Sequence
  Description of Artificial Sequence: Synthetic oligonucleotide
aagggagcauugucauugg

SEQ ID NO: 2817125 - RNA, 19 nt, Artificial Sequence
  Description of Artificial Sequence: Synthetic oligonucleotide
guggguagagcacgaaggg

SEQ ID NO: 2817126 - RNA, 19 nt, Artificial Sequence
  Description of Artificial Sequence: Synthetic oligonucleotide
cugugcagggagcagacgc

SEQ ID NO: 2817127 - RNA, 19 nt, Artificial Sequence
  Description of Artificial Sequence: Synthetic oligonucleotide
aagagugacgaguggcaga

SEQ ID NO: 2817128 - RNA, 19 nt, Artificial Sequence
  Description of Artificial Sequence: Synthetic oligonucleotide
uugagcagcuggaaagaca

SEQ ID NO: 2817129 - RNA, 19 nt, Artificial Sequence
  Description of Artificial Sequence: Synthetic oligonucleotide
cuugaagagugacgagugg

SEQ ID NO: 2817130 - RNA, 19 nt, Artificial Sequence
  Description of Artificial Sequence: Synthetic oligonucleotide
ugacgaguggcagaccuag

SEQ ID NO: 2817131 - RNA, 19 nt, Artificial Sequence
  Description of Artificial Sequence: Synthetic oligonucleotide
acagcccuggcuccguggc

SEQ ID NO: 2817132 - RNA, 19 nt, Artificial Sequence
  Description of Artificial Sequence: Synthetic oligonucleotide
ucugcaguggguagagcac

SEQ ID NO: 2817133 - RNA, 19 nt, Artificial Sequence
  Description of Artificial Sequence: Synthetic oligonucleotide
guuuuguuuuaagccaucc

SEQ ID NO: 2817134 - RNA, 19 nt, Artificial Sequence
  Description of Artificial Sequence: Synthetic oligonucleotide
aacagcccuggcuccgugg

SEQ ID NO: 2817135 - RNA, 19 nt, Artificial Sequence
  Description of Artificial Sequence: Synthetic oligonucleotide
caccucgccauugugagcc

SEQ ID NO: 2817136 - RNA, 19 nt, Artificial Sequence
  Description of Artificial Sequence: Synthetic oligonucleotide
ugaccagguagccuggcuc

SEQ ID NO: 2817137 - RNA, 19 nt, Artificial Sequence
  Description of Artificial Sequence: Synthetic oligonucleotide
ugagcccacacggugaaca

SEQ ID NO: 2817138 - RNA, 19 nt, Artificial Sequence
  Description of Artificial Sequence: Synthetic oligonucleotide
gaagagugacgaguggcag

SEQ ID NO: 2817139 - RNA, 19 nt, Artificial Sequence
  Description of Artificial Sequence: Synthetic oligonucleotide
auucuggccagagucgcgg

SEQ ID NO: 2817140 - RNA, 19 nt, Artificial Sequence
  Description of Artificial Sequence: Synthetic oligonucleotide
uugugagcccacacgguga

SEQ ID NO: 2817141 - RNA, 19 nt, Artificial Sequence
  Description of Artificial Sequence: Synthetic oligonucleotide
uguuuuguuuuaagccauc

SEQ ID NO: 2817142 - RNA, 19 nt, Artificial Sequence
  Description of Artificial Sequence: Synthetic oligonucleotide
agacgcguucugcaguggg

SEQ ID NO: 2817143 - RNA, 19 nt, Artificial Sequence
  Description of Artificial Sequence: Synthetic oligonucleotide
agggagcauugucauuggc

SEQ ID NO: 2817144 - RNA, 19 nt, Artificial Sequence
  Description of Artificial Sequence: Synthetic oligonucleotide
acgaguggcagaccuagga

SEQ ID NO: 2817145 - RNA, 19 nt, Artificial Sequence
  Description of Artificial Sequence: Synthetic oligonucleotide
aggaggagucgccauuguc

SEQ ID NO: 2817146 - RNA, 19 nt, Artificial Sequence
  Description of Artificial Sequence: Synthetic oligonucleotide
ccauugugagcccacacgg

SEQ ID NO: 2817147 - RNA, 19 nt, Artificial Sequence
  Description of Artificial Sequence: Synthetic oligonucleotide
cacgaagggagcauuguca

SEQ ID NO: 2817148 - RNA, 19 nt, Artificial Sequence
  Description of Artificial Sequence: Synthetic oligonucleotide
gacagccaggcauucuggc

SEQ ID NO: 2817149 - RNA, 19 nt, Artificial Sequence
  Description of Artificial Sequence: Synthetic oligonucleotide
agaccuaggaggagucgcc

SEQ ID NO: 2817150 - RNA, 19 nt, Artificial Sequence
  Description of Artificial Sequence: Synthetic oligonucleotide
guuuuaagccauccaccac

SEQ ID NO: 2817151 - RNA, 19 nt, Artificial Sequence
  Description of Artificial Sequence: Synthetic oligonucleotide
gccuugagcagcuggaaag

SEQ ID NO: 2817152 - RNA, 19 nt, Artificial Sequence
  Description of Artificial Sequence: Synthetic oligonucleotide
ggaggagucgccauugucc

SEQ ID NO: 2817153 - RNA, 19 nt, Artificial Sequence
  Description of Artificial Sequence: Synthetic oligonucleotide
gccauugugagcccacacg

SEQ ID NO: 2817154 - RNA, 19 nt, Artificial Sequence
  Description of Artificial Sequence: Synthetic oligonucleotide
acgaagggagcauugucau

SEQ ID NO: 2817155 - RNA, 19 nt, Artificial Sequence
  Description of Artificial Sequence: Synthetic oligonucleotide
acggugaacagcccuggcu

SEQ ID NO: 2817156 - RNA, 19 nt, Artificial Sequence
  Description of Artificial Sequence: Synthetic oligonucleotide
ugugagcccacacggugaa

SEQ ID NO: 2817157 - RNA, 19 nt, Artificial Sequence
  Description of Artificial Sequence: Synthetic oligonucleotide
ggcuccguggccuugagca

SEQ ID NO: 2817158 - RNA, 19 nt, Artificial Sequence
  Description of Artificial Sequence: Synthetic oligonucleotide
gagcagacgcguucugcag

SEQ ID NO: 2817159 - RNA, 19 nt, Artificial Sequence
  Description of Artificial Sequence: Synthetic oligonucleotide
caguggguagagcacgaag

SEQ ID NO: 2817160 - RNA, 19 nt, Artificial Sequence
  Description of Artificial Sequence: Synthetic oligonucleotide
cacacggugaacagcccug

SEQ ID NO: 2817161 - RNA, 19 nt, Artificial Sequence
  Description of Artificial Sequence: Synthetic oligonucleotide
gcuggaaagacagccaggc

SEQ ID NO: 2817162 - RNA, 19 nt, Artificial Sequence
  Description of Artificial Sequence: Synthetic oligonucleotide
cagaccuaggaggagucgc

SEQ ID NO: 2817163 - RNA, 19 nt, Artificial Sequence
  Description of Artificial Sequence: Synthetic oligonucleotide
agucgcgguccacugccac

SEQ ID NO: 2817164 - RNA, 19 nt, Artificial Sequence
  Description of Artificial Sequence: Synthetic oligonucleotide
aaagacagccaggcauucu

SEQ ID NO: 2817165 - RNA, 19 nt, Artificial Sequence
  Description of Artificial Sequence: Synthetic oligonucleotide
cauucuggccagagucgcg

SEQ ID NO: 2817166 - RNA, 19 nt, Artificial Sequence
  Description of Artificial Sequence: Synthetic oligonucleotide
ugcaguggguagagcacga

SEQ ID NO: 2817167 - RNA, 19 nt, Artificial Sequence
  Description of Artificial Sequence: Synthetic oligonucleotide
cugcaguggguagagcacg

SEQ ID NO: 2817168 - RNA, 19 nt, Artificial Sequence
  Description of Artificial Sequence: Synthetic oligonucleotide
gguagccuggcucugccgc

SEQ ID NO: 2817169 - RNA, 19 nt, Artificial Sequence
  Description of Artificial Sequence: Synthetic oligonucleotide
agcagacgcguucugcagu

SEQ ID NO: 2817170 - RNA, 19 nt, Artificial Sequence
  Description of Artificial Sequence: Synthetic oligonucleotide
cuaggaggagucgccauug

SEQ ID NO: 2817171 - RNA, 19 nt, Artificial Sequence
  Description of Artificial Sequence: Synthetic oligonucleotide
gagcccacacggugaacag

SEQ ID NO: 2817172 - RNA, 19 nt, Artificial Sequence
  Description of Artificial Sequence: Synthetic oligonucleotide
cucugugcagggagcagac

SEQ ID NO: 2817173 - RNA, 19 nt, Artificial Sequence
  Description of Artificial Sequence: Synthetic oligonucleotide
agcccacacggugaacagc

SEQ ID NO: 2817174 - RNA, 19 nt, Artificial Sequence
  Description of Artificial Sequence: Synthetic oligonucleotide
cuugagcagcuggaaagac

SEQ ID NO: 2817175 - RNA, 19 nt, Artificial Sequence
  Description of Artificial Sequence: Synthetic oligonucleotide
accacgcacuugaagagug

SEQ ID NO: 2817176 - RNA, 19 nt, Artificial Sequence
  Description of Artificial Sequence: Synthetic oligonucleotide
ucugugcagggagcagacg

SEQ ID NO: 2817177 - RNA, 19 nt, Artificial Sequence
  Description of Artificial Sequence: Synthetic oligonucleotide
acgcacuugaagagugacg

SEQ ID NO: 2817178 - RNA, 19 nt, Artificial Sequence
  Description of Artificial Sequence: Synthetic oligonucleotide
cuggccagagucgcggucc

SEQ ID NO: 2817179 - RNA, 19 nt, Artificial Sequence
  Description of Artificial Sequence: Synthetic oligonucleotide
gaggagucgccauuguccu

SEQ ID NO: 2817180 - RNA, 19 nt, Artificial Sequence
  Description of Artificial Sequence: Synthetic oligonucleotide
acacggugaacagcccugg

SEQ ID NO: 2817181 - RNA, 19 nt, Artificial Sequence
  Description of Artificial Sequence: Synthetic oligonucleotide
ggcauucuggccagagucg

SEQ ID NO: 2817182 - RNA, 19 nt, Artificial Sequence
  Description of Artificial Sequence: Synthetic oligonucleotide
cagccaggcauucuggcca

SEQ ID NO: 2817183 - RNA, 19 nt, Artificial Sequence
  Description of Artificial Sequence: Synthetic oligonucleotide
ggagucgccauuguccuug

SEQ ID NO: 2817184 - RNA, 19 nt, Artificial Sequence
  Description of Artificial Sequence: Synthetic oligonucleotide
gaaagacagccaggcauuc

SEQ ID NO: 2817185 - RNA, 19 nt, Artificial Sequence
  Description of Artificial Sequence: Synthetic oligonucleotide
uuaagccauccaccaccac

SEQ ID NO: 2817186 - RNA, 19 nt, Artificial Sequence
  Description of Artificial Sequence: Synthetic oligonucleotide
cacgcacuugaagagugac

SEQ ID NO: 2817187 - RNA, 19 nt, Artificial Sequence
  Description of Artificial Sequence: Synthetic oligonucleotide
gugaacagcccuggcuccg

SEQ ID NO: 2817188 - RNA, 19 nt, Artificial Sequence
  Description of Artificial Sequence: Synthetic oligonucleotide
ucgcgguccacugccacca

SEQ ID NO: 2817189 - RNA, 19 nt, Artificial Sequence
  Description of Artificial Sequence: Synthetic oligonucleotide
ggugaacagcccuggcucc

SEQ ID NO: 2817190 - RNA, 19 nt, Artificial Sequence
  Description of Artificial Sequence: Synthetic oligonucleotide
uaggaggagucgccauugu

SEQ ID NO: 2817191 - RNA, 19 nt, Artificial Sequence
  Description of Artificial Sequence: Synthetic oligonucleotide
accaccuuggugaccaggu

SEQ ID NO: 2817192 - RNA, 19 nt, Artificial Sequence
  Description of Artificial Sequence: Synthetic oligonucleotide
uccguggccuugagcagcu

SEQ ID NO: 2817193 - RNA, 19 nt, Artificial Sequence
  Description of Artificial Sequence: Synthetic oligonucleotide
ucuggccagagucgcgguc

SEQ ID NO: 2817194 - RNA, 19 nt, Artificial Sequence
  Description of Artificial Sequence: Synthetic oligonucleotide
agccaggcauucuggccag

SEQ ID NO: 2817195 - RNA, 19 nt, Artificial Sequence
  Description of Artificial Sequence: Synthetic oligonucleotide
guagccuggcucugccgcc

SEQ ID NO: 2817196 - RNA, 19 nt, Artificial Sequence
  Description of Artificial Sequence: Synthetic oligonucleotide
accagcgccuggcugcuga

SEQ ID NO: 2817197 - RNA, 19 nt, Artificial Sequence
  Description of Artificial Sequence: Synthetic oligonucleotide
cucgccauugugagcccac

SEQ ID NO: 2817198 - RNA, 19 nt, Artificial Sequence
  Description of Artificial Sequence: Synthetic oligonucleotide
accucgccauugugagccc

SEQ ID NO: 2817199 - RNA, 19 nt, Artificial Sequence
  Description of Artificial Sequence: Synthetic oligonucleotide
gagcacgaagggagcauug

SEQ ID NO: 2817200 - RNA, 19 nt, Artificial Sequence
  Description of Artificial Sequence: Synthetic oligonucleotide
agcacgaagggagcauugu

SEQ ID NO: 2817201 - RNA, 19 nt, Artificial Sequence
  Description of Artificial Sequence: Synthetic oligonucleotide
gacgaguggcagaccuagg

SEQ ID NO: 2817202 - RNA, 19 nt, Artificial Sequence
  Description of Artificial Sequence: Synthetic oligonucleotide
gaccagguagccuggcucu

SEQ ID NO: 2817203 - RNA, 19 nt, Artificial Sequence
  Description of Artificial Sequence: Synthetic oligonucleotide
guagagcacgaagggagca

SEQ ID NO: 2817204 - RNA, 19 nt, Artificial Sequence
  Description of Artificial Sequence: Synthetic oligonucleotide
agucgccauuguccuugac

SEQ ID NO: 2817205 - RNA, 19 nt, Artificial Sequence
  Description of Artificial Sequence: Synthetic oligonucleotide
cagagucgcgguccacugc

SEQ ID NO: 2817206 - RNA, 19 nt, Artificial Sequence
  Description of Artificial Sequence: Synthetic oligonucleotide
gcccacacggugaacagcc

SEQ ID NO: 2817207 - RNA, 19 nt, Artificial Sequence
  Description of Artificial Sequence: Synthetic oligonucleotide
gucgcgguccacugccacc

SEQ ID NO: 2817208 - RNA, 19 nt, Artificial Sequence
  Description of Artificial Sequence: Synthetic oligonucleotide
cacuugaagagugacgagu

SEQ ID NO: 2817209 - RNA, 19 nt, Artificial Sequence
  Description of Artificial Sequence: Synthetic oligonucleotide
gcagacgcguucugcagug

SEQ ID NO: 2817210 - RNA, 19 nt, Artificial Sequence
  Description of Artificial Sequence: Synthetic oligonucleotide
accuaggaggagucgccau

SEQ ID NO: 2817211 - RNA, 19 nt, Artificial Sequence
  Description of Artificial Sequence: Synthetic oligonucleotide
gaacagcccuggcuccgug

SEQ ID NO: 2817212 - RNA, 19 nt, Artificial Sequence
  Description of Artificial Sequence: Synthetic oligonucleotide
caccaccuuggugaccagg

SEQ ID NO: 2817213 - RNA, 19 nt, Artificial Sequence
  Description of Artificial Sequence: Synthetic oligonucleotide
uucuggccagagucgcggu

SEQ ID NO: 2817214 - RNA, 19 nt, Artificial Sequence
  Description of Artificial Sequence: Synthetic oligonucleotide
gcacuugaagagugacgag

SEQ ID NO: 2817215 - RNA, 19 nt, Artificial Sequence
  Description of Artificial Sequence: Synthetic oligonucleotide
uggcuccguggccuugagc

SEQ ID NO: 2817216 - RNA, 19 nt, Artificial Sequence
  Description of Artificial Sequence: Synthetic oligonucleotide
ugaacagcccuggcuccgu

SEQ ID NO: 2817217 - RNA, 19 nt, Artificial Sequence
  Description of Artificial Sequence: Synthetic oligonucleotide
gcauucuggccagagucgc

SEQ ID NO: 2817218 - RNA, 19 nt, Artificial Sequence
  Description of Artificial Sequence: Synthetic oligonucleotide
cacggugaacagcccuggc

SEQ ID NO: 2817219 - RNA, 19 nt, Artificial Sequence
  Description of Artificial Sequence: Synthetic oligonucleotide
uggcucugccgcccugggc

SEQ ID NO: 2817220 - RNA, 19 nt, Artificial Sequence
  Description of Artificial Sequence: Synthetic oligonucleotide
agagcacgaagggagcauu

SEQ ID NO: 2817221 - RNA, 19 nt, Artificial Sequence
  Description of Artificial Sequence: Synthetic oligonucleotide
cuggaaagacagccaggca

SEQ ID NO: 2817222 - RNA, 19 nt, Artificial Sequence
  Description of Artificial Sequence: Synthetic oligonucleotide
ucugccgcccugggcagca

SEQ ID NO: 2817223 - RNA, 19 nt, Artificial Sequence
  Description of Artificial Sequence: Synthetic oligonucleotide
gaccuaggaggagucgcca

SEQ ID NO: 2817224 - RNA, 19 nt, Artificial Sequence
  Description of Artificial Sequence: Synthetic oligonucleotide
uagccuggcucugccgccc

SEQ ID NO: 2817225 - RNA, 19 nt, Artificial Sequence
  Description of Artificial Sequence: Synthetic oligonucleotide
agggagcagacgcguucug

SEQ ID NO: 2817226 - RNA, 19 nt, Artificial Sequence
  Description of Artificial Sequence: Synthetic oligonucleotide
cuggcucugccgcccuggg

SEQ ID NO: 2817227 - RNA, 19 nt, Artificial Sequence
  Description of Artificial Sequence: Synthetic oligonucleotide
agcucugugcagggagcag

SEQ ID NO: 2817228 - RNA, 19 nt, Artificial Sequence
  Description of Artificial Sequence: Synthetic oligonucleotide
ugccgcccugggcagcagc

SEQ ID NO: 2817229 - RNA, 19 nt, Artificial Sequence
  Description of Artificial Sequence: Synthetic oligonucleotide
cgcaccucgccauugugag

SEQ ID NO: 2817230 - RNA, 19 nt, Artificial Sequence
  Description of Artificial Sequence: Synthetic oligonucleotide
agcccuggcuccguggccu

SEQ ID NO: 2817231 - RNA, 19 nt, Artificial Sequence
  Description of Artificial Sequence: Synthetic oligonucleotide
guggccuugagcagcugga

SEQ ID NO: 2817232 - RNA, 19 nt, Artificial Sequence
  Description of Artificial Sequence: Synthetic oligonucleotide
ugcagggagcagacgcguu

SEQ ID NO: 2817233 - RNA, 19 nt, Artificial Sequence
  Description of Artificial Sequence: Synthetic oligonucleotide
gcacgaagggagcauuguc

SEQ ID NO: 2817234 - RNA, 19 nt, Artificial Sequence
  Description of Artificial Sequence: Synthetic oligonucleotide
cugccaccaccuuggugac

SEQ ID NO: 2817235 - RNA, 19 nt, Artificial Sequence
  Description of Artificial Sequence: Synthetic oligonucleotide
ucgccauugugagcccaca

SEQ ID NO: 2817236 - RNA, 19 nt, Artificial Sequence
  Description of Artificial Sequence: Synthetic oligonucleotide
cgaguggcagaccuaggag

SEQ ID NO: 2817237 - RNA, 19 nt, Artificial Sequence
  Description of Artificial Sequence: Synthetic oligonucleotide
uggccuugagcagcuggaa

SEQ ID NO: 2817238 - RNA, 19 nt, Artificial Sequence
  Description of Artificial Sequence: Synthetic oligonucleotide
cauugugagcccacacggu

SEQ ID NO: 2817239 - RNA, 19 nt, Artificial Sequence
  Description of Artificial Sequence: Synthetic oligonucleotide
gcagggagcagacgcguuc

SEQ ID NO: 2817240 - RNA, 19 nt, Artificial Sequence
  Description of Artificial Sequence: Synthetic oligonucleotide
gcagaccuaggaggagucg

SEQ ID NO: 2817241 - RNA, 19 nt, Artificial Sequence
  Description of Artificial Sequence: Synthetic oligonucleotide
acgcguucugcagugggua

SEQ ID NO: 2817242 - RNA, 19 nt, Artificial Sequence
  Description of Artificial Sequence: Synthetic oligonucleotide
cggugaacagcccuggcuc

SEQ ID NO: 2817243 - RNA, 19 nt, Artificial Sequence
  Description of Artificial Sequence: Synthetic oligonucleotide
cgcaccagcgccuggcugc

SEQ ID NO: 2817244 - RNA, 19 nt, Artificial Sequence
  Description of Artificial Sequence: Synthetic oligonucleotide
cguggccuugagcagcugg

SEQ ID NO: 2817245 - RNA, 19 nt, Artificial Sequence
  Description of Artificial Sequence: Synthetic oligonucleotide
gggagcagacgcguucugc

SEQ ID NO: 2817246 - RNA, 19 nt, Artificial Sequence
  Description of Artificial Sequence: Synthetic oligonucleotide
cagacgcguucugcagugg

SEQ ID NO: 2817247 - RNA, 19 nt, Artificial Sequence
  Description of Artificial Sequence: Synthetic oligonucleotide
ccagagucgcgguccacug

SEQ ID NO: 2817248 - RNA, 19 nt, Artificial Sequence
  Description of Artificial Sequence: Synthetic oligonucleotide
gagugacgaguggcagacc

SEQ ID NO: 2817249 - RNA, 19 nt, Artificial Sequence
  Description of Artificial Sequence: Synthetic oligonucleotide
accagguagccuggcucug

SEQ ID NO: 2817250 - RNA, 19 nt, Artificial Sequence
  Description of Artificial Sequence: Synthetic oligonucleotide
gagucgccauuguccuuga

SEQ ID NO: 2817251 - RNA, 19 nt, Artificial Sequence
  Description of Artificial Sequence: Synthetic oligonucleotide
gccauccaccaccacgcac

SEQ ID NO: 2817252 - RNA, 19 nt, Artificial Sequence
  Description of Artificial Sequence: Synthetic oligonucleotide
gcagcucugugcagggagc

SEQ ID NO: 2817253 - RNA, 19 nt, Artificial Sequence
  Description of Artificial Sequence: Synthetic oligonucleotide
gcagcuggaaagacagcca

SEQ ID NO: 2817254 - RNA, 19 nt, Artificial Sequence
  Description of Artificial Sequence: Synthetic oligonucleotide
cagcccuggcuccguggcc

SEQ ID NO: 2817255 - RNA, 19 nt, Artificial Sequence
  Description of Artificial Sequence: Synthetic oligonucleotide
gcucugugcagggagcaga

SEQ ID NO: 2817256 - RNA, 19 nt, Artificial Sequence
  Description of Artificial Sequence: Synthetic oligonucleotide
cuggcuccguggccuugag

SEQ ID NO: 2817257 - RNA, 19 nt, Artificial Sequence
  Description of Artificial Sequence: Synthetic oligonucleotide
ccuuggugaccagguagcc

SEQ ID NO: 2817258 - RNA, 19 nt, Artificial Sequence
  Description of Artificial Sequence: Synthetic oligonucleotide
cuuggugaccagguagccu

SEQ ID NO: 2817259 - RNA, 19 nt, Artificial Sequence
  Description of Artificial Sequence: Synthetic oligonucleotide
aggagucgccauuguccuu

SEQ ID NO: 2817260 - RNA, 19 nt, Artificial Sequence
  Description of Artificial Sequence: Synthetic oligonucleotide
ccaggcauucuggccagag

SEQ ID NO: 2817261 - RNA, 19 nt, Artificial Sequence
  Description of Artificial Sequence: Synthetic oligonucleotide
gacgcguucugcagugggu

SEQ ID NO: 2817262 - RNA, 19 nt, Artificial Sequence
  Description of Artificial Sequence: Synthetic oligonucleotide
ugccaccaccuuggugacc

SEQ ID NO: 2817263 - RNA, 19 nt, Artificial Sequence
  Description of Artificial Sequence: Synthetic oligonucleotide
ggcagaccuaggaggaguc

SEQ ID NO: 2817264 - RNA, 19 nt, Artificial Sequence
  Description of Artificial Sequence: Synthetic oligonucleotide
ggaaagacagccaggcauu

SEQ ID NO: 2817265 - RNA, 19 nt, Artificial Sequence
  Description of Artificial Sequence: Synthetic oligonucleotide
cguucugcaguggguagag

SEQ ID NO: 2817266 - RNA, 19 nt, Artificial Sequence
  Description of Artificial Sequence: Synthetic oligonucleotide
cagcucugugcagggagca

SEQ ID NO: 2817267 - RNA, 19 nt, Artificial Sequence
  Description of Artificial Sequence: Synthetic oligonucleotide
gcaccucgccauugugagc

SEQ ID NO: 2817268 - RNA, 19 nt, Artificial Sequence
  Description of Artificial Sequence: Synthetic oligonucleotide
ggugaccagguagccuggc

SEQ ID NO: 2817269 - RNA, 19 nt, Artificial Sequence
  Description of Artificial Sequence: Synthetic oligonucleotide
gcgguccacugccaccacc

SEQ ID NO: 2817270 - RNA, 19 nt, Artificial Sequence
  Description of Artificial Sequence: Synthetic oligonucleotide
ccuugagcagcuggaaaga

SEQ ID NO: 2817271 - RNA, 19 nt, Artificial Sequence
  Description of Artificial Sequence: Synthetic oligonucleotide
cagcgccuggcugcugagc

SEQ ID NO: 2817272 - RNA, 19 nt, Artificial Sequence
  Description of Artificial Sequence: Synthetic oligonucleotide
ccagguagccuggcucugc

SEQ ID NO: 2817273 - RNA, 19 nt, Artificial Sequence
  Description of Artificial Sequence: Synthetic oligonucleotide
cccacacggugaacagccc

SEQ ID NO: 2817274 - RNA, 19 nt, Artificial Sequence
  Description of Artificial Sequence: Synthetic oligonucleotide
gagucgcgguccacugcca

SEQ ID NO: 2817275 - RNA, 19 nt, Artificial Sequence
  Description of Artificial Sequence: Synthetic oligonucleotide
cgcguucugcaguggguag

SEQ ID NO: 2817276 - RNA, 19 nt, Artificial Sequence
  Description of Artificial Sequence: Synthetic oligonucleotide
gugacgaguggcagaccua

SEQ ID NO: 2817277 - RNA, 19 nt, Artificial Sequence
  Description of Artificial Sequence: Synthetic oligonucleotide
cucugccgcccugggcagc

SEQ ID NO: 2817278 - RNA, 19 nt, Artificial Sequence
  Description of Artificial Sequence: Synthetic oligonucleotide
gugcagggagcagacgcgu

SEQ ID NO: 2817279 - RNA, 19 nt, Artificial Sequence
  Description of Artificial Sequence: Synthetic oligonucleotide
gcgcaccucgccauuguga

SEQ ID NO: 2817280 - RNA, 19 nt, Artificial Sequence
  Description of Artificial Sequence: Synthetic oligonucleotide
cagggagcagacgcguucu

SEQ ID NO: 2817281 - RNA, 19 nt, Artificial Sequence
  Description of Artificial Sequence: Synthetic oligonucleotide
gcguucugcaguggguaga

SEQ ID NO: 2817282 - RNA, 19 nt, Artificial Sequence
  Description of Artificial Sequence: Synthetic oligonucleotide
caccacgcacuugaagagu

SEQ ID NO: 2817283 - RNA, 19 nt, Artificial Sequence
  Description of Artificial Sequence: Synthetic oligonucleotide
gcgcaccagcgccuggcug

SEQ ID NO: 2817284 - RNA, 19 nt, Artificial Sequence
  Description of Artificial Sequence: Synthetic oligonucleotide
gugagcccacacggugaac

SEQ ID NO: 2817285 - RNA, 19 nt, Artificial Sequence
  Description of Artificial Sequence: Synthetic oligonucleotide
cgccauugugagcccacac

SEQ ID NO: 2817286 - RNA, 19 nt, Artificial Sequence
  Description of Artificial Sequence: Synthetic oligonucleotide
ccagcgccuggcugcugag

SEQ ID NO: 2817287 - RNA, 19 nt, Artificial Sequence
  Description of Artificial Sequence: Synthetic oligonucleotide
ccacgcacuugaagaguga

SEQ ID NO: 2817288 - RNA, 19 nt, Artificial Sequence
  Description of Artificial Sequence: Synthetic oligonucleotide
ccugggcagcagcucugug

SEQ ID NO: 2817289 - RNA, 19 nt, Artificial Sequence
  Description of Artificial Sequence: Synthetic oligonucleotide
gccagagucgcgguccacu

SEQ ID NO: 2817290 - RNA, 19 nt, Artificial Sequence
  Description of Artificial Sequence: Synthetic oligonucleotide
ccacacggugaacagcccu

SEQ ID NO: 2817291 - RNA, 19 nt, Artificial Sequence
  Description of Artificial Sequence: Synthetic oligonucleotide
cagcagcucugugcaggga

SEQ ID NO: 2817292 - RNA, 19 nt, Artificial Sequence
  Description of Artificial Sequence: Synthetic oligonucleotide
gcaguggguagagcacgaa

SEQ ID NO: 2817293 - RNA, 19 nt, Artificial Sequence
  Description of Artificial Sequence: Synthetic oligonucleotide
gcccugggcagcagcucug

SEQ ID NO: 2817294 - RNA, 19 nt, Artificial Sequence
  Description of Artificial Sequence: Synthetic oligonucleotide
cgguccacugccaccaccu

SEQ ID NO: 2817295 - RNA, 19 nt, Artificial Sequence
  Description of Artificial Sequence: Synthetic oligonucleotide
ccaccaccuuggugaccag

SEQ ID NO: 2817296 - RNA, 19 nt, Artificial Sequence
  Description of Artificial Sequence: Synthetic oligonucleotide
ccuaggaggagucgccauu

SEQ ID NO: 2817297 - RNA, 19 nt, Artificial Sequence
  Description of Artificial Sequence: Synthetic oligonucleotide
cugccgcccugggcagcag

SEQ ID NO: 2817298 - RNA, 19 nt, Artificial Sequence
  Description of Artificial Sequence: Synthetic oligonucleotide
ggccagagucgcgguccac

SEQ ID NO: 2817299 - RNA, 19 nt, Artificial Sequence
  Description of Artificial Sequence: Synthetic oligonucleotide
ccucgccauugugagccca

SEQ ID NO: 2817300 - RNA, 19 nt, Artificial Sequence
  Description of Artificial Sequence: Synthetic oligonucleotide
gguccacugccaccaccuu

SEQ ID NO: 2817301 - RNA, 19 nt, Artificial Sequence
  Description of Artificial Sequence: Synthetic oligonucleotide
gccgcccugggcagcagcu

SEQ ID NO: 2817302 - RNA, 19 nt, Artificial Sequence
  Description of Artificial Sequence: Synthetic oligonucleotide
ccgcccugggcagcagcuc

SEQ ID NO: 2817303 - RNA, 19 nt, Artificial Sequence
  Description of Artificial Sequence: Synthetic oligonucleotide
gccaggcauucuggccaga

SEQ ID NO: 2817304 - RNA, 19 nt, Artificial Sequence
  Description of Artificial Sequence: Synthetic oligonucleotide
cccuggcuccguggccuug

SEQ ID NO: 2817305 - RNA, 19 nt, Artificial Sequence
  Description of Artificial Sequence: Synthetic oligonucleotide
cgcccugggcagcagcucu

SEQ ID NO: 2817306 - RNA, 19 nt, Artificial Sequence
  Description of Artificial Sequence: Synthetic oligonucleotide
cgaagggagcauugucauu

SEQ ID NO: 2817307 - RNA, 19 nt, Artificial Sequence
  Description of Artificial Sequence: Synthetic oligonucleotide
ccguggccuugagcagcug

SEQ ID NO: 2817308 - RNA, 19 nt, Artificial Sequence
  Description of Artificial Sequence: Synthetic oligonucleotide
cccugggcagcagcucugu

SEQ ID NO: 2817309 - RNA, 19 nt, Artificial Sequence
  Description of Artificial Sequence: Synthetic oligonucleotide
gcccuggcuccguggccuu

SEQ ID NO: 2817310 - RNA, 19 nt, Artificial Sequence
  Description of Artificial Sequence: Synthetic oligonucleotide
cgcgcaccagcgccuggcu

SEQ ID NO: 2817311 - RNA, 19 nt, Artificial Sequence
  Description of Artificial Sequence: Synthetic oligonucleotide
aaagaauccuauuagagga

SEQ ID NO: 2817312 - RNA, 19 nt, Artificial Sequence
  Description of Artificial Sequence: Synthetic oligonucleotide
auauuuaaagcuuauguag

SEQ ID NO: 2817313 - RNA, 19 nt, Artificial Sequence
  Description of Artificial Sequence: Synthetic oligonucleotide
gaaagaauccuauuagagg

SEQ ID NO: 2817314 - RNA, 19 nt, Artificial Sequence
  Description of Artificial Sequence: Synthetic oligonucleotide
auauauuuaaagcuuaugu

SEQ ID NO: 2817315 - RNA, 19 nt, Artificial Sequence
  Description of Artificial Sequence: Synthetic oligonucleotide
aauggugacauaauguucg

SEQ ID NO: 2817316 - RNA, 19 nt, Artificial Sequence
  Description of Artificial Sequence: Synthetic oligonucleotide
aauccuauuagaggaaagc

SEQ ID NO: 2817317 - RNA, 19 nt, Artificial Sequence
  Description of Artificial Sequence: Synthetic oligonucleotide
uuuauaauucgcuuguaug

SEQ ID NO: 2817318 - RNA, 19 nt, Artificial Sequence
  Description of Artificial Sequence: Synthetic oligonucleotide
auaugaaaauaguuucugc

SEQ ID NO: 2817319 - RNA, 19 nt, Artificial Sequence
  Description of Artificial Sequence: Synthetic oligonucleotide
uaauguucggcguagacug

SEQ ID NO: 2817320 - RNA, 19 nt, Artificial Sequence
  Description of Artificial Sequence: Synthetic oligonucleotide
uuauaauucgcuuguaugu

SEQ ID NO: 2817321 - RNA, 19 nt, Artificial Sequence
  Description of Artificial Sequence: Synthetic oligonucleotide
aauagccuuagguauguag

SEQ ID NO: 2817322 - RNA, 19 nt, Artificial Sequence
  Description of Artificial Sequence: Synthetic oligonucleotide
gauguuuauaauucgcuug

SEQ ID NO: 2817323 - RNA, 19 nt, Artificial Sequence
  Description of Artificial Sequence: Synthetic oligonucleotide
uccuauuagaggaaagcgg

SEQ ID NO: 2817324 - RNA, 19 nt, Artificial Sequence
  Description of Artificial Sequence: Synthetic oligonucleotide
uaaaaguucaucugcacac

SEQ ID NO: 2817325 - RNA, 19 nt, Artificial Sequence
  Description of Artificial Sequence: Synthetic oligonucleotide
ucaaaauagccuuagguau

SEQ ID NO: 2817326 - RNA, 19 nt, Artificial Sequence
  Description of Artificial Sequence: Synthetic oligonucleotide
aauaucaccuaaaaguuca

SEQ ID NO: 2817327 - RNA, 19 nt, Artificial Sequence
  Description of Artificial Sequence: Synthetic oligonucleotide
auucaaaauagccuuaggu

SEQ ID NO: 2817328 - RNA, 19 nt, Artificial Sequence
  Description of Artificial Sequence: Synthetic oligonucleotide
aauuacgguggaaagaauc

SEQ ID NO: 2817329 - RNA, 19 nt, Artificial Sequence
  Description of Artificial Sequence: Synthetic oligonucleotide
uauauuuaaagcuuaugua

SEQ ID NO: 2817330 - RNA, 19 nt, Artificial Sequence
  Description of Artificial Sequence: Synthetic oligonucleotide
agcuaaauuacuaauauga

SEQ ID NO: 2817331 - RNA, 19 nt, Artificial Sequence
  Description of Artificial Sequence: Synthetic oligonucleotide
aauaacaugcuugagcuaa

SEQ ID NO: 2817332 - RNA, 19 nt, Artificial Sequence
  Description of Artificial Sequence: Synthetic oligonucleotide
uucaaaauagccuuaggua

SEQ ID NO: 2817333 - RNA, 19 nt, Artificial Sequence
  Description of Artificial Sequence: Synthetic oligonucleotide
ugagcuaaauuacuaauau

SEQ ID NO: 2817334 - RNA, 19 nt, Artificial Sequence
  Description of Artificial Sequence: Synthetic oligonucleotide
aaaaguucaucugcacacc

SEQ ID NO: 2817335 - RNA, 19 nt, Artificial Sequence
  Description of Artificial Sequence: Synthetic oligonucleotide
aaauuacuaauaugaaaau

SEQ ID NO: 2817336 - RNA, 19 nt, Artificial Sequence
  Description of Artificial Sequence: Synthetic oligonucleotide
cugcacaccacaauuacgg

SEQ ID NO: 2817337 - RNA, 19 nt, Artificial Sequence
  Description of Artificial Sequence: Synthetic oligonucleotide
uuaaagcuuauguagcugu

SEQ ID NO: 2817338 - RNA, 19 nt, Artificial Sequence
  Description of Artificial Sequence: Synthetic oligonucleotide
auuacgguggaaagaaucc

SEQ ID NO: 2817339 - RNA, 19 nt, Artificial Sequence
  Description of Artificial Sequence: Synthetic oligonucleotide
uuacuaauaugaaaauagu

SEQ ID NO: 2817340 - RNA, 19 nt, Artificial Sequence
  Description of Artificial Sequence: Synthetic oligonucleotide
ggugacauaauguucggcg

SEQ ID NO: 2817341 - RNA, 19 nt, Artificial Sequence
  Description of Artificial Sequence: Synthetic oligonucleotide
uuuaagaaacagugggcag

SEQ ID NO: 2817342 - RNA, 19 nt, Artificial Sequence
  Description of Artificial Sequence: Synthetic oligonucleotide
aaagcggauguuuauaauu

SEQ ID NO: 2817343 - RNA, 19 nt, Artificial Sequence
  Description of Artificial Sequence: Synthetic oligonucleotide
ugaaaauaguuucugccuc

SEQ ID NO: 2817344 - RNA, 19 nt, Artificial Sequence
  Description of Artificial Sequence: Synthetic oligonucleotide
augaaaauaguuucugccu

SEQ ID NO: 2817345 - RNA, 19 nt, Artificial Sequence
  Description of Artificial Sequence: Synthetic oligonucleotide
uauucaaaauagccuuagg

SEQ ID NO: 2817346 - RNA, 19 nt, Artificial Sequence
  Description of Artificial Sequence: Synthetic oligonucleotide
ucugccucuauucaaaaua

SEQ ID NO: 2817347 - RNA, 19 nt, Artificial Sequence
  Description of Artificial Sequence: Synthetic oligonucleotide
uguaugucaaggaaguuuu

SEQ ID NO: 2817348 - RNA, 19 nt, Artificial Sequence
  Description of Artificial Sequence: Synthetic oligonucleotide
agagacagggcacaauauc

SEQ ID NO: 2817349 - RNA, 19 nt, Artificial Sequence
  Description of Artificial Sequence: Synthetic oligonucleotide
aagcggauguuuauaauuc

SEQ ID NO: 2817350 - RNA, 19 nt, Artificial Sequence
  Description of Artificial Sequence: Synthetic oligonucleotide
aauuacuaauaugaaaaua

SEQ ID NO: 2817351 - RNA, 19 nt, Artificial Sequence
  Description of Artificial Sequence: Synthetic oligonucleotide
ucugcacaccacaauuacg

SEQ ID NO: 2817352 - RNA, 19 nt, Artificial Sequence
  Description of Artificial Sequence: Synthetic oligonucleotide
auguuuauaauucgcuugu

SEQ ID NO: 2817353 - RNA, 19 nt, Artificial Sequence
  Description of Artificial Sequence: Synthetic oligonucleotide
ucaccuaaaaguucaucug

SEQ ID NO: 2817354 - RNA, 19 nt, Artificial Sequence
  Description of Artificial Sequence: Synthetic oligonucleotide
aucugcacaccacaauuac

SEQ ID NO: 2817355 - RNA, 19 nt, Artificial Sequence
  Description of Artificial Sequence: Synthetic oligonucleotide
aagcuuauguagcuguccu

SEQ ID NO: 2817356 - RNA, 19 nt, Artificial Sequence
  Description of Artificial Sequence: Synthetic oligonucleotide
agguauguagugucuacuc

SEQ ID NO: 2817357 - RNA, 19 nt, Artificial Sequence
  Description of Artificial Sequence: Synthetic oligonucleotide
auccuauuagaggaaagcg

SEQ ID NO: 2817358 - RNA, 19 nt, Artificial Sequence
  Description of Artificial Sequence: Synthetic oligonucleotide
cuaaauuacuaauaugaaa

SEQ ID NO: 2817359 - RNA, 19 nt, Artificial Sequence
  Description of Artificial Sequence: Synthetic oligonucleotide
aaaguucaucugcacacca

SEQ ID NO: 2817360 - RNA, 19 nt, Artificial Sequence
  Description of Artificial Sequence: Synthetic oligonucleotide
uauguagugucuacucuga

SEQ ID NO: 2817361 - RNA, 19 nt, Artificial Sequence
  Description of Artificial Sequence: Synthetic oligonucleotide
guauguagugucuacucug

SEQ ID NO: 2817362 - RNA, 19 nt, Artificial Sequence
  Description of Artificial Sequence: Synthetic oligonucleotide
uugagcuaaauuacuaaua

SEQ ID NO: 2817363 - RNA, 19 nt, Artificial Sequence
  Description of Artificial Sequence: Synthetic oligonucleotide
uauuagaggaaagcggaug

SEQ ID NO: 2817364 - RNA, 19 nt, Artificial Sequence
  Description of Artificial Sequence: Synthetic oligonucleotide
guagugucuacucugaaaa

SEQ ID NO: 2817365 - RNA, 19 nt, Artificial Sequence
  Description of Artificial Sequence: Synthetic oligonucleotide
caaaauagccuuagguaug

SEQ ID NO: 2817366 - RNA, 19 nt, Artificial Sequence
  Description of Artificial Sequence: Synthetic oligonucleotide
uuuaaagcuuauguagcug

SEQ ID NO: 2817367 - RNA, 19 nt, Artificial Sequence
  Description of Artificial Sequence: Synthetic oligonucleotide
aaaauagccuuagguaugu

SEQ ID NO: 2817368 - RNA, 19 nt, Artificial Sequence
  Description of Artificial Sequence: Synthetic oligonucleotide
agcggauguuuauaauucg

SEQ ID NO: 2817369 - RNA, 19 nt, Artificial Sequence
  Description of Artificial Sequence: Synthetic oligonucleotide
gagcuaaauuacuaauaug

SEQ ID NO: 2817370 - RNA, 19 nt, Artificial Sequence
  Description of Artificial Sequence: Synthetic oligonucleotide
auucgcuuguaugucaagg

SEQ ID NO: 2817371 - RNA, 19 nt, Artificial Sequence
  Description of Artificial Sequence: Synthetic oligonucleotide
ucaucugcacaccacaauu

SEQ ID NO: 2817372 - RNA, 19 nt, Artificial Sequence
  Description of Artificial Sequence: Synthetic oligonucleotide
accgcaggggaguagacag

SEQ ID NO: 2817373 - RNA, 19 nt, Artificial Sequence
  Description of Artificial Sequence: Synthetic oligonucleotide
acaauuacgguggaaagaa

SEQ ID NO: 2817374 - RNA, 19 nt, Artificial Sequence
  Description of Artificial Sequence: Synthetic oligonucleotide
aguucaucugcacaccaca

SEQ ID NO: 2817375 - RNA, 19 nt, Artificial Sequence
  Description of Artificial Sequence: Synthetic oligonucleotide
auaauucgcuuguauguca

SEQ ID NO: 2817376 - RNA, 19 nt, Artificial Sequence
  Description of Artificial Sequence: Synthetic oligonucleotide
cugccucuauucaaaauag

SEQ ID NO: 2817377 - RNA, 19 nt, Artificial Sequence
  Description of Artificial Sequence: Synthetic oligonucleotide
cuuuaagaaacagugggca

SEQ ID NO: 2817378 - RNA, 19 nt, Artificial Sequence
  Description of Artificial Sequence: Synthetic oligonucleotide
uauaauucgcuuguauguc

SEQ ID NO: 2817379 - RNA, 19 nt, Artificial Sequence
  Description of Artificial Sequence: Synthetic oligonucleotide
uguagugucuacucugaaa

SEQ ID NO: 2817380 - RNA, 19 nt, Artificial Sequence
  Description of Artificial Sequence: Synthetic oligonucleotide
uuagguauguagugucuac

SEQ ID NO: 2817381 - RNA, 19 nt, Artificial Sequence
  Description of Artificial Sequence: Synthetic oligonucleotide
acugcggaagcggaagucc

SEQ ID NO: 2817382 - RNA, 19 nt, Artificial Sequence
  Description of Artificial Sequence: Synthetic oligonucleotide
aauucgcuuguaugucaag

SEQ ID NO: 2817383 - RNA, 19 nt, Artificial Sequence
  Description of Artificial Sequence: Synthetic oligonucleotide
uagacaggggcacugcgga

SEQ ID NO: 2817384 - RNA, 19 nt, Artificial Sequence
  Description of Artificial Sequence: Synthetic oligonucleotide
gaaacagugggcaggcuug

SEQ ID NO: 2817385 - RNA, 19 nt, Artificial Sequence
  Description of Artificial Sequence: Synthetic oligonucleotide
agcccggucaggcagccgc

SEQ ID NO: 2817386 - RNA, 19 nt, Artificial Sequence
  Description of Artificial Sequence: Synthetic oligonucleotide
cuauucaaaauagccuuag

SEQ ID NO: 2817387 - RNA, 19 nt, Artificial Sequence
  Description of Artificial Sequence: Synthetic oligonucleotide
caggcaguaggccucaggc

SEQ ID NO: 2817388 - RNA, 19 nt, Artificial Sequence
  Description of Artificial Sequence: Synthetic oligonucleotide
caauaucaccuaaaaguuc

SEQ ID NO: 2817389 - RNA, 19 nt, Artificial Sequence
  Description of Artificial Sequence: Synthetic oligonucleotide
auaauguucggcguagacu

SEQ ID NO: 2817390 - RNA, 19 nt, Artificial Sequence
  Description of Artificial Sequence: Synthetic oligonucleotide
gacauaauguucggcguag

SEQ ID NO: 2817391 - RNA, 19 nt, Artificial Sequence
  Description of Artificial Sequence: Synthetic oligonucleotide
uagccuuagguauguagug

SEQ ID NO: 2817392 - RNA, 19 nt, Artificial Sequence
  Description of Artificial Sequence: Synthetic oligonucleotide
acaauaucaccuaaaaguu

SEQ ID NO: 2817393 - RNA, 19 nt, Artificial Sequence
  Description of Artificial Sequence: Synthetic oligonucleotide
uuauguagcuguccuuuaa

SEQ ID NO: 2817394 - RNA, 19 nt, Artificial Sequence
  Description of Artificial Sequence: Synthetic oligonucleotide
cuggaguuggcgcuguccg

SEQ ID NO: 2817395 - RNA, 19 nt, Artificial Sequence
  Description of Artificial Sequence: Synthetic oligonucleotide
guucggcguagacugagcg

SEQ ID NO: 2817396 - RNA, 19 nt, Artificial Sequence
  Description of Artificial Sequence: Synthetic oligonucleotide
uaauucgcuuguaugucaa

SEQ ID NO: 2817397 - RNA, 19 nt, Artificial Sequence
  Description of Artificial Sequence: Synthetic oligonucleotide
ucggcguagacugagcggc

SEQ ID NO: 2817398 - RNA, 19 nt, Artificial Sequence
  Description of Artificial Sequence: Synthetic oligonucleotide
auagccuuagguauguagu

SEQ ID NO: 2817399 - RNA, 19 nt, Artificial Sequence
  Description of Artificial Sequence: Synthetic oligonucleotide
ugcuugagcuaaauuacua

SEQ ID NO: 2817400 - RNA, 19 nt, Artificial Sequence
  Description of Artificial Sequence: Synthetic oligonucleotide
aagcgagcagggucguacg

SEQ ID NO: 2817401 - RNA, 19 nt, Artificial Sequence
  Description of Artificial Sequence: Synthetic oligonucleotide
uucggcguagacugagcgg

SEQ ID NO: 2817402 - RNA, 19 nt, Artificial Sequence
  Description of Artificial Sequence: Synthetic oligonucleotide
augucaaggaaguuuuaaa

SEQ ID NO: 2817403 - RNA, 19 nt, Artificial Sequence
  Description of Artificial Sequence: Synthetic oligonucleotide
gagacagggcacaauauca

SEQ ID NO: 2817404 - RNA, 19 nt, Artificial Sequence
  Description of Artificial Sequence: Synthetic oligonucleotide
auguagcuguccuuuaaga

SEQ ID NO: 2817405 - RNA, 19 nt, Artificial Sequence
  Description of Artificial Sequence: Synthetic oligonucleotide
gaauccuauuagaggaaag

SEQ ID NO: 2817406 - RNA, 19 nt, Artificial Sequence
  Description of Artificial Sequence: Synthetic oligonucleotide
cauaauguucggcguagac

SEQ ID NO: 2817407 - RNA, 19 nt, Artificial Sequence
  Description of Artificial Sequence: Synthetic oligonucleotide
aacaugcuugagcuaaauu

SEQ ID NO: 2817408 - RNA, 19 nt, Artificial Sequence
  Description of Artificial Sequence: Synthetic oligonucleotide
auggugacauaauguucgg

SEQ ID NO: 2817409 - RNA, 19 nt, Artificial Sequence
  Description of Artificial Sequence: Synthetic oligonucleotide
ugccucuauucaaaauagc

SEQ ID NO: 2817410 - RNA, 19 nt, Artificial Sequence
  Description of Artificial Sequence: Synthetic oligonucleotide
aaauaguuucugccucuau

SEQ ID NO: 2817411 - RNA, 19 nt, Artificial Sequence
  Description of Artificial Sequence: Synthetic oligonucleotide
acaggggcacugcggaagc

SEQ ID NO: 2817412 - RNA, 19 nt, Artificial Sequence
  Description of Artificial Sequence: Synthetic oligonucleotide
accacaauuacgguggaaa

SEQ ID NO: 2817413 - RNA, 19 nt, Artificial Sequence
  Description of Artificial Sequence: Synthetic oligonucleotide
ucgcuuguaugucaaggaa

SEQ ID NO: 2817414 - RNA, 19 nt, Artificial Sequence
  Description of Artificial Sequence: Synthetic oligonucleotide
agacagggcacaauaucac

SEQ ID NO: 2817415 - RNA, 19 nt, Artificial Sequence
  Description of Artificial Sequence: Synthetic oligonucleotide
gccucuauucaaaauagcc

SEQ ID NO: 2817416 - RNA, 19 nt, Artificial Sequence
  Description of Artificial Sequence: Synthetic oligonucleotide
uucaucugcacaccacaau

SEQ ID NO: 2817417 - RNA, 19 nt, Artificial Sequence
  Description of Artificial Sequence: Synthetic oligonucleotide
ccuuuaagaaacagugggc

SEQ ID NO: 2817418 - RNA, 19 nt, Artificial Sequence
  Description of Artificial Sequence: Synthetic oligonucleotide
uacgguggaaagaauccua

SEQ ID NO: 2817419 - RNA, 19 nt, Artificial Sequence
  Description of Artificial Sequence: Synthetic oligonucleotide
gaagcgagcagggucguac

SEQ ID NO: 2817420 - RNA, 19 nt, Artificial Sequence
  Description of Artificial Sequence: Synthetic oligonucleotide
gguggaaagaauccuauua

SEQ ID NO: 2817421 - RNA, 19 nt, Artificial Sequence
  Description of Artificial Sequence: Synthetic oligonucleotide
cuccucaccgaagagcccg

SEQ ID NO: 2817422 - RNA, 19 nt, Artificial Sequence
  Description of Artificial Sequence: Synthetic oligonucleotide
gcacaauaucaccuaaaag

SEQ ID NO: 2817423 - RNA, 19 nt, Artificial Sequence
  Description of Artificial Sequence: Synthetic oligonucleotide
uuacgguggaaagaauccu

SEQ ID NO: 2817424 - RNA, 19 nt, Artificial Sequence
  Description of Artificial Sequence: Synthetic oligonucleotide
ccuauuagaggaaagcgga

SEQ ID NO: 2817425 - RNA, 19 nt, Artificial Sequence
  Description of Artificial Sequence: Synthetic oligonucleotide
guagacaggggcacugcgg

SEQ ID NO: 2817426 - RNA, 19 nt, Artificial Sequence
  Description of Artificial Sequence: Synthetic oligonucleotide
uagguauguagugucuacu

SEQ ID NO: 2817427 - RNA, 19 nt, Artificial Sequence
  Description of Artificial Sequence: Synthetic oligonucleotide
aaaauaguuucugccucua

SEQ ID NO: 2817428 - RNA, 19 nt, Artificial Sequence
  Description of Artificial Sequence: Synthetic oligonucleotide
acaggcaguaggccucagg

SEQ ID NO: 2817429 - RNA, 19 nt, Artificial Sequence
  Description of Artificial Sequence: Synthetic oligonucleotide
accucgggaagcgagcagg

SEQ ID NO: 2817430 - RNA, 19 nt, Artificial Sequence
  Description of Artificial Sequence: Synthetic oligonucleotide
uguucggcguagacugagc

SEQ ID NO: 2817431 - RNA, 19 nt, Artificial Sequence
  Description of Artificial Sequence: Synthetic oligonucleotide
acagggcacaauaucaccu

SEQ ID NO: 2817432 - RNA, 19 nt, Artificial Sequence
  Description of Artificial Sequence: Synthetic oligonucleotide
accuaaaaguucaucugca

SEQ ID NO: 2817433 - RNA, 19 nt, Artificial Sequence
  Description of Artificial Sequence: Synthetic oligonucleotide
uuucugccucuauucaaaa

SEQ ID NO: 2817434 - RNA, 19 nt, Artificial Sequence
  Description of Artificial Sequence: Synthetic oligonucleotide
guuuauaauucgcuuguau

SEQ ID NO: 2817435 - RNA, 19 nt, Artificial Sequence
  Description of Artificial Sequence: Synthetic oligonucleotide
aagaauccuauuagaggaa

SEQ ID NO: 2817436 - RNA, 19 nt, Artificial Sequence
  Description of Artificial Sequence: Synthetic oligonucleotide
agaauccuauuagaggaaa

SEQ ID NO: 2817437 - RNA, 19 nt, Artificial Sequence
  Description of Artificial Sequence: Synthetic oligonucleotide
ugcacaccacaauuacggu

SEQ ID NO: 2817438 - RNA, 19 nt, Artificial Sequence
  Description of Artificial Sequence: Synthetic oligonucleotide
agcacuaccgcaggggagu

SEQ ID NO: 2817439 - RNA, 19 nt, Artificial Sequence
  Description of Artificial Sequence: Synthetic oligonucleotide
cuugagcuaaauuacuaau

SEQ ID NO: 2817440 - RNA, 19 nt, Artificial Sequence
  Description of Artificial Sequence: Synthetic oligonucleotide
uccucaccgaagagcccgg

SEQ ID NO: 2817441 - RNA, 19 nt, Artificial Sequence
  Description of Artificial Sequence: Synthetic oligonucleotide
uggugacauaauguucggc

SEQ ID NO: 2817442 - RNA, 19 nt, Artificial Sequence
  Description of Artificial Sequence: Synthetic oligonucleotide
ggcacaauaucaccuaaaa

SEQ ID NO: 2817443 - RNA, 19 nt, Artificial Sequence
  Description of Artificial Sequence: Synthetic oligonucleotide
ggaaagcggauguuuauaa

SEQ ID NO: 2817444 - RNA, 19 nt, Artificial Sequence
  Description of Artificial Sequence: Synthetic oligonucleotide
uucugccucuauucaaaau

SEQ ID NO: 2817445 - RNA, 19 nt, Artificial Sequence
  Description of Artificial Sequence: Synthetic oligonucleotide
gaguuggcgcuguccgagg

SEQ ID NO: 2817446 - RNA, 19 nt, Artificial Sequence
  Description of Artificial Sequence: Synthetic oligonucleotide
acuaccgcaggggaguaga

SEQ ID NO: 2817447 - RNA, 19 nt, Artificial Sequence
  Description of Artificial Sequence: Synthetic oligonucleotide
cacaauuacgguggaaaga

SEQ ID NO: 2817448 - RNA, 19 nt, Artificial Sequence
  Description of Artificial Sequence: Synthetic oligonucleotide
ccuaaaaguucaucugcac

SEQ ID NO: 2817449 - RNA, 19 nt, Artificial Sequence
  Description of Artificial Sequence: Synthetic oligonucleotide
auguucggcguagacugag

SEQ ID NO: 2817450 - RNA, 19 nt, Artificial Sequence
  Description of Artificial Sequence: Synthetic oligonucleotide
ggcucgggcacgcaggugc

SEQ ID NO: 2817451 - RNA, 19 nt, Artificial Sequence
  Description of Artificial Sequence: Synthetic oligonucleotide
uguuuauaauucgcuugua

SEQ ID NO: 2817452 - RNA, 19 nt, Artificial Sequence
  Description of Artificial Sequence: Synthetic oligonucleotide
ggugcagcccaccggaaug

SEQ ID NO: 2817453 - RNA, 19 nt, Artificial Sequence
  Description of Artificial Sequence: Synthetic oligonucleotide
aacagugggcaggcuuguc

SEQ ID NO: 2817454 - RNA, 19 nt, Artificial Sequence
  Description of Artificial Sequence: Synthetic oligonucleotide
agccuuagguauguagugu

SEQ ID NO: 2817455 - RNA, 19 nt, Artificial Sequence
  Description of Artificial Sequence: Synthetic oligonucleotide
cagcccaccggaaugguga

SEQ ID NO: 2817456 - RNA, 19 nt, Artificial Sequence
  Description of Artificial Sequence: Synthetic oligonucleotide
ccacaauuacgguggaaag

SEQ ID NO: 2817457 - RNA, 19 nt, Artificial Sequence
  Description of Artificial Sequence: Synthetic oligonucleotide
uguccaugcuggaguuggc

SEQ ID NO: 2817458 - RNA, 19 nt, Artificial Sequence
  Description of Artificial Sequence: Synthetic oligonucleotide
aaacagugggcaggcuugu

SEQ ID NO: 2817459 - RNA, 19 nt, Artificial Sequence
  Description of Artificial Sequence: Synthetic oligonucleotide
agcccaccggaauggugac

SEQ ID NO: 2817460 - RNA, 19 nt, Artificial Sequence
  Description of Artificial Sequence: Synthetic oligonucleotide
acgcaggugcagcccaccg

SEQ ID NO: 2817461 - RNA, 19 nt, Artificial Sequence
  Description of Artificial Sequence: Synthetic oligonucleotide
aggggcacugcggaagcgg

SEQ ID NO: 2817462 - RNA, 19 nt, Artificial Sequence
  Description of Artificial Sequence: Synthetic oligonucleotide
gcagggucguacgaaaucc

SEQ ID NO: 2817463 - RNA, 19 nt, Artificial Sequence
  Description of Artificial Sequence: Synthetic oligonucleotide
uaccucgggaagcgagcag

SEQ ID NO: 2817464 - RNA, 19 nt, Artificial Sequence
  Description of Artificial Sequence: Synthetic oligonucleotide
gcuugagcuaaauuacuaa

SEQ ID NO: 2817465 - RNA, 19 nt, Artificial Sequence
  Description of Artificial Sequence: Synthetic oligonucleotide
guccuccucaccgaagagc

SEQ ID NO: 2817466 - RNA, 19 nt, Artificial Sequence
  Description of Artificial Sequence: Synthetic oligonucleotide
uaacaugcuugagcuaaau

SEQ ID NO: 2817467 - RNA, 19 nt, Artificial Sequence
  Description of Artificial Sequence: Synthetic oligonucleotide
gugacauaauguucggcgu

SEQ ID NO: 2817468 - RNA, 19 nt, Artificial Sequence
  Description of Artificial Sequence: Synthetic oligonucleotide
agggcacaauaucaccuaa

SEQ ID NO: 2817469 - RNA, 19 nt, Artificial Sequence
  Description of Artificial Sequence: Synthetic oligonucleotide
gaguagacaggggcacugc

SEQ ID NO: 2817470 - RNA, 19 nt, Artificial Sequence
  Description of Artificial Sequence: Synthetic oligonucleotide
augcuugagcuaaauuacu

SEQ ID NO: 2817471 - RNA, 19 nt, Artificial Sequence
  Description of Artificial Sequence: Synthetic oligonucleotide
uuggcgcuguccgaggccu

SEQ ID NO: 2817472 - RNA, 19 nt, Artificial Sequence
  Description of Artificial Sequence: Synthetic oligonucleotide
agaggaaagcggauguuua

SEQ ID NO: 2817473 - RNA, 19 nt, Artificial Sequence
  Description of Artificial Sequence: Synthetic oligonucleotide
uuagaggaaagcggauguu

SEQ ID NO: 2817474 - RNA, 19 nt, Artificial Sequence
  Description of Artificial Sequence: Synthetic oligonucleotide
agguaccucgggaagcgag

SEQ ID NO: 2817475 - RNA, 19 nt, Artificial Sequence
  Description of Artificial Sequence: Synthetic oligonucleotide
gaaagcggauguuuauaau

SEQ ID NO: 2817476 - RNA, 19 nt, Artificial Sequence
  Description of Artificial Sequence: Synthetic oligonucleotide
uggaguuggcgcuguccga

SEQ ID NO: 2817477 - RNA, 19 nt, Artificial Sequence
  Description of Artificial Sequence: Synthetic oligonucleotide
guuggcgcuguccgaggcc

SEQ ID NO: 2817478 - RNA, 19 nt, Artificial Sequence
  Description of Artificial Sequence: Synthetic oligonucleotide
caccgaagagcccggucag

SEQ ID NO: 2817479 - RNA, 19 nt, Artificial Sequence
  Description of Artificial Sequence: Synthetic oligonucleotide
uccgaggccuugucgggcu

SEQ ID NO: 2817480 - RNA, 19 nt, Artificial Sequence
  Description of Artificial Sequence: Synthetic oligonucleotide
aauguucggcguagacuga

SEQ ID NO: 2817481 - RNA, 19 nt, Artificial Sequence
  Description of Artificial Sequence: Synthetic oligonucleotide
cgcuuguaugucaaggaag

SEQ ID NO: 2817482 - RNA, 19 nt, Artificial Sequence
  Description of Artificial Sequence: Synthetic oligonucleotide
ggaguuggcgcuguccgag

SEQ ID NO: 2817483 - RNA, 19 nt, Artificial Sequence
  Description of Artificial Sequence: Synthetic oligonucleotide
gcggauguuuauaauucgc

SEQ ID NO: 2817484 - RNA, 19 nt, Artificial Sequence
  Description of Artificial Sequence: Synthetic oligonucleotide
auguagugucuacucugaa

SEQ ID NO: 2817485 - RNA, 19 nt, Artificial Sequence
  Description of Artificial Sequence: Synthetic oligonucleotide
cagcacuaccgcaggggag

SEQ ID NO: 2817486 - RNA, 19 nt, Artificial Sequence
  Description of Artificial Sequence: Synthetic oligonucleotide
gcuguccgaggccuugucg

SEQ ID NO: 2817487 - RNA, 19 nt, Artificial Sequence
  Description of Artificial Sequence: Synthetic oligonucleotide
caucugcacaccacaauua

SEQ ID NO: 2817488 - RNA, 19 nt, Artificial Sequence
  Description of Artificial Sequence: Synthetic oligonucleotide
gccuuagguauguaguguc

SEQ ID NO: 2817489 - RNA, 19 nt, Artificial Sequence
  Description of Artificial Sequence: Synthetic oligonucleotide
agcuuauguagcuguccuu

SEQ ID NO: 2817490 - RNA, 19 nt, Artificial Sequence
  Description of Artificial Sequence: Synthetic oligonucleotide
gugcagcccaccggaaugg

SEQ ID NO: 2817491 - RNA, 19 nt, Artificial Sequence
  Description of Artificial Sequence: Synthetic oligonucleotide
uaccgcaggggaguagaca

SEQ ID NO: 2817492 - RNA, 19 nt, Artificial Sequence
  Description of Artificial Sequence: Synthetic oligonucleotide
gcuguccuuuaagaaacag

SEQ ID NO: 2817493 - RNA, 19 nt, Artificial Sequence
  Description of Artificial Sequence: Synthetic oligonucleotide
ccggaauggugacauaaug

SEQ ID NO: 2817494 - RNA, 19 nt, Artificial Sequence
  Description of Artificial Sequence: Synthetic oligonucleotide
gcagguaccucgggaagcg

SEQ ID NO: 2817495 - RNA, 19 nt, Artificial Sequence
  Description of Artificial Sequence: Synthetic oligonucleotide
aggggaguagacaggggca

SEQ ID NO: 2817496 - RNA, 19 nt, Artificial Sequence
  Description of Artificial Sequence: Synthetic oligonucleotide
gguauguagugucuacucu

SEQ ID NO: 2817497 - RNA, 19 nt, Artificial Sequence
  Description of Artificial Sequence: Synthetic oligonucleotide
guagacugagcggccccgg

SEQ ID NO: 2817498 - RNA, 19 nt, Artificial Sequence
  Description of Artificial Sequence: Synthetic oligonucleotide
aagaaacagugggcaggcu

SEQ ID NO: 2817499 - RNA, 19 nt, Artificial Sequence
  Description of Artificial Sequence: Synthetic oligonucleotide
cuuauguagcuguccuuua

SEQ ID NO: 2817500 - RNA, 19 nt, Artificial Sequence
  Description of Artificial Sequence: Synthetic oligonucleotide
acgguggaaagaauccuau

SEQ ID NO: 2817501 - RNA, 19 nt, Artificial Sequence
  Description of Artificial Sequence: Synthetic oligonucleotide
cuugucgggcucgggcacg

SEQ ID NO: 2817502 - RNA, 19 nt, Artificial Sequence
  Description of Artificial Sequence: Synthetic oligonucleotide
agcgagcagggucguacga

SEQ ID NO: 2817503 - RNA, 19 nt, Artificial Sequence
  Description of Artificial Sequence: Synthetic oligonucleotide
gucgggcucgggcacgcag

SEQ ID NO: 2817504 - RNA, 19 nt, Artificial Sequence
  Description of Artificial Sequence: Synthetic oligonucleotide
acauaauguucggcguaga

SEQ ID NO: 2817505 - RNA, 19 nt, Artificial Sequence
  Description of Artificial Sequence: Synthetic oligonucleotide
ggaguagacaggggcacug

SEQ ID NO: 2817506 - RNA, 19 nt, Artificial Sequence
  Description of Artificial Sequence: Synthetic oligonucleotide
ggcacugcggaagcggaag

SEQ ID NO: 2817507 - RNA, 19 nt, Artificial Sequence
  Description of Artificial Sequence: Synthetic oligonucleotide
ggcgcagcacuaccgcagg

SEQ ID NO: 2817508 - RNA, 19 nt, Artificial Sequence
  Description of Artificial Sequence: Synthetic oligonucleotide
ggauguuuauaauucgcuu

SEQ ID NO: 2817509 - RNA, 19 nt, Artificial Sequence
  Description of Artificial Sequence: Synthetic oligonucleotide
gcaggugcagcccaccgga

SEQ ID NO: 2817510 - RNA, 19 nt, Artificial Sequence
  Description of Artificial Sequence: Synthetic oligonucleotide
aggugcagcccaccggaau

SEQ ID NO: 2817511 - RNA, 19 nt, Artificial Sequence
  Description of Artificial Sequence: Synthetic oligonucleotide
cucaccgaagagcccgguc

SEQ ID NO: 2817512 - RNA, 19 nt, Artificial Sequence
  Description of Artificial Sequence: Synthetic oligonucleotide
accgaagagcccggucagg

SEQ ID NO: 2817513 - RNA, 19 nt, Artificial Sequence
  Description of Artificial Sequence: Synthetic oligonucleotide
gguaccucgggaagcgagc

SEQ ID NO: 2817514 - RNA, 19 nt, Artificial Sequence
  Description of Artificial Sequence: Synthetic oligonucleotide
caccggaauggugacauaa

SEQ ID NO: 2817515 - RNA, 19 nt, Artificial Sequence
  Description of Artificial Sequence: Synthetic oligonucleotide
guucaucugcacaccacaa

SEQ ID NO: 2817516 - RNA, 19 nt, Artificial Sequence
  Description of Artificial Sequence: Synthetic oligonucleotide
gaggccuugucgggcucgg

SEQ ID NO: 2817517 - RNA, 19 nt, Artificial Sequence
  Description of Artificial Sequence: Synthetic oligonucleotide
auaacaugcuugagcuaaa

SEQ ID NO: 2817518 - RNA, 19 nt, Artificial Sequence
  Description of Artificial Sequence: Synthetic oligonucleotide
aaauagccuuagguaugua

SEQ ID NO: 2817519 - RNA, 19 nt, Artificial Sequence
  Description of Artificial Sequence: Synthetic oligonucleotide
auaucaccuaaaaguucau

SEQ ID NO: 2817520 - RNA, 19 nt, Artificial Sequence
  Description of Artificial Sequence: Synthetic oligonucleotide
cuauuagaggaaagcggau

SEQ ID NO: 2817521 - RNA, 19 nt, Artificial Sequence
  Description of Artificial Sequence: Synthetic oligonucleotide
cagggcacaauaucaccua

SEQ ID NO: 2817522 - RNA, 19 nt, Artificial Sequence
  Description of Artificial Sequence: Synthetic oligonucleotide
gugcggcgcagcacuaccg

SEQ ID NO: 2817523 - RNA, 19 nt, Artificial Sequence
  Description of Artificial Sequence: Synthetic oligonucleotide
guaccucgggaagcgagca

SEQ ID NO: 2817524 - RNA, 19 nt, Artificial Sequence
  Description of Artificial Sequence: Synthetic oligonucleotide
gcagcacuaccgcagggga

SEQ ID NO: 2817525 - RNA, 19 nt, Artificial Sequence
  Description of Artificial Sequence: Synthetic oligonucleotide
accggaauggugacauaau

SEQ ID NO: 2817526 - RNA, 19 nt, Artificial Sequence
  Description of Artificial Sequence: Synthetic oligonucleotide
gugggcaggcuuguccaug

SEQ ID NO: 2817527 - RNA, 19 nt, Artificial Sequence
  Description of Artificial Sequence: Synthetic oligonucleotide
ccucaggcagguaccucgg

SEQ ID NO: 2817528 - RNA, 19 nt, Artificial Sequence
  Description of Artificial Sequence: Synthetic oligonucleotide
cacugcggaagcggaaguc

SEQ ID NO: 2817529 - RNA, 19 nt, Artificial Sequence
  Description of Artificial Sequence: Synthetic oligonucleotide
uugucgggcucgggcacgc

SEQ ID NO: 2817530 - RNA, 19 nt, Artificial Sequence
  Description of Artificial Sequence: Synthetic oligonucleotide
agacaggggcacugcggaa

SEQ ID NO: 2817531 - RNA, 19 nt, Artificial Sequence
  Description of Artificial Sequence: Synthetic oligonucleotide
ggggaguagacaggggcac

SEQ ID NO: 2817532 - RNA, 19 nt, Artificial Sequence
  Description of Artificial Sequence: Synthetic oligonucleotide
ccgaagagcccggucaggc

SEQ ID NO: 2817533 - RNA, 19 nt, Artificial Sequence
  Description of Artificial Sequence: Synthetic oligonucleotide
agcuguccuuuaagaaaca

SEQ ID NO: 2817534 - RNA, 19 nt, Artificial Sequence
  Description of Artificial Sequence: Synthetic oligonucleotide
guccgaggccuugucgggc

SEQ ID NO: 2817535 - RNA, 19 nt, Artificial Sequence
  Description of Artificial Sequence: Synthetic oligonucleotide
acucagagacagggcacaa

SEQ ID NO: 2817536 - RNA, 19 nt, Artificial Sequence
  Description of Artificial Sequence: Synthetic oligonucleotide
caggcuuguccaugcugga

SEQ ID NO: 2817537 - RNA, 19 nt, Artificial Sequence
  Description of Artificial Sequence: Synthetic oligonucleotide
gcguagacugagcggcccc

SEQ ID NO: 2817538 - RNA, 19 nt, Artificial Sequence
  Description of Artificial Sequence: Synthetic oligonucleotide
cgcggcacaggcaguaggc

SEQ ID NO: 2817539 - RNA, 19 nt, Artificial Sequence
  Description of Artificial Sequence: Synthetic oligonucleotide
cagagacagggcacaauau

SEQ ID NO: 2817540 - RNA, 19 nt, Artificial Sequence
  Description of Artificial Sequence: Synthetic oligonucleotide
ggcguagacugagcggccc

SEQ ID NO: 2817541 - RNA, 19 nt, Artificial Sequence
  Description of Artificial Sequence: Synthetic oligonucleotide
gcuuauguagcuguccuuu

SEQ ID NO: 2817542 - RNA, 19 nt, Artificial Sequence
  Description of Artificial Sequence: Synthetic oligonucleotide
ggcacgcaggugcagccca

SEQ ID NO: 2817543 - RNA, 19 nt, Artificial Sequence
  Description of Artificial Sequence: Synthetic oligonucleotide
caggggcacugcggaagcg

SEQ ID NO: 2817544 - RNA, 19 nt, Artificial Sequence
  Description of Artificial Sequence: Synthetic oligonucleotide
guaugucaaggaaguuuua

SEQ ID NO: 2817545 - RNA, 19 nt, Artificial Sequence
  Description of Artificial Sequence: Synthetic oligonucleotide
ugcuggaguuggcgcuguc

SEQ ID NO: 2817546 - RNA, 19 nt, Artificial Sequence
  Description of Artificial Sequence: Synthetic oligonucleotide
cacuaccgcaggggaguag

SEQ ID NO: 2817547 - RNA, 19 nt, Artificial Sequence
  Description of Artificial Sequence: Synthetic oligonucleotide
cugcggaagcggaaguccu

SEQ ID NO: 2817548 - RNA, 19 nt, Artificial Sequence
  Description of Artificial Sequence: Synthetic oligonucleotide
cggaauggugacauaaugu

SEQ ID NO: 2817549 - RNA, 19 nt, Artificial Sequence
  Description of Artificial Sequence: Synthetic oligonucleotide
caauuacgguggaaagaau

SEQ ID NO: 2817550 - RNA, 19 nt, Artificial Sequence
  Description of Artificial Sequence: Synthetic oligonucleotide
ggucaggcagccgcggcac

SEQ ID NO: 2817551 - RNA, 19 nt, Artificial Sequence
  Description of Artificial Sequence: Synthetic oligonucleotide
cgcagcacuaccgcagggg

SEQ ID NO: 2817552 - RNA, 19 nt, Artificial Sequence
  Description of Artificial Sequence: Synthetic oligonucleotide
cggauguuuauaauucgcu

SEQ ID NO: 2817553 - RNA, 19 nt, Artificial Sequence
  Description of Artificial Sequence: Synthetic oligonucleotide
ccuugucgggcucgggcac

SEQ ID NO: 2817554 - RNA, 19 nt, Artificial Sequence
  Description of Artificial Sequence: Synthetic oligonucleotide
gcgcagcacuaccgcaggg

SEQ ID NO: 2817555 - RNA, 19 nt, Artificial Sequence
  Description of Artificial Sequence: Synthetic oligonucleotide
cguagacugagcggccccg

SEQ ID NO: 2817556 - RNA, 19 nt, Artificial Sequence
  Description of Artificial Sequence: Synthetic oligonucleotide
gcggcacaggcaguaggcc

SEQ ID NO: 2817557 - RNA, 19 nt, Artificial Sequence
  Description of Artificial Sequence: Synthetic oligonucleotide
gggcacaauaucaccuaaa

SEQ ID NO: 2817558 - RNA, 19 nt, Artificial Sequence
  Description of Artificial Sequence: Synthetic oligonucleotide
cgcaggugcagcccaccgg

SEQ ID NO: 2817559 - RNA, 19 nt, Artificial Sequence
  Description of Artificial Sequence: Synthetic oligonucleotide
cgugcggcgcagcacuacc

SEQ ID NO: 2817560 - RNA, 19 nt, Artificial Sequence
  Description of Artificial Sequence: Synthetic oligonucleotide
cucgggcacgcaggugcag

SEQ ID NO: 2817561 - RNA, 19 nt, Artificial Sequence
  Description of Artificial Sequence: Synthetic oligonucleotide
ccuccucaccgaagagccc

SEQ ID NO: 2817562 - RNA, 19 nt, Artificial Sequence
  Description of Artificial Sequence: Synthetic oligonucleotide
gagcccggucaggcagccg

SEQ ID NO: 2817563 - RNA, 19 nt, Artificial Sequence
  Description of Artificial Sequence: Synthetic oligonucleotide
cggcgcagcacuaccgcag

SEQ ID NO: 2817564 - RNA, 19 nt, Artificial Sequence
  Description of Artificial Sequence: Synthetic oligonucleotide
gcagcccaccggaauggug

SEQ ID NO: 2817565 - RNA, 19 nt, Artificial Sequence
  Description of Artificial Sequence: Synthetic oligonucleotide
agccgcggcacaggcagua

SEQ ID NO: 2817566 - RNA, 19 nt, Artificial Sequence
  Description of Artificial Sequence: Synthetic oligonucleotide
ggcgcuguccgaggccuug

SEQ ID NO: 2817567 - RNA, 19 nt, Artificial Sequence
  Description of Artificial Sequence: Synthetic oligonucleotide
caggccgccgugcggcgca

SEQ ID NO: 2817568 - RNA, 19 nt, Artificial Sequence
  Description of Artificial Sequence: Synthetic oligonucleotide
cacaggcaguaggccucag

SEQ ID NO: 2817569 - RNA, 19 nt, Artificial Sequence
  Description of Artificial Sequence: Synthetic oligonucleotide
ugucgggcucgggcacgca

SEQ ID NO: 2817570 - RNA, 19 nt, Artificial Sequence
  Description of Artificial Sequence: Synthetic oligonucleotide
caccacaauuacgguggaa

SEQ ID NO: 2817571 - RNA, 19 nt, Artificial Sequence
  Description of Artificial Sequence: Synthetic oligonucleotide
cgggcacgcaggugcagcc

SEQ ID NO: 2817572 - RNA, 19 nt, Artificial Sequence
  Description of Artificial Sequence: Synthetic oligonucleotide
gggcacgcaggugcagccc

SEQ ID NO: 2817573 - RNA, 19 nt, Artificial Sequence
  Description of Artificial Sequence: Synthetic oligonucleotide
gcggcgcagcacuaccgca

SEQ ID NO: 2817574 - RNA, 19 nt, Artificial Sequence
  Description of Artificial Sequence: Synthetic oligonucleotide
caggugcagcccaccggaa

SEQ ID NO: 2817575 - RNA, 19 nt, Artificial Sequence
  Description of Artificial Sequence: Synthetic oligonucleotide
gcgagcagggucguacgaa

SEQ ID NO: 2817576 - RNA, 19 nt, Artificial Sequence
  Description of Artificial Sequence: Synthetic oligonucleotide
ccggucaggcagccgcggc

SEQ ID NO: 2817577 - RNA, 19 nt, Artificial Sequence
  Description of Artificial Sequence: Synthetic oligonucleotide
uggcgcuguccgaggccuu

SEQ ID NO: 2817578 - RNA, 19 nt, Artificial Sequence
  Description of Artificial Sequence: Synthetic oligonucleotide
cgagcagggucguacgaaa

SEQ ID NO: 2817579 - RNA, 19 nt, Artificial Sequence
  Description of Artificial Sequence: Synthetic oligonucleotide
cagguaccucgggaagcga

SEQ ID NO: 2817580 - RNA, 19 nt, Artificial Sequence
  Description of Artificial Sequence: Synthetic oligonucleotide
gcccggucaggcagccgcg

SEQ ID NO: 2817581 - RNA, 19 nt, Artificial Sequence
  Description of Artificial Sequence: Synthetic oligonucleotide
cgaggccuugucgggcucg

SEQ ID NO: 2817582 - RNA, 19 nt, Artificial Sequence
  Description of Artificial Sequence: Synthetic oligonucleotide
gcacaggcaguaggccuca

SEQ ID NO: 2817583 - RNA, 19 nt, Artificial Sequence
  Description of Artificial Sequence: Synthetic oligonucleotide
cggcguagacugagcggcc

SEQ ID NO: 2817584 - RNA, 19 nt, Artificial Sequence
  Description of Artificial Sequence: Synthetic oligonucleotide
gcacugcggaagcggaagu

SEQ ID NO: 2817585 - RNA, 19 nt, Artificial Sequence
  Description of Artificial Sequence: Synthetic oligonucleotide
cccggucaggcagccgcgg

SEQ ID NO: 2817586 - RNA, 19 nt, Artificial Sequence
  Description of Artificial Sequence: Synthetic oligonucleotide
gccgcggcacaggcaguag

SEQ ID NO: 2817587 - RNA, 19 nt, Artificial Sequence
  Description of Artificial Sequence: Synthetic oligonucleotide
cucgggaagcgagcagggu

SEQ ID NO: 2817588 - RNA, 19 nt, Artificial Sequence
  Description of Artificial Sequence: Synthetic oligonucleotide
cccaccggaauggugacau

SEQ ID NO: 2817589 - RNA, 19 nt, Artificial Sequence
  Description of Artificial Sequence: Synthetic oligonucleotide
gggaguagacaggggcacu

SEQ ID NO: 2817590 - RNA, 19 nt, Artificial Sequence
  Description of Artificial Sequence: Synthetic oligonucleotide
gcacgcaggugcagcccac

SEQ ID NO: 2817591 - RNA, 19 nt, Artificial Sequence
  Description of Artificial Sequence: Synthetic oligonucleotide
gcucgggcacgcaggugca

SEQ ID NO: 2817592 - RNA, 19 nt, Artificial Sequence
  Description of Artificial Sequence: Synthetic oligonucleotide
aggccgccgugcggcgcag

SEQ ID NO: 2817593 - RNA, 19 nt, Artificial Sequence
  Description of Artificial Sequence: Synthetic oligonucleotide
gggcacugcggaagcggaa

SEQ ID NO: 2817594 - RNA, 19 nt, Artificial Sequence
  Description of Artificial Sequence: Synthetic oligonucleotide
cggucaggcagccgcggca

SEQ ID NO: 2817595 - RNA, 19 nt, Artificial Sequence
  Description of Artificial Sequence: Synthetic oligonucleotide
gggcucgggcacgcaggug

SEQ ID NO: 2817596 - RNA, 19 nt, Artificial Sequence
  Description of Artificial Sequence: Synthetic oligonucleotide
ccgugcggcgcagcacuac

SEQ ID NO: 2817597 - RNA, 19 nt, Artificial Sequence
  Description of Artificial Sequence: Synthetic oligonucleotide
cggcacaggcaguaggccu

SEQ ID NO: 2817598 - RNA, 19 nt, Artificial Sequence
  Description of Artificial Sequence: Synthetic oligonucleotide
ggaagcgagcagggucgua

SEQ ID NO: 2817599 - RNA, 19 nt, Artificial Sequence
  Description of Artificial Sequence: Synthetic oligonucleotide
ccgaggccuugucgggcuc

SEQ ID NO: 2817600 - RNA, 19 nt, Artificial Sequence
  Description of Artificial Sequence: Synthetic oligonucleotide
gcccaccggaauggugaca

SEQ ID NO: 2817601 - RNA, 19 nt, Artificial Sequence
  Description of Artificial Sequence: Synthetic oligonucleotide
cgcuguccgaggccuuguc

SEQ ID NO: 2817602 - RNA, 19 nt, Artificial Sequence
  Description of Artificial Sequence: Synthetic oligonucleotide
gcacuaccgcaggggagua

SEQ ID NO: 2817603 - RNA, 19 nt, Artificial Sequence
  Description of Artificial Sequence: Synthetic oligonucleotide
gggaagcgagcagggucgu

SEQ ID NO: 2817604 - RNA, 19 nt, Artificial Sequence
  Description of Artificial Sequence: Synthetic oligonucleotide
ccgccgugcggcgcagcac

SEQ ID NO: 2817605 - RNA, 19 nt, Artificial Sequence
  Description of Artificial Sequence: Synthetic oligonucleotide
cagccgcggcacaggcagu

SEQ ID NO: 2817606 - RNA, 19 nt, Artificial Sequence
  Description of Artificial Sequence: Synthetic oligonucleotide
cgccgugcggcgcagcacu

SEQ ID NO: 2817607 - RNA, 19 nt, Artificial Sequence
  Description of Artificial Sequence: Synthetic oligonucleotide
cgguggaaagaauccuauu

SEQ ID NO: 2817608 - RNA, 19 nt, Artificial Sequence
  Description of Artificial Sequence: Synthetic oligonucleotide
ccaccggaauggugacaua

SEQ ID NO: 2817609 - RNA, 19 nt, Artificial Sequence
  Description of Artificial Sequence: Synthetic oligonucleotide
gcgcuguccgaggccuugu

SEQ ID NO: 2817610 - RNA, 19 nt, Artificial Sequence
  Description of Artificial Sequence: Synthetic oligonucleotide
gccgugcggcgcagcacua

SEQ ID NO: 2817611 - RNA, 19 nt, Artificial Sequence
  Description of Artificial Sequence: Synthetic oligonucleotide
cgggcucgggcacgcaggu

SEQ ID NO: 2817612 - RNA, 19 nt, Artificial Sequence
  Description of Artificial Sequence: Synthetic oligonucleotide
ccucaccgaagagcccggu

SEQ ID NO: 2817613 - RNA, 19 nt, Artificial Sequence
  Description of Artificial Sequence: Synthetic oligonucleotide
ccccggcgcaggccgccgu

SEQ ID NO: 2817614 - RNA, 19 nt, Artificial Sequence
  Description of Artificial Sequence: Synthetic oligonucleotide
uuuucaacuauuaugaucc

SEQ ID NO: 2817615 - RNA, 19 nt, Artificial Sequence
  Description of Artificial Sequence: Synthetic oligonucleotide
aaguaugaagagcagacgc

SEQ ID NO: 2817616 - RNA, 19 nt, Artificial Sequence
  Description of Artificial Sequence: Synthetic oligonucleotide
uuaaguaugaagagcagac

SEQ ID NO: 2817617 - RNA, 19 nt, Artificial Sequence
  Description of Artificial Sequence: Synthetic oligonucleotide
gaugcuuccaacuggcugg

SEQ ID NO: 2817618 - RNA, 19 nt, Artificial Sequence
  Description of Artificial Sequence: Synthetic oligonucleotide
cuuucuguagccauguccg

SEQ ID NO: 2817619 - RNA, 19 nt, Artificial Sequence
  Description of Artificial Sequence: Synthetic oligonucleotide
uugcucuugaaccagcugg

SEQ ID NO: 2817620 - RNA, 19 nt, Artificial Sequence
  Description of Artificial Sequence: Synthetic oligonucleotide
uauuaugaucccuugaaga

SEQ ID NO: 2817621 - RNA, 19 nt, Artificial Sequence
  Description of Artificial Sequence: Synthetic oligonucleotide
ugguuaaugaggcaggaug

SEQ ID NO: 2817622 - RNA, 19 nt, Artificial Sequence
  Description of Artificial Sequence: Synthetic oligonucleotide
uaaacuucuggacuuccgg

SEQ ID NO: 2817623 - RNA, 19 nt, Artificial Sequence
  Description of Artificial Sequence: Synthetic oligonucleotide
agucuaaaggaggagaggc

SEQ ID NO: 2817624 - RNA, 19 nt, Artificial Sequence
  Description of Artificial Sequence: Synthetic oligonucleotide
aaugaggcaggaugcuucc

SEQ ID NO: 2817625 - RNA, 19 nt, Artificial Sequence
  Description of Artificial Sequence: Synthetic oligonucleotide
ucugacacgaacaagucuc

SEQ ID NO: 2817626 - RNA, 19 nt, Artificial Sequence
  Description of Artificial Sequence: Synthetic oligonucleotide
cugguuuugcucuugaacc

SEQ ID NO: 2817627 - RNA, 19 nt, Artificial Sequence
  Description of Artificial Sequence: Synthetic oligonucleotide
acaagucucuuucuguagc

SEQ ID NO: 2817628 - RNA, 19 nt, Artificial Sequence
  Description of Artificial Sequence: Synthetic oligonucleotide
ucuuucuguagccaugucc

SEQ ID NO: 2817629 - RNA, 19 nt, Artificial Sequence
  Description of Artificial Sequence: Synthetic oligonucleotide
cuugacuuugccaaccccg

SEQ ID NO: 2817630 - RNA, 19 nt, Artificial Sequence
  Description of Artificial Sequence: Synthetic oligonucleotide
uaugaucccuugaagaugu

SEQ ID NO: 2817631 - RNA, 19 nt, Artificial Sequence
  Description of Artificial Sequence: Synthetic oligonucleotide
ugcacagucugaacaaggg

SEQ ID NO: 2817632 - RNA, 19 nt, Artificial Sequence
  Description of Artificial Sequence: Synthetic oligonucleotide
acacgaacaagucucuuuc

SEQ ID NO: 2817633 - RNA, 19 nt, Artificial Sequence
  Description of Artificial Sequence: Synthetic oligonucleotide
gugguuggcagucuaaagg

SEQ ID NO: 2817634 - RNA, 19 nt, Artificial Sequence
  Description of Artificial Sequence: Synthetic oligonucleotide
aaacuucugcagcagaagu

SEQ ID NO: 2817635 - RNA, 19 nt, Artificial Sequence
  Description of Artificial Sequence: Synthetic oligonucleotide
uuugcugugccaccgcggg

SEQ ID NO: 2817636 - RNA, 19 nt, Artificial Sequence
  Description of Artificial Sequence: Synthetic oligonucleotide
uuuuaaguaugaagagcag

SEQ ID NO: 2817637 - RNA, 19 nt, Artificial Sequence
  Description of Artificial Sequence: Synthetic oligonucleotide
acuauuaugaucccuugaa

SEQ ID NO: 2817638 - RNA, 19 nt, Artificial Sequence
  Description of Artificial Sequence: Synthetic oligonucleotide
aacaagucucuuucuguag

SEQ ID NO: 2817639 - RNA, 19 nt, Artificial Sequence
  Description of Artificial Sequence: Synthetic oligonucleotide
uggacuuccggaaaguacu

SEQ ID NO: 2817640 - RNA, 19 nt, Artificial Sequence
  Description of Artificial Sequence: Synthetic oligonucleotide
ucaacuauuaugaucccuu

SEQ ID NO: 2817641 - RNA, 19 nt, Artificial Sequence
  Description of Artificial Sequence: Synthetic oligonucleotide
auuaugaucccuugaagau

SEQ ID NO: 2817642 - RNA, 19 nt, Artificial Sequence
  Description of Artificial Sequence: Synthetic oligonucleotide
uuuaaguaugaagagcaga

SEQ ID NO: 2817643 - RNA, 19 nt, Artificial Sequence
  Description of Artificial Sequence: Synthetic oligonucleotide
aaccccggggaucugcugc

SEQ ID NO: 2817644 - RNA, 19 nt, Artificial Sequence
  Description of Artificial Sequence: Synthetic oligonucleotide
aaguacuguucacuuaucu

SEQ ID NO: 2817645 - RNA, 19 nt, Artificial Sequence
  Description of Artificial Sequence: Synthetic oligonucleotide
gaucguuggaaacuucugc

SEQ ID NO: 2817646 - RNA, 19 nt, Artificial Sequence
  Description of Artificial Sequence: Synthetic oligonucleotide
cacagucugaacaagggac

SEQ ID NO: 2817647 - RNA, 19 nt, Artificial Sequence
  Description of Artificial Sequence: Synthetic oligonucleotide
ugagguccggcgaagaagc

SEQ ID NO: 2817648 - RNA, 19 nt, Artificial Sequence
  Description of Artificial Sequence: Synthetic oligonucleotide
ucaguugcuggaucguugg

SEQ ID NO: 2817649 - RNA, 19 nt, Artificial Sequence
  Description of Artificial Sequence: Synthetic oligonucleotide
agcacaguaaacuucugga

SEQ ID NO: 2817650 - RNA, 19 nt, Artificial Sequence
  Description of Artificial Sequence: Synthetic oligonucleotide
uugacuuugccaaccccgg

SEQ ID NO: 2817651 - RNA, 19 nt, Artificial Sequence
  Description of Artificial Sequence: Synthetic oligonucleotide
aguacuguucacuuaucug

SEQ ID NO: 2817652 - RNA, 19 nt, Artificial Sequence
  Description of Artificial Sequence: Synthetic oligonucleotide
aacuauuaugaucccuuga

SEQ ID NO: 2817653 - RNA, 19 nt, Artificial Sequence
  Description of Artificial Sequence: Synthetic oligonucleotide
agaaguggagccuugacuu

SEQ ID NO: 2817654 - RNA, 19 nt, Artificial Sequence
  Description of Artificial Sequence: Synthetic oligonucleotide
ucuugaaccagcugguuaa

SEQ ID NO: 2817655 - RNA, 19 nt, Artificial Sequence
  Description of Artificial Sequence: Synthetic oligonucleotide
uaaguaugaagagcagacg

SEQ ID NO: 2817656 - RNA, 19 nt, Artificial Sequence
  Description of Artificial Sequence: Synthetic oligonucleotide
ucuaaaggaggagaggcug

SEQ ID NO: 2817657 - RNA, 19 nt, Artificial Sequence
  Description of Artificial Sequence: Synthetic oligonucleotide
gagcacaguaaacuucugg

SEQ ID NO: 2817658 - RNA, 19 nt, Artificial Sequence
  Description of Artificial Sequence: Synthetic oligonucleotide
agcaacaccaucccaaggu

SEQ ID NO: 2817659 - RNA, 19 nt, Artificial Sequence
  Description of Artificial Sequence: Synthetic oligonucleotide
ucgagcacaguaaacuucu

SEQ ID NO: 2817660 - RNA, 19 nt, Artificial Sequence
  Description of Artificial Sequence: Synthetic oligonucleotide
aaacuucuggacuuccgga

SEQ ID NO: 2817661 - RNA, 19 nt, Artificial Sequence
  Description of Artificial Sequence: Synthetic oligonucleotide
gaaccagcugguuaaugag

SEQ ID NO: 2817662 - RNA, 19 nt, Artificial Sequence
  Description of Artificial Sequence: Synthetic oligonucleotide
ugguuggcagucuaaagga

SEQ ID NO: 2817663 - RNA, 19 nt, Artificial Sequence
  Description of Artificial Sequence: Synthetic oligonucleotide
cuauuaugaucccuugaag

SEQ ID NO: 2817664 - RNA, 19 nt, Artificial Sequence
  Description of Artificial Sequence: Synthetic oligonucleotide
uaaugaggcaggaugcuuc

SEQ ID NO: 2817665 - RNA, 19 nt, Artificial Sequence
  Description of Artificial Sequence: Synthetic oligonucleotide
aaggguuccugcugggcuc

SEQ ID NO: 2817666 - RNA, 19 nt, Artificial Sequence
  Description of Artificial Sequence: Synthetic oligonucleotide
uuggcagucuaaaggagga

SEQ ID NO: 2817667 - RNA, 19 nt, Artificial Sequence
  Description of Artificial Sequence: Synthetic oligonucleotide
uuccggaaaguacuguuca

SEQ ID NO: 2817668 - RNA, 19 nt, Artificial Sequence
  Description of Artificial Sequence: Synthetic oligonucleotide
gaagcuguggauuugcugu

SEQ ID NO: 2817669 - RNA, 19 nt, Artificial Sequence
  Description of Artificial Sequence: Synthetic oligonucleotide
uacuguucacuuaucugug

SEQ ID NO: 2817670 - RNA, 19 nt, Artificial Sequence
  Description of Artificial Sequence: Synthetic oligonucleotide
uccuccaguucuuggacgg

SEQ ID NO: 2817671 - RNA, 19 nt, Artificial Sequence
  Description of Artificial Sequence: Synthetic oligonucleotide
aucguuggaaacuucugca

SEQ ID NO: 2817672 - RNA, 19 nt, Artificial Sequence
  Description of Artificial Sequence: Synthetic oligonucleotide
aguaaacuucuggacuucc

SEQ ID NO: 2817673 - RNA, 19 nt, Artificial Sequence
  Description of Artificial Sequence: Synthetic oligonucleotide
gauuugcugugccaccgcg

SEQ ID NO: 2817674 - RNA, 19 nt, Artificial Sequence
  Description of Artificial Sequence: Synthetic oligonucleotide
cuaaaggaggagaggcugg

SEQ ID NO: 2817675 - RNA, 19 nt, Artificial Sequence
  Description of Artificial Sequence: Synthetic oligonucleotide
uugcucaguugcuggaucg

SEQ ID NO: 2817676 - RNA, 19 nt, Artificial Sequence
  Description of Artificial Sequence: Synthetic oligonucleotide
uuaugaucccuugaagaug

SEQ ID NO: 2817677 - RNA, 19 nt, Artificial Sequence
  Description of Artificial Sequence: Synthetic oligonucleotide
aggaggagaggcuggcugc

SEQ ID NO: 2817678 - RNA, 19 nt, Artificial Sequence
  Description of Artificial Sequence: Synthetic oligonucleotide
ucuguagccauguccggcc

SEQ ID NO: 2817679 - RNA, 19 nt, Artificial Sequence
  Description of Artificial Sequence: Synthetic oligonucleotide
uggaucguuggaaacuucu

SEQ ID NO: 2817680 - RNA, 19 nt, Artificial Sequence
  Description of Artificial Sequence: Synthetic oligonucleotide
accagcugguuaaugaggc

SEQ ID NO: 2817681 - RNA, 19 nt, Artificial Sequence
  Description of Artificial Sequence: Synthetic oligonucleotide
ucguuggaaacuucugcag

SEQ ID NO: 2817682 - RNA, 19 nt, Artificial Sequence
  Description of Artificial Sequence: Synthetic oligonucleotide
ugugguuggcagucuaaag

SEQ ID NO: 2817683 - RNA, 19 nt, Artificial Sequence
  Description of Artificial Sequence: Synthetic oligonucleotide
ugaagagcagacgcugugg

SEQ ID NO: 2817684 - RNA, 19 nt, Artificial Sequence
  Description of Artificial Sequence: Synthetic oligonucleotide
ucugcagcagaaguggagc

SEQ ID NO: 2817685 - RNA, 19 nt, Artificial Sequence
  Description of Artificial Sequence: Synthetic oligonucleotide
cugaacaagggacggcucg

SEQ ID NO: 2817686 - RNA, 19 nt, Artificial Sequence
  Description of Artificial Sequence: Synthetic oligonucleotide
gauguccagaguuucugac

SEQ ID NO: 2817687 - RNA, 19 nt, Artificial Sequence
  Description of Artificial Sequence: Synthetic oligonucleotide
uucugcagcagaaguggag

SEQ ID NO: 2817688 - RNA, 19 nt, Artificial Sequence
  Description of Artificial Sequence: Synthetic oligonucleotide
accgggagcaacaccaucc

SEQ ID NO: 2817689 - RNA, 19 nt, Artificial Sequence
  Description of Artificial Sequence: Synthetic oligonucleotide
aacuucuggacuuccggaa

SEQ ID NO: 2817690 - RNA, 19 nt, Artificial Sequence
  Description of Artificial Sequence: Synthetic oligonucleotide
guuggcagucuaaaggagg

SEQ ID NO: 2817691 - RNA, 19 nt, Artificial Sequence
  Description of Artificial Sequence: Synthetic oligonucleotide
gaaaguacuguucacuuau

SEQ ID NO: 2817692 - RNA, 19 nt, Artificial Sequence
  Description of Artificial Sequence: Synthetic oligonucleotide
ucuuccugaggaaaggguu

SEQ ID NO: 2817693 - RNA, 19 nt, Artificial Sequence
  Description of Artificial Sequence: Synthetic oligonucleotide
acaguaaacuucuggacuu

SEQ ID NO: 2817694 - RNA, 19 nt, Artificial Sequence
  Description of Artificial Sequence: Synthetic oligonucleotide
acgaacaagucucuuucug

SEQ ID NO: 2817695 - RNA, 19 nt, Artificial Sequence
  Description of Artificial Sequence: Synthetic oligonucleotide
aaccagcugguuaaugagg

SEQ ID NO: 2817696 - RNA, 19 nt, Artificial Sequence
  Description of Artificial Sequence: Synthetic oligonucleotide
uucugacacgaacaagucu

SEQ ID NO: 2817697 - RNA, 19 nt, Artificial Sequence
  Description of Artificial Sequence: Synthetic oligonucleotide
caagggacggcucggagag

SEQ ID NO: 2817698 - RNA, 19 nt, Artificial Sequence
  Description of Artificial Sequence: Synthetic oligonucleotide
uguggauuugcugugccac

SEQ ID NO: 2817699 - RNA, 19 nt, Artificial Sequence
  Description of Artificial Sequence: Synthetic oligonucleotide
caacaccaucccaaggucg

SEQ ID NO: 2817700 - RNA, 19 nt, Artificial Sequence
  Description of Artificial Sequence: Synthetic oligonucleotide
agagcagacgcugugguug

SEQ ID NO: 2817701 - RNA, 19 nt, Artificial Sequence
  Description of Artificial Sequence: Synthetic oligonucleotide
cagaguuucugacacgaac

SEQ ID NO: 2817702 - RNA, 19 nt, Artificial Sequence
  Description of Artificial Sequence: Synthetic oligonucleotide
agcguugcucaguugcugg

SEQ ID NO: 2817703 - RNA, 19 nt, Artificial Sequence
  Description of Artificial Sequence: Synthetic oligonucleotide
uccagaguuucugacacga

SEQ ID NO: 2817704 - RNA, 19 nt, Artificial Sequence
  Description of Artificial Sequence: Synthetic oligonucleotide
ugaggaaaggguuccugcu

SEQ ID NO: 2817705 - RNA, 19 nt, Artificial Sequence
  Description of Artificial Sequence: Synthetic oligonucleotide
uuuugcucuugaaccagcu

SEQ ID NO: 2817706 - RNA, 19 nt, Artificial Sequence
  Description of Artificial Sequence: Synthetic oligonucleotide
cugaggaaaggguuccugc

SEQ ID NO: 2817707 - RNA, 19 nt, Artificial Sequence
  Description of Artificial Sequence: Synthetic oligonucleotide
uaugaagagcagacgcugu

SEQ ID NO: 2817708 - RNA, 19 nt, Artificial Sequence
  Description of Artificial Sequence: Synthetic oligonucleotide
uggauuugcugugccaccg

SEQ ID NO: 2817709 - RNA, 19 nt, Artificial Sequence
  Description of Artificial Sequence: Synthetic oligonucleotide
ugguuuugcucuugaacca

SEQ ID NO: 2817710 - RNA, 19 nt, Artificial Sequence
  Description of Artificial Sequence: Synthetic oligonucleotide
caagucucuuucuguagcc

SEQ ID NO: 2817711 - RNA, 19 nt, Artificial Sequence
  Description of Artificial Sequence: Synthetic oligonucleotide
uuucugacacgaacaaguc

SEQ ID NO: 2817712 - RNA, 19 nt, Artificial Sequence
  Description of Artificial Sequence: Synthetic oligonucleotide
uggacggaagcguugcuca

SEQ ID NO: 2817713 - RNA, 19 nt, Artificial Sequence
  Description of Artificial Sequence: Synthetic oligonucleotide
guuggaaacuucugcagca

SEQ ID NO: 2817714 - RNA, 19 nt, Artificial Sequence
  Description of Artificial Sequence: Synthetic oligonucleotide
aacaagggacggcucggag

SEQ ID NO: 2817715 - RNA, 19 nt, Artificial Sequence
  Description of Artificial Sequence: Synthetic oligonucleotide
guacuguucacuuaucugu

SEQ ID NO: 2817716 - RNA, 19 nt, Artificial Sequence
  Description of Artificial Sequence: Synthetic oligonucleotide
uucuuccugaggaaagggu

SEQ ID NO: 2817717 - RNA, 19 nt, Artificial Sequence
  Description of Artificial Sequence: Synthetic oligonucleotide
acagucugaacaagggacg

SEQ ID NO: 2817718 - RNA, 19 nt, Artificial Sequence
  Description of Artificial Sequence: Synthetic oligonucleotide
agaguuucugacacgaaca

SEQ ID NO: 2817719 - RNA, 19 nt, Artificial Sequence
  Description of Artificial Sequence: Synthetic oligonucleotide
ugaacaagggacggcucgg

SEQ ID NO: 2817720 - RNA, 19 nt, Artificial Sequence
  Description of Artificial Sequence: Synthetic oligonucleotide
cugcacagucugaacaagg

SEQ ID NO: 2817721 - RNA, 19 nt, Artificial Sequence
  Description of Artificial Sequence: Synthetic oligonucleotide
agcgcacaccgcuucuucc

SEQ ID NO: 2817722 - RNA, 19 nt, Artificial Sequence
  Description of Artificial Sequence: Synthetic oligonucleotide
guaugaagagcagacgcug

SEQ ID NO: 2817723 - RNA, 19 nt, Artificial Sequence
  Description of Artificial Sequence: Synthetic oligonucleotide
aaaguacuguucacuuauc

SEQ ID NO: 2817724 - RNA, 19 nt, Artificial Sequence
  Description of Artificial Sequence: Synthetic oligonucleotide
gaucccuugaagaugucca

SEQ ID NO: 2817725 - RNA, 19 nt, Artificial Sequence
  Description of Artificial Sequence: Synthetic oligonucleotide
ugacuuugccaaccccggg

SEQ ID NO: 2817726 - RNA, 19 nt, Artificial Sequence
  Description of Artificial Sequence: Synthetic oligonucleotide
aaggucgagcacaguaaac

SEQ ID NO: 2817727 - RNA, 19 nt, Artificial Sequence
  Description of Artificial Sequence: Synthetic oligonucleotide
uccaguucuuggacggaag

SEQ ID NO: 2817728 - RNA, 19 nt, Artificial Sequence
  Description of Artificial Sequence: Synthetic oligonucleotide
ucggagagcgcacaccgcu

SEQ ID NO: 2817729 - RNA, 19 nt, Artificial Sequence
  Description of Artificial Sequence: Synthetic oligonucleotide
augaagagcagacgcugug

SEQ ID NO: 2817730 - RNA, 19 nt, Artificial Sequence
  Description of Artificial Sequence: Synthetic oligonucleotide
guuucugacacgaacaagu

SEQ ID NO: 2817731 - RNA, 19 nt, Artificial Sequence
  Description of Artificial Sequence: Synthetic oligonucleotide
uuucaacuauuaugauccc

SEQ ID NO: 2817732 - RNA, 19 nt, Artificial Sequence
  Description of Artificial Sequence: Synthetic oligonucleotide
aguucuuggacggaagcgu

SEQ ID NO: 2817733 - RNA, 19 nt, Artificial Sequence
  Description of Artificial Sequence: Synthetic oligonucleotide
ugaagauguccagaguuuc

SEQ ID NO: 2817734 - RNA, 19 nt, Artificial Sequence
  Description of Artificial Sequence: Synthetic oligonucleotide
ugaucccuugaagaugucc

SEQ ID NO: 2817735 - RNA, 19 nt, Artificial Sequence
  Description of Artificial Sequence: Synthetic oligonucleotide
uucaacuauuaugaucccu

SEQ ID NO: 2817736 - RNA, 19 nt, Artificial Sequence
  Description of Artificial Sequence: Synthetic oligonucleotide
uggaaacuucugcagcaga

SEQ ID NO: 2817737 - RNA, 19 nt, Artificial Sequence
  Description of Artificial Sequence: Synthetic oligonucleotide
ugcucuugaaccagcuggu

SEQ ID NO: 2817738 - RNA, 19 nt, Artificial Sequence
  Description of Artificial Sequence: Synthetic oligonucleotide
cuggacuuccggaaaguac

SEQ ID NO: 2817739 - RNA, 19 nt, Artificial Sequence
  Description of Artificial Sequence: Synthetic oligonucleotide
guaaacuucuggacuuccg

SEQ ID NO: 2817740 - RNA, 19 nt, Artificial Sequence
  Description of Artificial Sequence: Synthetic oligonucleotide
aggucgagcacaguaaacu

SEQ ID NO: 2817741 - RNA, 19 nt, Artificial Sequence
  Description of Artificial Sequence: Synthetic oligonucleotide
gaacaagucucuuucugua

SEQ ID NO: 2817742 - RNA, 19 nt, Artificial Sequence
  Description of Artificial Sequence: Synthetic oligonucleotide
ucuuggacggaagcguugc

SEQ ID NO: 2817743 - RNA, 19 nt, Artificial Sequence
  Description of Artificial Sequence: Synthetic oligonucleotide
gguuaaugaggcaggaugc

SEQ ID NO: 2817744 - RNA, 19 nt, Artificial Sequence
  Description of Artificial Sequence: Synthetic oligonucleotide
caacuauuaugaucccuug

SEQ ID NO: 2817745 - RNA, 19 nt, Artificial Sequence
  Description of Artificial Sequence: Synthetic oligonucleotide
aacaccaucccaaggucga

SEQ ID NO: 2817746 - RNA, 19 nt, Artificial Sequence
  Description of Artificial Sequence: Synthetic oligonucleotide
agucugaacaagggacggc

SEQ ID NO: 2817747 - RNA, 19 nt, Artificial Sequence
  Description of Artificial Sequence: Synthetic oligonucleotide
cuucuggacuuccggaaag

SEQ ID NO: 2817748 - RNA, 19 nt, Artificial Sequence
  Description of Artificial Sequence: Synthetic oligonucleotide
uucuuggacggaagcguug

SEQ ID NO: 2817749 - RNA, 19 nt, Artificial Sequence
  Description of Artificial Sequence: Synthetic oligonucleotide
auguccagaguuucugaca

SEQ ID NO: 2817750 - RNA, 19 nt, Artificial Sequence
  Description of Artificial Sequence: Synthetic oligonucleotide
cuucuuccugaggaaaggg

SEQ ID NO: 2817751 - RNA, 19 nt, Artificial Sequence
  Description of Artificial Sequence: Synthetic oligonucleotide
uuggaaacuucugcagcag

SEQ ID NO: 2817752 - RNA, 19 nt, Artificial Sequence
  Description of Artificial Sequence: Synthetic oligonucleotide
cucaguugcuggaucguug

SEQ ID NO: 2817753 - RNA, 19 nt, Artificial Sequence
  Description of Artificial Sequence: Synthetic oligonucleotide
uaaaggaggagaggcuggc

SEQ ID NO: 2817754 - RNA, 19 nt, Artificial Sequence
  Description of Artificial Sequence: Synthetic oligonucleotide
acaagggacggcucggaga

SEQ ID NO: 2817755 - RNA, 19 nt, Artificial Sequence
  Description of Artificial Sequence: Synthetic oligonucleotide
ucucuuucuguagccaugu

SEQ ID NO: 2817756 - RNA, 19 nt, Artificial Sequence
  Description of Artificial Sequence: Synthetic oligonucleotide
gagcaacaccaucccaagg

SEQ ID NO: 2817757 - RNA, 19 nt, Artificial Sequence
  Description of Artificial Sequence: Synthetic oligonucleotide
ggagccuugacuuugccaa

SEQ ID NO: 2817758 - RNA, 19 nt, Artificial Sequence
  Description of Artificial Sequence: Synthetic oligonucleotide
uguucacuuaucuguguuu

SEQ ID NO: 2817759 - RNA, 19 nt, Artificial Sequence
  Description of Artificial Sequence: Synthetic oligonucleotide
gagcagacgcugugguugg

SEQ ID NO: 2817760 - RNA, 19 nt, Artificial Sequence
  Description of Artificial Sequence: Synthetic oligonucleotide
aguuucugacacgaacaag

SEQ ID NO: 2817761 - RNA, 19 nt, Artificial Sequence
  Description of Artificial Sequence: Synthetic oligonucleotide
caguucuuggacggaagcg

SEQ ID NO: 2817762 - RNA, 19 nt, Artificial Sequence
  Description of Artificial Sequence: Synthetic oligonucleotide
agauguccagaguuucuga

SEQ ID NO: 2817763 - RNA, 19 nt, Artificial Sequence
  Description of Artificial Sequence: Synthetic oligonucleotide
cuuccaacuggcuggccac

SEQ ID NO: 2817764 - RNA, 19 nt, Artificial Sequence
  Description of Artificial Sequence: Synthetic oligonucleotide
gaguuucugacacgaacaa

SEQ ID NO: 2817765 - RNA, 19 nt, Artificial Sequence
  Description of Artificial Sequence: Synthetic oligonucleotide
accaucccaaggucgagca

SEQ ID NO: 2817766 - RNA, 19 nt, Artificial Sequence
  Description of Artificial Sequence: Synthetic oligonucleotide
uggagccuugacuuugcca

SEQ ID NO: 2817767 - RNA, 19 nt, Artificial Sequence
  Description of Artificial Sequence: Synthetic oligonucleotide
ugcuggaucguuggaaacu

SEQ ID NO: 2817768 - RNA, 19 nt, Artificial Sequence
  Description of Artificial Sequence: Synthetic oligonucleotide
agggacggcucggagagcg

SEQ ID NO: 2817769 - RNA, 19 nt, Artificial Sequence
  Description of Artificial Sequence: Synthetic oligonucleotide
acuguucacuuaucugugu

SEQ ID NO: 2817770 - RNA, 19 nt, Artificial Sequence
  Description of Artificial Sequence: Synthetic oligonucleotide
gcuggggucagugaggucc

SEQ ID NO: 2817771 - RNA, 19 nt, Artificial Sequence
  Description of Artificial Sequence: Synthetic oligonucleotide
agucucuuucuguagccau

SEQ ID NO: 2817772 - RNA, 19 nt, Artificial Sequence
  Description of Artificial Sequence: Synthetic oligonucleotide
gcaggaugcuuccaacugg

SEQ ID NO: 2817773 - RNA, 19 nt, Artificial Sequence
  Description of Artificial Sequence: Synthetic oligonucleotide
acuuccggaaaguacuguu

SEQ ID NO: 2817774 - RNA, 19 nt, Artificial Sequence
  Description of Artificial Sequence: Synthetic oligonucleotide
ggaugcuuccaacuggcug

SEQ ID NO: 2817775 - RNA, 19 nt, Artificial Sequence
  Description of Artificial Sequence: Synthetic oligonucleotide
ucugcugcacagucugaac

SEQ ID NO: 2817776 - RNA, 19 nt, Artificial Sequence
  Description of Artificial Sequence: Synthetic oligonucleotide
guugcuggaucguuggaaa

SEQ ID NO: 2817777 - RNA, 19 nt, Artificial Sequence
  Description of Artificial Sequence: Synthetic oligonucleotide
gcucggagagcgcacaccg

SEQ ID NO: 2817778 - RNA, 19 nt, Artificial Sequence
  Description of Artificial Sequence: Synthetic oligonucleotide
agcugguuaaugaggcagg

SEQ ID NO: 2817779 - RNA, 19 nt, Artificial Sequence
  Description of Artificial Sequence: Synthetic oligonucleotide
cagucuaaaggaggagagg

SEQ ID NO: 2817780 - RNA, 19 nt, Artificial Sequence
  Description of Artificial Sequence: Synthetic oligonucleotide
ucugaacaagggacggcuc

SEQ ID NO: 2817781 - RNA, 19 nt, Artificial Sequence
  Description of Artificial Sequence: Synthetic oligonucleotide
agcuguggauuugcugugc

SEQ ID NO: 2817782 - RNA, 19 nt, Artificial Sequence
  Description of Artificial Sequence: Synthetic oligonucleotide
caacuggcuggccaccggg

SEQ ID NO: 2817783 - RNA, 19 nt, Artificial Sequence
  Description of Artificial Sequence: Synthetic oligonucleotide
cacaguaaacuucuggacu

SEQ ID NO: 2817784 - RNA, 19 nt, Artificial Sequence
  Description of Artificial Sequence: Synthetic oligonucleotide
acuucuggacuuccggaaa

SEQ ID NO: 2817785 - RNA, 19 nt, Artificial Sequence
  Description of Artificial Sequence: Synthetic oligonucleotide
uccggaaaguacuguucac

SEQ ID NO: 2817786 - RNA, 19 nt, Artificial Sequence
  Description of Artificial Sequence: Synthetic oligonucleotide
uuaaugaggcaggaugcuu

SEQ ID NO: 2817787 - RNA, 19 nt, Artificial Sequence
  Description of Artificial Sequence: Synthetic oligonucleotide
aagcguugcucaguugcug

SEQ ID NO: 2817788 - RNA, 19 nt, Artificial Sequence
  Description of Artificial Sequence: Synthetic oligonucleotide
ggagcaacaccaucccaag

SEQ ID NO: 2817789 - RNA, 19 nt, Artificial Sequence
  Description of Artificial Sequence: Synthetic oligonucleotide
ccugguuuugcucuugaac

SEQ ID NO: 2817790 - RNA, 19 nt, Artificial Sequence
  Description of Artificial Sequence: Synthetic oligonucleotide
gugagguccggcgaagaag

SEQ ID NO: 2817791 - RNA, 19 nt, Artificial Sequence
  Description of Artificial Sequence: Synthetic oligonucleotide
gaggcaggaugcuuccaac

SEQ ID NO: 2817792 - RNA, 19 nt, Artificial Sequence
  Description of Artificial Sequence: Synthetic oligonucleotide
uccaacuggcuggccaccg

SEQ ID NO: 2817793 - RNA, 19 nt, Artificial Sequence
  Description of Artificial Sequence: Synthetic oligonucleotide
auuugcugugccaccgcgg

SEQ ID NO: 2817794 - RNA, 19 nt, Artificial Sequence
  Description of Artificial Sequence: Synthetic oligonucleotide
aggcaggaugcuuccaacu

SEQ ID NO: 2817795 - RNA, 19 nt, Artificial Sequence
  Description of Artificial Sequence: Synthetic oligonucleotide
guggauuugcugugccacc

SEQ ID NO: 2817796 - RNA, 19 nt, Artificial Sequence
  Description of Artificial Sequence: Synthetic oligonucleotide
uugaaccagcugguuaaug

SEQ ID NO: 2817797 - RNA, 19 nt, Artificial Sequence
  Description of Artificial Sequence: Synthetic oligonucleotide
gggucagugagguccggcg

SEQ ID NO: 2817798 - RNA, 19 nt, Artificial Sequence
  Description of Artificial Sequence: Synthetic oligonucleotide
uuugccaaccccggggauc

SEQ ID NO: 2817799 - RNA, 19 nt, Artificial Sequence
  Description of Artificial Sequence: Synthetic oligonucleotide
ggcaggaugcuuccaacug

SEQ ID NO: 2817800 - RNA, 19 nt, Artificial Sequence
  Description of Artificial Sequence: Synthetic oligonucleotide
aagagcagacgcugugguu

SEQ ID NO: 2817801 - RNA, 19 nt, Artificial Sequence
  Description of Artificial Sequence: Synthetic oligonucleotide
gcagucuaaaggaggagag

SEQ ID NO: 2817802 - RNA, 19 nt, Artificial Sequence
  Description of Artificial Sequence: Synthetic oligonucleotide
cagacgcugugguuggcag

SEQ ID NO: 2817803 - RNA, 19 nt, Artificial Sequence
  Description of Artificial Sequence: Synthetic oligonucleotide
gcacaguaaacuucuggac

SEQ ID NO: 2817804 - RNA, 19 nt, Artificial Sequence
  Description of Artificial Sequence: Synthetic oligonucleotide
aguugcuggaucguuggaa

SEQ ID NO: 2817805 - RNA, 19 nt, Artificial Sequence
  Description of Artificial Sequence: Synthetic oligonucleotide
gacgcugugguuggcaguc

SEQ ID NO: 2817806 - RNA, 19 nt, Artificial Sequence
  Description of Artificial Sequence: Synthetic oligonucleotide
ucccuugaagauguccaga

SEQ ID NO: 2817807 - RNA, 19 nt, Artificial Sequence
  Description of Artificial Sequence: Synthetic oligonucleotide
cugcugcacagucugaaca

SEQ ID NO: 2817808 - RNA, 19 nt, Artificial Sequence
  Description of Artificial Sequence: Synthetic oligonucleotide
augcuuccaacuggcuggc

SEQ ID NO: 2817809 - RNA, 19 nt, Artificial Sequence
  Description of Artificial Sequence: Synthetic oligonucleotide
uccggcgaagaagcugugg

SEQ ID NO: 2817810 - RNA, 19 nt, Artificial Sequence
  Description of Artificial Sequence: Synthetic oligonucleotide
guuuugcucuugaaccagc

SEQ ID NO: 2817811 - RNA, 19 nt, Artificial Sequence
  Description of Artificial Sequence: Synthetic oligonucleotide
gaagagcagacgcuguggu

SEQ ID NO: 2817812 - RNA, 19 nt, Artificial Sequence
  Description of Artificial Sequence: Synthetic oligonucleotide
uguagccauguccggccac

SEQ ID NO: 2817813 - RNA, 19 nt, Artificial Sequence
  Description of Artificial Sequence: Synthetic oligonucleotide
caccgcuucuuccugagga

SEQ ID NO: 2817814 - RNA, 19 nt, Artificial Sequence
  Description of Artificial Sequence: Synthetic oligonucleotide
caucccaaggucgagcaca

SEQ ID NO: 2817815 - RNA, 19 nt, Artificial Sequence
  Description of Artificial Sequence: Synthetic oligonucleotide
ugcagcagaaguggagccu

SEQ ID NO: 2817816 - RNA, 19 nt, Artificial Sequence
  Description of Artificial Sequence: Synthetic oligonucleotide
aagaagcuguggauuugcu

SEQ ID NO: 2817817 - RNA, 19 nt, Artificial Sequence
  Description of Artificial Sequence: Synthetic oligonucleotide
guccagaguuucugacacg

SEQ ID NO: 2817818 - RNA, 19 nt, Artificial Sequence
  Description of Artificial Sequence: Synthetic oligonucleotide
uuggacggaagcguugcuc

SEQ ID NO: 2817819 - RNA, 19 nt, Artificial Sequence
  Description of Artificial Sequence: Synthetic oligonucleotide
aggguuccugcugggcucc

SEQ ID NO: 2817820 - RNA, 19 nt, Artificial Sequence
  Description of Artificial Sequence: Synthetic oligonucleotide
gguuuugcucuugaaccag

SEQ ID NO: 2817821 - RNA, 19 nt, Artificial Sequence
  Description of Artificial Sequence: Synthetic oligonucleotide
uugccaaccccggggaucu

SEQ ID NO: 2817822 - RNA, 19 nt, Artificial Sequence
  Description of Artificial Sequence: Synthetic oligonucleotide
cacaccgcuucuuccugag

SEQ ID NO: 2817823 - RNA, 19 nt, Artificial Sequence
  Description of Artificial Sequence: Synthetic oligonucleotide
ugcugugccaccgcggguc

SEQ ID NO: 2817824 - RNA, 19 nt, Artificial Sequence
  Description of Artificial Sequence: Synthetic oligonucleotide
agugagguccggcgaagaa

SEQ ID NO: 2817825 - RNA, 19 nt, Artificial Sequence
  Description of Artificial Sequence: Synthetic oligonucleotide
gucgagcacaguaaacuuc

SEQ ID NO: 2817826 - RNA, 19 nt, Artificial Sequence
  Description of Artificial Sequence: Synthetic oligonucleotide
uggcuggccaccgggagca

SEQ ID NO: 2817827 - RNA, 19 nt, Artificial Sequence
  Description of Artificial Sequence: Synthetic oligonucleotide
ucccugguuuugcucuuga

SEQ ID NO: 2817828 - RNA, 19 nt, Artificial Sequence
  Description of Artificial Sequence: Synthetic oligonucleotide
gcuucuuccugaggaaagg

SEQ ID NO: 2817829 - RNA, 19 nt, Artificial Sequence
  Description of Artificial Sequence: Synthetic oligonucleotide
uucuggacuuccggaaagu

SEQ ID NO: 2817830 - RNA, 19 nt, Artificial Sequence
  Description of Artificial Sequence: Synthetic oligonucleotide
gacacgaacaagucucuuu

SEQ ID NO: 2817831 - RNA, 19 nt, Artificial Sequence
  Description of Artificial Sequence: Synthetic oligonucleotide
gucucuuucuguagccaug

SEQ ID NO: 2817832 - RNA, 19 nt, Artificial Sequence
  Description of Artificial Sequence: Synthetic oligonucleotide
uggcagucuaaaggaggag

SEQ ID NO: 2817833 - RNA, 19 nt, Artificial Sequence
  Description of Artificial Sequence: Synthetic oligonucleotide
ucuggacuuccggaaagua

SEQ ID NO: 2817834 - RNA, 19 nt, Artificial Sequence
  Description of Artificial Sequence: Synthetic oligonucleotide
acggaagcguugcucaguu

SEQ ID NO: 2817835 - RNA, 19 nt, Artificial Sequence
  Description of Artificial Sequence: Synthetic oligonucleotide
guagccauguccggccacc

SEQ ID NO: 2817836 - RNA, 19 nt, Artificial Sequence
  Description of Artificial Sequence: Synthetic oligonucleotide
acaccgcuucuuccugagg

SEQ ID NO: 2817837 - RNA, 19 nt, Artificial Sequence
  Description of Artificial Sequence: Synthetic oligonucleotide
gagccuugacuuugccaac

SEQ ID NO: 2817838 - RNA, 19 nt, Artificial Sequence
  Description of Artificial Sequence: Synthetic oligonucleotide
caaggucgagcacaguaaa

SEQ ID NO: 2817839 - RNA, 19 nt, Artificial Sequence
  Description of Artificial Sequence: Synthetic oligonucleotide
cguuggaaacuucugcagc

SEQ ID NO: 2817840 - RNA, 19 nt, Artificial Sequence
  Description of Artificial Sequence: Synthetic oligonucleotide
aagggacggcucggagagc

SEQ ID NO: 2817841 - RNA, 19 nt, Artificial Sequence
  Description of Artificial Sequence: Synthetic oligonucleotide
cuggcuggccaccgggagc

SEQ ID NO: 2817842 - RNA, 19 nt, Artificial Sequence
  Description of Artificial Sequence: Synthetic oligonucleotide
cucuugaaccagcugguua

SEQ ID NO: 2817843 - RNA, 19 nt, Artificial Sequence
  Description of Artificial Sequence: Synthetic oligonucleotide
ccaguucuuggacggaagc

SEQ ID NO: 2817844 - RNA, 19 nt, Artificial Sequence
  Description of Artificial Sequence: Synthetic oligonucleotide
gguuggcagucuaaaggag

SEQ ID NO: 2817845 - RNA, 19 nt, Artificial Sequence
  Description of Artificial Sequence: Synthetic oligonucleotide
cagaaguggagccuugacu

SEQ ID NO: 2817846 - RNA, 19 nt, Artificial Sequence
  Description of Artificial Sequence: Synthetic oligonucleotide
aucugcugcacagucugaa

SEQ ID NO: 2817847 - RNA, 19 nt, Artificial Sequence
  Description of Artificial Sequence: Synthetic oligonucleotide
ggcagucuaaaggaggaga

SEQ ID NO: 2817848 - RNA, 19 nt, Artificial Sequence
  Description of Artificial Sequence: Synthetic oligonucleotide
cucggagagcgcacaccgc

SEQ ID NO: 2817849 - RNA, 19 nt, Artificial Sequence
  Description of Artificial Sequence: Synthetic oligonucleotide
agacgcugugguuggcagu

SEQ ID NO: 2817850 - RNA, 19 nt, Artificial Sequence
  Description of Artificial Sequence: Synthetic oligonucleotide
accgcuucuuccugaggaa

SEQ ID NO: 2817851 - RNA, 19 nt, Artificial Sequence
  Description of Artificial Sequence: Synthetic oligonucleotide
caccaucccaaggucgagc

SEQ ID NO: 2817852 - RNA, 19 nt, Artificial Sequence
  Description of Artificial Sequence: Synthetic oligonucleotide
gcuguggauuugcugugcc

SEQ ID NO: 2817853 - RNA, 19 nt, Artificial Sequence
  Description of Artificial Sequence: Synthetic oligonucleotide
ggaucguuggaaacuucug

SEQ ID NO: 2817854 - RNA, 19 nt, Artificial Sequence
  Description of Artificial Sequence: Synthetic oligonucleotide
ggucccacgaccuccucca

SEQ ID NO: 2817855 - RNA, 19 nt, Artificial Sequence
  Description of Artificial Sequence: Synthetic oligonucleotide
gaagauguccagaguuucu

SEQ ID NO: 2817856 - RNA, 19 nt, Artificial Sequence
  Description of Artificial Sequence: Synthetic oligonucleotide
gucagugagguccggcgaa

SEQ ID NO: 2817857 - RNA, 19 nt, Artificial Sequence
  Description of Artificial Sequence: Synthetic oligonucleotide
ugggcucccugguuuugcu

SEQ ID NO: 2817858 - RNA, 19 nt, Artificial Sequence
  Description of Artificial Sequence: Synthetic oligonucleotide
aucccaaggucgagcacag

SEQ ID NO: 2817859 - RNA, 19 nt, Artificial Sequence
  Description of Artificial Sequence: Synthetic oligonucleotide
ugcucaguugcuggaucgu

SEQ ID NO: 2817860 - RNA, 19 nt, Artificial Sequence
  Description of Artificial Sequence: Synthetic oligonucleotide
gcaacaccaucccaagguc

SEQ ID NO: 2817861 - RNA, 19 nt, Artificial Sequence
  Description of Artificial Sequence: Synthetic oligonucleotide
cuggaucguuggaaacuuc

SEQ ID NO: 2817862 - RNA, 19 nt, Artificial Sequence
  Description of Artificial Sequence: Synthetic oligonucleotide
gagcgcacaccgcuucuuc

SEQ ID NO: 2817863 - RNA, 19 nt, Artificial Sequence
  Description of Artificial Sequence: Synthetic oligonucleotide
ugugccaccgcggguccca

SEQ ID NO: 2817864 - RNA, 19 nt, Artificial Sequence
  Description of Artificial Sequence: Synthetic oligonucleotide
gucugaacaagggacggcu

SEQ ID NO: 2817865 - RNA, 19 nt, Artificial Sequence
  Description of Artificial Sequence: Synthetic oligonucleotide
ggaaacuucugcagcagaa

SEQ ID NO: 2817866 - RNA, 19 nt, Artificial Sequence
  Description of Artificial Sequence: Synthetic oligonucleotide
uuccaacuggcuggccacc

SEQ ID NO: 2817867 - RNA, 19 nt, Artificial Sequence
  Description of Artificial Sequence: Synthetic oligonucleotide
guuaaugaggcaggaugcu

SEQ ID NO: 2817868 - RNA, 19 nt, Artificial Sequence
  Description of Artificial Sequence: Synthetic oligonucleotide
ggaaaguacuguucacuua

SEQ ID NO: 2817869 - RNA, 19 nt, Artificial Sequence
  Description of Artificial Sequence: Synthetic oligonucleotide
cuucugcagcagaagugga

SEQ ID NO: 2817870 - RNA, 19 nt, Artificial Sequence
  Description of Artificial Sequence: Synthetic oligonucleotide
caguaaacuucuggacuuc

SEQ ID NO: 2817871 - RNA, 19 nt, Artificial Sequence
  Description of Artificial Sequence: Synthetic oligonucleotide
cuggccaccgggagcaaca

SEQ ID NO: 2817872 - RNA, 19 nt, Artificial Sequence
  Description of Artificial Sequence: Synthetic oligonucleotide
cuguggauuugcugugcca

SEQ ID NO: 2817873 - RNA, 19 nt, Artificial Sequence
  Description of Artificial Sequence: Synthetic oligonucleotide
aacuggcuggccaccggga

SEQ ID NO: 2817874 - RNA, 19 nt, Artificial Sequence
  Description of Artificial Sequence: Synthetic oligonucleotide
agcagaaguggagccuuga

SEQ ID NO: 2817875 - RNA, 19 nt, Artificial Sequence
  Description of Artificial Sequence: Synthetic oligonucleotide
caccgcgggucccacgacc

SEQ ID NO: 2817876 - RNA, 19 nt, Artificial Sequence
  Description of Artificial Sequence: Synthetic oligonucleotide
gcacagucugaacaaggga

SEQ ID NO: 2817877 - RNA, 19 nt, Artificial Sequence
  Description of Artificial Sequence: Synthetic oligonucleotide
ggauuugcugugccaccgc

SEQ ID NO: 2817878 - RNA, 19 nt, Artificial Sequence
  Description of Artificial Sequence: Synthetic oligonucleotide
ggggaucugcugcacaguc

SEQ ID NO: 2817879 - RNA, 19 nt, Artificial Sequence
  Description of Artificial Sequence: Synthetic oligonucleotide
gaacaagggacggcucgga

SEQ ID NO: 2817880 - RNA, 19 nt, Artificial Sequence
  Description of Artificial Sequence: Synthetic oligonucleotide
cauguccggccaccaaauc

SEQ ID NO: 2817881 - RNA, 19 nt, Artificial Sequence
  Description of Artificial Sequence: Synthetic oligonucleotide
gccaccgggagcaacacca

SEQ ID NO: 2817882 - RNA, 19 nt, Artificial Sequence
  Description of Artificial Sequence: Synthetic oligonucleotide
gggagcaacaccaucccaa

SEQ ID NO: 2817883 - RNA, 19 nt, Artificial Sequence
  Description of Artificial Sequence: Synthetic oligonucleotide
guucacuuaucuguguuuu

SEQ ID NO: 2817884 - RNA, 19 nt, Artificial Sequence
  Description of Artificial Sequence: Synthetic oligonucleotide
gaggagaggcuggcugcag

SEQ ID NO: 2817885 - RNA, 19 nt, Artificial Sequence
  Description of Artificial Sequence: Synthetic oligonucleotide
uugcugugccaccgcgggu

SEQ ID NO: 2817886 - RNA, 19 nt, Artificial Sequence
  Description of Artificial Sequence: Synthetic oligonucleotide
agcagacgcugugguuggc

SEQ ID NO: 2817887 - RNA, 19 nt, Artificial Sequence
  Description of Artificial Sequence: Synthetic oligonucleotide
acaccaucccaaggucgag

SEQ ID NO: 2817888 - RNA, 19 nt, Artificial Sequence
  Description of Artificial Sequence: Synthetic oligonucleotide
cugggcucccugguuuugc

SEQ ID NO: 2817889 - RNA, 19 nt, Artificial Sequence
  Description of Artificial Sequence: Synthetic oligonucleotide
gcugcacagucugaacaag

SEQ ID NO: 2817890 - RNA, 19 nt, Artificial Sequence
  Description of Artificial Sequence: Synthetic oligonucleotide
gccuugacuuugccaaccc

SEQ ID NO: 2817891 - RNA, 19 nt, Artificial Sequence
  Description of Artificial Sequence: Synthetic oligonucleotide
cagcagaaguggagccuug

SEQ ID NO: 2817892 - RNA, 19 nt, Artificial Sequence
  Description of Artificial Sequence: Synthetic oligonucleotide
ggacggaagcguugcucag

SEQ ID NO: 2817893 - RNA, 19 nt, Artificial Sequence
  Description of Artificial Sequence: Synthetic oligonucleotide
ugacacgaacaagucucuu

SEQ ID NO: 2817894 - RNA, 19 nt, Artificial Sequence
  Description of Artificial Sequence: Synthetic oligonucleotide
cucuuucuguagccauguc

SEQ ID NO: 2817895 - RNA, 19 nt, Artificial Sequence
  Description of Artificial Sequence: Synthetic oligonucleotide
ccggggaucugcugcacag

SEQ ID NO: 2817896 - RNA, 19 nt, Artificial Sequence
  Description of Artificial Sequence: Synthetic oligonucleotide
uccugaggaaaggguuccu

SEQ ID NO: 2817897 - RNA, 19 nt, Artificial Sequence
  Description of Artificial Sequence: Synthetic oligonucleotide
ggagagcgcacaccgcuuc

SEQ ID NO: 2817898 - RNA, 19 nt, Artificial Sequence
  Description of Artificial Sequence: Synthetic oligonucleotide
gaagcguugcucaguugcu

SEQ ID NO: 2817899 - RNA, 19 nt, Artificial Sequence
  Description of Artificial Sequence: Synthetic oligonucleotide
accccggggaucugcugca

SEQ ID NO: 2817900 - RNA, 19 nt, Artificial Sequence
  Description of Artificial Sequence: Synthetic oligonucleotide
ggucagugagguccggcga

SEQ ID NO: 2817901 - RNA, 19 nt, Artificial Sequence
  Description of Artificial Sequence: Synthetic oligonucleotide
gggucccacgaccuccucc

SEQ ID NO: 2817902 - RNA, 19 nt, Artificial Sequence
  Description of Artificial Sequence: Synthetic oligonucleotide
gaaguggagccuugacuuu

SEQ ID NO: 2817903 - RNA, 19 nt, Artificial Sequence
  Description of Artificial Sequence: Synthetic oligonucleotide
gucuaaaggaggagaggcu

SEQ ID NO: 2817904 - RNA, 19 nt, Artificial Sequence
  Description of Artificial Sequence: Synthetic oligonucleotide
ggacuuccggaaaguacug

SEQ ID NO: 2817905 - RNA, 19 nt, Artificial Sequence
  Description of Artificial Sequence: Synthetic oligonucleotide
cgcuucuuccugaggaaag

SEQ ID NO: 2817906 - RNA, 19 nt, Artificial Sequence
  Description of Artificial Sequence: Synthetic oligonucleotide
ccuccuccaguucuuggac

SEQ ID NO: 2817907 - RNA, 19 nt, Artificial Sequence
  Description of Artificial Sequence: Synthetic oligonucleotide
ugccaccgcgggucccacg

SEQ ID NO: 2817908 - RNA, 19 nt, Artificial Sequence
  Description of Artificial Sequence: Synthetic oligonucleotide
uagccauguccggccacca

SEQ ID NO: 2817909 - RNA, 19 nt, Artificial Sequence
  Description of Artificial Sequence: Synthetic oligonucleotide
ugcugggcucccugguuuu

SEQ ID NO: 2817910 - RNA, 19 nt, Artificial Sequence
  Description of Artificial Sequence: Synthetic oligonucleotide
cacgaccuccuccaguucu

SEQ ID NO: 2817911 - RNA, 19 nt, Artificial Sequence
  Description of Artificial Sequence: Synthetic oligonucleotide
ccaaggucgagcacaguaa

SEQ ID NO: 2817912 - RNA, 19 nt, Artificial Sequence
  Description of Artificial Sequence: Synthetic oligonucleotide
cugacacgaacaagucucu

SEQ ID NO: 2817913 - RNA, 19 nt, Artificial Sequence
  Description of Artificial Sequence: Synthetic oligonucleotide
caccgggagcaacaccauc

SEQ ID NO: 2817914 - RNA, 19 nt, Artificial Sequence
  Description of Artificial Sequence: Synthetic oligonucleotide
cugugguuggcagucuaaa

SEQ ID NO: 2817915 - RNA, 19 nt, Artificial Sequence
  Description of Artificial Sequence: Synthetic oligonucleotide
ccgggagcaacaccauccc

SEQ ID NO: 2817916 - RNA, 19 nt, Artificial Sequence
  Description of Artificial Sequence: Synthetic oligonucleotide
gccauguccggccaccaaa

SEQ ID NO: 2817917 - RNA, 19 nt, Artificial Sequence
  Description of Artificial Sequence: Synthetic oligonucleotide
cacgaacaagucucuuucu

SEQ ID NO: 2817918 - RNA, 19 nt, Artificial Sequence
  Description of Artificial Sequence: Synthetic oligonucleotide
cuguucacuuaucuguguu

SEQ ID NO: 2817919 - RNA, 19 nt, Artificial Sequence
  Description of Artificial Sequence: Synthetic oligonucleotide
augaucccuugaagauguc

SEQ ID NO: 2817920 - RNA, 19 nt, Artificial Sequence
  Description of Artificial Sequence: Synthetic oligonucleotide
ggcucccugguuuugcucu

SEQ ID NO: 2817921 - RNA, 19 nt, Artificial Sequence
  Description of Artificial Sequence: Synthetic oligonucleotide
caaccccggggaucugcug

SEQ ID NO: 2817922 - RNA, 19 nt, Artificial Sequence
  Description of Artificial Sequence: Synthetic oligonucleotide
gacggcucggagagcgcac

SEQ ID NO: 2817923 - RNA, 19 nt, Artificial Sequence
  Description of Artificial Sequence: Synthetic oligonucleotide
gacuuccggaaaguacugu

SEQ ID NO: 2817924 - RNA, 19 nt, Artificial Sequence
  Description of Artificial Sequence: Synthetic oligonucleotide
agccauguccggccaccaa

SEQ ID NO: 2817925 - RNA, 19 nt, Artificial Sequence
  Description of Artificial Sequence: Synthetic oligonucleotide
cccaaggucgagcacagua

SEQ ID NO: 2817926 - RNA, 19 nt, Artificial Sequence
  Description of Artificial Sequence: Synthetic oligonucleotide
ccugaggaaaggguuccug

SEQ ID NO: 2817927 - RNA, 19 nt, Artificial Sequence
  Description of Artificial Sequence: Synthetic oligonucleotide
aggaugcuuccaacuggcu

SEQ ID NO: 2817928 - RNA, 19 nt, Artificial Sequence
  Description of Artificial Sequence: Synthetic oligonucleotide
ccggcgaagaagcugugga

SEQ ID NO: 2817929 - RNA, 19 nt, Artificial Sequence
  Description of Artificial Sequence: Synthetic oligonucleotide
gcugguuaaugaggcagga

SEQ ID NO: 2817930 - RNA, 19 nt, Artificial Sequence
  Description of Artificial Sequence: Synthetic oligonucleotide
augaggcaggaugcuucca

SEQ ID NO: 2817931 - RNA, 19 nt, Artificial Sequence
  Description of Artificial Sequence: Synthetic oligonucleotide
gacggaagcguugcucagu

SEQ ID NO: 2817932 - RNA, 19 nt, Artificial Sequence
  Description of Artificial Sequence: Synthetic oligonucleotide
accgcgggucccacgaccu

SEQ ID NO: 2817933 - RNA, 19 nt, Artificial Sequence
  Description of Artificial Sequence: Synthetic oligonucleotide
cuccaguucuuggacggaa

SEQ ID NO: 2817934 - RNA, 19 nt, Artificial Sequence
  Description of Artificial Sequence: Synthetic oligonucleotide
cuguagccauguccggcca

SEQ ID NO: 2817935 - RNA, 19 nt, Artificial Sequence
  Description of Artificial Sequence: Synthetic oligonucleotide
gagagcgcacaccgcuucu

SEQ ID NO: 2817936 - RNA, 19 nt, Artificial Sequence
  Description of Artificial Sequence: Synthetic oligonucleotide
ugcuuccaacuggcuggcc

SEQ ID NO: 2817937 - RNA, 19 nt, Artificial Sequence
  Description of Artificial Sequence: Synthetic oligonucleotide
acggcucggagagcgcaca

SEQ ID NO: 2817938 - RNA, 19 nt, Artificial Sequence
  Description of Artificial Sequence: Synthetic oligonucleotide
gguccggcgaagaagcugu

SEQ ID NO: 2817939 - RNA, 19 nt, Artificial Sequence
  Description of Artificial Sequence: Synthetic oligonucleotide
uggccaccgggagcaacac

SEQ ID NO: 2817940 - RNA, 19 nt, Artificial Sequence
  Description of Artificial Sequence: Synthetic oligonucleotide
cucccugguuuugcucuug

SEQ ID NO: 2817941 - RNA, 19 nt, Artificial Sequence
  Description of Artificial Sequence: Synthetic oligonucleotide
caguugcuggaucguugga

SEQ ID NO: 2817942 - RNA, 19 nt, Artificial Sequence
  Description of Artificial Sequence: Synthetic oligonucleotide
ggucgagcacaguaaacuu

SEQ ID NO: 2817943 - RNA, 19 nt, Artificial Sequence
  Description of Artificial Sequence: Synthetic oligonucleotide
agagcgcacaccgcuucuu

SEQ ID NO: 2817944 - RNA, 19 nt, Artificial Sequence
  Description of Artificial Sequence: Synthetic oligonucleotide
ggcucggagagcgcacacc

SEQ ID NO: 2817945 - RNA, 19 nt, Artificial Sequence
  Description of Artificial Sequence: Synthetic oligonucleotide
gccaccgcgggucccacga

SEQ ID NO: 2817946 - RNA, 19 nt, Artificial Sequence
  Description of Artificial Sequence: Synthetic oligonucleotide
gcgaagaagcuguggauuu

SEQ ID NO: 2817947 - RNA, 19 nt, Artificial Sequence
  Description of Artificial Sequence: Synthetic oligonucleotide
gcugugccaccgcgggucc

SEQ ID NO: 2817948 - RNA, 19 nt, Artificial Sequence
  Description of Artificial Sequence: Synthetic oligonucleotide
ggggucagugagguccggc

SEQ ID NO: 2817949 - RNA, 19 nt, Artificial Sequence
  Description of Artificial Sequence: Synthetic oligonucleotide
cgaacaagucucuuucugu

SEQ ID NO: 2817950 - RNA, 19 nt, Artificial Sequence
  Description of Artificial Sequence: Synthetic oligonucleotide
gcguugcucaguugcugga

SEQ ID NO: 2817951 - RNA, 19 nt, Artificial Sequence
  Description of Artificial Sequence: Synthetic oligonucleotide
guucuuggacggaagcguu

SEQ ID NO: 2817952 - RNA, 19 nt, Artificial Sequence
  Description of Artificial Sequence: Synthetic oligonucleotide
ggaggagaggcuggcugca

SEQ ID NO: 2817953 - RNA, 19 nt, Artificial Sequence
  Description of Artificial Sequence: Synthetic oligonucleotide
ggcgaagaagcuguggauu

SEQ ID NO: 2817954 - RNA, 19 nt, Artificial Sequence
  Description of Artificial Sequence: Synthetic oligonucleotide
ggccaccgggagcaacacc

SEQ ID NO: 2817955 - RNA, 19 nt, Artificial Sequence
  Description of Artificial Sequence: Synthetic oligonucleotide
acgaccuccuccaguucuu

SEQ ID NO: 2817956 - RNA, 19 nt, Artificial Sequence
  Description of Artificial Sequence: Synthetic oligonucleotide
gccaaccccggggaucugc

SEQ ID NO: 2817957 - RNA, 19 nt, Artificial Sequence
  Description of Artificial Sequence: Synthetic oligonucleotide
gcagacgcugugguuggca

SEQ ID NO: 2817958 - RNA, 19 nt, Artificial Sequence
  Description of Artificial Sequence: Synthetic oligonucleotide
ggacggcucggagagcgca

SEQ ID NO: 2817959 - RNA, 19 nt, Artificial Sequence
  Description of Artificial Sequence: Synthetic oligonucleotide
ucccaaggucgagcacagu

SEQ ID NO: 2817960 - RNA, 19 nt, Artificial Sequence
  Description of Artificial Sequence: Synthetic oligonucleotide
cgaagaagcuguggauuug

SEQ ID NO: 2817961 - RNA, 19 nt, Artificial Sequence
  Description of Artificial Sequence: Synthetic oligonucleotide
cagugagguccggcgaaga

SEQ ID NO: 2817962 - RNA, 19 nt, Artificial Sequence
  Description of Artificial Sequence: Synthetic oligonucleotide
ccagcugguuaaugaggca

SEQ ID NO: 2817963 - RNA, 19 nt, Artificial Sequence
  Description of Artificial Sequence: Synthetic oligonucleotide
cuuggacggaagcguugcu

SEQ ID NO: 2817964 - RNA, 19 nt, Artificial Sequence
  Description of Artificial Sequence: Synthetic oligonucleotide
cugugccaccgcggguccc

SEQ ID NO: 2817965 - RNA, 19 nt, Artificial Sequence
  Description of Artificial Sequence: Synthetic oligonucleotide
gggcucccugguuuugcuc

SEQ ID NO: 2817966 - RNA, 19 nt, Artificial Sequence
  Description of Artificial Sequence: Synthetic oligonucleotide
ccaucccaaggucgagcac

SEQ ID NO: 2817967 - RNA, 19 nt, Artificial Sequence
  Description of Artificial Sequence: Synthetic oligonucleotide
cugguuaaugaggcaggau

SEQ ID NO: 2817968 - RNA, 19 nt, Artificial Sequence
  Description of Artificial Sequence: Synthetic oligonucleotide
acgcugugguuggcagucu

SEQ ID NO: 2817969 - RNA, 19 nt, Artificial Sequence
  Description of Artificial Sequence: Synthetic oligonucleotide
gcugugguuggcagucuaa

SEQ ID NO: 2817970 - RNA, 19 nt, Artificial Sequence
  Description of Artificial Sequence: Synthetic oligonucleotide
guccggcgaagaagcugug

SEQ ID NO: 2817971 - RNA, 19 nt, Artificial Sequence
  Description of Artificial Sequence: Synthetic oligonucleotide
ccggaaaguacuguucacu

SEQ ID NO: 2817972 - RNA, 19 nt, Artificial Sequence
  Description of Artificial Sequence: Synthetic oligonucleotide
gcgcacaccgcuucuuccu

SEQ ID NO: 2817973 - RNA, 19 nt, Artificial Sequence
  Description of Artificial Sequence: Synthetic oligonucleotide
cuugaaccagcugguuaau

SEQ ID NO: 2817974 - RNA, 19 nt, Artificial Sequence
  Description of Artificial Sequence: Synthetic oligonucleotide
gcuggaucguuggaaacuu

SEQ ID NO: 2817975 - RNA, 19 nt, Artificial Sequence
  Description of Artificial Sequence: Synthetic oligonucleotide
cuuugccaaccccggggau

SEQ ID NO: 2817976 - RNA, 19 nt, Artificial Sequence
  Description of Artificial Sequence: Synthetic oligonucleotide
gcagcagggcuggggucag

SEQ ID NO: 2817977 - RNA, 19 nt, Artificial Sequence
  Description of Artificial Sequence: Synthetic oligonucleotide
ccagaguuucugacacgaa

SEQ ID NO: 2817978 - RNA, 19 nt, Artificial Sequence
  Description of Artificial Sequence: Synthetic oligonucleotide
cgcacaccgcuucuuccug

SEQ ID NO: 2817979 - RNA, 19 nt, Artificial Sequence
  Description of Artificial Sequence: Synthetic oligonucleotide
ggcuggcugcagcagggcu

SEQ ID NO: 2817980 - RNA, 19 nt, Artificial Sequence
  Description of Artificial Sequence: Synthetic oligonucleotide
ugccaaccccggggaucug

SEQ ID NO: 2817981 - RNA, 19 nt, Artificial Sequence
  Description of Artificial Sequence: Synthetic oligonucleotide
cgcgggucccacgaccucc

SEQ ID NO: 2817982 - RNA, 19 nt, Artificial Sequence
  Description of Artificial Sequence: Synthetic oligonucleotide
gagguccggcgaagaagcu

SEQ ID NO: 2817983 - RNA, 19 nt, Artificial Sequence
  Description of Artificial Sequence: Synthetic oligonucleotide
cggaaaguacuguucacuu

SEQ ID NO: 2817984 - RNA, 19 nt, Artificial Sequence
  Description of Artificial Sequence: Synthetic oligonucleotide
gcagcagaaguggagccuu

SEQ ID NO: 2817985 - RNA, 19 nt, Artificial Sequence
  Description of Artificial Sequence: Synthetic oligonucleotide
gcuggccaccgggagcaac

SEQ ID NO: 2817986 - RNA, 19 nt, Artificial Sequence
  Description of Artificial Sequence: Synthetic oligonucleotide
cccacgaccuccuccaguu

SEQ ID NO: 2817987 - RNA, 19 nt, Artificial Sequence
  Description of Artificial Sequence: Synthetic oligonucleotide
ccauguccggccaccaaau

SEQ ID NO: 2817988 - RNA, 19 nt, Artificial Sequence
  Description of Artificial Sequence: Synthetic oligonucleotide
gggcuggggucagugaggu

SEQ ID NO: 2817989 - RNA, 19 nt, Artificial Sequence
  Description of Artificial Sequence: Synthetic oligonucleotide
gggacggcucggagagcgc

SEQ ID NO: 2817990 - RNA, 19 nt, Artificial Sequence
  Description of Artificial Sequence: Synthetic oligonucleotide
cccugguuuugcucuugaa

SEQ ID NO: 2817991 - RNA, 19 nt, Artificial Sequence
  Description of Artificial Sequence: Synthetic oligonucleotide
ccacgaccuccuccaguuc

SEQ ID NO: 2817992 - RNA, 19 nt, Artificial Sequence
  Description of Artificial Sequence: Synthetic oligonucleotide
ggcuggggucagugagguc

SEQ ID NO: 2817993 - RNA, 19 nt, Artificial Sequence
  Description of Artificial Sequence: Synthetic oligonucleotide
ccgcuucuuccugaggaaa

SEQ ID NO: 2817994 - RNA, 19 nt, Artificial Sequence
  Description of Artificial Sequence: Synthetic oligonucleotide
gugccaccgcgggucccac

SEQ ID NO: 2817995 - RNA, 19 nt, Artificial Sequence
  Description of Artificial Sequence: Synthetic oligonucleotide
cccggggaucugcugcaca

SEQ ID NO: 2817996 - RNA, 19 nt, Artificial Sequence
  Description of Artificial Sequence: Synthetic oligonucleotide
ccaaccccggggaucugcu

SEQ ID NO: 2817997 - RNA, 19 nt, Artificial Sequence
  Description of Artificial Sequence: Synthetic oligonucleotide
gcucaguugcuggaucguu

SEQ ID NO: 2817998 - RNA, 19 nt, Artificial Sequence
  Description of Artificial Sequence: Synthetic oligonucleotide
cgggagcaacaccauccca

SEQ ID NO: 2817999 - RNA, 19 nt, Artificial Sequence
  Description of Artificial Sequence: Synthetic oligonucleotide
ccaccgcgggucccacgac

SEQ ID NO: 2818000 - RNA, 19 nt, Artificial Sequence
  Description of Artificial Sequence: Synthetic oligonucleotide
cggcucggagagcgcacac

SEQ ID NO: 2818001 - RNA, 19 nt, Artificial Sequence
  Description of Artificial Sequence: Synthetic oligonucleotide
gcucccugguuuugcucuu

SEQ ID NO: 2818002 - RNA, 19 nt, Artificial Sequence
  Description of Artificial Sequence: Synthetic oligonucleotide
gguuccugcugggcucccu

SEQ ID NO: 2818003 - RNA, 19 nt, Artificial Sequence
  Description of Artificial Sequence: Synthetic oligonucleotide
ccgcgggucccacgaccuc

SEQ ID NO: 2818004 - RNA, 19 nt, Artificial Sequence
  Description of Artificial Sequence: Synthetic oligonucleotide
cgcugugguuggcagucua

SEQ ID NO: 2818005 - RNA, 19 nt, Artificial Sequence
  Description of Artificial Sequence: Synthetic oligonucleotide
cggcgaagaagcuguggau

SEQ ID NO: 2818006 - RNA, 19 nt, Artificial Sequence
  Description of Artificial Sequence: Synthetic oligonucleotide
gcgggucccacgaccuccu

SEQ ID NO: 2818007 - RNA, 19 nt, Artificial Sequence
  Description of Artificial Sequence: Synthetic oligonucleotide
ccaccgggagcaacaccau

SEQ ID NO: 2818008 - RNA, 19 nt, Artificial Sequence
  Description of Artificial Sequence: Synthetic oligonucleotide
cguugcucaguugcuggau

SEQ ID NO: 2818009 - RNA, 19 nt, Artificial Sequence
  Description of Artificial Sequence: Synthetic oligonucleotide
cggagagcgcacaccgcuu

SEQ ID NO: 2818010 - RNA, 19 nt, Artificial Sequence
  Description of Artificial Sequence: Synthetic oligonucleotide
ggcuggccaccgggagcaa

SEQ ID NO: 2818011 - RNA, 19 nt, Artificial Sequence
  Description of Artificial Sequence: Synthetic oligonucleotide
cggggaucugcugcacagu

SEQ ID NO: 2818012 - RNA, 19 nt, Artificial Sequence
  Description of Artificial Sequence: Synthetic oligonucleotide
uuuauuuugggcuugucag

SEQ ID NO: 2818013 - RNA, 19 nt, Artificial Sequence
  Description of Artificial Sequence: Synthetic oligonucleotide
gauccuuacacucuugugg

SEQ ID NO: 2818014 - RNA, 19 nt, Artificial Sequence
  Description of Artificial Sequence: Synthetic oligonucleotide
aagguaauuccgaaggucc

SEQ ID NO: 2818015 - RNA, 19 nt, Artificial Sequence
  Description of Artificial Sequence: Synthetic oligonucleotide
auuguaaauuugcucaagg

SEQ ID NO: 2818016 - RNA, 19 nt, Artificial Sequence
  Description of Artificial Sequence: Synthetic oligonucleotide
gauaccagggcaccgaggg

SEQ ID NO: 2818017 - RNA, 19 nt, Artificial Sequence
  Description of Artificial Sequence: Synthetic oligonucleotide
uuuuauuuugggcuuguca

SEQ ID NO: 2818018 - RNA, 19 nt, Artificial Sequence
  Description of Artificial Sequence: Synthetic oligonucleotide
cucaagguaauuccgaagg

SEQ ID NO: 2818019 - RNA, 19 nt, Artificial Sequence
  Description of Artificial Sequence: Synthetic oligonucleotide
uguaaauuugcucaaggua

SEQ ID NO: 2818020 - RNA, 19 nt, Artificial Sequence
  Description of Artificial Sequence: Synthetic oligonucleotide
guugguucggaacacacgg

SEQ ID NO: 2818021 - RNA, 19 nt, Artificial Sequence
  Description of Artificial Sequence: Synthetic oligonucleotide
aagaaguugguucggaaca

SEQ ID NO: 2818022 - RNA, 19 nt, Artificial Sequence
  Description of Artificial Sequence: Synthetic oligonucleotide
aauuugcucaagguaauuc

SEQ ID NO: 2818023 - RNA, 19 nt, Artificial Sequence
  Description of Artificial Sequence: Synthetic oligonucleotide
uuuugggcuugucagaacc

SEQ ID NO: 2818024 - RNA, 19 nt, Artificial Sequence
  Description of Artificial Sequence: Synthetic oligonucleotide
aggaacauuguaaauuugc

SEQ ID NO: 2818025 - RNA, 19 nt, Artificial Sequence
  Description of Artificial Sequence: Synthetic oligonucleotide
aauugcacaguaucuucag

SEQ ID NO: 2818026 - RNA, 19 nt, Artificial Sequence
  Description of Artificial Sequence: Synthetic oligonucleotide
uagucuggcuucuugaucc

SEQ ID NO: 2818027 - RNA, 19 nt, Artificial Sequence
  Description of Artificial Sequence: Synthetic oligonucleotide
aguaucuucaggcugggca

SEQ ID NO: 2818028 - RNA, 19 nt, Artificial Sequence
  Description of Artificial Sequence: Synthetic oligonucleotide
accaagaagggauaccagg

SEQ ID NO: 2818029 - RNA, 19 nt, Artificial Sequence
  Description of Artificial Sequence: Synthetic oligonucleotide
uagcacacaggucauaggc

SEQ ID NO: 2818030 - RNA, 19 nt, Artificial Sequence
  Description of Artificial Sequence: Synthetic oligonucleotide
auaggccaaaccaagaagg

SEQ ID NO: 2818031 - RNA, 19 nt, Artificial Sequence
  Description of Artificial Sequence: Synthetic oligonucleotide
ucugggaaggugaaggucu

SEQ ID NO: 2818032 - RNA, 19 nt, Artificial Sequence
  Description of Artificial Sequence: Synthetic oligonucleotide
uggaugaagaaguugguuc

SEQ ID NO: 2818033 - RNA, 19 nt, Artificial Sequence
  Description of Artificial Sequence: Synthetic oligonucleotide
aacacauuccgcgccaugg

SEQ ID NO: 2818034 - RNA, 19 nt, Artificial Sequence
  Description of Artificial Sequence: Synthetic oligonucleotide
cuugucagaaccacugugc

SEQ ID NO: 2818035 - RNA, 19 nt, Artificial Sequence
  Description of Artificial Sequence: Synthetic oligonucleotide
aaaccaagaagggauacca

SEQ ID NO: 2818036 - RNA, 19 nt, Artificial Sequence
  Description of Artificial Sequence: Synthetic oligonucleotide
aacacacggagcuggggac

SEQ ID NO: 2818037 - RNA, 19 nt, Artificial Sequence
  Description of Artificial Sequence: Synthetic oligonucleotide
uucggaauugcacaguauc

SEQ ID NO: 2818038 - RNA, 19 nt, Artificial Sequence
  Description of Artificial Sequence: Synthetic oligonucleotide
aagaagggauaccagggca

SEQ ID NO: 2818039 - RNA, 19 nt, Artificial Sequence
  Description of Artificial Sequence: Synthetic oligonucleotide
aaaagaucugggaagguga

SEQ ID NO: 2818040 - RNA, 19 nt, Artificial Sequence
  Description of Artificial Sequence: Synthetic oligonucleotide
ugaaggucugcccaugggc

SEQ ID NO: 2818041 - RNA, 19 nt, Artificial Sequence
  Description of Artificial Sequence: Synthetic oligonucleotide
cacaguaucuucaggcugg

SEQ ID NO: 2818042 - RNA, 19 nt, Artificial Sequence
  Description of Artificial Sequence: Synthetic oligonucleotide
aaccacugugcucacuagg

SEQ ID NO: 2818043 - RNA, 19 nt, Artificial Sequence
  Description of Artificial Sequence: Synthetic oligonucleotide
aguaccaggccgcaccagc

SEQ ID NO: 2818044 - RNA, 19 nt, Artificial Sequence
  Description of Artificial Sequence: Synthetic oligonucleotide
gaagaaguugguucggaac

SEQ ID NO: 2818045 - RNA, 19 nt, Artificial Sequence
  Description of Artificial Sequence: Synthetic oligonucleotide
gaacauuguaaauuugcuc

SEQ ID NO: 2818046 - RNA, 19 nt, Artificial Sequence
  Description of Artificial Sequence: Synthetic oligonucleotide
uuguaaauuugcucaaggu

SEQ ID NO: 2818047 - RNA, 19 nt, Artificial Sequence
  Description of Artificial Sequence: Synthetic oligonucleotide
agcuggaugaagaaguugg

SEQ ID NO: 2818048 - RNA, 19 nt, Artificial Sequence
  Description of Artificial Sequence: Synthetic oligonucleotide
uaggccaaaccaagaaggg

SEQ ID NO: 2818049 - RNA, 19 nt, Artificial Sequence
  Description of Artificial Sequence: Synthetic oligonucleotide
guaaauuugcucaagguaa

SEQ ID NO: 2818050 - RNA, 19 nt, Artificial Sequence
  Description of Artificial Sequence: Synthetic oligonucleotide
ggaugaagaaguugguucg

SEQ ID NO: 2818051 - RNA, 19 nt, Artificial Sequence
  Description of Artificial Sequence: Synthetic oligonucleotide
ugguucggaacacacggag

SEQ ID NO: 2818052 - RNA, 19 nt, Artificial Sequence
  Description of Artificial Sequence: Synthetic oligonucleotide
uccuguuggagccaugcug

SEQ ID NO: 2818053 - RNA, 19 nt, Artificial Sequence
  Description of Artificial Sequence: Synthetic oligonucleotide
cuucuugauccuuacacuc

SEQ ID NO: 2818054 - RNA, 19 nt, Artificial Sequence
  Description of Artificial Sequence: Synthetic oligonucleotide
ucauaggccaaaccaagaa

SEQ ID NO: 2818055 - RNA, 19 nt, Artificial Sequence
  Description of Artificial Sequence: Synthetic oligonucleotide
ucccuguuagcacacaggu

SEQ ID NO: 2818056 - RNA, 19 nt, Artificial Sequence
  Description of Artificial Sequence: Synthetic oligonucleotide
uaggcuacuuuguagucug

SEQ ID NO: 2818057 - RNA, 19 nt, Artificial Sequence
  Description of Artificial Sequence: Synthetic oligonucleotide
acaggucauaggccaaacc

SEQ ID NO: 2818058 - RNA, 19 nt, Artificial Sequence
  Description of Artificial Sequence: Synthetic oligonucleotide
acaggaacauuguaaauuu

SEQ ID NO: 2818059 - RNA, 19 nt, Artificial Sequence
  Description of Artificial Sequence: Synthetic oligonucleotide
guaucuucaggcugggcag

SEQ ID NO: 2818060 - RNA, 19 nt, Artificial Sequence
  Description of Artificial Sequence: Synthetic oligonucleotide
uuauuuugggcuugucaga

SEQ ID NO: 2818061 - RNA, 19 nt, Artificial Sequence
  Description of Artificial Sequence: Synthetic oligonucleotide
agggauucggaauugcaca

SEQ ID NO: 2818062 - RNA, 19 nt, Artificial Sequence
  Description of Artificial Sequence: Synthetic oligonucleotide
aaguugguucggaacacac

SEQ ID NO: 2818063 - RNA, 19 nt, Artificial Sequence
  Description of Artificial Sequence: Synthetic oligonucleotide
uagggauucggaauugcac

SEQ ID NO: 2818064 - RNA, 19 nt, Artificial Sequence
  Description of Artificial Sequence: Synthetic oligonucleotide
ucggaauugcacaguaucu

SEQ ID NO: 2818065 - RNA, 19 nt, Artificial Sequence
  Description of Artificial Sequence: Synthetic oligonucleotide
ugaggcuccucuuccagag

SEQ ID NO: 2818066 - RNA, 19 nt, Artificial Sequence
  Description of Artificial Sequence: Synthetic oligonucleotide
auugcacaguaucuucagg

SEQ ID NO: 2818067 - RNA, 19 nt, Artificial Sequence
  Description of Artificial Sequence: Synthetic oligonucleotide
cauaggccaaaccaagaag

SEQ ID NO: 2818068 - RNA, 19 nt, Artificial Sequence
  Description of Artificial Sequence: Synthetic oligonucleotide
uaaauuugcucaagguaau

SEQ ID NO: 2818069 - RNA, 19 nt, Artificial Sequence
  Description of Artificial Sequence: Synthetic oligonucleotide
guuggagccaugcugcacc

SEQ ID NO: 2818070 - RNA, 19 nt, Artificial Sequence
  Description of Artificial Sequence: Synthetic oligonucleotide
cuuccagagggucugcagg

SEQ ID NO: 2818071 - RNA, 19 nt, Artificial Sequence
  Description of Artificial Sequence: Synthetic oligonucleotide
uuagcacacaggucauagg

SEQ ID NO: 2818072 - RNA, 19 nt, Artificial Sequence
  Description of Artificial Sequence: Synthetic oligonucleotide
uugauccuuacacucuugu

SEQ ID NO: 2818073 - RNA, 19 nt, Artificial Sequence
  Description of Artificial Sequence: Synthetic oligonucleotide
uucuugauccuuacacucu

SEQ ID NO: 2818074 - RNA, 19 nt, Artificial Sequence
  Description of Artificial Sequence: Synthetic oligonucleotide
gaaggugaaggucugccca

SEQ ID NO: 2818075 - RNA, 19 nt, Artificial Sequence
  Description of Artificial Sequence: Synthetic oligonucleotide
auuccgaagguccacccug

SEQ ID NO: 2818076 - RNA, 19 nt, Artificial Sequence
  Description of Artificial Sequence: Synthetic oligonucleotide
cucacuagggucuguggcc

SEQ ID NO: 2818077 - RNA, 19 nt, Artificial Sequence
  Description of Artificial Sequence: Synthetic oligonucleotide
ucaagguaauuccgaaggu

SEQ ID NO: 2818078 - RNA, 19 nt, Artificial Sequence
  Description of Artificial Sequence: Synthetic oligonucleotide
auccuuacacucuuguggu

SEQ ID NO: 2818079 - RNA, 19 nt, Artificial Sequence
  Description of Artificial Sequence: Synthetic oligonucleotide
guuagcacacaggucauag

SEQ ID NO: 2818080 - RNA, 19 nt, Artificial Sequence
  Description of Artificial Sequence: Synthetic oligonucleotide
uugucagaaccacugugcu

SEQ ID NO: 2818081 - RNA, 19 nt, Artificial Sequence
  Description of Artificial Sequence: Synthetic oligonucleotide
acacauuccgcgccauggc

SEQ ID NO: 2818082 - RNA, 19 nt, Artificial Sequence
  Description of Artificial Sequence: Synthetic oligonucleotide
uacuuuguagucuggcuuc

SEQ ID NO: 2818083 - RNA, 19 nt, Artificial Sequence
  Description of Artificial Sequence: Synthetic oligonucleotide
uccauagggauucggaauu

SEQ ID NO: 2818084 - RNA, 19 nt, Artificial Sequence
  Description of Artificial Sequence: Synthetic oligonucleotide
aauuccgaagguccacccu

SEQ ID NO: 2818085 - RNA, 19 nt, Artificial Sequence
  Description of Artificial Sequence: Synthetic oligonucleotide
gucagaaccacugugcuca

SEQ ID NO: 2818086 - RNA, 19 nt, Artificial Sequence
  Description of Artificial Sequence: Synthetic oligonucleotide
ucggaacacacggagcugg

SEQ ID NO: 2818087 - RNA, 19 nt, Artificial Sequence
  Description of Artificial Sequence: Synthetic oligonucleotide
aggcuccucuuccagaggg

SEQ ID NO: 2818088 - RNA, 19 nt, Artificial Sequence
  Description of Artificial Sequence: Synthetic oligonucleotide
acguaggcuacuuuguagu

SEQ ID NO: 2818089 - RNA, 19 nt, Artificial Sequence
  Description of Artificial Sequence: Synthetic oligonucleotide
uuguagucuggcuucuuga

SEQ ID NO: 2818090 - RNA, 19 nt, Artificial Sequence
  Description of Artificial Sequence: Synthetic oligonucleotide
ugauccuuacacucuugug

SEQ ID NO: 2818091 - RNA, 19 nt, Artificial Sequence
  Description of Artificial Sequence: Synthetic oligonucleotide
caagaagggauaccagggc

SEQ ID NO: 2818092 - RNA, 19 nt, Artificial Sequence
  Description of Artificial Sequence: Synthetic oligonucleotide
uugcucaagguaauuccga

SEQ ID NO: 2818093 - RNA, 19 nt, Artificial Sequence
  Description of Artificial Sequence: Synthetic oligonucleotide
uauuuugggcuugucagaa

SEQ ID NO: 2818094 - RNA, 19 nt, Artificial Sequence
  Description of Artificial Sequence: Synthetic oligonucleotide
uggucccuccuccuguugg

SEQ ID NO: 2818095 - RNA, 19 nt, Artificial Sequence
  Description of Artificial Sequence: Synthetic oligonucleotide
ucuccauagggauucggaa

SEQ ID NO: 2818096 - RNA, 19 nt, Artificial Sequence
  Description of Artificial Sequence: Synthetic oligonucleotide
agaaguugguucggaacac

SEQ ID NO: 2818097 - RNA, 19 nt, Artificial Sequence
  Description of Artificial Sequence: Synthetic oligonucleotide
gaaggucugcccaugggcc

SEQ ID NO: 2818098 - RNA, 19 nt, Artificial Sequence
  Description of Artificial Sequence: Synthetic oligonucleotide
cugcccaugggccagcugc

SEQ ID NO: 2818099 - RNA, 19 nt, Artificial Sequence
  Description of Artificial Sequence: Synthetic oligonucleotide
agaagggauaccagggcac

SEQ ID NO: 2818100 - RNA, 19 nt, Artificial Sequence
  Description of Artificial Sequence: Synthetic oligonucleotide
uaauuccgaagguccaccc

SEQ ID NO: 2818101 - RNA, 19 nt, Artificial Sequence
  Description of Artificial Sequence: Synthetic oligonucleotide
uacaacacauuccgcgcca

SEQ ID NO: 2818102 - RNA, 19 nt, Artificial Sequence
  Description of Artificial Sequence: Synthetic oligonucleotide
caggucauaggccaaacca

SEQ ID NO: 2818103 - RNA, 19 nt, Artificial Sequence
  Description of Artificial Sequence: Synthetic oligonucleotide
ggcuucuugauccuuacac

SEQ ID NO: 2818104 - RNA, 19 nt, Artificial Sequence
  Description of Artificial Sequence: Synthetic oligonucleotide
ccaagaagggauaccaggg

SEQ ID NO: 2818105 - RNA, 19 nt, Artificial Sequence
  Description of Artificial Sequence: Synthetic oligonucleotide
auuuugggcuugucagaac

SEQ ID NO: 2818106 - RNA, 19 nt, Artificial Sequence
  Description of Artificial Sequence: Synthetic oligonucleotide
agcacacaggucauaggcc

SEQ ID NO: 2818107 - RNA, 19 nt, Artificial Sequence
  Description of Artificial Sequence: Synthetic oligonucleotide
acacucuuguggucccucc

SEQ ID NO: 2818108 - RNA, 19 nt, Artificial Sequence
  Description of Artificial Sequence: Synthetic oligonucleotide
gaacacacggagcugggga

SEQ ID NO: 2818109 - RNA, 19 nt, Artificial Sequence
  Description of Artificial Sequence: Synthetic oligonucleotide
cacguaggcuacuuuguag

SEQ ID NO: 2818110 - RNA, 19 nt, Artificial Sequence
  Description of Artificial Sequence: Synthetic oligonucleotide
ugcacguaggcuacuuugu

SEQ ID NO: 2818111 - RNA, 19 nt, Artificial Sequence
  Description of Artificial Sequence: Synthetic oligonucleotide
ugaagaaguugguucggaa

SEQ ID NO: 2818112 - RNA, 19 nt, Artificial Sequence
  Description of Artificial Sequence: Synthetic oligonucleotide
uuccgaagguccacccugg

SEQ ID NO: 2818113 - RNA, 19 nt, Artificial Sequence
  Description of Artificial Sequence: Synthetic oligonucleotide
uggucaucuccauagggau

SEQ ID NO: 2818114 - RNA, 19 nt, Artificial Sequence
  Description of Artificial Sequence: Synthetic oligonucleotide
uuugggcuugucagaacca

SEQ ID NO: 2818115 - RNA, 19 nt, Artificial Sequence
  Description of Artificial Sequence: Synthetic oligonucleotide
agaaccacugugcucacua

SEQ ID NO: 2818116 - RNA, 19 nt, Artificial Sequence
  Description of Artificial Sequence: Synthetic oligonucleotide
gguacaacacauuccgcgc

SEQ ID NO: 2818117 - RNA, 19 nt, Artificial Sequence
  Description of Artificial Sequence: Synthetic oligonucleotide
cuuacacucuugugguccc

SEQ ID NO: 2818118 - RNA, 19 nt, Artificial Sequence
  Description of Artificial Sequence: Synthetic oligonucleotide
ucuugauccuuacacucuu

SEQ ID NO: 2818119 - RNA, 19 nt, Artificial Sequence
  Description of Artificial Sequence: Synthetic oligonucleotide
ccuguuagcacacagguca

SEQ ID NO: 2818120 - RNA, 19 nt, Artificial Sequence
  Description of Artificial Sequence: Synthetic oligonucleotide
guacaacacauuccgcgcc

SEQ ID NO: 2818121 - RNA, 19 nt, Artificial Sequence
  Description of Artificial Sequence: Synthetic oligonucleotide
agucccuguuagcacacag

SEQ ID NO: 2818122 - RNA, 19 nt, Artificial Sequence
  Description of Artificial Sequence: Synthetic oligonucleotide
acauuguaaauuugcucaa

SEQ ID NO: 2818123 - RNA, 19 nt, Artificial Sequence
  Description of Artificial Sequence: Synthetic oligonucleotide
accagcuggaugaagaagu

SEQ ID NO: 2818124 - RNA, 19 nt, Artificial Sequence
  Description of Artificial Sequence: Synthetic oligonucleotide
uguagucuggcuucuugau

SEQ ID NO: 2818125 - RNA, 19 nt, Artificial Sequence
  Description of Artificial Sequence: Synthetic oligonucleotide
cugcacguaggcuacuuug

SEQ ID NO: 2818126 - RNA, 19 nt, Artificial Sequence
  Description of Artificial Sequence: Synthetic oligonucleotide
ugggccagcugcacguagg

SEQ ID NO: 2818127 - RNA, 19 nt, Artificial Sequence
  Description of Artificial Sequence: Synthetic oligonucleotide
ugcucacuagggucugugg

SEQ ID NO: 2818128 - RNA, 19 nt, Artificial Sequence
  Description of Artificial Sequence: Synthetic oligonucleotide
uuccagagggucugcagga

SEQ ID NO: 2818129 - RNA, 19 nt, Artificial Sequence
  Description of Artificial Sequence: Synthetic oligonucleotide
gaauugcacaguaucuuca

SEQ ID NO: 2818130 - RNA, 19 nt, Artificial Sequence
  Description of Artificial Sequence: Synthetic oligonucleotide
cauuguaaauuugcucaag

SEQ ID NO: 2818131 - RNA, 19 nt, Artificial Sequence
  Description of Artificial Sequence: Synthetic oligonucleotide
gauucggaauugcacagua

SEQ ID NO: 2818132 - RNA, 19 nt, Artificial Sequence
  Description of Artificial Sequence: Synthetic oligonucleotide
ugcucaagguaauuccgaa

SEQ ID NO: 2818133 - RNA, 19 nt, Artificial Sequence
  Description of Artificial Sequence: Synthetic oligonucleotide
caaaccaagaagggauacc

SEQ ID NO: 2818134 - RNA, 19 nt, Artificial Sequence
  Description of Artificial Sequence: Synthetic oligonucleotide
aagggauaccagggcaccg

SEQ ID NO: 2818135 - RNA, 19 nt, Artificial Sequence
  Description of Artificial Sequence: Synthetic oligonucleotide
caagguaauuccgaagguc

SEQ ID NO: 2818136 - RNA, 19 nt, Artificial Sequence
  Description of Artificial Sequence: Synthetic oligonucleotide
aaggucugcccaugggcca

SEQ ID NO: 2818137 - RNA, 19 nt, Artificial Sequence
  Description of Artificial Sequence: Synthetic oligonucleotide
cuucaggcugggcaguacc

SEQ ID NO: 2818138 - RNA, 19 nt, Artificial Sequence
  Description of Artificial Sequence: Synthetic oligonucleotide
gggucuguggcccaguccc

SEQ ID NO: 2818139 - RNA, 19 nt, Artificial Sequence
  Description of Artificial Sequence: Synthetic oligonucleotide
uucaggcugggcaguacca

SEQ ID NO: 2818140 - RNA, 19 nt, Artificial Sequence
  Description of Artificial Sequence: Synthetic oligonucleotide
aaggugaaggucugcccau

SEQ ID NO: 2818141 - RNA, 19 nt, Artificial Sequence
  Description of Artificial Sequence: Synthetic oligonucleotide
cacugugcucacuaggguc

SEQ ID NO: 2818142 - RNA, 19 nt, Artificial Sequence
  Description of Artificial Sequence: Synthetic oligonucleotide
aguugguucggaacacacg

SEQ ID NO: 2818143 - RNA, 19 nt, Artificial Sequence
  Description of Artificial Sequence: Synthetic oligonucleotide
uccacccuggucaucucca

SEQ ID NO: 2818144 - RNA, 19 nt, Artificial Sequence
  Description of Artificial Sequence: Synthetic oligonucleotide
aaccaagaagggauaccag

SEQ ID NO: 2818145 - RNA, 19 nt, Artificial Sequence
  Description of Artificial Sequence: Synthetic oligonucleotide
ucuggcuucuugauccuua

SEQ ID NO: 2818146 - RNA, 19 nt, Artificial Sequence
  Description of Artificial Sequence: Synthetic oligonucleotide
aagaucugggaaggugaag

SEQ ID NO: 2818147 - RNA, 19 nt, Artificial Sequence
  Description of Artificial Sequence: Synthetic oligonucleotide
cuggucaucuccauaggga

SEQ ID NO: 2818148 - RNA, 19 nt, Artificial Sequence
  Description of Artificial Sequence: Synthetic oligonucleotide
guaauuccgaagguccacc

SEQ ID NO: 2818149 - RNA, 19 nt, Artificial Sequence
  Description of Artificial Sequence: Synthetic oligonucleotide
gaagggauaccagggcacc

SEQ ID NO: 2818150 - RNA, 19 nt, Artificial Sequence
  Description of Artificial Sequence: Synthetic oligonucleotide
acuggggucuuucucugga

SEQ ID NO: 2818151 - RNA, 19 nt, Artificial Sequence
  Description of Artificial Sequence: Synthetic oligonucleotide
gugaaggucugcccauggg

SEQ ID NO: 2818152 - RNA, 19 nt, Artificial Sequence
  Description of Artificial Sequence: Synthetic oligonucleotide
gaaccacugugcucacuag

SEQ ID NO: 2818153 - RNA, 19 nt, Artificial Sequence
  Description of Artificial Sequence: Synthetic oligonucleotide
accaggccgcaccagcugg

SEQ ID NO: 2818154 - RNA, 19 nt, Artificial Sequence
  Description of Artificial Sequence: Synthetic oligonucleotide
ggaauugcacaguaucuuc

SEQ ID NO: 2818155 - RNA, 19 nt, Artificial Sequence
  Description of Artificial Sequence: Synthetic oligonucleotide
uugguucggaacacacgga

SEQ ID NO: 2818156 - RNA, 19 nt, Artificial Sequence
  Description of Artificial Sequence: Synthetic oligonucleotide
aaagaucugggaaggugaa

SEQ ID NO: 2818157 - RNA, 19 nt, Artificial Sequence
  Description of Artificial Sequence: Synthetic oligonucleotide
cucuuguggucccuccucc

SEQ ID NO: 2818158 - RNA, 19 nt, Artificial Sequence
  Description of Artificial Sequence: Synthetic oligonucleotide
uggggucuuucucuggaaa

SEQ ID NO: 2818159 - RNA, 19 nt, Artificial Sequence
  Description of Artificial Sequence: Synthetic oligonucleotide
cagagggucugcaggacug

SEQ ID NO: 2818160 - RNA, 19 nt, Artificial Sequence
  Description of Artificial Sequence: Synthetic oligonucleotide
uuguggucccuccuccugu

SEQ ID NO: 2818161 - RNA, 19 nt, Artificial Sequence
  Description of Artificial Sequence: Synthetic oligonucleotide
guucggaacacacggagcu

SEQ ID NO: 2818162 - RNA, 19 nt, Artificial Sequence
  Description of Artificial Sequence: Synthetic oligonucleotide
gggauucggaauugcacag

SEQ ID NO: 2818163 - RNA, 19 nt, Artificial Sequence
  Description of Artificial Sequence: Synthetic oligonucleotide
caggaacauuguaaauuug

SEQ ID NO: 2818164 - RNA, 19 nt, Artificial Sequence
  Description of Artificial Sequence: Synthetic oligonucleotide
ugucagaaccacugugcuc

SEQ ID NO: 2818165 - RNA, 19 nt, Artificial Sequence
  Description of Artificial Sequence: Synthetic oligonucleotide
acacacggagcuggggacc

SEQ ID NO: 2818166 - RNA, 19 nt, Artificial Sequence
  Description of Artificial Sequence: Synthetic oligonucleotide
cauagggauucggaauugc

SEQ ID NO: 2818167 - RNA, 19 nt, Artificial Sequence
  Description of Artificial Sequence: Synthetic oligonucleotide
aaauuugcucaagguaauu

SEQ ID NO: 2818168 - RNA, 19 nt, Artificial Sequence
  Description of Artificial Sequence: Synthetic oligonucleotide
cuugauccuuacacucuug

SEQ ID NO: 2818169 - RNA, 19 nt, Artificial Sequence
  Description of Artificial Sequence: Synthetic oligonucleotide
caugcugcacccgcgugcg

SEQ ID NO: 2818170 - RNA, 19 nt, Artificial Sequence
  Description of Artificial Sequence: Synthetic oligonucleotide
ggucauaggccaaaccaag

SEQ ID NO: 2818171 - RNA, 19 nt, Artificial Sequence
  Description of Artificial Sequence: Synthetic oligonucleotide
cauuccgcgccauggcagc

SEQ ID NO: 2818172 - RNA, 19 nt, Artificial Sequence
  Description of Artificial Sequence: Synthetic oligonucleotide
ccacccagcugguagaggg

SEQ ID NO: 2818173 - RNA, 19 nt, Artificial Sequence
  Description of Artificial Sequence: Synthetic oligonucleotide
ugggcuugucagaaccacu

SEQ ID NO: 2818174 - RNA, 19 nt, Artificial Sequence
  Description of Artificial Sequence: Synthetic oligonucleotide
ucaggcugggcaguaccag

SEQ ID NO: 2818175 - RNA, 19 nt, Artificial Sequence
  Description of Artificial Sequence: Synthetic oligonucleotide
gacuggggucuuucucugg

SEQ ID NO: 2818176 - RNA, 19 nt, Artificial Sequence
  Description of Artificial Sequence: Synthetic oligonucleotide
guagucuggcuucuugauc

SEQ ID NO: 2818177 - RNA, 19 nt, Artificial Sequence
  Description of Artificial Sequence: Synthetic oligonucleotide
gcuugucagaaccacugug

SEQ ID NO: 2818178 - RNA, 19 nt, Artificial Sequence
  Description of Artificial Sequence: Synthetic oligonucleotide
ggcaguaccaggccgcacc

SEQ ID NO: 2818179 - RNA, 19 nt, Artificial Sequence
  Description of Artificial Sequence: Synthetic oligonucleotide
uaccagggcaccgaggguc

SEQ ID NO: 2818180 - RNA, 19 nt, Artificial Sequence
  Description of Artificial Sequence: Synthetic oligonucleotide
auagggauucggaauugca

SEQ ID NO: 2818181 - RNA, 19 nt, Artificial Sequence
  Description of Artificial Sequence: Synthetic oligonucleotide
ggugaaggucugcccaugg

SEQ ID NO: 2818182 - RNA, 19 nt, Artificial Sequence
  Description of Artificial Sequence: Synthetic oligonucleotide
uugggcuugucagaaccac

SEQ ID NO: 2818183 - RNA, 19 nt, Artificial Sequence
  Description of Artificial Sequence: Synthetic oligonucleotide
gcucacuagggucuguggc

SEQ ID NO: 2818184 - RNA, 19 nt, Artificial Sequence
  Description of Artificial Sequence: Synthetic oligonucleotide
gcucaagguaauuccgaag

SEQ ID NO: 2818185 - RNA, 19 nt, Artificial Sequence
  Description of Artificial Sequence: Synthetic oligonucleotide
cuuguggucccuccuccug

SEQ ID NO: 2818186 - RNA, 19 nt, Artificial Sequence
  Description of Artificial Sequence: Synthetic oligonucleotide
uuggagccaugcugcaccc

SEQ ID NO: 2818187 - RNA, 19 nt, Artificial Sequence
  Description of Artificial Sequence: Synthetic oligonucleotide
ggaaggugaaggucugccc

SEQ ID NO: 2818188 - RNA, 19 nt, Artificial Sequence
  Description of Artificial Sequence: Synthetic oligonucleotide
ucuuguggucccuccuccu

SEQ ID NO: 2818189 - RNA, 19 nt, Artificial Sequence
  Description of Artificial Sequence: Synthetic oligonucleotide
ccuuacacucuuguggucc

SEQ ID NO: 2818190 - RNA, 19 nt, Artificial Sequence
  Description of Artificial Sequence: Synthetic oligonucleotide
aucuccauagggauucgga

SEQ ID NO: 2818191 - RNA, 19 nt, Artificial Sequence
  Description of Artificial Sequence: Synthetic oligonucleotide
acauuccgcgccauggcag

SEQ ID NO: 2818192 - RNA, 19 nt, Artificial Sequence
  Description of Artificial Sequence: Synthetic oligonucleotide
uaccaggccgcaccagcug

SEQ ID NO: 2818193 - RNA, 19 nt, Artificial Sequence
  Description of Artificial Sequence: Synthetic oligonucleotide
augaagaaguugguucgga

SEQ ID NO: 2818194 - RNA, 19 nt, Artificial Sequence
  Description of Artificial Sequence: Synthetic oligonucleotide
acaguaucuucaggcuggg

SEQ ID NO: 2818195 - RNA, 19 nt, Artificial Sequence
  Description of Artificial Sequence: Synthetic oligonucleotide
ccuggucaucuccauaggg

SEQ ID NO: 2818196 - RNA, 19 nt, Artificial Sequence
  Description of Artificial Sequence: Synthetic oligonucleotide
ggagccaugcugcacccgc

SEQ ID NO: 2818197 - RNA, 19 nt, Artificial Sequence
  Description of Artificial Sequence: Synthetic oligonucleotide
ucaucuccauagggauucg

SEQ ID NO: 2818198 - RNA, 19 nt, Artificial Sequence
  Description of Artificial Sequence: Synthetic oligonucleotide
aggucauaggccaaaccaa

SEQ ID NO: 2818199 - RNA, 19 nt, Artificial Sequence
  Description of Artificial Sequence: Synthetic oligonucleotide
gaaguugguucggaacaca

SEQ ID NO: 2818200 - RNA, 19 nt, Artificial Sequence
  Description of Artificial Sequence: Synthetic oligonucleotide
gccacaggaacauuguaaa

SEQ ID NO: 2818201 - RNA, 19 nt, Artificial Sequence
  Description of Artificial Sequence: Synthetic oligonucleotide
uucggaacacacggagcug

SEQ ID NO: 2818202 - RNA, 19 nt, Artificial Sequence
  Description of Artificial Sequence: Synthetic oligonucleotide
aggccaaaccaagaaggga

SEQ ID NO: 2818203 - RNA, 19 nt, Artificial Sequence
  Description of Artificial Sequence: Synthetic oligonucleotide
cugggaaggugaaggucug

SEQ ID NO: 2818204 - RNA, 19 nt, Artificial Sequence
  Description of Artificial Sequence: Synthetic oligonucleotide
gcugggcaguaccaggccg

SEQ ID NO: 2818205 - RNA, 19 nt, Artificial Sequence
  Description of Artificial Sequence: Synthetic oligonucleotide
ugcugcacccgcgugcgca

SEQ ID NO: 2818206 - RNA, 19 nt, Artificial Sequence
  Description of Artificial Sequence: Synthetic oligonucleotide
uguuggagccaugcugcac

SEQ ID NO: 2818207 - RNA, 19 nt, Artificial Sequence
  Description of Artificial Sequence: Synthetic oligonucleotide
ucuguggcccagucccugu

SEQ ID NO: 2818208 - RNA, 19 nt, Artificial Sequence
  Description of Artificial Sequence: Synthetic oligonucleotide
caucuccauagggauucgg

SEQ ID NO: 2818209 - RNA, 19 nt, Artificial Sequence
  Description of Artificial Sequence: Synthetic oligonucleotide
ugcccaugggccagcugca

SEQ ID NO: 2818210 - RNA, 19 nt, Artificial Sequence
  Description of Artificial Sequence: Synthetic oligonucleotide
augggccagcugcacguag

SEQ ID NO: 2818211 - RNA, 19 nt, Artificial Sequence
  Description of Artificial Sequence: Synthetic oligonucleotide
ugcacccgcgugcgcacag

SEQ ID NO: 2818212 - RNA, 19 nt, Artificial Sequence
  Description of Artificial Sequence: Synthetic oligonucleotide
gaucugggaaggugaaggu

SEQ ID NO: 2818213 - RNA, 19 nt, Artificial Sequence
  Description of Artificial Sequence: Synthetic oligonucleotide
gggaaggugaaggucugcc

SEQ ID NO: 2818214 - RNA, 19 nt, Artificial Sequence
  Description of Artificial Sequence: Synthetic oligonucleotide
acuuuguagucuggcuucu

SEQ ID NO: 2818215 - RNA, 19 nt, Artificial Sequence
  Description of Artificial Sequence: Synthetic oligonucleotide
agguaauuccgaaggucca

SEQ ID NO: 2818216 - RNA, 19 nt, Artificial Sequence
  Description of Artificial Sequence: Synthetic oligonucleotide
uccuuacacucuugugguc

SEQ ID NO: 2818217 - RNA, 19 nt, Artificial Sequence
  Description of Artificial Sequence: Synthetic oligonucleotide
gggcuugucagaaccacug

SEQ ID NO: 2818218 - RNA, 19 nt, Artificial Sequence
  Description of Artificial Sequence: Synthetic oligonucleotide
caccagcuggaugaagaag

SEQ ID NO: 2818219 - RNA, 19 nt, Artificial Sequence
  Description of Artificial Sequence: Synthetic oligonucleotide
guccacccuggucaucucc

SEQ ID NO: 2818220 - RNA, 19 nt, Artificial Sequence
  Description of Artificial Sequence: Synthetic oligonucleotide
gucauaggccaaaccaaga

SEQ ID NO: 2818221 - RNA, 19 nt, Artificial Sequence
  Description of Artificial Sequence: Synthetic oligonucleotide
agggucugcaggacugggg

SEQ ID NO: 2818222 - RNA, 19 nt, Artificial Sequence
  Description of Artificial Sequence: Synthetic oligonucleotide
gguaauuccgaagguccac

SEQ ID NO: 2818223 - RNA, 19 nt, Artificial Sequence
  Description of Artificial Sequence: Synthetic oligonucleotide
agucuggcuucuugauccu

SEQ ID NO: 2818224 - RNA, 19 nt, Artificial Sequence
  Description of Artificial Sequence: Synthetic oligonucleotide
ucggcugcucugccucugc

SEQ ID NO: 2818225 - RNA, 19 nt, Artificial Sequence
  Description of Artificial Sequence: Synthetic oligonucleotide
ggaacauuguaaauuugcu

SEQ ID NO: 2818226 - RNA, 19 nt, Artificial Sequence
  Description of Artificial Sequence: Synthetic oligonucleotide
uagggucuguggcccaguc

SEQ ID NO: 2818227 - RNA, 19 nt, Artificial Sequence
  Description of Artificial Sequence: Synthetic oligonucleotide
agggauaccagggcaccga

SEQ ID NO: 2818228 - RNA, 19 nt, Artificial Sequence
  Description of Artificial Sequence: Synthetic oligonucleotide
acuagggucuguggcccag

SEQ ID NO: 2818229 - RNA, 19 nt, Artificial Sequence
  Description of Artificial Sequence: Synthetic oligonucleotide
cacaggaacauuguaaauu

SEQ ID NO: 2818230 - RNA, 19 nt, Artificial Sequence
  Description of Artificial Sequence: Synthetic oligonucleotide
gagccaugcugcacccgcg

SEQ ID NO: 2818231 - RNA, 19 nt, Artificial Sequence
  Description of Artificial Sequence: Synthetic oligonucleotide
uguggcccagucccuguua

SEQ ID NO: 2818232 - RNA, 19 nt, Artificial Sequence
  Description of Artificial Sequence: Synthetic oligonucleotide
cuacuuuguagucuggcuu

SEQ ID NO: 2818233 - RNA, 19 nt, Artificial Sequence
  Description of Artificial Sequence: Synthetic oligonucleotide
cgaagguccacccugguca

SEQ ID NO: 2818234 - RNA, 19 nt, Artificial Sequence
  Description of Artificial Sequence: Synthetic oligonucleotide
cacauuccgcgccauggca

SEQ ID NO: 2818235 - RNA, 19 nt, Artificial Sequence
  Description of Artificial Sequence: Synthetic oligonucleotide
cagcuggaugaagaaguug

SEQ ID NO: 2818236 - RNA, 19 nt, Artificial Sequence
  Description of Artificial Sequence: Synthetic oligonucleotide
ugcaggacuggggucuuuc

SEQ ID NO: 2818237 - RNA, 19 nt, Artificial Sequence
  Description of Artificial Sequence: Synthetic oligonucleotide
gugcgcacagcagccacag

SEQ ID NO: 2818238 - RNA, 19 nt, Artificial Sequence
  Description of Artificial Sequence: Synthetic oligonucleotide
ggcuacuuuguagucuggc

SEQ ID NO: 2818239 - RNA, 19 nt, Artificial Sequence
  Description of Artificial Sequence: Synthetic oligonucleotide
uacacucuuguggucccuc

SEQ ID NO: 2818240 - RNA, 19 nt, Artificial Sequence
  Description of Artificial Sequence: Synthetic oligonucleotide
uccgaagguccacccuggu

SEQ ID NO: 2818241 - RNA, 19 nt, Artificial Sequence
  Description of Artificial Sequence: Synthetic oligonucleotide
ucagaaccacugugcucac

SEQ ID NO: 2818242 - RNA, 19 nt, Artificial Sequence
  Description of Artificial Sequence: Synthetic oligonucleotide
auaccagggcaccgagggu

SEQ ID NO: 2818243 - RNA, 19 nt, Artificial Sequence
  Description of Artificial Sequence: Synthetic oligonucleotide
gaccacccagcugguagag

SEQ ID NO: 2818244 - RNA, 19 nt, Artificial Sequence
  Description of Artificial Sequence: Synthetic oligonucleotide
agccaugcugcacccgcgu

SEQ ID NO: 2818245 - RNA, 19 nt, Artificial Sequence
  Description of Artificial Sequence: Synthetic oligonucleotide
cccuccuccuguuggagcc

SEQ ID NO: 2818246 - RNA, 19 nt, Artificial Sequence
  Description of Artificial Sequence: Synthetic oligonucleotide
agcuggggaccacccagcu

SEQ ID NO: 2818247 - RNA, 19 nt, Artificial Sequence
  Description of Artificial Sequence: Synthetic oligonucleotide
caacacauuccgcgccaug

SEQ ID NO: 2818248 - RNA, 19 nt, Artificial Sequence
  Description of Artificial Sequence: Synthetic oligonucleotide
ugggaaggugaaggucugc

SEQ ID NO: 2818249 - RNA, 19 nt, Artificial Sequence
  Description of Artificial Sequence: Synthetic oligonucleotide
ucugcccaugggccagcug

SEQ ID NO: 2818250 - RNA, 19 nt, Artificial Sequence
  Description of Artificial Sequence: Synthetic oligonucleotide
gguucggaacacacggagc

SEQ ID NO: 2818251 - RNA, 19 nt, Artificial Sequence
  Description of Artificial Sequence: Synthetic oligonucleotide
accagggcaccgagggucg

SEQ ID NO: 2818252 - RNA, 19 nt, Artificial Sequence
  Description of Artificial Sequence: Synthetic oligonucleotide
ucuucaggcugggcaguac

SEQ ID NO: 2818253 - RNA, 19 nt, Artificial Sequence
  Description of Artificial Sequence: Synthetic oligonucleotide
gggauaccagggcaccgag

SEQ ID NO: 2818254 - RNA, 19 nt, Artificial Sequence
  Description of Artificial Sequence: Synthetic oligonucleotide
uggagccaugcugcacccg

SEQ ID NO: 2818255 - RNA, 19 nt, Artificial Sequence
  Description of Artificial Sequence: Synthetic oligonucleotide
ggaacacacggagcugggg

SEQ ID NO: 2818256 - RNA, 19 nt, Artificial Sequence
  Description of Artificial Sequence: Synthetic oligonucleotide
uguuagcacacaggucaua

SEQ ID NO: 2818257 - RNA, 19 nt, Artificial Sequence
  Description of Artificial Sequence: Synthetic oligonucleotide
uccagagggucugcaggac

SEQ ID NO: 2818258 - RNA, 19 nt, Artificial Sequence
  Description of Artificial Sequence: Synthetic oligonucleotide
ggacuggggucuuucucug

SEQ ID NO: 2818259 - RNA, 19 nt, Artificial Sequence
  Description of Artificial Sequence: Synthetic oligonucleotide
cuccauagggauucggaau

SEQ ID NO: 2818260 - RNA, 19 nt, Artificial Sequence
  Description of Artificial Sequence: Synthetic oligonucleotide
cacaggucauaggccaaac

SEQ ID NO: 2818261 - RNA, 19 nt, Artificial Sequence
  Description of Artificial Sequence: Synthetic oligonucleotide
uguggucccuccuccuguu

SEQ ID NO: 2818262 - RNA, 19 nt, Artificial Sequence
  Description of Artificial Sequence: Synthetic oligonucleotide
gugcucacuagggucugug

SEQ ID NO: 2818263 - RNA, 19 nt, Artificial Sequence
  Description of Artificial Sequence: Synthetic oligonucleotide
ggcaccgagggucggcugc

SEQ ID NO: 2818264 - RNA, 19 nt, Artificial Sequence
  Description of Artificial Sequence: Synthetic oligonucleotide
gcuucuugauccuuacacu

SEQ ID NO: 2818265 - RNA, 19 nt, Artificial Sequence
  Description of Artificial Sequence: Synthetic oligonucleotide
uuacacucuuguggucccu

SEQ ID NO: 2818266 - RNA, 19 nt, Artificial Sequence
  Description of Artificial Sequence: Synthetic oligonucleotide
accgagggucggcugcucu

SEQ ID NO: 2818267 - RNA, 19 nt, Artificial Sequence
  Description of Artificial Sequence: Synthetic oligonucleotide
gcuacuuuguagucuggcu

SEQ ID NO: 2818268 - RNA, 19 nt, Artificial Sequence
  Description of Artificial Sequence: Synthetic oligonucleotide
ccaugcugcacccgcgugc

SEQ ID NO: 2818269 - RNA, 19 nt, Artificial Sequence
  Description of Artificial Sequence: Synthetic oligonucleotide
auucggaauugcacaguau

SEQ ID NO: 2818270 - RNA, 19 nt, Artificial Sequence
  Description of Artificial Sequence: Synthetic oligonucleotide
ccaaaccaagaagggauac

SEQ ID NO: 2818271 - RNA, 19 nt, Artificial Sequence
  Description of Artificial Sequence: Synthetic oligonucleotide
aggugaaggucugcccaug

SEQ ID NO: 2818272 - RNA, 19 nt, Artificial Sequence
  Description of Artificial Sequence: Synthetic oligonucleotide
gccagcugcacguaggcua

SEQ ID NO: 2818273 - RNA, 19 nt, Artificial Sequence
  Description of Artificial Sequence: Synthetic oligonucleotide
ggggucuuucucuggaaaa

SEQ ID NO: 2818274 - RNA, 19 nt, Artificial Sequence
  Description of Artificial Sequence: Synthetic oligonucleotide
cacggagcuggggaccacc

SEQ ID NO: 2818275 - RNA, 19 nt, Artificial Sequence
  Description of Artificial Sequence: Synthetic oligonucleotide
ggauaccagggcaccgagg

SEQ ID NO: 2818276 - RNA, 19 nt, Artificial Sequence
  Description of Artificial Sequence: Synthetic oligonucleotide
acacaggucauaggccaaa

SEQ ID NO: 2818277 - RNA, 19 nt, Artificial Sequence
  Description of Artificial Sequence: Synthetic oligonucleotide
augcugcacccgcgugcgc

SEQ ID NO: 2818278 - RNA, 19 nt, Artificial Sequence
  Description of Artificial Sequence: Synthetic oligonucleotide
ugggcaguaccaggccgca

SEQ ID NO: 2818279 - RNA, 19 nt, Artificial Sequence
  Description of Artificial Sequence: Synthetic oligonucleotide
cccgcgugcgcacagcagc

SEQ ID NO: 2818280 - RNA, 19 nt, Artificial Sequence
  Description of Artificial Sequence: Synthetic oligonucleotide
ccagcugcacguaggcuac

SEQ ID NO: 2818281 - RNA, 19 nt, Artificial Sequence
  Description of Artificial Sequence: Synthetic oligonucleotide
ccuccuguuggagccaugc

SEQ ID NO: 2818282 - RNA, 19 nt, Artificial Sequence
  Description of Artificial Sequence: Synthetic oligonucleotide
uccuccuguuggagccaug

SEQ ID NO: 2818283 - RNA, 19 nt, Artificial Sequence
  Description of Artificial Sequence: Synthetic oligonucleotide
gucuguggcccagucccug

SEQ ID NO: 2818284 - RNA, 19 nt, Artificial Sequence
  Description of Artificial Sequence: Synthetic oligonucleotide
ggccaaaccaagaagggau

SEQ ID NO: 2818285 - RNA, 19 nt, Artificial Sequence
  Description of Artificial Sequence: Synthetic oligonucleotide
ugugcucacuagggucugu

SEQ ID NO: 2818286 - RNA, 19 nt, Artificial Sequence
  Description of Artificial Sequence: Synthetic oligonucleotide
gcacagcagccacaggaac

SEQ ID NO: 2818287 - RNA, 19 nt, Artificial Sequence
  Description of Artificial Sequence: Synthetic oligonucleotide
aggccgcaccagcuggaug

SEQ ID NO: 2818288 - RNA, 19 nt, Artificial Sequence
  Description of Artificial Sequence: Synthetic oligonucleotide
gucugcaggacuggggucu

SEQ ID NO: 2818289 - RNA, 19 nt, Artificial Sequence
  Description of Artificial Sequence: Synthetic oligonucleotide
ucugcagcugaggcuccuc

SEQ ID NO: 2818290 - RNA, 19 nt, Artificial Sequence
  Description of Artificial Sequence: Synthetic oligonucleotide
aggcuacuuuguagucugg

SEQ ID NO: 2818291 - RNA, 19 nt, Artificial Sequence
  Description of Artificial Sequence: Synthetic oligonucleotide
gggccagcugcacguaggc

SEQ ID NO: 2818292 - RNA, 19 nt, Artificial Sequence
  Description of Artificial Sequence: Synthetic oligonucleotide
gucccuccuccuguuggag

SEQ ID NO: 2818293 - RNA, 19 nt, Artificial Sequence
  Description of Artificial Sequence: Synthetic oligonucleotide
caguaucuucaggcugggc

SEQ ID NO: 2818294 - RNA, 19 nt, Artificial Sequence
  Description of Artificial Sequence: Synthetic oligonucleotide
cuguuggagccaugcugca

SEQ ID NO: 2818295 - RNA, 19 nt, Artificial Sequence
  Description of Artificial Sequence: Synthetic oligonucleotide
acaacacauuccgcgccau

SEQ ID NO: 2818296 - RNA, 19 nt, Artificial Sequence
  Description of Artificial Sequence: Synthetic oligonucleotide
cacacaggucauaggccaa

SEQ ID NO: 2818297 - RNA, 19 nt, Artificial Sequence
  Description of Artificial Sequence: Synthetic oligonucleotide
guggucccuccuccuguug

SEQ ID NO: 2818298 - RNA, 19 nt, Artificial Sequence
  Description of Artificial Sequence: Synthetic oligonucleotide
cccaugggccagcugcacg

SEQ ID NO: 2818299 - RNA, 19 nt, Artificial Sequence
  Description of Artificial Sequence: Synthetic oligonucleotide
gggucugcaggacuggggu

SEQ ID NO: 2818300 - RNA, 19 nt, Artificial Sequence
  Description of Artificial Sequence: Synthetic oligonucleotide
ggaccacccagcugguaga

SEQ ID NO: 2818301 - RNA, 19 nt, Artificial Sequence
  Description of Artificial Sequence: Synthetic oligonucleotide
agggcaccgagggucggcu

SEQ ID NO: 2818302 - RNA, 19 nt, Artificial Sequence
  Description of Artificial Sequence: Synthetic oligonucleotide
cugugcucacuagggucug

SEQ ID NO: 2818303 - RNA, 19 nt, Artificial Sequence
  Description of Artificial Sequence: Synthetic oligonucleotide
cccagucccuguuagcaca

SEQ ID NO: 2818304 - RNA, 19 nt, Artificial Sequence
  Description of Artificial Sequence: Synthetic oligonucleotide
gggguacaacacauuccgc

SEQ ID NO: 2818305 - RNA, 19 nt, Artificial Sequence
  Description of Artificial Sequence: Synthetic oligonucleotide
cguaggcuacuuuguaguc

SEQ ID NO: 2818306 - RNA, 19 nt, Artificial Sequence
  Description of Artificial Sequence: Synthetic oligonucleotide
cccuggucaucuccauagg

SEQ ID NO: 2818307 - RNA, 19 nt, Artificial Sequence
  Description of Artificial Sequence: Synthetic oligonucleotide
ccagucccuguuagcacac

SEQ ID NO: 2818308 - RNA, 19 nt, Artificial Sequence
  Description of Artificial Sequence: Synthetic oligonucleotide
ggucugcaggacugggguc

SEQ ID NO: 2818309 - RNA, 19 nt, Artificial Sequence
  Description of Artificial Sequence: Synthetic oligonucleotide
cccuguuagcacacagguc

SEQ ID NO: 2818310 - RNA, 19 nt, Artificial Sequence
  Description of Artificial Sequence: Synthetic oligonucleotide
gcaguaccaggccgcacca

SEQ ID NO: 2818311 - RNA, 19 nt, Artificial Sequence
  Description of Artificial Sequence: Synthetic oligonucleotide
acacggagcuggggaccac

SEQ ID NO: 2818312 - RNA, 19 nt, Artificial Sequence
  Description of Artificial Sequence: Synthetic oligonucleotide
ccauagggauucggaauug

SEQ ID NO: 2818313 - RNA, 19 nt, Artificial Sequence
  Description of Artificial Sequence: Synthetic oligonucleotide
caguaccaggccgcaccag

SEQ ID NO: 2818314 - RNA, 19 nt, Artificial Sequence
  Description of Artificial Sequence: Synthetic oligonucleotide
ggucccuccuccuguugga

SEQ ID NO: 2818315 - RNA, 19 nt, Artificial Sequence
  Description of Artificial Sequence: Synthetic oligonucleotide
aucuucaggcugggcagua

SEQ ID NO: 2818316 - RNA, 19 nt, Artificial Sequence
  Description of Artificial Sequence: Synthetic oligonucleotide
gcaccagcuggaugaagaa

SEQ ID NO: 2818317 - RNA, 19 nt, Artificial Sequence
  Description of Artificial Sequence: Synthetic oligonucleotide
agcugcacguaggcuacuu

SEQ ID NO: 2818318 - RNA, 19 nt, Artificial Sequence
  Description of Artificial Sequence: Synthetic oligonucleotide
cuggaugaagaaguugguu

SEQ ID NO: 2818319 - RNA, 19 nt, Artificial Sequence
  Description of Artificial Sequence: Synthetic oligonucleotide
cacacggagcuggggacca

SEQ ID NO: 2818320 - RNA, 19 nt, Artificial Sequence
  Description of Artificial Sequence: Synthetic oligonucleotide
cucuuccagagggucugca

SEQ ID NO: 2818321 - RNA, 19 nt, Artificial Sequence
  Description of Artificial Sequence: Synthetic oligonucleotide
gcacguaggcuacuuugua

SEQ ID NO: 2818322 - RNA, 19 nt, Artificial Sequence
  Description of Artificial Sequence: Synthetic oligonucleotide
gccaugcugcacccgcgug

SEQ ID NO: 2818323 - RNA, 19 nt, Artificial Sequence
  Description of Artificial Sequence: Synthetic oligonucleotide
cuguuagcacacaggucau

SEQ ID NO: 2818324 - RNA, 19 nt, Artificial Sequence
  Description of Artificial Sequence: Synthetic oligonucleotide
ccgcgugcgcacagcagcc

SEQ ID NO: 2818325 - RNA, 19 nt, Artificial Sequence
  Description of Artificial Sequence: Synthetic oligonucleotide
guaccaggccgcaccagcu

SEQ ID NO: 2818326 - RNA, 19 nt, Artificial Sequence
  Description of Artificial Sequence: Synthetic oligonucleotide
cacuagggucuguggccca

SEQ ID NO: 2818327 - RNA, 19 nt, Artificial Sequence
  Description of Artificial Sequence: Synthetic oligonucleotide
cacccgcgugcgcacagca

SEQ ID NO: 2818328 - RNA, 19 nt, Artificial Sequence
  Description of Artificial Sequence: Synthetic oligonucleotide
acccgcgugcgcacagcag

SEQ ID NO: 2818329 - RNA, 19 nt, Artificial Sequence
  Description of Artificial Sequence: Synthetic oligonucleotide
gcgugcgcacagcagccac

SEQ ID NO: 2818330 - RNA, 19 nt, Artificial Sequence
  Description of Artificial Sequence: Synthetic oligonucleotide
cacucuuguggucccuccu

SEQ ID NO: 2818331 - RNA, 19 nt, Artificial Sequence
  Description of Artificial Sequence: Synthetic oligonucleotide
ggcuugucagaaccacugu

SEQ ID NO: 2818332 - RNA, 19 nt, Artificial Sequence
  Description of Artificial Sequence: Synthetic oligonucleotide
ccgagggucggcugcucug

SEQ ID NO: 2818333 - RNA, 19 nt, Artificial Sequence
  Description of Artificial Sequence: Synthetic oligonucleotide
gcugcacccgcgugcgcac

SEQ ID NO: 2818334 - RNA, 19 nt, Artificial Sequence
  Description of Artificial Sequence: Synthetic oligonucleotide
cugcagcugaggcuccucu

SEQ ID NO: 2818335 - RNA, 19 nt, Artificial Sequence
  Description of Artificial Sequence: Synthetic oligonucleotide
gccaaaccaagaagggaua

SEQ ID NO: 2818336 - RNA, 19 nt, Artificial Sequence
  Description of Artificial Sequence: Synthetic oligonucleotide
cacccuggucaucuccaua

SEQ ID NO: 2818337 - RNA, 19 nt, Artificial Sequence
  Description of Artificial Sequence: Synthetic oligonucleotide
ggauucggaauugcacagu

SEQ ID NO: 2818338 - RNA, 19 nt, Artificial Sequence
  Description of Artificial Sequence: Synthetic oligonucleotide
cuccuguuggagccaugcu

SEQ ID NO: 2818339 - RNA, 19 nt, Artificial Sequence
  Description of Artificial Sequence: Synthetic oligonucleotide
gcuggaugaagaaguuggu

SEQ ID NO: 2818340 - RNA, 19 nt, Artificial Sequence
  Description of Artificial Sequence: Synthetic oligonucleotide
ccucugcagcugaggcucc

SEQ ID NO: 2818341 - RNA, 19 nt, Artificial Sequence
  Description of Artificial Sequence: Synthetic oligonucleotide
ccaugggccagcugcacgu

SEQ ID NO: 2818342 - RNA, 19 nt, Artificial Sequence
  Description of Artificial Sequence: Synthetic oligonucleotide
gcaggacuggggucuuucu

SEQ ID NO: 2818343 - RNA, 19 nt, Artificial Sequence
  Description of Artificial Sequence: Synthetic oligonucleotide
gggcaccgagggucggcug

SEQ ID NO: 2818344 - RNA, 19 nt, Artificial Sequence
  Description of Artificial Sequence: Synthetic oligonucleotide
cgcacagcagccacaggaa

SEQ ID NO: 2818345 - RNA, 19 nt, Artificial Sequence
  Description of Artificial Sequence: Synthetic oligonucleotide
gguccacccuggucaucuc

SEQ ID NO: 2818346 - RNA, 19 nt, Artificial Sequence
  Description of Artificial Sequence: Synthetic oligonucleotide
cagucccuguuagcacaca

SEQ ID NO: 2818347 - RNA, 19 nt, Artificial Sequence
  Description of Artificial Sequence: Synthetic oligonucleotide
ggucugcccaugggccagc

SEQ ID NO: 2818348 - RNA, 19 nt, Artificial Sequence
  Description of Artificial Sequence: Synthetic oligonucleotide
ccacaggaacauuguaaau

SEQ ID NO: 2818349 - RNA, 19 nt, Artificial Sequence
  Description of Artificial Sequence: Synthetic oligonucleotide
ccagagggucugcaggacu

SEQ ID NO: 2818350 - RNA, 19 nt, Artificial Sequence
  Description of Artificial Sequence: Synthetic oligonucleotide
caugggccagcugcacgua

SEQ ID NO: 2818351 - RNA, 19 nt, Artificial Sequence
  Description of Artificial Sequence: Synthetic oligonucleotide
cuuuguagucuggcuucuu

SEQ ID NO: 2818352 - RNA, 19 nt, Artificial Sequence
  Description of Artificial Sequence: Synthetic oligonucleotide
caccgagggucggcugcuc

SEQ ID NO: 2818353 - RNA, 19 nt, Artificial Sequence
  Description of Artificial Sequence: Synthetic oligonucleotide
gcugcacguaggcuacuuu

SEQ ID NO: 2818354 - RNA, 19 nt, Artificial Sequence
  Description of Artificial Sequence: Synthetic oligonucleotide
ccaggccgcaccagcugga

SEQ ID NO: 2818355 - RNA, 19 nt, Artificial Sequence
  Description of Artificial Sequence: Synthetic oligonucleotide
cuagggucuguggcccagu

SEQ ID NO: 2818356 - RNA, 19 nt, Artificial Sequence
  Description of Artificial Sequence: Synthetic oligonucleotide
ccagcuggaugaagaaguu

SEQ ID NO: 2818357 - RNA, 19 nt, Artificial Sequence
  Description of Artificial Sequence: Synthetic oligonucleotide
cgugcgcacagcagccaca

SEQ ID NO: 2818358 - RNA, 19 nt, Artificial Sequence
  Description of Artificial Sequence: Synthetic oligonucleotide
cagaaccacugugcucacu

SEQ ID NO: 2818359 - RNA, 19 nt, Artificial Sequence
  Description of Artificial Sequence: Synthetic oligonucleotide
gcacccgcgugcgcacagc

SEQ ID NO: 2818360 - RNA, 19 nt, Artificial Sequence
  Description of Artificial Sequence: Synthetic oligonucleotide
gcccaugggccagcugcac

SEQ ID NO: 2818361 - RNA, 19 nt, Artificial Sequence
  Description of Artificial Sequence: Synthetic oligonucleotide
gggcaguaccaggccgcac

SEQ ID NO: 2818362 - RNA, 19 nt, Artificial Sequence
  Description of Artificial Sequence: Synthetic oligonucleotide
ccagggcaccgagggucgg

SEQ ID NO: 2818363 - RNA, 19 nt, Artificial Sequence
  Description of Artificial Sequence: Synthetic oligonucleotide
gucuggcuucuugauccuu

SEQ ID NO: 2818364 - RNA, 19 nt, Artificial Sequence
  Description of Artificial Sequence: Synthetic oligonucleotide
ggucggcugcucugccucu

SEQ ID NO: 2818365 - RNA, 19 nt, Artificial Sequence
  Description of Artificial Sequence: Synthetic oligonucleotide
cugcacccgcgugcgcaca

SEQ ID NO: 2818366 - RNA, 19 nt, Artificial Sequence
  Description of Artificial Sequence: Synthetic oligonucleotide
cggaauugcacaguaucuu

SEQ ID NO: 2818367 - RNA, 19 nt, Artificial Sequence
  Description of Artificial Sequence: Synthetic oligonucleotide
cucugcagcugaggcuccu

SEQ ID NO: 2818368 - RNA, 19 nt, Artificial Sequence
  Description of Artificial Sequence: Synthetic oligonucleotide
cuguggcccagucccuguu

SEQ ID NO: 2818369 - RNA, 19 nt, Artificial Sequence
  Description of Artificial Sequence: Synthetic oligonucleotide
ggcuccucuuccagagggu

SEQ ID NO: 2818370 - RNA, 19 nt, Artificial Sequence
  Description of Artificial Sequence: Synthetic oligonucleotide
ggucuguggcccagucccu

SEQ ID NO: 2818371 - RNA, 19 nt, Artificial Sequence
  Description of Artificial Sequence: Synthetic oligonucleotide
ggccagcugcacguaggcu

SEQ ID NO: 2818372 - RNA, 19 nt, Artificial Sequence
  Description of Artificial Sequence: Synthetic oligonucleotide
ccuccuccuguuggagcca

SEQ ID NO: 2818373 - RNA, 19 nt, Artificial Sequence
  Description of Artificial Sequence: Synthetic oligonucleotide
gccgcaccagcuggaugaa

SEQ ID NO: 2818374 - RNA, 19 nt, Artificial Sequence
  Description of Artificial Sequence: Synthetic oligonucleotide
caggccgcaccagcuggau

SEQ ID NO: 2818375 - RNA, 19 nt, Artificial Sequence
  Description of Artificial Sequence: Synthetic oligonucleotide
cggagcuggggaccaccca

SEQ ID NO: 2818376 - RNA, 19 nt, Artificial Sequence
  Description of Artificial Sequence: Synthetic oligonucleotide
gcaccgagggucggcugcu

SEQ ID NO: 2818377 - RNA, 19 nt, Artificial Sequence
  Description of Artificial Sequence: Synthetic oligonucleotide
ggggaccacccagcuggua

SEQ ID NO: 2818378 - RNA, 19 nt, Artificial Sequence
  Description of Artificial Sequence: Synthetic oligonucleotide
ccacccuggucaucuccau

SEQ ID NO: 2818379 - RNA, 19 nt, Artificial Sequence
  Description of Artificial Sequence: Synthetic oligonucleotide
cggcugcucugccucugca

SEQ ID NO: 2818380 - RNA, 19 nt, Artificial Sequence
  Description of Artificial Sequence: Synthetic oligonucleotide
cagcugcacguaggcuacu

SEQ ID NO: 2818381 - RNA, 19 nt, Artificial Sequence
  Description of Artificial Sequence: Synthetic oligonucleotide
cgcgugcgcacagcagcca

SEQ ID NO: 2818382 - RNA, 19 nt, Artificial Sequence
  Description of Artificial Sequence: Synthetic oligonucleotide
cugcaggacuggggucuuu

SEQ ID NO: 2818383 - RNA, 19 nt, Artificial Sequence
  Description of Artificial Sequence: Synthetic oligonucleotide
  modified_base (3)..(3): a, c, u, g, unknown or other
uunuuuguuaacaaaauag

SEQ ID NO: 2818384 - RNA, 19 nt, Artificial Sequence
  Description of Artificial Sequence: Synthetic oligonucleotide
  modified_base (2)..(2): a, c, u, g, unknown or other
unuuuguuaacaaaauagg

SEQ ID NO: 2818385 - RNA, 19 nt, Artificial Sequence
  Description of Artificial Sequence: Synthetic oligonucleotide
uuuuccuggagccagcagg

SEQ ID NO: 2818386 - RNA, 19 nt, Artificial Sequence
  Description of Artificial Sequence: Synthetic oligonucleotide
uuuguuaacaaaauagguu

SEQ ID NO: 2818387 - RNA, 19 nt, Artificial Sequence
  Description of Artificial Sequence: Synthetic oligonucleotide
  modified_base (10)..(10): a, c, u, g, unknown or other
aacucgaagnggcggaagg

SEQ ID NO: 2818388 - RNA, 19 nt, Artificial Sequence
  Description of Artificial Sequence: Synthetic oligonucleotide
aauagguuuguuuuguuuu

SEQ ID NO: 2818389 - RNA, 19 nt, Artificial Sequence
  Description of Artificial Sequence: Synthetic oligonucleotide
uuguuaacaaaauagguuu

SEQ ID NO: 2818390 - RNA, 19 nt, Artificial Sequence
  Description of Artificial Sequence: Synthetic oligonucleotide
agugcgcagacgcagaggc

SEQ ID NO: 2818391 - RNA, 19 nt, Artificial Sequence
  Description of Artificial Sequence: Synthetic oligonucleotide
  modified_base (4)..(4): a, c, u, g, unknown or other
uuunuuuguuaacaaaaua

SEQ ID NO: 2818392 - RNA, 19 nt, Artificial Sequence
  Description of Artificial Sequence: Synthetic oligonucleotide
ucgggaaucggccaacucg

SEQ ID NO: 2818393 - RNA, 19 nt, Artificial Sequence
  Description of Artificial Sequence: Synthetic oligonucleotide
  modified_base (5)..(5): a, c, u, g, unknown or other
uuuunuuuguuaacaaaau

SEQ ID NO: 2818394 - RNA, 19 nt, Artificial Sequence
  Description of Artificial Sequence: Synthetic oligonucleotide
aguagucucggccgaaucc

SEQ ID NO: 2818395 - RNA, 19 nt, Artificial Sequence
  Description of Artificial Sequence: Synthetic oligonucleotide
aguggagaagacucgggcc

SEQ ID NO: 2818396 - RNA, 19 nt, Artificial Sequence
  Description of Artificial Sequence: Synthetic oligonucleotide
ugagcaauagugcagcagu

SEQ ID NO: 2818397 - RNA, 19 nt, Artificial Sequence
  Description of Artificial Sequence: Synthetic oligonucleotide
uuuuguuuuguuuuguuuu

SEQ ID NO: 2818398 - RNA, 19 nt, Artificial Sequence
  Description of Artificial Sequence: Synthetic oligonucleotide
uguuaacaaaauagguuug

SEQ ID NO: 2818399 - RNA, 19 nt, Artificial Sequence
  Description of Artificial Sequence: Synthetic oligonucleotide
agacccuuuuccuggagcc

SEQ ID NO: 2818400 - RNA, 19 nt, Artificial Sequence
  Description of Artificial Sequence: Synthetic oligonucleotide
  modified_base (16)..(16): a, c, u, g, unknown or other
ucggccaacucgaagnggc

SEQ ID NO: 2818401 - RNA, 19 nt, Artificial Sequence
  Description of Artificial Sequence: Synthetic oligonucleotide
aagacucgggccccuaugg

SEQ ID NO: 2818402 - RNA, 19 nt, Artificial Sequence
  Description of Artificial Sequence: Synthetic oligonucleotide
aauagugcagcagugcgca

SEQ ID NO: 2818403 - RNA, 19 nt, Artificial Sequence
  Description of Artificial Sequence: Synthetic oligonucleotide
gacgcagaggcccaggcgg

SEQ ID NO: 2818404 - RNA, 19 nt, Artificial Sequence
  Description of Artificial Sequence: Synthetic oligonucleotide
gagcgcgaagccuugagcg

SEQ ID NO: 2818405 - RNA, 19 nt, Artificial Sequence
  Description of Artificial Sequence: Synthetic oligonucleotide
acaaaauagguuuguuuug

SEQ ID NO: 2818406 - RNA, 19 nt, Artificial Sequence
  Description of Artificial Sequence: Synthetic oligonucleotide
  modified_base (19)..(19): a, c, u, g, unknown or other
gaaucggccaacucgaagn

SEQ ID NO: 2818407 - RNA, 19 nt, Artificial Sequence
  Description of Artificial Sequence: Synthetic oligonucleotide
aaauagguuuguuuuguuu

SEQ ID NO: 2818408 - RNA, 19 nt, Artificial Sequence
  Description of Artificial Sequence: Synthetic oligonucleotide
  modified_base (18)..(18): a, c, u, g, unknown or other
aaucggccaacucgaagng

SEQ ID NO: 2818409 - RNA, 19 nt, Artificial Sequence
  Description of Artificial Sequence: Synthetic oligonucleotide
uccacuguguccuguagcc

SEQ ID NO: 2818410 - RNA, 19 nt, Artificial Sequence
  Description of Artificial Sequence: Synthetic oligonucleotide
guuucucugugccagagac

SEQ ID NO: 2818411 - RNA, 19 nt, Artificial Sequence
  Description of Artificial Sequence: Synthetic oligonucleotide
gaauccuuagcagaugcgc

SEQ ID NO: 2818412 - RNA, 19 nt, Artificial Sequence
  Description of Artificial Sequence: Synthetic oligonucleotide
aaacgcagcagcgacagga

SEQ ID NO: 2818413 - RNA, 19 nt, Artificial Sequence
  Description of Artificial Sequence: Synthetic oligonucleotide
cacguuggcaccaucgggg

SEQ ID NO: 2818414 - RNA, 19 nt, Artificial Sequence
  Description of Artificial Sequence: Synthetic oligonucleotide
uaacaaaauagguuuguuu

SEQ ID NO: 2818415 - RNA, 19 nt, Artificial Sequence
  Description of Artificial Sequence: Synthetic oligonucleotide
gaaggugagcaauagugca

SEQ ID NO: 2818416 - RNA, 19 nt, Artificial Sequence
  Description of Artificial Sequence: Synthetic oligonucleotide
  modified_base (7)..(7): a, c, u, g, unknown or other
ucgaagnggcggaagguga

SEQ ID NO: 2818417 - RNA, 19 nt, Artificial Sequence
  Description of Artificial Sequence: Synthetic oligonucleotide
uuuccuggagccagcaggc

SEQ ID NO: 2818418 - RNA, 19 nt, Artificial Sequence
  Description of Artificial Sequence: Synthetic oligonucleotide
agcaauagugcagcagugc

SEQ ID NO: 2818419 - RNA, 19 nt, Artificial Sequence
  Description of Artificial Sequence: Synthetic oligonucleotide
ucacguuggcaccaucggg

SEQ ID NO: 2818420 - RNA, 19 nt, Artificial Sequence
  Description of Artificial Sequence: Synthetic oligonucleotide
ucacaguggagaagacucg

SEQ ID NO: 2818421 - RNA, 19 nt, Artificial Sequence
  Description of Artificial Sequence: Synthetic oligonucleotide
uuuucuugagacaggguuu

SEQ ID NO: 2818422 - RNA, 19 nt, Artificial Sequence
  Description of Artificial Sequence: Synthetic oligonucleotide
aucaacagcagcagcacgg

SEQ ID NO: 2818423 - RNA, 19 nt, Artificial Sequence
  Description of Artificial Sequence: Synthetic oligonucleotide
uuagcagaugcgcuguccu

SEQ ID NO: 2818424 - RNA, 19 nt, Artificial Sequence
  Description of Artificial Sequence: Synthetic oligonucleotide
aggugagcaauagugcagc

SEQ ID NO: 2818425 - RNA, 19 nt, Artificial Sequence
  Description of Artificial Sequence: Synthetic oligonucleotide
gaucaacagcagcagcacg

SEQ ID NO: 2818426 - RNA, 19 nt, Artificial Sequence
  Description of Artificial Sequence: Synthetic oligonucleotide
gagauggccaucacagugg

SEQ ID NO: 2818427 - RNA, 19 nt, Artificial Sequence
  Description of Artificial Sequence: Synthetic oligonucleotide
cacuguguccuguagcccg

SEQ ID NO: 2818428 - RNA, 19 nt, Artificial Sequence
  Description of Artificial Sequence: Synthetic oligonucleotide
uccugcaguagucucggcc

SEQ ID NO: 2818429 - RNA, 19 nt, Artificial Sequence
  Description of Artificial Sequence: Synthetic oligonucleotide
agcagaugcgcuguccucc

SEQ ID NO: 2818430 - RNA, 19 nt, Artificial Sequence
  Description of Artificial Sequence: Synthetic oligonucleotide
agugcagcagugcgcagac

SEQ ID NO: 2818431 - RNA, 19 nt, Artificial Sequence
  Description of Artificial Sequence: Synthetic oligonucleotide
gaaggcgcggagcagguug

SEQ ID NO: 2818432 - RNA, 19 nt, Artificial Sequence
  Description of Artificial Sequence: Synthetic oligonucleotide
agggcugcagcucacguug

SEQ ID NO: 2818433 - RNA, 19 nt, Artificial Sequence
  Description of Artificial Sequence: Synthetic oligonucleotide
acggagauggccaucacag

SEQ ID NO: 2818434 - RNA, 19 nt, Artificial Sequence
  Description of Artificial Sequence: Synthetic oligonucleotide
agcgacaggaucaacagca

SEQ ID NO: 2818435 - RNA, 19 nt, Artificial Sequence
  Description of Artificial Sequence: Synthetic oligonucleotide
gcaauagugcagcagugcg

SEQ ID NO: 2818436 - RNA, 19 nt, Artificial Sequence
  Description of Artificial Sequence: Synthetic oligonucleotide
aaaauagguuuguuuuguu

SEQ ID NO: 2818437 - RNA, 19 nt, Artificial Sequence
  Description of Artificial Sequence: Synthetic oligonucleotide
guggagaagacucgggccc

SEQ ID NO: 2818438 - RNA, 19 nt, Artificial Sequence
  Description of Artificial Sequence: Synthetic oligonucleotide
ugcgcuguccuccacugug

SEQ ID NO: 2818439 - RNA, 19 nt, Artificial Sequence
  Description of Artificial Sequence: Synthetic oligonucleotide
auggccaucacaguggaga

SEQ ID NO: 2818440 - RNA, 19 nt, Artificial Sequence
  Description of Artificial Sequence: Synthetic oligonucleotide
aaggugagcaauagugcag

SEQ ID NO: 2818441 - RNA, 19 nt, Artificial Sequence
  Description of Artificial Sequence: Synthetic oligonucleotide
caauagugcagcagugcgc

SEQ ID NO: 2818442 - RNA, 19 nt, Artificial Sequence
  Description of Artificial Sequence: Synthetic oligonucleotide
acgcagcaaacgcagcagc

SEQ ID NO: 2818443 - RNA, 19 nt, Artificial Sequence
  Description of Artificial Sequence: Synthetic oligonucleotide
aauccuuagcagaugcgcu

SEQ ID NO: 2818444 - RNA, 19 nt, Artificial Sequence
  Description of Artificial Sequence: Synthetic oligonucleotide
aagccuugagcguggccuc

SEQ ID NO: 2818445 - RNA, 19 nt, Artificial Sequence
  Description of Artificial Sequence: Synthetic oligonucleotide
ggagauggccaucacagug

SEQ ID NO: 2818446 - RNA, 19 nt, Artificial Sequence
  Description of Artificial Sequence: Synthetic oligonucleotide
ucuccugcaguagucucgg

SEQ ID NO: 2818447 - RNA, 19 nt, Artificial Sequence
  Description of Artificial Sequence: Synthetic oligonucleotide
uugagcguggccucgcgca

SEQ ID NO: 2818448 - RNA, 19 nt, Artificial Sequence
  Description of Artificial Sequence: Synthetic oligonucleotide
ugcgcagacgcagaggccc

SEQ ID NO: 2818449 - RNA, 19 nt, Artificial Sequence
  Description of Artificial Sequence: Synthetic oligonucleotide
gugccagagacccuuuucc

SEQ ID NO: 2818450 - RNA, 19 nt, Artificial Sequence
  Description of Artificial Sequence: Synthetic oligonucleotide
ugagcgcgaagccuugagc

SEQ ID NO: 2818451 - RNA, 19 nt, Artificial Sequence
  Description of Artificial Sequence: Synthetic oligonucleotide
uuucucugugccagagacc

SEQ ID NO: 2818452 - RNA, 19 nt, Artificial Sequence
  Description of Artificial Sequence: Synthetic oligonucleotide
auccuuagcagaugcgcug

SEQ ID NO: 2818453 - RNA, 19 nt, Artificial Sequence
  Description of Artificial Sequence: Synthetic oligonucleotide
caguggagaagacucgggc

SEQ ID NO: 2818454 - RNA, 19 nt, Artificial Sequence
  Description of Artificial Sequence: Synthetic oligonucleotide
uggaagccugcgcagcucc

SEQ ID NO: 2818455 - RNA, 19 nt, Artificial Sequence
  Description of Artificial Sequence: Synthetic oligonucleotide
cucacguuggcaccaucgg

SEQ ID NO: 2818456 - RNA, 19 nt, Artificial Sequence
  Description of Artificial Sequence: Synthetic oligonucleotide
ucggccgaauccuuagcag

SEQ ID NO: 2818457 - RNA, 19 nt, Artificial Sequence
  Description of Artificial Sequence: Synthetic oligonucleotide
gagacccuuuuccuggagc

SEQ ID NO: 2818458 - RNA, 19 nt, Artificial Sequence
  Description of Artificial Sequence: Synthetic oligonucleotide
uuucuugagacaggguuuc

SEQ ID NO: 2818459 - RNA, 19 nt, Artificial Sequence
  Description of Artificial Sequence: Synthetic oligonucleotide
ugugccagagacccuuuuc

SEQ ID NO: 2818460 - RNA, 19 nt, Artificial Sequence
  Description of Artificial Sequence: Synthetic oligonucleotide
uguagcccgcgguagguga

SEQ ID NO: 2818461 - RNA, 19 nt, Artificial Sequence
  Description of Artificial Sequence: Synthetic oligonucleotide
aggaucaacagcagcagca

SEQ ID NO: 2818462 - RNA, 19 nt, Artificial Sequence
  Description of Artificial Sequence: Synthetic oligonucleotide
uccgucgacgcagcaaacg

SEQ ID NO: 2818463 - RNA, 19 nt, Artificial Sequence
  Description of Artificial Sequence: Synthetic oligonucleotide
gaagacucgggccccuaug

SEQ ID NO: 2818464 - RNA, 19 nt, Artificial Sequence
  Description of Artificial Sequence: Synthetic oligonucleotide
ucgcguagcuccgagccgg

SEQ ID NO: 2818465 - RNA, 19 nt, Artificial Sequence
  Description of Artificial Sequence: Synthetic oligonucleotide
ccugcaguagucucggccg

SEQ ID NO: 2818466 - RNA, 19 nt, Artificial Sequence
  Description of Artificial Sequence: Synthetic oligonucleotide
cacaguggagaagacucgg

SEQ ID NO: 2818467 - RNA, 19 nt, Artificial Sequence
  Description of Artificial Sequence: Synthetic oligonucleotide
gugggcaccgucgaaggcg

SEQ ID NO: 2818468 - RNA, 19 nt, Artificial Sequence
  Description of Artificial Sequence: Synthetic oligonucleotide
uuagggcugcagcucacgu

SEQ ID NO: 2818469 - RNA, 19 nt, Artificial Sequence
  Description of Artificial Sequence: Synthetic oligonucleotide
agacgcagaggcccaggcg

SEQ ID NO: 2818470 - RNA, 19 nt, Artificial Sequence
  Description of Artificial Sequence: Synthetic oligonucleotide
uaggugagcgcgaagccuu

SEQ ID NO: 2818471 - RNA, 19 nt, Artificial Sequence
  Description of Artificial Sequence: Synthetic oligonucleotide
aaggcgcggagcagguugc

SEQ ID NO: 2818472 - RNA, 19 nt, Artificial Sequence
  Description of Artificial Sequence: Synthetic oligonucleotide
gaagccuugagcguggccu

SEQ ID NO: 2818473 - RNA, 19 nt, Artificial Sequence
  Description of Artificial Sequence: Synthetic oligonucleotide
ugcagcucacguuggcacc

SEQ ID NO: 2818474 - RNA, 19 nt, Artificial Sequence
  Description of Artificial Sequence: Synthetic oligonucleotide
cuuagcagaugcgcugucc

SEQ ID NO: 2818475 - RNA, 19 nt, Artificial Sequence
  Description of Artificial Sequence: Synthetic oligonucleotide
ugcggaaggugagcaauag

SEQ ID NO: 2818476 - RNA, 19 nt, Artificial Sequence
  Description of Artificial Sequence: Synthetic oligonucleotide
gucgacgcagcaaacgcag

SEQ ID NO: 2818477 - RNA, 19 nt, Artificial Sequence
  Description of Artificial Sequence: Synthetic oligonucleotide
gacgcagcaaacgcagcag

SEQ ID NO: 2818478 - RNA, 19 nt, Artificial Sequence
  Description of Artificial Sequence: Synthetic oligonucleotide
gcagcgacaggaucaacag

SEQ ID NO: 2818479 - RNA, 19 nt, Artificial Sequence
  Description of Artificial Sequence: Synthetic oligonucleotide
cugcagcucacguuggcac

SEQ ID NO: 2818480 - RNA, 19 nt, Artificial Sequence
  Description of Artificial Sequence: Synthetic oligonucleotide
uguguccuguagcccgcgg

SEQ ID NO: 2818481 - RNA, 19 nt, Artificial Sequence
  Description of Artificial Sequence: Synthetic oligonucleotide
ugggcaccgucgaaggcgc

SEQ ID NO: 2818482 - RNA, 19 nt, Artificial Sequence
  Description of Artificial Sequence: Synthetic oligonucleotide
agcagguugccggacgagg

SEQ ID NO: 2818483 - RNA, 19 nt, Artificial Sequence
  Description of Artificial Sequence: Synthetic oligonucleotide
ggaaggugagcaauagugc

SEQ ID NO: 2818484 - RNA, 19 nt, Artificial Sequence
  Description of Artificial Sequence: Synthetic oligonucleotide
aucgcugcggaaggugagc

SEQ ID NO: 2818485 - RNA, 19 nt, Artificial Sequence
  Description of Artificial Sequence: Synthetic oligonucleotide
cuccacuguguccuguagc

SEQ ID NO: 2818486 - RNA, 19 nt, Artificial Sequence
  Description of Artificial Sequence: Synthetic oligonucleotide
gucgaaggcgcggagcagg

SEQ ID NO: 2818487 - RNA, 19 nt, Artificial Sequence
  Description of Artificial Sequence: Synthetic oligonucleotide
agcagcgacaggaucaaca

SEQ ID NO: 2818488 - RNA, 19 nt, Artificial Sequence
  Description of Artificial Sequence: Synthetic oligonucleotide
agauggccaucacagugga

SEQ ID NO: 2818489 - RNA, 19 nt, Artificial Sequence
  Description of Artificial Sequence: Synthetic oligonucleotide
ucuugagacaggguuucuc

SEQ ID NO: 2818490 - RNA, 19 nt, Artificial Sequence
  Description of Artificial Sequence: Synthetic oligonucleotide
gucuccugcaguagucucg

SEQ ID NO: 2818491 - RNA, 19 nt, Artificial Sequence
  Description of Artificial Sequence: Synthetic oligonucleotide
uguccuguagcccgcggua

SEQ ID NO: 2818492 - RNA, 19 nt, Artificial Sequence
  Description of Artificial Sequence: Synthetic oligonucleotide
gugagcaauagugcagcag

SEQ ID NO: 2818493 - RNA, 19 nt, Artificial Sequence
  Description of Artificial Sequence: Synthetic oligonucleotide
cagcaaacgcagcagcgac

SEQ ID NO: 2818494 - RNA, 19 nt, Artificial Sequence
  Description of Artificial Sequence: Synthetic oligonucleotide
agcguggccucgcgcaucg

SEQ ID NO: 2818495 - RNA, 19 nt, Artificial Sequence
  Description of Artificial Sequence: Synthetic oligonucleotide
cuauggaagccugcgcagc

SEQ ID NO: 2818496 - RNA, 19 nt, Artificial Sequence
  Description of Artificial Sequence: Synthetic oligonucleotide
gaagccugcgcagcucccg

SEQ ID NO: 2818497 - RNA, 19 nt, Artificial Sequence
  Description of Artificial Sequence: Synthetic oligonucleotide
agaugcgcuguccuccacu

SEQ ID NO: 2818498 - RNA, 19 nt, Artificial Sequence
  Description of Artificial Sequence: Synthetic oligonucleotide
ucgcgcaucgcugcggaag

SEQ ID NO: 2818499 - RNA, 19 nt, Artificial Sequence
  Description of Artificial Sequence: Synthetic oligonucleotide
guuaacaaaauagguuugu

SEQ ID NO: 2818500 - RNA, 19 nt, Artificial Sequence
  Description of Artificial Sequence: Synthetic oligonucleotide
  modified_base (8)..(8): a, c, u, g, unknown or other
cucgaagnggcggaaggug

SEQ ID NO: 2818501 - RNA, 19 nt, Artificial Sequence
  Description of Artificial Sequence: Synthetic oligonucleotide
gagcaauagugcagcagug

SEQ ID NO: 2818502 - RNA, 19 nt, Artificial Sequence
  Description of Artificial Sequence: Synthetic oligonucleotide
gucucggccgaauccuuag

SEQ ID NO: 2818503 - RNA, 19 nt, Artificial Sequence
  Description of Artificial Sequence: Synthetic oligonucleotide
ggaaucggccaacucgaag

SEQ ID NO: 2818504 - RNA, 19 nt, Artificial Sequence
  Description of Artificial Sequence: Synthetic oligonucleotide
uagugcagcagugcgcaga

SEQ ID NO: 2818505 - RNA, 19 nt, Artificial Sequence
  Description of Artificial Sequence: Synthetic oligonucleotide
ucucggccgaauccuuagc

SEQ ID NO: 2818506 - RNA, 19 nt, Artificial Sequence
  Description of Artificial Sequence: Synthetic oligonucleotide
acccuuuuccuggagccag

SEQ ID NO: 2818507 - RNA, 19 nt, Artificial Sequence
  Description of Artificial Sequence: Synthetic oligonucleotide
caggcagcuccgucgacgc

SEQ ID NO: 2818508 - RNA, 19 nt, Artificial Sequence
  Description of Artificial Sequence: Synthetic oligonucleotide
acuguguccuguagcccgc

SEQ ID NO: 2818509 - RNA, 19 nt, Artificial Sequence
  Description of Artificial Sequence: Synthetic oligonucleotide
uccuuagcagaugcgcugu

SEQ ID NO: 2818510 - RNA, 19 nt, Artificial Sequence
  Description of Artificial Sequence: Synthetic oligonucleotide
cagguugccggacgaggcg

SEQ ID NO: 2818511 - RNA, 19 nt, Artificial Sequence
  Description of Artificial Sequence: Synthetic oligonucleotide
ugccggacgaggcgucgcg

SEQ ID NO: 2818512 - RNA, 19 nt, Artificial Sequence
  Description of Artificial Sequence: Synthetic oligonucleotide
accgucgaaggcgcggagc

SEQ ID NO: 2818513 - RNA, 19 nt, Artificial Sequence
  Description of Artificial Sequence: Synthetic oligonucleotide
agcagcacggagauggcca

SEQ ID NO: 2818514 - RNA, 19 nt, Artificial Sequence
  Description of Artificial Sequence: Synthetic oligonucleotide
cuuagggcugcagcucacg

SEQ ID NO: 2818515 - RNA, 19 nt, Artificial Sequence
  Description of Artificial Sequence: Synthetic oligonucleotide
gcaaacgcagcagcgacag

SEQ ID NO: 2818516 - RNA, 19 nt, Artificial Sequence
  Description of Artificial Sequence: Synthetic oligonucleotide
ccagcaggcagcuccgucg

SEQ ID NO: 2818517 - RNA, 19 nt, Artificial Sequence
  Description of Artificial Sequence: Synthetic oligonucleotide
caaaauagguuuguuuugu

SEQ ID NO: 2818518 - RNA, 19 nt, Artificial Sequence
  Description of Artificial Sequence: Synthetic oligonucleotide
ccgaauccuuagcagaugc

SEQ ID NO: 2818519 - RNA, 19 nt, Artificial Sequence
  Description of Artificial Sequence: Synthetic oligonucleotide
agcacggagauggccauca

SEQ ID NO: 2818520 - RNA, 19 nt, Artificial Sequence
  Description of Artificial Sequence: Synthetic oligonucleotide
uggccaucacaguggagaa

SEQ ID NO: 2818521 - RNA, 19 nt, Artificial Sequence
  Description of Artificial Sequence: Synthetic oligonucleotide
cuugagcguggccucgcgc

SEQ ID NO: 2818522 - RNA, 19 nt, Artificial Sequence
  Description of Artificial Sequence: Synthetic oligonucleotide
caucgcugcggaaggugag

SEQ ID NO: 2818523 - RNA, 19 nt, Artificial Sequence
  Description of Artificial Sequence: Synthetic oligonucleotide
acucgggccccuauggaag

SEQ ID NO: 2818524 - RNA, 19 nt, Artificial Sequence
  Description of Artificial Sequence: Synthetic oligonucleotide
acgcagcagcgacaggauc

SEQ ID NO: 2818525 - RNA, 19 nt, Artificial Sequence
  Description of Artificial Sequence: Synthetic oligonucleotide
gugagcgcgaagccuugag

SEQ ID NO: 2818526 - RNA, 19 nt, Artificial Sequence
  Description of Artificial Sequence: Synthetic oligonucleotide
ucgacgcagcaaacgcagc

SEQ ID NO: 2818527 - RNA, 19 nt, Artificial Sequence
  Description of Artificial Sequence: Synthetic oligonucleotide
gcucacguuggcaccaucg

SEQ ID NO: 2818528 - RNA, 19 nt, Artificial Sequence
  Description of Artificial Sequence: Synthetic oligonucleotide
gacucgggccccuauggaa

SEQ ID NO: 2818529 - RNA, 19 nt, Artificial Sequence
  Description of Artificial Sequence: Synthetic oligonucleotide
agcgcgaagccuugagcgu

SEQ ID NO: 2818530 - RNA, 19 nt, Artificial Sequence
  Description of Artificial Sequence: Synthetic oligonucleotide
  modified_base (14)..(14): a, c, u, g, unknown or other
ggccaacucgaagnggcgg

SEQ ID NO: 2818531 - RNA, 19 nt, Artificial Sequence
  Description of Artificial Sequence: Synthetic oligonucleotide
  modified_base (17)..(17): a, c, u, g, unknown or other
aucggccaacucgaagngg

SEQ ID NO: 2818532 - RNA, 19 nt, Artificial Sequence
  Description of Artificial Sequence: Synthetic oligonucleotide
gucgcguagcuccgagccg

SEQ ID NO: 2818533 - RNA, 19 nt, Artificial Sequence
  Description of Artificial Sequence: Synthetic oligonucleotide
  modified_base (9)..(9): a, c, u, g, unknown or other
acucgaagnggcggaaggu

SEQ ID NO: 2818534 - RNA, 19 nt, Artificial Sequence
  Description of Artificial Sequence: Synthetic oligonucleotide
cagcgacaggaucaacagc

SEQ ID NO: 2818535 - RNA, 19 nt, Artificial Sequence
  Description of Artificial Sequence: Synthetic oligonucleotide
gagccggucucgggaaucg

SEQ ID NO: 2818536 - RNA, 19 nt, Artificial Sequence
  Description of Artificial Sequence: Synthetic oligonucleotide
ucgaaggcgcggagcaggu

SEQ ID NO: 2818537 - RNA, 19 nt, Artificial Sequence
  Description of Artificial Sequence: Synthetic oligonucleotide
acguuggcaccaucggggu

SEQ ID NO: 2818538 - RNA, 19 nt, Artificial Sequence
  Description of Artificial Sequence: Synthetic oligonucleotide
agccugcgcagcucccggc

SEQ ID NO: 2818539 - RNA, 19 nt, Artificial Sequence
  Description of Artificial Sequence: Synthetic oligonucleotide
gccaucacaguggagaaga

SEQ ID NO: 2818540 - RNA, 19 nt, Artificial Sequence
  Description of Artificial Sequence: Synthetic oligonucleotide
accaucggggucuccugca

SEQ ID NO: 2818541 - RNA, 19 nt, Artificial Sequence
  Description of Artificial Sequence: Synthetic oligonucleotide
cucgggccccuauggaagc

SEQ ID NO: 2818542 - RNA, 19 nt, Artificial Sequence
  Description of Artificial Sequence: Synthetic oligonucleotide
cgaggcgucgcguagcucc

SEQ ID NO: 2818543 - RNA, 19 nt, Artificial Sequence
  Description of Artificial Sequence: Synthetic oligonucleotide
aucggggucuccugcagua

SEQ ID NO: 2818544 - RNA, 19 nt, Artificial Sequence
  Description of Artificial Sequence: Synthetic oligonucleotide
cucggccgaauccuuagca

SEQ ID NO: 2818545 - RNA, 19 nt, Artificial Sequence
  Description of Artificial Sequence: Synthetic oligonucleotide
auagugcagcagugcgcag

SEQ ID NO: 2818546 - RNA, 19 nt, Artificial Sequence
  Description of Artificial Sequence: Synthetic oligonucleotide
guagcuccgagccggucuc

SEQ ID NO: 2818547 - RNA, 19 nt, Artificial Sequence
  Description of Artificial Sequence: Synthetic oligonucleotide
ccuauggaagccugcgcag

SEQ ID NO: 2818548 - RNA, 19 nt, Artificial Sequence
  Description of Artificial Sequence: Synthetic oligonucleotide
caccaucggggucuccugc

SEQ ID NO: 2818549 - RNA, 19 nt, Artificial Sequence
  Description of Artificial Sequence: Synthetic oligonucleotide
uagcagaugcgcuguccuc

SEQ ID NO: 2818550 - RNA, 19 nt, Artificial Sequence
  Description of Artificial Sequence: Synthetic oligonucleotide
auggaagccugcgcagcuc

SEQ ID NO: 2818551 - RNA, 19 nt, Artificial Sequence
  Description of Artificial Sequence: Synthetic oligonucleotide
  modified_base (11)..(11): a, c, u, g, unknown or other
caacucgaagnggcggaag

SEQ ID NO: 2818552 - RNA, 19 nt, Artificial Sequence
  Description of Artificial Sequence: Synthetic oligonucleotide
gggugggcaccgucgaagg

SEQ ID NO: 2818553 - RNA, 19 nt, Artificial Sequence
  Description of Artificial Sequence: Synthetic oligonucleotide
agaagacucgggccccuau

SEQ ID NO: 2818554 - RNA, 19 nt, Artificial Sequence
  Description of Artificial Sequence: Synthetic oligonucleotide
gaggcccaggcgguggcgg

SEQ ID NO: 2818555 - RNA, 19 nt, Artificial Sequence
  Description of Artificial Sequence: Synthetic oligonucleotide
ucgcugcggaaggugagca

SEQ ID NO: 2818556 - RNA, 19 nt, Artificial Sequence
  Description of Artificial Sequence: Synthetic oligonucleotide
guuggcaccaucggggucu

SEQ ID NO: 2818557 - RNA, 19 nt, Artificial Sequence
  Description of Artificial Sequence: Synthetic oligonucleotide
cagcagugcgcagacgcag

SEQ ID NO: 2818558 - RNA, 19 nt, Artificial Sequence
  Description of Artificial Sequence: Synthetic oligonucleotide
aacgcagcagcgacaggau

SEQ ID NO: 2818559 - RNA, 19 nt, Artificial Sequence
  Description of Artificial Sequence: Synthetic oligonucleotide
ggaucaacagcagcagcac

SEQ ID NO: 2818560 - RNA, 19 nt, Artificial Sequence
  Description of Artificial Sequence: Synthetic oligonucleotide
agcucacguuggcaccauc

SEQ ID NO: 2818561 - RNA, 19 nt, Artificial Sequence
  Description of Artificial Sequence: Synthetic oligonucleotide
gaggcgucgcguagcuccg

SEQ ID NO: 2818562 - RNA, 19 nt, Artificial Sequence
  Description of Artificial Sequence: Synthetic oligonucleotide
uagggcugcagcucacguu

SEQ ID NO: 2818563 - RNA, 19 nt, Artificial Sequence
  Description of Artificial Sequence: Synthetic oligonucleotide
cacggagauggccaucaca

SEQ ID NO: 2818564 - RNA, 19 nt, Artificial Sequence
  Description of Artificial Sequence: Synthetic oligonucleotide
ugagcguggccucgcgcau

SEQ ID NO: 2818565 - RNA, 19 nt, Artificial Sequence
  Description of Artificial Sequence: Synthetic oligonucleotide
ggcagcuccgucgacgcag

SEQ ID NO: 2818566 - RNA, 19 nt, Artificial Sequence
  Description of Artificial Sequence: Synthetic oligonucleotide
gcgcggagcagguugccgg

SEQ ID NO: 2818567 - RNA, 19 nt, Artificial Sequence
  Description of Artificial Sequence: Synthetic oligonucleotide
agcaggcagcuccgucgac

SEQ ID NO: 2818568 - RNA, 19 nt, Artificial Sequence
  Description of Artificial Sequence: Synthetic oligonucleotide
gcaggcagcuccgucgacg

SEQ ID NO: 2818569 - RNA, 19 nt, Artificial Sequence
  Description of Artificial Sequence: Synthetic oligonucleotide
gauggccaucacaguggag

SEQ ID NO: 2818570 - RNA, 19 nt, Artificial Sequence
  Description of Artificial Sequence: Synthetic oligonucleotide
ccgucgacgcagcaaacgc

SEQ ID NO: 2818571 - RNA, 19 nt, Artificial Sequence
  Description of Artificial Sequence: Synthetic oligonucleotide
ucucugugccagagacccu

SEQ ID NO: 2818572 - RNA, 19 nt, Artificial Sequence
  Description of Artificial Sequence: Synthetic oligonucleotide
ucggggucuccugcaguag

SEQ ID NO: 2818573 - RNA, 19 nt, Artificial Sequence
  Description of Artificial Sequence: Synthetic oligonucleotide
guugccggacgaggcgucg

SEQ ID NO: 2818574 - RNA, 19 nt, Artificial Sequence
  Description of Artificial Sequence: Synthetic oligonucleotide
caaacgcagcagcgacagg

SEQ ID NO: 2818575 - RNA, 19 nt, Artificial Sequence
  Description of Artificial Sequence: Synthetic oligonucleotide
uccuccacuguguccugua

SEQ ID NO: 2818576 - RNA, 19 nt, Artificial Sequence
  Description of Artificial Sequence: Synthetic oligonucleotide
guccuguagcccgcgguag

SEQ ID NO: 2818577 - RNA, 19 nt, Artificial Sequence
  Description of Artificial Sequence: Synthetic oligonucleotide
guagucucggccgaauccu

SEQ ID NO: 2818578 - RNA, 19 nt, Artificial Sequence
  Description of Artificial Sequence: Synthetic oligonucleotide
uucuugagacaggguuucu

SEQ ID NO: 2818579 - RNA, 19 nt, Artificial Sequence
  Description of Artificial Sequence: Synthetic oligonucleotide
cgucgcguagcuccgagcc

SEQ ID NO: 2818580 - RNA, 19 nt, Artificial Sequence
  Description of Artificial Sequence: Synthetic oligonucleotide
agcaaacgcagcagcgaca

SEQ ID NO: 2818581 - RNA, 19 nt, Artificial Sequence
  Description of Artificial Sequence: Synthetic oligonucleotide
cgaauccuuagcagaugcg

SEQ ID NO: 2818582 - RNA, 19 nt, Artificial Sequence
  Description of Artificial Sequence: Synthetic oligonucleotide
ucucgggaaucggccaacu

SEQ ID NO: 2818583 - RNA, 19 nt, Artificial Sequence
  Description of Artificial Sequence: Synthetic oligonucleotide
cagugcgcagacgcagagg

SEQ ID NO: 2818584 - RNA, 19 nt, Artificial Sequence
  Description of Artificial Sequence: Synthetic oligonucleotide
uagucucggccgaauccuu

SEQ ID NO: 2818585 - RNA, 19 nt, Artificial Sequence
  Description of Artificial Sequence: Synthetic oligonucleotide
agguugccggacgaggcgu

SEQ ID NO: 2818586 - RNA, 19 nt, Artificial Sequence
  Description of Artificial Sequence: Synthetic oligonucleotide
ccggucucgggaaucggcc

SEQ ID NO: 2818587 - RNA, 19 nt, Artificial Sequence
  Description of Artificial Sequence: Synthetic oligonucleotide
agccuugagcguggccucg

SEQ ID NO: 2818588 - RNA, 19 nt, Artificial Sequence
  Description of Artificial Sequence: Synthetic oligonucleotide
gagcagguugccggacgag

SEQ ID NO: 2818589 - RNA, 19 nt, Artificial Sequence
  Description of Artificial Sequence: Synthetic oligonucleotide
cucgggaaucggccaacuc

SEQ ID NO: 2818590 - RNA, 19 nt, Artificial Sequence
  Description of Artificial Sequence: Synthetic oligonucleotide
gcuguccuccacugugucc

SEQ ID NO: 2818591 - RNA, 19 nt, Artificial Sequence
  Description of Artificial Sequence: Synthetic oligonucleotide
aggcccaggcgguggcggg

SEQ ID NO: 2818592 - RNA, 19 nt, Artificial Sequence
  Description of Artificial Sequence: Synthetic oligonucleotide
agcuccgagccggucucgg

SEQ ID NO: 2818593 - RNA, 19 nt, Artificial Sequence
  Description of Artificial Sequence: Synthetic oligonucleotide
gcagugcgcagacgcagag

SEQ ID NO: 2818594 - RNA, 19 nt, Artificial Sequence
  Description of Artificial Sequence: Synthetic oligonucleotide
cuguccuccacuguguccu

SEQ ID NO: 2818595 - RNA, 19 nt, Artificial Sequence
  Description of Artificial Sequence: Synthetic oligonucleotide
guggccucgcgcaucgcug

SEQ ID NO: 2818596 - RNA, 19 nt, Artificial Sequence
  Description of Artificial Sequence: Synthetic oligonucleotide
gccccuauggaagccugcg

SEQ ID NO: 2818597 - RNA, 19 nt, Artificial Sequence
  Description of Artificial Sequence: Synthetic oligonucleotide
cccgcgguaggugagcgcg

SEQ ID NO: 2818598 - RNA, 19 nt, Artificial Sequence
  Description of Artificial Sequence: Synthetic oligonucleotide
ggcuuagggcugcagcuca

SEQ ID NO: 2818599 - RNA, 19 nt, Artificial Sequence
  Description of Artificial Sequence: Synthetic oligonucleotide
guagcccgcgguaggugag

SEQ ID NO: 2818600 - RNA, 19 nt, Artificial Sequence
  Description of Artificial Sequence: Synthetic oligonucleotide
gacccuuuuccuggagcca

SEQ ID NO: 2818601 - RNA, 19 nt, Artificial Sequence
  Description of Artificial Sequence: Synthetic oligonucleotide
cccuauggaagccugcgca

SEQ ID NO: 2818602 - RNA, 19 nt, Artificial Sequence
  Description of Artificial Sequence: Synthetic oligonucleotide
gcuccgucgacgcagcaaa

SEQ ID NO: 2818603 - RNA, 19 nt, Artificial Sequence
  Description of Artificial Sequence: Synthetic oligonucleotide
agcccgcgguaggugagcg

SEQ ID NO: 2818604 - RNA, 19 nt, Artificial Sequence
  Description of Artificial Sequence: Synthetic oligonucleotide
ggguuucucugugccagag

SEQ ID NO: 2818605 - RNA, 19 nt, Artificial Sequence
  Description of Artificial Sequence: Synthetic oligonucleotide
cuccgagccggucucggga

SEQ ID NO: 2818606 - RNA, 19 nt, Artificial Sequence
  Description of Artificial Sequence: Synthetic oligonucleotide
gcagguugccggacgaggc

SEQ ID NO: 2818607 - RNA, 19 nt, Artificial Sequence
  Description of Artificial Sequence: Synthetic oligonucleotide
ugcaguagucucggccgaa

SEQ ID NO: 2818608 - RNA, 19 nt, Artificial Sequence
  Description of Artificial Sequence: Synthetic oligonucleotide
  modified_base (6)..(6): a, c, u, g, unknown or other
cgaagnggcggaaggugag

SEQ ID NO: 2818609 - RNA, 19 nt, Artificial Sequence
  Description of Artificial Sequence: Synthetic oligonucleotide
ggucuccugcaguagucuc

SEQ ID NO: 2818610 - RNA, 19 nt, Artificial Sequence
  Description of Artificial Sequence: Synthetic oligonucleotide
uuccuggagccagcaggca

SEQ ID NO: 2818611 - RNA, 19 nt, Artificial Sequence
  Description of Artificial Sequence: Synthetic oligonucleotide
ggcaccgucgaaggcgcgg

SEQ ID NO: 2818612 - RNA, 19 nt, Artificial Sequence
  Description of Artificial Sequence: Synthetic oligonucleotide
ggagcagguugccggacga

SEQ ID NO: 2818613 - RNA, 19 nt, Artificial Sequence
  Description of Artificial Sequence: Synthetic oligonucleotide
ggugagcaauagugcagca

SEQ ID NO: 2818614 - RNA, 19 nt, Artificial Sequence
  Description of Artificial Sequence: Synthetic oligonucleotide
uugccggacgaggcgucgc

SEQ ID NO: 2818615 - RNA, 19 nt, Artificial Sequence
  Description of Artificial Sequence: Synthetic oligonucleotide
uagcuccgagccggucucg

SEQ ID NO: 2818616 - RNA, 19 nt, Artificial Sequence
  Description of Artificial Sequence: Synthetic oligonucleotide
cuccgucgacgcagcaaac

SEQ ID NO: 2818617 - RNA, 19 nt, Artificial Sequence
  Description of Artificial Sequence: Synthetic oligonucleotide
cccggcuuagggcugcagc

SEQ ID NO: 2818618 - RNA, 19 nt, Artificial Sequence
  Description of Artificial Sequence: Synthetic oligonucleotide
cgguaggugagcgcgaagc

SEQ ID NO: 2818619 - RNA, 19 nt, Artificial Sequence
  Description of Artificial Sequence: Synthetic oligonucleotide
agcagugcgcagacgcaga

SEQ ID NO: 2818620 - RNA, 19 nt, Artificial Sequence
  Description of Artificial Sequence: Synthetic oligonucleotide
cuguguccuguagcccgcg

SEQ ID NO: 2818621 - RNA, 19 nt, Artificial Sequence
  Description of Artificial Sequence: Synthetic oligonucleotide
ucgggccccuauggaagcc

SEQ ID NO: 2818622 - RNA, 19 nt, Artificial Sequence
  Description of Artificial Sequence: Synthetic oligonucleotide
caucacaguggagaagacu

SEQ ID NO: 2818623 - RNA, 19 nt, Artificial Sequence
  Description of Artificial Sequence: Synthetic oligonucleotide
ggugggcaccgucgaaggc

SEQ ID NO: 2818624 - RNA, 19 nt, Artificial Sequence
  Description of Artificial Sequence: Synthetic oligonucleotide
aggcgcggagcagguugcc

SEQ ID NO: 2818625 - RNA, 19 nt, Artificial Sequence
  Description of Artificial Sequence: Synthetic oligonucleotide
augcgcuguccuccacugu

SEQ ID NO: 2818626 - RNA, 19 nt, Artificial Sequence
  Description of Artificial Sequence: Synthetic oligonucleotide
gacgaggcgucgcguagcu

SEQ ID NO: 2818627 - RNA, 19 nt, Artificial Sequence
  Description of Artificial Sequence: Synthetic oligonucleotide
gcagcaaacgcagcagcga

SEQ ID NO: 2818628 - RNA, 19 nt, Artificial Sequence
  Description of Artificial Sequence: Synthetic oligonucleotide
cuguagcccgcgguaggug

SEQ ID NO: 2818629 - RNA, 19 nt, Artificial Sequence
  Description of Artificial Sequence: Synthetic oligonucleotide
cugcaguagucucggccga

SEQ ID NO: 2818630 - RNA, 19 nt, Artificial Sequence
  Description of Artificial Sequence: Synthetic oligonucleotide
agccggucucgggaaucgg

SEQ ID NO: 2818631 - RNA, 19 nt, Artificial Sequence
  Description of Artificial Sequence: Synthetic oligonucleotide
agcuccgucgacgcagcaa

SEQ ID NO: 2818632 - RNA, 19 nt, Artificial Sequence
  Description of Artificial Sequence: Synthetic oligonucleotide
cgcagcucccggcuuaggg

SEQ ID NO: 2818633 - RNA, 19 nt, Artificial Sequence
  Description of Artificial Sequence: Synthetic oligonucleotide
ggcgucgcguagcuccgag

SEQ ID NO: 2818634 - RNA, 19 nt, Artificial Sequence
  Description of Artificial Sequence: Synthetic oligonucleotide
gcagaggcccaggcggugg

SEQ ID NO: 2818635 - RNA, 19 nt, Artificial Sequence
  Description of Artificial Sequence: Synthetic oligonucleotide
cagcaggcagcuccgucga

SEQ ID NO: 2818636 - RNA, 19 nt, Artificial Sequence
  Description of Artificial Sequence: Synthetic oligonucleotide
cuccugcaguagucucggc

SEQ ID NO: 2818637 - RNA, 19 nt, Artificial Sequence
  Description of Artificial Sequence: Synthetic oligonucleotide
cagcucccggcuuagggcu

SEQ ID NO: 2818638 - RNA, 19 nt, Artificial Sequence
  Description of Artificial Sequence: Synthetic oligonucleotide
gcgacaggaucaacagcag

SEQ ID NO: 2818639 - RNA, 19 nt, Artificial Sequence
  Description of Artificial Sequence: Synthetic oligonucleotide
gucucgggaaucggccaac

SEQ ID NO: 2818640 - RNA, 19 nt, Artificial Sequence
  Description of Artificial Sequence: Synthetic oligonucleotide
gcuccgagccggucucggg

SEQ ID NO: 2818641 - RNA, 19 nt, Artificial Sequence
  Description of Artificial Sequence: Synthetic oligonucleotide
  modified_base (13)..(13): a, c, u, g, unknown or other
gccaacucgaagnggcgga

SEQ ID NO: 2818642 - RNA, 19 nt, Artificial Sequence
  Description of Artificial Sequence: Synthetic oligonucleotide
ggccaucacaguggagaag

SEQ ID NO: 2818643 - RNA, 19 nt, Artificial Sequence
  Description of Artificial Sequence: Synthetic oligonucleotide
cugcggaaggugagcaaua

SEQ ID NO: 2818644 - RNA, 19 nt, Artificial Sequence
  Description of Artificial Sequence: Synthetic oligonucleotide
gcaccaucggggucuccug

SEQ ID NO: 2818645 - RNA, 19 nt, Artificial Sequence
  Description of Artificial Sequence: Synthetic oligonucleotide
gcgcgaagccuugagcgug

SEQ ID NO: 2818646 - RNA, 19 nt, Artificial Sequence
  Description of Artificial Sequence: Synthetic oligonucleotide
ggucucgggaaucggccaa

SEQ ID NO: 2818647 - RNA, 19 nt, Artificial Sequence
  Description of Artificial Sequence: Synthetic oligonucleotide
cagaugcgcuguccuccac

SEQ ID NO: 2818648 - RNA, 19 nt, Artificial Sequence
  Description of Artificial Sequence: Synthetic oligonucleotide
ccaucacaguggagaagac

SEQ ID NO: 2818649 - RNA, 19 nt, Artificial Sequence
  Description of Artificial Sequence: Synthetic oligonucleotide
caggcgguggcgggugggc

SEQ ID NO: 2818650 - RNA, 19 nt, Artificial Sequence
  Description of Artificial Sequence: Synthetic oligonucleotide
gcagaugcgcuguccucca

SEQ ID NO: 2818651 - RNA, 19 nt, Artificial Sequence
  Description of Artificial Sequence: Synthetic oligonucleotide
caccgucgaaggcgcggag

SEQ ID NO: 2818652 - RNA, 19 nt, Artificial Sequence
  Description of Artificial Sequence: Synthetic oligonucleotide
cgggaaucggccaacucga

SEQ ID NO: 2818653 - RNA, 19 nt, Artificial Sequence
  Description of Artificial Sequence: Synthetic oligonucleotide
guggcgggugggcaccguc

SEQ ID NO: 2818654 - RNA, 19 nt, Artificial Sequence
  Description of Artificial Sequence: Synthetic oligonucleotide
aggugagcgcgaagccuug

SEQ ID NO: 2818655 - RNA, 19 nt, Artificial Sequence
  Description of Artificial Sequence: Synthetic oligonucleotide
gccgaauccuuagcagaug

SEQ ID NO: 2818656 - RNA, 19 nt, Artificial Sequence
  Description of Artificial Sequence: Synthetic oligonucleotide
ccuugagcguggccucgcg

SEQ ID NO: 2818657 - RNA, 19 nt, Artificial Sequence
  Description of Artificial Sequence: Synthetic oligonucleotide
gugcgcagacgcagaggcc

SEQ ID NO: 2818658 - RNA, 19 nt, Artificial Sequence
  Description of Artificial Sequence: Synthetic oligonucleotide
ggacgaggcgucgcguagc

SEQ ID NO: 2818659 - RNA, 19 nt, Artificial Sequence
  Description of Artificial Sequence: Synthetic oligonucleotide
ccccuauggaagccugcgc

SEQ ID NO: 2818660 - RNA, 19 nt, Artificial Sequence
  Description of Artificial Sequence: Synthetic oligonucleotide
ggcgcggagcagguugccg

SEQ ID NO: 2818661 - RNA, 19 nt, Artificial Sequence
  Description of Artificial Sequence: Synthetic oligonucleotide
cgcgcaucgcugcggaagg

SEQ ID NO: 2818662 - RNA, 19 nt, Artificial Sequence
  Description of Artificial Sequence: Synthetic oligonucleotide
agucucggccgaauccuua

SEQ ID NO: 2818663 - RNA, 19 nt, Artificial Sequence
  Description of Artificial Sequence: Synthetic oligonucleotide
gcagacgcagaggcccagg

SEQ ID NO: 2818664 - RNA, 19 nt, Artificial Sequence
  Description of Artificial Sequence: Synthetic oligonucleotide
ucccggcuuagggcugcag

SEQ ID NO: 2818665 - RNA, 19 nt, Artificial Sequence
  Description of Artificial Sequence: Synthetic oligonucleotide
acgaggcgucgcguagcuc

SEQ ID NO: 2818666 - RNA, 19 nt, Artificial Sequence
  Description of Artificial Sequence: Synthetic oligonucleotide
gcaucgcugcggaagguga

SEQ ID NO: 2818667 - RNA, 19 nt, Artificial Sequence
  Description of Artificial Sequence: Synthetic oligonucleotide
gugcagcagugcgcagacg

SEQ ID NO: 2818668 - RNA, 19 nt, Artificial Sequence
  Description of Artificial Sequence: Synthetic oligonucleotide
ccaucggggucuccugcag

SEQ ID NO: 2818669 - RNA, 19 nt, Artificial Sequence
  Description of Artificial Sequence: Synthetic oligonucleotide
gccggucucgggaaucggc

SEQ ID NO: 2818670 - RNA, 19 nt, Artificial Sequence
  Description of Artificial Sequence: Synthetic oligonucleotide
aggcagcuccgucgacgca

SEQ ID NO: 2818671 - RNA, 19 nt, Artificial Sequence
  Description of Artificial Sequence: Synthetic oligonucleotide
ccacuguguccuguagccc

SEQ ID NO: 2818672 - RNA, 19 nt, Artificial Sequence
  Description of Artificial Sequence: Synthetic oligonucleotide
ggcgguggcgggugggcac

SEQ ID NO: 2818673 - RNA, 19 nt, Artificial Sequence
  Description of Artificial Sequence: Synthetic oligonucleotide
gcagcucacguuggcacca

SEQ ID NO: 2818674 - RNA, 19 nt, Artificial Sequence
  Description of Artificial Sequence: Synthetic oligonucleotide
cgcgaagccuugagcgugg

SEQ ID NO: 2818675 - RNA, 19 nt, Artificial Sequence
  Description of Artificial Sequence: Synthetic oligonucleotide
acgcagaggcccaggcggu

SEQ ID NO: 2818676 - RNA, 19 nt, Artificial Sequence
  Description of Artificial Sequence: Synthetic oligonucleotide
ccgucgaaggcgcggagca

SEQ ID NO: 2818677 - RNA, 19 nt, Artificial Sequence
  Description of Artificial Sequence: Synthetic oligonucleotide
ggggucuccugcaguaguc

SEQ ID NO: 2818678 - RNA, 19 nt, Artificial Sequence
  Description of Artificial Sequence: Synthetic oligonucleotide
gagcguggccucgcgcauc

SEQ ID NO: 2818679 - RNA, 19 nt, Artificial Sequence
  Description of Artificial Sequence: Synthetic oligonucleotide
cggagcagguugccggacg

SEQ ID NO: 2818680 - RNA, 19 nt, Artificial Sequence
  Description of Artificial Sequence: Synthetic oligonucleotide
uuggcaccaucggggucuc

SEQ ID NO: 2818681 - RNA, 19 nt, Artificial Sequence
  Description of Artificial Sequence: Synthetic oligonucleotide
cucugugccagagacccuu

SEQ ID NO: 2818682 - RNA, 19 nt, Artificial Sequence
  Description of Artificial Sequence: Synthetic oligonucleotide
  modified_base (15)..(15): a, c, u, g, unknown or other
cggccaacucgaagnggcg

SEQ ID NO: 2818683 - RNA, 19 nt, Artificial Sequence
  Description of Artificial Sequence: Synthetic oligonucleotide
ggaagccugcgcagcuccc

SEQ ID NO: 2818684 - RNA, 19 nt, Artificial Sequence
  Description of Artificial Sequence: Synthetic oligonucleotide
gcgguaggugagcgcgaag

SEQ ID NO: 2818685 - RNA, 19 nt, Artificial Sequence
  Description of Artificial Sequence: Synthetic oligonucleotide
gggcugcagcucacguugg

SEQ ID NO: 2818686 - RNA, 19 nt, Artificial Sequence
  Description of Artificial Sequence: Synthetic oligonucleotide
gccagcaggcagcuccguc

SEQ ID NO: 2818687 - RNA, 19 nt, Artificial Sequence
  Description of Artificial Sequence: Synthetic oligonucleotide
cgacgcagcaaacgcagca

SEQ ID NO: 2818688 - RNA, 19 nt, Artificial Sequence
  Description of Artificial Sequence: Synthetic oligonucleotide
gcgucgcguagcuccgagc

SEQ ID NO: 2818689 - RNA, 19 nt, Artificial Sequence
  Description of Artificial Sequence: Synthetic oligonucleotide
ggcgggugggcaccgucga

SEQ ID NO: 2818690 - RNA, 19 nt, Artificial Sequence
  Description of Artificial Sequence: Synthetic oligonucleotide
gagaagacucgggccccua

SEQ ID NO: 2818691 - RNA, 19 nt, Artificial Sequence
  Description of Artificial Sequence: Synthetic oligonucleotide
gcagcuccgucgacgcagc

SEQ ID NO: 2818692 - RNA, 19 nt, Artificial Sequence
  Description of Artificial Sequence: Synthetic oligonucleotide
cggccgaauccuuagcaga

SEQ ID NO: 2818693 - RNA, 19 nt, Artificial Sequence
  Description of Artificial Sequence: Synthetic oligonucleotide
ccuuagcagaugcgcuguc

SEQ ID NO: 2818694 - RNA, 19 nt, Artificial Sequence
  Description of Artificial Sequence: Synthetic oligonucleotide
caucggggucuccugcagu

SEQ ID NO: 2818695 - RNA, 19 nt, Artificial Sequence
  Description of Artificial Sequence: Synthetic oligonucleotide
gcagcagugcgcagacgca

SEQ ID NO: 2818696 - RNA, 19 nt, Artificial Sequence
  Description of Artificial Sequence: Synthetic oligonucleotide
gcugcggaaggugagcaau

SEQ ID NO: 2818697 - RNA, 19 nt, Artificial Sequence
  Description of Artificial Sequence: Synthetic oligonucleotide
cgucgacgcagcaaacgca

SEQ ID NO: 2818698 - RNA, 19 nt, Artificial Sequence
  Description of Artificial Sequence: Synthetic oligonucleotide
ggccccuauggaagccugc

SEQ ID NO: 2818699 - RNA, 19 nt, Artificial Sequence
  Description of Artificial Sequence: Synthetic oligonucleotide
gccucgcgcaucgcugcgg

SEQ ID NO: 2818700 - RNA, 19 nt, Artificial Sequence
  Description of Artificial Sequence: Synthetic oligonucleotide
cgggugggcaccgucgaag

SEQ ID NO: 2818701 - RNA, 19 nt, Artificial Sequence
  Description of Artificial Sequence: Synthetic oligonucleotide
cagcacggagauggccauc

SEQ ID NO: 2818702 - RNA, 19 nt, Artificial Sequence
  Description of Artificial Sequence: Synthetic oligonucleotide
gggccccuauggaagccug

SEQ ID NO: 2818703 - RNA, 19 nt, Artificial Sequence
  Description of Artificial Sequence: Synthetic oligonucleotide
cugcgcagcucccggcuua

SEQ ID NO: 2818704 - RNA, 19 nt, Artificial Sequence
  Description of Artificial Sequence: Synthetic oligonucleotide
cagcagcgacaggaucaac

SEQ ID NO: 2818705 - RNA, 19 nt, Artificial Sequence
  Description of Artificial Sequence: Synthetic oligonucleotide
ccggcuuagggcugcagcu

SEQ ID NO: 2818706 - RNA, 19 nt, Artificial Sequence
  Description of Artificial Sequence: Synthetic oligonucleotide
gcuuagggcugcagcucac

SEQ ID NO: 2818707 - RNA, 19 nt, Artificial Sequence
  Description of Artificial Sequence: Synthetic oligonucleotide
gcggaaggugagcaauagu

SEQ ID NO: 2818708 - RNA, 19 nt, Artificial Sequence
  Description of Artificial Sequence: Synthetic oligonucleotide
cggacgaggcgucgcguag

SEQ ID NO: 2818709 - RNA, 19 nt, Artificial Sequence
  Description of Artificial Sequence: Synthetic oligonucleotide
ggccgaauccuuagcagau

SEQ ID NO: 2818710 - RNA, 19 nt, Artificial Sequence
  Description of Artificial Sequence: Synthetic oligonucleotide
cgaagccuugagcguggcc

SEQ ID NO: 2818711 - RNA, 19 nt, Artificial Sequence
  Description of Artificial Sequence: Synthetic oligonucleotide
gcaccgucgaaggcgcgga

SEQ ID NO: 2818712 - RNA, 19 nt, Artificial Sequence
  Description of Artificial Sequence: Synthetic oligonucleotide
gccuugagcguggccucgc

SEQ ID NO: 2818713 - RNA, 19 nt, Artificial Sequence
  Description of Artificial Sequence: Synthetic oligonucleotide
gcacggagauggccaucac

SEQ ID NO: 2818714 - RNA, 19 nt, Artificial Sequence
  Description of Artificial Sequence: Synthetic oligonucleotide
gguugccggacgaggcguc

SEQ ID NO: 2818715 - RNA, 19 nt, Artificial Sequence
  Description of Artificial Sequence: Synthetic oligonucleotide
ggugagcgcgaagccuuga

SEQ ID NO: 2818716 - RNA, 19 nt, Artificial Sequence
  Description of Artificial Sequence: Synthetic oligonucleotide
cgcaucgcugcggaaggug

SEQ ID NO: 2818717 - RNA, 19 nt, Artificial Sequence
  Description of Artificial Sequence: Synthetic oligonucleotide
gggucuccugcaguagucu

SEQ ID NO: 2818718 - RNA, 19 nt, Artificial Sequence
  Description of Artificial Sequence: Synthetic oligonucleotide
gcgguggcgggugggcacc

SEQ ID NO: 2818719 - RNA, 19 nt, Artificial Sequence
  Description of Artificial Sequence: Synthetic oligonucleotide
uggcaccaucggggucucc

SEQ ID NO: 2818720 - RNA, 19 nt, Artificial Sequence
  Description of Artificial Sequence: Synthetic oligonucleotide
ccaggcgguggcggguggg

SEQ ID NO: 2818721 - RNA, 19 nt, Artificial Sequence
  Description of Artificial Sequence: Synthetic oligonucleotide
aggcgucgcguagcuccga

SEQ ID NO: 2818722 - RNA, 19 nt, Artificial Sequence
  Description of Artificial Sequence: Synthetic oligonucleotide
cucgcgcaucgcugcggaa

SEQ ID NO: 2818723 - RNA, 19 nt, Artificial Sequence
  Description of Artificial Sequence: Synthetic oligonucleotide
gcccgcgguaggugagcgc

SEQ ID NO: 2818724 - RNA, 19 nt, Artificial Sequence
  Description of Artificial Sequence: Synthetic oligonucleotide
cuggagccagcaggcagcu

SEQ ID NO: 2818725 - RNA, 19 nt, Artificial Sequence
  Description of Artificial Sequence: Synthetic oligonucleotide
ccucgcgcaucgcugcgga

SEQ ID NO: 2818726 - RNA, 19 nt, Artificial Sequence
  Description of Artificial Sequence: Synthetic oligonucleotide
gcagcacggagauggccau

SEQ ID NO: 2818727 - RNA, 19 nt, Artificial Sequence
  Description of Artificial Sequence: Synthetic oligonucleotide
gcgaagccuugagcguggc

SEQ ID NO: 2818728 - RNA, 19 nt, Artificial Sequence
  Description of Artificial Sequence: Synthetic oligonucleotide
gggaaucggccaacucgaa

SEQ ID NO: 2818729 - RNA, 19 nt, Artificial Sequence
  Description of Artificial Sequence: Synthetic oligonucleotide
  modified_base (12)..(12): a, c, u, g, unknown or other
ccaacucgaagnggcggaa

SEQ ID NO: 2818730 - RNA, 19 nt, Artificial Sequence
  Description of Artificial Sequence: Synthetic oligonucleotide
cgcuguccuccacuguguc

SEQ ID NO: 2818731 - RNA, 19 nt, Artificial Sequence
  Description of Artificial Sequence: Synthetic oligonucleotide
cguagcuccgagccggucu

SEQ ID NO: 2818732 - RNA, 19 nt, Artificial Sequence
  Description of Artificial Sequence: Synthetic oligonucleotide
cguuggcaccaucgggguc

SEQ ID NO: 2818733 - RNA, 19 nt, Artificial Sequence
  Description of Artificial Sequence: Synthetic oligonucleotide
cagcuccgucgacgcagca

SEQ ID NO: 2818734 - RNA, 19 nt, Artificial Sequence
  Description of Artificial Sequence: Synthetic oligonucleotide
cugugccagagacccuuuu

SEQ ID NO: 2818735 - RNA, 19 nt, Artificial Sequence
  Description of Artificial Sequence: Synthetic oligonucleotide
gccugcgcagcucccggcu

SEQ ID NO: 2818736 - RNA, 19 nt, Artificial Sequence
  Description of Artificial Sequence: Synthetic oligonucleotide
gcccaggcgguggcgggug

SEQ ID NO: 2818737 - RNA, 19 nt, Artificial Sequence
  Description of Artificial Sequence: Synthetic oligonucleotide
cggucucgggaaucggcca

SEQ ID NO: 2818738 - RNA, 19 nt, Artificial Sequence
  Description of Artificial Sequence: Synthetic oligonucleotide
gcggagcagguugccggac

SEQ ID NO: 2818739 - RNA, 19 nt, Artificial Sequence
  Description of Artificial Sequence: Synthetic oligonucleotide
gggcaccgucgaaggcgcg

SEQ ID NO: 2818740 - RNA, 19 nt, Artificial Sequence
  Description of Artificial Sequence: Synthetic oligonucleotide
ggagaagacucgggccccu

SEQ ID NO: 2818741 - RNA, 19 nt, Artificial Sequence
  Description of Artificial Sequence: Synthetic oligonucleotide
cggcuuagggcugcagcuc

SEQ ID NO: 2818742 - RNA, 19 nt, Artificial Sequence
  Description of Artificial Sequence: Synthetic oligonucleotide
cgucgaaggcgcggagcag

SEQ ID NO: 2818743 - RNA, 19 nt, Artificial Sequence
  Description of Artificial Sequence: Synthetic oligonucleotide
cgagccggucucgggaauc

SEQ ID NO: 2818744 - RNA, 19 nt, Artificial Sequence
  Description of Artificial Sequence: Synthetic oligonucleotide
gcgcagacgcagaggccca

SEQ ID NO: 2818745 - RNA, 19 nt, Artificial Sequence
  Description of Artificial Sequence: Synthetic oligonucleotide
ccggacgaggcgucgcgua

SEQ ID NO: 2818746 - RNA, 19 nt, Artificial Sequence
  Description of Artificial Sequence: Synthetic oligonucleotide
ccuguagcccgcgguaggu

SEQ ID NO: 2818747 - RNA, 19 nt, Artificial Sequence
  Description of Artificial Sequence: Synthetic oligonucleotide
gcgggugggcaccgucgaa

SEQ ID NO: 2818748 - RNA, 19 nt, Artificial Sequence
  Description of Artificial Sequence: Synthetic oligonucleotide
gcgcuguccuccacugugu

SEQ ID NO: 2818749 - RNA, 19 nt, Artificial Sequence
  Description of Artificial Sequence: Synthetic oligonucleotide
cgcagacgcagaggcccag

SEQ ID NO: 2818750 - RNA, 19 nt, Artificial Sequence
  Description of Artificial Sequence: Synthetic oligonucleotide
gcguagcuccgagccgguc

SEQ ID NO: 2818751 - RNA, 19 nt, Artificial Sequence
  Description of Artificial Sequence: Synthetic oligonucleotide
cucccggcuuagggcugca

SEQ ID NO: 2818752 - RNA, 19 nt, Artificial Sequence
  Description of Artificial Sequence: Synthetic oligonucleotide
cguggccucgcgcaucgcu

SEQ ID NO: 2818753 - RNA, 19 nt, Artificial Sequence
  Description of Artificial Sequence: Synthetic oligonucleotide
cgcagaggcccaggcggug

SEQ ID NO: 2818754 - RNA, 19 nt, Artificial Sequence
  Description of Artificial Sequence: Synthetic oligonucleotide
ccgcgguaggugagcgcga

SEQ ID NO: 2818755 - RNA, 19 nt, Artificial Sequence
  Description of Artificial Sequence: Synthetic oligonucleotide
cggagauggccaucacagu

SEQ ID NO: 2818756 - RNA, 19 nt, Artificial Sequence
  Description of Artificial Sequence: Synthetic oligonucleotide
cgcugcggaaggugagcaa

SEQ ID NO: 2818757 - RNA, 19 nt, Artificial Sequence
  Description of Artificial Sequence: Synthetic oligonucleotide
cggggucuccugcaguagu

SEQ ID NO: 2818758 - RNA, 19 nt, Artificial Sequence
  Description of Artificial Sequence: Synthetic oligonucleotide
cagcucacguuggcaccau

SEQ ID NO: 2818759 - RNA, 19 nt, Artificial Sequence
  Description of Artificial Sequence: Synthetic oligonucleotide
cgguggcgggugggcaccg

SEQ ID NO: 2818760 - RNA, 19 nt, Artificial Sequence
  Description of Artificial Sequence: Synthetic oligonucleotide
gccggacgaggcgucgcgu

SEQ ID NO: 2818761 - RNA, 19 nt, Artificial Sequence
  Description of Artificial Sequence: Synthetic oligonucleotide
cgcgguaggugagcgcgaa

SEQ ID NO: 2818762 - RNA, 19 nt, Artificial Sequence
  Description of Artificial Sequence: Synthetic oligonucleotide
gcguggccucgcgcaucgc

SEQ ID NO: 2818763 - RNA, 19 nt, Artificial Sequence
  Description of Artificial Sequence: Synthetic oligonucleotide
ggcccaggcgguggcgggu

SEQ ID NO: 2818764 - RNA, 19 nt, Artificial Sequence
  Description of Artificial Sequence: Synthetic oligonucleotide
gcgcaucgcugcggaaggu

SEQ ID NO: 2818765 - RNA, 19 nt, Artificial Sequence
  Description of Artificial Sequence: Synthetic oligonucleotide
gguggcgggugggcaccgu

SEQ ID NO: 2818766 - RNA, 19 nt, Artificial Sequence
  Description of Artificial Sequence: Synthetic oligonucleotide
ccugcgcagcucccggcuu

SEQ ID NO: 2818767 - RNA, 19 nt, Artificial Sequence
  Description of Artificial Sequence: Synthetic oligonucleotide
cgggccccuauggaagccu

SEQ ID NO: 2818768 - RNA, 19 nt, Artificial Sequence
  Description of Artificial Sequence: Synthetic oligonucleotide
cgcguagcuccgagccggu

SEQ ID NO: 2818769 - RNA, 19 nt, Artificial Sequence
  Description of Artificial Sequence: Synthetic oligonucleotide
cgaaggcgcggagcagguu

SEQ ID NO: 2818770 - RNA, 19 nt, Artificial Sequence
  Description of Artificial Sequence: Synthetic oligonucleotide
  modified_base (1)..(1): a, c, u, g, unknown or other
nuuuguuaacaaaauaggu

SEQ ID NO: 2818771 - RNA, 19 nt, Artificial Sequence
  Description of Artificial Sequence: Synthetic oligonucleotide
aaggaaauaauccacaugc

SEQ ID NO: 2818772 - RNA, 19 nt, Artificial Sequence
  Description of Artificial Sequence: Synthetic oligonucleotide
  modified_base (19)..(19): a, c, u, g, unknown or other
uaaaacuucggcaagaggn

SEQ ID NO: 2818773 - RNA, 19 nt, Artificial Sequence
  Description of Artificial Sequence: Synthetic oligonucleotide
aacuuuuacagucagcguc

SEQ ID NO: 2818774 - RNA, 19 nt, Artificial Sequence
  Description of Artificial Sequence: Synthetic oligonucleotide
guaacaauaagacagucag

SEQ ID NO: 2818775 - RNA, 19 nt, Artificial Sequence
  Description of Artificial Sequence: Synthetic oligonucleotide
aauguuuuacuacaguuga

SEQ ID NO: 2818776 - RNA, 19 nt, Artificial Sequence
  Description of Artificial Sequence: Synthetic oligonucleotide
aauaagacagucagcagcc

SEQ ID NO: 2818777 - RNA, 19 nt, Artificial Sequence
  Description of Artificial Sequence: Synthetic oligonucleotide
aacuugaggaccucguugc

SEQ ID NO: 2818778 - RNA, 19 nt, Artificial Sequence
  Description of Artificial Sequence: Synthetic oligonucleotide
aacaauaagacagucagca

SEQ ID NO: 2818779 - RNA, 19 nt, Artificial Sequence
  Description of Artificial Sequence: Synthetic oligonucleotide
uguaaaaguucacacaucu

SEQ ID NO: 2818780 - RNA, 19 nt, Artificial Sequence
  Description of Artificial Sequence: Synthetic oligonucleotide
auaauccacaugcugaaac

SEQ ID NO: 2818781 - RNA, 19 nt, Artificial Sequence
  Description of Artificial Sequence: Synthetic oligonucleotide
auuacaucaaauguuuuac

SEQ ID NO: 2818782 - RNA, 19 nt, Artificial Sequence
  Description of Artificial Sequence: Synthetic oligonucleotide
aauucuaaacacugcccac

SEQ ID NO: 2818783 - RNA, 19 nt, Artificial Sequence
  Description of Artificial Sequence: Synthetic oligonucleotide
acaucaaauguuuuacuac

SEQ ID NO: 2818784 - RNA, 19 nt, Artificial Sequence
  Description of Artificial Sequence: Synthetic oligonucleotide
aucacaauuacaucaaaug

SEQ ID NO: 2818785 - RNA, 19 nt, Artificial Sequence
  Description of Artificial Sequence: Synthetic oligonucleotide
uguuuuacuacaguugagg

SEQ ID NO: 2818786 - RNA, 19 nt, Artificial Sequence
  Description of Artificial Sequence: Synthetic oligonucleotide
caaacaauucuaaacacug

SEQ ID NO: 2818787 - RNA, 19 nt, Artificial Sequence
  Description of Artificial Sequence: Synthetic oligonucleotide
aaacaacuguaccuguuac

SEQ ID NO: 2818788 - RNA, 19 nt, Artificial Sequence
  Description of Artificial Sequence: Synthetic oligonucleotide
aaugcagcccaacuuuuac

SEQ ID NO: 2818789 - RNA, 19 nt, Artificial Sequence
  Description of Artificial Sequence: Synthetic oligonucleotide
uaaauuucgagcaaacaau

SEQ ID NO: 2818790 - RNA, 19 nt, Artificial Sequence
  Description of Artificial Sequence: Synthetic oligonucleotide
caucuaaccacacugagug

SEQ ID NO: 2818791 - RNA, 19 nt, Artificial Sequence
  Description of Artificial Sequence: Synthetic oligonucleotide
aauuacaucaaauguuuua

SEQ ID NO: 2818792 - RNA, 19 nt, Artificial Sequence
  Description of Artificial Sequence: Synthetic oligonucleotide
aggcauuugcuuuaucugc

SEQ ID NO: 2818793 - RNA, 19 nt, Artificial Sequence
  Description of Artificial Sequence: Synthetic oligonucleotide
cuaaacacugcccaccugg

SEQ ID NO: 2818794 - RNA, 19 nt, Artificial Sequence
  Description of Artificial Sequence: Synthetic oligonucleotide
ucaacuucugaucugguuc

SEQ ID NO: 2818795 - RNA, 19 nt, Artificial Sequence
  Description of Artificial Sequence: Synthetic oligonucleotide
aaacuugaggaccucguug

SEQ ID NO: 2818796 - RNA, 19 nt, Artificial Sequence
  Description of Artificial Sequence: Synthetic oligonucleotide
cagagcaaggaaauaaucc

SEQ ID NO: 2818797 - RNA, 19 nt, Artificial Sequence
  Description of Artificial Sequence: Synthetic oligonucleotide
uacaagagaugucagacaa

SEQ ID NO: 2818798 - RNA, 19 nt, Artificial Sequence
  Description of Artificial Sequence: Synthetic oligonucleotide
cuuucaguaaaacuucggc

SEQ ID NO: 2818799 - RNA, 19 nt, Artificial Sequence
  Description of Artificial Sequence: Synthetic oligonucleotide
cuggcuguaaauuucgagc

SEQ ID NO: 2818800 - RNA, 19 nt, Artificial Sequence
  Description of Artificial Sequence: Synthetic oligonucleotide
acagucagcguccagacug

SEQ ID NO: 2818801 - RNA, 19 nt, Artificial Sequence
  Description of Artificial Sequence: Synthetic oligonucleotide
ugauaaacaacuguaccug

SEQ ID NO: 2818802 - RNA, 19 nt, Artificial Sequence
  Description of Artificial Sequence: Synthetic oligonucleotide
gaaauaauccacaugcuga

SEQ ID NO: 2818803 - RNA, 19 nt, Artificial Sequence
  Description of Artificial Sequence: Synthetic oligonucleotide
gagcaaacaauucuaaaca

SEQ ID NO: 2818804 - RNA, 19 nt, Artificial Sequence
  Description of Artificial Sequence: Synthetic oligonucleotide
ucuuucaguaaaacuucgg

SEQ ID NO: 2818805 - RNA, 19 nt, Artificial Sequence
  Description of Artificial Sequence: Synthetic oligonucleotide
uguuacuucuuuuaaccga

SEQ ID NO: 2818806 - RNA, 19 nt, Artificial Sequence
  Description of Artificial Sequence: Synthetic oligonucleotide
auuuguucugccauggugg

SEQ ID NO: 2818807 - RNA, 19 nt, Artificial Sequence
  Description of Artificial Sequence: Synthetic oligonucleotide
aaauaauccacaugcugaa

SEQ ID NO: 2818808 - RNA, 19 nt, Artificial Sequence
  Description of Artificial Sequence: Synthetic oligonucleotide
guaaauuucgagcaaacaa

SEQ ID NO: 2818809 - RNA, 19 nt, Artificial Sequence
  Description of Artificial Sequence: Synthetic oligonucleotide
uguggugauaaacaacugu

SEQ ID NO: 2818810 - RNA, 19 nt, Artificial Sequence
  Description of Artificial Sequence: Synthetic oligonucleotide
ucuuuuaaccgauuuguuc

SEQ ID NO: 2818811 - RNA, 19 nt, Artificial Sequence
  Description of Artificial Sequence: Synthetic oligonucleotide
acuacaguugaggaguggc

SEQ ID NO: 2818812 - RNA, 19 nt, Artificial Sequence
  Description of Artificial Sequence: Synthetic oligonucleotide
auucuaaacacugcccacc

SEQ ID NO: 2818813 - RNA, 19 nt, Artificial Sequence
  Description of Artificial Sequence: Synthetic oligonucleotide
ucugaucugguucugucug

SEQ ID NO: 2818814 - RNA, 19 nt, Artificial Sequence
  Description of Artificial Sequence: Synthetic oligonucleotide
gauuuguucugccauggug

SEQ ID NO: 2818815 - RNA, 19 nt, Artificial Sequence
  Description of Artificial Sequence: Synthetic oligonucleotide
ugguggaucaaucacaauu

SEQ ID NO: 2818816 - RNA, 19 nt, Artificial Sequence
  Description of Artificial Sequence: Synthetic oligonucleotide
aagaaugcagggcacgcug

SEQ ID NO: 2818817 - RNA, 19 nt, Artificial Sequence
  Description of Artificial Sequence: Synthetic oligonucleotide
cacacaucuaaccacacug

SEQ ID NO: 2818818 - RNA, 19 nt, Artificial Sequence
  Description of Artificial Sequence: Synthetic oligonucleotide
aaaugggucugauggaacu

SEQ ID NO: 2818819 - RNA, 19 nt, Artificial Sequence
  Description of Artificial Sequence: Synthetic oligonucleotide
acuuuuacagucagcgucc

SEQ ID NO: 2818820 - RNA, 19 nt, Artificial Sequence
  Description of Artificial Sequence: Synthetic oligonucleotide
acccaaguaacaauaagac

SEQ ID NO: 2818821 - RNA, 19 nt, Artificial Sequence
  Description of Artificial Sequence: Synthetic oligonucleotide
acaauucuaaacacugccc

SEQ ID NO: 2818822 - RNA, 19 nt, Artificial Sequence
  Description of Artificial Sequence: Synthetic oligonucleotide
  modified_base (18)..(18): a, c, u, g, unknown or other
aaaacuucggcaagaggng

SEQ ID NO: 2818823 - RNA, 19 nt, Artificial Sequence
  Description of Artificial Sequence: Synthetic oligonucleotide
  modified_base (16)..(16): a, c, u, g, unknown or other
aacuucggcaagaggnggc

SEQ ID NO: 2818824 - RNA, 19 nt, Artificial Sequence
  Description of Artificial Sequence: Synthetic oligonucleotide
ugcagcccaacuuuuacag

SEQ ID NO: 2818825 - RNA, 19 nt, Artificial Sequence
  Description of Artificial Sequence: Synthetic oligonucleotide
cauacaagagaugucagac

SEQ ID NO: 2818826 - RNA, 19 nt, Artificial Sequence
  Description of Artificial Sequence: Synthetic oligonucleotide
uuuacagucagcguccaga

SEQ ID NO: 2818827 - RNA, 19 nt, Artificial Sequence
  Description of Artificial Sequence: Synthetic oligonucleotide
augucagacaaagggaagc

SEQ ID NO: 2818828 - RNA, 19 nt, Artificial Sequence
  Description of Artificial Sequence: Synthetic oligonucleotide
acaggcauuugcuuuaucu

SEQ ID NO: 2818829 - RNA, 19 nt, Artificial Sequence
  Description of Artificial Sequence: Synthetic oligonucleotide
acaguugaggaguggcugc

SEQ ID NO: 2818830 - RNA, 19 nt, Artificial Sequence
  Description of Artificial Sequence: Synthetic oligonucleotide
aucugguucugucuguugg

SEQ ID NO: 2818831 - RNA, 19 nt, Artificial Sequence
  Description of Artificial Sequence: Synthetic oligonucleotide
aauuucgagcaaacaauuc

SEQ ID NO: 2818832 - RNA, 19 nt, Artificial Sequence
  Description of Artificial Sequence: Synthetic oligonucleotide
aaguaacaauaagacaguc

SEQ ID NO: 2818833 - RNA, 19 nt, Artificial Sequence
  Description of Artificial Sequence: Synthetic oligonucleotide
uacaucaaauguuuuacua

SEQ ID NO: 2818834 - RNA, 19 nt, Artificial Sequence
  Description of Artificial Sequence: Synthetic oligonucleotide
gauggaacuggggaaaugc

SEQ ID NO: 2818835 - RNA, 19 nt, Artificial Sequence
  Description of Artificial Sequence: Synthetic oligonucleotide
uacaaggagaaaugggucu

SEQ ID NO: 2818836 - RNA, 19 nt, Artificial Sequence
  Description of Artificial Sequence: Synthetic oligonucleotide
cuuagggacaggcauuugc

SEQ ID NO: 2818837 - RNA, 19 nt, Artificial Sequence
  Description of Artificial Sequence: Synthetic oligonucleotide
uggcuguaaauuucgagca

SEQ ID NO: 2818838 - RNA, 19 nt, Artificial Sequence
  Description of Artificial Sequence: Synthetic oligonucleotide
accuguuacuucuuuuaac

SEQ ID NO: 2818839 - RNA, 19 nt, Artificial Sequence
  Description of Artificial Sequence: Synthetic oligonucleotide
gauguagucuuucaguaaa

SEQ ID NO: 2818840 - RNA, 19 nt, Artificial Sequence
  Description of Artificial Sequence: Synthetic oligonucleotide
ucagcguccagacugcaga

SEQ ID NO: 2818841 - RNA, 19 nt, Artificial Sequence
  Description of Artificial Sequence: Synthetic oligonucleotide
gugagugaagaaugcaggg

SEQ ID NO: 2818842 - RNA, 19 nt, Artificial Sequence
  Description of Artificial Sequence: Synthetic oligonucleotide
uguuggucacccaaguaac

SEQ ID NO: 2818843 - RNA, 19 nt, Artificial Sequence
  Description of Artificial Sequence: Synthetic oligonucleotide
cuguuacuucuuuuaaccg

SEQ ID NO: 2818844 - RNA, 19 nt, Artificial Sequence
  Description of Artificial Sequence: Synthetic oligonucleotide
aacaacuguaccuguuacu

SEQ ID NO: 2818845 - RNA, 19 nt, Artificial Sequence
  Description of Artificial Sequence: Synthetic oligonucleotide
cacugagugauacaaggag

SEQ ID NO: 2818846 - RNA, 19 nt, Artificial Sequence
  Description of Artificial Sequence: Synthetic oligonucleotide
ggugauaaacaacuguacc

SEQ ID NO: 2818847 - RNA, 19 nt, Artificial Sequence
  Description of Artificial Sequence: Synthetic oligonucleotide
uggaucaaucacaauuaca

SEQ ID NO: 2818848 - RNA, 19 nt, Artificial Sequence
  Description of Artificial Sequence: Synthetic oligonucleotide
gagugaagaaugcagggca

SEQ ID NO: 2818849 - RNA, 19 nt, Artificial Sequence
  Description of Artificial Sequence: Synthetic oligonucleotide
caugcugaaacuugaggac

SEQ ID NO: 2818850 - RNA, 19 nt, Artificial Sequence
  Description of Artificial Sequence: Synthetic oligonucleotide
uugauguagucuuucagua

SEQ ID NO: 2818851 - RNA, 19 nt, Artificial Sequence
  Description of Artificial Sequence: Synthetic oligonucleotide
ugguguaaaaguucacaca

SEQ ID NO: 2818852 - RNA, 19 nt, Artificial Sequence
  Description of Artificial Sequence: Synthetic oligonucleotide
ccaacuuuuacagucagcg

SEQ ID NO: 2818853 - RNA, 19 nt, Artificial Sequence
  Description of Artificial Sequence: Synthetic oligonucleotide
uaacaauaagacagucagc

SEQ ID NO: 2818854 - RNA, 19 nt, Artificial Sequence
  Description of Artificial Sequence: Synthetic oligonucleotide
uaaacaacuguaccuguua

SEQ ID NO: 2818855 - RNA, 19 nt, Artificial Sequence
  Description of Artificial Sequence: Synthetic oligonucleotide
uggugauaaacaacuguac

SEQ ID NO: 2818856 - RNA, 19 nt, Artificial Sequence
  Description of Artificial Sequence: Synthetic oligonucleotide
caucaaauguuuuacuaca

SEQ ID NO: 2818857 - RNA, 19 nt, Artificial Sequence
  Description of Artificial Sequence: Synthetic oligonucleotide
uuucgagcaaacaauucua

SEQ ID NO: 2818858 - RNA, 19 nt, Artificial Sequence
  Description of Artificial Sequence: Synthetic oligonucleotide
ccuguuacuucuuuuaacc

SEQ ID NO: 2818859 - RNA, 19 nt, Artificial Sequence
  Description of Artificial Sequence: Synthetic oligonucleotide
cuuuuaaccgauuuguucu

SEQ ID NO: 2818860 - RNA, 19 nt, Artificial Sequence
  Description of Artificial Sequence: Synthetic oligonucleotide
uguaaauuucgagcaaaca

SEQ ID NO: 2818861 - RNA, 19 nt, Artificial Sequence
  Description of Artificial Sequence: Synthetic oligonucleotide
ugaaacuugaggaccucgu

SEQ ID NO: 2818862 - RNA, 19 nt, Artificial Sequence
  Description of Artificial Sequence: Synthetic oligonucleotide
ugcauacaagagaugucag

SEQ ID NO: 2818863 - RNA, 19 nt, Artificial Sequence
  Description of Artificial Sequence: Synthetic oligonucleotide
uaauccacaugcugaaacu

SEQ ID NO: 2818864 - RNA, 19 nt, Artificial Sequence
  Description of Artificial Sequence: Synthetic oligonucleotide
auuugcuuuaucugcugug

SEQ ID NO: 2818865 - RNA, 19 nt, Artificial Sequence
  Description of Artificial Sequence: Synthetic oligonucleotide
uuacaucaaauguuuuacu

SEQ ID NO: 2818866 - RNA, 19 nt, Artificial Sequence
  Description of Artificial Sequence: Synthetic oligonucleotide
agugauacaaggagaaaug

SEQ ID NO: 2818867 - RNA, 19 nt, Artificial Sequence
  Description of Artificial Sequence: Synthetic oligonucleotide
  modified_base (17)..(17): a, c, u, g, unknown or other
aaacuucggcaagaggngg

SEQ ID NO: 2818868 - RNA, 19 nt, Artificial Sequence
  Description of Artificial Sequence: Synthetic oligonucleotide
uccacaugcugaaacuuga

SEQ ID NO: 2818869 - RNA, 19 nt, Artificial Sequence
  Description of Artificial Sequence: Synthetic oligonucleotide
guaaaacuucggcaagagg

SEQ ID NO: 2818870 - RNA, 19 nt, Artificial Sequence
  Description of Artificial Sequence: Synthetic oligonucleotide
aguggcugcauacaagaga

SEQ ID NO: 2818871 - RNA, 19 nt, Artificial Sequence
  Description of Artificial Sequence: Synthetic oligonucleotide
uuaaccgauuuguucugcc

SEQ ID NO: 2818872 - RNA, 19 nt, Artificial Sequence
  Description of Artificial Sequence: Synthetic oligonucleotide
cacaugcugaaacuugagg

SEQ ID NO: 2818873 - RNA, 19 nt, Artificial Sequence
  Description of Artificial Sequence: Synthetic oligonucleotide
uuaucugcuguggugauaa

SEQ ID NO: 2818874 - RNA, 19 nt, Artificial Sequence
  Description of Artificial Sequence: Synthetic oligonucleotide
gaacuggggaaaugcagcc

SEQ ID NO: 2818875 - RNA, 19 nt, Artificial Sequence
  Description of Artificial Sequence: Synthetic oligonucleotide
acaauaagacagucagcag

SEQ ID NO: 2818876 - RNA, 19 nt, Artificial Sequence
  Description of Artificial Sequence: Synthetic oligonucleotide
aacuggggaaaugcagccc

SEQ ID NO: 2818877 - RNA, 19 nt, Artificial Sequence
  Description of Artificial Sequence: Synthetic oligonucleotide
uugugugagugaagaaugc

SEQ ID NO: 2818878 - RNA, 19 nt, Artificial Sequence
  Description of Artificial Sequence: Synthetic oligonucleotide
  modified_base (7)..(7): a, c, u, g, unknown or other
aagaggnggcuugugugag

SEQ ID NO: 2818879 - RNA, 19 nt, Artificial Sequence
  Description of Artificial Sequence: Synthetic oligonucleotide
ugcuuuaucugcuguggug

SEQ ID NO: 2818880 - RNA, 19 nt, Artificial Sequence
  Description of Artificial Sequence: Synthetic oligonucleotide
auacaaggagaaauggguc

SEQ ID NO: 2818881 - RNA, 19 nt, Artificial Sequence
  Description of Artificial Sequence: Synthetic oligonucleotide
guuuuacuacaguugagga

SEQ ID NO: 2818882 - RNA, 19 nt, Artificial Sequence
  Description of Artificial Sequence: Synthetic oligonucleotide
aaccgauuuguucugccau

SEQ ID NO: 2818883 - RNA, 19 nt, Artificial Sequence
  Description of Artificial Sequence: Synthetic oligonucleotide
aguaaaacuucggcaagag

SEQ ID NO: 2818884 - RNA, 19 nt, Artificial Sequence
  Description of Artificial Sequence: Synthetic oligonucleotide
uucuaaacacugcccaccu

SEQ ID NO: 2818885 - RNA, 19 nt, Artificial Sequence
  Description of Artificial Sequence: Synthetic oligonucleotide
caauucuaaacacugccca

SEQ ID NO: 2818886 - RNA, 19 nt, Artificial Sequence
  Description of Artificial Sequence: Synthetic oligonucleotide
aaauuucgagcaaacaauu

SEQ ID NO: 2818887 - RNA, 19 nt, Artificial Sequence
  Description of Artificial Sequence: Synthetic oligonucleotide
ucuaaccacacugagugau

SEQ ID NO: 2818888 - RNA, 19 nt, Artificial Sequence
  Description of Artificial Sequence: Synthetic oligonucleotide
ugucuguuggucacccaag

SEQ ID NO: 2818889 - RNA, 19 nt, Artificial Sequence
  Description of Artificial Sequence: Synthetic oligonucleotide
  modified_base (13)..(13): a, c, u, g, unknown or other
uucggcaagaggnggcuug

SEQ ID NO: 2818890 - RNA, 19 nt, Artificial Sequence
  Description of Artificial Sequence: Synthetic oligonucleotide
cacccaaguaacaauaaga

SEQ ID NO: 2818891 - RNA, 19 nt, Artificial Sequence
  Description of Artificial Sequence: Synthetic oligonucleotide
gugauaaacaacuguaccu

SEQ ID NO: 2818892 - RNA, 19 nt, Artificial Sequence
  Description of Artificial Sequence: Synthetic oligonucleotide
uguagucuuucaguaaaac

SEQ ID NO: 2818893 - RNA, 19 nt, Artificial Sequence
  Description of Artificial Sequence: Synthetic oligonucleotide
auacaagagaugucagaca

SEQ ID NO: 2818894 - RNA, 19 nt, Artificial Sequence
  Description of Artificial Sequence: Synthetic oligonucleotide
uaaacacugcccaccuggc

SEQ ID NO: 2818895 - RNA, 19 nt, Artificial Sequence
  Description of Artificial Sequence: Synthetic oligonucleotide
ugacgaucaacuucugauc

SEQ ID NO: 2818896 - RNA, 19 nt, Artificial Sequence
  Description of Artificial Sequence: Synthetic oligonucleotide
aguaacaauaagacaguca

SEQ ID NO: 2818897 - RNA, 19 nt, Artificial Sequence
  Description of Artificial Sequence: Synthetic oligonucleotide
uuacagucagcguccagac

SEQ ID NO: 2818898 - RNA, 19 nt, Artificial Sequence
  Description of Artificial Sequence: Synthetic oligonucleotide
acuggggaaaugcagccca

SEQ ID NO: 2818899 - RNA, 19 nt, Artificial Sequence
  Description of Artificial Sequence: Synthetic oligonucleotide
cuguaaauuucgagcaaac

SEQ ID NO: 2818900 - RNA, 19 nt, Artificial Sequence
  Description of Artificial Sequence: Synthetic oligonucleotide
aucugcuguggugauaaac

SEQ ID NO: 2818901 - RNA, 19 nt, Artificial Sequence
  Description of Artificial Sequence: Synthetic oligonucleotide
uacuucuuuuaaccgauuu

SEQ ID NO: 2818902 - RNA, 19 nt, Artificial Sequence
  Description of Artificial Sequence: Synthetic oligonucleotide
uuuguucugccauggugga

SEQ ID NO: 2818903 - RNA, 19 nt, Artificial Sequence
  Description of Artificial Sequence: Synthetic oligonucleotide
acuugaggaccucguugcc

SEQ ID NO: 2818904 - RNA, 19 nt, Artificial Sequence
  Description of Artificial Sequence: Synthetic oligonucleotide
ugaagaaugcagggcacgc

SEQ ID NO: 2818905 - RNA, 19 nt, Artificial Sequence
  Description of Artificial Sequence: Synthetic oligonucleotide
cacaucuaaccacacugag

SEQ ID NO: 2818906 - RNA, 19 nt, Artificial Sequence
  Description of Artificial Sequence: Synthetic oligonucleotide
cagcccaacuuuuacaguc

SEQ ID NO: 2818907 - RNA, 19 nt, Artificial Sequence
  Description of Artificial Sequence: Synthetic oligonucleotide
aaugggucugauggaacug

SEQ ID NO: 2818908 - RNA, 19 nt, Artificial Sequence
  Description of Artificial Sequence: Synthetic oligonucleotide
ugauguagucuuucaguaa

SEQ ID NO: 2818909 - RNA, 19 nt, Artificial Sequence
  Description of Artificial Sequence: Synthetic oligonucleotide
ugugugagugaagaaugca

SEQ ID NO: 2818910 - RNA, 19 nt, Artificial Sequence
  Description of Artificial Sequence: Synthetic oligonucleotide
aaugcagggcacgcugacg

SEQ ID NO: 2818911 - RNA, 19 nt, Artificial Sequence
  Description of Artificial Sequence: Synthetic oligonucleotide
uucugaucugguucugucu

SEQ ID NO: 2818912 - RNA, 19 nt, Artificial Sequence
  Description of Artificial Sequence: Synthetic oligonucleotide
ugggucugauggaacuggg

SEQ ID NO: 2818913 - RNA, 19 nt, Artificial Sequence
  Description of Artificial Sequence: Synthetic oligonucleotide
ugccccaacucauccaacc

SEQ ID NO: 2818914 - RNA, 19 nt, Artificial Sequence
  Description of Artificial Sequence: Synthetic oligonucleotide
ucacacaucuaaccacacu

SEQ ID NO: 2818915 - RNA, 19 nt, Artificial Sequence
  Description of Artificial Sequence: Synthetic oligonucleotide
uuacuacaguugaggagug

SEQ ID NO: 2818916 - RNA, 19 nt, Artificial Sequence
  Description of Artificial Sequence: Synthetic oligonucleotide
agugaagaaugcagggcac

SEQ ID NO: 2818917 - RNA, 19 nt, Artificial Sequence
  Description of Artificial Sequence: Synthetic oligonucleotide
agggaagcugcucuggggu

SEQ ID NO: 2818918 - RNA, 19 nt, Artificial Sequence
  Description of Artificial Sequence: Synthetic oligonucleotide
uuuaaccgauuuguucugc

SEQ ID NO: 2818919 - RNA, 19 nt, Artificial Sequence
  Description of Artificial Sequence: Synthetic oligonucleotide
gucuuucaguaaaacuucg

SEQ ID NO: 2818920 - RNA, 19 nt, Artificial Sequence
  Description of Artificial Sequence: Synthetic oligonucleotide
acaacuguaccuguuacuu

SEQ ID NO: 2818921 - RNA, 19 nt, Artificial Sequence
  Description of Artificial Sequence: Synthetic oligonucleotide
gagcaaggaaauaauccac

SEQ ID NO: 2818922 - RNA, 19 nt, Artificial Sequence
  Description of Artificial Sequence: Synthetic oligonucleotide
uaccuguuacuucuuuuaa

SEQ ID NO: 2818923 - RNA, 19 nt, Artificial Sequence
  Description of Artificial Sequence: Synthetic oligonucleotide
ucgagcaaacaauucuaaa

SEQ ID NO: 2818924 - RNA, 19 nt, Artificial Sequence
  Description of Artificial Sequence: Synthetic oligonucleotide
uuuuacagucagcguccag

SEQ ID NO: 2818925 - RNA, 19 nt, Artificial Sequence
  Description of Artificial Sequence: Synthetic oligonucleotide
gacgaucaacuucugaucu

SEQ ID NO: 2818926 - RNA, 19 nt, Artificial Sequence
  Description of Artificial Sequence: Synthetic oligonucleotide
ucguugccccaacucaucc

SEQ ID NO: 2818927 - RNA, 19 nt, Artificial Sequence
  Description of Artificial Sequence: Synthetic oligonucleotide
cugagugauacaaggagaa

SEQ ID NO: 2818928 - RNA, 19 nt, Artificial Sequence
  Description of Artificial Sequence: Synthetic oligonucleotide
ugucagacaaagggaagcu

SEQ ID NO: 2818929 - RNA, 19 nt, Artificial Sequence
  Description of Artificial Sequence: Synthetic oligonucleotide
cuugauguagucuuucagu

SEQ ID NO: 2818930 - RNA, 19 nt, Artificial Sequence
  Description of Artificial Sequence: Synthetic oligonucleotide
cacgcugacgaucaacuuc

SEQ ID NO: 2818931 - RNA, 19 nt, Artificial Sequence
  Description of Artificial Sequence: Synthetic oligonucleotide
augggucugauggaacugg

SEQ ID NO: 2818932 - RNA, 19 nt, Artificial Sequence
  Description of Artificial Sequence: Synthetic oligonucleotide
ucuaaacacugcccaccug

SEQ ID NO: 2818933 - RNA, 19 nt, Artificial Sequence
  Description of Artificial Sequence: Synthetic oligonucleotide
acugagugauacaaggaga

SEQ ID NO: 2818934 - RNA, 19 nt, Artificial Sequence
  Description of Artificial Sequence: Synthetic oligonucleotide
uguaccuguuacuucuuuu

SEQ ID NO: 2818935 - RNA, 19 nt, Artificial Sequence
  Description of Artificial Sequence: Synthetic oligonucleotide
agaaaugggucugauggaa

SEQ ID NO: 2818936 - RNA, 19 nt, Artificial Sequence
  Description of Artificial Sequence: Synthetic oligonucleotide
acaaggagaaaugggucug

SEQ ID NO: 2818937 - RNA, 19 nt, Artificial Sequence
  Description of Artificial Sequence: Synthetic oligonucleotide
cugcauacaagagauguca

SEQ ID NO: 2818938 - RNA, 19 nt, Artificial Sequence
  Description of Artificial Sequence: Synthetic oligonucleotide
aauccacaugcugaaacuu

SEQ ID NO: 2818939 - RNA, 19 nt, Artificial Sequence
  Description of Artificial Sequence: Synthetic oligonucleotide
accucguugccccaacuca

SEQ ID NO: 2818940 - RNA, 19 nt, Artificial Sequence
  Description of Artificial Sequence: Synthetic oligonucleotide
uugcuuuaucugcuguggu

SEQ ID NO: 2818941 - RNA, 19 nt, Artificial Sequence
  Description of Artificial Sequence: Synthetic oligonucleotide
cuguuggucacccaaguaa

SEQ ID NO: 2818942 - RNA, 19 nt, Artificial Sequence
  Description of Artificial Sequence: Synthetic oligonucleotide
cuucugaucugguucuguc

SEQ ID NO: 2818943 - RNA, 19 nt, Artificial Sequence
  Description of Artificial Sequence: Synthetic oligonucleotide
cugaaacuugaggaccucg

SEQ ID NO: 2818944 - RNA, 19 nt, Artificial Sequence
  Description of Artificial Sequence: Synthetic oligonucleotide
uucacacaucuaaccacac

SEQ ID NO: 2818945 - RNA, 19 nt, Artificial Sequence
  Description of Artificial Sequence: Synthetic oligonucleotide
agcaaggaaauaauccaca

SEQ ID NO: 2818946 - RNA, 19 nt, Artificial Sequence
  Description of Artificial Sequence: Synthetic oligonucleotide
gugaagaaugcagggcacg

SEQ ID NO: 2818947 - RNA, 19 nt, Artificial Sequence
  Description of Artificial Sequence: Synthetic oligonucleotide
  modified_base (5)..(5): a, c, u, g, unknown or other
gaggnggcuugugugagug

SEQ ID NO: 2818948 - RNA, 19 nt, Artificial Sequence
  Description of Artificial Sequence: Synthetic oligonucleotide
gguguaaaaguucacacau

SEQ ID NO: 2818949 - RNA, 19 nt, Artificial Sequence
  Description of Artificial Sequence: Synthetic oligonucleotide
accgauuuguucugccaug

SEQ ID NO: 2818950 - RNA, 19 nt, Artificial Sequence
  Description of Artificial Sequence: Synthetic oligonucleotide
caaccuggcuguaaauuuc

SEQ ID NO: 2818951 - RNA, 19 nt, Artificial Sequence
  Description of Artificial Sequence: Synthetic oligonucleotide
gauaaacaacuguaccugu

SEQ ID NO: 2818952 - RNA, 19 nt, Artificial Sequence
  Description of Artificial Sequence: Synthetic oligonucleotide
gagaaaugggucugaugga

SEQ ID NO: 2818953 - RNA, 19 nt, Artificial Sequence
  Description of Artificial Sequence: Synthetic oligonucleotide
aauaauccacaugcugaaa

SEQ ID NO: 2818954 - RNA, 19 nt, Artificial Sequence
  Description of Artificial Sequence: Synthetic oligonucleotide
ugcccaccuggcuugaugu

SEQ ID NO: 2818955 - RNA, 19 nt, Artificial Sequence
  Description of Artificial Sequence: Synthetic oligonucleotide
cuucuuuuaaccgauuugu

SEQ ID NO: 2818956 - RNA, 19 nt, Artificial Sequence
  Description of Artificial Sequence: Synthetic oligonucleotide
gcuugauguagucuuucag

SEQ ID NO: 2818957 - RNA, 19 nt, Artificial Sequence
  Description of Artificial Sequence: Synthetic oligonucleotide
ucuguuggucacccaagua

SEQ ID NO: 2818958 - RNA, 19 nt, Artificial Sequence
  Description of Artificial Sequence: Synthetic oligonucleotide
  modified_base (9)..(9): a, c, u, g, unknown or other
gcaagaggnggcuugugug

SEQ ID NO: 2818959 - RNA, 19 nt, Artificial Sequence
  Description of Artificial Sequence: Synthetic oligonucleotide
guggaucaaucacaauuac

SEQ ID NO: 2818960 - RNA, 19 nt, Artificial Sequence
  Description of Artificial Sequence: Synthetic oligonucleotide
cuugaggaccucguugccc

SEQ ID NO: 2818961 - RNA, 19 nt, Artificial Sequence
  Description of Artificial Sequence: Synthetic oligonucleotide
gaaaugggucugauggaac

SEQ ID NO: 2818962 - RNA, 19 nt, Artificial Sequence
  Description of Artificial Sequence: Synthetic oligonucleotide
ggucugauggaacugggga

SEQ ID NO: 2818963 - RNA, 19 nt, Artificial Sequence
  Description of Artificial Sequence: Synthetic oligonucleotide
caugguggaucaaucacaa

SEQ ID NO: 2818964 - RNA, 19 nt, Artificial Sequence
  Description of Artificial Sequence: Synthetic oligonucleotide
cccaacucauccaaccugg

SEQ ID NO: 2818965 - RNA, 19 nt, Artificial Sequence
  Description of Artificial Sequence: Synthetic oligonucleotide
gagugauacaaggagaaau

SEQ ID NO: 2818966 - RNA, 19 nt, Artificial Sequence
  Description of Artificial Sequence: Synthetic oligonucleotide
agacaaagggaagcugcuc

SEQ ID NO: 2818967 - RNA, 19 nt, Artificial Sequence
  Description of Artificial Sequence: Synthetic oligonucleotide
uucugucuguuggucaccc

SEQ ID NO: 2818968 - RNA, 19 nt, Artificial Sequence
  Description of Artificial Sequence: Synthetic oligonucleotide
aucaacuucugaucugguu

SEQ ID NO: 2818969 - RNA, 19 nt, Artificial Sequence
  Description of Artificial Sequence: Synthetic oligonucleotide
guggugauaaacaacugua

SEQ ID NO: 2818970 - RNA, 19 nt, Artificial Sequence
  Description of Artificial Sequence: Synthetic oligonucleotide
guaccuguuacuucuuuua

SEQ ID NO: 2818971 - RNA, 19 nt, Artificial Sequence
  Description of Artificial Sequence: Synthetic oligonucleotide
cugacgaucaacuucugau

SEQ ID NO: 2818972 - RNA, 19 nt, Artificial Sequence
  Description of Artificial Sequence: Synthetic oligonucleotide
uacuacaguugaggagugg

SEQ ID NO: 2818973 - RNA, 19 nt, Artificial Sequence
  Description of Artificial Sequence: Synthetic oligonucleotide
auaagacagucagcagccg

SEQ ID NO: 2818974 - RNA, 19 nt, Artificial Sequence
  Description of Artificial Sequence: Synthetic oligonucleotide
gaaugcagggcacgcugac

SEQ ID NO: 2818975 - RNA, 19 nt, Artificial Sequence
  Description of Artificial Sequence: Synthetic oligonucleotide
acaucuaaccacacugagu

SEQ ID NO: 2818976 - RNA, 19 nt, Artificial Sequence
  Description of Artificial Sequence: Synthetic oligonucleotide
  modified_base (8)..(8): a, c, u, g, unknown or other
caagaggnggcuuguguga

SEQ ID NO: 2818977 - RNA, 19 nt, Artificial Sequence
  Description of Artificial Sequence: Synthetic oligonucleotide
acgcugacgaucaacuucu

SEQ ID NO: 2818978 - RNA, 19 nt, Artificial Sequence
  Description of Artificial Sequence: Synthetic oligonucleotide
uggucacccaaguaacaau

SEQ ID NO: 2818979 - RNA, 19 nt, Artificial Sequence
  Description of Artificial Sequence: Synthetic oligonucleotide
auguuuuacuacaguugag

SEQ ID NO: 2818980 - RNA, 19 nt, Artificial Sequence
  Description of Artificial Sequence: Synthetic oligonucleotide
auccacaugcugaaacuug

SEQ ID NO: 2818981 - RNA, 19 nt, Artificial Sequence
  Description of Artificial Sequence: Synthetic oligonucleotide
cuguggugauaaacaacug

SEQ ID NO: 2818982 - RNA, 19 nt, Artificial Sequence
  Description of Artificial Sequence: Synthetic oligonucleotide
uccaaccuggcuguaaauu

SEQ ID NO: 2818983 - RNA, 19 nt, Artificial Sequence
  Description of Artificial Sequence: Synthetic oligonucleotide
gguucugucuguuggucac

SEQ ID NO: 2818984 - RNA, 19 nt, Artificial Sequence
  Description of Artificial Sequence: Synthetic oligonucleotide
acacugcccaccuggcuug

SEQ ID NO: 2818985 - RNA, 19 nt, Artificial Sequence
  Description of Artificial Sequence: Synthetic oligonucleotide
caacuguaccuguuacuuc

SEQ ID NO: 2818986 - RNA, 19 nt, Artificial Sequence
  Description of Artificial Sequence: Synthetic oligonucleotide
caaguaacaauaagacagu

SEQ ID NO: 2818987 - RNA, 19 nt, Artificial Sequence
  Description of Artificial Sequence: Synthetic oligonucleotide
agcguccagacugcagagc

SEQ ID NO: 2818988 - RNA, 19 nt, Artificial Sequence
  Description of Artificial Sequence: Synthetic oligonucleotide
guugccccaacucauccaa

SEQ ID NO: 2818989 - RNA, 19 nt, Artificial Sequence
  Description of Artificial Sequence: Synthetic oligonucleotide
ugagugauacaaggagaaa

SEQ ID NO: 2818990 - RNA, 19 nt, Artificial Sequence
  Description of Artificial Sequence: Synthetic oligonucleotide
gucugauggaacuggggaa

SEQ ID NO: 2818991 - RNA, 19 nt, Artificial Sequence
  Description of Artificial Sequence: Synthetic oligonucleotide
acacaucuaaccacacuga

SEQ ID NO: 2818992 - RNA, 19 nt, Artificial Sequence
  Description of Artificial Sequence: Synthetic oligonucleotide
gaggaguggcugcauacaa

SEQ ID NO: 2818993 - RNA, 19 nt, Artificial Sequence
  Description of Artificial Sequence: Synthetic oligonucleotide
aggaccucguugccccaac

SEQ ID NO: 2818994 - RNA, 19 nt, Artificial Sequence
  Description of Artificial Sequence: Synthetic oligonucleotide
aucuaaccacacugaguga

SEQ ID NO: 2818995 - RNA, 19 nt, Artificial Sequence
  Description of Artificial Sequence: Synthetic oligonucleotide
auaaacaacuguaccuguu

SEQ ID NO: 2818996 - RNA, 19 nt, Artificial Sequence
  Description of Artificial Sequence: Synthetic oligonucleotide
ccuggcuguaaauuucgag

SEQ ID NO: 2818997 - RNA, 19 nt, Artificial Sequence
  Description of Artificial Sequence: Synthetic oligonucleotide
gaguggcugcauacaagag

SEQ ID NO: 2818998 - RNA, 19 nt, Artificial Sequence
  Description of Artificial Sequence: Synthetic oligonucleotide
cagucagcguccagacugc

SEQ ID NO: 2818999 - RNA, 19 nt, Artificial Sequence
  Description of Artificial Sequence: Synthetic oligonucleotide
aacuucugaucugguucug

SEQ ID NO: 2819000 - RNA, 19 nt, Artificial Sequence
  Description of Artificial Sequence: Synthetic oligonucleotide
gccaugguggaucaaucac

SEQ ID NO: 2819001 - RNA, 19 nt, Artificial Sequence
  Description of Artificial Sequence: Synthetic oligonucleotide
aaaugcagcccaacuuuua

SEQ ID NO: 2819002 - RNA, 19 nt, Artificial Sequence
  Description of Artificial Sequence: Synthetic oligonucleotide
uuacuucuuuuaaccgauu

SEQ ID NO: 2819003 - RNA, 19 nt, Artificial Sequence
  Description of Artificial Sequence: Synthetic oligonucleotide
guuacuucuuuuaaccgau

SEQ ID NO: 2819004 - RNA, 19 nt, Artificial Sequence
  Description of Artificial Sequence: Synthetic oligonucleotide
gcuguggugauaaacaacu

SEQ ID NO: 2819005 - RNA, 19 nt, Artificial Sequence
  Description of Artificial Sequence: Synthetic oligonucleotide
  modified_base (2)..(2): a, c, u, g, unknown or other
gnggcuugugugagugaag

SEQ ID NO: 2819006 - RNA, 19 nt, Artificial Sequence
  Description of Artificial Sequence: Synthetic oligonucleotide
cugccaugguggaucaauc

SEQ ID NO: 2819007 - RNA, 19 nt, Artificial Sequence
  Description of Artificial Sequence: Synthetic oligonucleotide
aggaguggcugcauacaag

SEQ ID NO: 2819008 - RNA, 19 nt, Artificial Sequence
  Description of Artificial Sequence: Synthetic oligonucleotide
gguggaucaaucacaauua

SEQ ID NO: 2819009 - RNA, 19 nt, Artificial Sequence
  Description of Artificial Sequence: Synthetic oligonucleotide
gcauacaagagaugucaga

SEQ ID NO: 2819010 - RNA, 19 nt, Artificial Sequence
  Description of Artificial Sequence: Synthetic oligonucleotide
cagacugcagagcaaggaa

SEQ ID NO: 2819011 - RNA, 19 nt, Artificial Sequence
  Description of Artificial Sequence: Synthetic oligonucleotide
agacugcagagcaaggaaa

SEQ ID NO: 2819012 - RNA, 19 nt, Artificial Sequence
  Description of Artificial Sequence: Synthetic oligonucleotide
uuuaucugcuguggugaua

SEQ ID NO: 2819013 - RNA, 19 nt, Artificial Sequence
  Description of Artificial Sequence: Synthetic oligonucleotide
cugucuguuggucacccaa

SEQ ID NO: 2819014 - RNA, 19 nt, Artificial Sequence
  Description of Artificial Sequence: Synthetic oligonucleotide
guguaaaaguucacacauc

SEQ ID NO: 2819015 - RNA, 19 nt, Artificial Sequence
  Description of Artificial Sequence: Synthetic oligonucleotide
uggcugcauacaagagaug

SEQ ID NO: 2819016 - RNA, 19 nt, Artificial Sequence
  Description of Artificial Sequence: Synthetic oligonucleotide
acuucugaucugguucugu

SEQ ID NO: 2819017 - RNA, 19 nt, Artificial Sequence
  Description of Artificial Sequence: Synthetic oligonucleotide
cagcguccagacugcagag

SEQ ID NO: 2819018 - RNA, 19 nt, Artificial Sequence
  Description of Artificial Sequence: Synthetic oligonucleotide
  modified_base (6)..(6): a, c, u, g, unknown or other
agaggnggcuugugugagu

SEQ ID NO: 2819019 - RNA, 19 nt, Artificial Sequence
  Description of Artificial Sequence: Synthetic oligonucleotide
  modified_base (15)..(15): a, c, u, g, unknown or other
acuucggcaagaggnggcu

SEQ ID NO: 2819020 - RNA, 19 nt, Artificial Sequence
  Description of Artificial Sequence: Synthetic oligonucleotide
ggaaaugcagcccaacuuu

SEQ ID NO: 2819021 - RNA, 19 nt, Artificial Sequence
  Description of Artificial Sequence: Synthetic oligonucleotide
cgaucaacuucugaucugg

SEQ ID NO: 2819022 - RNA, 19 nt, Artificial Sequence
  Description of Artificial Sequence: Synthetic oligonucleotide
cucguugccccaacucauc

SEQ ID NO: 2819023 - RNA, 19 nt, Artificial Sequence
  Description of Artificial Sequence: Synthetic oligonucleotide
ucauccaaccuggcuguaa

SEQ ID NO: 2819024 - RNA, 19 nt, Artificial Sequence
  Description of Artificial Sequence: Synthetic oligonucleotide
auggaacuggggaaaugca

SEQ ID NO: 2819025 - RNA, 19 nt, Artificial Sequence
  Description of Artificial Sequence: Synthetic oligonucleotide
cagggcacgcugacgauca

SEQ ID NO: 2819026 - RNA, 19 nt, Artificial Sequence
  Description of Artificial Sequence: Synthetic oligonucleotide
cugcuguggugauaaacaa

SEQ ID NO: 2819027 - RNA, 19 nt, Artificial Sequence
  Description of Artificial Sequence: Synthetic oligonucleotide
uggcuugauguagucuuuc

SEQ ID NO: 2819028 - RNA, 19 nt, Artificial Sequence
  Description of Artificial Sequence: Synthetic oligonucleotide
gcagccgccagcuuaggga

SEQ ID NO: 2819029 - RNA, 19 nt, Artificial Sequence
  Description of Artificial Sequence: Synthetic oligonucleotide
cccaaguaacaauaagaca

SEQ ID NO: 2819030 - RNA, 19 nt, Artificial Sequence
  Description of Artificial Sequence: Synthetic oligonucleotide
agaaugcagggcacgcuga

SEQ ID NO: 2819031 - RNA, 19 nt, Artificial Sequence
  Description of Artificial Sequence: Synthetic oligonucleotide
uggggaaaugcagcccaac

SEQ ID NO: 2819032 - RNA, 19 nt, Artificial Sequence
  Description of Artificial Sequence: Synthetic oligonucleotide
agcuuagggacaggcauuu

SEQ ID NO: 2819033 - RNA, 19 nt, Artificial Sequence
  Description of Artificial Sequence: Synthetic oligonucleotide
guaaaaguucacacaucua

SEQ ID NO: 2819034 - RNA, 19 nt, Artificial Sequence
  Description of Artificial Sequence: Synthetic oligonucleotide
uugccccaacucauccaac

SEQ ID NO: 2819035 - RNA, 19 nt, Artificial Sequence
  Description of Artificial Sequence: Synthetic oligonucleotide
  modified_base (12)..(12): a, c, u, g, unknown or other
ucggcaagaggnggcuugu

SEQ ID NO: 2819036 - RNA, 19 nt, Artificial Sequence
  Description of Artificial Sequence: Synthetic oligonucleotide
ggcugcauacaagagaugu

SEQ ID NO: 2819037 - RNA, 19 nt, Artificial Sequence
  Description of Artificial Sequence: Synthetic oligonucleotide
ccgauuuguucugccaugg

SEQ ID NO: 2819038 - RNA, 19 nt, Artificial Sequence
  Description of Artificial Sequence: Synthetic oligonucleotide
auccaaccuggcuguaaau

SEQ ID NO: 2819039 - RNA, 19 nt, Artificial Sequence
  Description of Artificial Sequence: Synthetic oligonucleotide
guucugccaugguggauca

SEQ ID NO: 2819040 - RNA, 19 nt, Artificial Sequence
  Description of Artificial Sequence: Synthetic oligonucleotide
guugaggaguggcugcaua

SEQ ID NO: 2819041 - RNA, 19 nt, Artificial Sequence
  Description of Artificial Sequence: Synthetic oligonucleotide
gcguccagacugcagagca

SEQ ID NO: 2819042 - RNA, 19 nt, Artificial Sequence
  Description of Artificial Sequence: Synthetic oligonucleotide
  modified_base (10)..(10): a, c, u, g, unknown or other
ggcaagaggnggcuugugu

SEQ ID NO: 2819043 - RNA, 19 nt, Artificial Sequence
  Description of Artificial Sequence: Synthetic oligonucleotide
agcccaacuuuuacaguca

SEQ ID NO: 2819044 - RNA, 19 nt, Artificial Sequence
  Description of Artificial Sequence: Synthetic oligonucleotide
cugcccaccuggcuugaug

SEQ ID NO: 2819045 - RNA, 19 nt, Artificial Sequence
  Description of Artificial Sequence: Synthetic oligonucleotide
gcaaacaauucuaaacacu

SEQ ID NO: 2819046 - RNA, 19 nt, Artificial Sequence
  Description of Artificial Sequence: Synthetic oligonucleotide
  modified_base (4)..(4): a, c, u, g, unknown or other
aggnggcuugugugaguga

SEQ ID NO: 2819047 - RNA, 19 nt, Artificial Sequence
  Description of Artificial Sequence: Synthetic oligonucleotide
guucugucuguuggucacc

SEQ ID NO: 2819048 - RNA, 19 nt, Artificial Sequence
  Description of Artificial Sequence: Synthetic oligonucleotide
auguagucuuucaguaaaa

SEQ ID NO: 2819049 - RNA, 19 nt, Artificial Sequence
  Description of Artificial Sequence: Synthetic oligonucleotide
ggcuugauguagucuuuca

SEQ ID NO: 2819050 - RNA, 19 nt, Artificial Sequence
  Description of Artificial Sequence: Synthetic oligonucleotide
gacugcagagcaaggaaau

SEQ ID NO: 2819051 - RNA, 19 nt, Artificial Sequence
  Description of Artificial Sequence: Synthetic oligonucleotide
gggucugauggaacugggg

SEQ ID NO: 2819052 - RNA, 19 nt, Artificial Sequence
  Description of Artificial Sequence: Synthetic oligonucleotide
cccaacuuuuacagucagc

SEQ ID NO: 2819053 - RNA, 19 nt, Artificial Sequence
  Description of Artificial Sequence: Synthetic oligonucleotide
acaagagaugucagacaaa

SEQ ID NO: 2819054 - RNA, 19 nt, Artificial Sequence
  Description of Artificial Sequence: Synthetic oligonucleotide
gaagaaugcagggcacgcu

SEQ ID NO: 2819055 - RNA, 19 nt, Artificial Sequence
  Description of Artificial Sequence: Synthetic oligonucleotide
ccacaugcugaaacuugag

SEQ ID NO: 2819056 - RNA, 19 nt, Artificial Sequence
  Description of Artificial Sequence: Synthetic oligonucleotide
gucacccaaguaacaauaa

SEQ ID NO: 2819057 - RNA, 19 nt, Artificial Sequence
  Description of Artificial Sequence: Synthetic oligonucleotide
ugaggaccucguugcccca

SEQ ID NO: 2819058 - RNA, 19 nt, Artificial Sequence
  Description of Artificial Sequence: Synthetic oligonucleotide
cagacaaagggaagcugcu

SEQ ID NO: 2819059 - RNA, 19 nt, Artificial Sequence
  Description of Artificial Sequence: Synthetic oligonucleotide
gacaggcauuugcuuuauc

SEQ ID NO: 2819060 - RNA, 19 nt, Artificial Sequence
  Description of Artificial Sequence: Synthetic oligonucleotide
ggucacccaaguaacaaua

SEQ ID NO: 2819061 - RNA, 19 nt, Artificial Sequence
  Description of Artificial Sequence: Synthetic oligonucleotide
caacuuuuacagucagcgu

SEQ ID NO: 2819062 - RNA, 19 nt, Artificial Sequence
  Description of Artificial Sequence: Synthetic oligonucleotide
gucuguuggucacccaagu

SEQ ID NO: 2819063 - RNA, 19 nt, Artificial Sequence
  Description of Artificial Sequence: Synthetic oligonucleotide
  modified_base (3)..(3): a, c, u, g, unknown or other
ggnggcuugugugagugaa

SEQ ID NO: 2819064 - RNA, 19 nt, Artificial Sequence
  Description of Artificial Sequence: Synthetic oligonucleotide
gcugacgaucaacuucuga

SEQ ID NO: 2819065 - RNA, 19 nt, Artificial Sequence
  Description of Artificial Sequence: Synthetic oligonucleotide
gaaaugcagcccaacuuuu

SEQ ID NO: 2819066 - RNA, 19 nt, Artificial Sequence
  Description of Artificial Sequence: Synthetic oligonucleotide
ccccaacucauccaaccug

SEQ ID NO: 2819067 - RNA, 19 nt, Artificial Sequence
  Description of Artificial Sequence: Synthetic oligonucleotide
gcaaggaaauaauccacau

SEQ ID NO: 2819068 - RNA, 19 nt, Artificial Sequence
  Description of Artificial Sequence: Synthetic oligonucleotide
cuuuuacagucagcgucca

SEQ ID NO: 2819069 - RNA, 19 nt, Artificial Sequence
  Description of Artificial Sequence: Synthetic oligonucleotide
gcuugugugagugaagaau

SEQ ID NO: 2819070 - RNA, 19 nt, Artificial Sequence
  Description of Artificial Sequence: Synthetic oligonucleotide
caauuacaucaaauguuuu

SEQ ID NO: 2819071 - RNA, 19 nt, Artificial Sequence
  Description of Artificial Sequence: Synthetic oligonucleotide
gggacaggcauuugcuuua

SEQ ID NO: 2819072 - RNA, 19 nt, Artificial Sequence
  Description of Artificial Sequence: Synthetic oligonucleotide
ggcuguaaauuucgagcaa

SEQ ID NO: 2819073 - RNA, 19 nt, Artificial Sequence
  Description of Artificial Sequence: Synthetic oligonucleotide
gcugcauacaagagauguc

SEQ ID NO: 2819074 - RNA, 19 nt, Artificial Sequence
  Description of Artificial Sequence: Synthetic oligonucleotide
gggaaaugcagcccaacuu

SEQ ID NO: 2819075 - RNA, 19 nt, Artificial Sequence
  Description of Artificial Sequence: Synthetic oligonucleotide
ggggaaaugcagcccaacu

SEQ ID NO: 2819076 - RNA, 19 nt, Artificial Sequence
  Description of Artificial Sequence: Synthetic oligonucleotide
cccaccuggcuugauguag

SEQ ID NO: 2819077 - RNA, 19 nt, Artificial Sequence
  Description of Artificial Sequence: Synthetic oligonucleotide
aguugaggaguggcugcau

SEQ ID NO: 2819078 - RNA, 19 nt, Artificial Sequence
  Description of Artificial Sequence: Synthetic oligonucleotide
cuuuaucugcuguggugau

SEQ ID NO: 2819079 - RNA, 19 nt, Artificial Sequence
  Description of Artificial Sequence: Synthetic oligonucleotide
accuggcuguaaauuucga

SEQ ID NO: 2819080 - RNA, 19 nt, Artificial Sequence
  Description of Artificial Sequence: Synthetic oligonucleotide
ggcacgcugacgaucaacu

SEQ ID NO: 2819081 - RNA, 19 nt, Artificial Sequence
  Description of Artificial Sequence: Synthetic oligonucleotide
gccgccagcuuagggacag

SEQ ID NO: 2819082 - RNA, 19 nt, Artificial Sequence
  Description of Artificial Sequence: Synthetic oligonucleotide
cugaucugguucugucugu

SEQ ID NO: 2819083 - RNA, 19 nt, Artificial Sequence
  Description of Artificial Sequence: Synthetic oligonucleotide
ccagcuuagggacaggcau

SEQ ID NO: 2819084 - RNA, 19 nt, Artificial Sequence
  Description of Artificial Sequence: Synthetic oligonucleotide
cuggggaaaugcagcccaa

SEQ ID NO: 2819085 - RNA, 19 nt, Artificial Sequence
  Description of Artificial Sequence: Synthetic oligonucleotide
gaggaccucguugccccaa

SEQ ID NO: 2819086 - RNA, 19 nt, Artificial Sequence
  Description of Artificial Sequence: Synthetic oligonucleotide
ccaaccuggcuguaaauuu

SEQ ID NO: 2819087 - RNA, 19 nt, Artificial Sequence
  Description of Artificial Sequence: Synthetic oligonucleotide
gcugaaacuugaggaccuc

SEQ ID NO: 2819088 - RNA, 19 nt, Artificial Sequence
  Description of Artificial Sequence: Synthetic oligonucleotide
cagcuuagggacaggcauu

SEQ ID NO: 2819089 - RNA, 19 nt, Artificial Sequence
  Description of Artificial Sequence: Synthetic oligonucleotide
gcagggcacgcugacgauc

SEQ ID NO: 2819090 - RNA, 19 nt, Artificial Sequence
  Description of Artificial Sequence: Synthetic oligonucleotide
gccagcuuagggacaggca

SEQ ID NO: 2819091 - RNA, 19 nt, Artificial Sequence
  Description of Artificial Sequence: Synthetic oligonucleotide
gcuuagggacaggcauuug

SEQ ID NO: 2819092 - RNA, 19 nt, Artificial Sequence
  Description of Artificial Sequence: Synthetic oligonucleotide
cuggcuugauguagucuuu

SEQ ID NO: 2819093 - RNA, 19 nt, Artificial Sequence
  Description of Artificial Sequence: Synthetic oligonucleotide
cuguaccuguuacuucuuu

SEQ ID NO: 2819094 - RNA, 19 nt, Artificial Sequence
  Description of Artificial Sequence: Synthetic oligonucleotide
gccccaacucauccaaccu

SEQ ID NO: 2819095 - RNA, 19 nt, Artificial Sequence
  Description of Artificial Sequence: Synthetic oligonucleotide
agggcacgcugacgaucaa

SEQ ID NO: 2819096 - RNA, 19 nt, Artificial Sequence
  Description of Artificial Sequence: Synthetic oligonucleotide
gcagcccaacuuuuacagu

SEQ ID NO: 2819097 - RNA, 19 nt, Artificial Sequence
  Description of Artificial Sequence: Synthetic oligonucleotide
cugauggaacuggggaaau

SEQ ID NO: 2819098 - RNA, 19 nt, Artificial Sequence
  Description of Artificial Sequence: Synthetic oligonucleotide
agccgccagcuuagggaca

SEQ ID NO: 2819099 - RNA, 19 nt, Artificial Sequence
  Description of Artificial Sequence: Synthetic oligonucleotide
cguugccccaacucaucca

SEQ ID NO: 2819100 - RNA, 19 nt, Artificial Sequence
  Description of Artificial Sequence: Synthetic oligonucleotide
acugcccaccuggcuugau

SEQ ID NO: 2819101 - RNA, 19 nt, Artificial Sequence
  Description of Artificial Sequence: Synthetic oligonucleotide
ccucguugccccaacucau

SEQ ID NO: 2819102 - RNA, 19 nt, Artificial Sequence
  Description of Artificial Sequence: Synthetic oligonucleotide
  modified_base (14)..(14): a, c, u, g, unknown or other
cuucggcaagaggnggcuu

SEQ ID NO: 2819103 - RNA, 19 nt, Artificial Sequence
  Description of Artificial Sequence: Synthetic oligonucleotide
ggaccucguugccccaacu

SEQ ID NO: 2819104 - RNA, 19 nt, Artificial Sequence
  Description of Artificial Sequence: Synthetic oligonucleotide
cacugcccaccuggcuuga

SEQ ID NO: 2819105 - RNA, 19 nt, Artificial Sequence
  Description of Artificial Sequence: Synthetic oligonucleotide
gcccaccuggcuugaugua

SEQ ID NO: 2819106 - RNA, 19 nt, Artificial Sequence
  Description of Artificial Sequence: Synthetic oligonucleotide
gcacgcugacgaucaacuu

SEQ ID NO: 2819107 - RNA, 19 nt, Artificial Sequence
  Description of Artificial Sequence: Synthetic oligonucleotide
cgcugacgaucaacuucug

SEQ ID NO: 2819108 - RNA, 19 nt, Artificial Sequence
  Description of Artificial Sequence: Synthetic oligonucleotide
cgauuuguucugccauggu

SEQ ID NO: 2819109 - RNA, 19 nt, Artificial Sequence
  Description of Artificial Sequence: Synthetic oligonucleotide
  modified_base (11)..(11): a, c, u, g, unknown or other
cggcaagaggnggcuugug

SEQ ID NO: 2819110 - RNA, 19 nt, Artificial Sequence
  Description of Artificial Sequence: Synthetic oligonucleotide
ccgccagcuuagggacagg

SEQ ID NO: 2819111 - RNA, 19 nt, Artificial Sequence
  Description of Artificial Sequence: Synthetic oligonucleotide
  modified_base (1)..(1): a, c, u, g, unknown or other
nggcuugugugagugaaga

SEQ ID NO: 2819112 - RNA, 19 nt, Artificial Sequence
  Description of Artificial Sequence: Synthetic oligonucleotide
auuuauucaagccaucucc

SEQ ID NO: 2819113 - RNA, 19 nt, Artificial Sequence
  Description of Artificial Sequence: Synthetic oligonucleotide
accaauuugauacaaggac

SEQ ID NO: 2819114 - RNA, 19 nt, Artificial Sequence
  Description of Artificial Sequence: Synthetic oligonucleotide
acggucaccaauuugauac

SEQ ID NO: 2819115 - RNA, 19 nt, Artificial Sequence
  Description of Artificial Sequence: Synthetic oligonucleotide
ucuuuacucaucuucauag

SEQ ID NO: 2819116 - RNA, 19 nt, Artificial Sequence
  Description of Artificial Sequence: Synthetic oligonucleotide
uccucuuacaagcaaaggg

SEQ ID NO: 2819117 - RNA, 19 nt, Artificial Sequence
  Description of Artificial Sequence: Synthetic oligonucleotide
ugaggguugugaaagaggg

SEQ ID NO: 2819118 - RNA, 19 nt, Artificial Sequence
  Description of Artificial Sequence: Synthetic oligonucleotide
aaguuauuuauucaagcca

SEQ ID NO: 2819119 - RNA, 19 nt, Artificial Sequence
  Description of Artificial Sequence: Synthetic oligonucleotide
uaaguuauuuauucaagcc

SEQ ID NO: 2819120 - RNA, 19 nt, Artificial Sequence
  Description of Artificial Sequence: Synthetic oligonucleotide
ucaccaauuugauacaagg

SEQ ID NO: 2819121 - RNA, 19 nt, Artificial Sequence
  Description of Artificial Sequence: Synthetic oligonucleotide
agaguaaugguccaaacca

SEQ ID NO: 2819122 - RNA, 19 nt, Artificial Sequence
  Description of Artificial Sequence: Synthetic oligonucleotide
uuuacucaucuucauagcc

SEQ ID NO: 2819123 - RNA, 19 nt, Artificial Sequence
  Description of Artificial Sequence: Synthetic oligonucleotide
cuuacaagcaaagggaugg

SEQ ID NO: 2819124 - RNA, 19 nt, Artificial Sequence
  Description of Artificial Sequence: Synthetic oligonucleotide
gauacaaggacagaugagc

SEQ ID NO: 2819125 - RNA, 19 nt, Artificial Sequence
  Description of Artificial Sequence: Synthetic oligonucleotide
aaugguccaaaccagugcu

SEQ ID NO: 2819126 - RNA, 19 nt, Artificial Sequence
  Description of Artificial Sequence: Synthetic oligonucleotide
gacagaugagcuuagcgcc

SEQ ID NO: 2819127 - RNA, 19 nt, Artificial Sequence
  Description of Artificial Sequence: Synthetic oligonucleotide
caauuugauacaaggacag

SEQ ID NO: 2819128 - RNA, 19 nt, Artificial Sequence
  Description of Artificial Sequence: Synthetic oligonucleotide
acauccgagacgcacacac

SEQ ID NO: 2819129 - RNA, 19 nt, Artificial Sequence
  Description of Artificial Sequence: Synthetic oligonucleotide
uggaagauugguguaacgg

SEQ ID NO: 2819130 - RNA, 19 nt, Artificial Sequence
  Description of Artificial Sequence: Synthetic oligonucleotide
ucgugguccacacacagag

SEQ ID NO: 2819131 - RNA, 19 nt, Artificial Sequence
  Description of Artificial Sequence: Synthetic oligonucleotide
uccacaugcgagcugaacc

SEQ ID NO: 2819132 - RNA, 19 nt, Artificial Sequence
  Description of Artificial Sequence: Synthetic oligonucleotide
agcaugcucacucccaccc

SEQ ID NO: 2819133 - RNA, 19 nt, Artificial Sequence
  Description of Artificial Sequence: Synthetic oligonucleotide
uuuauucaagccaucuccu

SEQ ID NO: 2819134 - RNA, 19 nt, Artificial Sequence
  Description of Artificial Sequence: Synthetic oligonucleotide
aaaccagugcugugguccc

SEQ ID NO: 2819135 - RNA, 19 nt, Artificial Sequence
  Description of Artificial Sequence: Synthetic oligonucleotide
aagacguugagcaugcuca

SEQ ID NO: 2819136 - RNA, 19 nt, Artificial Sequence
  Description of Artificial Sequence: Synthetic oligonucleotide
uauucaagccaucuccucu

SEQ ID NO: 2819137 - RNA, 19 nt, Artificial Sequence
  Description of Artificial Sequence: Synthetic oligonucleotide
acacacagaguaauggucc

SEQ ID NO: 2819138 - RNA, 19 nt, Artificial Sequence
  Description of Artificial Sequence: Synthetic oligonucleotide
agcuuagcgccccaugugc

SEQ ID NO: 2819139 - RNA, 19 nt, Artificial Sequence
  Description of Artificial Sequence: Synthetic oligonucleotide
aaguaggugagagccuucc

SEQ ID NO: 2819140 - RNA, 19 nt, Artificial Sequence
  Description of Artificial Sequence: Synthetic oligonucleotide
cacgaaguaggugagagcc

SEQ ID NO: 2819141 - RNA, 19 nt, Artificial Sequence
  Description of Artificial Sequence: Synthetic oligonucleotide
aggacagaugagcuuagcg

SEQ ID NO: 2819142 - RNA, 19 nt, Artificial Sequence
  Description of Artificial Sequence: Synthetic oligonucleotide
guuaccaucuccccagggg

SEQ ID NO: 2819143 - RNA, 19 nt, Artificial Sequence
  Description of Artificial Sequence: Synthetic oligonucleotide
ugauacaaggacagaugag

SEQ ID NO: 2819144 - RNA, 19 nt, Artificial Sequence
  Description of Artificial Sequence: Synthetic oligonucleotide
uuucgugguccacacacag

SEQ ID NO: 2819145 - RNA, 19 nt, Artificial Sequence
  Description of Artificial Sequence: Synthetic oligonucleotide
uaugguuaccaucucccca

SEQ ID NO: 2819146 - RNA, 19 nt, Artificial Sequence
  Description of Artificial Sequence: Synthetic oligonucleotide
uauuuauucaagccaucuc

SEQ ID NO: 2819147 - RNA, 19 nt, Artificial Sequence
  Description of Artificial Sequence: Synthetic oligonucleotide
auccgagacgcacacacgg

SEQ ID NO: 2819148 - RNA, 19 nt, Artificial Sequence
  Description of Artificial Sequence: Synthetic oligonucleotide
ucuuacaagcaaagggaug

SEQ ID NO: 2819149 - RNA, 19 nt, Artificial Sequence
  Description of Artificial Sequence: Synthetic oligonucleotide
augguuaccaucuccccag

SEQ ID NO: 2819150 - RNA, 19 nt, Artificial Sequence
  Description of Artificial Sequence: Synthetic oligonucleotide
acaagcaaagggauggugg

SEQ ID NO: 2819151 - RNA, 19 nt, Artificial Sequence
  Description of Artificial Sequence: Synthetic oligonucleotide
uuaccaucuccccagggga

SEQ ID NO: 2819152 - RNA, 19 nt, Artificial Sequence
  Description of Artificial Sequence: Synthetic oligonucleotide
acguugagcaugcucacuc

SEQ ID NO: 2819153 - RNA, 19 nt, Artificial Sequence
  Description of Artificial Sequence: Synthetic oligonucleotide
agcgccacgaaguagguga

SEQ ID NO: 2819154 - RNA, 19 nt, Artificial Sequence
  Description of Artificial Sequence: Synthetic oligonucleotide
agaggguaugguuaccauc

SEQ ID NO: 2819155 - RNA, 19 nt, Artificial Sequence
  Description of Artificial Sequence: Synthetic oligonucleotide
auugguguaacggucacca

SEQ ID NO: 2819156 - RNA, 19 nt, Artificial Sequence
  Description of Artificial Sequence: Synthetic oligonucleotide
gaaguggguucacaugagg

SEQ ID NO: 2819157 - RNA, 19 nt, Artificial Sequence
  Description of Artificial Sequence: Synthetic oligonucleotide
acagaguaaugguccaaac

SEQ ID NO: 2819158 - RNA, 19 nt, Artificial Sequence
  Description of Artificial Sequence: Synthetic oligonucleotide
cagaguaaugguccaaacc

SEQ ID NO: 2819159 - RNA, 19 nt, Artificial Sequence
  Description of Artificial Sequence: Synthetic oligonucleotide
caaaccagugcuguggucc

SEQ ID NO: 2819160 - RNA, 19 nt, Artificial Sequence
  Description of Artificial Sequence: Synthetic oligonucleotide
cacaugaggguugugaaag

SEQ ID NO: 2819161 - RNA, 19 nt, Artificial Sequence
  Description of Artificial Sequence: Synthetic oligonucleotide
gaugguggaagauuggugu

SEQ ID NO: 2819162 - RNA, 19 nt, Artificial Sequence
  Description of Artificial Sequence: Synthetic oligonucleotide
cuuuacucaucuucauagc

SEQ ID NO: 2819163 - RNA, 19 nt, Artificial Sequence
  Description of Artificial Sequence: Synthetic oligonucleotide
caggggaagggcuuggucc

SEQ ID NO: 2819164 - RNA, 19 nt, Artificial Sequence
  Description of Artificial Sequence: Synthetic oligonucleotide
aaagaggguaugguuacca

SEQ ID NO: 2819165 - RNA, 19 nt, Artificial Sequence
  Description of Artificial Sequence: Synthetic oligonucleotide
ugugaaagaggguaugguu

SEQ ID NO: 2819166 - RNA, 19 nt, Artificial Sequence
  Description of Artificial Sequence: Synthetic oligonucleotide
ugagcuuagcgccccaugu

SEQ ID NO: 2819167 - RNA, 19 nt, Artificial Sequence
  Description of Artificial Sequence: Synthetic oligonucleotide
ggacagaugagcuuagcgc

SEQ ID NO: 2819168 - RNA, 19 nt, Artificial Sequence
  Description of Artificial Sequence: Synthetic oligonucleotide
agcugaacccuccucgccg

SEQ ID NO: 2819169 - RNA, 19 nt, Artificial Sequence
  Description of Artificial Sequence: Synthetic oligonucleotide
agauugguguaacggucac

SEQ ID NO: 2819170 - RNA, 19 nt, Artificial Sequence
  Description of Artificial Sequence: Synthetic oligonucleotide
guugugaaagaggguaugg

SEQ ID NO: 2819171 - RNA, 19 nt, Artificial Sequence
  Description of Artificial Sequence: Synthetic oligonucleotide
ugguguaacggucaccaau

SEQ ID NO: 2819172 - RNA, 19 nt, Artificial Sequence
  Description of Artificial Sequence: Synthetic oligonucleotide
cuucauagccagucggaag

SEQ ID NO: 2819173 - RNA, 19 nt, Artificial Sequence
  Description of Artificial Sequence: Synthetic oligonucleotide
uaggugagagccuuccaca

SEQ ID NO: 2819174 - RNA, 19 nt, Artificial Sequence
  Description of Artificial Sequence: Synthetic oligonucleotide
gaagauugguguaacgguc

SEQ ID NO: 2819175 - RNA, 19 nt, Artificial Sequence
  Description of Artificial Sequence: Synthetic oligonucleotide
cacacacagaguaaugguc

SEQ ID NO: 2819176 - RNA, 19 nt, Artificial Sequence
  Description of Artificial Sequence: Synthetic oligonucleotide
cucagcagcccagacaucc

SEQ ID NO: 2819177 - RNA, 19 nt, Artificial Sequence
  Description of Artificial Sequence: Synthetic oligonucleotide
gaguaaugguccaaaccag

SEQ ID NO: 2819178 - RNA, 19 nt, Artificial Sequence
  Description of Artificial Sequence: Synthetic oligonucleotide
aagauugguguaacgguca

SEQ ID NO: 2819179 - RNA, 19 nt, Artificial Sequence
  Description of Artificial Sequence: Synthetic oligonucleotide
uaggcgacgaacucggguc

SEQ ID NO: 2819180 - RNA, 19 nt, Artificial Sequence
  Description of Artificial Sequence: Synthetic oligonucleotide
guaggugagagccuuccac

SEQ ID NO: 2819181 - RNA, 19 nt, Artificial Sequence
  Description of Artificial Sequence: Synthetic oligonucleotide
agcaaagggaugguggaag

SEQ ID NO: 2819182 - RNA, 19 nt, Artificial Sequence
  Description of Artificial Sequence: Synthetic oligonucleotide
gagccuuccacaugcgagc

SEQ ID NO: 2819183 - RNA, 19 nt, Artificial Sequence
  Description of Artificial Sequence: Synthetic oligonucleotide
ugcuguggucccuuguugc

SEQ ID NO: 2819184 - RNA, 19 nt, Artificial Sequence
  Description of Artificial Sequence: Synthetic oligonucleotide
ugugcuuucgugguccaca

SEQ ID NO: 2819185 - RNA, 19 nt, Artificial Sequence
  Description of Artificial Sequence: Synthetic oligonucleotide
acuucaggaagacguugag

SEQ ID NO: 2819186 - RNA, 19 nt, Artificial Sequence
  Description of Artificial Sequence: Synthetic oligonucleotide
agacguugagcaugcucac

SEQ ID NO: 2819187 - RNA, 19 nt, Artificial Sequence
  Description of Artificial Sequence: Synthetic oligonucleotide
aaagggaugguggaagauu

SEQ ID NO: 2819188 - RNA, 19 nt, Artificial Sequence
  Description of Artificial Sequence: Synthetic oligonucleotide
guccaaaccagugcugugg

SEQ ID NO: 2819189 - RNA, 19 nt, Artificial Sequence
  Description of Artificial Sequence: Synthetic oligonucleotide
uuauucaagccaucuccuc

SEQ ID NO: 2819190 - RNA, 19 nt, Artificial Sequence
  Description of Artificial Sequence: Synthetic oligonucleotide
guaaugguccaaaccagug

SEQ ID NO: 2819191 - RNA, 19 nt, Artificial Sequence
  Description of Artificial Sequence: Synthetic oligonucleotide
gguaugguuaccaucuccc

SEQ ID NO: 2819192 - RNA, 19 nt, Artificial Sequence
  Description of Artificial Sequence: Synthetic oligonucleotide
gacgaacucgggucucucg

SEQ ID NO: 2819193 - RNA, 19 nt, Artificial Sequence
  Description of Artificial Sequence: Synthetic oligonucleotide
agagccuuccacaugcgag

SEQ ID NO: 2819194 - RNA, 19 nt, Artificial Sequence
  Description of Artificial Sequence: Synthetic oligonucleotide
gaugcggaggugcggguag

SEQ ID NO: 2819195 - RNA, 19 nt, Artificial Sequence
  Description of Artificial Sequence: Synthetic oligonucleotide
uggguucacaugaggguug

SEQ ID NO: 2819196 - RNA, 19 nt, Artificial Sequence
  Description of Artificial Sequence: Synthetic oligonucleotide
gaacucgggucucucgugc

SEQ ID NO: 2819197 - RNA, 19 nt, Artificial Sequence
  Description of Artificial Sequence: Synthetic oligonucleotide
ucggaaguggguucacaug

SEQ ID NO: 2819198 - RNA, 19 nt, Artificial Sequence
  Description of Artificial Sequence: Synthetic oligonucleotide
ucacucccaccccaggcag

SEQ ID NO: 2819199 - RNA, 19 nt, Artificial Sequence
  Description of Artificial Sequence: Synthetic oligonucleotide
ugucgcgacuucaggaaga

SEQ ID NO: 2819200 - RNA, 19 nt, Artificial Sequence
  Description of Artificial Sequence: Synthetic oligonucleotide
guugagcaugcucacuccc

SEQ ID NO: 2819201 - RNA, 19 nt, Artificial Sequence
  Description of Artificial Sequence: Synthetic oligonucleotide
agcccagacauccgagacg

SEQ ID NO: 2819202 - RNA, 19 nt, Artificial Sequence
  Description of Artificial Sequence: Synthetic oligonucleotide
augaggguugugaaagagg

SEQ ID NO: 2819203 - RNA, 19 nt, Artificial Sequence
  Description of Artificial Sequence: Synthetic oligonucleotide
acaaggacagaugagcuua

SEQ ID NO: 2819204 - RNA, 19 nt, Artificial Sequence
  Description of Artificial Sequence: Synthetic oligonucleotide
guaugguuaccaucucccc

SEQ ID NO: 2819205 - RNA, 19 nt, Artificial Sequence
  Description of Artificial Sequence: Synthetic oligonucleotide
guggaagauugguguaacg

SEQ ID NO: 2819206 - RNA, 19 nt, Artificial Sequence
  Description of Artificial Sequence: Synthetic oligonucleotide
auagccagucggaaguggg

SEQ ID NO: 2819207 - RNA, 19 nt, Artificial Sequence
  Description of Artificial Sequence: Synthetic oligonucleotide
uugugaaagaggguauggu

SEQ ID NO: 2819208 - RNA, 19 nt, Artificial Sequence
  Description of Artificial Sequence: Synthetic oligonucleotide
gcuuucgugguccacacac

SEQ ID NO: 2819209 - RNA, 19 nt, Artificial Sequence
  Description of Artificial Sequence: Synthetic oligonucleotide
aagaggguaugguuaccau

SEQ ID NO: 2819210 - RNA, 19 nt, Artificial Sequence
  Description of Artificial Sequence: Synthetic oligonucleotide
uugguccugaugcggaggu

SEQ ID NO: 2819211 - RNA, 19 nt, Artificial Sequence
  Description of Artificial Sequence: Synthetic oligonucleotide
ugcggguaggcgacgaacu

SEQ ID NO: 2819212 - RNA, 19 nt, Artificial Sequence
  Description of Artificial Sequence: Synthetic oligonucleotide
aggguugugaaagagggua

SEQ ID NO: 2819213 - RNA, 19 nt, Artificial Sequence
  Description of Artificial Sequence: Synthetic oligonucleotide
uacaagcaaagggauggug

SEQ ID NO: 2819214 - RNA, 19 nt, Artificial Sequence
  Description of Artificial Sequence: Synthetic oligonucleotide
uguggucccuuguugccug

SEQ ID NO: 2819215 - RNA, 19 nt, Artificial Sequence
  Description of Artificial Sequence: Synthetic oligonucleotide
auacaaggacagaugagcu

SEQ ID NO: 2819216 - RNA, 19 nt, Artificial Sequence
  Description of Artificial Sequence: Synthetic oligonucleotide
caugcgagcugaacccucc

SEQ ID NO: 2819217 - RNA, 19 nt, Artificial Sequence
  Description of Artificial Sequence: Synthetic oligonucleotide
aguaaugguccaaaccagu

SEQ ID NO: 2819218 - RNA, 19 nt, Artificial Sequence
  Description of Artificial Sequence: Synthetic oligonucleotide
guucacaugaggguuguga

SEQ ID NO: 2819219 - RNA, 19 nt, Artificial Sequence
  Description of Artificial Sequence: Synthetic oligonucleotide
caggaagacguugagcaug

SEQ ID NO: 2819220 - RNA, 19 nt, Artificial Sequence
  Description of Artificial Sequence: Synthetic oligonucleotide
ucuucauagccagucggaa

SEQ ID NO: 2819221 - RNA, 19 nt, Artificial Sequence
  Description of Artificial Sequence: Synthetic oligonucleotide
caccaauuugauacaagga

SEQ ID NO: 2819222 - RNA, 19 nt, Artificial Sequence
  Description of Artificial Sequence: Synthetic oligonucleotide
agccaucuccucuuacaag

SEQ ID NO: 2819223 - RNA, 19 nt, Artificial Sequence
  Description of Artificial Sequence: Synthetic oligonucleotide
ucucuuuacucaucuucau

SEQ ID NO: 2819224 - RNA, 19 nt, Artificial Sequence
  Description of Artificial Sequence: Synthetic oligonucleotide
gacaugggccgucccaccc

SEQ ID NO: 2819225 - RNA, 19 nt, Artificial Sequence
  Description of Artificial Sequence: Synthetic oligonucleotide
acgaacucgggucucucgu

SEQ ID NO: 2819226 - RNA, 19 nt, Artificial Sequence
  Description of Artificial Sequence: Synthetic oligonucleotide
uacaaggacagaugagcuu

SEQ ID NO: 2819227 - RNA, 19 nt, Artificial Sequence
  Description of Artificial Sequence: Synthetic oligonucleotide
aacggucaccaauuugaua

SEQ ID NO: 2819228 - RNA, 19 nt, Artificial Sequence
  Description of Artificial Sequence: Synthetic oligonucleotide
uccgagacgcacacacggc

SEQ ID NO: 2819229 - RNA, 19 nt, Artificial Sequence
  Description of Artificial Sequence: Synthetic oligonucleotide
gagcuuagcgccccaugug

SEQ ID NO: 2819230 - RNA, 19 nt, Artificial Sequence
  Description of Artificial Sequence: Synthetic oligonucleotide
ucucgugcuccgcgugucg

SEQ ID NO: 2819231 - RNA, 19 nt, Artificial Sequence
  Description of Artificial Sequence: Synthetic oligonucleotide
ugguuaccaucuccccagg

SEQ ID NO: 2819232 - RNA, 19 nt, Artificial Sequence
  Description of Artificial Sequence: Synthetic oligonucleotide
gcgagcugaacccuccucg

SEQ ID NO: 2819233 - RNA, 19 nt, Artificial Sequence
  Description of Artificial Sequence: Synthetic oligonucleotide
acggccgccaccaucuugg

SEQ ID NO: 2819234 - RNA, 19 nt, Artificial Sequence
  Description of Artificial Sequence: Synthetic oligonucleotide
ucaagccaucuccucuuac

SEQ ID NO: 2819235 - RNA, 19 nt, Artificial Sequence
  Description of Artificial Sequence: Synthetic oligonucleotide
ugguccaaaccagugcugu

SEQ ID NO: 2819236 - RNA, 19 nt, Artificial Sequence
  Description of Artificial Sequence: Synthetic oligonucleotide
uaguccagguucucuuuac

SEQ ID NO: 2819237 - RNA, 19 nt, Artificial Sequence
  Description of Artificial Sequence: Synthetic oligonucleotide
ccucuuacaagcaaaggga

SEQ ID NO: 2819238 - RNA, 19 nt, Artificial Sequence
  Description of Artificial Sequence: Synthetic oligonucleotide
acaugggccgucccacccg

SEQ ID NO: 2819239 - RNA, 19 nt, Artificial Sequence
  Description of Artificial Sequence: Synthetic oligonucleotide
uucgugguccacacacaga

SEQ ID NO: 2819240 - RNA, 19 nt, Artificial Sequence
  Description of Artificial Sequence: Synthetic oligonucleotide
gugguccacacacagagua

SEQ ID NO: 2819241 - RNA, 19 nt, Artificial Sequence
  Description of Artificial Sequence: Synthetic oligonucleotide
ugggcgccacucgacaugg

SEQ ID NO: 2819242 - RNA, 19 nt, Artificial Sequence
  Description of Artificial Sequence: Synthetic oligonucleotide
ugaacccuccucgccgugg

SEQ ID NO: 2819243 - RNA, 19 nt, Artificial Sequence
  Description of Artificial Sequence: Synthetic oligonucleotide
gugaaagaggguaugguua

SEQ ID NO: 2819244 - RNA, 19 nt, Artificial Sequence
  Description of Artificial Sequence: Synthetic oligonucleotide
gagacgcacacacggccgc

SEQ ID NO: 2819245 - RNA, 19 nt, Artificial Sequence
  Description of Artificial Sequence: Synthetic oligonucleotide
gucaccaauuugauacaag

SEQ ID NO: 2819246 - RNA, 19 nt, Artificial Sequence
  Description of Artificial Sequence: Synthetic oligonucleotide
cauccgagacgcacacacg

SEQ ID NO: 2819247 - RNA, 19 nt, Artificial Sequence
  Description of Artificial Sequence: Synthetic oligonucleotide
augagcuuagcgccccaug

SEQ ID NO: 2819248 - RNA, 19 nt, Artificial Sequence
  Description of Artificial Sequence: Synthetic oligonucleotide
gauugguguaacggucacc

SEQ ID NO: 2819249 - RNA, 19 nt, Artificial Sequence
  Description of Artificial Sequence: Synthetic oligonucleotide
aacccuccucgccgugggc

SEQ ID NO: 2819250 - RNA, 19 nt, Artificial Sequence
  Description of Artificial Sequence: Synthetic oligonucleotide
caaggacagaugagcuuag

SEQ ID NO: 2819251 - RNA, 19 nt, Artificial Sequence
  Description of Artificial Sequence: Synthetic oligonucleotide
cauagccagucggaagugg

SEQ ID NO: 2819252 - RNA, 19 nt, Artificial Sequence
  Description of Artificial Sequence: Synthetic oligonucleotide
acacacggccgccaccauc

SEQ ID NO: 2819253 - RNA, 19 nt, Artificial Sequence
  Description of Artificial Sequence: Synthetic oligonucleotide
ccacaugcgagcugaaccc

SEQ ID NO: 2819254 - RNA, 19 nt, Artificial Sequence
  Description of Artificial Sequence: Synthetic oligonucleotide
gagggcccggcucagcagc

SEQ ID NO: 2819255 - RNA, 19 nt, Artificial Sequence
  Description of Artificial Sequence: Synthetic oligonucleotide
aggguaugguuaccaucuc

SEQ ID NO: 2819256 - RNA, 19 nt, Artificial Sequence
  Description of Artificial Sequence: Synthetic oligonucleotide
cuccucuuacaagcaaagg

SEQ ID NO: 2819257 - RNA, 19 nt, Artificial Sequence
  Description of Artificial Sequence: Synthetic oligonucleotide
ugguccacacacagaguaa

SEQ ID NO: 2819258 - RNA, 19 nt, Artificial Sequence
  Description of Artificial Sequence: Synthetic oligonucleotide
gagcugaacccuccucgcc

SEQ ID NO: 2819259 - RNA, 19 nt, Artificial Sequence
  Description of Artificial Sequence: Synthetic oligonucleotide
acucgggucucucgugcuc

SEQ ID NO: 2819260 - RNA, 19 nt, Artificial Sequence
  Description of Artificial Sequence: Synthetic oligonucleotide
cuugguccugaugcggagg

SEQ ID NO: 2819261 - RNA, 19 nt, Artificial Sequence
  Description of Artificial Sequence: Synthetic oligonucleotide
acaugaggguugugaaaga

SEQ ID NO: 2819262 - RNA, 19 nt, Artificial Sequence
  Description of Artificial Sequence: Synthetic oligonucleotide
uagccagucggaagugggu

SEQ ID NO: 2819263 - RNA, 19 nt, Artificial Sequence
  Description of Artificial Sequence: Synthetic oligonucleotide
auaguccagguucucuuua

SEQ ID NO: 2819264 - RNA, 19 nt, Artificial Sequence
  Description of Artificial Sequence: Synthetic oligonucleotide
ucgugcuccgcgugucgcg

SEQ ID NO: 2819265 - RNA, 19 nt, Artificial Sequence
  Description of Artificial Sequence: Synthetic oligonucleotide
aguaggugagagccuucca

SEQ ID NO: 2819266 - RNA, 19 nt, Artificial Sequence
  Description of Artificial Sequence: Synthetic oligonucleotide
ggguaugguuaccaucucc

SEQ ID NO: 2819267 - RNA, 19 nt, Artificial Sequence
  Description of Artificial Sequence: Synthetic oligonucleotide
gugucgcgacuucaggaag

SEQ ID NO: 2819268 - RNA, 19 nt, Artificial Sequence
  Description of Artificial Sequence: Synthetic oligonucleotide
acucgacaugggccguccc

SEQ ID NO: 2819269 - RNA, 19 nt, Artificial Sequence
  Description of Artificial Sequence: Synthetic oligonucleotide
ugguggaagauugguguaa

SEQ ID NO: 2819270 - RNA, 19 nt, Artificial Sequence
  Description of Artificial Sequence: Synthetic oligonucleotide
gaagggcuugguccugaug

SEQ ID NO: 2819271 - RNA, 19 nt, Artificial Sequence
  Description of Artificial Sequence: Synthetic oligonucleotide
ucucucgugcuccgcgugu

SEQ ID NO: 2819272 - RNA, 19 nt, Artificial Sequence
  Description of Artificial Sequence: Synthetic oligonucleotide
uuacaagcaaagggauggu

SEQ ID NO: 2819273 - RNA, 19 nt, Artificial Sequence
  Description of Artificial Sequence: Synthetic oligonucleotide
gccccaugugcuuucgugg

SEQ ID NO: 2819274 - RNA, 19 nt, Artificial Sequence
  Description of Artificial Sequence: Synthetic oligonucleotide
aggugagagccuuccacau

SEQ ID NO: 2819275 - RNA, 19 nt, Artificial Sequence
  Description of Artificial Sequence: Synthetic oligonucleotide
ggaagauugguguaacggu

SEQ ID NO: 2819276 - RNA, 19 nt, Artificial Sequence
  Description of Artificial Sequence: Synthetic oligonucleotide
aucuucauagccagucgga

SEQ ID NO: 2819277 - RNA, 19 nt, Artificial Sequence
  Description of Artificial Sequence: Synthetic oligonucleotide
ucgacaugggccgucccac

SEQ ID NO: 2819278 - RNA, 19 nt, Artificial Sequence
  Description of Artificial Sequence: Synthetic oligonucleotide
gccacgaaguaggugagag

SEQ ID NO: 2819279 - RNA, 19 nt, Artificial Sequence
  Description of Artificial Sequence: Synthetic oligonucleotide
cagacauccgagacgcaca

SEQ ID NO: 2819280 - RNA, 19 nt, Artificial Sequence
  Description of Artificial Sequence: Synthetic oligonucleotide
gguuaccaucuccccaggg

SEQ ID NO: 2819281 - RNA, 19 nt, Artificial Sequence
  Description of Artificial Sequence: Synthetic oligonucleotide
gugcuguggucccuuguug

SEQ ID NO: 2819282 - RNA, 19 nt, Artificial Sequence
  Description of Artificial Sequence: Synthetic oligonucleotide
ggguaggcgacgaacucgg

SEQ ID NO: 2819283 - RNA, 19 nt, Artificial Sequence
  Description of Artificial Sequence: Synthetic oligonucleotide
gguccugaugcggaggugc

SEQ ID NO: 2819284 - RNA, 19 nt, Artificial Sequence
  Description of Artificial Sequence: Synthetic oligonucleotide
cacacagaguaauggucca

SEQ ID NO: 2819285 - RNA, 19 nt, Artificial Sequence
  Description of Artificial Sequence: Synthetic oligonucleotide
ugcgagcugaacccuccuc

SEQ ID NO: 2819286 - RNA, 19 nt, Artificial Sequence
  Description of Artificial Sequence: Synthetic oligonucleotide
uccugaugcggaggugcgg

SEQ ID NO: 2819287 - RNA, 19 nt, Artificial Sequence
  Description of Artificial Sequence: Synthetic oligonucleotide
ucgggucucucgugcuccg

SEQ ID NO: 2819288 - RNA, 19 nt, Artificial Sequence
  Description of Artificial Sequence: Synthetic oligonucleotide
cagaugagcuuagcgcccc

SEQ ID NO: 2819289 - RNA, 19 nt, Artificial Sequence
  Description of Artificial Sequence: Synthetic oligonucleotide
gguugugaaagaggguaug

SEQ ID NO: 2819290 - RNA, 19 nt, Artificial Sequence
  Description of Artificial Sequence: Synthetic oligonucleotide
acccuccucgccgugggcg

SEQ ID NO: 2819291 - RNA, 19 nt, Artificial Sequence
  Description of Artificial Sequence: Synthetic oligonucleotide
ggaugguggaagauuggug

SEQ ID NO: 2819292 - RNA, 19 nt, Artificial Sequence
  Description of Artificial Sequence: Synthetic oligonucleotide
acaugcgagcugaacccuc

SEQ ID NO: 2819293 - RNA, 19 nt, Artificial Sequence
  Description of Artificial Sequence: Synthetic oligonucleotide
agacgcacacacggccgcc

SEQ ID NO: 2819294 - RNA, 19 nt, Artificial Sequence
  Description of Artificial Sequence: Synthetic oligonucleotide
ucgccgugggcgccacucg

SEQ ID NO: 2819295 - RNA, 19 nt, Artificial Sequence
  Description of Artificial Sequence: Synthetic oligonucleotide
aucuccucuuacaagcaaa

SEQ ID NO: 2819296 - RNA, 19 nt, Artificial Sequence
  Description of Artificial Sequence: Synthetic oligonucleotide
acgcacacacggccgccac

SEQ ID NO: 2819297 - RNA, 19 nt, Artificial Sequence
  Description of Artificial Sequence: Synthetic oligonucleotide
cucgggucucucgugcucc

SEQ ID NO: 2819298 - RNA, 19 nt, Artificial Sequence
  Description of Artificial Sequence: Synthetic oligonucleotide
cucuuuacucaucuucaua

SEQ ID NO: 2819299 - RNA, 19 nt, Artificial Sequence
  Description of Artificial Sequence: Synthetic oligonucleotide
caugggccgucccacccgc

SEQ ID NO: 2819300 - RNA, 19 nt, Artificial Sequence
  Description of Artificial Sequence: Synthetic oligonucleotide
cuuucgugguccacacaca

SEQ ID NO: 2819301 - RNA, 19 nt, Artificial Sequence
  Description of Artificial Sequence: Synthetic oligonucleotide
uuccacaugcgagcugaac

SEQ ID NO: 2819302 - RNA, 19 nt, Artificial Sequence
  Description of Artificial Sequence: Synthetic oligonucleotide
gggucucucgugcuccgcg

SEQ ID NO: 2819303 - RNA, 19 nt, Artificial Sequence
  Description of Artificial Sequence: Synthetic oligonucleotide
ggugagagccuuccacaug

SEQ ID NO: 2819304 - RNA, 19 nt, Artificial Sequence
  Description of Artificial Sequence: Synthetic oligonucleotide
cucuuacaagcaaagggau

SEQ ID NO: 2819305 - RNA, 19 nt, Artificial Sequence
  Description of Artificial Sequence: Synthetic oligonucleotide
aggcgacgaacucgggucu

SEQ ID NO: 2819306 - RNA, 19 nt, Artificial Sequence
  Description of Artificial Sequence: Synthetic oligonucleotide
gcuguggucccuuguugcc

SEQ ID NO: 2819307 - RNA, 19 nt, Artificial Sequence
  Description of Artificial Sequence: Synthetic oligonucleotide
guccugaugcggaggugcg

SEQ ID NO: 2819308 - RNA, 19 nt, Artificial Sequence
  Description of Artificial Sequence: Synthetic oligonucleotide
ucgcgacuucaggaagacg

SEQ ID NO: 2819309 - RNA, 19 nt, Artificial Sequence
  Description of Artificial Sequence: Synthetic oligonucleotide
gugggcgccacucgacaug

SEQ ID NO: 2819310 - RNA, 19 nt, Artificial Sequence
  Description of Artificial Sequence: Synthetic oligonucleotide
gauaguccagguucucuuu

SEQ ID NO: 2819311 - RNA, 19 nt, Artificial Sequence
  Description of Artificial Sequence: Synthetic oligonucleotide
ccugaugcggaggugcggg

SEQ ID NO: 2819312 - RNA, 19 nt, Artificial Sequence
  Description of Artificial Sequence: Synthetic oligonucleotide
ggcgccacucgacaugggc

SEQ ID NO: 2819313 - RNA, 19 nt, Artificial Sequence
  Description of Artificial Sequence: Synthetic oligonucleotide
guccacacacagaguaaug

SEQ ID NO: 2819314 - RNA, 19 nt, Artificial Sequence
  Description of Artificial Sequence: Synthetic oligonucleotide
gguggaagauugguguaac

SEQ ID NO: 2819315 - RNA, 19 nt, Artificial Sequence
  Description of Artificial Sequence: Synthetic oligonucleotide
uugguguaacggucaccaa

SEQ ID NO: 2819316 - RNA, 19 nt, Artificial Sequence
  Description of Artificial Sequence: Synthetic oligonucleotide
augugcuuucgugguccac

SEQ ID NO: 2819317 - RNA, 19 nt, Artificial Sequence
  Description of Artificial Sequence: Synthetic oligonucleotide
guaggcgacgaacucgggu

SEQ ID NO: 2819318 - RNA, 19 nt, Artificial Sequence
  Description of Artificial Sequence: Synthetic oligonucleotide
gucucucgugcuccgcgug

SEQ ID NO: 2819319 - RNA, 19 nt, Artificial Sequence
  Description of Artificial Sequence: Synthetic oligonucleotide
cacagaguaaugguccaaa

SEQ ID NO: 2819320 - RNA, 19 nt, Artificial Sequence
  Description of Artificial Sequence: Synthetic oligonucleotide
caucuccccaggggaaggg

SEQ ID NO: 2819321 - RNA, 19 nt, Artificial Sequence
  Description of Artificial Sequence: Synthetic oligonucleotide
agcagcccagacauccgag

SEQ ID NO: 2819322 - RNA, 19 nt, Artificial Sequence
  Description of Artificial Sequence: Synthetic oligonucleotide
ggcucagcagcccagacau

SEQ ID NO: 2819323 - RNA, 19 nt, Artificial Sequence
  Description of Artificial Sequence: Synthetic oligonucleotide
cucgacaugggccguccca

SEQ ID NO: 2819324 - RNA, 19 nt, Artificial Sequence
  Description of Artificial Sequence: Synthetic oligonucleotide
uuagcgccccaugugcuuu

SEQ ID NO: 2819325 - RNA, 19 nt, Artificial Sequence
  Description of Artificial Sequence: Synthetic oligonucleotide
ccgagacgcacacacggcc

SEQ ID NO: 2819326 - RNA, 19 nt, Artificial Sequence
  Description of Artificial Sequence: Synthetic oligonucleotide
uccgcgugucgcgacuuca

SEQ ID NO: 2819327 - RNA, 19 nt, Artificial Sequence
  Description of Artificial Sequence: Synthetic oligonucleotide
ugcuccgcgugucgcgacu

SEQ ID NO: 2819328 - RNA, 19 nt, Artificial Sequence
  Description of Artificial Sequence: Synthetic oligonucleotide
ccagacauccgagacgcac

SEQ ID NO: 2819329 - RNA, 19 nt, Artificial Sequence
  Description of Artificial Sequence: Synthetic oligonucleotide
augguccaaaccagugcug

SEQ ID NO: 2819330 - RNA, 19 nt, Artificial Sequence
  Description of Artificial Sequence: Synthetic oligonucleotide
gcaaagggaugguggaaga

SEQ ID NO: 2819331 - RNA, 19 nt, Artificial Sequence
  Description of Artificial Sequence: Synthetic oligonucleotide
gucggaaguggguucacau

SEQ ID NO: 2819332 - RNA, 19 nt, Artificial Sequence
  Description of Artificial Sequence: Synthetic oligonucleotide
agaugagcuuagcgcccca

SEQ ID NO: 2819333 - RNA, 19 nt, Artificial Sequence
  Description of Artificial Sequence: Synthetic oligonucleotide
gucgcgacuucaggaagac

SEQ ID NO: 2819334 - RNA, 19 nt, Artificial Sequence
  Description of Artificial Sequence: Synthetic oligonucleotide
caucuccucuuacaagcaa

SEQ ID NO: 2819335 - RNA, 19 nt, Artificial Sequence
  Description of Artificial Sequence: Synthetic oligonucleotide
cucgugcuccgcgugucgc

SEQ ID NO: 2819336 - RNA, 19 nt, Artificial Sequence
  Description of Artificial Sequence: Synthetic oligonucleotide
gcuugguccugaugcggag

SEQ ID NO: 2819337 - RNA, 19 nt, Artificial Sequence
  Description of Artificial Sequence: Synthetic oligonucleotide
agucggaaguggguucaca

SEQ ID NO: 2819338 - RNA, 19 nt, Artificial Sequence
  Description of Artificial Sequence: Synthetic oligonucleotide
ugaugcggaggugcgggua

SEQ ID NO: 2819339 - RNA, 19 nt, Artificial Sequence
  Description of Artificial Sequence: Synthetic oligonucleotide
cacucgacaugggccgucc

SEQ ID NO: 2819340 - RNA, 19 nt, Artificial Sequence
  Description of Artificial Sequence: Synthetic oligonucleotide
ugcggaggugcggguaggc

SEQ ID NO: 2819341 - RNA, 19 nt, Artificial Sequence
  Description of Artificial Sequence: Synthetic oligonucleotide
augcgagcugaacccuccu

SEQ ID NO: 2819342 - RNA, 19 nt, Artificial Sequence
  Description of Artificial Sequence: Synthetic oligonucleotide
cggaaguggguucacauga

SEQ ID NO: 2819343 - RNA, 19 nt, Artificial Sequence
  Description of Artificial Sequence: Synthetic oligonucleotide
ccacgaaguaggugagagc

SEQ ID NO: 2819344 - RNA, 19 nt, Artificial Sequence
  Description of Artificial Sequence: Synthetic oligonucleotide
cgagacgcacacacggccg

SEQ ID NO: 2819345 - RNA, 19 nt, Artificial Sequence
  Description of Artificial Sequence: Synthetic oligonucleotide
agccagucggaaguggguu

SEQ ID NO: 2819346 - RNA, 19 nt, Artificial Sequence
  Description of Artificial Sequence: Synthetic oligonucleotide
gugcggguaggcgacgaac

SEQ ID NO: 2819347 - RNA, 19 nt, Artificial Sequence
  Description of Artificial Sequence: Synthetic oligonucleotide
cgccacucgacaugggccg

SEQ ID NO: 2819348 - RNA, 19 nt, Artificial Sequence
  Description of Artificial Sequence: Synthetic oligonucleotide
cucgccgugggcgccacuc

SEQ ID NO: 2819349 - RNA, 19 nt, Artificial Sequence
  Description of Artificial Sequence: Synthetic oligonucleotide
caugugcuuucguggucca

SEQ ID NO: 2819350 - RNA, 19 nt, Artificial Sequence
  Description of Artificial Sequence: Synthetic oligonucleotide
augcggaggugcggguagg

SEQ ID NO: 2819351 - RNA, 19 nt, Artificial Sequence
  Description of Artificial Sequence: Synthetic oligonucleotide
gcgugucgcgacuucagga

SEQ ID NO: 2819352 - RNA, 19 nt, Artificial Sequence
  Description of Artificial Sequence: Synthetic oligonucleotide
accccaggcagcgccacga

SEQ ID NO: 2819353 - RNA, 19 nt, Artificial Sequence
  Description of Artificial Sequence: Synthetic oligonucleotide
gaggugcggguaggcgacg

SEQ ID NO: 2819354 - RNA, 19 nt, Artificial Sequence
  Description of Artificial Sequence: Synthetic oligonucleotide
ugguccugaugcggaggug

SEQ ID NO: 2819355 - RNA, 19 nt, Artificial Sequence
  Description of Artificial Sequence: Synthetic oligonucleotide
cgcgacuucaggaagacgu

SEQ ID NO: 2819356 - RNA, 19 nt, Artificial Sequence
  Description of Artificial Sequence: Synthetic oligonucleotide
ggaggugcggguaggcgac

SEQ ID NO: 2819357 - RNA, 19 nt, Artificial Sequence
  Description of Artificial Sequence: Synthetic oligonucleotide
gcaugcucacucccacccc

SEQ ID NO: 2819358 - RNA, 19 nt, Artificial Sequence
  Description of Artificial Sequence: Synthetic oligonucleotide
agcgccccaugugcuuucg

SEQ ID NO: 2819359 - RNA, 19 nt, Artificial Sequence
  Description of Artificial Sequence: Synthetic oligonucleotide
gcgccacucgacaugggcc

SEQ ID NO: 2819360 - RNA, 19 nt, Artificial Sequence
  Description of Artificial Sequence: Synthetic oligonucleotide
gguguaacggucaccaauu

SEQ ID NO: 2819361 - RNA, 19 nt, Artificial Sequence
  Description of Artificial Sequence: Synthetic oligonucleotide
cgagcugaacccuccucgc

SEQ ID NO: 2819362 - RNA, 19 nt, Artificial Sequence
  Description of Artificial Sequence: Synthetic oligonucleotide
gacgcacacacggccgcca

SEQ ID NO: 2819363 - RNA, 19 nt, Artificial Sequence
  Description of Artificial Sequence: Synthetic oligonucleotide
ggucaccaauuugauacaa

SEQ ID NO: 2819364 - RNA, 19 nt, Artificial Sequence
  Description of Artificial Sequence: Synthetic oligonucleotide
gcagcccagacauccgaga

SEQ ID NO: 2819365 - RNA, 19 nt, Artificial Sequence
  Description of Artificial Sequence: Synthetic oligonucleotide
ucccacccgcgggagggcc

SEQ ID NO: 2819366 - RNA, 19 nt, Artificial Sequence
  Description of Artificial Sequence: Synthetic oligonucleotide
cugaacccuccucgccgug

SEQ ID NO: 2819367 - RNA, 19 nt, Artificial Sequence
  Description of Artificial Sequence: Synthetic oligonucleotide
uagcgccccaugugcuuuc

SEQ ID NO: 2819368 - RNA, 19 nt, Artificial Sequence
  Description of Artificial Sequence: Synthetic oligonucleotide
gacauccgagacgcacaca

SEQ ID NO: 2819369 - RNA, 19 nt, Artificial Sequence
  Description of Artificial Sequence: Synthetic oligonucleotide
gacguugagcaugcucacu

SEQ ID NO: 2819370 - RNA, 19 nt, Artificial Sequence
  Description of Artificial Sequence: Synthetic oligonucleotide
gaggguugugaaagagggu

SEQ ID NO: 2819371 - RNA, 19 nt, Artificial Sequence
  Description of Artificial Sequence: Synthetic oligonucleotide
cggguaggcgacgaacucg

SEQ ID NO: 2819372 - RNA, 19 nt, Artificial Sequence
  Description of Artificial Sequence: Synthetic oligonucleotide
gcacacacggccgccacca

SEQ ID NO: 2819373 - RNA, 19 nt, Artificial Sequence
  Description of Artificial Sequence: Synthetic oligonucleotide
gggagggcccggcucagca

SEQ ID NO: 2819374 - RNA, 19 nt, Artificial Sequence
  Description of Artificial Sequence: Synthetic oligonucleotide
accagugcuguggucccuu

SEQ ID NO: 2819375 - RNA, 19 nt, Artificial Sequence
  Description of Artificial Sequence: Synthetic oligonucleotide
gguaggcgacgaacucggg

SEQ ID NO: 2819376 - RNA, 19 nt, Artificial Sequence
  Description of Artificial Sequence: Synthetic oligonucleotide
ccaucuccccaggggaagg

SEQ ID NO: 2819377 - RNA, 19 nt, Artificial Sequence
  Description of Artificial Sequence: Synthetic oligonucleotide
gcggaggugcggguaggcg

SEQ ID NO: 2819378 - RNA, 19 nt, Artificial Sequence
  Description of Artificial Sequence: Synthetic oligonucleotide
aggugcggguaggcgacga

SEQ ID NO: 2819379 - RNA, 19 nt, Artificial Sequence
  Description of Artificial Sequence: Synthetic oligonucleotide
ccaggcagcgccacgaagu

SEQ ID NO: 2819380 - RNA, 19 nt, Artificial Sequence
  Description of Artificial Sequence: Synthetic oligonucleotide
caggcagcgccacgaagua

SEQ ID NO: 2819381 - RNA, 19 nt, Artificial Sequence
  Description of Artificial Sequence: Synthetic oligonucleotide
gaugagcuuagcgccccau

SEQ ID NO: 2819382 - RNA, 19 nt, Artificial Sequence
  Description of Artificial Sequence: Synthetic oligonucleotide
cagcgccacgaaguaggug

SEQ ID NO: 2819383 - RNA, 19 nt, Artificial Sequence
  Description of Artificial Sequence: Synthetic oligonucleotide
acccgcgggagggcccggc

SEQ ID NO: 2819384 - RNA, 19 nt, Artificial Sequence
  Description of Artificial Sequence: Synthetic oligonucleotide
cgccccaugugcuuucgug

SEQ ID NO: 2819385 - RNA, 19 nt, Artificial Sequence
  Description of Artificial Sequence: Synthetic oligonucleotide
gcggguaggcgacgaacuc

SEQ ID NO: 2819386 - RNA, 19 nt, Artificial Sequence
  Description of Artificial Sequence: Synthetic oligonucleotide
ccaggggaagggcuugguc

SEQ ID NO: 2819387 - RNA, 19 nt, Artificial Sequence
  Description of Artificial Sequence: Synthetic oligonucleotide
cgaacucgggucucucgug

SEQ ID NO: 2819388 - RNA, 19 nt, Artificial Sequence
  Description of Artificial Sequence: Synthetic oligonucleotide
cagucggaaguggguucac

SEQ ID NO: 2819389 - RNA, 19 nt, Artificial Sequence
  Description of Artificial Sequence: Synthetic oligonucleotide
guguaacggucaccaauuu

SEQ ID NO: 2819390 - RNA, 19 nt, Artificial Sequence
  Description of Artificial Sequence: Synthetic oligonucleotide
cgacuucaggaagacguug

SEQ ID NO: 2819391 - RNA, 19 nt, Artificial Sequence
  Description of Artificial Sequence: Synthetic oligonucleotide
cuuagcgccccaugugcuu

SEQ ID NO: 2819392 - RNA, 19 nt, Artificial Sequence
  Description of Artificial Sequence: Synthetic oligonucleotide
cgugucgcgacuucaggaa

SEQ ID NO: 2819393 - RNA, 19 nt, Artificial Sequence
  Description of Artificial Sequence: Synthetic oligonucleotide
caaagggaugguggaagau

SEQ ID NO: 2819394 - RNA, 19 nt, Artificial Sequence
  Description of Artificial Sequence: Synthetic oligonucleotide
cuccgcgugucgcgacuuc

SEQ ID NO: 2819395 - RNA, 19 nt, Artificial Sequence
  Description of Artificial Sequence: Synthetic oligonucleotide
ccgcgugucgcgacuucag

SEQ ID NO: 2819396 - RNA, 19 nt, Artificial Sequence
  Description of Artificial Sequence: Synthetic oligonucleotide
cgcgugucgcgacuucagg

SEQ ID NO: 2819397 - RNA, 19 nt, Artificial Sequence
  Description of Artificial Sequence: Synthetic oligonucleotide
gugcuccgcgugucgcgac

SEQ ID NO: 2819398 - RNA, 19 nt, Artificial Sequence
  Description of Artificial Sequence: Synthetic oligonucleotide
cccaggcagcgccacgaag

SEQ ID NO: 2819399 - RNA, 19 nt, Artificial Sequence
  Description of Artificial Sequence: Synthetic oligonucleotide
gggauaguccagguucucu

SEQ ID NO: 2819400 - RNA, 19 nt, Artificial Sequence
  Description of Artificial Sequence: Synthetic oligonucleotide
cgucccacccgcgggaggg

SEQ ID NO: 2819401 - RNA, 19 nt, Artificial Sequence
  Description of Artificial Sequence: Synthetic oligonucleotide
cccuccucgccgugggcgc

SEQ ID NO: 2819402 - RNA, 19 nt, Artificial Sequence
  Description of Artificial Sequence: Synthetic oligonucleotide
cccaugugcuuucgugguc

SEQ ID NO: 2819403 - RNA, 19 nt, Artificial Sequence
  Description of Artificial Sequence: Synthetic oligonucleotide
cuguggucccuuguugccu

SEQ ID NO: 2819404 - RNA, 19 nt, Artificial Sequence
  Description of Artificial Sequence: Synthetic oligonucleotide
gguucacaugaggguugug

SEQ ID NO: 2819405 - RNA, 19 nt, Artificial Sequence
  Description of Artificial Sequence: Synthetic oligonucleotide
cacaugcgagcugaacccu

SEQ ID NO: 2819406 - RNA, 19 nt, Artificial Sequence
  Description of Artificial Sequence: Synthetic oligonucleotide
augggccgucccacccgcg

SEQ ID NO: 2819407 - RNA, 19 nt, Artificial Sequence
  Description of Artificial Sequence: Synthetic oligonucleotide
gcgccacgaaguaggugag

SEQ ID NO: 2819408 - RNA, 19 nt, Artificial Sequence
  Description of Artificial Sequence: Synthetic oligonucleotide
ccagucggaaguggguuca

SEQ ID NO: 2819409 - RNA, 19 nt, Artificial Sequence
  Description of Artificial Sequence: Synthetic oligonucleotide
gcugaacccuccucgccgu

SEQ ID NO: 2819410 - RNA, 19 nt, Artificial Sequence
  Description of Artificial Sequence: Synthetic oligonucleotide
ccagugcuguggucccuug

SEQ ID NO: 2819411 - RNA, 19 nt, Artificial Sequence
  Description of Artificial Sequence: Synthetic oligonucleotide
cgacaugggccgucccacc

SEQ ID NO: 2819412 - RNA, 19 nt, Artificial Sequence
  Description of Artificial Sequence: Synthetic oligonucleotide
ggggauaguccagguucuc

SEQ ID NO: 2819413 - RNA, 19 nt, Artificial Sequence
  Description of Artificial Sequence: Synthetic oligonucleotide
ggucucucgugcuccgcgu

SEQ ID NO: 2819414 - RNA, 19 nt, Artificial Sequence
  Description of Artificial Sequence: Synthetic oligonucleotide
ggguugugaaagaggguau

SEQ ID NO: 2819415 - RNA, 19 nt, Artificial Sequence
  Description of Artificial Sequence: Synthetic oligonucleotide
ggugcggguaggcgacgaa

SEQ ID NO: 2819416 - RNA, 19 nt, Artificial Sequence
  Description of Artificial Sequence: Synthetic oligonucleotide
ggccgucccacccgcggga

SEQ ID NO: 2819417 - RNA, 19 nt, Artificial Sequence
  Description of Artificial Sequence: Synthetic oligonucleotide
ggggaagggcuugguccug

SEQ ID NO: 2819418 - RNA, 19 nt, Artificial Sequence
  Description of Artificial Sequence: Synthetic oligonucleotide
gucccacccgcgggagggc

SEQ ID NO: 2819419 - RNA, 19 nt, Artificial Sequence
  Description of Artificial Sequence: Synthetic oligonucleotide
gcuuagcgccccaugugcu

SEQ ID NO: 2819420 - RNA, 19 nt, Artificial Sequence
  Description of Artificial Sequence: Synthetic oligonucleotide
ggcgacgaacucgggucuc

SEQ ID NO: 2819421 - RNA, 19 nt, Artificial Sequence
  Description of Artificial Sequence: Synthetic oligonucleotide
uccucgccgugggcgccac

SEQ ID NO: 2819422 - RNA, 19 nt, Artificial Sequence
  Description of Artificial Sequence: Synthetic oligonucleotide
ccggcucagcagcccagac

SEQ ID NO: 2819423 - RNA, 19 nt, Artificial Sequence
  Description of Artificial Sequence: Synthetic oligonucleotide
cccacccgcgggagggccc

SEQ ID NO: 2819424 - RNA, 19 nt, Artificial Sequence
  Description of Artificial Sequence: Synthetic oligonucleotide
cuccccaggggaagggcuu

SEQ ID NO: 2819425 - RNA, 19 nt, Artificial Sequence
  Description of Artificial Sequence: Synthetic oligonucleotide
cgcacacacggccgccacc

SEQ ID NO: 2819426 - RNA, 19 nt, Artificial Sequence
  Description of Artificial Sequence: Synthetic oligonucleotide
ccacccgcgggagggcccg

SEQ ID NO: 2819427 - RNA, 19 nt, Artificial Sequence
  Description of Artificial Sequence: Synthetic oligonucleotide
gccgugggcgccacucgac

SEQ ID NO: 2819428 - RNA, 19 nt, Artificial Sequence
  Description of Artificial Sequence: Synthetic oligonucleotide
ccccaggggaagggcuugg

SEQ ID NO: 2819429 - RNA, 19 nt, Artificial Sequence
  Description of Artificial Sequence: Synthetic oligonucleotide
gccgucccacccgcgggag

SEQ ID NO: 2819430 - RNA, 19 nt, Artificial Sequence
  Description of Artificial Sequence: Synthetic oligonucleotide
ccgucccacccgcgggagg

SEQ ID NO: 2819431 - RNA, 19 nt, Artificial Sequence
  Description of Artificial Sequence: Synthetic oligonucleotide
ccgugggcgccacucgaca

SEQ ID NO: 2819432 - RNA, 19 nt, Artificial Sequence
  Description of Artificial Sequence: Synthetic oligonucleotide
ggaagggcuugguccugau

SEQ ID NO: 2819433 - RNA, 19 nt, Artificial Sequence
  Description of Artificial Sequence: Synthetic oligonucleotide
ccacucgacaugggccguc

SEQ ID NO: 2819434 - RNA, 19 nt, Artificial Sequence
  Description of Artificial Sequence: Synthetic oligonucleotide
gggcgccacucgacauggg

SEQ ID NO: 2819435 - RNA, 19 nt, Artificial Sequence
  Description of Artificial Sequence: Synthetic oligonucleotide
gcgacuucaggaagacguu

SEQ ID NO: 2819436 - RNA, 19 nt, Artificial Sequence
  Description of Artificial Sequence: Synthetic oligonucleotide
cacccgcgggagggcccgg

SEQ ID NO: 2819437 - RNA, 19 nt, Artificial Sequence
  Description of Artificial Sequence: Synthetic oligonucleotide
cgcgggagggcccggcuca

SEQ ID NO: 2819438 - RNA, 19 nt, Artificial Sequence
  Description of Artificial Sequence: Synthetic oligonucleotide
ccgcgggagggcccggcuc

SEQ ID NO: 2819439 - RNA, 19 nt, Artificial Sequence
  Description of Artificial Sequence: Synthetic oligonucleotide
gcgggagggcccggcucag

SEQ ID NO: 2819440 - RNA, 19 nt, Artificial Sequence
  Description of Artificial Sequence: Synthetic oligonucleotide
gcgacgaacucgggucucu

SEQ ID NO: 2819441 - RNA, 19 nt, Artificial Sequence
  Description of Artificial Sequence: Synthetic oligonucleotide
cgacgaacucgggucucuc

SEQ ID NO: 2819442 - RNA, 19 nt, Artificial Sequence
  Description of Artificial Sequence: Synthetic oligonucleotide
gcagcgccacgaaguaggu

SEQ ID NO: 2819443 - RNA, 19 nt, Artificial Sequence
  Description of Artificial Sequence: Synthetic oligonucleotide
cccagacauccgagacgca

SEQ ID NO: 2819444 - RNA, 19 nt, Artificial Sequence
  Description of Artificial Sequence: Synthetic oligonucleotide
cgugcuccgcgugucgcga

SEQ ID NO: 2819445 - RNA, 19 nt, Artificial Sequence
  Description of Artificial Sequence: Synthetic oligonucleotide
cgggucucucgugcuccgc

SEQ ID NO: 2819446 - RNA, 19 nt, Artificial Sequence
  Description of Artificial Sequence: Synthetic oligonucleotide
cgugguccacacacagagu

SEQ ID NO: 2819447 - RNA, 19 nt, Artificial Sequence
  Description of Artificial Sequence: Synthetic oligonucleotide
cgccgugggcgccacucga

SEQ ID NO: 2819448 - RNA, 19 nt, Artificial Sequence
  Description of Artificial Sequence: Synthetic oligonucleotide
gccacucgacaugggccgu

SEQ ID NO: 2819449 - RNA, 19 nt, Artificial Sequence
  Description of Artificial Sequence: Synthetic oligonucleotide
ccccaggcagcgccacgaa

SEQ ID NO: 2819450 - RNA, 19 nt, Artificial Sequence
  Description of Artificial Sequence: Synthetic oligonucleotide
cgugggcgccacucgacau

SEQ ID NO: 2819451 - RNA, 19 nt, Artificial Sequence
  Description of Artificial Sequence: Synthetic oligonucleotide
gcgccccaugugcuuucgu

SEQ ID NO: 2819452 - RNA, 19 nt, Artificial Sequence
  Description of Artificial Sequence: Synthetic oligonucleotide
cgccacgaaguaggugaga

SEQ ID NO: 2819453 - RNA, 19 nt, Artificial Sequence
  Description of Artificial Sequence: Synthetic oligonucleotide
cgggagggcccggcucagc

SEQ ID NO: 2819454 - RNA, 19 nt, Artificial Sequence
  Description of Artificial Sequence: Synthetic oligonucleotide
gcuccgcgugucgcgacuu

SEQ ID NO: 2819455 - RNA, 19 nt, Artificial Sequence
  Description of Artificial Sequence: Synthetic oligonucleotide
cggccgccaccaucuugga

SEQ ID NO: 2819456 - RNA, 19 nt, Artificial Sequence
  Description of Artificial Sequence: Synthetic oligonucleotide
aauucuuuucccucguugc

SEQ ID NO: 2819457 - RNA, 19 nt, Artificial Sequence
  Description of Artificial Sequence: Synthetic oligonucleotide
aauagacguggacagaaac

SEQ ID NO: 2819458 - RNA, 19 nt, Artificial Sequence
  Description of Artificial Sequence: Synthetic oligonucleotide
ucuaucuuccuuuugaaga

SEQ ID NO: 2819459 - RNA, 19 nt, Artificial Sequence
  Description of Artificial Sequence: Synthetic oligonucleotide
uuggcuuccacguacuugg

SEQ ID NO: 2819460 - RNA, 19 nt, Artificial Sequence
  Description of Artificial Sequence: Synthetic oligonucleotide
auacauagaacucgucagc

SEQ ID NO: 2819461 - RNA, 19 nt, Artificial Sequence
  Description of Artificial Sequence: Synthetic oligonucleotide
aaccaguaauucuuuuccc

SEQ ID NO: 2819462 - RNA, 19 nt, Artificial Sequence
  Description of Artificial Sequence: Synthetic oligonucleotide
gaaccaguaauucuuuucc

SEQ ID NO: 2819463 - RNA, 19 nt, Artificial Sequence
  Description of Artificial Sequence: Synthetic oligonucleotide
aaacuccacuuccuggucc

SEQ ID NO: 2819464 - RNA, 19 nt, Artificial Sequence
  Description of Artificial Sequence: Synthetic oligonucleotide
uucccagggacauacauag

SEQ ID NO: 2819465 - RNA, 19 nt, Artificial Sequence
  Description of Artificial Sequence: Synthetic oligonucleotide
cauacauagaacucgucag

SEQ ID NO: 2819466 - RNA, 19 nt, Artificial Sequence
  Description of Artificial Sequence: Synthetic oligonucleotide
aagucuaucuuccuuuuga

SEQ ID NO: 2819467 - RNA, 19 nt, Artificial Sequence
  Description of Artificial Sequence: Synthetic oligonucleotide
aaguccuaggcccuugaac

SEQ ID NO: 2819468 - RNA, 19 nt, Artificial Sequence
  Description of Artificial Sequence: Synthetic oligonucleotide
uggaucuucuggcucaucg

SEQ ID NO: 2819469 - RNA, 19 nt, Artificial Sequence
  Description of Artificial Sequence: Synthetic oligonucleotide
augacagcuuguuucaugg

SEQ ID NO: 2819470 - RNA, 19 nt, Artificial Sequence
  Description of Artificial Sequence: Synthetic oligonucleotide
aguuguggcaaauucagcu

SEQ ID NO: 2819471 - RNA, 19 nt, Artificial Sequence
  Description of Artificial Sequence: Synthetic oligonucleotide
ugagcugagcaauagacgu

SEQ ID NO: 2819472 - RNA, 19 nt, Artificial Sequence
  Description of Artificial Sequence: Synthetic oligonucleotide
uuccuuuugaagaaguccu

SEQ ID NO: 2819473 - RNA, 19 nt, Artificial Sequence
  Description of Artificial Sequence: Synthetic oligonucleotide
uuuugaagaaguccuuggc

SEQ ID NO: 2819474 - RNA, 19 nt, Artificial Sequence
  Description of Artificial Sequence: Synthetic oligonucleotide
gauguuaaucgacugcgcc

SEQ ID NO: 2819475 - RNA, 19 nt, Artificial Sequence
  Description of Artificial Sequence: Synthetic oligonucleotide
aucaaugagcacauguucc

SEQ ID NO: 2819476 - RNA, 19 nt, Artificial Sequence
  Description of Artificial Sequence: Synthetic oligonucleotide
cuugagcugagcaauagac

SEQ ID NO: 2819477 - RNA, 19 nt, Artificial Sequence
  Description of Artificial Sequence: Synthetic oligonucleotide
uugagcugagcaauagacg

SEQ ID NO: 2819478 - RNA, 19 nt, Artificial Sequence
  Description of Artificial Sequence: Synthetic oligonucleotide
acauacauagaacucguca

SEQ ID NO: 2819479 - RNA, 19 nt, Artificial Sequence
  Description of Artificial Sequence: Synthetic oligonucleotide
caucauguaacuucccagg

SEQ ID NO: 2819480 - RNA, 19 nt, Artificial Sequence
  Description of Artificial Sequence: Synthetic oligonucleotide
uaauucuuuucccucguug

SEQ ID NO: 2819481 - RNA, 19 nt, Artificial Sequence
  Description of Artificial Sequence: Synthetic oligonucleotide
cuuuugaagaaguccuugg

SEQ ID NO: 2819482 - RNA, 19 nt, Artificial Sequence
  Description of Artificial Sequence: Synthetic oligonucleotide
uccacaucauguaacuucc

SEQ ID NO: 2819483 - RNA, 19 nt, Artificial Sequence
  Description of Artificial Sequence: Synthetic oligonucleotide
gucuucuccacauaguacc

SEQ ID NO: 2819484 - RNA, 19 nt, Artificial Sequence
  Description of Artificial Sequence: Synthetic oligonucleotide
ugagcaauagacguggaca

SEQ ID NO: 2819485 - RNA, 19 nt, Artificial Sequence
  Description of Artificial Sequence: Synthetic oligonucleotide
uacauagaacucgucagcg

SEQ ID NO: 2819486 - RNA, 19 nt, Artificial Sequence
  Description of Artificial Sequence: Synthetic oligonucleotide
cucaucguuuccaugacag

SEQ ID NO: 2819487 - RNA, 19 nt, Artificial Sequence
  Description of Artificial Sequence: Synthetic oligonucleotide
uuguucagcacguucagac

SEQ ID NO: 2819488 - RNA, 19 nt, Artificial Sequence
  Description of Artificial Sequence: Synthetic oligonucleotide
aguccuaggcccuugaaca

SEQ ID NO: 2819489 - RNA, 19 nt, Artificial Sequence
  Description of Artificial Sequence: Synthetic oligonucleotide
ucuuucugcaacauauccu

SEQ ID NO: 2819490 - RNA, 19 nt, Artificial Sequence
  Description of Artificial Sequence: Synthetic oligonucleotide
uugguaaggaagucuaucu

SEQ ID NO: 2819491 - RNA, 19 nt, Artificial Sequence
  Description of Artificial Sequence: Synthetic oligonucleotide
acaucauguaacuucccag

SEQ ID NO: 2819492 - RNA, 19 nt, Artificial Sequence
  Description of Artificial Sequence: Synthetic oligonucleotide
gagcaauagacguggacag

SEQ ID NO: 2819493 - RNA, 19 nt, Artificial Sequence
  Description of Artificial Sequence: Synthetic oligonucleotide
gugauguuaaucgacugcg

SEQ ID NO: 2819494 - RNA, 19 nt, Artificial Sequence
  Description of Artificial Sequence: Synthetic oligonucleotide
cauguaacuucccagggac

SEQ ID NO: 2819495 - RNA, 19 nt, Artificial Sequence
  Description of Artificial Sequence: Synthetic oligonucleotide
agcacguucagacaguccu

SEQ ID NO: 2819496 - RNA, 19 nt, Artificial Sequence
  Description of Artificial Sequence: Synthetic oligonucleotide
aucauguaacuucccaggg

SEQ ID NO: 2819497 - RNA, 19 nt, Artificial Sequence
  Description of Artificial Sequence: Synthetic oligonucleotide
aacauauccucaugccuug

SEQ ID NO: 2819498 - RNA, 19 nt, Artificial Sequence
  Description of Artificial Sequence: Synthetic oligonucleotide
ugagcauuuccaguugugg

SEQ ID NO: 2819499 - RNA, 19 nt, Artificial Sequence
  Description of Artificial Sequence: Synthetic oligonucleotide
aaugagcacauguuccaca

SEQ ID NO: 2819500 - RNA, 19 nt, Artificial Sequence
  Description of Artificial Sequence: Synthetic oligonucleotide
uuccacaucauguaacuuc

SEQ ID NO: 2819501 - RNA, 19 nt, Artificial Sequence
  Description of Artificial Sequence: Synthetic oligonucleotide
uuggcagucgccugagucg

SEQ ID NO: 2819502 - RNA, 19 nt, Artificial Sequence
  Description of Artificial Sequence: Synthetic oligonucleotide
uucuccaucugcuugguaa

SEQ ID NO: 2819503 - RNA, 19 nt, Artificial Sequence
  Description of Artificial Sequence: Synthetic oligonucleotide
ucaaugagcacauguucca

SEQ ID NO: 2819504 - RNA, 19 nt, Artificial Sequence
  Description of Artificial Sequence: Synthetic oligonucleotide
ugcaacauauccucaugcc

SEQ ID NO: 2819505 - RNA, 19 nt, Artificial Sequence
  Description of Artificial Sequence: Synthetic oligonucleotide
ugguucuugagcauuucca

SEQ ID NO: 2819506 - RNA, 19 nt, Artificial Sequence
  Description of Artificial Sequence: Synthetic oligonucleotide
agaaacuccacuuccuggu

SEQ ID NO: 2819507 - RNA, 19 nt, Artificial Sequence
  Description of Artificial Sequence: Synthetic oligonucleotide
guucagcacguucagacag

SEQ ID NO: 2819508 - RNA, 19 nt, Artificial Sequence
  Description of Artificial Sequence: Synthetic oligonucleotide
uauccucaugccuuggcag

SEQ ID NO: 2819509 - RNA, 19 nt, Artificial Sequence
  Description of Artificial Sequence: Synthetic oligonucleotide
aucuucuccaucugcuugg

SEQ ID NO: 2819510 - RNA, 19 nt, Artificial Sequence
  Description of Artificial Sequence: Synthetic oligonucleotide
uccaguuguggcaaauuca

SEQ ID NO: 2819511 - RNA, 19 nt, Artificial Sequence
  Description of Artificial Sequence: Synthetic oligonucleotide
caguaauucuuuucccucg

SEQ ID NO: 2819512 - RNA, 19 nt, Artificial Sequence
  Description of Artificial Sequence: Synthetic oligonucleotide
gagcacauguuccacauca

SEQ ID NO: 2819513 - RNA, 19 nt, Artificial Sequence
  Description of Artificial Sequence: Synthetic oligonucleotide
uuucauggcgugcuucucc

SEQ ID NO: 2819514 - RNA, 19 nt, Artificial Sequence
  Description of Artificial Sequence: Synthetic oligonucleotide
uguuccacaucauguaacu

SEQ ID NO: 2819515 - RNA, 19 nt, Artificial Sequence
  Description of Artificial Sequence: Synthetic oligonucleotide
aaucgacugcgccauguug

SEQ ID NO: 2819516 - RNA, 19 nt, Artificial Sequence
  Description of Artificial Sequence: Synthetic oligonucleotide
uguggcaaauucagcuccg

SEQ ID NO: 2819517 - RNA, 19 nt, Artificial Sequence
  Description of Artificial Sequence: Synthetic oligonucleotide
gagcauuuccaguuguggc

SEQ ID NO: 2819518 - RNA, 19 nt, Artificial Sequence
  Description of Artificial Sequence: Synthetic oligonucleotide
ucugcaacauauccucaug

SEQ ID NO: 2819519 - RNA, 19 nt, Artificial Sequence
  Description of Artificial Sequence: Synthetic oligonucleotide
ucauguaacuucccaggga

SEQ ID NO: 2819520 - RNA, 19 nt, Artificial Sequence
  Description of Artificial Sequence: Synthetic oligonucleotide
agcauuuccaguuguggca

SEQ ID NO: 2819521 - RNA, 19 nt, Artificial Sequence
  Description of Artificial Sequence: Synthetic oligonucleotide
acagguuccucucugcucu

SEQ ID NO: 2819522 - RNA, 19 nt, Artificial Sequence
  Description of Artificial Sequence: Synthetic oligonucleotide
acauagaacucgucagcgg

SEQ ID NO: 2819523 - RNA, 19 nt, Artificial Sequence
  Description of Artificial Sequence: Synthetic oligonucleotide
guaaggaagucuaucuucc

SEQ ID NO: 2819524 - RNA, 19 nt, Artificial Sequence
  Description of Artificial Sequence: Synthetic oligonucleotide
uugaacagguuccucucug

SEQ ID NO: 2819525 - RNA, 19 nt, Artificial Sequence
  Description of Artificial Sequence: Synthetic oligonucleotide
uggcucaucguuuccauga

SEQ ID NO: 2819526 - RNA, 19 nt, Artificial Sequence
  Description of Artificial Sequence: Synthetic oligonucleotide
uucuccacauaguacccag

SEQ ID NO: 2819527 - RNA, 19 nt, Artificial Sequence
  Description of Artificial Sequence: Synthetic oligonucleotide
ugaacggcuggcuggaucu

SEQ ID NO: 2819528 - RNA, 19 nt, Artificial Sequence
  Description of Artificial Sequence: Synthetic oligonucleotide
agcugagcaauagacgugg

SEQ ID NO: 2819529 - RNA, 19 nt, Artificial Sequence
  Description of Artificial Sequence: Synthetic oligonucleotide
uccgugauguuaaucgacu

SEQ ID NO: 2819530 - RNA, 19 nt, Artificial Sequence
  Description of Artificial Sequence: Synthetic oligonucleotide
cagaaacuccacuuccugg

SEQ ID NO: 2819531 - RNA, 19 nt, Artificial Sequence
  Description of Artificial Sequence: Synthetic oligonucleotide
accaguaauucuuuucccu

SEQ ID NO: 2819532 - RNA, 19 nt, Artificial Sequence
  Description of Artificial Sequence: Synthetic oligonucleotide
uccacauaguacccagugc

SEQ ID NO: 2819533 - RNA, 19 nt, Artificial Sequence
  Description of Artificial Sequence: Synthetic oligonucleotide
auguuaaucgacugcgcca

SEQ ID NO: 2819534 - RNA, 19 nt, Artificial Sequence
  Description of Artificial Sequence: Synthetic oligonucleotide
uucuugagcauuuccaguu

SEQ ID NO: 2819535 - RNA, 19 nt, Artificial Sequence
  Description of Artificial Sequence: Synthetic oligonucleotide
agaacucgucagcggaacc

SEQ ID NO: 2819536 - RNA, 19 nt, Artificial Sequence
  Description of Artificial Sequence: Synthetic oligonucleotide
ucuccaucugcuugguaag

SEQ ID NO: 2819537 - RNA, 19 nt, Artificial Sequence
  Description of Artificial Sequence: Synthetic oligonucleotide
caucaaugagcacauguuc

SEQ ID NO: 2819538 - RNA, 19 nt, Artificial Sequence
  Description of Artificial Sequence: Synthetic oligonucleotide
ugauguuaaucgacugcgc

SEQ ID NO: 2819539 - RNA, 19 nt, Artificial Sequence
  Description of Artificial Sequence: Synthetic oligonucleotide
ucuugagcauuuccaguug

SEQ ID NO: 2819540 - RNA, 19 nt, Artificial Sequence
  Description of Artificial Sequence: Synthetic oligonucleotide
ugucuucuccacauaguac

SEQ ID NO: 2819541 - RNA, 19 nt, Artificial Sequence
  Description of Artificial Sequence: Synthetic oligonucleotide
acagaaacuccacuuccug

SEQ ID NO: 2819542 - RNA, 19 nt, Artificial Sequence
  Description of Artificial Sequence: Synthetic oligonucleotide
gggacauacauagaacucg

SEQ ID NO: 2819543 - RNA, 19 nt, Artificial Sequence
  Description of Artificial Sequence: Synthetic oligonucleotide
uuccaguuguggcaaauuc

SEQ ID NO: 2819544 - RNA, 19 nt, Artificial Sequence
  Description of Artificial Sequence: Synthetic oligonucleotide
cugcaacauauccucaugc

SEQ ID NO: 2819545 - RNA, 19 nt, Artificial Sequence
  Description of Artificial Sequence: Synthetic oligonucleotide
gucugcaccaccuugagcu

SEQ ID NO: 2819546 - RNA, 19 nt, Artificial Sequence
  Description of Artificial Sequence: Synthetic oligonucleotide
aaggaagucuaucuuccuu

SEQ ID NO: 2819547 - RNA, 19 nt, Artificial Sequence
  Description of Artificial Sequence: Synthetic oligonucleotide
caucugcuugguaaggaag

SEQ ID NO: 2819548 - RNA, 19 nt, Artificial Sequence
  Description of Artificial Sequence: Synthetic oligonucleotide
aucgacugcgccauguugg

SEQ ID NO: 2819549 - RNA, 19 nt, Artificial Sequence
  Description of Artificial Sequence: Synthetic oligonucleotide
ugcuugguaaggaagucua

SEQ ID NO: 2819550 - RNA, 19 nt, Artificial Sequence
  Description of Artificial Sequence: Synthetic oligonucleotide
gguucuugagcauuuccag

SEQ ID NO: 2819551 - RNA, 19 nt, Artificial Sequence
  Description of Artificial Sequence: Synthetic oligonucleotide
gucuaucuuccuuuugaag

SEQ ID NO: 2819552 - RNA, 19 nt, Artificial Sequence
  Description of Artificial Sequence: Synthetic oligonucleotide
aguaauucuuuucccucgu

SEQ ID NO: 2819553 - RNA, 19 nt, Artificial Sequence
  Description of Artificial Sequence: Synthetic oligonucleotide
aguccuuggcauccucagc

SEQ ID NO: 2819554 - RNA, 19 nt, Artificial Sequence
  Description of Artificial Sequence: Synthetic oligonucleotide
uugagcauuuccaguugug

SEQ ID NO: 2819555 - RNA, 19 nt, Artificial Sequence
  Description of Artificial Sequence: Synthetic oligonucleotide
auauccucaugccuuggca

SEQ ID NO: 2819556 - RNA, 19 nt, Artificial Sequence
  Description of Artificial Sequence: Synthetic oligonucleotide
ucguuuccaugacagcuug

SEQ ID NO: 2819557 - RNA, 19 nt, Artificial Sequence
  Description of Artificial Sequence: Synthetic oligonucleotide
cacuuccugguccagcugg

SEQ ID NO: 2819558 - RNA, 19 nt, Artificial Sequence
  Description of Artificial Sequence: Synthetic oligonucleotide
uuggucugcaccaccuuga

SEQ ID NO: 2819559 - RNA, 19 nt, Artificial Sequence
  Description of Artificial Sequence: Synthetic oligonucleotide
uaacuucccagggacauac

SEQ ID NO: 2819560 - RNA, 19 nt, Artificial Sequence
  Description of Artificial Sequence: Synthetic oligonucleotide
gguaaggaagucuaucuuc

SEQ ID NO: 2819561 - RNA, 19 nt, Artificial Sequence
  Description of Artificial Sequence: Synthetic oligonucleotide
guacccagugcccacauca

SEQ ID NO: 2819562 - RNA, 19 nt, Artificial Sequence
  Description of Artificial Sequence: Synthetic oligonucleotide
ccacauaguacccagugcc

SEQ ID NO: 2819563 - RNA, 19 nt, Artificial Sequence
  Description of Artificial Sequence: Synthetic oligonucleotide
uguuaaucgacugcgccau

SEQ ID NO: 2819564 - RNA, 19 nt, Artificial Sequence
  Description of Artificial Sequence: Synthetic oligonucleotide
auguuccacaucauguaac

SEQ ID NO: 2819565 - RNA, 19 nt, Artificial Sequence
  Description of Artificial Sequence: Synthetic oligonucleotide
cauagaacucgucagcgga

SEQ ID NO: 2819566 - RNA, 19 nt, Artificial Sequence
  Description of Artificial Sequence: Synthetic oligonucleotide
uguaacuucccagggacau

SEQ ID NO: 2819567 - RNA, 19 nt, Artificial Sequence
  Description of Artificial Sequence: Synthetic oligonucleotide
cacauaguacccagugccc

SEQ ID NO: 2819568 - RNA, 19 nt, Artificial Sequence
  Description of Artificial Sequence: Synthetic oligonucleotide
uguucagcacguucagaca

SEQ ID NO: 2819569 - RNA, 19 nt, Artificial Sequence
  Description of Artificial Sequence: Synthetic oligonucleotide
ucuccugaacggcuggcug

SEQ ID NO: 2819570 - RNA, 19 nt, Artificial Sequence
  Description of Artificial Sequence: Synthetic oligonucleotide
aggaagucuaucuuccuuu

SEQ ID NO: 2819571 - RNA, 19 nt, Artificial Sequence
  Description of Artificial Sequence: Synthetic oligonucleotide
ugcuggaucuucuggcuca

SEQ ID NO: 2819572 - RNA, 19 nt, Artificial Sequence
  Description of Artificial Sequence: Synthetic oligonucleotide
uacuuggucugcaccaccu

SEQ ID NO: 2819573 - RNA, 19 nt, Artificial Sequence
  Description of Artificial Sequence: Synthetic oligonucleotide
aggcccuugaacagguucc

SEQ ID NO: 2819574 - RNA, 19 nt, Artificial Sequence
  Description of Artificial Sequence: Synthetic oligonucleotide
ugaagaaguccuuggcauc

SEQ ID NO: 2819575 - RNA, 19 nt, Artificial Sequence
  Description of Artificial Sequence: Synthetic oligonucleotide
ucuucuggcucaucguuuc

SEQ ID NO: 2819576 - RNA, 19 nt, Artificial Sequence
  Description of Artificial Sequence: Synthetic oligonucleotide
caugacagcuuguuucaug

SEQ ID NO: 2819577 - RNA, 19 nt, Artificial Sequence
  Description of Artificial Sequence: Synthetic oligonucleotide
acguacuuggucugcacca

SEQ ID NO: 2819578 - RNA, 19 nt, Artificial Sequence
  Description of Artificial Sequence: Synthetic oligonucleotide
cuccacauaguacccagug

SEQ ID NO: 2819579 - RNA, 19 nt, Artificial Sequence
  Description of Artificial Sequence: Synthetic oligonucleotide
uuaaucgacugcgccaugu

SEQ ID NO: 2819580 - RNA, 19 nt, Artificial Sequence
  Description of Artificial Sequence: Synthetic oligonucleotide
aacucgucagcggaaccag

SEQ ID NO: 2819581 - RNA, 19 nt, Artificial Sequence
  Description of Artificial Sequence: Synthetic oligonucleotide
ucgacugcgccauguuggg

SEQ ID NO: 2819582 - RNA, 19 nt, Artificial Sequence
  Description of Artificial Sequence: Synthetic oligonucleotide
cuuggcagucgccugaguc

SEQ ID NO: 2819583 - RNA, 19 nt, Artificial Sequence
  Description of Artificial Sequence: Synthetic oligonucleotide
acauguuccacaucaugua

SEQ ID NO: 2819584 - RNA, 19 nt, Artificial Sequence
  Description of Artificial Sequence: Synthetic oligonucleotide
agggacauacauagaacuc

SEQ ID NO: 2819585 - RNA, 19 nt, Artificial Sequence
  Description of Artificial Sequence: Synthetic oligonucleotide
cuugguaaggaagucuauc

SEQ ID NO: 2819586 - RNA, 19 nt, Artificial Sequence
  Description of Artificial Sequence: Synthetic oligonucleotide
ccaguuguggcaaauucag

SEQ ID NO: 2819587 - RNA, 19 nt, Artificial Sequence
  Description of Artificial Sequence: Synthetic oligonucleotide
ggcaaauucagcuccguga

SEQ ID NO: 2819588 - RNA, 19 nt, Artificial Sequence
  Description of Artificial Sequence: Synthetic oligonucleotide
uggcaaauucagcuccgug

SEQ ID NO: 2819589 - RNA, 19 nt, Artificial Sequence
  Description of Artificial Sequence: Synthetic oligonucleotide
ucaucguuuccaugacagc

SEQ ID NO: 2819590 - RNA, 19 nt, Artificial Sequence
  Description of Artificial Sequence: Synthetic oligonucleotide
cugguucuugagcauuucc

SEQ ID NO: 2819591 - RNA, 19 nt, Artificial Sequence
  Description of Artificial Sequence: Synthetic oligonucleotide
cauauccucaugccuuggc

SEQ ID NO: 2819592 - RNA, 19 nt, Artificial Sequence
  Description of Artificial Sequence: Synthetic oligonucleotide
ugguaaggaagucuaucuu

SEQ ID NO: 2819593 - RNA, 19 nt, Artificial Sequence
  Description of Artificial Sequence: Synthetic oligonucleotide
cuaucuuccuuuugaagaa

SEQ ID NO: 2819594 - RNA, 19 nt, Artificial Sequence
  Description of Artificial Sequence: Synthetic oligonucleotide
cuuggucugcaccaccuug

SEQ ID NO: 2819595 - RNA, 19 nt, Artificial Sequence
  Description of Artificial Sequence: Synthetic oligonucleotide
uaaggaagucuaucuuccu

SEQ ID NO: 2819596 - RNA, 19 nt, Artificial Sequence
  Description of Artificial Sequence: Synthetic oligonucleotide
augagcacauguuccacau

SEQ ID NO: 2819597 - RNA, 19 nt, Artificial Sequence
  Description of Artificial Sequence: Synthetic oligonucleotide
ugagcugcuggaucuucug

SEQ ID NO: 2819598 - RNA, 19 nt, Artificial Sequence
  Description of Artificial Sequence: Synthetic oligonucleotide
uucauggcgugcuucuccu

SEQ ID NO: 2819599 - RNA, 19 nt, Artificial Sequence
  Description of Artificial Sequence: Synthetic oligonucleotide
agacguggacagaaacucc

SEQ ID NO: 2819600 - RNA, 19 nt, Artificial Sequence
  Description of Artificial Sequence: Synthetic oligonucleotide
agucuaucuuccuuuugaa

SEQ ID NO: 2819601 - RNA, 19 nt, Artificial Sequence
  Description of Artificial Sequence: Synthetic oligonucleotide
cuccgugauguuaaucgac

SEQ ID NO: 2819602 - RNA, 19 nt, Artificial Sequence
  Description of Artificial Sequence: Synthetic oligonucleotide
uccuaggcccuugaacagg

SEQ ID NO: 2819603 - RNA, 19 nt, Artificial Sequence
  Description of Artificial Sequence: Synthetic oligonucleotide
ucagacaguccuuggcuuc

SEQ ID NO: 2819604 - RNA, 19 nt, Artificial Sequence
  Description of Artificial Sequence: Synthetic oligonucleotide
cacguacuuggucugcacc

SEQ ID NO: 2819605 - RNA, 19 nt, Artificial Sequence
  Description of Artificial Sequence: Synthetic oligonucleotide
uuucccucguugcucuugu

SEQ ID NO: 2819606 - RNA, 19 nt, Artificial Sequence
  Description of Artificial Sequence: Synthetic oligonucleotide
uugcucuuguucagcacgu

SEQ ID NO: 2819607 - RNA, 19 nt, Artificial Sequence
  Description of Artificial Sequence: Synthetic oligonucleotide
ucguugcucuuguucagca

SEQ ID NO: 2819608 - RNA, 19 nt, Artificial Sequence
  Description of Artificial Sequence: Synthetic oligonucleotide
cauaguacccagugcccac

SEQ ID NO: 2819609 - RNA, 19 nt, Artificial Sequence
  Description of Artificial Sequence: Synthetic oligonucleotide
ucagcggaaccaguaauuc

SEQ ID NO: 2819610 - RNA, 19 nt, Artificial Sequence
  Description of Artificial Sequence: Synthetic oligonucleotide
acuucccagggacauacau

SEQ ID NO: 2819611 - RNA, 19 nt, Artificial Sequence
  Description of Artificial Sequence: Synthetic oligonucleotide
ggaaccaguaauucuuuuc

SEQ ID NO: 2819612 - RNA, 19 nt, Artificial Sequence
  Description of Artificial Sequence: Synthetic oligonucleotide
ucccucguugcucuuguuc

SEQ ID NO: 2819613 - RNA, 19 nt, Artificial Sequence
  Description of Artificial Sequence: Synthetic oligonucleotide
uggucugcaccaccuugag

SEQ ID NO: 2819614 - RNA, 19 nt, Artificial Sequence
  Description of Artificial Sequence: Synthetic oligonucleotide
ugcaccaccuugagcugag

SEQ ID NO: 2819615 - RNA, 19 nt, Artificial Sequence
  Description of Artificial Sequence: Synthetic oligonucleotide
aaaguccuaggcccuugaa

SEQ ID NO: 2819616 - RNA, 19 nt, Artificial Sequence
  Description of Artificial Sequence: Synthetic oligonucleotide
uucagcacguucagacagu

SEQ ID NO: 2819617 - RNA, 19 nt, Artificial Sequence
  Description of Artificial Sequence: Synthetic oligonucleotide
cacauguuccacaucaugu

SEQ ID NO: 2819618 - RNA, 19 nt, Artificial Sequence
  Description of Artificial Sequence: Synthetic oligonucleotide
cugagcaauagacguggac

SEQ ID NO: 2819619 - RNA, 19 nt, Artificial Sequence
  Description of Artificial Sequence: Synthetic oligonucleotide
uucagacaguccuuggcuu

SEQ ID NO: 2819620 - RNA, 19 nt, Artificial Sequence
  Description of Artificial Sequence: Synthetic oligonucleotide
gacguggacagaaacucca

SEQ ID NO: 2819621 - RNA, 19 nt, Artificial Sequence
  Description of Artificial Sequence: Synthetic oligonucleotide
accaccuugagcugagcaa

SEQ ID NO: 2819622 - RNA, 19 nt, Artificial Sequence
  Description of Artificial Sequence: Synthetic oligonucleotide
cacaucauguaacuuccca

SEQ ID NO: 2819623 - RNA, 19 nt, Artificial Sequence
  Description of Artificial Sequence: Synthetic oligonucleotide
agcuuguuucauggcgugc

SEQ ID NO: 2819624 - RNA, 19 nt, Artificial Sequence
  Description of Artificial Sequence: Synthetic oligonucleotide
acguucagacaguccuugg

SEQ ID NO: 2819625 - RNA, 19 nt, Artificial Sequence
  Description of Artificial Sequence: Synthetic oligonucleotide
gaaacuccacuuccugguc

SEQ ID NO: 2819626 - RNA, 19 nt, Artificial Sequence
  Description of Artificial Sequence: Synthetic oligonucleotide
caguuguggcaaauucagc

SEQ ID NO: 2819627 - RNA, 19 nt, Artificial Sequence
  Description of Artificial Sequence: Synthetic oligonucleotide
ugacagcuuguuucauggc

SEQ ID NO: 2819628 - RNA, 19 nt, Artificial Sequence
  Description of Artificial Sequence: Synthetic oligonucleotide
auccucaugccuuggcagu

SEQ ID NO: 2819629 - RNA, 19 nt, Artificial Sequence
  Description of Artificial Sequence: Synthetic oligonucleotide
uccaucugcuugguaagga

SEQ ID NO: 2819630 - RNA, 19 nt, Artificial Sequence
  Description of Artificial Sequence: Synthetic oligonucleotide
acauaguacccagugccca

SEQ ID NO: 2819631 - RNA, 19 nt, Artificial Sequence
  Description of Artificial Sequence: Synthetic oligonucleotide
aucugcuugguaaggaagu

SEQ ID NO: 2819632 - RNA, 19 nt, Artificial Sequence
  Description of Artificial Sequence: Synthetic oligonucleotide
aacggcuggcuggaucuuc

SEQ ID NO: 2819633 - RNA, 19 nt, Artificial Sequence
  Description of Artificial Sequence: Synthetic oligonucleotide
acugcgccauguuggguag

SEQ ID NO: 2819634 - RNA, 19 nt, Artificial Sequence
  Description of Artificial Sequence: Synthetic oligonucleotide
cuuggcauccucagcuguc

SEQ ID NO: 2819635 - RNA, 19 nt, Artificial Sequence
  Description of Artificial Sequence: Synthetic oligonucleotide
acagcuuguuucauggcgu

SEQ ID NO: 2819636 - RNA, 19 nt, Artificial Sequence
  Description of Artificial Sequence: Synthetic oligonucleotide
ggcgugcuucuccugaacg

SEQ ID NO: 2819637 - RNA, 19 nt, Artificial Sequence
  Description of Artificial Sequence: Synthetic oligonucleotide
cagggacauacauagaacu

SEQ ID NO: 2819638 - RNA, 19 nt, Artificial Sequence
  Description of Artificial Sequence: Synthetic oligonucleotide
gaacucgucagcggaacca

SEQ ID NO: 2819639 - RNA, 19 nt, Artificial Sequence
  Description of Artificial Sequence: Synthetic oligonucleotide
uagaacucgucagcggaac

SEQ ID NO: 2819640 - RNA, 19 nt, Artificial Sequence
  Description of Artificial Sequence: Synthetic oligonucleotide
uccuuuugaagaaguccuu

SEQ ID NO: 2819641 - RNA, 19 nt, Artificial Sequence
  Description of Artificial Sequence: Synthetic oligonucleotide
gacugcgccauguugggua

SEQ ID NO: 2819642 - RNA, 19 nt, Artificial Sequence
  Description of Artificial Sequence: Synthetic oligonucleotide
uucuggcucaucguuucca

SEQ ID NO: 2819643 - RNA, 19 nt, Artificial Sequence
  Description of Artificial Sequence: Synthetic oligonucleotide
ucgucagcggaaccaguaa

SEQ ID NO: 2819644 - RNA, 19 nt, Artificial Sequence
  Description of Artificial Sequence: Synthetic oligonucleotide
gugcccacaucaaugagca

SEQ ID NO: 2819645 - RNA, 19 nt, Artificial Sequence
  Description of Artificial Sequence: Synthetic oligonucleotide
ucuccacauaguacccagu

SEQ ID NO: 2819646 - RNA, 19 nt, Artificial Sequence
  Description of Artificial Sequence: Synthetic oligonucleotide
guucagacaguccuuggcu

SEQ ID NO: 2819647 - RNA, 19 nt, Artificial Sequence
  Description of Artificial Sequence: Synthetic oligonucleotide
aauucagcuccgugauguu

SEQ ID NO: 2819648 - RNA, 19 nt, Artificial Sequence
  Description of Artificial Sequence: Synthetic oligonucleotide
cuuccacguacuuggucug

SEQ ID NO: 2819649 - RNA, 19 nt, Artificial Sequence
  Description of Artificial Sequence: Synthetic oligonucleotide
ugccuuggcagucgccuga

SEQ ID NO: 2819650 - RNA, 19 nt, Artificial Sequence
  Description of Artificial Sequence: Synthetic oligonucleotide
guccuuggcuuccacguac

SEQ ID NO: 2819651 - RNA, 19 nt, Artificial Sequence
  Description of Artificial Sequence: Synthetic oligonucleotide
ucuggcucaucguuuccau

SEQ ID NO: 2819652 - RNA, 19 nt, Artificial Sequence
  Description of Artificial Sequence: Synthetic oligonucleotide
ucugcuugguaaggaaguc

SEQ ID NO: 2819653 - RNA, 19 nt, Artificial Sequence
  Description of Artificial Sequence: Synthetic oligonucleotide
agcggaaccaguaauucuu

SEQ ID NO: 2819654 - RNA, 19 nt, Artificial Sequence
  Description of Artificial Sequence: Synthetic oligonucleotide
guccuaggcccuugaacag

SEQ ID NO: 2819655 - RNA, 19 nt, Artificial Sequence
  Description of Artificial Sequence: Synthetic oligonucleotide
uccuuggcauccucagcug

SEQ ID NO: 2819656 - RNA, 19 nt, Artificial Sequence
  Description of Artificial Sequence: Synthetic oligonucleotide
aguacccagugcccacauc

SEQ ID NO: 2819657 - RNA, 19 nt, Artificial Sequence
  Description of Artificial Sequence: Synthetic oligonucleotide
cauguuccacaucauguaa

SEQ ID NO: 2819658 - RNA, 19 nt, Artificial Sequence
  Description of Artificial Sequence: Synthetic oligonucleotide
guacuuggucugcaccacc

SEQ ID NO: 2819659 - RNA, 19 nt, Artificial Sequence
  Description of Artificial Sequence: Synthetic oligonucleotide
accuugagcugagcaauag

SEQ ID NO: 2819660 - RNA, 19 nt, Artificial Sequence
  Description of Artificial Sequence: Synthetic oligonucleotide
ccaguaauucuuuucccuc

SEQ ID NO: 2819661 - RNA, 19 nt, Artificial Sequence
  Description of Artificial Sequence: Synthetic oligonucleotide
caaauucagcuccgugaug

SEQ ID NO: 2819662 - RNA, 19 nt, Artificial Sequence
  Description of Artificial Sequence: Synthetic oligonucleotide
uggcagucgccugagucgc

SEQ ID NO: 2819663 - RNA, 19 nt, Artificial Sequence
  Description of Artificial Sequence: Synthetic oligonucleotide
uaaucgacugcgccauguu

SEQ ID NO: 2819664 - RNA, 19 nt, Artificial Sequence
  Description of Artificial Sequence: Synthetic oligonucleotide
cugucuucuccacauagua

SEQ ID NO: 2819665 - RNA, 19 nt, Artificial Sequence
  Description of Artificial Sequence: Synthetic oligonucleotide
gagcugagcaauagacgug

SEQ ID NO: 2819666 - RNA, 19 nt, Artificial Sequence
  Description of Artificial Sequence: Synthetic oligonucleotide
ucaugccuuggcagucgcc

SEQ ID NO: 2819667 - RNA, 19 nt, Artificial Sequence
  Description of Artificial Sequence: Synthetic oligonucleotide
cacguucagacaguccuug

SEQ ID NO: 2819668 - RNA, 19 nt, Artificial Sequence
  Description of Artificial Sequence: Synthetic oligonucleotide
gcacauguuccacaucaug

SEQ ID NO: 2819669 - RNA, 19 nt, Artificial Sequence
  Description of Artificial Sequence: Synthetic oligonucleotide
caaugagcacauguuccac

SEQ ID NO: 2819670 - RNA, 19 nt, Artificial Sequence
  Description of Artificial Sequence: Synthetic oligonucleotide
ugagcacauguuccacauc

SEQ ID NO: 2819671 - RNA, 19 nt, Artificial Sequence
  Description of Artificial Sequence: Synthetic oligonucleotide
acauauccucaugccuugg

SEQ ID NO: 2819672 - RNA, 19 nt, Artificial Sequence
  Description of Artificial Sequence: Synthetic oligonucleotide
ucagcacguucagacaguc

SEQ ID NO: 2819673 - RNA, 19 nt, Artificial Sequence
  Description of Artificial Sequence: Synthetic oligonucleotide
gcgugcuucuccugaacgg

SEQ ID NO: 2819674 - RNA, 19 nt, Artificial Sequence
  Description of Artificial Sequence: Synthetic oligonucleotide
cgugauguuaaucgacugc

SEQ ID NO: 2819675 - RNA, 19 nt, Artificial Sequence
  Description of Artificial Sequence: Synthetic oligonucleotide
caacauauccucaugccuu

SEQ ID NO: 2819676 - RNA, 19 nt, Artificial Sequence
  Description of Artificial Sequence: Synthetic oligonucleotide
cagcuuguuucauggcgug

SEQ ID NO: 2819677 - RNA, 19 nt, Artificial Sequence
  Description of Artificial Sequence: Synthetic oligonucleotide
cucguugcucuuguucagc

SEQ ID NO: 2819678 - RNA, 19 nt, Artificial Sequence
  Description of Artificial Sequence: Synthetic oligonucleotide
acguggacagaaacuccac

SEQ ID NO: 2819679 - RNA, 19 nt, Artificial Sequence
  Description of Artificial Sequence: Synthetic oligonucleotide
ucugcucuuucugcaacau

SEQ ID NO: 2819680 - RNA, 19 nt, Artificial Sequence
  Description of Artificial Sequence: Synthetic oligonucleotide
cagacaguccuuggcuucc

SEQ ID NO: 2819681 - RNA, 19 nt, Artificial Sequence
  Description of Artificial Sequence: Synthetic oligonucleotide
aagaaguccuuggcauccu

SEQ ID NO: 2819682 - RNA, 19 nt, Artificial Sequence
  Description of Artificial Sequence: Synthetic oligonucleotide
caucguuuccaugacagcu

SEQ ID NO: 2819683 - RNA, 19 nt, Artificial Sequence
  Description of Artificial Sequence: Synthetic oligonucleotide
uccacguacuuggucugca

SEQ ID NO: 2819684 - RNA, 19 nt, Artificial Sequence
  Description of Artificial Sequence: Synthetic oligonucleotide
cuucuggcucaucguuucc

SEQ ID NO: 2819685 - RNA, 19 nt, Artificial Sequence
  Description of Artificial Sequence: Synthetic oligonucleotide
cccagugcccacaucaaug

SEQ ID NO: 2819686 - RNA, 19 nt, Artificial Sequence
  Description of Artificial Sequence: Synthetic oligonucleotide
cauggcgugcuucuccuga

SEQ ID NO: 2819687 - RNA, 19 nt, Artificial Sequence
  Description of Artificial Sequence: Synthetic oligonucleotide
ccagggacauacauagaac

SEQ ID NO: 2819688 - RNA, 19 nt, Artificial Sequence
  Description of Artificial Sequence: Synthetic oligonucleotide
gacauacauagaacucguc

SEQ ID NO: 2819689 - RNA, 19 nt, Artificial Sequence
  Description of Artificial Sequence: Synthetic oligonucleotide
uacccagugcccacaucaa

SEQ ID NO: 2819690 - RNA, 19 nt, Artificial Sequence
  Description of Artificial Sequence: Synthetic oligonucleotide
cucaugccuuggcagucgc

SEQ ID NO: 2819691 - RNA, 19 nt, Artificial Sequence
  Description of Artificial Sequence: Synthetic oligonucleotide
ugcgccauguuggguagga

SEQ ID NO: 2819692 - RNA, 19 nt, Artificial Sequence
  Description of Artificial Sequence: Synthetic oligonucleotide
uuuccaguuguggcaaauu

SEQ ID NO: 2819693 - RNA, 19 nt, Artificial Sequence
  Description of Artificial Sequence: Synthetic oligonucleotide
gaucuucuggcucaucguu

SEQ ID NO: 2819694 - RNA, 19 nt, Artificial Sequence
  Description of Artificial Sequence: Synthetic oligonucleotide
cugaacggcuggcuggauc

SEQ ID NO: 2819695 - RNA, 19 nt, Artificial Sequence
  Description of Artificial Sequence: Synthetic oligonucleotide
uucuccugaacggcuggcu

SEQ ID NO: 2819696 - RNA, 19 nt, Artificial Sequence
  Description of Artificial Sequence: Synthetic oligonucleotide
gcccacaucaaugagcaca

SEQ ID NO: 2819697 - RNA, 19 nt, Artificial Sequence
  Description of Artificial Sequence: Synthetic oligonucleotide
gcuuccacguacuuggucu

SEQ ID NO: 2819698 - RNA, 19 nt, Artificial Sequence
  Description of Artificial Sequence: Synthetic oligonucleotide
uccugaacggcuggcugga

SEQ ID NO: 2819699 - RNA, 19 nt, Artificial Sequence
  Description of Artificial Sequence: Synthetic oligonucleotide
auaguacccagugcccaca

SEQ ID NO: 2819700 - RNA, 19 nt, Artificial Sequence
  Description of Artificial Sequence: Synthetic oligonucleotide
cuggcucaucguuuccaug

SEQ ID NO: 2819701 - RNA, 19 nt, Artificial Sequence
  Description of Artificial Sequence: Synthetic oligonucleotide
gcuucuccugaacggcugg

SEQ ID NO: 2819702 - RNA, 19 nt, Artificial Sequence
  Description of Artificial Sequence: Synthetic oligonucleotide
guggacagaaacuccacuu

SEQ ID NO: 2819703 - RNA, 19 nt, Artificial Sequence
  Description of Artificial Sequence: Synthetic oligonucleotide
cagcacguucagacagucc

SEQ ID NO: 2819704 - RNA, 19 nt, Artificial Sequence
  Description of Artificial Sequence: Synthetic oligonucleotide
cuucccagggacauacaua

SEQ ID NO: 2819705 - RNA, 19 nt, Artificial Sequence
  Description of Artificial Sequence: Synthetic oligonucleotide
agcaauagacguggacaga

SEQ ID NO: 2819706 - RNA, 19 nt, Artificial Sequence
  Description of Artificial Sequence: Synthetic oligonucleotide
uuccacguacuuggucugc

SEQ ID NO: 2819707 - RNA, 19 nt, Artificial Sequence
  Description of Artificial Sequence: Synthetic oligonucleotide
ucauggcgugcuucuccug

SEQ ID NO: 2819708 - RNA, 19 nt, Artificial Sequence
  Description of Artificial Sequence: Synthetic oligonucleotide
ugugagcugcuggaucuuc

SEQ ID NO: 2819709 - RNA, 19 nt, Artificial Sequence
  Description of Artificial Sequence: Synthetic oligonucleotide
cgccauguuggguaggagg

SEQ ID NO: 2819710 - RNA, 19 nt, Artificial Sequence
  Description of Artificial Sequence: Synthetic oligonucleotide
guuaaucgacugcgccaug

SEQ ID NO: 2819711 - RNA, 19 nt, Artificial Sequence
  Description of Artificial Sequence: Synthetic oligonucleotide
augccuuggcagucgccug

SEQ ID NO: 2819712 - RNA, 19 nt, Artificial Sequence
  Description of Artificial Sequence: Synthetic oligonucleotide
gcaauagacguggacagaa

SEQ ID NO: 2819713 - RNA, 19 nt, Artificial Sequence
  Description of Artificial Sequence: Synthetic oligonucleotide
gacagaaacuccacuuccu

SEQ ID NO: 2819714 - RNA, 19 nt, Artificial Sequence
  Description of Artificial Sequence: Synthetic oligonucleotide
ccuuuugaagaaguccuug

SEQ ID NO: 2819715 - RNA, 19 nt, Artificial Sequence
  Description of Artificial Sequence: Synthetic oligonucleotide
cagugcccacaucaaugag

SEQ ID NO: 2819716 - RNA, 19 nt, Artificial Sequence
  Description of Artificial Sequence: Synthetic oligonucleotide
uaguacccagugcccacau

SEQ ID NO: 2819717 - RNA, 19 nt, Artificial Sequence
  Description of Artificial Sequence: Synthetic oligonucleotide
gcaacauauccucaugccu

SEQ ID NO: 2819718 - RNA, 19 nt, Artificial Sequence
  Description of Artificial Sequence: Synthetic oligonucleotide
auagaacucgucagcggaa

SEQ ID NO: 2819719 - RNA, 19 nt, Artificial Sequence
  Description of Artificial Sequence: Synthetic oligonucleotide
uggcgugcuucuccugaac

SEQ ID NO: 2819720 - RNA, 19 nt, Artificial Sequence
  Description of Artificial Sequence: Synthetic oligonucleotide
ucccagggacauacauaga

SEQ ID NO: 2819721 - RNA, 19 nt, Artificial Sequence
  Description of Artificial Sequence: Synthetic oligonucleotide
caguccuuggcuuccacgu

SEQ ID NO: 2819722 - RNA, 19 nt, Artificial Sequence
  Description of Artificial Sequence: Synthetic oligonucleotide
cugcuggaucuucuggcuc

SEQ ID NO: 2819723 - RNA, 19 nt, Artificial Sequence
  Description of Artificial Sequence: Synthetic oligonucleotide
cuucuccugaacggcuggc

SEQ ID NO: 2819724 - RNA, 19 nt, Artificial Sequence
  Description of Artificial Sequence: Synthetic oligonucleotide
caauagacguggacagaaa

SEQ ID NO: 2819725 - RNA, 19 nt, Artificial Sequence
  Description of Artificial Sequence: Synthetic oligonucleotide
aucguuuccaugacagcuu

SEQ ID NO: 2819726 - RNA, 19 nt, Artificial Sequence
  Description of Artificial Sequence: Synthetic oligonucleotide
ccuugaacagguuccucuc

SEQ ID NO: 2819727 - RNA, 19 nt, Artificial Sequence
  Description of Artificial Sequence: Synthetic oligonucleotide
ggcuggcuggaucuucucc

SEQ ID NO: 2819728 - RNA, 19 nt, Artificial Sequence
  Description of Artificial Sequence: Synthetic oligonucleotide
cucgucagcggaaccagua

SEQ ID NO: 2819729 - RNA, 19 nt, Artificial Sequence
  Description of Artificial Sequence: Synthetic oligonucleotide
caccaccuugagcugagca

SEQ ID NO: 2819730 - RNA, 19 nt, Artificial Sequence
  Description of Artificial Sequence: Synthetic oligonucleotide
cguucagacaguccuuggc

SEQ ID NO: 2819731 - RNA, 19 nt, Artificial Sequence
  Description of Artificial Sequence: Synthetic oligonucleotide
cuugagcauuuccaguugu

SEQ ID NO: 2819732 - RNA, 19 nt, Artificial Sequence
  Description of Artificial Sequence: Synthetic oligonucleotide
gccauguuggguaggagga

SEQ ID NO: 2819733 - RNA, 19 nt, Artificial Sequence
  Description of Artificial Sequence: Synthetic oligonucleotide
acccagugcccacaucaau

SEQ ID NO: 2819734 - RNA, 19 nt, Artificial Sequence
  Description of Artificial Sequence: Synthetic oligonucleotide
gcaaauucagcuccgugau

SEQ ID NO: 2819735 - RNA, 19 nt, Artificial Sequence
  Description of Artificial Sequence: Synthetic oligonucleotide
auguaacuucccagggaca

SEQ ID NO: 2819736 - RNA, 19 nt, Artificial Sequence
  Description of Artificial Sequence: Synthetic oligonucleotide
cccagggacauacauagaa

SEQ ID NO: 2819737 - RNA, 19 nt, Artificial Sequence
  Description of Artificial Sequence: Synthetic oligonucleotide
aguccuuggcuuccacgua

SEQ ID NO: 2819738 - RNA, 19 nt, Artificial Sequence
  Description of Artificial Sequence: Synthetic oligonucleotide
acuuggucugcaccaccuu

SEQ ID NO: 2819739 - RNA, 19 nt, Artificial Sequence
  Description of Artificial Sequence: Synthetic oligonucleotide
auggcgugcuucuccugaa

SEQ ID NO: 2819740 - RNA, 19 nt, Artificial Sequence
  Description of Artificial Sequence: Synthetic oligonucleotide
cuuguucagcacguucaga

SEQ ID NO: 2819741 - RNA, 19 nt, Artificial Sequence
  Description of Artificial Sequence: Synthetic oligonucleotide
ccgugauguuaaucgacug

SEQ ID NO: 2819742 - RNA, 19 nt, Artificial Sequence
  Description of Artificial Sequence: Synthetic oligonucleotide
aucuucuggcucaucguuu

SEQ ID NO: 2819743 - RNA, 19 nt, Artificial Sequence
  Description of Artificial Sequence: Synthetic oligonucleotide
uggcuuccacguacuuggu

SEQ ID NO: 2819744 - RNA, 19 nt, Artificial Sequence
  Description of Artificial Sequence: Synthetic oligonucleotide
cuucuccacauaguaccca

SEQ ID NO: 2819745 - RNA, 19 nt, Artificial Sequence
  Description of Artificial Sequence: Synthetic oligonucleotide
cuugaacagguuccucucu

SEQ ID NO: 2819746 - RNA, 19 nt, Artificial Sequence
  Description of Artificial Sequence: Synthetic oligonucleotide
ggucugcaccaccuugagc

SEQ ID NO: 2819747 - RNA, 19 nt, Artificial Sequence
  Description of Artificial Sequence: Synthetic oligonucleotide
ggcucaucguuuccaugac

SEQ ID NO: 2819748 - RNA, 19 nt, Artificial Sequence
  Description of Artificial Sequence: Synthetic oligonucleotide
caugccuuggcagucgccu

SEQ ID NO: 2819749 - RNA, 19 nt, Artificial Sequence
  Description of Artificial Sequence: Synthetic oligonucleotide
ccagugcccacaucaauga

SEQ ID NO: 2819750 - RNA, 19 nt, Artificial Sequence
  Description of Artificial Sequence: Synthetic oligonucleotide
gguuccucucugcucuuuc

SEQ ID NO: 2819751 - RNA, 19 nt, Artificial Sequence
  Description of Artificial Sequence: Synthetic oligonucleotide
guuucauggcgugcuucuc

SEQ ID NO: 2819752 - RNA, 19 nt, Artificial Sequence
  Description of Artificial Sequence: Synthetic oligonucleotide
gcuccgugauguuaaucga

SEQ ID NO: 2819753 - RNA, 19 nt, Artificial Sequence
  Description of Artificial Sequence: Synthetic oligonucleotide
ggcugugagcugcuggauc

SEQ ID NO: 2819754 - RNA, 19 nt, Artificial Sequence
  Description of Artificial Sequence: Synthetic oligonucleotide
cagucgccugagucgcccc

SEQ ID NO: 2819755 - RNA, 19 nt, Artificial Sequence
  Description of Artificial Sequence: Synthetic oligonucleotide
ccacaucauguaacuuccc

SEQ ID NO: 2819756 - RNA, 19 nt, Artificial Sequence
  Description of Artificial Sequence: Synthetic oligonucleotide
cauccucagcugucuucuc

SEQ ID NO: 2819757 - RNA, 19 nt, Artificial Sequence
  Description of Artificial Sequence: Synthetic oligonucleotide
cgugcuucuccugaacggc

SEQ ID NO: 2819758 - RNA, 19 nt, Artificial Sequence
  Description of Artificial Sequence: Synthetic oligonucleotide
agcacauguuccacaucau

SEQ ID NO: 2819759 - RNA, 19 nt, Artificial Sequence
  Description of Artificial Sequence: Synthetic oligonucleotide
uggcauccucagcugucuu

SEQ ID NO: 2819760 - RNA, 19 nt, Artificial Sequence
  Description of Artificial Sequence: Synthetic oligonucleotide
ggacauacauagaacucgu

SEQ ID NO: 2819761 - RNA, 19 nt, Artificial Sequence
  Description of Artificial Sequence: Synthetic oligonucleotide
ugcccacaucaaugagcac

SEQ ID NO: 2819762 - RNA, 19 nt, Artificial Sequence
  Description of Artificial Sequence: Synthetic oligonucleotide
acggcuggcuggaucuucu

SEQ ID NO: 2819763 - RNA, 19 nt, Artificial Sequence
  Description of Artificial Sequence: Synthetic oligonucleotide
gcucaucguuuccaugaca

SEQ ID NO: 2819764 - RNA, 19 nt, Artificial Sequence
  Description of Artificial Sequence: Synthetic oligonucleotide
agcugguucuugagcauuu

SEQ ID NO: 2819765 - RNA, 19 nt, Artificial Sequence
  Description of Artificial Sequence: Synthetic oligonucleotide
ggaucuucuggcucaucgu

SEQ ID NO: 2819766 - RNA, 19 nt, Artificial Sequence
  Description of Artificial Sequence: Synthetic oligonucleotide
cagcggaaccaguaauucu

SEQ ID NO: 2819767 - RNA, 19 nt, Artificial Sequence
  Description of Artificial Sequence: Synthetic oligonucleotide
gcauuuccaguuguggcaa

SEQ ID NO: 2819768 - RNA, 19 nt, Artificial Sequence
  Description of Artificial Sequence: Synthetic oligonucleotide
ggcuuccacguacuugguc

SEQ ID NO: 2819769 - RNA, 19 nt, Artificial Sequence
  Description of Artificial Sequence: Synthetic oligonucleotide
gcuuguuucauggcgugcu

SEQ ID NO: 2819770 - RNA, 19 nt, Artificial Sequence
  Description of Artificial Sequence: Synthetic oligonucleotide
guaauucuuuucccucguu

SEQ ID NO: 2819771 - RNA, 19 nt, Artificial Sequence
  Description of Artificial Sequence: Synthetic oligonucleotide
cauuuccaguuguggcaaa

SEQ ID NO: 2819772 - RNA, 19 nt, Artificial Sequence
  Description of Artificial Sequence: Synthetic oligonucleotide
ugcucuuguucagcacguu

SEQ ID NO: 2819773 - RNA, 19 nt, Artificial Sequence
  Description of Artificial Sequence: Synthetic oligonucleotide
cugcuugguaaggaagucu

SEQ ID NO: 2819774 - RNA, 19 nt, Artificial Sequence
  Description of Artificial Sequence: Synthetic oligonucleotide
ccucaugccuuggcagucg

SEQ ID NO: 2819775 - RNA, 19 nt, Artificial Sequence
  Description of Artificial Sequence: Synthetic oligonucleotide
gcagucgccugagucgccc

SEQ ID NO: 2819776 - RNA, 19 nt, Artificial Sequence
  Description of Artificial Sequence: Synthetic oligonucleotide
guaacuucccagggacaua

SEQ ID NO: 2819777 - RNA, 19 nt, Artificial Sequence
  Description of Artificial Sequence: Synthetic oligonucleotide
ccuugagcugagcaauaga

SEQ ID NO: 2819778 - RNA, 19 nt, Artificial Sequence
  Description of Artificial Sequence: Synthetic oligonucleotide
acucgucagcggaaccagu

SEQ ID NO: 2819779 - RNA, 19 nt, Artificial Sequence
  Description of Artificial Sequence: Synthetic oligonucleotide
cugcaccaccuugagcuga

SEQ ID NO: 2819780 - RNA, 19 nt, Artificial Sequence
  Description of Artificial Sequence: Synthetic oligonucleotide
ccaucugcuugguaaggaa

SEQ ID NO: 2819781 - RNA, 19 nt, Artificial Sequence
  Description of Artificial Sequence: Synthetic oligonucleotide
gucagcggaaccaguaauu

SEQ ID NO: 2819782 - RNA, 19 nt, Artificial Sequence
  Description of Artificial Sequence: Synthetic oligonucleotide
ccacguacuuggucugcac

SEQ ID NO: 2819783 - RNA, 19 nt, Artificial Sequence
  Description of Artificial Sequence: Synthetic oligonucleotide
caccuugagcugagcaaua

SEQ ID NO: 2819784 - RNA, 19 nt, Artificial Sequence
  Description of Artificial Sequence: Synthetic oligonucleotide
cccuugaacagguuccucu

SEQ ID NO: 2819785 - RNA, 19 nt, Artificial Sequence
  Description of Artificial Sequence: Synthetic oligonucleotide
cugcucuuucugcaacaua

SEQ ID NO: 2819786 - RNA, 19 nt, Artificial Sequence
  Description of Artificial Sequence: Synthetic oligonucleotide
cugcgccauguuggguagg

SEQ ID NO: 2819787 - RNA, 19 nt, Artificial Sequence
  Description of Artificial Sequence: Synthetic oligonucleotide
cugguccagcugguucuug

SEQ ID NO: 2819788 - RNA, 19 nt, Artificial Sequence
  Description of Artificial Sequence: Synthetic oligonucleotide
uucccucguugcucuuguu

SEQ ID NO: 2819789 - RNA, 19 nt, Artificial Sequence
  Description of Artificial Sequence: Synthetic oligonucleotide
cuuguuucauggcgugcuu

SEQ ID NO: 2819790 - RNA, 19 nt, Artificial Sequence
  Description of Artificial Sequence: Synthetic oligonucleotide
cguacuuggucugcaccac

SEQ ID NO: 2819791 - RNA, 19 nt, Artificial Sequence
  Description of Artificial Sequence: Synthetic oligonucleotide
gcugguucuugagcauuuc

SEQ ID NO: 2819792 - RNA, 19 nt, Artificial Sequence
  Description of Artificial Sequence: Synthetic oligonucleotide
guuccacaucauguaacuu

SEQ ID NO: 2819793 - RNA, 19 nt, Artificial Sequence
  Description of Artificial Sequence: Synthetic oligonucleotide
ccccagggcugugagcugc

SEQ ID NO: 2819794 - RNA, 19 nt, Artificial Sequence
  Description of Artificial Sequence: Synthetic oligonucleotide
guggcaaauucagcuccgu

SEQ ID NO: 2819795 - RNA, 19 nt, Artificial Sequence
  Description of Artificial Sequence: Synthetic oligonucleotide
agguuccucucugcucuuu

SEQ ID NO: 2819796 - RNA, 19 nt, Artificial Sequence
  Description of Artificial Sequence: Synthetic oligonucleotide
gccuuggcagucgccugag

SEQ ID NO: 2819797 - RNA, 19 nt, Artificial Sequence
  Description of Artificial Sequence: Synthetic oligonucleotide
cuucuccaucugcuuggua

SEQ ID NO: 2819798 - RNA, 19 nt, Artificial Sequence
  Description of Artificial Sequence: Synthetic oligonucleotide
ccuaggcccuugaacaggu

SEQ ID NO: 2819799 - RNA, 19 nt, Artificial Sequence
  Description of Artificial Sequence: Synthetic oligonucleotide
ccacuuccugguccagcug

SEQ ID NO: 2819800 - RNA, 19 nt, Artificial Sequence
  Description of Artificial Sequence: Synthetic oligonucleotide
gcugagcaauagacgugga

SEQ ID NO: 2819801 - RNA, 19 nt, Artificial Sequence
  Description of Artificial Sequence: Synthetic oligonucleotide
cagcugucuucuccacaua

SEQ ID NO: 2819802 - RNA, 19 nt, Artificial Sequence
  Description of Artificial Sequence: Synthetic oligonucleotide
gcgccauguuggguaggag

SEQ ID NO: 2819803 - RNA, 19 nt, Artificial Sequence
  Description of Artificial Sequence: Synthetic oligonucleotide
ccaccuugagcugagcaau

SEQ ID NO: 2819804 - RNA, 19 nt, Artificial Sequence
  Description of Artificial Sequence: Synthetic oligonucleotide
ccuuggcauccucagcugu

SEQ ID NO: 2819805 - RNA, 19 nt, Artificial Sequence
  Description of Artificial Sequence: Synthetic oligonucleotide
ggcagucgccugagucgcc

SEQ ID NO: 2819806 - RNA, 19 nt, Artificial Sequence
  Description of Artificial Sequence: Synthetic oligonucleotide
ccacaucaaugagcacaug

SEQ ID NO: 2819807 - RNA, 19 nt, Artificial Sequence
  Description of Artificial Sequence: Synthetic oligonucleotide
gcccuugaacagguuccuc

SEQ ID NO: 2819808 - RNA, 19 nt, Artificial Sequence
  Description of Artificial Sequence: Synthetic oligonucleotide
cguggacagaaacuccacu

SEQ ID NO: 2819809 - RNA, 19 nt, Artificial Sequence
  Description of Artificial Sequence: Synthetic oligonucleotide
cagcugguucuugagcauu

SEQ ID NO: 2819810 - RNA, 19 nt, Artificial Sequence
  Description of Artificial Sequence: Synthetic oligonucleotide
gcuugguaaggaagucuau

SEQ ID NO: 2819811 - RNA, 19 nt, Artificial Sequence
  Description of Artificial Sequence: Synthetic oligonucleotide
ggcccuugaacagguuccu

SEQ ID NO: 2819812 - RNA, 19 nt, Artificial Sequence
  Description of Artificial Sequence: Synthetic oligonucleotide
gcaccaccuugagcugagc

SEQ ID NO: 2819813 - RNA, 19 nt, Artificial Sequence
  Description of Artificial Sequence: Synthetic oligonucleotide
cuaggcccuugaacagguu

SEQ ID NO: 2819814 - RNA, 19 nt, Artificial Sequence
  Description of Artificial Sequence: Synthetic oligonucleotide
gcggaaccaguaauucuuu

SEQ ID NO: 2819815 - RNA, 19 nt, Artificial Sequence
  Description of Artificial Sequence: Synthetic oligonucleotide
ccagcugguucuugagcau

SEQ ID NO: 2819816 - RNA, 19 nt, Artificial Sequence
  Description of Artificial Sequence: Synthetic oligonucleotide
cgucagcggaaccaguaau

SEQ ID NO: 2819817 - RNA, 19 nt, Artificial Sequence
  Description of Artificial Sequence: Synthetic oligonucleotide
cagguuccucucugcucuu

SEQ ID NO: 2819818 - RNA, 19 nt, Artificial Sequence
  Description of Artificial Sequence: Synthetic oligonucleotide
gcacguucagacaguccuu

SEQ ID NO: 2819819 - RNA, 19 nt, Artificial Sequence
  Description of Artificial Sequence: Synthetic oligonucleotide
cguuuccaugacagcuugu

SEQ ID NO: 2819820 - RNA, 19 nt, Artificial Sequence
  Description of Artificial Sequence: Synthetic oligonucleotide
cggaaccaguaauucuuuu

SEQ ID NO: 2819821 - RNA, 19 nt, Artificial Sequence
  Description of Artificial Sequence: Synthetic oligonucleotide
ccaugacagcuuguuucau

SEQ ID NO: 2819822 - RNA, 19 nt, Artificial Sequence
  Description of Artificial Sequence: Synthetic oligonucleotide
ccuuggcuuccacguacuu

SEQ ID NO: 2819823 - RNA, 19 nt, Artificial Sequence
  Description of Artificial Sequence: Synthetic oligonucleotide
ccuuggcagucgccugagu

SEQ ID NO: 2819824 - RNA, 19 nt, Artificial Sequence
  Description of Artificial Sequence: Synthetic oligonucleotide
cgacugcgccauguugggu

SEQ ID NO: 2819825 - RNA, 19 nt, Artificial Sequence
  Description of Artificial Sequence: Synthetic oligonucleotide
ccugaacggcuggcuggau

SEQ ID NO: 2819826 - RNA, 19 nt, Artificial Sequence
  Description of Artificial Sequence: Synthetic oligonucleotide
aauucauugaacugcagcc

SEQ ID NO: 2819827 - RNA, 19 nt, Artificial Sequence
  Description of Artificial Sequence: Synthetic oligonucleotide
aaauucauugaacugcagc

SEQ ID NO: 2819828 - RNA, 19 nt, Artificial Sequence
  Description of Artificial Sequence: Synthetic oligonucleotide
uuuacaaauucauugaacu

SEQ ID NO: 2819829 - RNA, 19 nt, Artificial Sequence
  Description of Artificial Sequence: Synthetic oligonucleotide
guuaccuuaauuuucuccg

SEQ ID NO: 2819830 - RNA, 19 nt, Artificial Sequence
  Description of Artificial Sequence: Synthetic oligonucleotide
ugaaaagugacuguuuugg

SEQ ID NO: 2819831 - RNA, 19 nt, Artificial Sequence
  Description of Artificial Sequence: Synthetic oligonucleotide
agaaucacgacaugaaggg

SEQ ID NO: 2819832 - RNA, 19 nt, Artificial Sequence
  Description of Artificial Sequence: Synthetic oligonucleotide
uguuaaauccuuugguagg

SEQ ID NO: 2819833 - RNA, 19 nt, Artificial Sequence
  Description of Artificial Sequence: Synthetic oligonucleotide
uacaaauucauugaacugc

SEQ ID NO: 2819834 - RNA, 19 nt, Artificial Sequence
  Description of Artificial Sequence: Synthetic oligonucleotide
gacaugaagggacugaaag

SEQ ID NO: 2819835 - RNA, 19 nt, Artificial Sequence
  Description of Artificial Sequence: Synthetic oligonucleotide
aaaccggugucccggaacc

SEQ ID NO: 2819836 - RNA, 19 nt, Artificial Sequence
  Description of Artificial Sequence: Synthetic oligonucleotide
ugaagggacugaaaggacg

SEQ ID NO: 2819837 - RNA, 19 nt, Artificial Sequence
  Description of Artificial Sequence: Synthetic oligonucleotide
aaucacgacaugaagggac

SEQ ID NO: 2819838 - RNA, 19 nt, Artificial Sequence
  Description of Artificial Sequence: Synthetic oligonucleotide
uuuucuccguguuaaaucc

SEQ ID NO: 2819839 - RNA, 19 nt, Artificial Sequence
  Description of Artificial Sequence: Synthetic oligonucleotide
uccaccacaaacacaaugc

SEQ ID NO: 2819840 - RNA, 19 nt, Artificial Sequence
  Description of Artificial Sequence: Synthetic oligonucleotide
ugaacugcagccuguauag

SEQ ID NO: 2819841 - RNA, 19 nt, Artificial Sequence
  Description of Artificial Sequence: Synthetic oligonucleotide
aaagugacuguuuuggaau

SEQ ID NO: 2819842 - RNA, 19 nt, Artificial Sequence
  Description of Artificial Sequence: Synthetic oligonucleotide
cagaaucacgacaugaagg

SEQ ID NO: 2819843 - RNA, 19 nt, Artificial Sequence
  Description of Artificial Sequence: Synthetic oligonucleotide
uggaagucuggucugacag

SEQ ID NO: 2819844 - RNA, 19 nt, Artificial Sequence
  Description of Artificial Sequence: Synthetic oligonucleotide
auucucucgacaucgacag

SEQ ID NO: 2819845 - RNA, 19 nt, Artificial Sequence
  Description of Artificial Sequence: Synthetic oligonucleotide
auuucucuugaccaccuac

SEQ ID NO: 2819846 - RNA, 19 nt, Artificial Sequence
  Description of Artificial Sequence: Synthetic oligonucleotide
aacgcguucuucuagucug

SEQ ID NO: 2819847 - RNA, 19 nt, Artificial Sequence
  Description of Artificial Sequence: Synthetic oligonucleotide
aaaagugacuguuuuggaa

SEQ ID NO: 2819848 - RNA, 19 nt, Artificial Sequence
  Description of Artificial Sequence: Synthetic oligonucleotide
acuguuuuggaauugccca

SEQ ID NO: 2819849 - RNA, 19 nt, Artificial Sequence
  Description of Artificial Sequence: Synthetic oligonucleotide
guauaugacuuccacagug

SEQ ID NO: 2819850 - RNA, 19 nt, Artificial Sequence
  Description of Artificial Sequence: Synthetic oligonucleotide
uccguguuaaauccuuugg

SEQ ID NO: 2819851 - RNA, 19 nt, Artificial Sequence
  Description of Artificial Sequence: Synthetic oligonucleotide
agaacuguugucuucccag

SEQ ID NO: 2819852 - RNA, 19 nt, Artificial Sequence
  Description of Artificial Sequence: Synthetic oligonucleotide
ucuucuagucugcuuacag

SEQ ID NO: 2819853 - RNA, 19 nt, Artificial Sequence
  Description of Artificial Sequence: Synthetic oligonucleotide
uuaauuuucuccguguuaa

SEQ ID NO: 2819854 - RNA, 19 nt, Artificial Sequence
  Description of Artificial Sequence: Synthetic oligonucleotide
aauccuuugguaggcaccg

SEQ ID NO: 2819855 - RNA, 19 nt, Artificial Sequence
  Description of Artificial Sequence: Synthetic oligonucleotide
aaauccuuugguaggcacc

SEQ ID NO: 2819856 - RNA, 19 nt, Artificial Sequence
  Description of Artificial Sequence: Synthetic oligonucleotide
auuuacaaauucauugaac

SEQ ID NO: 2819857 - RNA, 19 nt, Artificial Sequence
  Description of Artificial Sequence: Synthetic oligonucleotide
uauuuacaaauucauugaa

SEQ ID NO: 2819858 - RNA, 19 nt, Artificial Sequence
  Description of Artificial Sequence: Synthetic oligonucleotide
acaugaagggacugaaagg

SEQ ID NO: 2819859 - RNA, 19 nt, Artificial Sequence
  Description of Artificial Sequence: Synthetic oligonucleotide
uuuggaauugcccaagguu

SEQ ID NO: 2819860 - RNA, 19 nt, Artificial Sequence
  Description of Artificial Sequence: Synthetic oligonucleotide
ggguauaugacuuccacag

SEQ ID NO: 2819861 - RNA, 19 nt, Artificial Sequence
  Description of Artificial Sequence: Synthetic oligonucleotide
aacuguugucuucccagcg

SEQ ID NO: 2819862 - RNA, 19 nt, Artificial Sequence
  Description of Artificial Sequence: Synthetic oligonucleotide
uuggaauugcccaagguua

SEQ ID NO: 2819863 - RNA, 19 nt, Artificial Sequence
  Description of Artificial Sequence: Synthetic oligonucleotide
guauuuacaaauucauuga

SEQ ID NO: 2819864 - RNA, 19 nt, Artificial Sequence
  Description of Artificial Sequence: Synthetic oligonucleotide
uacagucucucuuccaggg

SEQ ID NO: 2819865 - RNA, 19 nt, Artificial Sequence
  Description of Artificial Sequence: Synthetic oligonucleotide
uucuagucugcuuacaguc

SEQ ID NO: 2819866 - RNA, 19 nt, Artificial Sequence
  Description of Artificial Sequence: Synthetic oligonucleotide
cuuaauuucucuugaccac

SEQ ID NO: 2819867 - RNA, 19 nt, Artificial Sequence
  Description of Artificial Sequence: Synthetic oligonucleotide
acuguugucuucccagcgc

SEQ ID NO: 2819868 - RNA, 19 nt, Artificial Sequence
  Description of Artificial Sequence: Synthetic oligonucleotide
gacagaguccaccacaaac

SEQ ID NO: 2819869 - RNA, 19 nt, Artificial Sequence
  Description of Artificial Sequence: Synthetic oligonucleotide
uuaauuucucuugaccacc

SEQ ID NO: 2819870 - RNA, 19 nt, Artificial Sequence
  Description of Artificial Sequence: Synthetic oligonucleotide
cuuacagucucucuuccag

SEQ ID NO: 2819871 - RNA, 19 nt, Artificial Sequence
  Description of Artificial Sequence: Synthetic oligonucleotide
ucucucgacaucgacagag

SEQ ID NO: 2819872 - RNA, 19 nt, Artificial Sequence
  Description of Artificial Sequence: Synthetic oligonucleotide
cguauuuacaaauucauug

SEQ ID NO: 2819873 - RNA, 19 nt, Artificial Sequence
  Description of Artificial Sequence: Synthetic oligonucleotide
uuucucuugaccaccuaca

SEQ ID NO: 2819874 - RNA, 19 nt, Artificial Sequence
  Description of Artificial Sequence: Synthetic oligonucleotide
uccacaguggccuuaauuu

SEQ ID NO: 2819875 - RNA, 19 nt, Artificial Sequence
  Description of Artificial Sequence: Synthetic oligonucleotide
ugugcaucggguauaugac

SEQ ID NO: 2819876 - RNA, 19 nt, Artificial Sequence
  Description of Artificial Sequence: Synthetic oligonucleotide
gaagggacugaaaggacgg

SEQ ID NO: 2819877 - RNA, 19 nt, Artificial Sequence
  Description of Artificial Sequence: Synthetic oligonucleotide
aaugccaucugugcaucgg

SEQ ID NO: 2819878 - RNA, 19 nt, Artificial Sequence
  Description of Artificial Sequence: Synthetic oligonucleotide
ucgacaucgacagagucca

SEQ ID NO: 2819879 - RNA, 19 nt, Artificial Sequence
  Description of Artificial Sequence: Synthetic oligonucleotide
ucugcuuacagucucucuu

SEQ ID NO: 2819880 - RNA, 19 nt, Artificial Sequence
  Description of Artificial Sequence: Synthetic oligonucleotide
uuacagucucucuuccagg

SEQ ID NO: 2819881 - RNA, 19 nt, Artificial Sequence
  Description of Artificial Sequence: Synthetic oligonucleotide
caagguuaccuuaauuuuc

SEQ ID NO: 2819882 - RNA, 19 nt, Artificial Sequence
  Description of Artificial Sequence: Synthetic oligonucleotide
auuccccauuuccagcugc

SEQ ID NO: 2819883 - RNA, 19 nt, Artificial Sequence
  Description of Artificial Sequence: Synthetic oligonucleotide
aacugcagccuguauagaa

SEQ ID NO: 2819884 - RNA, 19 nt, Artificial Sequence
  Description of Artificial Sequence: Synthetic oligonucleotide
uugaacugcagccuguaua

SEQ ID NO: 2819885 - RNA, 19 nt, Artificial Sequence
  Description of Artificial Sequence: Synthetic oligonucleotide
aagguuaccuuaauuuucu

SEQ ID NO: 2819886 - RNA, 19 nt, Artificial Sequence
  Description of Artificial Sequence: Synthetic oligonucleotide
uggucugacaguccauucc

SEQ ID NO: 2819887 - RNA, 19 nt, Artificial Sequence
  Description of Artificial Sequence: Synthetic oligonucleotide
aaacacaaugccaucugug

SEQ ID NO: 2819888 - RNA, 19 nt, Artificial Sequence
  Description of Artificial Sequence: Synthetic oligonucleotide
cucgacaucgacagagucc

SEQ ID NO: 2819889 - RNA, 19 nt, Artificial Sequence
  Description of Artificial Sequence: Synthetic oligonucleotide
agugaaaagugacuguuuu

SEQ ID NO: 2819890 - RNA, 19 nt, Artificial Sequence
  Description of Artificial Sequence: Synthetic oligonucleotide
uuuuggaauugcccaaggu

SEQ ID NO: 2819891 - RNA, 19 nt, Artificial Sequence
  Description of Artificial Sequence: Synthetic oligonucleotide
cagaagugaaaagugacug

SEQ ID NO: 2819892 - RNA, 19 nt, Artificial Sequence
  Description of Artificial Sequence: Synthetic oligonucleotide
acaaacacaaugccaucug

SEQ ID NO: 2819893 - RNA, 19 nt, Artificial Sequence
  Description of Artificial Sequence: Synthetic oligonucleotide
uaccuuaauuuucuccgug

SEQ ID NO: 2819894 - RNA, 19 nt, Artificial Sequence
  Description of Artificial Sequence: Synthetic oligonucleotide
guuaaauccuuugguaggc

SEQ ID NO: 2819895 - RNA, 19 nt, Artificial Sequence
  Description of Artificial Sequence: Synthetic oligonucleotide
agaagugaaaagugacugu

SEQ ID NO: 2819896 - RNA, 19 nt, Artificial Sequence
  Description of Artificial Sequence: Synthetic oligonucleotide
uuuccagcugcaaaccggu

SEQ ID NO: 2819897 - RNA, 19 nt, Artificial Sequence
  Description of Artificial Sequence: Synthetic oligonucleotide
ucccagaagugaaaaguga

SEQ ID NO: 2819898 - RNA, 19 nt, Artificial Sequence
  Description of Artificial Sequence: Synthetic oligonucleotide
gacuguuuuggaauugccc

SEQ ID NO: 2819899 - RNA, 19 nt, Artificial Sequence
  Description of Artificial Sequence: Synthetic oligonucleotide
acaggauggaagucugguc

SEQ ID NO: 2819900 - RNA, 19 nt, Artificial Sequence
  Description of Artificial Sequence: Synthetic oligonucleotide
uaauuucucuugaccaccu

SEQ ID NO: 2819901 - RNA, 19 nt, Artificial Sequence
  Description of Artificial Sequence: Synthetic oligonucleotide
ucuagucugcuuacagucu

SEQ ID NO: 2819902 - RNA, 19 nt, Artificial Sequence
  Description of Artificial Sequence: Synthetic oligonucleotide
ugacuguuuuggaauugcc

SEQ ID NO: 2819903 - RNA, 19 nt, Artificial Sequence
  Description of Artificial Sequence: Synthetic oligonucleotide
gguuaccuuaauuuucucc

SEQ ID NO: 2819904 - RNA, 19 nt, Artificial Sequence
  Description of Artificial Sequence: Synthetic oligonucleotide
uguuuuggaauugcccaag

SEQ ID NO: 2819905 - RNA, 19 nt, Artificial Sequence
  Description of Artificial Sequence: Synthetic oligonucleotide
accaccuacaucccagaag

SEQ ID NO: 2819906 - RNA, 19 nt, Artificial Sequence
  Description of Artificial Sequence: Synthetic oligonucleotide
caugaagggacugaaagga

SEQ ID NO: 2819907 - RNA, 19 nt, Artificial Sequence
  Description of Artificial Sequence: Synthetic oligonucleotide
aggacggcagacuggacag

SEQ ID NO: 2819908 - RNA, 19 nt, Artificial Sequence
  Description of Artificial Sequence: Synthetic oligonucleotide
ggaucgagcuaccagacug

SEQ ID NO: 2819909 - RNA, 19 nt, Artificial Sequence
  Description of Artificial Sequence: Synthetic oligonucleotide
caguccauuccccauuucc

SEQ ID NO: 2819910 - RNA, 19 nt, Artificial Sequence
  Description of Artificial Sequence: Synthetic oligonucleotide
auuuccagcugcaaaccgg

SEQ ID NO: 2819911 - RNA, 19 nt, Artificial Sequence
  Description of Artificial Sequence: Synthetic oligonucleotide
cugugcaucggguauauga

SEQ ID NO: 2819912 - RNA, 19 nt, Artificial Sequence
  Description of Artificial Sequence: Synthetic oligonucleotide
ucggguauaugacuuccac

SEQ ID NO: 2819913 - RNA, 19 nt, Artificial Sequence
  Description of Artificial Sequence: Synthetic oligonucleotide
guuuuggaauugcccaagg

SEQ ID NO: 2819914 - RNA, 19 nt, Artificial Sequence
  Description of Artificial Sequence: Synthetic oligonucleotide
uuugguaggcaccguauuu

SEQ ID NO: 2819915 - RNA, 19 nt, Artificial Sequence
  Description of Artificial Sequence: Synthetic oligonucleotide
uggaauugcccaagguuac

SEQ ID NO: 2819916 - RNA, 19 nt, Artificial Sequence
  Description of Artificial Sequence: Synthetic oligonucleotide
guggccuuaauuucucuug

SEQ ID NO: 2819917 - RNA, 19 nt, Artificial Sequence
  Description of Artificial Sequence: Synthetic oligonucleotide
guaggcaccguauuuacaa

SEQ ID NO: 2819918 - RNA, 19 nt, Artificial Sequence
  Description of Artificial Sequence: Synthetic oligonucleotide
ucugacaguccauucccca

SEQ ID NO: 2819919 - RNA, 19 nt, Artificial Sequence
  Description of Artificial Sequence: Synthetic oligonucleotide
ugucccggaaccgaacgcg

SEQ ID NO: 2819920 - RNA, 19 nt, Artificial Sequence
  Description of Artificial Sequence: Synthetic oligonucleotide
cugaaaggacggcagacug

SEQ ID NO: 2819921 - RNA, 19 nt, Artificial Sequence
  Description of Artificial Sequence: Synthetic oligonucleotide
aucgacagaguccaccaca

SEQ ID NO: 2819922 - RNA, 19 nt, Artificial Sequence
  Description of Artificial Sequence: Synthetic oligonucleotide
cauuuccagcugcaaaccg

SEQ ID NO: 2819923 - RNA, 19 nt, Artificial Sequence
  Description of Artificial Sequence: Synthetic oligonucleotide
acugcuggcccacgguccc

SEQ ID NO: 2819924 - RNA, 19 nt, Artificial Sequence
  Description of Artificial Sequence: Synthetic oligonucleotide
acaucgacagaguccacca

SEQ ID NO: 2819925 - RNA, 19 nt, Artificial Sequence
  Description of Artificial Sequence: Synthetic oligonucleotide
accacaaacacaaugccau

SEQ ID NO: 2819926 - RNA, 19 nt, Artificial Sequence
  Description of Artificial Sequence: Synthetic oligonucleotide
uggacaggauggaagucug

SEQ ID NO: 2819927 - RNA, 19 nt, Artificial Sequence
  Description of Artificial Sequence: Synthetic oligonucleotide
gaaaagugacuguuuugga

SEQ ID NO: 2819928 - RNA, 19 nt, Artificial Sequence
  Description of Artificial Sequence: Synthetic oligonucleotide
gaacuguugucuucccagc

SEQ ID NO: 2819929 - RNA, 19 nt, Artificial Sequence
  Description of Artificial Sequence: Synthetic oligonucleotide
uggccuuaauuucucuuga

SEQ ID NO: 2819930 - RNA, 19 nt, Artificial Sequence
  Description of Artificial Sequence: Synthetic oligonucleotide
ugcaucggguauaugacuu

SEQ ID NO: 2819931 - RNA, 19 nt, Artificial Sequence
  Description of Artificial Sequence: Synthetic oligonucleotide
gugaaaagugacuguuuug

SEQ ID NO: 2819932 - RNA, 19 nt, Artificial Sequence
  Description of Artificial Sequence: Synthetic oligonucleotide
uuaccuuaauuuucuccgu

SEQ ID NO: 2819933 - RNA, 19 nt, Artificial Sequence
  Description of Artificial Sequence: Synthetic oligonucleotide
ugcuuacagucucucuucc

SEQ ID NO: 2819934 - RNA, 19 nt, Artificial Sequence
  Description of Artificial Sequence: Synthetic oligonucleotide
accuuaauuuucuccgugu

SEQ ID NO: 2819935 - RNA, 19 nt, Artificial Sequence
  Description of Artificial Sequence: Synthetic oligonucleotide
acaaauucauugaacugca

SEQ ID NO: 2819936 - RNA, 19 nt, Artificial Sequence
  Description of Artificial Sequence: Synthetic oligonucleotide
acugcagccuguauagaac

SEQ ID NO: 2819937 - RNA, 19 nt, Artificial Sequence
  Description of Artificial Sequence: Synthetic oligonucleotide
aagggacugaaaggacggc

SEQ ID NO: 2819938 - RNA, 19 nt, Artificial Sequence
  Description of Artificial Sequence: Synthetic oligonucleotide
gacaucgacagaguccacc

SEQ ID NO: 2819939 - RNA, 19 nt, Artificial Sequence
  Description of Artificial Sequence: Synthetic oligonucleotide
uagaacuguugucuuccca

SEQ ID NO: 2819940 - RNA, 19 nt, Artificial Sequence
  Description of Artificial Sequence: Synthetic oligonucleotide
acaucccagaagugaaaag

SEQ ID NO: 2819941 - RNA, 19 nt, Artificial Sequence
  Description of Artificial Sequence: Synthetic oligonucleotide
gaagucuggucugacaguc

SEQ ID NO: 2819942 - RNA, 19 nt, Artificial Sequence
  Description of Artificial Sequence: Synthetic oligonucleotide
uccauuccccauuuccagc

SEQ ID NO: 2819943 - RNA, 19 nt, Artificial Sequence
  Description of Artificial Sequence: Synthetic oligonucleotide
agacugcuggcccacgguc

SEQ ID NO: 2819944 - RNA, 19 nt, Artificial Sequence
  Description of Artificial Sequence: Synthetic oligonucleotide
guccaccacaaacacaaug

SEQ ID NO: 2819945 - RNA, 19 nt, Artificial Sequence
  Description of Artificial Sequence: Synthetic oligonucleotide
aagugacuguuuuggaauu

SEQ ID NO: 2819946 - RNA, 19 nt, Artificial Sequence
  Description of Artificial Sequence: Synthetic oligonucleotide
augccaucugugcaucggg

SEQ ID NO: 2819947 - RNA, 19 nt, Artificial Sequence
  Description of Artificial Sequence: Synthetic oligonucleotide
cgagcuaccagacugcugg

SEQ ID NO: 2819948 - RNA, 19 nt, Artificial Sequence
  Description of Artificial Sequence: Synthetic oligonucleotide
guccauuccccauuuccag

SEQ ID NO: 2819949 - RNA, 19 nt, Artificial Sequence
  Description of Artificial Sequence: Synthetic oligonucleotide
cauucucucgacaucgaca

SEQ ID NO: 2819950 - RNA, 19 nt, Artificial Sequence
  Description of Artificial Sequence: Synthetic oligonucleotide
auucauugaacugcagccu

SEQ ID NO: 2819951 - RNA, 19 nt, Artificial Sequence
  Description of Artificial Sequence: Synthetic oligonucleotide
ucgacagaguccaccacaa

SEQ ID NO: 2819952 - RNA, 19 nt, Artificial Sequence
  Description of Artificial Sequence: Synthetic oligonucleotide
acagucucucuuccagggg

SEQ ID NO: 2819953 - RNA, 19 nt, Artificial Sequence
  Description of Artificial Sequence: Synthetic oligonucleotide
aagucuggucugacagucc

SEQ ID NO: 2819954 - RNA, 19 nt, Artificial Sequence
  Description of Artificial Sequence: Synthetic oligonucleotide
uucucuugaccaccuacau

SEQ ID NO: 2819955 - RNA, 19 nt, Artificial Sequence
  Description of Artificial Sequence: Synthetic oligonucleotide
ccuuaauuucucuugacca

SEQ ID NO: 2819956 - RNA, 19 nt, Artificial Sequence
  Description of Artificial Sequence: Synthetic oligonucleotide
guuuuggcuucuuccauuc

SEQ ID NO: 2819957 - RNA, 19 nt, Artificial Sequence
  Description of Artificial Sequence: Synthetic oligonucleotide
ucucgacaucgacagaguc

SEQ ID NO: 2819958 - RNA, 19 nt, Artificial Sequence
  Description of Artificial Sequence: Synthetic oligonucleotide
agcugcaaaccgguguccc

SEQ ID NO: 2819959 - RNA, 19 nt, Artificial Sequence
  Description of Artificial Sequence: Synthetic oligonucleotide
ugagccgccggggaguccg

SEQ ID NO: 2819960 - RNA, 19 nt, Artificial Sequence
  Description of Artificial Sequence: Synthetic oligonucleotide
uguugucuucccagcgcag

SEQ ID NO: 2819961 - RNA, 19 nt, Artificial Sequence
  Description of Artificial Sequence: Synthetic oligonucleotide
accuacaucccagaaguga

SEQ ID NO: 2819962 - RNA, 19 nt, Artificial Sequence
  Description of Artificial Sequence: Synthetic oligonucleotide
caccguauuuacaaauuca

SEQ ID NO: 2819963 - RNA, 19 nt, Artificial Sequence
  Description of Artificial Sequence: Synthetic oligonucleotide
uuccacaguggccuuaauu

SEQ ID NO: 2819964 - RNA, 19 nt, Artificial Sequence
  Description of Artificial Sequence: Synthetic oligonucleotide
uuucuccguguuaaauccu

SEQ ID NO: 2819965 - RNA, 19 nt, Artificial Sequence
  Description of Artificial Sequence: Synthetic oligonucleotide
ggucugacaguccauuccc

SEQ ID NO: 2819966 - RNA, 19 nt, Artificial Sequence
  Description of Artificial Sequence: Synthetic oligonucleotide
caaauucauugaacugcag

SEQ ID NO: 2819967 - RNA, 19 nt, Artificial Sequence
  Description of Artificial Sequence: Synthetic oligonucleotide
uacaucccagaagugaaaa

SEQ ID NO: 2819968 - RNA, 19 nt, Artificial Sequence
  Description of Artificial Sequence: Synthetic oligonucleotide
aauugcccaagguuaccuu

SEQ ID NO: 2819969 - RNA, 19 nt, Artificial Sequence
  Description of Artificial Sequence: Synthetic oligonucleotide
cuccguguuaaauccuuug

SEQ ID NO: 2819970 - RNA, 19 nt, Artificial Sequence
  Description of Artificial Sequence: Synthetic oligonucleotide
aggauggaagucuggucug

SEQ ID NO: 2819971 - RNA, 19 nt, Artificial Sequence
  Description of Artificial Sequence: Synthetic oligonucleotide
uuaaauccuuugguaggca

SEQ ID NO: 2819972 - RNA, 19 nt, Artificial Sequence
  Description of Artificial Sequence: Synthetic oligonucleotide
accguauuuacaaauucau

SEQ ID NO: 2819973 - RNA, 19 nt, Artificial Sequence
  Description of Artificial Sequence: Synthetic oligonucleotide
augaagggacugaaaggac

SEQ ID NO: 2819974 - RNA, 19 nt, Artificial Sequence
  Description of Artificial Sequence: Synthetic oligonucleotide
ugcagccuguauagaacug

SEQ ID NO: 2819975 - RNA, 19 nt, Artificial Sequence
  Description of Artificial Sequence: Synthetic oligonucleotide
ugguaggcaccguauuuac

SEQ ID NO: 2819976 - RNA, 19 nt, Artificial Sequence
  Description of Artificial Sequence: Synthetic oligonucleotide
aucccagaagugaaaagug

SEQ ID NO: 2819977 - RNA, 19 nt, Artificial Sequence
  Description of Artificial Sequence: Synthetic oligonucleotide
caucggguauaugacuucc

SEQ ID NO: 2819978 - RNA, 19 nt, Artificial Sequence
  Description of Artificial Sequence: Synthetic oligonucleotide
gacugaaaggacggcagac

SEQ ID NO: 2819979 - RNA, 19 nt, Artificial Sequence
  Description of Artificial Sequence: Synthetic oligonucleotide
accgaacgcguucuucuag

SEQ ID NO: 2819980 - RNA, 19 nt, Artificial Sequence
  Description of Artificial Sequence: Synthetic oligonucleotide
uucuccguguuaaauccuu

SEQ ID NO: 2819981 - RNA, 19 nt, Artificial Sequence
  Description of Artificial Sequence: Synthetic oligonucleotide
cugcuuacagucucucuuc

SEQ ID NO: 2819982 - RNA, 19 nt, Artificial Sequence
  Description of Artificial Sequence: Synthetic oligonucleotide
acaaugccaucugugcauc

SEQ ID NO: 2819983 - RNA, 19 nt, Artificial Sequence
  Description of Artificial Sequence: Synthetic oligonucleotide
agguuaccuuaauuuucuc

SEQ ID NO: 2819984 - RNA, 19 nt, Artificial Sequence
  Description of Artificial Sequence: Synthetic oligonucleotide
agcuaccagacugcuggcc

SEQ ID NO: 2819985 - RNA, 19 nt, Artificial Sequence
  Description of Artificial Sequence: Synthetic oligonucleotide
gaucgagcuaccagacugc

SEQ ID NO: 2819986 - RNA, 19 nt, Artificial Sequence
  Description of Artificial Sequence: Synthetic oligonucleotide
auugcccaagguuaccuua

SEQ ID NO: 2819987 - RNA, 19 nt, Artificial Sequence
  Description of Artificial Sequence: Synthetic oligonucleotide
gcuucuuccauucucucga

SEQ ID NO: 2819988 - RNA, 19 nt, Artificial Sequence
  Description of Artificial Sequence: Synthetic oligonucleotide
gugacuguuuuggaauugc

SEQ ID NO: 2819989 - RNA, 19 nt, Artificial Sequence
  Description of Artificial Sequence: Synthetic oligonucleotide
acugaaaggacggcagacu

SEQ ID NO: 2819990 - RNA, 19 nt, Artificial Sequence
  Description of Artificial Sequence: Synthetic oligonucleotide
uaauuuucuccguguuaaa

SEQ ID NO: 2819991 - RNA, 19 nt, Artificial Sequence
  Description of Artificial Sequence: Synthetic oligonucleotide
uugcccaagguuaccuuaa

SEQ ID NO: 2819992 - RNA, 19 nt, Artificial Sequence
  Description of Artificial Sequence: Synthetic oligonucleotide
gcaguccagacccagaauc

SEQ ID NO: 2819993 - RNA, 19 nt, Artificial Sequence
  Description of Artificial Sequence: Synthetic oligonucleotide
cccauuuccagcugcaaac

SEQ ID NO: 2819994 - RNA, 19 nt, Artificial Sequence
  Description of Artificial Sequence: Synthetic oligonucleotide
cugcaaaccggugucccgg

SEQ ID NO: 2819995 - RNA, 19 nt, Artificial Sequence
  Description of Artificial Sequence: Synthetic oligonucleotide
ggugucccggaaccgaacg

SEQ ID NO: 2819996 - RNA, 19 nt, Artificial Sequence
  Description of Artificial Sequence: Synthetic oligonucleotide
agacccagaaucacgacau

SEQ ID NO: 2819997 - RNA, 19 nt, Artificial Sequence
  Description of Artificial Sequence: Synthetic oligonucleotide
agcggcgaggccugacggc

SEQ ID NO: 2819998 - RNA, 19 nt, Artificial Sequence
  Description of Artificial Sequence: Synthetic oligonucleotide
uugucuucccagcgcaguc

SEQ ID NO: 2819999 - RNA, 19 nt, Artificial Sequence
  Description of Artificial Sequence: Synthetic oligonucleotide
cuuaauuuucuccguguua

SEQ ID NO: 2820000 - RNA, 19 nt, Artificial Sequence
  Description of Artificial Sequence: Synthetic oligonucleotide
guucuucuagucugcuuac

SEQ ID NO: 2820001 - RNA, 19 nt, Artificial Sequence
  Description of Artificial Sequence: Synthetic oligonucleotide
aauuucucuugaccaccua

SEQ ID NO: 2820002 - RNA, 19 nt, Artificial Sequence
  Description of Artificial Sequence: Synthetic oligonucleotide
aguggccuuaauuucucuu

SEQ ID NO: 2820003 - RNA, 19 nt, Artificial Sequence
  Description of Artificial Sequence: Synthetic oligonucleotide
gaaccgaacgcguucuucu

SEQ ID NO: 2820004 - RNA, 19 nt, Artificial Sequence
  Description of Artificial Sequence: Synthetic oligonucleotide
uugguaggcaccguauuua

SEQ ID NO: 2820005 - RNA, 19 nt, Artificial Sequence
  Description of Artificial Sequence: Synthetic oligonucleotide
uagucugcuuacagucucu

SEQ ID NO: 2820006 - RNA, 19 nt, Artificial Sequence
  Description of Artificial Sequence: Synthetic oligonucleotide
uccuuugguaggcaccgua

SEQ ID NO: 2820007 - RNA, 19 nt, Artificial Sequence
  Description of Artificial Sequence: Synthetic oligonucleotide
auggaagucuggucugaca

SEQ ID NO: 2820008 - RNA, 19 nt, Artificial Sequence
  Description of Artificial Sequence: Synthetic oligonucleotide
aggcaccguauuuacaaau

SEQ ID NO: 2820009 - RNA, 19 nt, Artificial Sequence
  Description of Artificial Sequence: Synthetic oligonucleotide
aguccauuccccauuucca

SEQ ID NO: 2820010 - RNA, 19 nt, Artificial Sequence
  Description of Artificial Sequence: Synthetic oligonucleotide
uuccccauuuccagcugca

SEQ ID NO: 2820011 - RNA, 19 nt, Artificial Sequence
  Description of Artificial Sequence: Synthetic oligonucleotide
ggcagacuggacaggaugg

SEQ ID NO: 2820012 - RNA, 19 nt, Artificial Sequence
  Description of Artificial Sequence: Synthetic oligonucleotide
agugacuguuuuggaauug

SEQ ID NO: 2820013 - RNA, 19 nt, Artificial Sequence
  Description of Artificial Sequence: Synthetic oligonucleotide
ugccaucugugcaucgggu

SEQ ID NO: 2820014 - RNA, 19 nt, Artificial Sequence
  Description of Artificial Sequence: Synthetic oligonucleotide
caaaccggugucccggaac

SEQ ID NO: 2820015 - RNA, 19 nt, Artificial Sequence
  Description of Artificial Sequence: Synthetic oligonucleotide
uccauucucucgacaucga

SEQ ID NO: 2820016 - RNA, 19 nt, Artificial Sequence
  Description of Artificial Sequence: Synthetic oligonucleotide
acaguggccuuaauuucuc

SEQ ID NO: 2820017 - RNA, 19 nt, Artificial Sequence
  Description of Artificial Sequence: Synthetic oligonucleotide
acccagaaucacgacauga

SEQ ID NO: 2820018 - RNA, 19 nt, Artificial Sequence
  Description of Artificial Sequence: Synthetic oligonucleotide
gaagugaaaagugacuguu

SEQ ID NO: 2820019 - RNA, 19 nt, Artificial Sequence
  Description of Artificial Sequence: Synthetic oligonucleotide
cccagcgcaguccagaccc

SEQ ID NO: 2820020 - RNA, 19 nt, Artificial Sequence
  Description of Artificial Sequence: Synthetic oligonucleotide
aagugaaaagugacuguuu

SEQ ID NO: 2820021 - RNA, 19 nt, Artificial Sequence
  Description of Artificial Sequence: Synthetic oligonucleotide
caaugccaucugugcaucg

SEQ ID NO: 2820022 - RNA, 19 nt, Artificial Sequence
  Description of Artificial Sequence: Synthetic oligonucleotide
gcuaccagacugcuggccc

SEQ ID NO: 2820023 - RNA, 19 nt, Artificial Sequence
  Description of Artificial Sequence: Synthetic oligonucleotide
ccagaaucacgacaugaag

SEQ ID NO: 2820024 - RNA, 19 nt, Artificial Sequence
  Description of Artificial Sequence: Synthetic oligonucleotide
caggauggaagucuggucu

SEQ ID NO: 2820025 - RNA, 19 nt, Artificial Sequence
  Description of Artificial Sequence: Synthetic oligonucleotide
ucgagcuaccagacugcug

SEQ ID NO: 2820026 - RNA, 19 nt, Artificial Sequence
  Description of Artificial Sequence: Synthetic oligonucleotide
cagacccagaaucacgaca

SEQ ID NO: 2820027 - RNA, 19 nt, Artificial Sequence
  Description of Artificial Sequence: Synthetic oligonucleotide
ugaccaccuacaucccaga

SEQ ID NO: 2820028 - RNA, 19 nt, Artificial Sequence
  Description of Artificial Sequence: Synthetic oligonucleotide
ucuggucugacaguccauu

SEQ ID NO: 2820029 - RNA, 19 nt, Artificial Sequence
  Description of Artificial Sequence: Synthetic oligonucleotide
auugaacugcagccuguau

SEQ ID NO: 2820030 - RNA, 19 nt, Artificial Sequence
  Description of Artificial Sequence: Synthetic oligonucleotide
agggacugaaaggacggca

SEQ ID NO: 2820031 - RNA, 19 nt, Artificial Sequence
  Description of Artificial Sequence: Synthetic oligonucleotide
aaaggacggcagacuggac

SEQ ID NO: 2820032 - RNA, 19 nt, Artificial Sequence
  Description of Artificial Sequence: Synthetic oligonucleotide
aaccgaacgcguucuucua

SEQ ID NO: 2820033 - RNA, 19 nt, Artificial Sequence
  Description of Artificial Sequence: Synthetic oligonucleotide
uaggcaccguauuuacaaa

SEQ ID NO: 2820034 - RNA, 19 nt, Artificial Sequence
  Description of Artificial Sequence: Synthetic oligonucleotide
gauggaagucuggucugac

SEQ ID NO: 2820035 - RNA, 19 nt, Artificial Sequence
  Description of Artificial Sequence: Synthetic oligonucleotide
gaaucacgacaugaaggga

SEQ ID NO: 2820036 - RNA, 19 nt, Artificial Sequence
  Description of Artificial Sequence: Synthetic oligonucleotide
cuguugucuucccagcgca

SEQ ID NO: 2820037 - RNA, 19 nt, Artificial Sequence
  Description of Artificial Sequence: Synthetic oligonucleotide
cuucuuccauucucucgac

SEQ ID NO: 2820038 - RNA, 19 nt, Artificial Sequence
  Description of Artificial Sequence: Synthetic oligonucleotide
gacugcuggcccacggucc

SEQ ID NO: 2820039 - RNA, 19 nt, Artificial Sequence
  Description of Artificial Sequence: Synthetic oligonucleotide
aucacgacaugaagggacu

SEQ ID NO: 2820040 - RNA, 19 nt, Artificial Sequence
  Description of Artificial Sequence: Synthetic oligonucleotide
ccuguauagaacuguuguc

SEQ ID NO: 2820041 - RNA, 19 nt, Artificial Sequence
  Description of Artificial Sequence: Synthetic oligonucleotide
caucccagaagugaaaagu

SEQ ID NO: 2820042 - RNA, 19 nt, Artificial Sequence
  Description of Artificial Sequence: Synthetic oligonucleotide
ucuccguguuaaauccuuu

SEQ ID NO: 2820043 - RNA, 19 nt, Artificial Sequence
  Description of Artificial Sequence: Synthetic oligonucleotide
uucccagcgcaguccagac

SEQ ID NO: 2820044 - RNA, 19 nt, Artificial Sequence
  Description of Artificial Sequence: Synthetic oligonucleotide
gggacugaaaggacggcag

SEQ ID NO: 2820045 - RNA, 19 nt, Artificial Sequence
  Description of Artificial Sequence: Synthetic oligonucleotide
aaccggugucccggaaccg

SEQ ID NO: 2820046 - RNA, 19 nt, Artificial Sequence
  Description of Artificial Sequence: Synthetic oligonucleotide
cuggucugacaguccauuc

SEQ ID NO: 2820047 - RNA, 19 nt, Artificial Sequence
  Description of Artificial Sequence: Synthetic oligonucleotide
gaguccgucccgggcagcg

SEQ ID NO: 2820048 - RNA, 19 nt, Artificial Sequence
  Description of Artificial Sequence: Synthetic oligonucleotide
cuguuuuggaauugcccaa

SEQ ID NO: 2820049 - RNA, 19 nt, Artificial Sequence
  Description of Artificial Sequence: Synthetic oligonucleotide
gcaccguauuuacaaauuc

SEQ ID NO: 2820050 - RNA, 19 nt, Artificial Sequence
  Description of Artificial Sequence: Synthetic oligonucleotide
ugcaaaccggugucccgga

SEQ ID NO: 2820051 - RNA, 19 nt, Artificial Sequence
  Description of Artificial Sequence: Synthetic oligonucleotide
acgacaugaagggacugaa

SEQ ID NO: 2820052 - RNA, 19 nt, Artificial Sequence
  Description of Artificial Sequence: Synthetic oligonucleotide
gaacgcguucuucuagucu

SEQ ID NO: 2820053 - RNA, 19 nt, Artificial Sequence
  Description of Artificial Sequence: Synthetic oligonucleotide
gccuguauagaacuguugu

SEQ ID NO: 2820054 - RNA, 19 nt, Artificial Sequence
  Description of Artificial Sequence: Synthetic oligonucleotide
gacaggauggaagucuggu

SEQ ID NO: 2820055 - RNA, 19 nt, Artificial Sequence
  Description of Artificial Sequence: Synthetic oligonucleotide
ucacgacaugaagggacug

SEQ ID NO: 2820056 - RNA, 19 nt, Artificial Sequence
  Description of Artificial Sequence: Synthetic oligonucleotide
ucccagcgcaguccagacc

SEQ ID NO: 2820057 - RNA, 19 nt, Artificial Sequence
  Description of Artificial Sequence: Synthetic oligonucleotide
gaauugcccaagguuaccu

SEQ ID NO: 2820058 - RNA, 19 nt, Artificial Sequence
  Description of Artificial Sequence: Synthetic oligonucleotide
gacggcagacuggacagga

SEQ ID NO: 2820059 - RNA, 19 nt, Artificial Sequence
  Description of Artificial Sequence: Synthetic oligonucleotide
gcugcaaaccggugucccg

SEQ ID NO: 2820060 - RNA, 19 nt, Artificial Sequence
  Description of Artificial Sequence: Synthetic oligonucleotide
gacccagaaucacgacaug

SEQ ID NO: 2820061 - RNA, 19 nt, Artificial Sequence
  Description of Artificial Sequence: Synthetic oligonucleotide
acgcguucuucuagucugc

SEQ ID NO: 2820062 - RNA, 19 nt, Artificial Sequence
  Description of Artificial Sequence: Synthetic oligonucleotide
cacaguggccuuaauuucu

SEQ ID NO: 2820063 - RNA, 19 nt, Artificial Sequence
  Description of Artificial Sequence: Synthetic oligonucleotide
cuucuagucugcuuacagu

SEQ ID NO: 2820064 - RNA, 19 nt, Artificial Sequence
  Description of Artificial Sequence: Synthetic oligonucleotide
uucucucgacaucgacaga

SEQ ID NO: 2820065 - RNA, 19 nt, Artificial Sequence
  Description of Artificial Sequence: Synthetic oligonucleotide
cagcggcgaggccugacgg

SEQ ID NO: 2820066 - RNA, 19 nt, Artificial Sequence
  Description of Artificial Sequence: Synthetic oligonucleotide
gugucccggaaccgaacgc

SEQ ID NO: 2820067 - RNA, 19 nt, Artificial Sequence
  Description of Artificial Sequence: Synthetic oligonucleotide
gagcuaccagacugcuggc

SEQ ID NO: 2820068 - RNA, 19 nt, Artificial Sequence
  Description of Artificial Sequence: Synthetic oligonucleotide
agccuguauagaacuguug

SEQ ID NO: 2820069 - RNA, 19 nt, Artificial Sequence
  Description of Artificial Sequence: Synthetic oligonucleotide
caucgacagaguccaccac

SEQ ID NO: 2820070 - RNA, 19 nt, Artificial Sequence
  Description of Artificial Sequence: Synthetic oligonucleotide
uggcuucuuccauucucuc

SEQ ID NO: 2820071 - RNA, 19 nt, Artificial Sequence
  Description of Artificial Sequence: Synthetic oligonucleotide
agaguccaccacaaacaca

SEQ ID NO: 2820072 - RNA, 19 nt, Artificial Sequence
  Description of Artificial Sequence: Synthetic oligonucleotide
ugcccaagguuaccuuaau

SEQ ID NO: 2820073 - RNA, 19 nt, Artificial Sequence
  Description of Artificial Sequence: Synthetic oligonucleotide
cacaaugccaucugugcau

SEQ ID NO: 2820074 - RNA, 19 nt, Artificial Sequence
  Description of Artificial Sequence: Synthetic oligonucleotide
cauuccccauuuccagcug

SEQ ID NO: 2820075 - RNA, 19 nt, Artificial Sequence
  Description of Artificial Sequence: Synthetic oligonucleotide
aucgagcuaccagacugcu

SEQ ID NO: 2820076 - RNA, 19 nt, Artificial Sequence
  Description of Artificial Sequence: Synthetic oligonucleotide
cuacaucccagaagugaaa

SEQ ID NO: 2820077 - RNA, 19 nt, Artificial Sequence
  Description of Artificial Sequence: Synthetic oligonucleotide
caaacacaaugccaucugu

SEQ ID NO: 2820078 - RNA, 19 nt, Artificial Sequence
  Description of Artificial Sequence: Synthetic oligonucleotide
gucuucccagcgcagucca

SEQ ID NO: 2820079 - RNA, 19 nt, Artificial Sequence
  Description of Artificial Sequence: Synthetic oligonucleotide
gucugacaguccauucccc

SEQ ID NO: 2820080 - RNA, 19 nt, Artificial Sequence
  Description of Artificial Sequence: Synthetic oligonucleotide
cuaccagacugcuggccca

SEQ ID NO: 2820081 - RNA, 19 nt, Artificial Sequence
  Description of Artificial Sequence: Synthetic oligonucleotide
cacaaacacaaugccaucu

SEQ ID NO: 2820082 - RNA, 19 nt, Artificial Sequence
  Description of Artificial Sequence: Synthetic oligonucleotide
gaggccugacggcggccgg

SEQ ID NO: 2820083 - RNA, 19 nt, Artificial Sequence
  Description of Artificial Sequence: Synthetic oligonucleotide
ccuacaucccagaagugaa

SEQ ID NO: 2820084 - RNA, 19 nt, Artificial Sequence
  Description of Artificial Sequence: Synthetic oligonucleotide
gccuccgcggcugugagcc

SEQ ID NO: 2820085 - RNA, 19 nt, Artificial Sequence
  Description of Artificial Sequence: Synthetic oligonucleotide
ggccuuaauuucucuugac

SEQ ID NO: 2820086 - RNA, 19 nt, Artificial Sequence
  Description of Artificial Sequence: Synthetic oligonucleotide
gcggcugugagccgccggg

SEQ ID NO: 2820087 - RNA, 19 nt, Artificial Sequence
  Description of Artificial Sequence: Synthetic oligonucleotide
caccuacaucccagaagug

SEQ ID NO: 2820088 - RNA, 19 nt, Artificial Sequence
  Description of Artificial Sequence: Synthetic oligonucleotide
ggaauugcccaagguuacc

SEQ ID NO: 2820089 - RNA, 19 nt, Artificial Sequence
  Description of Artificial Sequence: Synthetic oligonucleotide
ccauuuccagcugcaaacc

SEQ ID NO: 2820090 - RNA, 19 nt, Artificial Sequence
  Description of Artificial Sequence: Synthetic oligonucleotide
cugcagccuguauagaacu

SEQ ID NO: 2820091 - RNA, 19 nt, Artificial Sequence
  Description of Artificial Sequence: Synthetic oligonucleotide
ccaccuacaucccagaagu

SEQ ID NO: 2820092 - RNA, 19 nt, Artificial Sequence
  Description of Artificial Sequence: Synthetic oligonucleotide
gcagcggcgaggccugacg

SEQ ID NO: 2820093 - RNA, 19 nt, Artificial Sequence
  Description of Artificial Sequence: Synthetic oligonucleotide
gaccaccuacaucccagaa

SEQ ID NO: 2820094 - RNA, 19 nt, Artificial Sequence
  Description of Artificial Sequence: Synthetic oligonucleotide
ccagcugcaaaccgguguc

SEQ ID NO: 2820095 - RNA, 19 nt, Artificial Sequence
  Description of Artificial Sequence: Synthetic oligonucleotide
acuuccacaguggccuuaa

SEQ ID NO: 2820096 - RNA, 19 nt, Artificial Sequence
  Description of Artificial Sequence: Synthetic oligonucleotide
gcugugagccgccggggag

SEQ ID NO: 2820097 - RNA, 19 nt, Artificial Sequence
  Description of Artificial Sequence: Synthetic oligonucleotide
cacgacaugaagggacuga

SEQ ID NO: 2820098 - RNA, 19 nt, Artificial Sequence
  Description of Artificial Sequence: Synthetic oligonucleotide
aucugugcaucggguauau

SEQ ID NO: 2820099 - RNA, 19 nt, Artificial Sequence
  Description of Artificial Sequence: Synthetic oligonucleotide
aucggguauaugacuucca

SEQ ID NO: 2820100 - RNA, 19 nt, Artificial Sequence
  Description of Artificial Sequence: Synthetic oligonucleotide
cguguuaaauccuuuggua

SEQ ID NO: 2820101 - RNA, 19 nt, Artificial Sequence
  Description of Artificial Sequence: Synthetic oligonucleotide
cuucccagcgcaguccaga

SEQ ID NO: 2820102 - RNA, 19 nt, Artificial Sequence
  Description of Artificial Sequence: Synthetic oligonucleotide
uaccagacugcuggcccac

SEQ ID NO: 2820103 - RNA, 19 nt, Artificial Sequence
  Description of Artificial Sequence: Synthetic oligonucleotide
gugcaucggguauaugacu

SEQ ID NO: 2820104 - RNA, 19 nt, Artificial Sequence
  Description of Artificial Sequence: Synthetic oligonucleotide
ggacugaaaggacggcaga

SEQ ID NO: 2820105 - RNA, 19 nt, Artificial Sequence
  Description of Artificial Sequence: Synthetic oligonucleotide
cccaagguuaccuuaauuu

SEQ ID NO: 2820106 - RNA, 19 nt, Artificial Sequence
  Description of Artificial Sequence: Synthetic oligonucleotide
accggugucccggaaccga

SEQ ID NO: 2820107 - RNA, 19 nt, Artificial Sequence
  Description of Artificial Sequence: Synthetic oligonucleotide
ucccgggcagcggcgaggc

SEQ ID NO: 2820108 - RNA, 19 nt, Artificial Sequence
  Description of Artificial Sequence: Synthetic oligonucleotide
ucugugcaucggguauaug

SEQ ID NO: 2820109 - RNA, 19 nt, Artificial Sequence
  Description of Artificial Sequence: Synthetic oligonucleotide
ucccggaaccgaacgcguu

SEQ ID NO: 2820110 - RNA, 19 nt, Artificial Sequence
  Description of Artificial Sequence: Synthetic oligonucleotide
ccauucucucgacaucgac

SEQ ID NO: 2820111 - RNA, 19 nt, Artificial Sequence
  Description of Artificial Sequence: Synthetic oligonucleotide
ggacaggauggaagucugg

SEQ ID NO: 2820112 - RNA, 19 nt, Artificial Sequence
  Description of Artificial Sequence: Synthetic oligonucleotide
gacaguccauuccccauuu

SEQ ID NO: 2820113 - RNA, 19 nt, Artificial Sequence
  Description of Artificial Sequence: Synthetic oligonucleotide
gcuuacagucucucuucca

SEQ ID NO: 2820114 - RNA, 19 nt, Artificial Sequence
  Description of Artificial Sequence: Synthetic oligonucleotide
gaacugcagccuguauaga

SEQ ID NO: 2820115 - RNA, 19 nt, Artificial Sequence
  Description of Artificial Sequence: Synthetic oligonucleotide
cagcugcaaaccggugucc

SEQ ID NO: 2820116 - RNA, 19 nt, Artificial Sequence
  Description of Artificial Sequence: Synthetic oligonucleotide
cguucuucuagucugcuua

SEQ ID NO: 2820117 - RNA, 19 nt, Artificial Sequence
  Description of Artificial Sequence: Synthetic oligonucleotide
cccagaaucacgacaugaa

SEQ ID NO: 2820118 - RNA, 19 nt, Artificial Sequence
  Description of Artificial Sequence: Synthetic oligonucleotide
gguauaugacuuccacagu

SEQ ID NO: 2820119 - RNA, 19 nt, Artificial Sequence
  Description of Artificial Sequence: Synthetic oligonucleotide
gcggcgaggccugacggcg

SEQ ID NO: 2820120 - RNA, 19 nt, Artificial Sequence
  Description of Artificial Sequence: Synthetic oligonucleotide
ccagacugcuggcccacgg

SEQ ID NO: 2820121 - RNA, 19 nt, Artificial Sequence
  Description of Artificial Sequence: Synthetic oligonucleotide
cuccgcggcugugagccgc

SEQ ID NO: 2820122 - RNA, 19 nt, Artificial Sequence
  Description of Artificial Sequence: Synthetic oligonucleotide
ugugagccgccggggaguc

SEQ ID NO: 2820123 - RNA, 19 nt, Artificial Sequence
  Description of Artificial Sequence: Synthetic oligonucleotide
uccccauuuccagcugcaa

SEQ ID NO: 2820124 - RNA, 19 nt, Artificial Sequence
  Description of Artificial Sequence: Synthetic oligonucleotide
gcaucggguauaugacuuc

SEQ ID NO: 2820125 - RNA, 19 nt, Artificial Sequence
  Description of Artificial Sequence: Synthetic oligonucleotide
ggggaguccgucccgggca

SEQ ID NO: 2820126 - RNA, 19 nt, Artificial Sequence
  Description of Artificial Sequence: Synthetic oligonucleotide
ggaaccgaacgcguucuuc

SEQ ID NO: 2820127 - RNA, 19 nt, Artificial Sequence
  Description of Artificial Sequence: Synthetic oligonucleotide
ccagaagugaaaagugacu

SEQ ID NO: 2820128 - RNA, 19 nt, Artificial Sequence
  Description of Artificial Sequence: Synthetic oligonucleotide
guugucuucccagcgcagu

SEQ ID NO: 2820129 - RNA, 19 nt, Artificial Sequence
  Description of Artificial Sequence: Synthetic oligonucleotide
ccugacggcggccgggccg

SEQ ID NO: 2820130 - RNA, 19 nt, Artificial Sequence
  Description of Artificial Sequence: Synthetic oligonucleotide
aguccgucccgggcagcgg

SEQ ID NO: 2820131 - RNA, 19 nt, Artificial Sequence
  Description of Artificial Sequence: Synthetic oligonucleotide
ccacaaacacaaugccauc

SEQ ID NO: 2820132 - RNA, 19 nt, Artificial Sequence
  Description of Artificial Sequence: Synthetic oligonucleotide
gucgucccgccuccgcggc

SEQ ID NO: 2820133 - RNA, 19 nt, Artificial Sequence
  Description of Artificial Sequence: Synthetic oligonucleotide
ggggaucgagcuaccagac

SEQ ID NO: 2820134 - RNA, 19 nt, Artificial Sequence
  Description of Artificial Sequence: Synthetic oligonucleotide
ugacuuccacaguggccuu

SEQ ID NO: 2820135 - RNA, 19 nt, Artificial Sequence
  Description of Artificial Sequence: Synthetic oligonucleotide
aggccugacggcggccggg

SEQ ID NO: 2820136 - RNA, 19 nt, Artificial Sequence
  Description of Artificial Sequence: Synthetic oligonucleotide
gggaguccgucccgggcag

SEQ ID NO: 2820137 - RNA, 19 nt, Artificial Sequence
  Description of Artificial Sequence: Synthetic oligonucleotide
gucugcuuacagucucucu

SEQ ID NO: 2820138 - RNA, 19 nt, Artificial Sequence
  Description of Artificial Sequence: Synthetic oligonucleotide
cagcgcaguccagacccag

SEQ ID NO: 2820139 - RNA, 19 nt, Artificial Sequence
  Description of Artificial Sequence: Synthetic oligonucleotide
cagacuggacaggauggaa

SEQ ID NO: 2820140 - RNA, 19 nt, Artificial Sequence
  Description of Artificial Sequence: Synthetic oligonucleotide
aguucaguuuuggcuucuu

SEQ ID NO: 2820141 - RNA, 19 nt, Artificial Sequence
  Description of Artificial Sequence: Synthetic oligonucleotide
ccaagguuaccuuaauuuu

SEQ ID NO: 2820142 - RNA, 19 nt, Artificial Sequence
  Description of Artificial Sequence: Synthetic oligonucleotide
gucccgggcagcggcgagg

SEQ ID NO: 2820143 - RNA, 19 nt, Artificial Sequence
  Description of Artificial Sequence: Synthetic oligonucleotide
gguaggcaccguauuuaca

SEQ ID NO: 2820144 - RNA, 19 nt, Artificial Sequence
  Description of Artificial Sequence: Synthetic oligonucleotide
ggaagucuggucugacagu

SEQ ID NO: 2820145 - RNA, 19 nt, Artificial Sequence
  Description of Artificial Sequence: Synthetic oligonucleotide
cggcagacuggacaggaug

SEQ ID NO: 2820146 - RNA, 19 nt, Artificial Sequence
  Description of Artificial Sequence: Synthetic oligonucleotide
cucucgacaucgacagagu

SEQ ID NO: 2820147 - RNA, 19 nt, Artificial Sequence
  Description of Artificial Sequence: Synthetic oligonucleotide
ggauggaagucuggucuga

SEQ ID NO: 2820148 - RNA, 19 nt, Artificial Sequence
  Description of Artificial Sequence: Synthetic oligonucleotide
agcgcaguccagacccaga

SEQ ID NO: 2820149 - RNA, 19 nt, Artificial Sequence
  Description of Artificial Sequence: Synthetic oligonucleotide
caucugugcaucggguaua

SEQ ID NO: 2820150 - RNA, 19 nt, Artificial Sequence
  Description of Artificial Sequence: Synthetic oligonucleotide
ccagacccagaaucacgac

SEQ ID NO: 2820151 - RNA, 19 nt, Artificial Sequence
  Description of Artificial Sequence: Synthetic oligonucleotide
ccgucgucccgccuccgcg

SEQ ID NO: 2820152 - RNA, 19 nt, Artificial Sequence
  Description of Artificial Sequence: Synthetic oligonucleotide
ccguguuaaauccuuuggu

SEQ ID NO: 2820153 - RNA, 19 nt, Artificial Sequence
  Description of Artificial Sequence: Synthetic oligonucleotide
gccaucugugcaucgggua

SEQ ID NO: 2820154 - RNA, 19 nt, Artificial Sequence
  Description of Artificial Sequence: Synthetic oligonucleotide
gcgcaguccagacccagaa

SEQ ID NO: 2820155 - RNA, 19 nt, Artificial Sequence
  Description of Artificial Sequence: Synthetic oligonucleotide
cccggaaccgaacgcguuc

SEQ ID NO: 2820156 - RNA, 19 nt, Artificial Sequence
  Description of Artificial Sequence: Synthetic oligonucleotide
ggcgaggccugacggcggc

SEQ ID NO: 2820157 - RNA, 19 nt, Artificial Sequence
  Description of Artificial Sequence: Synthetic oligonucleotide
ggacggcagacuggacagg

SEQ ID NO: 2820158 - RNA, 19 nt, Artificial Sequence
  Description of Artificial Sequence: Synthetic oligonucleotide
cggguauaugacuuccaca

SEQ ID NO: 2820159 - RNA, 19 nt, Artificial Sequence
  Description of Artificial Sequence: Synthetic oligonucleotide
auccuuugguaggcaccgu

SEQ ID NO: 2820160 - RNA, 19 nt, Artificial Sequence
  Description of Artificial Sequence: Synthetic oligonucleotide
ucgucccgccuccgcggcu

SEQ ID NO: 2820161 - RNA, 19 nt, Artificial Sequence
  Description of Artificial Sequence: Synthetic oligonucleotide
gcagccuguauagaacugu

SEQ ID NO: 2820162 - RNA, 19 nt, Artificial Sequence
  Description of Artificial Sequence: Synthetic oligonucleotide
ccauuccccauuuccagcu

SEQ ID NO: 2820163 - RNA, 19 nt, Artificial Sequence
  Description of Artificial Sequence: Synthetic oligonucleotide
gcagacuggacaggaugga

SEQ ID NO: 2820164 - RNA, 19 nt, Artificial Sequence
  Description of Artificial Sequence: Synthetic oligonucleotide
cagccuguauagaacuguu

SEQ ID NO: 2820165 - RNA, 19 nt, Artificial Sequence
  Description of Artificial Sequence: Synthetic oligonucleotide
gccgccggggaguccgucc

SEQ ID NO: 2820166 - RNA, 19 nt, Artificial Sequence
  Description of Artificial Sequence: Synthetic oligonucleotide
aguccaccacaaacacaau

SEQ ID NO: 2820167 - RNA, 19 nt, Artificial Sequence
  Description of Artificial Sequence: Synthetic oligonucleotide
cgaacgcguucuucuaguc

SEQ ID NO: 2820168 - RNA, 19 nt, Artificial Sequence
  Description of Artificial Sequence: Synthetic oligonucleotide
cagacugcuggcccacggu

SEQ ID NO: 2820169 - RNA, 19 nt, Artificial Sequence
  Description of Artificial Sequence: Synthetic oligonucleotide
cgucgucccgccuccgcgg

SEQ ID NO: 2820170 - RNA, 19 nt, Artificial Sequence
  Description of Artificial Sequence: Synthetic oligonucleotide
cugacggcggccgggccga

SEQ ID NO: 2820171 - RNA, 19 nt, Artificial Sequence
  Description of Artificial Sequence: Synthetic oligonucleotide
ccccauuuccagcugcaaa

SEQ ID NO: 2820172 - RNA, 19 nt, Artificial Sequence
  Description of Artificial Sequence: Synthetic oligonucleotide
acggcagacuggacaggau

SEQ ID NO: 2820173 - RNA, 19 nt, Artificial Sequence
  Description of Artificial Sequence: Synthetic oligonucleotide
gccggggaguccgucccgg

SEQ ID NO: 2820174 - RNA, 19 nt, Artificial Sequence
  Description of Artificial Sequence: Synthetic oligonucleotide
caguggccuuaauuucucu

SEQ ID NO: 2820175 - RNA, 19 nt, Artificial Sequence
  Description of Artificial Sequence: Synthetic oligonucleotide
ccuuaauuuucuccguguu

SEQ ID NO: 2820176 - RNA, 19 nt, Artificial Sequence
  Description of Artificial Sequence: Synthetic oligonucleotide
ggcaccguauuuacaaauu

SEQ ID NO: 2820177 - RNA, 19 nt, Artificial Sequence
  Description of Artificial Sequence: Synthetic oligonucleotide
ccguauuuacaaauucauu

SEQ ID NO: 2820178 - RNA, 19 nt, Artificial Sequence
  Description of Artificial Sequence: Synthetic oligonucleotide
agccgccggggaguccguc

SEQ ID NO: 2820179 - RNA, 19 nt, Artificial Sequence
  Description of Artificial Sequence: Synthetic oligonucleotide
ccgccggggaguccguccc

SEQ ID NO: 2820180 - RNA, 19 nt, Artificial Sequence
  Description of Artificial Sequence: Synthetic oligonucleotide
gggaucgagcuaccagacu

SEQ ID NO: 2820181 - RNA, 19 nt, Artificial Sequence
  Description of Artificial Sequence: Synthetic oligonucleotide
ccuuugguaggcaccguau

SEQ ID NO: 2820182 - RNA, 19 nt, Artificial Sequence
  Description of Artificial Sequence: Synthetic oligonucleotide
ccaucugugcaucggguau

SEQ ID NO: 2820183 - RNA, 19 nt, Artificial Sequence
  Description of Artificial Sequence: Synthetic oligonucleotide
cgaggccugacggcggccg

SEQ ID NO: 2820184 - RNA, 19 nt, Artificial Sequence
  Description of Artificial Sequence: Synthetic oligonucleotide
cugugagccgccggggagu

SEQ ID NO: 2820185 - RNA, 19 nt, Artificial Sequence
  Description of Artificial Sequence: Synthetic oligonucleotide
gucccggaaccgaacgcgu

SEQ ID NO: 2820186 - RNA, 19 nt, Artificial Sequence
  Description of Artificial Sequence: Synthetic oligonucleotide
ggccugacggcggccgggc

SEQ ID NO: 2820187 - RNA, 19 nt, Artificial Sequence
  Description of Artificial Sequence: Synthetic oligonucleotide
gcaaaccggugucccggaa

SEQ ID NO: 2820188 - RNA, 19 nt, Artificial Sequence
  Description of Artificial Sequence: Synthetic oligonucleotide
ccggggaguccgucccggg

SEQ ID NO: 2820189 - RNA, 19 nt, Artificial Sequence
  Description of Artificial Sequence: Synthetic oligonucleotide
ccgaacgcguucuucuagu

SEQ ID NO: 2820190 - RNA, 19 nt, Artificial Sequence
  Description of Artificial Sequence: Synthetic oligonucleotide
cggggaguccgucccgggc

SEQ ID NO: 2820191 - RNA, 19 nt, Artificial Sequence
  Description of Artificial Sequence: Synthetic oligonucleotide
cccgucgucccgccuccgc

SEQ ID NO: 2820192 - RNA, 19 nt, Artificial Sequence
  Description of Artificial Sequence: Synthetic oligonucleotide
gcccaagguuaccuuaauu

SEQ ID NO: 2820193 - RNA, 19 nt, Artificial Sequence
  Description of Artificial Sequence: Synthetic oligonucleotide
cgacaugaagggacugaaa

SEQ ID NO: 2820194 - RNA, 19 nt, Artificial Sequence
  Description of Artificial Sequence: Synthetic oligonucleotide
gugagccgccggggagucc

SEQ ID NO: 2820195 - RNA, 19 nt, Artificial Sequence
  Description of Artificial Sequence: Synthetic oligonucleotide
ucccgccuccgcggcugug

SEQ ID NO: 2820196 - RNA, 19 nt, Artificial Sequence
  Description of Artificial Sequence: Synthetic oligonucleotide
ggaguccgucccgggcagc

SEQ ID NO: 2820197 - RNA, 19 nt, Artificial Sequence
  Description of Artificial Sequence: Synthetic oligonucleotide
cggugucccggaaccgaac

SEQ ID NO: 2820198 - RNA, 19 nt, Artificial Sequence
  Description of Artificial Sequence: Synthetic oligonucleotide
ccgccuccgcggcugugag

SEQ ID NO: 2820199 - RNA, 19 nt, Artificial Sequence
  Description of Artificial Sequence: Synthetic oligonucleotide
ccuccgcggcugugagccg

SEQ ID NO: 2820200 - RNA, 19 nt, Artificial Sequence
  Description of Artificial Sequence: Synthetic oligonucleotide
gccugacggcggccgggcc

SEQ ID NO: 2820201 - RNA, 19 nt, Artificial Sequence
  Description of Artificial Sequence: Synthetic oligonucleotide
cgggcagcggcgaggccug

SEQ ID NO: 2820202 - RNA, 19 nt, Artificial Sequence
  Description of Artificial Sequence: Synthetic oligonucleotide
ccggugucccggaaccgaa

SEQ ID NO: 2820203 - RNA, 19 nt, Artificial Sequence
  Description of Artificial Sequence: Synthetic oligonucleotide
ggcagcggcgaggccugac

SEQ ID NO: 2820204 - RNA, 19 nt, Artificial Sequence
  Description of Artificial Sequence: Synthetic oligonucleotide
cggcgaggccugacggcgg

SEQ ID NO: 2820205 - RNA, 19 nt, Artificial Sequence
  Description of Artificial Sequence: Synthetic oligonucleotide
gcguucuucuagucugcuu

SEQ ID NO: 2820206 - RNA, 19 nt, Artificial Sequence
  Description of Artificial Sequence: Synthetic oligonucleotide
cuuccacaguggccuuaau

SEQ ID NO: 2820207 - RNA, 19 nt, Artificial Sequence
  Description of Artificial Sequence: Synthetic oligonucleotide
ccagcgcaguccagaccca

SEQ ID NO: 2820208 - RNA, 19 nt, Artificial Sequence
  Description of Artificial Sequence: Synthetic oligonucleotide
cgacaucgacagaguccac

SEQ ID NO: 2820209 - RNA, 19 nt, Artificial Sequence
  Description of Artificial Sequence: Synthetic oligonucleotide
gcgaggccugacggcggcc

SEQ ID NO: 2820210 - RNA, 19 nt, Artificial Sequence
  Description of Artificial Sequence: Synthetic oligonucleotide
ugacggcggccgggccgac

SEQ ID NO: 2820211 - RNA, 19 nt, Artificial Sequence
  Description of Artificial Sequence: Synthetic oligonucleotide
cgucccgccuccgcggcug

SEQ ID NO: 2820212 - RNA, 19 nt, Artificial Sequence
  Description of Artificial Sequence: Synthetic oligonucleotide
ccgggcagcggcgaggccu

SEQ ID NO: 2820213 - RNA, 19 nt, Artificial Sequence
  Description of Artificial Sequence: Synthetic oligonucleotide
ccggaaccgaacgcguucu

SEQ ID NO: 2820214 - RNA, 19 nt, Artificial Sequence
  Description of Artificial Sequence: Synthetic oligonucleotide
cgccggggaguccgucccg

SEQ ID NO: 2820215 - RNA, 19 nt, Artificial Sequence
  Description of Artificial Sequence: Synthetic oligonucleotide
cgccuccgcggcugugagc

SEQ ID NO: 2820216 - RNA, 19 nt, Artificial Sequence
  Description of Artificial Sequence: Synthetic oligonucleotide
cgacagaguccaccacaaa

SEQ ID NO: 2820217 - RNA, 19 nt, Artificial Sequence
  Description of Artificial Sequence: Synthetic oligonucleotide
cccgccuccgcggcuguga

SEQ ID NO: 2820218 - RNA, 19 nt, Artificial Sequence
  Description of Artificial Sequence: Synthetic oligonucleotide
gucccgccuccgcggcugu

SEQ ID NO: 2820219 - RNA, 19 nt, Artificial Sequence
  Description of Artificial Sequence: Synthetic oligonucleotide
cccgggcagcggcgaggcc

SEQ ID NO: 2820220 - RNA, 19 nt, Artificial Sequence
  Description of Artificial Sequence: Synthetic oligonucleotide
ccccgucgucccgccuccg

SEQ ID NO: 2820221 - RNA, 19 nt, Artificial Sequence
  Description of Artificial Sequence: Synthetic oligonucleotide
gagccgccggggaguccgu

SEQ ID NO: 2820222 - RNA, 19 nt, Artificial Sequence
  Description of Artificial Sequence: Synthetic oligonucleotide
cgcaguccagacccagaau

SEQ ID NO: 2820223 - RNA, 19 nt, Artificial Sequence
  Description of Artificial Sequence: Synthetic oligonucleotide
cgcguucuucuagucugcu

SEQ ID NO: 2820224 - RNA, 19 nt, Artificial Sequence
  Description of Artificial Sequence: Synthetic oligonucleotide
gggcagcggcgaggccuga

SEQ ID NO: 2820225 - RNA, 19 nt, Artificial Sequence
  Description of Artificial Sequence: Synthetic oligonucleotide
cggaaccgaacgcguucuu

SEQ ID NO: 2820226 - RNA, 19 nt, Artificial Sequence
  Description of Artificial Sequence: Synthetic oligonucleotide
aauuuuguuggcaacaucc

SEQ ID NO: 2820227 - RNA, 19 nt, Artificial Sequence
  Description of Artificial Sequence: Synthetic oligonucleotide
ucuucuaucuucuucaugg

SEQ ID NO: 2820228 - RNA, 19 nt, Artificial Sequence
  Description of Artificial Sequence: Synthetic oligonucleotide
uauauuuggaauuagccag

SEQ ID NO: 2820229 - RNA, 19 nt, Artificial Sequence
  Description of Artificial Sequence: Synthetic oligonucleotide
uuugauaauggcauagugg

SEQ ID NO: 2820230 - RNA, 19 nt, Artificial Sequence
  Description of Artificial Sequence: Synthetic oligonucleotide
aguauauuuggaauuagcc

SEQ ID NO: 2820231 - RNA, 19 nt, Artificial Sequence
  Description of Artificial Sequence: Synthetic oligonucleotide
aaugucauagagcuucuuc

SEQ ID NO: 2820232 - RNA, 19 nt, Artificial Sequence
  Description of Artificial Sequence: Synthetic oligonucleotide
acaucaaugucauagagcu

SEQ ID NO: 2820233 - RNA, 19 nt, Artificial Sequence
  Description of Artificial Sequence: Synthetic oligonucleotide
aauggcauaguggucaagc

SEQ ID NO: 2820234 - RNA, 19 nt, Artificial Sequence
  Description of Artificial Sequence: Synthetic oligonucleotide
uugacguccacaaugaaca

SEQ ID NO: 2820235 - RNA, 19 nt, Artificial Sequence
  Description of Artificial Sequence: Synthetic oligonucleotide
uugauaauggcauaguggu

SEQ ID NO: 2820236 - RNA, 19 nt, Artificial Sequence
  Description of Artificial Sequence: Synthetic oligonucleotide
aaaagaguauauuuggaau

SEQ ID NO: 2820237 - RNA, 19 nt, Artificial Sequence
  Description of Artificial Sequence: Synthetic oligonucleotide
agcaucauaaucaggagcc

SEQ ID NO: 2820238 - RNA, 19 nt, Artificial Sequence
  Description of Artificial Sequence: Synthetic oligonucleotide
ucuaucuucuucauggcug

SEQ ID NO: 2820239 - RNA, 19 nt, Artificial Sequence
  Description of Artificial Sequence: Synthetic oligonucleotide
gaugaucccaauuuuguug

SEQ ID NO: 2820240 - RNA, 19 nt, Artificial Sequence
  Description of Artificial Sequence: Synthetic oligonucleotide
aaagaguauauuuggaauu

SEQ ID NO: 2820241 - RNA, 19 nt, Artificial Sequence
  Description of Artificial Sequence: Synthetic oligonucleotide
uuagaugaucccaauuuug

SEQ ID NO: 2820242 - RNA, 19 nt, Artificial Sequence
  Description of Artificial Sequence: Synthetic oligonucleotide
uucacagccuguuugaucu

SEQ ID NO: 2820243 - RNA, 19 nt, Artificial Sequence
  Description of Artificial Sequence: Synthetic oligonucleotide
augaucccaauuuuguugg

SEQ ID NO: 2820244 - RNA, 19 nt, Artificial Sequence
  Description of Artificial Sequence: Synthetic oligonucleotide
uuggcuucggcuuugggag

SEQ ID NO: 2820245 - RNA, 19 nt, Artificial Sequence
  Description of Artificial Sequence: Synthetic oligonucleotide
uccuucuucgcuuucggcg

SEQ ID NO: 2820246 - RNA, 19 nt, Artificial Sequence
  Description of Artificial Sequence: Synthetic oligonucleotide
aacacaaguguguuguugu

SEQ ID NO: 2820247 - RNA, 19 nt, Artificial Sequence
  Description of Artificial Sequence: Synthetic oligonucleotide
uuuguuggcaacauccaga

SEQ ID NO: 2820248 - RNA, 19 nt, Artificial Sequence
  Description of Artificial Sequence: Synthetic oligonucleotide
gauucaguuuagaugaucc

SEQ ID NO: 2820249 - RNA, 19 nt, Artificial Sequence
  Description of Artificial Sequence: Synthetic oligonucleotide
cuggauucaguuuagauga

SEQ ID NO: 2820250 - RNA, 19 nt, Artificial Sequence
  Description of Artificial Sequence: Synthetic oligonucleotide
auaaucaggagccaagcga

SEQ ID NO: 2820251 - RNA, 19 nt, Artificial Sequence
  Description of Artificial Sequence: Synthetic oligonucleotide
gaauuagccagcuggauuc

SEQ ID NO: 2820252 - RNA, 19 nt, Artificial Sequence
  Description of Artificial Sequence: Synthetic oligonucleotide
auucaguuuagaugauccc

SEQ ID NO: 2820253 - RNA, 19 nt, Artificial Sequence
  Description of Artificial Sequence: Synthetic oligonucleotide
gauaauggcauagugguca

SEQ ID NO: 2820254 - RNA, 19 nt, Artificial Sequence
  Description of Artificial Sequence: Synthetic oligonucleotide
auuugauaauggcauagug

SEQ ID NO: 2820255 - RNA, 19 nt, Artificial Sequence
  Description of Artificial Sequence: Synthetic oligonucleotide
uuuuguuggcaacauccag

SEQ ID NO: 2820256 - RNA, 19 nt, Artificial Sequence
  Description of Artificial Sequence: Synthetic oligonucleotide
ugcuuguuggccuugacgu

SEQ ID NO: 2820257 - RNA, 19 nt, Artificial Sequence
  Description of Artificial Sequence: Synthetic oligonucleotide
uuuggccacaucaauguca

SEQ ID NO: 2820258 - RNA, 19 nt, Artificial Sequence
  Description of Artificial Sequence: Synthetic oligonucleotide
guauauuuggaauuagcca

SEQ ID NO: 2820259 - RNA, 19 nt, Artificial Sequence
  Description of Artificial Sequence: Synthetic oligonucleotide
gaauuugauaauggcauag

SEQ ID NO: 2820260 - RNA, 19 nt, Artificial Sequence
  Description of Artificial Sequence: Synthetic oligonucleotide
aaugaacacaaguguguug

SEQ ID NO: 2820261 - RNA, 19 nt, Artificial Sequence
  Description of Artificial Sequence: Synthetic oligonucleotide
ucuuucgcggguauuuggg

SEQ ID NO: 2820262 - RNA, 19 nt, Artificial Sequence
  Description of Artificial Sequence: Synthetic oligonucleotide
aagcuuguuucuccugggc

SEQ ID NO: 2820263 - RNA, 19 nt, Artificial Sequence
  Description of Artificial Sequence: Synthetic oligonucleotide
uuugaucuggugcuuguug

SEQ ID NO: 2820264 - RNA, 19 nt, Artificial Sequence
  Description of Artificial Sequence: Synthetic oligonucleotide
uagaugaucccaauuuugu

SEQ ID NO: 2820265 - RNA, 19 nt, Artificial Sequence
  Description of Artificial Sequence: Synthetic oligonucleotide
uuguuggcaacauccagag

SEQ ID NO: 2820266 - RNA, 19 nt, Artificial Sequence
  Description of Artificial Sequence: Synthetic oligonucleotide
aggguguugacuuuggcca

SEQ ID NO: 2820267 - RNA, 19 nt, Artificial Sequence
  Description of Artificial Sequence: Synthetic oligonucleotide
uaaucaggagccaagcgaa

SEQ ID NO: 2820268 - RNA, 19 nt, Artificial Sequence
  Description of Artificial Sequence: Synthetic oligonucleotide
guugacuuuggccacauca

SEQ ID NO: 2820269 - RNA, 19 nt, Artificial Sequence
  Description of Artificial Sequence: Synthetic oligonucleotide
cacaaugaacacaagugug

SEQ ID NO: 2820270 - RNA, 19 nt, Artificial Sequence
  Description of Artificial Sequence: Synthetic oligonucleotide
uucaguuuagaugauccca

SEQ ID NO: 2820271 - RNA, 19 nt, Artificial Sequence
  Description of Artificial Sequence: Synthetic oligonucleotide
augucauagagcuucuuca

SEQ ID NO: 2820272 - RNA, 19 nt, Artificial Sequence
  Description of Artificial Sequence: Synthetic oligonucleotide
cagagcaucauaaucagga

SEQ ID NO: 2820273 - RNA, 19 nt, Artificial Sequence
  Description of Artificial Sequence: Synthetic oligonucleotide
cacaucaaugucauagagc

SEQ ID NO: 2820274 - RNA, 19 nt, Artificial Sequence
  Description of Artificial Sequence: Synthetic oligonucleotide
acuuuggccacaucaaugu

SEQ ID NO: 2820275 - RNA, 19 nt, Artificial Sequence
  Description of Artificial Sequence: Synthetic oligonucleotide
ucaguuuagaugaucccaa

SEQ ID NO: 2820276 - RNA, 19 nt, Artificial Sequence
  Description of Artificial Sequence: Synthetic oligonucleotide
uuuagaugaucccaauuuu

SEQ ID NO: 2820277 - RNA, 19 nt, Artificial Sequence
  Description of Artificial Sequence: Synthetic oligonucleotide
ucauggcugacucaguggu

SEQ ID NO: 2820278 - RNA, 19 nt, Artificial Sequence
  Description of Artificial Sequence: Synthetic oligonucleotide
gagcaucauaaucaggagc

SEQ ID NO: 2820279 - RNA, 19 nt, Artificial Sequence
  Description of Artificial Sequence: Synthetic oligonucleotide
aaggccuucgcuuuggcuu

SEQ ID NO: 2820280 - RNA, 19 nt, Artificial Sequence
  Description of Artificial Sequence: Synthetic oligonucleotide
cuugacguccacaaugaac

SEQ ID NO: 2820281 - RNA, 19 nt, Artificial Sequence
  Description of Artificial Sequence: Synthetic oligonucleotide
ucuccgucaggccuuauga

SEQ ID NO: 2820282 - RNA, 19 nt, Artificial Sequence
  Description of Artificial Sequence: Synthetic oligonucleotide
auauuuggaauuagccagc

SEQ ID NO: 2820283 - RNA, 19 nt, Artificial Sequence
  Description of Artificial Sequence: Synthetic oligonucleotide
agcuuguuucuccugggcg

SEQ ID NO: 2820284 - RNA, 19 nt, Artificial Sequence
  Description of Artificial Sequence: Synthetic oligonucleotide
gaggguguugacuuuggcc

SEQ ID NO: 2820285 - RNA, 19 nt, Artificial Sequence
  Description of Artificial Sequence: Synthetic oligonucleotide
ucuucucuccgucaggccu

SEQ ID NO: 2820286 - RNA, 19 nt, Artificial Sequence
  Description of Artificial Sequence: Synthetic oligonucleotide
uucauggcugacucagugg

SEQ ID NO: 2820287 - RNA, 19 nt, Artificial Sequence
  Description of Artificial Sequence: Synthetic oligonucleotide
uccagagcaucauaaucag

SEQ ID NO: 2820288 - RNA, 19 nt, Artificial Sequence
  Description of Artificial Sequence: Synthetic oligonucleotide
uguguuguugucuucuauc

SEQ ID NO: 2820289 - RNA, 19 nt, Artificial Sequence
  Description of Artificial Sequence: Synthetic oligonucleotide
cauaaucaggagccaagcg

SEQ ID NO: 2820290 - RNA, 19 nt, Artificial Sequence
  Description of Artificial Sequence: Synthetic oligonucleotide
aauuugauaauggcauagu

SEQ ID NO: 2820291 - RNA, 19 nt, Artificial Sequence
  Description of Artificial Sequence: Synthetic oligonucleotide
aacguaugccuucuucucu

SEQ ID NO: 2820292 - RNA, 19 nt, Artificial Sequence
  Description of Artificial Sequence: Synthetic oligonucleotide
augaacacaaguguguugu

SEQ ID NO: 2820293 - RNA, 19 nt, Artificial Sequence
  Description of Artificial Sequence: Synthetic oligonucleotide
uuugggaggggcaggagcu

SEQ ID NO: 2820294 - RNA, 19 nt, Artificial Sequence
  Description of Artificial Sequence: Synthetic oligonucleotide
agccgcagggucuugggcc

SEQ ID NO: 2820295 - RNA, 19 nt, Artificial Sequence
  Description of Artificial Sequence: Synthetic oligonucleotide
uuggcuuucaaggccuucg

SEQ ID NO: 2820296 - RNA, 19 nt, Artificial Sequence
  Description of Artificial Sequence: Synthetic oligonucleotide
gaguauauuuggaauuagc

SEQ ID NO: 2820297 - RNA, 19 nt, Artificial Sequence
  Description of Artificial Sequence: Synthetic oligonucleotide
ugucauagagcuucuucac

SEQ ID NO: 2820298 - RNA, 19 nt, Artificial Sequence
  Description of Artificial Sequence: Synthetic oligonucleotide
gccuucuuggcuuucaagg

SEQ ID NO: 2820299 - RNA, 19 nt, Artificial Sequence
  Description of Artificial Sequence: Synthetic oligonucleotide
uucggcgccaucuuggcga

SEQ ID NO: 2820300 - RNA, 19 nt, Artificial Sequence
  Description of Artificial Sequence: Synthetic oligonucleotide
uugacuuuggccacaucaa

SEQ ID NO: 2820301 - RNA, 19 nt, Artificial Sequence
  Description of Artificial Sequence: Synthetic oligonucleotide
uuggaauuagccagcugga

SEQ ID NO: 2820302 - RNA, 19 nt, Artificial Sequence
  Description of Artificial Sequence: Synthetic oligonucleotide
gcuggauucaguuuagaug

SEQ ID NO: 2820303 - RNA, 19 nt, Artificial Sequence
  Description of Artificial Sequence: Synthetic oligonucleotide
agagcaucauaaucaggag

SEQ ID NO: 2820304 - RNA, 19 nt, Artificial Sequence
  Description of Artificial Sequence: Synthetic oligonucleotide
aagaguauauuuggaauua

SEQ ID NO: 2820305 - RNA, 19 nt, Artificial Sequence
  Description of Artificial Sequence: Synthetic oligonucleotide
cuucuucacagccuguuug

SEQ ID NO: 2820306 - RNA, 19 nt, Artificial Sequence
  Description of Artificial Sequence: Synthetic oligonucleotide
uucuuggcuuucaaggccu

SEQ ID NO: 2820307 - RNA, 19 nt, Artificial Sequence
  Description of Artificial Sequence: Synthetic oligonucleotide
aggggcaggagcuuccuuc

SEQ ID NO: 2820308 - RNA, 19 nt, Artificial Sequence
  Description of Artificial Sequence: Synthetic oligonucleotide
auccagagcaucauaauca

SEQ ID NO: 2820309 - RNA, 19 nt, Artificial Sequence
  Description of Artificial Sequence: Synthetic oligonucleotide
acguaugccuucuucucuc

SEQ ID NO: 2820310 - RNA, 19 nt, Artificial Sequence
  Description of Artificial Sequence: Synthetic oligonucleotide
auaguggucaagcuuguuu

SEQ ID NO: 2820311 - RNA, 19 nt, Artificial Sequence
  Description of Artificial Sequence: Synthetic oligonucleotide
uuguugucuucuaucuucu

SEQ ID NO: 2820312 - RNA, 19 nt, Artificial Sequence
  Description of Artificial Sequence: Synthetic oligonucleotide
uggucaagcuuguuucucc

SEQ ID NO: 2820313 - RNA, 19 nt, Artificial Sequence
  Description of Artificial Sequence: Synthetic oligonucleotide
uucuucacagccuguuuga

SEQ ID NO: 2820314 - RNA, 19 nt, Artificial Sequence
  Description of Artificial Sequence: Synthetic oligonucleotide
agccaagcgaacguaugcc

SEQ ID NO: 2820315 - RNA, 19 nt, Artificial Sequence
  Description of Artificial Sequence: Synthetic oligonucleotide
acaaugaacacaagugugu

SEQ ID NO: 2820316 - RNA, 19 nt, Artificial Sequence
  Description of Artificial Sequence: Synthetic oligonucleotide
ggccacaucaaugucauag

SEQ ID NO: 2820317 - RNA, 19 nt, Artificial Sequence
  Description of Artificial Sequence: Synthetic oligonucleotide
cauccagagcaucauaauc

SEQ ID NO: 2820318 - RNA, 19 nt, Artificial Sequence
  Description of Artificial Sequence: Synthetic oligonucleotide
uucgcuuuggcuucggcuu

SEQ ID NO: 2820319 - RNA, 19 nt, Artificial Sequence
  Description of Artificial Sequence: Synthetic oligonucleotide
cuuugggaggggcaggagc

SEQ ID NO: 2820320 - RNA, 19 nt, Artificial Sequence
  Description of Artificial Sequence: Synthetic oligonucleotide
gagccaagcgaacguaugc

SEQ ID NO: 2820321 - RNA, 19 nt, Artificial Sequence
  Description of Artificial Sequence: Synthetic oligonucleotide
uuggccuugacguccacaa

SEQ ID NO: 2820322 - RNA, 19 nt, Artificial Sequence
  Description of Artificial Sequence: Synthetic oligonucleotide
gacuuuggccacaucaaug

SEQ ID NO: 2820323 - RNA, 19 nt, Artificial Sequence
  Description of Artificial Sequence: Synthetic oligonucleotide
gaacacaaguguguuguug

SEQ ID NO: 2820324 - RNA, 19 nt, Artificial Sequence
  Description of Artificial Sequence: Synthetic oligonucleotide
uaugaggguguugacuuug

SEQ ID NO: 2820325 - RNA, 19 nt, Artificial Sequence
  Description of Artificial Sequence: Synthetic oligonucleotide
cuucauggcugacucagug

SEQ ID NO: 2820326 - RNA, 19 nt, Artificial Sequence
  Description of Artificial Sequence: Synthetic oligonucleotide
ucaggagccaagcgaacgu

SEQ ID NO: 2820327 - RNA, 19 nt, Artificial Sequence
  Description of Artificial Sequence: Synthetic oligonucleotide
uucgcuuucggcgccaucu

SEQ ID NO: 2820328 - RNA, 19 nt, Artificial Sequence
  Description of Artificial Sequence: Synthetic oligonucleotide
aucaggagccaagcgaacg

SEQ ID NO: 2820329 - RNA, 19 nt, Artificial Sequence
  Description of Artificial Sequence: Synthetic oligonucleotide
gaacguaugccuucuucuc

SEQ ID NO: 2820330 - RNA, 19 nt, Artificial Sequence
  Description of Artificial Sequence: Synthetic oligonucleotide
cuucuaucuucuucauggc

SEQ ID NO: 2820331 - RNA, 19 nt, Artificial Sequence
  Description of Artificial Sequence: Synthetic oligonucleotide
uuucgcggguauuugggcu

SEQ ID NO: 2820332 - RNA, 19 nt, Artificial Sequence
  Description of Artificial Sequence: Synthetic oligonucleotide
ugaucuggugcuuguuggc

SEQ ID NO: 2820333 - RNA, 19 nt, Artificial Sequence
  Description of Artificial Sequence: Synthetic oligonucleotide
acacaaguguguuguuguc

SEQ ID NO: 2820334 - RNA, 19 nt, Artificial Sequence
  Description of Artificial Sequence: Synthetic oligonucleotide
uaugccuucuucucuccgu

SEQ ID NO: 2820335 - RNA, 19 nt, Artificial Sequence
  Description of Artificial Sequence: Synthetic oligonucleotide
caagcuuguuucuccuggg

SEQ ID NO: 2820336 - RNA, 19 nt, Artificial Sequence
  Description of Artificial Sequence: Synthetic oligonucleotide
agaguauauuuggaauuag

SEQ ID NO: 2820337 - RNA, 19 nt, Artificial Sequence
  Description of Artificial Sequence: Synthetic oligonucleotide
acaaguguguuguugucuu

SEQ ID NO: 2820338 - RNA, 19 nt, Artificial Sequence
  Description of Artificial Sequence: Synthetic oligonucleotide
cucuuucgcggguauuugg

SEQ ID NO: 2820339 - RNA, 19 nt, Artificial Sequence
  Description of Artificial Sequence: Synthetic oligonucleotide
ugacgugcggaucuucuuc

SEQ ID NO: 2820340 - RNA, 19 nt, Artificial Sequence
  Description of Artificial Sequence: Synthetic oligonucleotide
aguuuagaugaucccaauu

SEQ ID NO: 2820341 - RNA, 19 nt, Artificial Sequence
  Description of Artificial Sequence: Synthetic oligonucleotide
uuagccagcuggauucagu

SEQ ID NO: 2820342 - RNA, 19 nt, Artificial Sequence
  Description of Artificial Sequence: Synthetic oligonucleotide
ggcauaguggucaagcuug

SEQ ID NO: 2820343 - RNA, 19 nt, Artificial Sequence
  Description of Artificial Sequence: Synthetic oligonucleotide
uguuugaucuggugcuugu

SEQ ID NO: 2820344 - RNA, 19 nt, Artificial Sequence
  Description of Artificial Sequence: Synthetic oligonucleotide
auuugggcugccuccggag

SEQ ID NO: 2820345 - RNA, 19 nt, Artificial Sequence
  Description of Artificial Sequence: Synthetic oligonucleotide
cuucuucucuccgucaggc

SEQ ID NO: 2820346 - RNA, 19 nt, Artificial Sequence
  Description of Artificial Sequence: Synthetic oligonucleotide
uauuugggcugccuccgga

SEQ ID NO: 2820347 - RNA, 19 nt, Artificial Sequence
  Description of Artificial Sequence: Synthetic oligonucleotide
ucaaugucauagagcuucu

SEQ ID NO: 2820348 - RNA, 19 nt, Artificial Sequence
  Description of Artificial Sequence: Synthetic oligonucleotide
uuucggcgccaucuuggcg

SEQ ID NO: 2820349 - RNA, 19 nt, Artificial Sequence
  Description of Artificial Sequence: Synthetic oligonucleotide
cuuccuucuucgcuuucgg

SEQ ID NO: 2820350 - RNA, 19 nt, Artificial Sequence
  Description of Artificial Sequence: Synthetic oligonucleotide
aaucaggagccaagcgaac

SEQ ID NO: 2820351 - RNA, 19 nt, Artificial Sequence
  Description of Artificial Sequence: Synthetic oligonucleotide
cuuucgcggguauuugggc

SEQ ID NO: 2820352 - RNA, 19 nt, Artificial Sequence
  Description of Artificial Sequence: Synthetic oligonucleotide
aucccaauuuuguuggcaa

SEQ ID NO: 2820353 - RNA, 19 nt, Artificial Sequence
  Description of Artificial Sequence: Synthetic oligonucleotide
uucgcggguauuugggcug

SEQ ID NO: 2820354 - RNA, 19 nt, Artificial Sequence
  Description of Artificial Sequence: Synthetic oligonucleotide
uauuuggaauuagccagcu

SEQ ID NO: 2820355 - RNA, 19 nt, Artificial Sequence
  Description of Artificial Sequence: Synthetic oligonucleotide
agcuggauucaguuuagau

SEQ ID NO: 2820356 - RNA, 19 nt, Artificial Sequence
  Description of Artificial Sequence: Synthetic oligonucleotide
agcacugccuucuuggcuu

SEQ ID NO: 2820357 - RNA, 19 nt, Artificial Sequence
  Description of Artificial Sequence: Synthetic oligonucleotide
gaucuggugcuuguuggcc

SEQ ID NO: 2820358 - RNA, 19 nt, Artificial Sequence
  Description of Artificial Sequence: Synthetic oligonucleotide
uucaaggccuucgcuuugg

SEQ ID NO: 2820359 - RNA, 19 nt, Artificial Sequence
  Description of Artificial Sequence: Synthetic oligonucleotide
aggagcuuccuucuucgcu

SEQ ID NO: 2820360 - RNA, 19 nt, Artificial Sequence
  Description of Artificial Sequence: Synthetic oligonucleotide
cuuguuucuccugggcgcg

SEQ ID NO: 2820361 - RNA, 19 nt, Artificial Sequence
  Description of Artificial Sequence: Synthetic oligonucleotide
gacgccuuucagcacugcc

SEQ ID NO: 2820362 - RNA, 19 nt, Artificial Sequence
  Description of Artificial Sequence: Synthetic oligonucleotide
ugaggguguugacuuuggc

SEQ ID NO: 2820363 - RNA, 19 nt, Artificial Sequence
  Description of Artificial Sequence: Synthetic oligonucleotide
uugggcugccuccggagcc

SEQ ID NO: 2820364 - RNA, 19 nt, Artificial Sequence
  Description of Artificial Sequence: Synthetic oligonucleotide
ugccuucuuggcuuucaag

SEQ ID NO: 2820365 - RNA, 19 nt, Artificial Sequence
  Description of Artificial Sequence: Synthetic oligonucleotide
gaaggugggugacgugcgg

SEQ ID NO: 2820366 - RNA, 19 nt, Artificial Sequence
  Description of Artificial Sequence: Synthetic oligonucleotide
cuguggacgccuuucagca

SEQ ID NO: 2820367 - RNA, 19 nt, Artificial Sequence
  Description of Artificial Sequence: Synthetic oligonucleotide
agaugaucccaauuuuguu

SEQ ID NO: 2820368 - RNA, 19 nt, Artificial Sequence
  Description of Artificial Sequence: Synthetic oligonucleotide
auggcauaguggucaagcu

SEQ ID NO: 2820369 - RNA, 19 nt, Artificial Sequence
  Description of Artificial Sequence: Synthetic oligonucleotide
uggcauaguggucaagcuu

SEQ ID NO: 2820370 - RNA, 19 nt, Artificial Sequence
  Description of Artificial Sequence: Synthetic oligonucleotide
auuuggaauuagccagcug

SEQ ID NO: 2820371 - RNA, 19 nt, Artificial Sequence
  Description of Artificial Sequence: Synthetic oligonucleotide
guaugccuucuucucuccg

SEQ ID NO: 2820372 - RNA, 19 nt, Artificial Sequence
  Description of Artificial Sequence: Synthetic oligonucleotide
caagcgaacguaugccuuc

SEQ ID NO: 2820373 - RNA, 19 nt, Artificial Sequence
  Description of Artificial Sequence: Synthetic oligonucleotide
aggccuucgcuuuggcuuc

SEQ ID NO: 2820374 - RNA, 19 nt, Artificial Sequence
  Description of Artificial Sequence: Synthetic oligonucleotide
ggccuugacguccacaaug

SEQ ID NO: 2820375 - RNA, 19 nt, Artificial Sequence
  Description of Artificial Sequence: Synthetic oligonucleotide
uggcuuucaaggccuucgc

SEQ ID NO: 2820376 - RNA, 19 nt, Artificial Sequence
  Description of Artificial Sequence: Synthetic oligonucleotide
cuucacagccuguuugauc

SEQ ID NO: 2820377 - RNA, 19 nt, Artificial Sequence
  Description of Artificial Sequence: Synthetic oligonucleotide
uuggcaacauccagagcau

SEQ ID NO: 2820378 - RNA, 19 nt, Artificial Sequence
  Description of Artificial Sequence: Synthetic oligonucleotide
uugggccgccggaaggugg

SEQ ID NO: 2820379 - RNA, 19 nt, Artificial Sequence
  Description of Artificial Sequence: Synthetic oligonucleotide
gcuuguuucuccugggcgc

SEQ ID NO: 2820380 - RNA, 19 nt, Artificial Sequence
  Description of Artificial Sequence: Synthetic oligonucleotide
auggcugacucagugguca

SEQ ID NO: 2820381 - RNA, 19 nt, Artificial Sequence
  Description of Artificial Sequence: Synthetic oligonucleotide
acguccacaaugaacacaa

SEQ ID NO: 2820382 - RNA, 19 nt, Artificial Sequence
  Description of Artificial Sequence: Synthetic oligonucleotide
ucaggccuuaugagggugu

SEQ ID NO: 2820383 - RNA, 19 nt, Artificial Sequence
  Description of Artificial Sequence: Synthetic oligonucleotide
cuuaugaggguguugacuu

SEQ ID NO: 2820384 - RNA, 19 nt, Artificial Sequence
  Description of Artificial Sequence: Synthetic oligonucleotide
gucauagagcuucuucaca

SEQ ID NO: 2820385 - RNA, 19 nt, Artificial Sequence
  Description of Artificial Sequence: Synthetic oligonucleotide
ucccaauuuuguuggcaac

SEQ ID NO: 2820386 - RNA, 19 nt, Artificial Sequence
  Description of Artificial Sequence: Synthetic oligonucleotide
cuuucggcgccaucuuggc

SEQ ID NO: 2820387 - RNA, 19 nt, Artificial Sequence
  Description of Artificial Sequence: Synthetic oligonucleotide
uuccuucuucgcuuucggc

SEQ ID NO: 2820388 - RNA, 19 nt, Artificial Sequence
  Description of Artificial Sequence: Synthetic oligonucleotide
gcaggagcuuccuucuucg

SEQ ID NO: 2820389 - RNA, 19 nt, Artificial Sequence
  Description of Artificial Sequence: Synthetic oligonucleotide
aauuagccagcuggauuca

SEQ ID NO: 2820390 - RNA, 19 nt, Artificial Sequence
  Description of Artificial Sequence: Synthetic oligonucleotide
acauccagagcaucauaau

SEQ ID NO: 2820391 - RNA, 19 nt, Artificial Sequence
  Description of Artificial Sequence: Synthetic oligonucleotide
uucggcuuugggaggggca

SEQ ID NO: 2820392 - RNA, 19 nt, Artificial Sequence
  Description of Artificial Sequence: Synthetic oligonucleotide
ucggcuuugggaggggcag

SEQ ID NO: 2820393 - RNA, 19 nt, Artificial Sequence
  Description of Artificial Sequence: Synthetic oligonucleotide
aucuggugcuuguuggccu

SEQ ID NO: 2820394 - RNA, 19 nt, Artificial Sequence
  Description of Artificial Sequence: Synthetic oligonucleotide
caauuuuguuggcaacauc

SEQ ID NO: 2820395 - RNA, 19 nt, Artificial Sequence
  Description of Artificial Sequence: Synthetic oligonucleotide
gguauuugggcugccuccg

SEQ ID NO: 2820396 - RNA, 19 nt, Artificial Sequence
  Description of Artificial Sequence: Synthetic oligonucleotide
ccuucuuggcuuucaaggc

SEQ ID NO: 2820397 - RNA, 19 nt, Artificial Sequence
  Description of Artificial Sequence: Synthetic oligonucleotide
gaucccaauuuuguuggca

SEQ ID NO: 2820398 - RNA, 19 nt, Artificial Sequence
  Description of Artificial Sequence: Synthetic oligonucleotide
uucuucucuccgucaggcc

SEQ ID NO: 2820399 - RNA, 19 nt, Artificial Sequence
  Description of Artificial Sequence: Synthetic oligonucleotide
uuuguggcuguggacgccu

SEQ ID NO: 2820400 - RNA, 19 nt, Artificial Sequence
  Description of Artificial Sequence: Synthetic oligonucleotide
ccgucaggccuuaugaggg

SEQ ID NO: 2820401 - RNA, 19 nt, Artificial Sequence
  Description of Artificial Sequence: Synthetic oligonucleotide
auaauggcauaguggucaa

SEQ ID NO: 2820402 - RNA, 19 nt, Artificial Sequence
  Description of Artificial Sequence: Synthetic oligonucleotide
ggguauuugggcugccucc

SEQ ID NO: 2820403 - RNA, 19 nt, Artificial Sequence
  Description of Artificial Sequence: Synthetic oligonucleotide
ugaucccaauuuuguuggc

SEQ ID NO: 2820404 - RNA, 19 nt, Artificial Sequence
  Description of Artificial Sequence: Synthetic oligonucleotide
gcugacucaguggucaggg

SEQ ID NO: 2820405 - RNA, 19 nt, Artificial Sequence
  Description of Artificial Sequence: Synthetic oligonucleotide
guguuguugucuucuaucu

SEQ ID NO: 2820406 - RNA, 19 nt, Artificial Sequence
  Description of Artificial Sequence: Synthetic oligonucleotide
gucuugggccgccggaagg

SEQ ID NO: 2820407 - RNA, 19 nt, Artificial Sequence
  Description of Artificial Sequence: Synthetic oligonucleotide
uagccagcuggauucaguu

SEQ ID NO: 2820408 - RNA, 19 nt, Artificial Sequence
  Description of Artificial Sequence: Synthetic oligonucleotide
guauuugggcugccuccgg

SEQ ID NO: 2820409 - RNA, 19 nt, Artificial Sequence
  Description of Artificial Sequence: Synthetic oligonucleotide
cugggcgcgcucuuucgcg

SEQ ID NO: 2820410 - RNA, 19 nt, Artificial Sequence
  Description of Artificial Sequence: Synthetic oligonucleotide
guccacaaugaacacaagu

SEQ ID NO: 2820411 - RNA, 19 nt, Artificial Sequence
  Description of Artificial Sequence: Synthetic oligonucleotide
uccugggcgcgcucuuucg

SEQ ID NO: 2820412 - RNA, 19 nt, Artificial Sequence
  Description of Artificial Sequence: Synthetic oligonucleotide
cacagccuguuugaucugg

SEQ ID NO: 2820413 - RNA, 19 nt, Artificial Sequence
  Description of Artificial Sequence: Synthetic oligonucleotide
cuccgucaggccuuaugag

SEQ ID NO: 2820414 - RNA, 19 nt, Artificial Sequence
  Description of Artificial Sequence: Synthetic oligonucleotide
uuguuggccuugacgucca

SEQ ID NO: 2820415 - RNA, 19 nt, Artificial Sequence
  Description of Artificial Sequence: Synthetic oligonucleotide
gcuguggacgccuuucagc

SEQ ID NO: 2820416 - RNA, 19 nt, Artificial Sequence
  Description of Artificial Sequence: Synthetic oligonucleotide
ugggcgcgcucuuucgcgg

SEQ ID NO: 2820417 - RNA, 19 nt, Artificial Sequence
  Description of Artificial Sequence: Synthetic oligonucleotide
ggggaauuugauaauggca

SEQ ID NO: 2820418 - RNA, 19 nt, Artificial Sequence
  Description of Artificial Sequence: Synthetic oligonucleotide
ccuucuucgcuuucggcgc

SEQ ID NO: 2820419 - RNA, 19 nt, Artificial Sequence
  Description of Artificial Sequence: Synthetic oligonucleotide
gucaagcuuguuucuccug

SEQ ID NO: 2820420 - RNA, 19 nt, Artificial Sequence
  Description of Artificial Sequence: Synthetic oligonucleotide
uuuuguggcuguggacgcc

SEQ ID NO: 2820421 - RNA, 19 nt, Artificial Sequence
  Description of Artificial Sequence: Synthetic oligonucleotide
cugacucaguggucagggg

SEQ ID NO: 2820422 - RNA, 19 nt, Artificial Sequence
  Description of Artificial Sequence: Synthetic oligonucleotide
ugccuccggagccgcaggg

SEQ ID NO: 2820423 - RNA, 19 nt, Artificial Sequence
  Description of Artificial Sequence: Synthetic oligonucleotide
aaggugggugacgugcgga

SEQ ID NO: 2820424 - RNA, 19 nt, Artificial Sequence
  Description of Artificial Sequence: Synthetic oligonucleotide
ugacguccacaaugaacac

SEQ ID NO: 2820425 - RNA, 19 nt, Artificial Sequence
  Description of Artificial Sequence: Synthetic oligonucleotide
aagcgaacguaugccuucu

SEQ ID NO: 2820426 - RNA, 19 nt, Artificial Sequence
  Description of Artificial Sequence: Synthetic oligonucleotide
uggcuucggcuuugggagg

SEQ ID NO: 2820427 - RNA, 19 nt, Artificial Sequence
  Description of Artificial Sequence: Synthetic oligonucleotide
gggaauuugauaauggcau

SEQ ID NO: 2820428 - RNA, 19 nt, Artificial Sequence
  Description of Artificial Sequence: Synthetic oligonucleotide
gacguccacaaugaacaca

SEQ ID NO: 2820429 - RNA, 19 nt, Artificial Sequence
  Description of Artificial Sequence: Synthetic oligonucleotide
uggcuguggacgccuuuca

SEQ ID NO: 2820430 - RNA, 19 nt, Artificial Sequence
  Description of Artificial Sequence: Synthetic oligonucleotide
uggaauuagccagcuggau

SEQ ID NO: 2820431 - RNA, 19 nt, Artificial Sequence
  Description of Artificial Sequence: Synthetic oligonucleotide
gcuuucggcgccaucuugg

SEQ ID NO: 2820432 - RNA, 19 nt, Artificial Sequence
  Description of Artificial Sequence: Synthetic oligonucleotide
uuaugaggguguugacuuu

SEQ ID NO: 2820433 - RNA, 19 nt, Artificial Sequence
  Description of Artificial Sequence: Synthetic oligonucleotide
augaggguguugacuuugg

SEQ ID NO: 2820434 - RNA, 19 nt, Artificial Sequence
  Description of Artificial Sequence: Synthetic oligonucleotide
ucuugggccgccggaaggu

SEQ ID NO: 2820435 - RNA, 19 nt, Artificial Sequence
  Description of Artificial Sequence: Synthetic oligonucleotide
uaauggcauaguggucaag

SEQ ID NO: 2820436 - RNA, 19 nt, Artificial Sequence
  Description of Artificial Sequence: Synthetic oligonucleotide
cuucuucgcuuucggcgcc

SEQ ID NO: 2820437 - RNA, 19 nt, Artificial Sequence
  Description of Artificial Sequence: Synthetic oligonucleotide
auuagccagcuggauucag

SEQ ID NO: 2820438 - RNA, 19 nt, Artificial Sequence
  Description of Artificial Sequence: Synthetic oligonucleotide
uggauucaguuuagaugau

SEQ ID NO: 2820439 - RNA, 19 nt, Artificial Sequence
  Description of Artificial Sequence: Synthetic oligonucleotide
ugccuucuucucuccguca

SEQ ID NO: 2820440 - RNA, 19 nt, Artificial Sequence
  Description of Artificial Sequence: Synthetic oligonucleotide
aguguguuguugucuucua

SEQ ID NO: 2820441 - RNA, 19 nt, Artificial Sequence
  Description of Artificial Sequence: Synthetic oligonucleotide
uguggacgccuuucagcac

SEQ ID NO: 2820442 - RNA, 19 nt, Artificial Sequence
  Description of Artificial Sequence: Synthetic oligonucleotide
cucuccgucaggccuuaug

SEQ ID NO: 2820443 - RNA, 19 nt, Artificial Sequence
  Description of Artificial Sequence: Synthetic oligonucleotide
caaguguguuguugucuuc

SEQ ID NO: 2820444 - RNA, 19 nt, Artificial Sequence
  Description of Artificial Sequence: Synthetic oligonucleotide
ugggcugccuccggagccg

SEQ ID NO: 2820445 - RNA, 19 nt, Artificial Sequence
  Description of Artificial Sequence: Synthetic oligonucleotide
ucuggugcuuguuggccuu

SEQ ID NO: 2820446 - RNA, 19 nt, Artificial Sequence
  Description of Artificial Sequence: Synthetic oligonucleotide
uggcugacucaguggucag

SEQ ID NO: 2820447 - RNA, 19 nt, Artificial Sequence
  Description of Artificial Sequence: Synthetic oligonucleotide
acgccuuucagcacugccu

SEQ ID NO: 2820448 - RNA, 19 nt, Artificial Sequence
  Description of Artificial Sequence: Synthetic oligonucleotide
agcuuccuucuucgcuuuc

SEQ ID NO: 2820449 - RNA, 19 nt, Artificial Sequence
  Description of Artificial Sequence: Synthetic oligonucleotide
ggccuuaugaggguguuga

SEQ ID NO: 2820450 - RNA, 19 nt, Artificial Sequence
  Description of Artificial Sequence: Synthetic oligonucleotide
gagccgcagggucuugggc

SEQ ID NO: 2820451 - RNA, 19 nt, Artificial Sequence
  Description of Artificial Sequence: Synthetic oligonucleotide
cagccuguuugaucuggug

SEQ ID NO: 2820452 - RNA, 19 nt, Artificial Sequence
  Description of Artificial Sequence: Synthetic oligonucleotide
ggaaggugggugacgugcg

SEQ ID NO: 2820453 - RNA, 19 nt, Artificial Sequence
  Description of Artificial Sequence: Synthetic oligonucleotide
caucauaaucaggagccaa

SEQ ID NO: 2820454 - RNA, 19 nt, Artificial Sequence
  Description of Artificial Sequence: Synthetic oligonucleotide
ccagagcaucauaaucagg

SEQ ID NO: 2820455 - RNA, 19 nt, Artificial Sequence
  Description of Artificial Sequence: Synthetic oligonucleotide
cauggcugacucagugguc

SEQ ID NO: 2820456 - RNA, 19 nt, Artificial Sequence
  Description of Artificial Sequence: Synthetic oligonucleotide
gacgugcggaucuucuucu

SEQ ID NO: 2820457 - RNA, 19 nt, Artificial Sequence
  Description of Artificial Sequence: Synthetic oligonucleotide
uguugucuucuaucuucuu

SEQ ID NO: 2820458 - RNA, 19 nt, Artificial Sequence
  Description of Artificial Sequence: Synthetic oligonucleotide
uuucuccugggcgcgcucu

SEQ ID NO: 2820459 - RNA, 19 nt, Artificial Sequence
  Description of Artificial Sequence: Synthetic oligonucleotide
ggaauuugauaauggcaua

SEQ ID NO: 2820460 - RNA, 19 nt, Artificial Sequence
  Description of Artificial Sequence: Synthetic oligonucleotide
uguuucuccugggcgcgcu

SEQ ID NO: 2820461 - RNA, 19 nt, Artificial Sequence
  Description of Artificial Sequence: Synthetic oligonucleotide
gccagcuggauucaguuua

SEQ ID NO: 2820462 - RNA, 19 nt, Artificial Sequence
  Description of Artificial Sequence: Synthetic oligonucleotide
caggagcuuccuucuucgc

SEQ ID NO: 2820463 - RNA, 19 nt, Artificial Sequence
  Description of Artificial Sequence: Synthetic oligonucleotide
cuucgcuuuggcuucggcu

SEQ ID NO: 2820464 - RNA, 19 nt, Artificial Sequence
  Description of Artificial Sequence: Synthetic oligonucleotide
aggugggugacgugcggau

SEQ ID NO: 2820465 - RNA, 19 nt, Artificial Sequence
  Description of Artificial Sequence: Synthetic oligonucleotide
gucaggccuuaugagggug

SEQ ID NO: 2820466 - RNA, 19 nt, Artificial Sequence
  Description of Artificial Sequence: Synthetic oligonucleotide
cuuucaaggccuucgcuuu

SEQ ID NO: 2820467 - RNA, 19 nt, Artificial Sequence
  Description of Artificial Sequence: Synthetic oligonucleotide
guggacgccuuucagcacu

SEQ ID NO: 2820468 - RNA, 19 nt, Artificial Sequence
  Description of Artificial Sequence: Synthetic oligonucleotide
acugccuucuuggcuuuca

SEQ ID NO: 2820469 - RNA, 19 nt, Artificial Sequence
  Description of Artificial Sequence: Synthetic oligonucleotide
ggagccgcagggucuuggg

SEQ ID NO: 2820470 - RNA, 19 nt, Artificial Sequence
  Description of Artificial Sequence: Synthetic oligonucleotide
agggucuugggccgccgga

SEQ ID NO: 2820471 - RNA, 19 nt, Artificial Sequence
  Description of Artificial Sequence: Synthetic oligonucleotide
uguugacuuuggccacauc

SEQ ID NO: 2820472 - RNA, 19 nt, Artificial Sequence
  Description of Artificial Sequence: Synthetic oligonucleotide
guggucaagcuuguuucuc

SEQ ID NO: 2820473 - RNA, 19 nt, Artificial Sequence
  Description of Artificial Sequence: Synthetic oligonucleotide
ggauucaguuuagaugauc

SEQ ID NO: 2820474 - RNA, 19 nt, Artificial Sequence
  Description of Artificial Sequence: Synthetic oligonucleotide
ucgcuuuggcuucggcuuu

SEQ ID NO: 2820475 - RNA, 19 nt, Artificial Sequence
  Description of Artificial Sequence: Synthetic oligonucleotide
uaucuucuucauggcugac

SEQ ID NO: 2820476 - RNA, 19 nt, Artificial Sequence
  Description of Artificial Sequence: Synthetic oligonucleotide
ggcaggagcuuccuucuuc

SEQ ID NO: 2820477 - RNA, 19 nt, Artificial Sequence
  Description of Artificial Sequence: Synthetic oligonucleotide
ucuuggcuuucaaggccuu

SEQ ID NO: 2820478 - RNA, 19 nt, Artificial Sequence
  Description of Artificial Sequence: Synthetic oligonucleotide
gugggugacgugcggaucu

SEQ ID NO: 2820479 - RNA, 19 nt, Artificial Sequence
  Description of Artificial Sequence: Synthetic oligonucleotide
cuucggcuuugggaggggc

SEQ ID NO: 2820480 - RNA, 19 nt, Artificial Sequence
  Description of Artificial Sequence: Synthetic oligonucleotide
gccgcagggucuugggccg

SEQ ID NO: 2820481 - RNA, 19 nt, Artificial Sequence
  Description of Artificial Sequence: Synthetic oligonucleotide
gcgaacguaugccuucuuc

SEQ ID NO: 2820482 - RNA, 19 nt, Artificial Sequence
  Description of Artificial Sequence: Synthetic oligonucleotide
ggagccaagcgaacguaug

SEQ ID NO: 2820483 - RNA, 19 nt, Artificial Sequence
  Description of Artificial Sequence: Synthetic oligonucleotide
ggcuguggacgccuuucag

SEQ ID NO: 2820484 - RNA, 19 nt, Artificial Sequence
  Description of Artificial Sequence: Synthetic oligonucleotide
uguggcuguggacgccuuu

SEQ ID NO: 2820485 - RNA, 19 nt, Artificial Sequence
  Description of Artificial Sequence: Synthetic oligonucleotide
ggcuucggcuuugggaggg

SEQ ID NO: 2820486 - RNA, 19 nt, Artificial Sequence
  Description of Artificial Sequence: Synthetic oligonucleotide
ccagcuggauucaguuuag

SEQ ID NO: 2820487 - RNA, 19 nt, Artificial Sequence
  Description of Artificial Sequence: Synthetic oligonucleotide
cagggucuugggccgccgg

SEQ ID NO: 2820488 - RNA, 19 nt, Artificial Sequence
  Description of Artificial Sequence: Synthetic oligonucleotide
agccagcuggauucaguuu

SEQ ID NO: 2820489 - RNA, 19 nt, Artificial Sequence
  Description of Artificial Sequence: Synthetic oligonucleotide
ucgcggguauuugggcugc

SEQ ID NO: 2820490 - RNA, 19 nt, Artificial Sequence
  Description of Artificial Sequence: Synthetic oligonucleotide
ggucuugggccgccggaag

SEQ ID NO: 2820491 - RNA, 19 nt, Artificial Sequence
  Description of Artificial Sequence: Synthetic oligonucleotide
uggccuugacguccacaau

SEQ ID NO: 2820492 - RNA, 19 nt, Artificial Sequence
  Description of Artificial Sequence: Synthetic oligonucleotide
uuguuucuccugggcgcgc

SEQ ID NO: 2820493 - RNA, 19 nt, Artificial Sequence
  Description of Artificial Sequence: Synthetic oligonucleotide
cuuggcuuucaaggccuuc

SEQ ID NO: 2820494 - RNA, 19 nt, Artificial Sequence
  Description of Artificial Sequence: Synthetic oligonucleotide
ggguguugacuuuggccac

SEQ ID NO: 2820495 - RNA, 19 nt, Artificial Sequence
  Description of Artificial Sequence: Synthetic oligonucleotide
ugggaggggcaggagcuuc

SEQ ID NO: 2820496 - RNA, 19 nt, Artificial Sequence
  Description of Artificial Sequence: Synthetic oligonucleotide
ucgcuuucggcgccaucuu

SEQ ID NO: 2820497 - RNA, 19 nt, Artificial Sequence
  Description of Artificial Sequence: Synthetic oligonucleotide
uucuucgcuuucggcgcca

SEQ ID NO: 2820498 - RNA, 19 nt, Artificial Sequence
  Description of Artificial Sequence: Synthetic oligonucleotide
cugccuccggagccgcagg

SEQ ID NO: 2820499 - RNA, 19 nt, Artificial Sequence
  Description of Artificial Sequence: Synthetic oligonucleotide
gcuuucaaggccuucgcuu

SEQ ID NO: 2820500 - RNA, 19 nt, Artificial Sequence
  Description of Artificial Sequence: Synthetic oligonucleotide
aggagccaagcgaacguau

SEQ ID NO: 2820501 - RNA, 19 nt, Artificial Sequence
  Description of Artificial Sequence: Synthetic oligonucleotide
acagccuguuugaucuggu

SEQ ID NO: 2820502 - RNA, 19 nt, Artificial Sequence
  Description of Artificial Sequence: Synthetic oligonucleotide
cggaaggugggugacgugc

SEQ ID NO: 2820503 - RNA, 19 nt, Artificial Sequence
  Description of Artificial Sequence: Synthetic oligonucleotide
cccaauuuuguuggcaaca

SEQ ID NO: 2820504 - RNA, 19 nt, Artificial Sequence
  Description of Artificial Sequence: Synthetic oligonucleotide
guuggccuugacguccaca

SEQ ID NO: 2820505 - RNA, 19 nt, Artificial Sequence
  Description of Artificial Sequence: Synthetic oligonucleotide
caacauccagagcaucaua

SEQ ID NO: 2820506 - RNA, 19 nt, Artificial Sequence
  Description of Artificial Sequence: Synthetic oligonucleotide
uguuggccuugacguccac

SEQ ID NO: 2820507 - RNA, 19 nt, Artificial Sequence
  Description of Artificial Sequence: Synthetic oligonucleotide
cuccugggcgcgcucuuuc

SEQ ID NO: 2820508 - RNA, 19 nt, Artificial Sequence
  Description of Artificial Sequence: Synthetic oligonucleotide
ggcugacucaguggucagg

SEQ ID NO: 2820509 - RNA, 19 nt, Artificial Sequence
  Description of Artificial Sequence: Synthetic oligonucleotide
ucggcgccaucuuggcgaa

SEQ ID NO: 2820510 - RNA, 19 nt, Artificial Sequence
  Description of Artificial Sequence: Synthetic oligonucleotide
gcuuguuggccuugacguc

SEQ ID NO: 2820511 - RNA, 19 nt, Artificial Sequence
  Description of Artificial Sequence: Synthetic oligonucleotide
gccuugacguccacaauga

SEQ ID NO: 2820512 - RNA, 19 nt, Artificial Sequence
  Description of Artificial Sequence: Synthetic oligonucleotide
ggagcuuccuucuucgcuu

SEQ ID NO: 2820513 - RNA, 19 nt, Artificial Sequence
  Description of Artificial Sequence: Synthetic oligonucleotide
uucuccugggcgcgcucuu

SEQ ID NO: 2820514 - RNA, 19 nt, Artificial Sequence
  Description of Artificial Sequence: Synthetic oligonucleotide
caaugaacacaaguguguu

SEQ ID NO: 2820515 - RNA, 19 nt, Artificial Sequence
  Description of Artificial Sequence: Synthetic oligonucleotide
gugcggaucuucuucuuuu

SEQ ID NO: 2820516 - RNA, 19 nt, Artificial Sequence
  Description of Artificial Sequence: Synthetic oligonucleotide
cuugggccgccggaaggug

SEQ ID NO: 2820517 - RNA, 19 nt, Artificial Sequence
  Description of Artificial Sequence: Synthetic oligonucleotide
guguguuguugucuucuau

SEQ ID NO: 2820518 - RNA, 19 nt, Artificial Sequence
  Description of Artificial Sequence: Synthetic oligonucleotide
ggucaagcuuguuucuccu

SEQ ID NO: 2820519 - RNA, 19 nt, Artificial Sequence
  Description of Artificial Sequence: Synthetic oligonucleotide
guuucuccugggcgcgcuc

SEQ ID NO: 2820520 - RNA, 19 nt, Artificial Sequence
  Description of Artificial Sequence: Synthetic oligonucleotide
cguaugccuucuucucucc

SEQ ID NO: 2820521 - RNA, 19 nt, Artificial Sequence
  Description of Artificial Sequence: Synthetic oligonucleotide
gcucuuucgcggguauuug

SEQ ID NO: 2820522 - RNA, 19 nt, Artificial Sequence
  Description of Artificial Sequence: Synthetic oligonucleotide
gguguugacuuuggccaca

SEQ ID NO: 2820523 - RNA, 19 nt, Artificial Sequence
  Description of Artificial Sequence: Synthetic oligonucleotide
uuguggcuguggacgccuu

SEQ ID NO: 2820524 - RNA, 19 nt, Artificial Sequence
  Description of Artificial Sequence: Synthetic oligonucleotide
acgugcggaucuucuucuu

SEQ ID NO: 2820525 - RNA, 19 nt, Artificial Sequence
  Description of Artificial Sequence: Synthetic oligonucleotide
agcgaacguaugccuucuu

SEQ ID NO: 2820526 - RNA, 19 nt, Artificial Sequence
  Description of Artificial Sequence: Synthetic oligonucleotide
caaggccuucgcuuuggcu

SEQ ID NO: 2820527 - RNA, 19 nt, Artificial Sequence
  Description of Artificial Sequence: Synthetic oligonucleotide
caguuuagaugaucccaau

SEQ ID NO: 2820528 - RNA, 19 nt, Artificial Sequence
  Description of Artificial Sequence: Synthetic oligonucleotide
gccuuaugaggguguugac

SEQ ID NO: 2820529 - RNA, 19 nt, Artificial Sequence
  Description of Artificial Sequence: Synthetic oligonucleotide
gggcgcgcucuuucgcggg

SEQ ID NO: 2820530 - RNA, 19 nt, Artificial Sequence
  Description of Artificial Sequence: Synthetic oligonucleotide
gcuuuggcuucggcuuugg

SEQ ID NO: 2820531 - RNA, 19 nt, Artificial Sequence
  Description of Artificial Sequence: Synthetic oligonucleotide
cuucgcuuucggcgccauc

SEQ ID NO: 2820532 - RNA, 19 nt, Artificial Sequence
  Description of Artificial Sequence: Synthetic oligonucleotide
gcaucauaaucaggagcca

SEQ ID NO: 2820533 - RNA, 19 nt, Artificial Sequence
  Description of Artificial Sequence: Synthetic oligonucleotide
gccaagcgaacguaugccu

SEQ ID NO: 2820534 - RNA, 19 nt, Artificial Sequence
  Description of Artificial Sequence: Synthetic oligonucleotide
ucuucgcuuucggcgccau

SEQ ID NO: 2820535 - RNA, 19 nt, Artificial Sequence
  Description of Artificial Sequence: Synthetic oligonucleotide
uccggagccgcagggucuu

SEQ ID NO: 2820536 - RNA, 19 nt, Artificial Sequence
  Description of Artificial Sequence: Synthetic oligonucleotide
ccugggcgcgcucuuucgc

SEQ ID NO: 2820537 - RNA, 19 nt, Artificial Sequence
  Description of Artificial Sequence: Synthetic oligonucleotide
ggcgccaucuuggcgaaaa

SEQ ID NO: 2820538 - RNA, 19 nt, Artificial Sequence
  Description of Artificial Sequence: Synthetic oligonucleotide
uucucuccgucaggccuua

SEQ ID NO: 2820539 - RNA, 19 nt, Artificial Sequence
  Description of Artificial Sequence: Synthetic oligonucleotide
cgaacguaugccuucuucu

SEQ ID NO: 2820540 - RNA, 19 nt, Artificial Sequence
  Description of Artificial Sequence: Synthetic oligonucleotide
cuucucuccgucaggccuu

SEQ ID NO: 2820541 - RNA, 19 nt, Artificial Sequence
  Description of Artificial Sequence: Synthetic oligonucleotide
ucuccugggcgcgcucuuu

SEQ ID NO: 2820542 - RNA, 19 nt, Artificial Sequence
  Description of Artificial Sequence: Synthetic oligonucleotide
ggcuuucaaggccuucgcu

SEQ ID NO: 2820543 - RNA, 19 nt, Artificial Sequence
  Description of Artificial Sequence: Synthetic oligonucleotide
ccuucgcuuuggcuucggc

SEQ ID NO: 2820544 - RNA, 19 nt, Artificial Sequence
  Description of Artificial Sequence: Synthetic oligonucleotide
ccuccggagccgcaggguc

SEQ ID NO: 2820545 - RNA, 19 nt, Artificial Sequence
  Description of Artificial Sequence: Synthetic oligonucleotide
cagcacugccuucuuggcu

SEQ ID NO: 2820546 - RNA, 19 nt, Artificial Sequence
  Description of Artificial Sequence: Synthetic oligonucleotide
ggcuuugggaggggcagga

SEQ ID NO: 2820547 - RNA, 19 nt, Artificial Sequence
  Description of Artificial Sequence: Synthetic oligonucleotide
ccuuaugaggguguugacu

SEQ ID NO: 2820548 - RNA, 19 nt, Artificial Sequence
  Description of Artificial Sequence: Synthetic oligonucleotide
cggguauuugggcugccuc

SEQ ID NO: 2820549 - RNA, 19 nt, Artificial Sequence
  Description of Artificial Sequence: Synthetic oligonucleotide
ugggugacgugcggaucuu

SEQ ID NO: 2820550 - RNA, 19 nt, Artificial Sequence
  Description of Artificial Sequence: Synthetic oligonucleotide
ggugacgugcggaucuucu

SEQ ID NO: 2820551 - RNA, 19 nt, Artificial Sequence
  Description of Artificial Sequence: Synthetic oligonucleotide
gccgccggaagguggguga

SEQ ID NO: 2820552 - RNA, 19 nt, Artificial Sequence
  Description of Artificial Sequence: Synthetic oligonucleotide
caggagccaagcgaacgua

SEQ ID NO: 2820553 - RNA, 19 nt, Artificial Sequence
  Description of Artificial Sequence: Synthetic oligonucleotide
caucaaugucauagagcuu

SEQ ID NO: 2820554 - RNA, 19 nt, Artificial Sequence
  Description of Artificial Sequence: Synthetic oligonucleotide
gcuuugggaggggcaggag

SEQ ID NO: 2820555 - RNA, 19 nt, Artificial Sequence
  Description of Artificial Sequence: Synthetic oligonucleotide
uggccacaucaaugucaua

SEQ ID NO: 2820556 - RNA, 19 nt, Artificial Sequence
  Description of Artificial Sequence: Synthetic oligonucleotide
gugacgugcggaucuucuu

SEQ ID NO: 2820557 - RNA, 19 nt, Artificial Sequence
  Description of Artificial Sequence: Synthetic oligonucleotide
ggugggugacgugcggauc

SEQ ID NO: 2820558 - RNA, 19 nt, Artificial Sequence
  Description of Artificial Sequence: Synthetic oligonucleotide
gcuucggcuuugggagggg

SEQ ID NO: 2820559 - RNA, 19 nt, Artificial Sequence
  Description of Artificial Sequence: Synthetic oligonucleotide
gcaacauccagagcaucau

SEQ ID NO: 2820560 - RNA, 19 nt, Artificial Sequence
  Description of Artificial Sequence: Synthetic oligonucleotide
gccuuucagcacugccuuc

SEQ ID NO: 2820561 - RNA, 19 nt, Artificial Sequence
  Description of Artificial Sequence: Synthetic oligonucleotide
cuccggagccgcagggucu

SEQ ID NO: 2820562 - RNA, 19 nt, Artificial Sequence
  Description of Artificial Sequence: Synthetic oligonucleotide
gcagggucuugggccgccg

SEQ ID NO: 2820563 - RNA, 19 nt, Artificial Sequence
  Description of Artificial Sequence: Synthetic oligonucleotide
cguccacaaugaacacaag

SEQ ID NO: 2820564 - RNA, 19 nt, Artificial Sequence
  Description of Artificial Sequence: Synthetic oligonucleotide
ccaauuuuguuggcaacau

SEQ ID NO: 2820565 - RNA, 19 nt, Artificial Sequence
  Description of Artificial Sequence: Synthetic oligonucleotide
cacugccuucuuggcuuuc

SEQ ID NO: 2820566 - RNA, 19 nt, Artificial Sequence
  Description of Artificial Sequence: Synthetic oligonucleotide
guguugacuuuggccacau

SEQ ID NO: 2820567 - RNA, 19 nt, Artificial Sequence
  Description of Artificial Sequence: Synthetic oligonucleotide
cgcuuucggcgccaucuug

SEQ ID NO: 2820568 - RNA, 19 nt, Artificial Sequence
  Description of Artificial Sequence: Synthetic oligonucleotide
ggacgccuuucagcacugc

SEQ ID NO: 2820569 - RNA, 19 nt, Artificial Sequence
  Description of Artificial Sequence: Synthetic oligonucleotide
gccggaaggugggugacgu

SEQ ID NO: 2820570 - RNA, 19 nt, Artificial Sequence
  Description of Artificial Sequence: Synthetic oligonucleotide
ccaagcgaacguaugccuu

SEQ ID NO: 2820571 - RNA, 19 nt, Artificial Sequence
  Description of Artificial Sequence: Synthetic oligonucleotide
ggccgccggaaggugggug

SEQ ID NO: 2820572 - RNA, 19 nt, Artificial Sequence
  Description of Artificial Sequence: Synthetic oligonucleotide
ccggaaggugggugacgug

SEQ ID NO: 2820573 - RNA, 19 nt, Artificial Sequence
  Description of Artificial Sequence: Synthetic oligonucleotide
gccuucgcuuuggcuucgg

SEQ ID NO: 2820574 - RNA, 19 nt, Artificial Sequence
  Description of Artificial Sequence: Synthetic oligonucleotide
ccuugacguccacaaugaa

SEQ ID NO: 2820575 - RNA, 19 nt, Artificial Sequence
  Description of Artificial Sequence: Synthetic oligonucleotide
gaggggcaggagcuuccuu

SEQ ID NO: 2820576 - RNA, 19 nt, Artificial Sequence
  Description of Artificial Sequence: Synthetic oligonucleotide
gcauaguggucaagcuugu

SEQ ID NO: 2820577 - RNA, 19 nt, Artificial Sequence
  Description of Artificial Sequence: Synthetic oligonucleotide
gggugacgugcggaucuuc

SEQ ID NO: 2820578 - RNA, 19 nt, Artificial Sequence
  Description of Artificial Sequence: Synthetic oligonucleotide
ucucuccgucaggccuuau

SEQ ID NO: 2820579 - RNA, 19 nt, Artificial Sequence
  Description of Artificial Sequence: Synthetic oligonucleotide
cauaguggucaagcuuguu

SEQ ID NO: 2820580 - RNA, 19 nt, Artificial Sequence
  Description of Artificial Sequence: Synthetic oligonucleotide
caaugucauagagcuucuu

SEQ ID NO: 2820581 - RNA, 19 nt, Artificial Sequence
  Description of Artificial Sequence: Synthetic oligonucleotide
cggagccgcagggucuugg

SEQ ID NO: 2820582 - RNA, 19 nt, Artificial Sequence
  Description of Artificial Sequence: Synthetic oligonucleotide
gggcugccuccggagccgc

SEQ ID NO: 2820583 - RNA, 19 nt, Artificial Sequence
  Description of Artificial Sequence: Synthetic oligonucleotide
caggccuuaugaggguguu

SEQ ID NO: 2820584 - RNA, 19 nt, Artificial Sequence
  Description of Artificial Sequence: Synthetic oligonucleotide
cgcuuuggcuucggcuuug

SEQ ID NO: 2820585 - RNA, 19 nt, Artificial Sequence
  Description of Artificial Sequence: Synthetic oligonucleotide
cgccggaaggugggugacg

SEQ ID NO: 2820586 - RNA, 19 nt, Artificial Sequence
  Description of Artificial Sequence: Synthetic oligonucleotide
ccgccggaaggugggugac

SEQ ID NO: 2820587 - RNA, 19 nt, Artificial Sequence
  Description of Artificial Sequence: Synthetic oligonucleotide
ggcgcgcucuuucgcgggu

SEQ ID NO: 2820588 - RNA, 19 nt, Artificial Sequence
  Description of Artificial Sequence: Synthetic oligonucleotide
gcggguauuugggcugccu

SEQ ID NO: 2820589 - RNA, 19 nt, Artificial Sequence
  Description of Artificial Sequence: Synthetic oligonucleotide
cgcagggucuugggccgcc

SEQ ID NO: 2820590 - RNA, 19 nt, Artificial Sequence
  Description of Artificial Sequence: Synthetic oligonucleotide
cgccuuucagcacugccuu

SEQ ID NO: 2820591 - RNA, 19 nt, Artificial Sequence
  Description of Artificial Sequence: Synthetic oligonucleotide
ccgcagggucuugggccgc

SEQ ID NO: 2820592 - RNA, 19 nt, Artificial Sequence
  Description of Artificial Sequence: Synthetic oligonucleotide
gcacugccuucuuggcuuu

SEQ ID NO: 2820593 - RNA, 19 nt, Artificial Sequence
  Description of Artificial Sequence: Synthetic oligonucleotide
cgucaggccuuaugagggu

SEQ ID NO: 2820594 - RNA, 19 nt, Artificial Sequence
  Description of Artificial Sequence: Synthetic oligonucleotide
cgugcggaucuucuucuuu

SEQ ID NO: 2820595 - RNA, 19 nt, Artificial Sequence
  Description of Artificial Sequence: Synthetic oligonucleotide
cgcucuuucgcggguauuu

SEQ ID NO: 2820596 - RNA, 19 nt, Artificial Sequence
  Description of Artificial Sequence: Synthetic oligonucleotide
cgcggguauuugggcugcc

SEQ ID NO: 2820597 - RNA, 19 nt, Artificial Sequence
  Description of Artificial Sequence: Synthetic oligonucleotide
gccuccggagccgcagggu

SEQ ID NO: 2820598 - RNA, 19 nt, Artificial Sequence
  Description of Artificial Sequence: Synthetic oligonucleotide
ggcugccuccggagccgca

SEQ ID NO: 2820599 - RNA, 19 nt, Artificial Sequence
  Description of Artificial Sequence: Synthetic oligonucleotide
gcgcgcucuuucgcgggua

SEQ ID NO: 2820600 - RNA, 19 nt, Artificial Sequence
  Description of Artificial Sequence: Synthetic oligonucleotide
ccggagccgcagggucuug

SEQ ID NO: 2820601 - RNA, 19 nt, Artificial Sequence
  Description of Artificial Sequence: Synthetic oligonucleotide
gcgcucuuucgcggguauu

SEQ ID NO: 2820602 - RNA, 19 nt, Artificial Sequence
  Description of Artificial Sequence: Synthetic oligonucleotide
cgcgcucuuucgcggguau

SEQ ID NO: 2820603 - RNA, 19 nt, Artificial Sequence
  Description of Artificial Sequence: Synthetic oligonucleotide
gggccgccggaaggugggu

SEQ ID NO: 2820604 - RNA, 19 nt, Artificial Sequence
  Description of Artificial Sequence: Synthetic oligonucleotide
cggcgccaucuuggcgaaa

SEQ ID NO: 2820605 - RNA, 19 nt, Artificial Sequence
  Description of Artificial Sequence: Synthetic oligonucleotide
uguacuuucaucauuuccg

SEQ ID NO: 2820606 - RNA, 19 nt, Artificial Sequence
  Description of Artificial Sequence: Synthetic oligonucleotide
auuauccccaaacugaugc

SEQ ID NO: 2820607 - RNA, 19 nt, Artificial Sequence
  Description of Artificial Sequence: Synthetic oligonucleotide
aacugaugcacauggaacc

SEQ ID NO: 2820608 - RNA, 19 nt, Artificial Sequence
  Description of Artificial Sequence: Synthetic oligonucleotide
uguauuauccccaaacuga

SEQ ID NO: 2820609 - RNA, 19 nt, Artificial Sequence
  Description of Artificial Sequence: Synthetic oligonucleotide
aucauuuccgccuuugccc

SEQ ID NO: 2820610 - RNA, 19 nt, Artificial Sequence
  Description of Artificial Sequence: Synthetic oligonucleotide
aaaaugaggaccugcacug

SEQ ID NO: 2820611 - RNA, 19 nt, Artificial Sequence
  Description of Artificial Sequence: Synthetic oligonucleotide
augaguuugagacucaguc

SEQ ID NO: 2820612 - RNA, 19 nt, Artificial Sequence
  Description of Artificial Sequence: Synthetic oligonucleotide
ucuucaauggacacauugg

SEQ ID NO: 2820613 - RNA, 19 nt, Artificial Sequence
  Description of Artificial Sequence: Synthetic oligonucleotide
uugagacucagucacacag

SEQ ID NO: 2820614 - RNA, 19 nt, Artificial Sequence
  Description of Artificial Sequence: Synthetic oligonucleotide
aauguuuacugggcaaucc

SEQ ID NO: 2820615 - RNA, 19 nt, Artificial Sequence
  Description of Artificial Sequence: Synthetic oligonucleotide
gaggauuaaaaugaggacc

SEQ ID NO: 2820616 - RNA, 19 nt, Artificial Sequence
  Description of Artificial Sequence: Synthetic oligonucleotide
uguuuacugggcaaucccg

SEQ ID NO: 2820617 - RNA, 19 nt, Artificial Sequence
  Description of Artificial Sequence: Synthetic oligonucleotide
uuguguauuauccccaaac

SEQ ID NO: 2820618 - RNA, 19 nt, Artificial Sequence
  Description of Artificial Sequence: Synthetic oligonucleotide
aagccaagcggcuuccagc

SEQ ID NO: 2820619 - RNA, 19 nt, Artificial Sequence
  Description of Artificial Sequence: Synthetic oligonucleotide
auguuuacugggcaauccc

SEQ ID NO: 2820620 - RNA, 19 nt, Artificial Sequence
  Description of Artificial Sequence: Synthetic oligonucleotide
uucucauggaccaccauug

SEQ ID NO: 2820621 - RNA, 19 nt, Artificial Sequence
  Description of Artificial Sequence: Synthetic oligonucleotide
acagccuuguguauuaucc

SEQ ID NO: 2820622 - RNA, 19 nt, Artificial Sequence
  Description of Artificial Sequence: Synthetic oligonucleotide
gaguuugagacucagucac

SEQ ID NO: 2820623 - RNA, 19 nt, Artificial Sequence
  Description of Artificial Sequence: Synthetic oligonucleotide
uucugcucgaaguggaugg

SEQ ID NO: 2820624 - RNA, 19 nt, Artificial Sequence
  Description of Artificial Sequence: Synthetic oligonucleotide
uguguauuauccccaaacu

SEQ ID NO: 2820625 - RNA, 19 nt, Artificial Sequence
  Description of Artificial Sequence: Synthetic oligonucleotide
ucauggaccaccauuguuc

SEQ ID NO: 2820626 - RNA, 19 nt, Artificial Sequence
  Description of Artificial Sequence: Synthetic oligonucleotide
uuguacuuucaucauuucc

SEQ ID NO: 2820627 - RNA, 19 nt, Artificial Sequence
  Description of Artificial Sequence: Synthetic oligonucleotide
gagacucagucacacaggg

SEQ ID NO: 2820628 - RNA, 19 nt, Artificial Sequence
  Description of Artificial Sequence: Synthetic oligonucleotide
aacugguucaccacuuccc

SEQ ID NO: 2820629 - RNA, 19 nt, Artificial Sequence
  Description of Artificial Sequence: Synthetic oligonucleotide
cuucaauggacacauuggc

SEQ ID NO: 2820630 - RNA, 19 nt, Artificial Sequence
  Description of Artificial Sequence: Synthetic oligonucleotide
cacaccacaagccaagcgg

SEQ ID NO: 2820631 - RNA, 19 nt, Artificial Sequence
  Description of Artificial Sequence: Synthetic oligonucleotide
agagugagaucacaugauc

SEQ ID NO: 2820632 - RNA, 19 nt, Artificial Sequence
  Description of Artificial Sequence: Synthetic oligonucleotide
gauuaaaaugaggaccugc

SEQ ID NO: 2820633 - RNA, 19 nt, Artificial Sequence
  Description of Artificial Sequence: Synthetic oligonucleotide
cacaugaucuucaauggac

SEQ ID NO: 2820634 - RNA, 19 nt, Artificial Sequence
  Description of Artificial Sequence: Synthetic oligonucleotide
ugaggauuaaaaugaggac

SEQ ID NO: 2820635 - RNA, 19 nt, Artificial Sequence
  Description of Artificial Sequence: Synthetic oligonucleotide
ugauagaaugcucucccga

SEQ ID NO: 2820636 - RNA, 19 nt, Artificial Sequence
  Description of Artificial Sequence: Synthetic oligonucleotide
ucucccgagagugagauca

SEQ ID NO: 2820637 - RNA, 19 nt, Artificial Sequence
  Description of Artificial Sequence: Synthetic oligonucleotide
ugagaucacaugaucuuca

SEQ ID NO: 2820638 - RNA, 19 nt, Artificial Sequence
  Description of Artificial Sequence: Synthetic oligonucleotide
ugagacucagucacacagg

SEQ ID NO: 2820639 - RNA, 19 nt, Artificial Sequence
  Description of Artificial Sequence: Synthetic oligonucleotide
uuaaaaugaggaccugcac

SEQ ID NO: 2820640 - RNA, 19 nt, Artificial Sequence
  Description of Artificial Sequence: Synthetic oligonucleotide
uacugggcaaucccgauca

SEQ ID NO: 2820641 - RNA, 19 nt, Artificial Sequence
  Description of Artificial Sequence: Synthetic oligonucleotide
gacucagucacacagggaa

SEQ ID NO: 2820642 - RNA, 19 nt, Artificial Sequence
  Description of Artificial Sequence: Synthetic oligonucleotide
uccgccauguuucuuggag

SEQ ID NO: 2820643 - RNA, 19 nt, Artificial Sequence
  Description of Artificial Sequence: Synthetic oligonucleotide
ugaguuugagacucaguca

SEQ ID NO: 2820644 - RNA, 19 nt, Artificial Sequence
  Description of Artificial Sequence: Synthetic oligonucleotide
guguauuauccccaaacug

SEQ ID NO: 2820645 - RNA, 19 nt, Artificial Sequence
  Description of Artificial Sequence: Synthetic oligonucleotide
gugaggauuaaaaugagga

SEQ ID NO: 2820646 - RNA, 19 nt, Artificial Sequence
  Description of Artificial Sequence: Synthetic oligonucleotide
cuguuaucuguccugagac

SEQ ID NO: 2820647 - RNA, 19 nt, Artificial Sequence
  Description of Artificial Sequence: Synthetic oligonucleotide
uucgucgccaugcuucgcg

SEQ ID NO: 2820648 - RNA, 19 nt, Artificial Sequence
  Description of Artificial Sequence: Synthetic oligonucleotide
ugaucuucaauggacacau

SEQ ID NO: 2820649 - RNA, 19 nt, Artificial Sequence
  Description of Artificial Sequence: Synthetic oligonucleotide
ugggcaaucccgaucacac

SEQ ID NO: 2820650 - RNA, 19 nt, Artificial Sequence
  Description of Artificial Sequence: Synthetic oligonucleotide
auuaaaaugaggaccugca

SEQ ID NO: 2820651 - RNA, 19 nt, Artificial Sequence
  Description of Artificial Sequence: Synthetic oligonucleotide
acgcacacggccuucgucg

SEQ ID NO: 2820652 - RNA, 19 nt, Artificial Sequence
  Description of Artificial Sequence: Synthetic oligonucleotide
cuucccggcagucacauug

SEQ ID NO: 2820653 - RNA, 19 nt, Artificial Sequence
  Description of Artificial Sequence: Synthetic oligonucleotide
cauggaccaccauuguucg

SEQ ID NO: 2820654 - RNA, 19 nt, Artificial Sequence
  Description of Artificial Sequence: Synthetic oligonucleotide
caucauuuccgccuuugcc

SEQ ID NO: 2820655 - RNA, 19 nt, Artificial Sequence
  Description of Artificial Sequence: Synthetic oligonucleotide
aggauuaaaaugaggaccu

SEQ ID NO: 2820656 - RNA, 19 nt, Artificial Sequence
  Description of Artificial Sequence: Synthetic oligonucleotide
ucacaccacaagccaagcg

SEQ ID NO: 2820657 - RNA, 19 nt, Artificial Sequence
  Description of Artificial Sequence: Synthetic oligonucleotide
acacagggaauguuuacug

SEQ ID NO: 2820658 - RNA, 19 nt, Artificial Sequence
  Description of Artificial Sequence: Synthetic oligonucleotide
ucacaugaucuucaaugga

SEQ ID NO: 2820659 - RNA, 19 nt, Artificial Sequence
  Description of Artificial Sequence: Synthetic oligonucleotide
acauggaacccaugcuggc

SEQ ID NO: 2820660 - RNA, 19 nt, Artificial Sequence
  Description of Artificial Sequence: Synthetic oligonucleotide
ucccgaucacaccacaagc

SEQ ID NO: 2820661 - RNA, 19 nt, Artificial Sequence
  Description of Artificial Sequence: Synthetic oligonucleotide
augauagaaugcucucccg

SEQ ID NO: 2820662 - RNA, 19 nt, Artificial Sequence
  Description of Artificial Sequence: Synthetic oligonucleotide
gaaugcucucccgagagug

SEQ ID NO: 2820663 - RNA, 19 nt, Artificial Sequence
  Description of Artificial Sequence: Synthetic oligonucleotide
gauggugcccugcaccggg

SEQ ID NO: 2820664 - RNA, 19 nt, Artificial Sequence
  Description of Artificial Sequence: Synthetic oligonucleotide
guacuuucaucauuuccgc

SEQ ID NO: 2820665 - RNA, 19 nt, Artificial Sequence
  Description of Artificial Sequence: Synthetic oligonucleotide
uguuaucuguccugagacc

SEQ ID NO: 2820666 - RNA, 19 nt, Artificial Sequence
  Description of Artificial Sequence: Synthetic oligonucleotide
agcauuuccagucuuugua

SEQ ID NO: 2820667 - RNA, 19 nt, Artificial Sequence
  Description of Artificial Sequence: Synthetic oligonucleotide
ucauuuccgccuuugccca

SEQ ID NO: 2820668 - RNA, 19 nt, Artificial Sequence
  Description of Artificial Sequence: Synthetic oligonucleotide
cuuggagugaggauuaaaa

SEQ ID NO: 2820669 - RNA, 19 nt, Artificial Sequence
  Description of Artificial Sequence: Synthetic oligonucleotide
ugagaccacaacugguuca

SEQ ID NO: 2820670 - RNA, 19 nt, Artificial Sequence
  Description of Artificial Sequence: Synthetic oligonucleotide
cacagggaauguuuacugg

SEQ ID NO: 2820671 - RNA, 19 nt, Artificial Sequence
  Description of Artificial Sequence: Synthetic oligonucleotide
agugagaucacaugaucuu

SEQ ID NO: 2820672 - RNA, 19 nt, Artificial Sequence
  Description of Artificial Sequence: Synthetic oligonucleotide
uauuauccccaaacugaug

SEQ ID NO: 2820673 - RNA, 19 nt, Artificial Sequence
  Description of Artificial Sequence: Synthetic oligonucleotide
ggagugaggauuaaaauga

SEQ ID NO: 2820674 - RNA, 19 nt, Artificial Sequence
  Description of Artificial Sequence: Synthetic oligonucleotide
uucgcgaggagacgcgcgg

SEQ ID NO: 2820675 - RNA, 19 nt, Artificial Sequence
  Description of Artificial Sequence: Synthetic oligonucleotide
uuucuuggagugaggauua

SEQ ID NO: 2820676 - RNA, 19 nt, Artificial Sequence
  Description of Artificial Sequence: Synthetic oligonucleotide
uguucggccgaugauagaa

SEQ ID NO: 2820677 - RNA, 19 nt, Artificial Sequence
  Description of Artificial Sequence: Synthetic oligonucleotide
gaucacaccacaagccaag

SEQ ID NO: 2820678 - RNA, 19 nt, Artificial Sequence
  Description of Artificial Sequence: Synthetic oligonucleotide
aaaugaggaccugcacugg

SEQ ID NO: 2820679 - RNA, 19 nt, Artificial Sequence
  Description of Artificial Sequence: Synthetic oligonucleotide
aucccgaucacaccacaag

SEQ ID NO: 2820680 - RNA, 19 nt, Artificial Sequence
  Description of Artificial Sequence: Synthetic oligonucleotide
ugaggaccugcacugguac

SEQ ID NO: 2820681 - RNA, 19 nt, Artificial Sequence
  Description of Artificial Sequence: Synthetic oligonucleotide
acaccacaagccaagcggc

SEQ ID NO: 2820682 - RNA, 19 nt, Artificial Sequence
  Description of Artificial Sequence: Synthetic oligonucleotide
cagggaauguuuacugggc

SEQ ID NO: 2820683 - RNA, 19 nt, Artificial Sequence
  Description of Artificial Sequence: Synthetic oligonucleotide
cccaaacugaugcacaugg

SEQ ID NO: 2820684 - RNA, 19 nt, Artificial Sequence
  Description of Artificial Sequence: Synthetic oligonucleotide
ugguucaccacuucccuuc

SEQ ID NO: 2820685 - RNA, 19 nt, Artificial Sequence
  Description of Artificial Sequence: Synthetic oligonucleotide
auuguucggccgaugauag

SEQ ID NO: 2820686 - RNA, 19 nt, Artificial Sequence
  Description of Artificial Sequence: Synthetic oligonucleotide
uucagcacgcacacggccu

SEQ ID NO: 2820687 - RNA, 19 nt, Artificial Sequence
  Description of Artificial Sequence: Synthetic oligonucleotide
uucggccgaugauagaaug

SEQ ID NO: 2820688 - RNA, 19 nt, Artificial Sequence
  Description of Artificial Sequence: Synthetic oligonucleotide
cuuugcccaagucaucuug

SEQ ID NO: 2820689 - RNA, 19 nt, Artificial Sequence
  Description of Artificial Sequence: Synthetic oligonucleotide
ucggccgaugauagaaugc

SEQ ID NO: 2820690 - RNA, 19 nt, Artificial Sequence
  Description of Artificial Sequence: Synthetic oligonucleotide
auagaaugcucucccgaga

SEQ ID NO: 2820691 - RNA, 19 nt, Artificial Sequence
  Description of Artificial Sequence: Synthetic oligonucleotide
acggccuucgucgccaugc

SEQ ID NO: 2820692 - RNA, 19 nt, Artificial Sequence
  Description of Artificial Sequence: Synthetic oligonucleotide
ucucuugauccgagggucc

SEQ ID NO: 2820693 - RNA, 19 nt, Artificial Sequence
  Description of Artificial Sequence: Synthetic oligonucleotide
guccugagaccacaacugg

SEQ ID NO: 2820694 - RNA, 19 nt, Artificial Sequence
  Description of Artificial Sequence: Synthetic oligonucleotide
uuugagacucagucacaca

SEQ ID NO: 2820695 - RNA, 19 nt, Artificial Sequence
  Description of Artificial Sequence: Synthetic oligonucleotide
accauuguucggccgauga

SEQ ID NO: 2820696 - RNA, 19 nt, Artificial Sequence
  Description of Artificial Sequence: Synthetic oligonucleotide
caacugguucaccacuucc

SEQ ID NO: 2820697 - RNA, 19 nt, Artificial Sequence
  Description of Artificial Sequence: Synthetic oligonucleotide
cauguuucuuggagugagg

SEQ ID NO: 2820698 - RNA, 19 nt, Artificial Sequence
  Description of Artificial Sequence: Synthetic oligonucleotide
augcuucgcgaggagacgc

SEQ ID NO: 2820699 - RNA, 19 nt, Artificial Sequence
  Description of Artificial Sequence: Synthetic oligonucleotide
agggaauguuuacugggca

SEQ ID NO: 2820700 - RNA, 19 nt, Artificial Sequence
  Description of Artificial Sequence: Synthetic oligonucleotide
uuaucuguccugagaccac

SEQ ID NO: 2820701 - RNA, 19 nt, Artificial Sequence
  Description of Artificial Sequence: Synthetic oligonucleotide
uucaucauuuccgccuuug

SEQ ID NO: 2820702 - RNA, 19 nt, Artificial Sequence
  Description of Artificial Sequence: Synthetic oligonucleotide
auggaacccaugcuggccu

SEQ ID NO: 2820703 - RNA, 19 nt, Artificial Sequence
  Description of Artificial Sequence: Synthetic oligonucleotide
guggauggugcccugcacc

SEQ ID NO: 2820704 - RNA, 19 nt, Artificial Sequence
  Description of Artificial Sequence: Synthetic oligonucleotide
cuucagcacgcacacggcc

SEQ ID NO: 2820705 - RNA, 19 nt, Artificial Sequence
  Description of Artificial Sequence: Synthetic oligonucleotide
ucgcccuucagcacgcaca

SEQ ID NO: 2820706 - RNA, 19 nt, Artificial Sequence
  Description of Artificial Sequence: Synthetic oligonucleotide
gagugaggauuaaaaugag

SEQ ID NO: 2820707 - RNA, 19 nt, Artificial Sequence
  Description of Artificial Sequence: Synthetic oligonucleotide
agcagaugaguuugagacu

SEQ ID NO: 2820708 - RNA, 19 nt, Artificial Sequence
  Description of Artificial Sequence: Synthetic oligonucleotide
agucaucuugcuucucaug

SEQ ID NO: 2820709 - RNA, 19 nt, Artificial Sequence
  Description of Artificial Sequence: Synthetic oligonucleotide
acaccauccuucccggcag

SEQ ID NO: 2820710 - RNA, 19 nt, Artificial Sequence
  Description of Artificial Sequence: Synthetic oligonucleotide
ggacacauuggccacacca

SEQ ID NO: 2820711 - RNA, 19 nt, Artificial Sequence
  Description of Artificial Sequence: Synthetic oligonucleotide
caauggacacauuggccac

SEQ ID NO: 2820712 - RNA, 19 nt, Artificial Sequence
  Description of Artificial Sequence: Synthetic oligonucleotide
uguuucuuggagugaggau

SEQ ID NO: 2820713 - RNA, 19 nt, Artificial Sequence
  Description of Artificial Sequence: Synthetic oligonucleotide
uuuacugggcaaucccgau

SEQ ID NO: 2820714 - RNA, 19 nt, Artificial Sequence
  Description of Artificial Sequence: Synthetic oligonucleotide
aucacaccacaagccaagc

SEQ ID NO: 2820715 - RNA, 19 nt, Artificial Sequence
  Description of Artificial Sequence: Synthetic oligonucleotide
uuacugggcaaucccgauc

SEQ ID NO: 2820716 - RNA, 19 nt, Artificial Sequence
  Description of Artificial Sequence: Synthetic oligonucleotide
ugcuucgcgaggagacgcg

SEQ ID NO: 2820717 - RNA, 19 nt, Artificial Sequence
  Description of Artificial Sequence: Synthetic oligonucleotide
agccaagcggcuuccagca

SEQ ID NO: 2820718 - RNA, 19 nt, Artificial Sequence
  Description of Artificial Sequence: Synthetic oligonucleotide
auguuucuuggagugagga

SEQ ID NO: 2820719 - RNA, 19 nt, Artificial Sequence
  Description of Artificial Sequence: Synthetic oligonucleotide
ggccacaccauccuucccg

SEQ ID NO: 2820720 - RNA, 19 nt, Artificial Sequence
  Description of Artificial Sequence: Synthetic oligonucleotide
cagccuuguguauuauccc

SEQ ID NO: 2820721 - RNA, 19 nt, Artificial Sequence
  Description of Artificial Sequence: Synthetic oligonucleotide
agaugaguuugagacucag

SEQ ID NO: 2820722 - RNA, 19 nt, Artificial Sequence
  Description of Artificial Sequence: Synthetic oligonucleotide
ucuguccugagaccacaac

SEQ ID NO: 2820723 - RNA, 19 nt, Artificial Sequence
  Description of Artificial Sequence: Synthetic oligonucleotide
aggaccugcacugguacag

SEQ ID NO: 2820724 - RNA, 19 nt, Artificial Sequence
  Description of Artificial Sequence: Synthetic oligonucleotide
accaccauuguucggccga

SEQ ID NO: 2820725 - RNA, 19 nt, Artificial Sequence
  Description of Artificial Sequence: Synthetic oligonucleotide
gucgccaugcuucgcgagg

SEQ ID NO: 2820726 - RNA, 19 nt, Artificial Sequence
  Description of Artificial Sequence: Synthetic oligonucleotide
acaugccucucuugauccg

SEQ ID NO: 2820727 - RNA, 19 nt, Artificial Sequence
  Description of Artificial Sequence: Synthetic oligonucleotide
ucucauggaccaccauugu

SEQ ID NO: 2820728 - RNA, 19 nt, Artificial Sequence
  Description of Artificial Sequence: Synthetic oligonucleotide
uccagucuuuguacuuuca

SEQ ID NO: 2820729 - RNA, 19 nt, Artificial Sequence
  Description of Artificial Sequence: Synthetic oligonucleotide
auggacacauuggccacac

SEQ ID NO: 2820730 - RNA, 19 nt, Artificial Sequence
  Description of Artificial Sequence: Synthetic oligonucleotide
ugcuucucauggaccacca

SEQ ID NO: 2820731 - RNA, 19 nt, Artificial Sequence
  Description of Artificial Sequence: Synthetic oligonucleotide
gagaccacaacugguucac

SEQ ID NO: 2820732 - RNA, 19 nt, Artificial Sequence
  Description of Artificial Sequence: Synthetic oligonucleotide
cauccuucccggcagucac

SEQ ID NO: 2820733 - RNA, 19 nt, Artificial Sequence
  Description of Artificial Sequence: Synthetic oligonucleotide
ucgaaguggauggugcccu

SEQ ID NO: 2820734 - RNA, 19 nt, Artificial Sequence
  Description of Artificial Sequence: Synthetic oligonucleotide
cauggaacccaugcuggcc

SEQ ID NO: 2820735 - RNA, 19 nt, Artificial Sequence
  Description of Artificial Sequence: Synthetic oligonucleotide
cucucuugauccgaggguc

SEQ ID NO: 2820736 - RNA, 19 nt, Artificial Sequence
  Description of Artificial Sequence: Synthetic oligonucleotide
uaucuguccugagaccaca

SEQ ID NO: 2820737 - RNA, 19 nt, Artificial Sequence
  Description of Artificial Sequence: Synthetic oligonucleotide
uucccggcagucacauugc

SEQ ID NO: 2820738 - RNA, 19 nt, Artificial Sequence
  Description of Artificial Sequence: Synthetic oligonucleotide
cuucgcgaggagacgcgcg

SEQ ID NO: 2820739 - RNA, 19 nt, Artificial Sequence
  Description of Artificial Sequence: Synthetic oligonucleotide
gcccaagucaucuugcuuc

SEQ ID NO: 2820740 - RNA, 19 nt, Artificial Sequence
  Description of Artificial Sequence: Synthetic oligonucleotide
gcagaugaguuugagacuc

SEQ ID NO: 2820741 - RNA, 19 nt, Artificial Sequence
  Description of Artificial Sequence: Synthetic oligonucleotide
uccuguuaucuguccugag

SEQ ID NO: 2820742 - RNA, 19 nt, Artificial Sequence
  Description of Artificial Sequence: Synthetic oligonucleotide
uacagccuuguguauuauc

SEQ ID NO: 2820743 - RNA, 19 nt, Artificial Sequence
  Description of Artificial Sequence: Synthetic oligonucleotide
caagccaagcggcuuccag

SEQ ID NO: 2820744 - RNA, 19 nt, Artificial Sequence
  Description of Artificial Sequence: Synthetic oligonucleotide
uuccagucuuuguacuuuc

SEQ ID NO: 2820745 - RNA, 19 nt, Artificial Sequence
  Description of Artificial Sequence: Synthetic oligonucleotide
gccucucuugauccgaggg

SEQ ID NO: 2820746 - RNA, 19 nt, Artificial Sequence
  Description of Artificial Sequence: Synthetic oligonucleotide
gaccaccauuguucggccg

SEQ ID NO: 2820747 - RNA, 19 nt, Artificial Sequence
  Description of Artificial Sequence: Synthetic oligonucleotide
ugauccgaggguccgccau

SEQ ID NO: 2820748 - RNA, 19 nt, Artificial Sequence
  Description of Artificial Sequence: Synthetic oligonucleotide
gagugagaucacaugaucu

SEQ ID NO: 2820749 - RNA, 19 nt, Artificial Sequence
  Description of Artificial Sequence: Synthetic oligonucleotide
cugagaccacaacugguuc

SEQ ID NO: 2820750 - RNA, 19 nt, Artificial Sequence
  Description of Artificial Sequence: Synthetic oligonucleotide
ugccucucuugauccgagg

SEQ ID NO: 2820751 - RNA, 19 nt, Artificial Sequence
  Description of Artificial Sequence: Synthetic oligonucleotide
aaugcucucccgagaguga

SEQ ID NO: 2820752 - RNA, 19 nt, Artificial Sequence
  Description of Artificial Sequence: Synthetic oligonucleotide
gugagaucacaugaucuuc

SEQ ID NO: 2820753 - RNA, 19 nt, Artificial Sequence
  Description of Artificial Sequence: Synthetic oligonucleotide
caugcuucgcgaggagacg

SEQ ID NO: 2820754 - RNA, 19 nt, Artificial Sequence
  Description of Artificial Sequence: Synthetic oligonucleotide
guuuacugggcaaucccga

SEQ ID NO: 2820755 - RNA, 19 nt, Artificial Sequence
  Description of Artificial Sequence: Synthetic oligonucleotide
agaaugcucucccgagagu

SEQ ID NO: 2820756 - RNA, 19 nt, Artificial Sequence
  Description of Artificial Sequence: Synthetic oligonucleotide
gauccgaggguccgccaug

SEQ ID NO: 2820757 - RNA, 19 nt, Artificial Sequence
  Description of Artificial Sequence: Synthetic oligonucleotide
cccgaucacaccacaagcc

SEQ ID NO: 2820758 - RNA, 19 nt, Artificial Sequence
  Description of Artificial Sequence: Synthetic oligonucleotide
ucuuggagugaggauuaaa

SEQ ID NO: 2820759 - RNA, 19 nt, Artificial Sequence
  Description of Artificial Sequence: Synthetic oligonucleotide
guuucuuggagugaggauu

SEQ ID NO: 2820760 - RNA, 19 nt, Artificial Sequence
  Description of Artificial Sequence: Synthetic oligonucleotide
auggaccaccauuguucgg

SEQ ID NO: 2820761 - RNA, 19 nt, Artificial Sequence
  Description of Artificial Sequence: Synthetic oligonucleotide
ugcccaggucuccaacaug

SEQ ID NO: 2820762 - RNA, 19 nt, Artificial Sequence
  Description of Artificial Sequence: Synthetic oligonucleotide
augcucucccgagagugag

SEQ ID NO: 2820763 - RNA, 19 nt, Artificial Sequence
  Description of Artificial Sequence: Synthetic oligonucleotide
aaucccgaucacaccacaa

SEQ ID NO: 2820764 - RNA, 19 nt, Artificial Sequence
  Description of Artificial Sequence: Synthetic oligonucleotide
cacaccauccuucccggca

SEQ ID NO: 2820765 - RNA, 19 nt, Artificial Sequence
  Description of Artificial Sequence: Synthetic oligonucleotide
cauuguucggccgaugaua

SEQ ID NO: 2820766 - RNA, 19 nt, Artificial Sequence
  Description of Artificial Sequence: Synthetic oligonucleotide
auuuccgccuuugcccaag

SEQ ID NO: 2820767 - RNA, 19 nt, Artificial Sequence
  Description of Artificial Sequence: Synthetic oligonucleotide
gccgucgcccuucagcacg

SEQ ID NO: 2820768 - RNA, 19 nt, Artificial Sequence
  Description of Artificial Sequence: Synthetic oligonucleotide
ccaugcuucgcgaggagac

SEQ ID NO: 2820769 - RNA, 19 nt, Artificial Sequence
  Description of Artificial Sequence: Synthetic oligonucleotide
caccacuucccuucugcuc

SEQ ID NO: 2820770 - RNA, 19 nt, Artificial Sequence
  Description of Artificial Sequence: Synthetic oligonucleotide
ccauguuucuuggagugag

SEQ ID NO: 2820771 - RNA, 19 nt, Artificial Sequence
  Description of Artificial Sequence: Synthetic oligonucleotide
gucacauugcccaggucuc

SEQ ID NO: 2820772 - RNA, 19 nt, Artificial Sequence
  Description of Artificial Sequence: Synthetic oligonucleotide
ucccggcagucacauugcc

SEQ ID NO: 2820773 - RNA, 19 nt, Artificial Sequence
  Description of Artificial Sequence: Synthetic oligonucleotide
gcccaggucuccaacaugc

SEQ ID NO: 2820774 - RNA, 19 nt, Artificial Sequence
  Description of Artificial Sequence: Synthetic oligonucleotide
ugguacagccuuguguauu

SEQ ID NO: 2820775 - RNA, 19 nt, Artificial Sequence
  Description of Artificial Sequence: Synthetic oligonucleotide
cuguccugagaccacaacu

SEQ ID NO: 2820776 - RNA, 19 nt, Artificial Sequence
  Description of Artificial Sequence: Synthetic oligonucleotide
gguccgccauguuucuugg

SEQ ID NO: 2820777 - RNA, 19 nt, Artificial Sequence
  Description of Artificial Sequence: Synthetic oligonucleotide
ucgccaugcuucgcgagga

SEQ ID NO: 2820778 - RNA, 19 nt, Artificial Sequence
  Description of Artificial Sequence: Synthetic oligonucleotide
ugcucucccgagagugaga

SEQ ID NO: 2820779 - RNA, 19 nt, Artificial Sequence
  Description of Artificial Sequence: Synthetic oligonucleotide
cuccaacaugccucucuug

SEQ ID NO: 2820780 - RNA, 19 nt, Artificial Sequence
  Description of Artificial Sequence: Synthetic oligonucleotide
agcacgcacacggccuucg

SEQ ID NO: 2820781 - RNA, 19 nt, Artificial Sequence
  Description of Artificial Sequence: Synthetic oligonucleotide
ucugcucgaaguggauggu

SEQ ID NO: 2820782 - RNA, 19 nt, Artificial Sequence
  Description of Artificial Sequence: Synthetic oligonucleotide
cuucagucaguccuguuau

SEQ ID NO: 2820783 - RNA, 19 nt, Artificial Sequence
  Description of Artificial Sequence: Synthetic oligonucleotide
uuccagcauuuccagucuu

SEQ ID NO: 2820784 - RNA, 19 nt, Artificial Sequence
  Description of Artificial Sequence: Synthetic oligonucleotide
guauuauccccaaacugau

SEQ ID NO: 2820785 - RNA, 19 nt, Artificial Sequence
  Description of Artificial Sequence: Synthetic oligonucleotide
ccggcagucacauugccca

SEQ ID NO: 2820786 - RNA, 19 nt, Artificial Sequence
  Description of Artificial Sequence: Synthetic oligonucleotide
gaggaccugcacugguaca

SEQ ID NO: 2820787 - RNA, 19 nt, Artificial Sequence
  Description of Artificial Sequence: Synthetic oligonucleotide
uuguucggccgaugauaga

SEQ ID NO: 2820788 - RNA, 19 nt, Artificial Sequence
  Description of Artificial Sequence: Synthetic oligonucleotide
uuuccgccuuugcccaagu

SEQ ID NO: 2820789 - RNA, 19 nt, Artificial Sequence
  Description of Artificial Sequence: Synthetic oligonucleotide
gggaauguuuacugggcaa

SEQ ID NO: 2820790 - RNA, 19 nt, Artificial Sequence
  Description of Artificial Sequence: Synthetic oligonucleotide
uggacacauuggccacacc

SEQ ID NO: 2820791 - RNA, 19 nt, Artificial Sequence
  Description of Artificial Sequence: Synthetic oligonucleotide
cgagagugagaucacauga

SEQ ID NO: 2820792 - RNA, 19 nt, Artificial Sequence
  Description of Artificial Sequence: Synthetic oligonucleotide
cacugguacagccuugugu

SEQ ID NO: 2820793 - RNA, 19 nt, Artificial Sequence
  Description of Artificial Sequence: Synthetic oligonucleotide
cacaagccaagcggcuucc

SEQ ID NO: 2820794 - RNA, 19 nt, Artificial Sequence
  Description of Artificial Sequence: Synthetic oligonucleotide
gguacagccuuguguauua

SEQ ID NO: 2820795 - RNA, 19 nt, Artificial Sequence
  Description of Artificial Sequence: Synthetic oligonucleotide
ucccgagagugagaucaca

SEQ ID NO: 2820796 - RNA, 19 nt, Artificial Sequence
  Description of Artificial Sequence: Synthetic oligonucleotide
ccgagagugagaucacaug

SEQ ID NO: 2820797 - RNA, 19 nt, Artificial Sequence
  Description of Artificial Sequence: Synthetic oligonucleotide
ccuucgucgccaugcuucg

SEQ ID NO: 2820798 - RNA, 19 nt, Artificial Sequence
  Description of Artificial Sequence: Synthetic oligonucleotide
cuucucauggaccaccauu

SEQ ID NO: 2820799 - RNA, 19 nt, Artificial Sequence
  Description of Artificial Sequence: Synthetic oligonucleotide
gaugaguuugagacucagu

SEQ ID NO: 2820800 - RNA, 19 nt, Artificial Sequence
  Description of Artificial Sequence: Synthetic oligonucleotide
gucuccaacaugccucucu

SEQ ID NO: 2820801 - RNA, 19 nt, Artificial Sequence
  Description of Artificial Sequence: Synthetic oligonucleotide
accauccuucccggcaguc

SEQ ID NO: 2820802 - RNA, 19 nt, Artificial Sequence
  Description of Artificial Sequence: Synthetic oligonucleotide
ggcagucacauugcccagg

SEQ ID NO: 2820803 - RNA, 19 nt, Artificial Sequence
  Description of Artificial Sequence: Synthetic oligonucleotide
gacacauuggccacaccau

SEQ ID NO: 2820804 - RNA, 19 nt, Artificial Sequence
  Description of Artificial Sequence: Synthetic oligonucleotide
ccuguuaucuguccugaga

SEQ ID NO: 2820805 - RNA, 19 nt, Artificial Sequence
  Description of Artificial Sequence: Synthetic oligonucleotide
gucacacagggaauguuua

SEQ ID NO: 2820806 - RNA, 19 nt, Artificial Sequence
  Description of Artificial Sequence: Synthetic oligonucleotide
uccuucccggcagucacau

SEQ ID NO: 2820807 - RNA, 19 nt, Artificial Sequence
  Description of Artificial Sequence: Synthetic oligonucleotide
ggugcccugcaccgggccg

SEQ ID NO: 2820808 - RNA, 19 nt, Artificial Sequence
  Description of Artificial Sequence: Synthetic oligonucleotide
cuuguguauuauccccaaa

SEQ ID NO: 2820809 - RNA, 19 nt, Artificial Sequence
  Description of Artificial Sequence: Synthetic oligonucleotide
cgaugauagaaugcucucc

SEQ ID NO: 2820810 - RNA, 19 nt, Artificial Sequence
  Description of Artificial Sequence: Synthetic oligonucleotide
cugcucgaaguggauggug

SEQ ID NO: 2820811 - RNA, 19 nt, Artificial Sequence
  Description of Artificial Sequence: Synthetic oligonucleotide
gaacccaugcuggccuuca

SEQ ID NO: 2820812 - RNA, 19 nt, Artificial Sequence
  Description of Artificial Sequence: Synthetic oligonucleotide
ugcaccgggccgucgcccu

SEQ ID NO: 2820813 - RNA, 19 nt, Artificial Sequence
  Description of Artificial Sequence: Synthetic oligonucleotide
ccgaugauagaaugcucuc

SEQ ID NO: 2820814 - RNA, 19 nt, Artificial Sequence
  Description of Artificial Sequence: Synthetic oligonucleotide
cacgcacacggccuucguc

SEQ ID NO: 2820815 - RNA, 19 nt, Artificial Sequence
  Description of Artificial Sequence: Synthetic oligonucleotide
caugccucucuugauccga

SEQ ID NO: 2820816 - RNA, 19 nt, Artificial Sequence
  Description of Artificial Sequence: Synthetic oligonucleotide
ggaccaccauuguucggcc

SEQ ID NO: 2820817 - RNA, 19 nt, Artificial Sequence
  Description of Artificial Sequence: Synthetic oligonucleotide
cugcacugguacagccuug

SEQ ID NO: 2820818 - RNA, 19 nt, Artificial Sequence
  Description of Artificial Sequence: Synthetic oligonucleotide
uuccgccuuugcccaaguc

SEQ ID NO: 2820819 - RNA, 19 nt, Artificial Sequence
  Description of Artificial Sequence: Synthetic oligonucleotide
caaucccgaucacaccaca

SEQ ID NO: 2820820 - RNA, 19 nt, Artificial Sequence
  Description of Artificial Sequence: Synthetic oligonucleotide
cgaggguccgccauguuuc

SEQ ID NO: 2820821 - RNA, 19 nt, Artificial Sequence
  Description of Artificial Sequence: Synthetic oligonucleotide
augccucucuugauccgag

SEQ ID NO: 2820822 - RNA, 19 nt, Artificial Sequence
  Description of Artificial Sequence: Synthetic oligonucleotide
auggugcccugcaccgggc

SEQ ID NO: 2820823 - RNA, 19 nt, Artificial Sequence
  Description of Artificial Sequence: Synthetic oligonucleotide
cucccgagagugagaucac

SEQ ID NO: 2820824 - RNA, 19 nt, Artificial Sequence
  Description of Artificial Sequence: Synthetic oligonucleotide
aagcggcuuccagcauuuc

SEQ ID NO: 2820825 - RNA, 19 nt, Artificial Sequence
  Description of Artificial Sequence: Synthetic oligonucleotide
gccuucgucgccaugcuuc

SEQ ID NO: 2820826 - RNA, 19 nt, Artificial Sequence
  Description of Artificial Sequence: Synthetic oligonucleotide
cugaugcacauggaaccca

SEQ ID NO: 2820827 - RNA, 19 nt, Artificial Sequence
  Description of Artificial Sequence: Synthetic oligonucleotide
cagaugaguuugagacuca

SEQ ID NO: 2820828 - RNA, 19 nt, Artificial Sequence
  Description of Artificial Sequence: Synthetic oligonucleotide
acucagucacacagggaau

SEQ ID NO: 2820829 - RNA, 19 nt, Artificial Sequence
  Description of Artificial Sequence: Synthetic oligonucleotide
accacaagccaagcggcuu

SEQ ID NO: 2820830 - RNA, 19 nt, Artificial Sequence
  Description of Artificial Sequence: Synthetic oligonucleotide
ccuucagcacgcacacggc

SEQ ID NO: 2820831 - RNA, 19 nt, Artificial Sequence
  Description of Artificial Sequence: Synthetic oligonucleotide
accugcacugguacagccu

SEQ ID NO: 2820832 - RNA, 19 nt, Artificial Sequence
  Description of Artificial Sequence: Synthetic oligonucleotide
agacucagucacacaggga

SEQ ID NO: 2820833 - RNA, 19 nt, Artificial Sequence
  Description of Artificial Sequence: Synthetic oligonucleotide
uucuuggagugaggauuaa

SEQ ID NO: 2820834 - RNA, 19 nt, Artificial Sequence
  Description of Artificial Sequence: Synthetic oligonucleotide
gggcaaucccgaucacacc

SEQ ID NO: 2820835 - RNA, 19 nt, Artificial Sequence
  Description of Artificial Sequence: Synthetic oligonucleotide
gggccgucgcccuucagca

SEQ ID NO: 2820836 - RNA, 19 nt, Artificial Sequence
  Description of Artificial Sequence: Synthetic oligonucleotide
cugggcaaucccgaucaca

SEQ ID NO: 2820837 - RNA, 19 nt, Artificial Sequence
  Description of Artificial Sequence: Synthetic oligonucleotide
cuuccagcauuuccagucu

SEQ ID NO: 2820838 - RNA, 19 nt, Artificial Sequence
  Description of Artificial Sequence: Synthetic oligonucleotide
gucgcccuucagcacgcac

SEQ ID NO: 2820839 - RNA, 19 nt, Artificial Sequence
  Description of Artificial Sequence: Synthetic oligonucleotide
gccgaugauagaaugcucu

SEQ ID NO: 2820840 - RNA, 19 nt, Artificial Sequence
  Description of Artificial Sequence: Synthetic oligonucleotide
ucgcgaggagacgcgcggc

SEQ ID NO: 2820841 - RNA, 19 nt, Artificial Sequence
  Description of Artificial Sequence: Synthetic oligonucleotide
auccgaggguccgccaugu

SEQ ID NO: 2820842 - RNA, 19 nt, Artificial Sequence
  Description of Artificial Sequence: Synthetic oligonucleotide
ccuucagucaguccuguua

SEQ ID NO: 2820843 - RNA, 19 nt, Artificial Sequence
  Description of Artificial Sequence: Synthetic oligonucleotide
ugcuggccuucagucaguc

SEQ ID NO: 2820844 - RNA, 19 nt, Artificial Sequence
  Description of Artificial Sequence: Synthetic oligonucleotide
cccggcagucacauugccc

SEQ ID NO: 2820845 - RNA, 19 nt, Artificial Sequence
  Description of Artificial Sequence: Synthetic oligonucleotide
uggaacccaugcuggccuu

SEQ ID NO: 2820846 - RNA, 19 nt, Artificial Sequence
  Description of Artificial Sequence: Synthetic oligonucleotide
augaggaccugcacuggua

SEQ ID NO: 2820847 - RNA, 19 nt, Artificial Sequence
  Description of Artificial Sequence: Synthetic oligonucleotide
ggaauguuuacugggcaau

SEQ ID NO: 2820848 - RNA, 19 nt, Artificial Sequence
  Description of Artificial Sequence: Synthetic oligonucleotide
gccuuguguauuaucccca

SEQ ID NO: 2820849 - RNA, 19 nt, Artificial Sequence
  Description of Artificial Sequence: Synthetic oligonucleotide
ccacaagccaagcggcuuc

SEQ ID NO: 2820850 - RNA, 19 nt, Artificial Sequence
  Description of Artificial Sequence: Synthetic oligonucleotide
ggauggugcccugcaccgg

SEQ ID NO: 2820851 - RNA, 19 nt, Artificial Sequence
  Description of Artificial Sequence: Synthetic oligonucleotide
cuucgucgccaugcuucgc

SEQ ID NO: 2820852 - RNA, 19 nt, Artificial Sequence
  Description of Artificial Sequence: Synthetic oligonucleotide
caguccuguuaucuguccu

SEQ ID NO: 2820853 - RNA, 19 nt, Artificial Sequence
  Description of Artificial Sequence: Synthetic oligonucleotide
cucauggaccaccauuguu

SEQ ID NO: 2820854 - RNA, 19 nt, Artificial Sequence
  Description of Artificial Sequence: Synthetic oligonucleotide
gcaaucccgaucacaccac

SEQ ID NO: 2820855 - RNA, 19 nt, Artificial Sequence
  Description of Artificial Sequence: Synthetic oligonucleotide
ggaccugcacugguacagc

SEQ ID NO: 2820856 - RNA, 19 nt, Artificial Sequence
  Description of Artificial Sequence: Synthetic oligonucleotide
cagucacauugcccagguc

SEQ ID NO: 2820857 - RNA, 19 nt, Artificial Sequence
  Description of Artificial Sequence: Synthetic oligonucleotide
aucuguccugagaccacaa

SEQ ID NO: 2820858 - RNA, 19 nt, Artificial Sequence
  Description of Artificial Sequence: Synthetic oligonucleotide
cucucccgagagugagauc

SEQ ID NO: 2820859 - RNA, 19 nt, Artificial Sequence
  Description of Artificial Sequence: Synthetic oligonucleotide
cugcaccgggccgucgccc

SEQ ID NO: 2820860 - RNA, 19 nt, Artificial Sequence
  Description of Artificial Sequence: Synthetic oligonucleotide
gaggguccgccauguuucu

SEQ ID NO: 2820861 - RNA, 19 nt, Artificial Sequence
  Description of Artificial Sequence: Synthetic oligonucleotide
gcgaggagacgcgcggcgg

SEQ ID NO: 2820862 - RNA, 19 nt, Artificial Sequence
  Description of Artificial Sequence: Synthetic oligonucleotide
caccauuguucggccgaug

SEQ ID NO: 2820863 - RNA, 19 nt, Artificial Sequence
  Description of Artificial Sequence: Synthetic oligonucleotide
gcacugguacagccuugug

SEQ ID NO: 2820864 - RNA, 19 nt, Artificial Sequence
  Description of Artificial Sequence: Synthetic oligonucleotide
gcuucgcgaggagacgcgc

SEQ ID NO: 2820865 - RNA, 19 nt, Artificial Sequence
  Description of Artificial Sequence: Synthetic oligonucleotide
caagcggcuuccagcauuu

SEQ ID NO: 2820866 - RNA, 19 nt, Artificial Sequence
  Description of Artificial Sequence: Synthetic oligonucleotide
ccaugcuggccuucaguca

SEQ ID NO: 2820867 - RNA, 19 nt, Artificial Sequence
  Description of Artificial Sequence: Synthetic oligonucleotide
caccacaagccaagcggcu

SEQ ID NO: 2820868 - RNA, 19 nt, Artificial Sequence
  Description of Artificial Sequence: Synthetic oligonucleotide
auccuucccggcagucaca

SEQ ID NO: 2820869 - RNA, 19 nt, Artificial Sequence
  Description of Artificial Sequence: Synthetic oligonucleotide
guccgccauguuucuugga

SEQ ID NO: 2820870 - RNA, 19 nt, Artificial Sequence
  Description of Artificial Sequence: Synthetic oligonucleotide
cauuuccgccuuugcccaa

SEQ ID NO: 2820871 - RNA, 19 nt, Artificial Sequence
  Description of Artificial Sequence: Synthetic oligonucleotide
ggccgaugauagaaugcuc

SEQ ID NO: 2820872 - RNA, 19 nt, Artificial Sequence
  Description of Artificial Sequence: Synthetic oligonucleotide
uccgaggguccgccauguu

SEQ ID NO: 2820873 - RNA, 19 nt, Artificial Sequence
  Description of Artificial Sequence: Synthetic oligonucleotide
gcacacggccuucgucgcc

SEQ ID NO: 2820874 - RNA, 19 nt, Artificial Sequence
  Description of Artificial Sequence: Synthetic oligonucleotide
cgcccuucagcacgcacac

SEQ ID NO: 2820875 - RNA, 19 nt, Artificial Sequence
  Description of Artificial Sequence: Synthetic oligonucleotide
cgcgaggagacgcgcggcg

SEQ ID NO: 2820876 - RNA, 19 nt, Artificial Sequence
  Description of Artificial Sequence: Synthetic oligonucleotide
cgaggagacgcgcggcggc

SEQ ID NO: 2820877 - RNA, 19 nt, Artificial Sequence
  Description of Artificial Sequence: Synthetic oligonucleotide
gccaugcuucgcgaggaga

SEQ ID NO: 2820878 - RNA, 19 nt, Artificial Sequence
  Description of Artificial Sequence: Synthetic oligonucleotide
cgaucacaccacaagccaa

SEQ ID NO: 2820879 - RNA, 19 nt, Artificial Sequence
  Description of Artificial Sequence: Synthetic oligonucleotide
cugguucaccacuucccuu

SEQ ID NO: 2820880 - RNA, 19 nt, Artificial Sequence
  Description of Artificial Sequence: Synthetic oligonucleotide
ccccaaacugaugcacaug

SEQ ID NO: 2820881 - RNA, 19 nt, Artificial Sequence
  Description of Artificial Sequence: Synthetic oligonucleotide
ccugcaccgggccgucgcc

SEQ ID NO: 2820882 - RNA, 19 nt, Artificial Sequence
  Description of Artificial Sequence: Synthetic oligonucleotide
cacggccuucgucgccaug

SEQ ID NO: 2820883 - RNA, 19 nt, Artificial Sequence
  Description of Artificial Sequence: Synthetic oligonucleotide
ccgucgcccuucagcacgc

SEQ ID NO: 2820884 - RNA, 19 nt, Artificial Sequence
  Description of Artificial Sequence: Synthetic oligonucleotide
accgggccgucgcccuuca

SEQ ID NO: 2820885 - RNA, 19 nt, Artificial Sequence
  Description of Artificial Sequence: Synthetic oligonucleotide
cgcacacggccuucgucgc

SEQ ID NO: 2820886 - RNA, 19 nt, Artificial Sequence
  Description of Artificial Sequence: Synthetic oligonucleotide
guucggccgaugauagaau

SEQ ID NO: 2820887 - RNA, 19 nt, Artificial Sequence
  Description of Artificial Sequence: Synthetic oligonucleotide
ccacaacugguucaccacu

SEQ ID NO: 2820888 - RNA, 19 nt, Artificial Sequence
  Description of Artificial Sequence: Synthetic oligonucleotide
ggaacccaugcuggccuuc

SEQ ID NO: 2820889 - RNA, 19 nt, Artificial Sequence
  Description of Artificial Sequence: Synthetic oligonucleotide
ccagucuuuguacuuucau

SEQ ID NO: 2820890 - RNA, 19 nt, Artificial Sequence
  Description of Artificial Sequence: Synthetic oligonucleotide
ccucucuugauccgagggu

SEQ ID NO: 2820891 - RNA, 19 nt, Artificial Sequence
  Description of Artificial Sequence: Synthetic oligonucleotide
cgucgccaugcuucgcgag

SEQ ID NO: 2820892 - RNA, 19 nt, Artificial Sequence
  Description of Artificial Sequence: Synthetic oligonucleotide
ccgccuuugcccaagucau

SEQ ID NO: 2820893 - RNA, 19 nt, Artificial Sequence
  Description of Artificial Sequence: Synthetic oligonucleotide
gcucucccgagagugagau

SEQ ID NO: 2820894 - RNA, 19 nt, Artificial Sequence
  Description of Artificial Sequence: Synthetic oligonucleotide
cagcacgcacacggccuuc

SEQ ID NO: 2820895 - RNA, 19 nt, Artificial Sequence
  Description of Artificial Sequence: Synthetic oligonucleotide
caccgggccgucgcccuuc

SEQ ID NO: 2820896 - RNA, 19 nt, Artificial Sequence
  Description of Artificial Sequence: Synthetic oligonucleotide
cccgagagugagaucacau

SEQ ID NO: 2820897 - RNA, 19 nt, Artificial Sequence
  Description of Artificial Sequence: Synthetic oligonucleotide
ugcccugcaccgggccguc

SEQ ID NO: 2820898 - RNA, 19 nt, Artificial Sequence
  Description of Artificial Sequence: Synthetic oligonucleotide
aggguccgccauguuucuu

SEQ ID NO: 2820899 - RNA, 19 nt, Artificial Sequence
  Description of Artificial Sequence: Synthetic oligonucleotide
gcccuucagcacgcacacg

SEQ ID NO: 2820900 - RNA, 19 nt, Artificial Sequence
  Description of Artificial Sequence: Synthetic oligonucleotide
gaucuucaauggacacauu

SEQ ID NO: 2820901 - RNA, 19 nt, Artificial Sequence
  Description of Artificial Sequence: Synthetic oligonucleotide
ccauccuucccggcaguca

SEQ ID NO: 2820902 - RNA, 19 nt, Artificial Sequence
  Description of Artificial Sequence: Synthetic oligonucleotide
ccaagucaucuugcuucuc

SEQ ID NO: 2820903 - RNA, 19 nt, Artificial Sequence
  Description of Artificial Sequence: Synthetic oligonucleotide
guacagccuuguguauuau

SEQ ID NO: 2820904 - RNA, 19 nt, Artificial Sequence
  Description of Artificial Sequence: Synthetic oligonucleotide
ccgccauguuucuuggagu

SEQ ID NO: 2820905 - RNA, 19 nt, Artificial Sequence
  Description of Artificial Sequence: Synthetic oligonucleotide
gugcccugcaccgggccgu

SEQ ID NO: 2820906 - RNA, 19 nt, Artificial Sequence
  Description of Artificial Sequence: Synthetic oligonucleotide
ccaagcggcuuccagcauu

SEQ ID NO: 2820907 - RNA, 19 nt, Artificial Sequence
  Description of Artificial Sequence: Synthetic oligonucleotide
ccacuucccuucugcucga

SEQ ID NO: 2820908 - RNA, 19 nt, Artificial Sequence
  Description of Artificial Sequence: Synthetic oligonucleotide
caccauccuucccggcagu

SEQ ID NO: 2820909 - RNA, 19 nt, Artificial Sequence
  Description of Artificial Sequence: Synthetic oligonucleotide
ccauuguucggccgaugau

SEQ ID NO: 2820910 - RNA, 19 nt, Artificial Sequence
  Description of Artificial Sequence: Synthetic oligonucleotide
cgccuuugcccaagucauc

SEQ ID NO: 2820911 - RNA, 19 nt, Artificial Sequence
  Description of Artificial Sequence: Synthetic oligonucleotide
gcuucucauggaccaccau

SEQ ID NO: 2820912 - RNA, 19 nt, Artificial Sequence
  Description of Artificial Sequence: Synthetic oligonucleotide
cgccaugcuucgcgaggag

SEQ ID NO: 2820913 - RNA, 19 nt, Artificial Sequence
  Description of Artificial Sequence: Synthetic oligonucleotide
cacuucccuucugcucgaa

SEQ ID NO: 2820914 - RNA, 19 nt, Artificial Sequence
  Description of Artificial Sequence: Synthetic oligonucleotide
ccgaggguccgccauguuu

SEQ ID NO: 2820915 - RNA, 19 nt, Artificial Sequence
  Description of Artificial Sequence: Synthetic oligonucleotide
ccuucugcucgaaguggau

SEQ ID NO: 2820916 - RNA, 19 nt, Artificial Sequence
  Description of Artificial Sequence: Synthetic oligonucleotide
gcacgcacacggccuucgu

SEQ ID NO: 2820917 - RNA, 19 nt, Artificial Sequence
  Description of Artificial Sequence: Synthetic oligonucleotide
gcccugcaccgggccgucg

SEQ ID NO: 2820918 - RNA, 19 nt, Artificial Sequence
  Description of Artificial Sequence: Synthetic oligonucleotide
ggccuucgucgccaugcuu

SEQ ID NO: 2820919 - RNA, 19 nt, Artificial Sequence
  Description of Artificial Sequence: Synthetic oligonucleotide
gccuucagucaguccuguu

SEQ ID NO: 2820920 - RNA, 19 nt, Artificial Sequence
  Description of Artificial Sequence: Synthetic oligonucleotide
gccaagcggcuuccagcau

SEQ ID NO: 2820921 - RNA, 19 nt, Artificial Sequence
  Description of Artificial Sequence: Synthetic oligonucleotide
ccgggccgucgcccuucag

SEQ ID NO: 2820922 - RNA, 19 nt, Artificial Sequence
  Description of Artificial Sequence: Synthetic oligonucleotide
ccaccauuguucggccgau

SEQ ID NO: 2820923 - RNA, 19 nt, Artificial Sequence
  Description of Artificial Sequence: Synthetic oligonucleotide
cggccuucgucgccaugcu

SEQ ID NO: 2820924 - RNA, 19 nt, Artificial Sequence
  Description of Artificial Sequence: Synthetic oligonucleotide
gcaccgggccgucgcccuu

SEQ ID NO: 2820925 - RNA, 19 nt, Artificial Sequence
  Description of Artificial Sequence: Synthetic oligonucleotide
cgucgcccuucagcacgca

SEQ ID NO: 2820926 - RNA, 19 nt, Artificial Sequence
  Description of Artificial Sequence: Synthetic oligonucleotide
augcuuaugagugagaagc

SEQ ID NO: 2820927 - RNA, 19 nt, Artificial Sequence
  Description of Artificial Sequence: Synthetic oligonucleotide
ugcgauucugcucagagcc

SEQ ID NO: 2820928 - RNA, 19 nt, Artificial Sequence
  Description of Artificial Sequence: Synthetic oligonucleotide
ucagagacgaugcacaggc

SEQ ID NO: 2820929 - RNA, 19 nt, Artificial Sequence
  Description of Artificial Sequence: Synthetic oligonucleotide
ugaggaagaauccugacaa

SEQ ID NO: 2820930 - RNA, 19 nt, Artificial Sequence
  Description of Artificial Sequence: Synthetic oligonucleotide
uuggauauggagaagcugu

SEQ ID NO: 2820931 - RNA, 19 nt, Artificial Sequence
  Description of Artificial Sequence: Synthetic oligonucleotide
uuacucaggaaguagggag

SEQ ID NO: 2820932 - RNA, 19 nt, Artificial Sequence
  Description of Artificial Sequence: Synthetic oligonucleotide
gaagcugugguacaguacc

SEQ ID NO: 2820933 - RNA, 19 nt, Artificial Sequence
  Description of Artificial Sequence: Synthetic oligonucleotide
uugucuuuggauauggaga

SEQ ID NO: 2820934 - RNA, 19 nt, Artificial Sequence
  Description of Artificial Sequence: Synthetic oligonucleotide
ugagaagcagguaauuucc

SEQ ID NO: 2820935 - RNA, 19 nt, Artificial Sequence
  Description of Artificial Sequence: Synthetic oligonucleotide
ugaaucucagagacgaugc

SEQ ID NO: 2820936 - RNA, 19 nt, Artificial Sequence
  Description of Artificial Sequence: Synthetic oligonucleotide
agacagcugggcuacaugc

SEQ ID NO: 2820937 - RNA, 19 nt, Artificial Sequence
  Description of Artificial Sequence: Synthetic oligonucleotide
ugguacaguacccaggcag

SEQ ID NO: 2820938 - RNA, 19 nt, Artificial Sequence
  Description of Artificial Sequence: Synthetic oligonucleotide
cuuaugagugagaagcagg

SEQ ID NO: 2820939 - RNA, 19 nt, Artificial Sequence
  Description of Artificial Sequence: Synthetic oligonucleotide
ucuuagcugguucaggaag

SEQ ID NO: 2820940 - RNA, 19 nt, Artificial Sequence
  Description of Artificial Sequence: Synthetic oligonucleotide
aacugcagcaugaagacag

SEQ ID NO: 2820941 - RNA, 19 nt, Artificial Sequence
  Description of Artificial Sequence: Synthetic oligonucleotide
aagcagguaauuuccagug

SEQ ID NO: 2820942 - RNA, 19 nt, Artificial Sequence
  Description of Artificial Sequence: Synthetic oligonucleotide
uaugucuugggccaccuug

SEQ ID NO: 2820943 - RNA, 19 nt, Artificial Sequence
  Description of Artificial Sequence: Synthetic oligonucleotide
cugagguugaaucucagag

SEQ ID NO: 2820944 - RNA, 19 nt, Artificial Sequence
  Description of Artificial Sequence: Synthetic oligonucleotide
ugugguacaguacccaggc

SEQ ID NO: 2820945 - RNA, 19 nt, Artificial Sequence
  Description of Artificial Sequence: Synthetic oligonucleotide
gagguugaaucucagagac

SEQ ID NO: 2820946 - RNA, 19 nt, Artificial Sequence
  Description of Artificial Sequence: Synthetic oligonucleotide
uccagugccaucuaugucu

SEQ ID NO: 2820947 - RNA, 19 nt, Artificial Sequence
  Description of Artificial Sequence: Synthetic oligonucleotide
aaucucagagacgaugcac

SEQ ID NO: 2820948 - RNA, 19 nt, Artificial Sequence
  Description of Artificial Sequence: Synthetic oligonucleotide
ugcgauuucgguaacugca

SEQ ID NO: 2820949 - RNA, 19 nt, Artificial Sequence
  Description of Artificial Sequence: Synthetic oligonucleotide
aaaacugcugguccuucuc

SEQ ID NO: 2820950 - RNA, 19 nt, Artificial Sequence
  Description of Artificial Sequence: Synthetic oligonucleotide
uuaugagugagaagcaggu

SEQ ID NO: 2820951 - RNA, 19 nt, Artificial Sequence
  Description of Artificial Sequence: Synthetic oligonucleotide
guugucuuuggauauggag

SEQ ID NO: 2820952 - RNA, 19 nt, Artificial Sequence
  Description of Artificial Sequence: Synthetic oligonucleotide
ucugcgauucugcucagag

SEQ ID NO: 2820953 - RNA, 19 nt, Artificial Sequence
  Description of Artificial Sequence: Synthetic oligonucleotide
ucuuuggauauggagaagc

SEQ ID NO: 2820954 - RNA, 19 nt, Artificial Sequence
  Description of Artificial Sequence: Synthetic oligonucleotide
aaguuacucaggaaguagg

SEQ ID NO: 2820955 - RNA, 19 nt, Artificial Sequence
  Description of Artificial Sequence: Synthetic oligonucleotide
uacucaggaaguagggagg

SEQ ID NO: 2820956 - RNA, 19 nt, Artificial Sequence
  Description of Artificial Sequence: Synthetic oligonucleotide
cuuucugaaggucucugcg

SEQ ID NO: 2820957 - RNA, 19 nt, Artificial Sequence
  Description of Artificial Sequence: Synthetic oligonucleotide
uucaggaagucucugcucu

SEQ ID NO: 2820958 - RNA, 19 nt, Artificial Sequence
  Description of Artificial Sequence: Synthetic oligonucleotide
acaguacccaggcaggugg

SEQ ID NO: 2820959 - RNA, 19 nt, Artificial Sequence
  Description of Artificial Sequence: Synthetic oligonucleotide
uugaggaagaauccugaca

SEQ ID NO: 2820960 - RNA, 19 nt, Artificial Sequence
  Description of Artificial Sequence: Synthetic oligonucleotide
agagacgaugcacaggcag

SEQ ID NO: 2820961 - RNA, 19 nt, Artificial Sequence
  Description of Artificial Sequence: Synthetic oligonucleotide
caacagugcuuucugaagg

SEQ ID NO: 2820962 - RNA, 19 nt, Artificial Sequence
  Description of Artificial Sequence: Synthetic oligonucleotide
aagaauccugacaacagug

SEQ ID NO: 2820963 - RNA, 19 nt, Artificial Sequence
  Description of Artificial Sequence: Synthetic oligonucleotide
agagccaaaggcuggcugg

SEQ ID NO: 2820964 - RNA, 19 nt, Artificial Sequence
  Description of Artificial Sequence: Synthetic oligonucleotide
augagugagaagcagguaa

SEQ ID NO: 2820965 - RNA, 19 nt, Artificial Sequence
  Description of Artificial Sequence: Synthetic oligonucleotide
aagucucugcucucgacug

SEQ ID NO: 2820966 - RNA, 19 nt, Artificial Sequence
  Description of Artificial Sequence: Synthetic oligonucleotide
uugaaucucagagacgaug

SEQ ID NO: 2820967 - RNA, 19 nt, Artificial Sequence
  Description of Artificial Sequence: Synthetic oligonucleotide
acaacagugcuuucugaag

SEQ ID NO: 2820968 - RNA, 19 nt, Artificial Sequence
  Description of Artificial Sequence: Synthetic oligonucleotide
guagggaggggcuagcucc

SEQ ID NO: 2820969 - RNA, 19 nt, Artificial Sequence
  Description of Artificial Sequence: Synthetic oligonucleotide
uauggagaagcugugguac

SEQ ID NO: 2820970 - RNA, 19 nt, Artificial Sequence
  Description of Artificial Sequence: Synthetic oligonucleotide
agaauccugacaacagugc

SEQ ID NO: 2820971 - RNA, 19 nt, Artificial Sequence
  Description of Artificial Sequence: Synthetic oligonucleotide
ugagguugaaucucagaga

SEQ ID NO: 2820972 - RNA, 19 nt, Artificial Sequence
  Description of Artificial Sequence: Synthetic oligonucleotide
ucucuuagcugguucagga

SEQ ID NO: 2820973 - RNA, 19 nt, Artificial Sequence
  Description of Artificial Sequence: Synthetic oligonucleotide
agugccaucuaugucuugg

SEQ ID NO: 2820974 - RNA, 19 nt, Artificial Sequence
  Description of Artificial Sequence: Synthetic oligonucleotide
agcagguaauuuccagugc

SEQ ID NO: 2820975 - RNA, 19 nt, Artificial Sequence
  Description of Artificial Sequence: Synthetic oligonucleotide
uucgguaacugcagcauga

SEQ ID NO: 2820976 - RNA, 19 nt, Artificial Sequence
  Description of Artificial Sequence: Synthetic oligonucleotide
agcaugaagacagcugggc

SEQ ID NO: 2820977 - RNA, 19 nt, Artificial Sequence
  Description of Artificial Sequence: Synthetic oligonucleotide
agguggcugagcuggagcc

SEQ ID NO: 2820978 - RNA, 19 nt, Artificial Sequence
  Description of Artificial Sequence: Synthetic oligonucleotide
agaagcagguaauuuccag

SEQ ID NO: 2820979 - RNA, 19 nt, Artificial Sequence
  Description of Artificial Sequence: Synthetic oligonucleotide
ugggcuacaugcuuaugag

SEQ ID NO: 2820980 - RNA, 19 nt, Artificial Sequence
  Description of Artificial Sequence: Synthetic oligonucleotide
ugcucagagccaaaggcug

SEQ ID NO: 2820981 - RNA, 19 nt, Artificial Sequence
  Description of Artificial Sequence: Synthetic oligonucleotide
aacagugcuuucugaaggu

SEQ ID NO: 2820982 - RNA, 19 nt, Artificial Sequence
  Description of Artificial Sequence: Synthetic oligonucleotide
gcagcaugaagacagcugg

SEQ ID NO: 2820983 - RNA, 19 nt, Artificial Sequence
  Description of Artificial Sequence: Synthetic oligonucleotide
ugcagcaugaagacagcug

SEQ ID NO: 2820984 - RNA, 19 nt, Artificial Sequence
  Description of Artificial Sequence: Synthetic oligonucleotide
ucaggaaguagggaggggc

SEQ ID NO: 2820985 - RNA, 19 nt, Artificial Sequence
  Description of Artificial Sequence: Synthetic oligonucleotide
uuuggauauggagaagcug

SEQ ID NO: 2820986 - RNA, 19 nt, Artificial Sequence
  Description of Artificial Sequence: Synthetic oligonucleotide
augaagacagcugggcuac

SEQ ID NO: 2820987 - RNA, 19 nt, Artificial Sequence
  Description of Artificial Sequence: Synthetic oligonucleotide
uuucugaaggucucugcga

SEQ ID NO: 2820988 - RNA, 19 nt, Artificial Sequence
  Description of Artificial Sequence: Synthetic oligonucleotide
gauuucgguaacugcagca

SEQ ID NO: 2820989 - RNA, 19 nt, Artificial Sequence
  Description of Artificial Sequence: Synthetic oligonucleotide
gugagaagcagguaauuuc

SEQ ID NO: 2820990 - RNA, 19 nt, Artificial Sequence
  Description of Artificial Sequence: Synthetic oligonucleotide
uuucgguaacugcagcaug

SEQ ID NO: 2820991 - RNA, 19 nt, Artificial Sequence
  Description of Artificial Sequence: Synthetic oligonucleotide
aaacugcugguccuucucu

SEQ ID NO: 2820992 - RNA, 19 nt, Artificial Sequence
  Description of Artificial Sequence: Synthetic oligonucleotide
aguuacucaggaaguaggg

SEQ ID NO: 2820993 - RNA, 19 nt, Artificial Sequence
  Description of Artificial Sequence: Synthetic oligonucleotide
gggcaaguuacucaggaag

SEQ ID NO: 2820994 - RNA, 19 nt, Artificial Sequence
  Description of Artificial Sequence: Synthetic oligonucleotide
gucucugcgauucugcuca

SEQ ID NO: 2820995 - RNA, 19 nt, Artificial Sequence
  Description of Artificial Sequence: Synthetic oligonucleotide
uggauauggagaagcugug

SEQ ID NO: 2820996 - RNA, 19 nt, Artificial Sequence
  Description of Artificial Sequence: Synthetic oligonucleotide
uucugaaggucucugcgau

SEQ ID NO: 2820997 - RNA, 19 nt, Artificial Sequence
  Description of Artificial Sequence: Synthetic oligonucleotide
ugagugagaagcagguaau

SEQ ID NO: 2820998 - RNA, 19 nt, Artificial Sequence
  Description of Artificial Sequence: Synthetic oligonucleotide
gguaacugcagcaugaaga

SEQ ID NO: 2820999 - RNA, 19 nt, Artificial Sequence
  Description of Artificial Sequence: Synthetic oligonucleotide
agcaucugagguugaaucu

SEQ ID NO: 2821000 - RNA, 19 nt, Artificial Sequence
  Description of Artificial Sequence: Synthetic oligonucleotide
aauuuccagugccaucuau

SEQ ID NO: 2821001 - RNA, 19 nt, Artificial Sequence
  Description of Artificial Sequence: Synthetic oligonucleotide
ucucagagacgaugcacag

SEQ ID NO: 2821002 - RNA, 19 nt, Artificial Sequence
  Description of Artificial Sequence: Synthetic oligonucleotide
ugagcuggagcccugcgau

SEQ ID NO: 2821003 - RNA, 19 nt, Artificial Sequence
  Description of Artificial Sequence: Synthetic oligonucleotide
aggaagaauccugacaaca

SEQ ID NO: 2821004 - RNA, 19 nt, Artificial Sequence
  Description of Artificial Sequence: Synthetic oligonucleotide
aguagggaggggcuagcuc

SEQ ID NO: 2821005 - RNA, 19 nt, Artificial Sequence
  Description of Artificial Sequence: Synthetic oligonucleotide
gauauggagaagcuguggu

SEQ ID NO: 2821006 - RNA, 19 nt, Artificial Sequence
  Description of Artificial Sequence: Synthetic oligonucleotide
ugcuuaugagugagaagca

SEQ ID NO: 2821007 - RNA, 19 nt, Artificial Sequence
  Description of Artificial Sequence: Synthetic oligonucleotide
caaguuacucaggaaguag

SEQ ID NO: 2821008 - RNA, 19 nt, Artificial Sequence
  Description of Artificial Sequence: Synthetic oligonucleotide
cagcaucugagguugaauc

SEQ ID NO: 2821009 - RNA, 19 nt, Artificial Sequence
  Description of Artificial Sequence: Synthetic oligonucleotide
gacaacagugcuuucugaa

SEQ ID NO: 2821010 - RNA, 19 nt, Artificial Sequence
  Description of Artificial Sequence: Synthetic oligonucleotide
gguugaaucucagagacga

SEQ ID NO: 2821011 - RNA, 19 nt, Artificial Sequence
  Description of Artificial Sequence: Synthetic oligonucleotide
aggggcuagcuccaccagc

SEQ ID NO: 2821012 - RNA, 19 nt, Artificial Sequence
  Description of Artificial Sequence: Synthetic oligonucleotide
caugcuuaugagugagaag

SEQ ID NO: 2821013 - RNA, 19 nt, Artificial Sequence
  Description of Artificial Sequence: Synthetic oligonucleotide
ucugagguugaaucucaga

SEQ ID NO: 2821014 - RNA, 19 nt, Artificial Sequence
  Description of Artificial Sequence: Synthetic oligonucleotide
ggcuacaugcuuaugagug

SEQ ID NO: 2821015 - RNA, 19 nt, Artificial Sequence
  Description of Artificial Sequence: Synthetic oligonucleotide
aagcugugguacaguaccc

SEQ ID NO: 2821016 - RNA, 19 nt, Artificial Sequence
  Description of Artificial Sequence: Synthetic oligonucleotide
cugacaacagugcuuucug

SEQ ID NO: 2821017 - RNA, 19 nt, Artificial Sequence
  Description of Artificial Sequence: Synthetic oligonucleotide
gcagguaauuuccagugcc

SEQ ID NO: 2821018 - RNA, 19 nt, Artificial Sequence
  Description of Artificial Sequence: Synthetic oligonucleotide
ugguucaggaagucucugc

SEQ ID NO: 2821019 - RNA, 19 nt, Artificial Sequence
  Description of Artificial Sequence: Synthetic oligonucleotide
cuacaugcuuaugagugag

SEQ ID NO: 2821020 - RNA, 19 nt, Artificial Sequence
  Description of Artificial Sequence: Synthetic oligonucleotide
cugugguacaguacccagg

SEQ ID NO: 2821021 - RNA, 19 nt, Artificial Sequence
  Description of Artificial Sequence: Synthetic oligonucleotide
uucucuuagcugguucagg

SEQ ID NO: 2821022 - RNA, 19 nt, Artificial Sequence
  Description of Artificial Sequence: Synthetic oligonucleotide
ugccaucuaugucuugggc

SEQ ID NO: 2821023 - RNA, 19 nt, Artificial Sequence
  Description of Artificial Sequence: Synthetic oligonucleotide
guaauuuccagugccaucu

SEQ ID NO: 2821024 - RNA, 19 nt, Artificial Sequence
  Description of Artificial Sequence: Synthetic oligonucleotide
acucaggaaguagggaggg

SEQ ID NO: 2821025 - RNA, 19 nt, Artificial Sequence
  Description of Artificial Sequence: Synthetic oligonucleotide
gaagcagguaauuuccagu

SEQ ID NO: 2821026 - RNA, 19 nt, Artificial Sequence
  Description of Artificial Sequence: Synthetic oligonucleotide
auuuccagugccaucuaug

SEQ ID NO: 2821027 - RNA, 19 nt, Artificial Sequence
  Description of Artificial Sequence: Synthetic oligonucleotide
agcuccaccagcaucugag

SEQ ID NO: 2821028 - RNA, 19 nt, Artificial Sequence
  Description of Artificial Sequence: Synthetic oligonucleotide
caguugucuuuggauaugg

SEQ ID NO: 2821029 - RNA, 19 nt, Artificial Sequence
  Description of Artificial Sequence: Synthetic oligonucleotide
agaagcugugguacaguac

SEQ ID NO: 2821030 - RNA, 19 nt, Artificial Sequence
  Description of Artificial Sequence: Synthetic oligonucleotide
ggaagaauccugacaacag

SEQ ID NO: 2821031 - RNA, 19 nt, Artificial Sequence
  Description of Artificial Sequence: Synthetic oligonucleotide
gaagaauccugacaacagu

SEQ ID NO: 2821032 - RNA, 19 nt, Artificial Sequence
  Description of Artificial Sequence: Synthetic oligonucleotide
gccaucuaugucuugggcc

SEQ ID NO: 2821033 - RNA, 19 nt, Artificial Sequence
  Description of Artificial Sequence: Synthetic oligonucleotide
acaugcuuaugagugagaa

SEQ ID NO: 2821034 - RNA, 19 nt, Artificial Sequence
  Description of Artificial Sequence: Synthetic oligonucleotide
ugggccaccuugaggaaga

SEQ ID NO: 2821035 - RNA, 19 nt, Artificial Sequence
  Description of Artificial Sequence: Synthetic oligonucleotide
ugacaacagugcuuucuga

SEQ ID NO: 2821036 - RNA, 19 nt, Artificial Sequence
  Description of Artificial Sequence: Synthetic oligonucleotide
acgaugcacaggcaguugu

SEQ ID NO: 2821037 - RNA, 19 nt, Artificial Sequence
  Description of Artificial Sequence: Synthetic oligonucleotide
cugaaggucucugcgauuc

SEQ ID NO: 2821038 - RNA, 19 nt, Artificial Sequence
  Description of Artificial Sequence: Synthetic oligonucleotide
auauggagaagcuguggua

SEQ ID NO: 2821039 - RNA, 19 nt, Artificial Sequence
  Description of Artificial Sequence: Synthetic oligonucleotide
agcccugcgauuucgguaa

SEQ ID NO: 2821040 - RNA, 19 nt, Artificial Sequence
  Description of Artificial Sequence: Synthetic oligonucleotide
aucucagagacgaugcaca

SEQ ID NO: 2821041 - RNA, 19 nt, Artificial Sequence
  Description of Artificial Sequence: Synthetic oligonucleotide
ugucuugggccaccuugag

SEQ ID NO: 2821042 - RNA, 19 nt, Artificial Sequence
  Description of Artificial Sequence: Synthetic oligonucleotide
uacaugcuuaugagugaga

SEQ ID NO: 2821043 - RNA, 19 nt, Artificial Sequence
  Description of Artificial Sequence: Synthetic oligonucleotide
cugggcuacaugcuuauga

SEQ ID NO: 2821044 - RNA, 19 nt, Artificial Sequence
  Description of Artificial Sequence: Synthetic oligonucleotide
agucucugcucucgacugg

SEQ ID NO: 2821045 - RNA, 19 nt, Artificial Sequence
  Description of Artificial Sequence: Synthetic oligonucleotide
cugcgauuucgguaacugc

SEQ ID NO: 2821046 - RNA, 19 nt, Artificial Sequence
  Description of Artificial Sequence: Synthetic oligonucleotide
gaauccugacaacagugcu

SEQ ID NO: 2821047 - RNA, 19 nt, Artificial Sequence
  Description of Artificial Sequence: Synthetic oligonucleotide
aucuaugucuugggccacc

SEQ ID NO: 2821048 - RNA, 19 nt, Artificial Sequence
  Description of Artificial Sequence: Synthetic oligonucleotide
cagcaugaagacagcuggg

SEQ ID NO: 2821049 - RNA, 19 nt, Artificial Sequence
  Description of Artificial Sequence: Synthetic oligonucleotide
gguacaguacccaggcagg

SEQ ID NO: 2821050 - RNA, 19 nt, Artificial Sequence
  Description of Artificial Sequence: Synthetic oligonucleotide
aauccugacaacagugcuu

SEQ ID NO: 2821051 - RNA, 19 nt, Artificial Sequence
  Description of Artificial Sequence: Synthetic oligonucleotide
aggcaguugucuuuggaua

SEQ ID NO: 2821052 - RNA, 19 nt, Artificial Sequence
  Description of Artificial Sequence: Synthetic oligonucleotide
gaagucucugcucucgacu

SEQ ID NO: 2821053 - RNA, 19 nt, Artificial Sequence
  Description of Artificial Sequence: Synthetic oligonucleotide
gaggaagaauccugacaac

SEQ ID NO: 2821054 - RNA, 19 nt, Artificial Sequence
  Description of Artificial Sequence: Synthetic oligonucleotide
gaaucucagagacgaugca

SEQ ID NO: 2821055 - RNA, 19 nt, Artificial Sequence
  Description of Artificial Sequence: Synthetic oligonucleotide
auuucgguaacugcagcau

SEQ ID NO: 2821056 - RNA, 19 nt, Artificial Sequence
  Description of Artificial Sequence: Synthetic oligonucleotide
uccaccagcaucugagguu

SEQ ID NO: 2821057 - RNA, 19 nt, Artificial Sequence
  Description of Artificial Sequence: Synthetic oligonucleotide
gaaggucucugcgauucug

SEQ ID NO: 2821058 - RNA, 19 nt, Artificial Sequence
  Description of Artificial Sequence: Synthetic oligonucleotide
caugaagacagcugggcua

SEQ ID NO: 2821059 - RNA, 19 nt, Artificial Sequence
  Description of Artificial Sequence: Synthetic oligonucleotide
agugagaagcagguaauuu

SEQ ID NO: 2821060 - RNA, 19 nt, Artificial Sequence
  Description of Artificial Sequence: Synthetic oligonucleotide
aacugcugguccuucucuu

SEQ ID NO: 2821061 - RNA, 19 nt, Artificial Sequence
  Description of Artificial Sequence: Synthetic oligonucleotide
ugcuuucugaaggucucug

SEQ ID NO: 2821062 - RNA, 19 nt, Artificial Sequence
  Description of Artificial Sequence: Synthetic oligonucleotide
uggagcccugcgauuucgg

SEQ ID NO: 2821063 - RNA, 19 nt, Artificial Sequence
  Description of Artificial Sequence: Synthetic oligonucleotide
gccaccuugaggaagaauc

SEQ ID NO: 2821064 - RNA, 19 nt, Artificial Sequence
  Description of Artificial Sequence: Synthetic oligonucleotide
cugcgauucugcucagagc

SEQ ID NO: 2821065 - RNA, 19 nt, Artificial Sequence
  Description of Artificial Sequence: Synthetic oligonucleotide
caggaagucucugcucucg

SEQ ID NO: 2821066 - RNA, 19 nt, Artificial Sequence
  Description of Artificial Sequence: Synthetic oligonucleotide
accuugaggaagaauccug

SEQ ID NO: 2821067 - RNA, 19 nt, Artificial Sequence
  Description of Artificial Sequence: Synthetic oligonucleotide
acaggcaguugucuuugga

SEQ ID NO: 2821068 - RNA, 19 nt, Artificial Sequence
  Description of Artificial Sequence: Synthetic oligonucleotide
cucagagacgaugcacagg

SEQ ID NO: 2821069 - RNA, 19 nt, Artificial Sequence
  Description of Artificial Sequence: Synthetic oligonucleotide
gagaagcugugguacagua

SEQ ID NO: 2821070 - RNA, 19 nt, Artificial Sequence
  Description of Artificial Sequence: Synthetic oligonucleotide
ggauauggagaagcugugg

SEQ ID NO: 2821071 - RNA, 19 nt, Artificial Sequence
  Description of Artificial Sequence: Synthetic oligonucleotide
ugcacaggcaguugucuuu

SEQ ID NO: 2821072 - RNA, 19 nt, Artificial Sequence
  Description of Artificial Sequence: Synthetic oligonucleotide
gagccaaaggcuggcuggg

SEQ ID NO: 2821073 - RNA, 19 nt, Artificial Sequence
  Description of Artificial Sequence: Synthetic oligonucleotide
cugcugguccuucucuuag

SEQ ID NO: 2821074 - RNA, 19 nt, Artificial Sequence
  Description of Artificial Sequence: Synthetic oligonucleotide
uuccagugccaucuauguc

SEQ ID NO: 2821075 - RNA, 19 nt, Artificial Sequence
  Description of Artificial Sequence: Synthetic oligonucleotide
uacaguacccaggcaggug

SEQ ID NO: 2821076 - RNA, 19 nt, Artificial Sequence
  Description of Artificial Sequence: Synthetic oligonucleotide
ugcugguccuucucuuagc

SEQ ID NO: 2821077 - RNA, 19 nt, Artificial Sequence
  Description of Artificial Sequence: Synthetic oligonucleotide
guuacucaggaaguaggga

SEQ ID NO: 2821078 - RNA, 19 nt, Artificial Sequence
  Description of Artificial Sequence: Synthetic oligonucleotide
gucucugcucucgacuggg

SEQ ID NO: 2821079 - RNA, 19 nt, Artificial Sequence
  Description of Artificial Sequence: Synthetic oligonucleotide
auccugacaacagugcuuu

SEQ ID NO: 2821080 - RNA, 19 nt, Artificial Sequence
  Description of Artificial Sequence: Synthetic oligonucleotide
caucugagguugaaucuca

SEQ ID NO: 2821081 - RNA, 19 nt, Artificial Sequence
  Description of Artificial Sequence: Synthetic oligonucleotide
uugggccaccuugaggaag

SEQ ID NO: 2821082 - RNA, 19 nt, Artificial Sequence
  Description of Artificial Sequence: Synthetic oligonucleotide
gcuuaugagugagaagcag

SEQ ID NO: 2821083 - RNA, 19 nt, Artificial Sequence
  Description of Artificial Sequence: Synthetic oligonucleotide
guucaggaagucucugcuc

SEQ ID NO: 2821084 - RNA, 19 nt, Artificial Sequence
  Description of Artificial Sequence: Synthetic oligonucleotide
ugaaggucucugcgauucu

SEQ ID NO: 2821085 - RNA, 19 nt, Artificial Sequence
  Description of Artificial Sequence: Synthetic oligonucleotide
aggucucugcgauucugcu

SEQ ID NO: 2821086 - RNA, 19 nt, Artificial Sequence
  Description of Artificial Sequence: Synthetic oligonucleotide
cagguggcugagcuggagc

SEQ ID NO: 2821087 - RNA, 19 nt, Artificial Sequence
  Description of Artificial Sequence: Synthetic oligonucleotide
uacccaggcagguggcuga

SEQ ID NO: 2821088 - RNA, 19 nt, Artificial Sequence
  Description of Artificial Sequence: Synthetic oligonucleotide
gguaauuuccagugccauc

SEQ ID NO: 2821089 - RNA, 19 nt, Artificial Sequence
  Description of Artificial Sequence: Synthetic oligonucleotide
ucuaugucuugggccaccu

SEQ ID NO: 2821090 - RNA, 19 nt, Artificial Sequence
  Description of Artificial Sequence: Synthetic oligonucleotide
gcugugguacaguacccag

SEQ ID NO: 2821091 - RNA, 19 nt, Artificial Sequence
  Description of Artificial Sequence: Synthetic oligonucleotide
uuagcugguucaggaaguc

SEQ ID NO: 2821092 - RNA, 19 nt, Artificial Sequence
  Description of Artificial Sequence: Synthetic oligonucleotide
cucagagccaaaggcuggc

SEQ ID NO: 2821093 - RNA, 19 nt, Artificial Sequence
  Description of Artificial Sequence: Synthetic oligonucleotide
uagggaggggcuagcucca

SEQ ID NO: 2821094 - RNA, 19 nt, Artificial Sequence
  Description of Artificial Sequence: Synthetic oligonucleotide
cagguaauuuccagugcca

SEQ ID NO: 2821095 - RNA, 19 nt, Artificial Sequence
  Description of Artificial Sequence: Synthetic oligonucleotide
ccaccuugaggaagaaucc

SEQ ID NO: 2821096 - RNA, 19 nt, Artificial Sequence
  Description of Artificial Sequence: Synthetic oligonucleotide
agguugaaucucagagacg

SEQ ID NO: 2821097 - RNA, 19 nt, Artificial Sequence
  Description of Artificial Sequence: Synthetic oligonucleotide
aaguagggaggggcuagcu

SEQ ID NO: 2821098 - RNA, 19 nt, Artificial Sequence
  Description of Artificial Sequence: Synthetic oligonucleotide
agguaauuuccagugccau

SEQ ID NO: 2821099 - RNA, 19 nt, Artificial Sequence
  Description of Artificial Sequence: Synthetic oligonucleotide
uaauuuccagugccaucua

SEQ ID NO: 2821100 - RNA, 19 nt, Artificial Sequence
  Description of Artificial Sequence: Synthetic oligonucleotide
uaugagugagaagcaggua

SEQ ID NO: 2821101 - RNA, 19 nt, Artificial Sequence
  Description of Artificial Sequence: Synthetic oligonucleotide
ucaggaagucucugcucuc

SEQ ID NO: 2821102 - RNA, 19 nt, Artificial Sequence
  Description of Artificial Sequence: Synthetic oligonucleotide
cuggcugggacaggggaag

SEQ ID NO: 2821103 - RNA, 19 nt, Artificial Sequence
  Description of Artificial Sequence: Synthetic oligonucleotide
gcuuucugaaggucucugc

SEQ ID NO: 2821104 - RNA, 19 nt, Artificial Sequence
  Description of Artificial Sequence: Synthetic oligonucleotide
gagaagcagguaauuucca

SEQ ID NO: 2821105 - RNA, 19 nt, Artificial Sequence
  Description of Artificial Sequence: Synthetic oligonucleotide
gaaguagggaggggcuagc

SEQ ID NO: 2821106 - RNA, 19 nt, Artificial Sequence
  Description of Artificial Sequence: Synthetic oligonucleotide
ccaucuaugucuugggcca

SEQ ID NO: 2821107 - RNA, 19 nt, Artificial Sequence
  Description of Artificial Sequence: Synthetic oligonucleotide
cuuagcugguucaggaagu

SEQ ID NO: 2821108 - RNA, 19 nt, Artificial Sequence
  Description of Artificial Sequence: Synthetic oligonucleotide
aggaagucucugcucucga

SEQ ID NO: 2821109 - RNA, 19 nt, Artificial Sequence
  Description of Artificial Sequence: Synthetic oligonucleotide
cuuuggauauggagaagcu

SEQ ID NO: 2821110 - RNA, 19 nt, Artificial Sequence
  Description of Artificial Sequence: Synthetic oligonucleotide
gaggggcuagcuccaccag

SEQ ID NO: 2821111 - RNA, 19 nt, Artificial Sequence
  Description of Artificial Sequence: Synthetic oligonucleotide
ggaaguagggaggggcuag

SEQ ID NO: 2821112 - RNA, 19 nt, Artificial Sequence
  Description of Artificial Sequence: Synthetic oligonucleotide
agcugugguacaguaccca

SEQ ID NO: 2821113 - RNA, 19 nt, Artificial Sequence
  Description of Artificial Sequence: Synthetic oligonucleotide
gacgaugcacaggcaguug

SEQ ID NO: 2821114 - RNA, 19 nt, Artificial Sequence
  Description of Artificial Sequence: Synthetic oligonucleotide
cuggagcccugcgauuucg

SEQ ID NO: 2821115 - RNA, 19 nt, Artificial Sequence
  Description of Artificial Sequence: Synthetic oligonucleotide
cucaggaaguagggagggg

SEQ ID NO: 2821116 - RNA, 19 nt, Artificial Sequence
  Description of Artificial Sequence: Synthetic oligonucleotide
augucuugggccaccuuga

SEQ ID NO: 2821117 - RNA, 19 nt, Artificial Sequence
  Description of Artificial Sequence: Synthetic oligonucleotide
cacaggcaguugucuuugg

SEQ ID NO: 2821118 - RNA, 19 nt, Artificial Sequence
  Description of Artificial Sequence: Synthetic oligonucleotide
gaugcacaggcaguugucu

SEQ ID NO: 2821119 - RNA, 19 nt, Artificial Sequence
  Description of Artificial Sequence: Synthetic oligonucleotide
gcuacaugcuuaugaguga

SEQ ID NO: 2821120 - RNA, 19 nt, Artificial Sequence
  Description of Artificial Sequence: Synthetic oligonucleotide
uagcuccaccagcaucuga

SEQ ID NO: 2821121 - RNA, 19 nt, Artificial Sequence
  Description of Artificial Sequence: Synthetic oligonucleotide
gucuuuggauauggagaag

SEQ ID NO: 2821122 - RNA, 19 nt, Artificial Sequence
  Description of Artificial Sequence: Synthetic oligonucleotide
caguacccaggcagguggc

SEQ ID NO: 2821123 - RNA, 19 nt, Artificial Sequence
  Description of Artificial Sequence: Synthetic oligonucleotide
agcugggcuacaugcuuau

SEQ ID NO: 2821124 - RNA, 19 nt, Artificial Sequence
  Description of Artificial Sequence: Synthetic oligonucleotide
ucgguaacugcagcaugaa

SEQ ID NO: 2821125 - RNA, 19 nt, Artificial Sequence
  Description of Artificial Sequence: Synthetic oligonucleotide
augcacaggcaguugucuu

SEQ ID NO: 2821126 - RNA, 19 nt, Artificial Sequence
  Description of Artificial Sequence: Synthetic oligonucleotide
gagcccugcgauuucggua

SEQ ID NO: 2821127 - RNA, 19 nt, Artificial Sequence
  Description of Artificial Sequence: Synthetic oligonucleotide
aucugagguugaaucucag

SEQ ID NO: 2821128 - RNA, 19 nt, Artificial Sequence
  Description of Artificial Sequence: Synthetic oligonucleotide
gcgauuucgguaacugcag

SEQ ID NO: 2821129 - RNA, 19 nt, Artificial Sequence
  Description of Artificial Sequence: Synthetic oligonucleotide
gguucaggaagucucugcu

SEQ ID NO: 2821130 - RNA, 19 nt, Artificial Sequence
  Description of Artificial Sequence: Synthetic oligonucleotide
ggaggggcuagcuccacca

SEQ ID NO: 2821131 - RNA, 19 nt, Artificial Sequence
  Description of Artificial Sequence: Synthetic oligonucleotide
ucagagccaaaggcuggcu

SEQ ID NO: 2821132 - RNA, 19 nt, Artificial Sequence
  Description of Artificial Sequence: Synthetic oligonucleotide
ggaagucucugcucucgac

SEQ ID NO: 2821133 - RNA, 19 nt, Artificial Sequence
  Description of Artificial Sequence: Synthetic oligonucleotide
ucucugcgauucugcucag

SEQ ID NO: 2821134 - RNA, 19 nt, Artificial Sequence
  Description of Artificial Sequence: Synthetic oligonucleotide
agacgaugcacaggcaguu

SEQ ID NO: 2821135 - RNA, 19 nt, Artificial Sequence
  Description of Artificial Sequence: Synthetic oligonucleotide
ccuugaggaagaauccuga

SEQ ID NO: 2821136 - RNA, 19 nt, Artificial Sequence
  Description of Artificial Sequence: Synthetic oligonucleotide
guacccaggcagguggcug

SEQ ID NO: 2821137 - RNA, 19 nt, Artificial Sequence
  Description of Artificial Sequence: Synthetic oligonucleotide
cucuuagcugguucaggaa

SEQ ID NO: 2821138 - RNA, 19 nt, Artificial Sequence
  Description of Artificial Sequence: Synthetic oligonucleotide
gcaucugagguugaaucuc

SEQ ID NO: 2821139 - RNA, 19 nt, Artificial Sequence
  Description of Artificial Sequence: Synthetic oligonucleotide
cugguucaggaagucucug

SEQ ID NO: 2821140 - RNA, 19 nt, Artificial Sequence
  Description of Artificial Sequence: Synthetic oligonucleotide
gagacgaugcacaggcagu

SEQ ID NO: 2821141 - RNA, 19 nt, Artificial Sequence
  Description of Artificial Sequence: Synthetic oligonucleotide
ccugcgauuucgguaacug

SEQ ID NO: 2821142 - RNA, 19 nt, Artificial Sequence
  Description of Artificial Sequence: Synthetic oligonucleotide
agcuggagcccugcgauuu

SEQ ID NO: 2821143 - RNA, 19 nt, Artificial Sequence
  Description of Artificial Sequence: Synthetic oligonucleotide
ccaccagcaucugagguug

SEQ ID NO: 2821144 - RNA, 19 nt, Artificial Sequence
  Description of Artificial Sequence: Synthetic oligonucleotide
gccaaaggcuggcugggac

SEQ ID NO: 2821145 - RNA, 19 nt, Artificial Sequence
  Description of Artificial Sequence: Synthetic oligonucleotide
ggucucugcgauucugcuc

SEQ ID NO: 2821146 - RNA, 19 nt, Artificial Sequence
  Description of Artificial Sequence: Synthetic oligonucleotide
caucuaugucuugggccac

SEQ ID NO: 2821147 - RNA, 19 nt, Artificial Sequence
  Description of Artificial Sequence: Synthetic oligonucleotide
ggcuagcuccaccagcauc

SEQ ID NO: 2821148 - RNA, 19 nt, Artificial Sequence
  Description of Artificial Sequence: Synthetic oligonucleotide
gcugagcuggagcccugcg

SEQ ID NO: 2821149 - RNA, 19 nt, Artificial Sequence
  Description of Artificial Sequence: Synthetic oligonucleotide
ggcaaguuacucaggaagu

SEQ ID NO: 2821150 - RNA, 19 nt, Artificial Sequence
  Description of Artificial Sequence: Synthetic oligonucleotide
ggggcuagcuccaccagca

SEQ ID NO: 2821151 - RNA, 19 nt, Artificial Sequence
  Description of Artificial Sequence: Synthetic oligonucleotide
aggaaguagggaggggcua

SEQ ID NO: 2821152 - RNA, 19 nt, Artificial Sequence
  Description of Artificial Sequence: Synthetic oligonucleotide
gcacaggcaguugucuuug

SEQ ID NO: 2821153 - RNA, 19 nt, Artificial Sequence
  Description of Artificial Sequence: Synthetic oligonucleotide
uggcugagcuggagcccug

SEQ ID NO: 2821154 - RNA, 19 nt, Artificial Sequence
  Description of Artificial Sequence: Synthetic oligonucleotide
ggcaguugucuuuggauau

SEQ ID NO: 2821155 - RNA, 19 nt, Artificial Sequence
  Description of Artificial Sequence: Synthetic oligonucleotide
gugguacaguacccaggca

SEQ ID NO: 2821156 - RNA, 19 nt, Artificial Sequence
  Description of Artificial Sequence: Synthetic oligonucleotide
caggaaguagggaggggcu

SEQ ID NO: 2821157 - RNA, 19 nt, Artificial Sequence
  Description of Artificial Sequence: Synthetic oligonucleotide
cuagcuccaccagcaucug

SEQ ID NO: 2821158 - RNA, 19 nt, Artificial Sequence
  Description of Artificial Sequence: Synthetic oligonucleotide
gcaugaagacagcugggcu

SEQ ID NO: 2821159 - RNA, 19 nt, Artificial Sequence
  Description of Artificial Sequence: Synthetic oligonucleotide
gauucugcucagagccaaa

SEQ ID NO: 2821160 - RNA, 19 nt, Artificial Sequence
  Description of Artificial Sequence: Synthetic oligonucleotide
uccugacaacagugcuuuc

SEQ ID NO: 2821161 - RNA, 19 nt, Artificial Sequence
  Description of Artificial Sequence: Synthetic oligonucleotide
cgauuucgguaacugcagc

SEQ ID NO: 2821162 - RNA, 19 nt, Artificial Sequence
  Description of Artificial Sequence: Synthetic oligonucleotide
accagcaucugagguugaa

SEQ ID NO: 2821163 - RNA, 19 nt, Artificial Sequence
  Description of Artificial Sequence: Synthetic oligonucleotide
uggcugggacaggggaagc

SEQ ID NO: 2821164 - RNA, 19 nt, Artificial Sequence
  Description of Artificial Sequence: Synthetic oligonucleotide
agggaggggcuagcuccac

SEQ ID NO: 2821165 - RNA, 19 nt, Artificial Sequence
  Description of Artificial Sequence: Synthetic oligonucleotide
gaagacagcugggcuacau

SEQ ID NO: 2821166 - RNA, 19 nt, Artificial Sequence
  Description of Artificial Sequence: Synthetic oligonucleotide
gguggcugagcuggagccc

SEQ ID NO: 2821167 - RNA, 19 nt, Artificial Sequence
  Description of Artificial Sequence: Synthetic oligonucleotide
cuccaccagcaucugaggu

SEQ ID NO: 2821168 - RNA, 19 nt, Artificial Sequence
  Description of Artificial Sequence: Synthetic oligonucleotide
gcaaguuacucaggaagua

SEQ ID NO: 2821169 - RNA, 19 nt, Artificial Sequence
  Description of Artificial Sequence: Synthetic oligonucleotide
gcugguccuucucuuagcu

SEQ ID NO: 2821170 - RNA, 19 nt, Artificial Sequence
  Description of Artificial Sequence: Synthetic oligonucleotide
cagagacgaugcacaggca

SEQ ID NO: 2821171 - RNA, 19 nt, Artificial Sequence
  Description of Artificial Sequence: Synthetic oligonucleotide
cagcugggcuacaugcuua

SEQ ID NO: 2821172 - RNA, 19 nt, Artificial Sequence
  Description of Artificial Sequence: Synthetic oligonucleotide
gggaggggcuagcuccacc

SEQ ID NO: 2821173 - RNA, 19 nt, Artificial Sequence
  Description of Artificial Sequence: Synthetic oligonucleotide
cagugccaucuaugucuug

SEQ ID NO: 2821174 - RNA, 19 nt, Artificial Sequence
  Description of Artificial Sequence: Synthetic oligonucleotide
ggggcaaguuacucaggaa

SEQ ID NO: 2821175 - RNA, 19 nt, Artificial Sequence
  Description of Artificial Sequence: Synthetic oligonucleotide
gagugagaagcagguaauu

SEQ ID NO: 2821176 - RNA, 19 nt, Artificial Sequence
  Description of Artificial Sequence: Synthetic oligonucleotide
guacaguacccaggcaggu

SEQ ID NO: 2821177 - RNA, 19 nt, Artificial Sequence
  Description of Artificial Sequence: Synthetic oligonucleotide
agccaaaggcuggcuggga

SEQ ID NO: 2821178 - RNA, 19 nt, Artificial Sequence
  Description of Artificial Sequence: Synthetic oligonucleotide
caccuugaggaagaauccu

SEQ ID NO: 2821179 - RNA, 19 nt, Artificial Sequence
  Description of Artificial Sequence: Synthetic oligonucleotide
gggcuacaugcuuaugagu

SEQ ID NO: 2821180 - RNA, 19 nt, Artificial Sequence
  Description of Artificial Sequence: Synthetic oligonucleotide
cgguaacugcagcaugaag

SEQ ID NO: 2821181 - RNA, 19 nt, Artificial Sequence
  Description of Artificial Sequence: Synthetic oligonucleotide
cgaugcacaggcaguuguc

SEQ ID NO: 2821182 - RNA, 19 nt, Artificial Sequence
  Description of Artificial Sequence: Synthetic oligonucleotide
ccugacaacagugcuuucu

SEQ ID NO: 2821183 - RNA, 19 nt, Artificial Sequence
  Description of Artificial Sequence: Synthetic oligonucleotide
cugcagcaugaagacagcu

SEQ ID NO: 2821184 - RNA, 19 nt, Artificial Sequence
  Description of Artificial Sequence: Synthetic oligonucleotide
guugaaucucagagacgau

SEQ ID NO: 2821185 - RNA, 19 nt, Artificial Sequence
  Description of Artificial Sequence: Synthetic oligonucleotide
ggagcccugcgauuucggu

SEQ ID NO: 2821186 - RNA, 19 nt, Artificial Sequence
  Description of Artificial Sequence: Synthetic oligonucleotide
gcuggagcccugcgauuuc

SEQ ID NO: 2821187 - RNA, 19 nt, Artificial Sequence
  Description of Artificial Sequence: Synthetic oligonucleotide
cucugcgauucugcucaga

SEQ ID NO: 2821188 - RNA, 19 nt, Artificial Sequence
  Description of Artificial Sequence: Synthetic oligonucleotide
gcuggcugggacaggggaa

SEQ ID NO: 2821189 - RNA, 19 nt, Artificial Sequence
  Description of Artificial Sequence: Synthetic oligonucleotide
gcgauucugcucagagcca

SEQ ID NO: 2821190 - RNA, 19 nt, Artificial Sequence
  Description of Artificial Sequence: Synthetic oligonucleotide
gcugggcuacaugcuuaug

SEQ ID NO: 2821191 - RNA, 19 nt, Artificial Sequence
  Description of Artificial Sequence: Synthetic oligonucleotide
caccagcaucugagguuga

SEQ ID NO: 2821192 - RNA, 19 nt, Artificial Sequence
  Description of Artificial Sequence: Synthetic oligonucleotide
gagcuggagcccugcgauu

SEQ ID NO: 2821193 - RNA, 19 nt, Artificial Sequence
  Description of Artificial Sequence: Synthetic oligonucleotide
cgauucugcucagagccaa

SEQ ID NO: 2821194 - RNA, 19 nt, Artificial Sequence
  Description of Artificial Sequence: Synthetic oligonucleotide
gguccuucucuuagcuggu

SEQ ID NO: 2821195 - RNA, 19 nt, Artificial Sequence
  Description of Artificial Sequence: Synthetic oligonucleotide
cuaugucuugggccaccuu

SEQ ID NO: 2821196 - RNA, 19 nt, Artificial Sequence
  Description of Artificial Sequence: Synthetic oligonucleotide
gcccugcgauuucgguaac

SEQ ID NO: 2821197 - RNA, 19 nt, Artificial Sequence
  Description of Artificial Sequence: Synthetic oligonucleotide
ccagugccaucuaugucuu

SEQ ID NO: 2821198 - RNA, 19 nt, Artificial Sequence
  Description of Artificial Sequence: Synthetic oligonucleotide
ccagcaucugagguugaau

SEQ ID NO: 2821199 - RNA, 19 nt, Artificial Sequence
  Description of Artificial Sequence: Synthetic oligonucleotide
ggccaccuugaggaagaau

SEQ ID NO: 2821200 - RNA, 19 nt, Artificial Sequence
  Description of Artificial Sequence: Synthetic oligonucleotide
gggccaccuugaggaagaa

SEQ ID NO: 2821201 - RNA, 19 nt, Artificial Sequence
  Description of Artificial Sequence: Synthetic oligonucleotide
cccugcgauuucgguaacu

SEQ ID NO: 2821202 - RNA, 19 nt, Artificial Sequence
  Description of Artificial Sequence: Synthetic oligonucleotide
aaaguaaagacacugauuc

SEQ ID NO: 2821203 - RNA, 19 nt, Artificial Sequence
  Description of Artificial Sequence: Synthetic oligonucleotide
aaauuucaaaaguaaagac

SEQ ID NO: 2821204 - RNA, 19 nt, Artificial Sequence
  Description of Artificial Sequence: Synthetic oligonucleotide
aacuaaauaaauuuggaca

SEQ ID NO: 2821205 - RNA, 19 nt, Artificial Sequence
  Description of Artificial Sequence: Synthetic oligonucleotide
ucuuacaacaaacugagag

SEQ ID NO: 2821206 - RNA, 19 nt, Artificial Sequence
  Description of Artificial Sequence: Synthetic oligonucleotide
auucuuuucucuuuuaugc

SEQ ID NO: 2821207 - RNA, 19 nt, Artificial Sequence
  Description of Artificial Sequence: Synthetic oligonucleotide
caagauaugaaccaaauag

SEQ ID NO: 2821208 - RNA, 19 nt, Artificial Sequence
  Description of Artificial Sequence: Synthetic oligonucleotide
aauagaacaguucucuggg

SEQ ID NO: 2821209 - RNA, 19 nt, Artificial Sequence
  Description of Artificial Sequence: Synthetic oligonucleotide
ugcacuaaaacaaagacaa

SEQ ID NO: 2821210 - RNA, 19 nt, Artificial Sequence
  Description of Artificial Sequence: Synthetic oligonucleotide
acaaagacaagauaugaac

SEQ ID NO: 2821211 - RNA, 19 nt, Artificial Sequence
  Description of Artificial Sequence: Synthetic oligonucleotide
uuagcuugcauucugaaug

SEQ ID NO: 2821212 - RNA, 19 nt, Artificial Sequence
  Description of Artificial Sequence: Synthetic oligonucleotide
acuaaauaaauuuggacag

SEQ ID NO: 2821213 - RNA, 19 nt, Artificial Sequence
  Description of Artificial Sequence: Synthetic oligonucleotide
gagagugaaagauaaaggg

SEQ ID NO: 2821214 - RNA, 19 nt, Artificial Sequence
  Description of Artificial Sequence: Synthetic oligonucleotide
uuuucuauuauucaaaauu

SEQ ID NO: 2821215 - RNA, 19 nt, Artificial Sequence
  Description of Artificial Sequence: Synthetic oligonucleotide
aaagauaaagggcucccgc

SEQ ID NO: 2821216 - RNA, 19 nt, Artificial Sequence
  Description of Artificial Sequence: Synthetic oligonucleotide
auuucaaaaguaaagacac

SEQ ID NO: 2821217 - RNA, 19 nt, Artificial Sequence
  Description of Artificial Sequence: Synthetic oligonucleotide
ucuuuuaugcacuaaaaca

SEQ ID NO: 2821218 - RNA, 19 nt, Artificial Sequence
  Description of Artificial Sequence: Synthetic oligonucleotide
cauggaaacauauauacag

SEQ ID NO: 2821219 - RNA, 19 nt, Artificial Sequence
  Description of Artificial Sequence: Synthetic oligonucleotide
aagauaugaaccaaauagc

SEQ ID NO: 2821220 - RNA, 19 nt, Artificial Sequence
  Description of Artificial Sequence: Synthetic oligonucleotide
uaauaauagguguauuugg

SEQ ID NO: 2821221 - RNA, 19 nt, Artificial Sequence
  Description of Artificial Sequence: Synthetic oligonucleotide
auuauguuagcuugcauuc

SEQ ID NO: 2821222 - RNA, 19 nt, Artificial Sequence
  Description of Artificial Sequence: Synthetic oligonucleotide
uuagugacugcuuacacag

SEQ ID NO: 2821223 - RNA, 19 nt, Artificial Sequence
  Description of Artificial Sequence: Synthetic oligonucleotide
aacuuuucaaaguggagag

SEQ ID NO: 2821224 - RNA, 19 nt, Artificial Sequence
  Description of Artificial Sequence: Synthetic oligonucleotide
aaagacaagauaugaacca

SEQ ID NO: 2821225 - RNA, 19 nt, Artificial Sequence
  Description of Artificial Sequence: Synthetic oligonucleotide
uauauuucauuuauguaca

SEQ ID NO: 2821226 - RNA, 19 nt, Artificial Sequence
  Description of Artificial Sequence: Synthetic oligonucleotide
aagauaaagggcucccgcc

SEQ ID NO: 2821227 - RNA, 19 nt, Artificial Sequence
  Description of Artificial Sequence: Synthetic oligonucleotide
uuuggugugaauagaacag

SEQ ID NO: 2821228 - RNA, 19 nt, Artificial Sequence
  Description of Artificial Sequence: Synthetic oligonucleotide
uguacauggaaacauauau

SEQ ID NO: 2821229 - RNA, 19 nt, Artificial Sequence
  Description of Artificial Sequence: Synthetic oligonucleotide
aaacauauauacagaauac

SEQ ID NO: 2821230 - RNA, 19 nt, Artificial Sequence
  Description of Artificial Sequence: Synthetic oligonucleotide
uacauggaaacauauauac

SEQ ID NO: 2821231 - RNA, 19 nt, Artificial Sequence
  Description of Artificial Sequence: Synthetic oligonucleotide
aaucuuacaacaaacugag

SEQ ID NO: 2821232 - RNA, 19 nt, Artificial Sequence
  Description of Artificial Sequence: Synthetic oligonucleotide
accaaauagcaauacaaac

SEQ ID NO: 2821233 - RNA, 19 nt, Artificial Sequence
  Description of Artificial Sequence: Synthetic oligonucleotide
gaauagaacaguucucugg

SEQ ID NO: 2821234 - RNA, 19 nt, Artificial Sequence
  Description of Artificial Sequence: Synthetic oligonucleotide
aauacaaucuuacaacaaa

SEQ ID NO: 2821235 - RNA, 19 nt, Artificial Sequence
  Description of Artificial Sequence: Synthetic oligonucleotide
aaacugagagagcaugccc

SEQ ID NO: 2821236 - RNA, 19 nt, Artificial Sequence
  Description of Artificial Sequence: Synthetic oligonucleotide
aauaaauuuggacagcauu

SEQ ID NO: 2821237 - RNA, 19 nt, Artificial Sequence
  Description of Artificial Sequence: Synthetic oligonucleotide
uguccuuuaaauuucaaaa

SEQ ID NO: 2821238 - RNA, 19 nt, Artificial Sequence
  Description of Artificial Sequence: Synthetic oligonucleotide
aauuucaaaaguaaagaca

SEQ ID NO: 2821239 - RNA, 19 nt, Artificial Sequence
  Description of Artificial Sequence: Synthetic oligonucleotide
uuuaccuuuucuauuauuc

SEQ ID NO: 2821240 - RNA, 19 nt, Artificial Sequence
  Description of Artificial Sequence: Synthetic oligonucleotide
gaaacauauauacagaaua

SEQ ID NO: 2821241 - RNA, 19 nt, Artificial Sequence
  Description of Artificial Sequence: Synthetic oligonucleotide
cuugcauucugaaugacag

SEQ ID NO: 2821242 - RNA, 19 nt, Artificial Sequence
  Description of Artificial Sequence: Synthetic oligonucleotide
uuuaugcacuaaaacaaag

SEQ ID NO: 2821243 - RNA, 19 nt, Artificial Sequence
  Description of Artificial Sequence: Synthetic oligonucleotide
cuaguuuucagaaaucaac

SEQ ID NO: 2821244 - RNA, 19 nt, Artificial Sequence
  Description of Artificial Sequence: Synthetic oligonucleotide
ucauuuauguacauggaaa

SEQ ID NO: 2821245 - RNA, 19 nt, Artificial Sequence
  Description of Artificial Sequence: Synthetic oligonucleotide
uuacaacaaacugagagag

SEQ ID NO: 2821246 - RNA, 19 nt, Artificial Sequence
  Description of Artificial Sequence: Synthetic oligonucleotide
cuuacacagauuauguuag

SEQ ID NO: 2821247 - RNA, 19 nt, Artificial Sequence
  Description of Artificial Sequence: Synthetic oligonucleotide
uucaaaaguaaagacacug

SEQ ID NO: 2821248 - RNA, 19 nt, Artificial Sequence
  Description of Artificial Sequence: Synthetic oligonucleotide
uuucuauuauucaaaauua

SEQ ID NO: 2821249 - RNA, 19 nt, Artificial Sequence
  Description of Artificial Sequence: Synthetic oligonucleotide
aauagguguauuugguuug

SEQ ID NO: 2821250 - RNA, 19 nt, Artificial Sequence
  Description of Artificial Sequence: Synthetic oligonucleotide
acaaagacagauuuccguc

SEQ ID NO: 2821251 - RNA, 19 nt, Artificial Sequence
  Description of Artificial Sequence: Synthetic oligonucleotide
caaagacaagauaugaacc

SEQ ID NO: 2821252 - RNA, 19 nt, Artificial Sequence
  Description of Artificial Sequence: Synthetic oligonucleotide
ucuauuauucaaaauuaaa

SEQ ID NO: 2821253 - RNA, 19 nt, Artificial Sequence
  Description of Artificial Sequence: Synthetic oligonucleotide
auaugaaccaaauagcaau

SEQ ID NO: 2821254 - RNA, 19 nt, Artificial Sequence
  Description of Artificial Sequence: Synthetic oligonucleotide
uacaaacuuuucaaagugg

SEQ ID NO: 2821255 - RNA, 19 nt, Artificial Sequence
  Description of Artificial Sequence: Synthetic oligonucleotide
aaacuuuucaaaguggaga

SEQ ID NO: 2821256 - RNA, 19 nt, Artificial Sequence
  Description of Artificial Sequence: Synthetic oligonucleotide
aguuuucagaaaucaacac

SEQ ID NO: 2821257 - RNA, 19 nt, Artificial Sequence
  Description of Artificial Sequence: Synthetic oligonucleotide
auaaauuuggacagcauuc

SEQ ID NO: 2821258 - RNA, 19 nt, Artificial Sequence
  Description of Artificial Sequence: Synthetic oligonucleotide
uaguuuucagaaaucaaca

SEQ ID NO: 2821259 - RNA, 19 nt, Artificial Sequence
  Description of Artificial Sequence: Synthetic oligonucleotide
uuugguuuggugugaauag

SEQ ID NO: 2821260 - RNA, 19 nt, Artificial Sequence
  Description of Artificial Sequence: Synthetic oligonucleotide
aaauccgucucuucugcac

SEQ ID NO: 2821261 - RNA, 19 nt, Artificial Sequence
  Description of Artificial Sequence: Synthetic oligonucleotide
gaacuaaauaaauuuggac

SEQ ID NO: 2821262 - RNA, 19 nt, Artificial Sequence
  Description of Artificial Sequence: Synthetic oligonucleotide
acaaucuuacaacaaacug

SEQ ID NO: 2821263 - RNA, 19 nt, Artificial Sequence
  Description of Artificial Sequence: Synthetic oligonucleotide
agagugaaagauaaagggc

SEQ ID NO: 2821264 - RNA, 19 nt, Artificial Sequence
  Description of Artificial Sequence: Synthetic oligonucleotide
uucagaaaucaacacagga

SEQ ID NO: 2821265 - RNA, 19 nt, Artificial Sequence
  Description of Artificial Sequence: Synthetic oligonucleotide
uuuccauaauaauaggugu

SEQ ID NO: 2821266 - RNA, 19 nt, Artificial Sequence
  Description of Artificial Sequence: Synthetic oligonucleotide
cagaauacaaucuuacaac

SEQ ID NO: 2821267 - RNA, 19 nt, Artificial Sequence
  Description of Artificial Sequence: Synthetic oligonucleotide
ucagaaaucaacacaggaa

SEQ ID NO: 2821268 - RNA, 19 nt, Artificial Sequence
  Description of Artificial Sequence: Synthetic oligonucleotide
acagaauacaaucuuacaa

SEQ ID NO: 2821269 - RNA, 19 nt, Artificial Sequence
  Description of Artificial Sequence: Synthetic oligonucleotide
cagaaaucaacacaggaac

SEQ ID NO: 2821270 - RNA, 19 nt, Artificial Sequence
  Description of Artificial Sequence: Synthetic oligonucleotide
uggagagugaaagauaaag

SEQ ID NO: 2821271 - RNA, 19 nt, Artificial Sequence
  Description of Artificial Sequence: Synthetic oligonucleotide
uuaugcacuaaaacaaaga

SEQ ID NO: 2821272 - RNA, 19 nt, Artificial Sequence
  Description of Artificial Sequence: Synthetic oligonucleotide
ugcacaaagacagauuucc

SEQ ID NO: 2821273 - RNA, 19 nt, Artificial Sequence
  Description of Artificial Sequence: Synthetic oligonucleotide
aagacacugauucuuuucu

SEQ ID NO: 2821274 - RNA, 19 nt, Artificial Sequence
  Description of Artificial Sequence: Synthetic oligonucleotide
cuauuauucaaaauuaaaa

SEQ ID NO: 2821275 - RNA, 19 nt, Artificial Sequence
  Description of Artificial Sequence: Synthetic oligonucleotide
acaggaacuaaauaaauuu

SEQ ID NO: 2821276 - RNA, 19 nt, Artificial Sequence
  Description of Artificial Sequence: Synthetic oligonucleotide
auaauaauagguguauuug

SEQ ID NO: 2821277 - RNA, 19 nt, Artificial Sequence
  Description of Artificial Sequence: Synthetic oligonucleotide
ucaaaaguaaagacacuga

SEQ ID NO: 2821278 - RNA, 19 nt, Artificial Sequence
  Description of Artificial Sequence: Synthetic oligonucleotide
aaaacaaagacaagauaug

SEQ ID NO: 2821279 - RNA, 19 nt, Artificial Sequence
  Description of Artificial Sequence: Synthetic oligonucleotide
agaauacaaucuuacaaca

SEQ ID NO: 2821280 - RNA, 19 nt, Artificial Sequence
  Description of Artificial Sequence: Synthetic oligonucleotide
uaaauaaauuuggacagca

SEQ ID NO: 2821281 - RNA, 19 nt, Artificial Sequence
  Description of Artificial Sequence: Synthetic oligonucleotide
aaacaaagacaagauauga

SEQ ID NO: 2821282 - RNA, 19 nt, Artificial Sequence
  Description of Artificial Sequence: Synthetic oligonucleotide
acaggcaugauguuuaccu

SEQ ID NO: 2821283 - RNA, 19 nt, Artificial Sequence
  Description of Artificial Sequence: Synthetic oligonucleotide
cuuuuaugcacuaaaacaa

SEQ ID NO: 2821284 - RNA, 19 nt, Artificial Sequence
  Description of Artificial Sequence: Synthetic oligonucleotide
cauuuauguacauggaaac

SEQ ID NO: 2821285 - RNA, 19 nt, Artificial Sequence
  Description of Artificial Sequence: Synthetic oligonucleotide
aauaauagguguauuuggu

SEQ ID NO: 2821286 - RNA, 19 nt, Artificial Sequence
  Description of Artificial Sequence: Synthetic oligonucleotide
ugcauucugaaugacaggc

SEQ ID NO: 2821287 - RNA, 19 nt, Artificial Sequence
  Description of Artificial Sequence: Synthetic oligonucleotide
acagauuuccgucguuucc

SEQ ID NO: 2821288 - RNA, 19 nt, Artificial Sequence
  Description of Artificial Sequence: Synthetic oligonucleotide
uacaaucuuacaacaaacu

SEQ ID NO: 2821289 - RNA, 19 nt, Artificial Sequence
  Description of Artificial Sequence: Synthetic oligonucleotide
agcaauacaaacuuuucaa

SEQ ID NO: 2821290 - RNA, 19 nt, Artificial Sequence
  Description of Artificial Sequence: Synthetic oligonucleotide
aggaacuaaauaaauuugg

SEQ ID NO: 2821291 - RNA, 19 nt, Artificial Sequence
  Description of Artificial Sequence: Synthetic oligonucleotide
uucauuuauguacauggaa

SEQ ID NO: 2821292 - RNA, 19 nt, Artificial Sequence
  Description of Artificial Sequence: Synthetic oligonucleotide
ucugcacaaagacagauuu

SEQ ID NO: 2821293 - RNA, 19 nt, Artificial Sequence
  Description of Artificial Sequence: Synthetic oligonucleotide
gagagcaugcccuuugucc

SEQ ID NO: 2821294 - RNA, 19 nt, Artificial Sequence
  Description of Artificial Sequence: Synthetic oligonucleotide
cacagauuauguuagcuug

SEQ ID NO: 2821295 - RNA, 19 nt, Artificial Sequence
  Description of Artificial Sequence: Synthetic oligonucleotide
uagcaauacaaacuuuuca

SEQ ID NO: 2821296 - RNA, 19 nt, Artificial Sequence
  Description of Artificial Sequence: Synthetic oligonucleotide
uauguuagcuugcauucug

SEQ ID NO: 2821297 - RNA, 19 nt, Artificial Sequence
  Description of Artificial Sequence: Synthetic oligonucleotide
aacaaacugagagagcaug

SEQ ID NO: 2821298 - RNA, 19 nt, Artificial Sequence
  Description of Artificial Sequence: Synthetic oligonucleotide
uuuauguacauggaaacau

SEQ ID NO: 2821299 - RNA, 19 nt, Artificial Sequence
  Description of Artificial Sequence: Synthetic oligonucleotide
acaacaaacugagagagca

SEQ ID NO: 2821300 - RNA, 19 nt, Artificial Sequence
  Description of Artificial Sequence: Synthetic oligonucleotide
caaucuuacaacaaacuga

SEQ ID NO: 2821301 - RNA, 19 nt, Artificial Sequence
  Description of Artificial Sequence: Synthetic oligonucleotide
auacagaauacaaucuuac

SEQ ID NO: 2821302 - RNA, 19 nt, Artificial Sequence
  Description of Artificial Sequence: Synthetic oligonucleotide
uuaaugaucuucuuucuuu

SEQ ID NO: 2821303 - RNA, 19 nt, Artificial Sequence
  Description of Artificial Sequence: Synthetic oligonucleotide
aauuuggacagcauuccag

SEQ ID NO: 2821304 - RNA, 19 nt, Artificial Sequence
  Description of Artificial Sequence: Synthetic oligonucleotide
auacaaucuuacaacaaac

SEQ ID NO: 2821305 - RNA, 19 nt, Artificial Sequence
  Description of Artificial Sequence: Synthetic oligonucleotide
aaaguggagagugaaagau

SEQ ID NO: 2821306 - RNA, 19 nt, Artificial Sequence
  Description of Artificial Sequence: Synthetic oligonucleotide
uuuuaugcacuaaaacaaa

SEQ ID NO: 2821307 - RNA, 19 nt, Artificial Sequence
  Description of Artificial Sequence: Synthetic oligonucleotide
agauaaagggcucccgccg

SEQ ID NO: 2821308 - RNA, 19 nt, Artificial Sequence
  Description of Artificial Sequence: Synthetic oligonucleotide
ugaaccaaauagcaauaca

SEQ ID NO: 2821309 - RNA, 19 nt, Artificial Sequence
  Description of Artificial Sequence: Synthetic oligonucleotide
uaaauuuggacagcauucc

SEQ ID NO: 2821310 - RNA, 19 nt, Artificial Sequence
  Description of Artificial Sequence: Synthetic oligonucleotide
aaugcugcuuuccccaaug

SEQ ID NO: 2821311 - RNA, 19 nt, Artificial Sequence
  Description of Artificial Sequence: Synthetic oligonucleotide
cuuuucaaaguggagagug

SEQ ID NO: 2821312 - RNA, 19 nt, Artificial Sequence
  Description of Artificial Sequence: Synthetic oligonucleotide
uucuauuauucaaaauuaa

SEQ ID NO: 2821313 - RNA, 19 nt, Artificial Sequence
  Description of Artificial Sequence: Synthetic oligonucleotide
gguuuaaugaucuucuuuc

SEQ ID NO: 2821314 - RNA, 19 nt, Artificial Sequence
  Description of Artificial Sequence: Synthetic oligonucleotide
uuaccuuuucuauuauuca

SEQ ID NO: 2821315 - RNA, 19 nt, Artificial Sequence
  Description of Artificial Sequence: Synthetic oligonucleotide
uucaaugcugcuuucccca

SEQ ID NO: 2821316 - RNA, 19 nt, Artificial Sequence
  Description of Artificial Sequence: Synthetic oligonucleotide
uauguacauggaaacauau

SEQ ID NO: 2821317 - RNA, 19 nt, Artificial Sequence
  Description of Artificial Sequence: Synthetic oligonucleotide
uucucuuuuaugcacuaaa

SEQ ID NO: 2821318 - RNA, 19 nt, Artificial Sequence
  Description of Artificial Sequence: Synthetic oligonucleotide
uaauagguguauuugguuu

SEQ ID NO: 2821319 - RNA, 19 nt, Artificial Sequence
  Description of Artificial Sequence: Synthetic oligonucleotide
uggacagcauuccagcuug

SEQ ID NO: 2821320 - RNA, 19 nt, Artificial Sequence
  Description of Artificial Sequence: Synthetic oligonucleotide
uuucauuuauguacaugga

SEQ ID NO: 2821321 - RNA, 19 nt, Artificial Sequence
  Description of Artificial Sequence: Synthetic oligonucleotide
uagaacaguucucugggcu

SEQ ID NO: 2821322 - RNA, 19 nt, Artificial Sequence
  Description of Artificial Sequence: Synthetic oligonucleotide
aaauuuggacagcauucca

SEQ ID NO: 2821323 - RNA, 19 nt, Artificial Sequence
  Description of Artificial Sequence: Synthetic oligonucleotide
aaagacagauuuccgucgu

SEQ ID NO: 2821324 - RNA, 19 nt, Artificial Sequence
  Description of Artificial Sequence: Synthetic oligonucleotide
cucuuuuaugcacuaaaac

SEQ ID NO: 2821325 - RNA, 19 nt, Artificial Sequence
  Description of Artificial Sequence: Synthetic oligonucleotide
ugggcuaguuuucagaaau

SEQ ID NO: 2821326 - RNA, 19 nt, Artificial Sequence
  Description of Artificial Sequence: Synthetic oligonucleotide
ugacugcuuacacagauua

SEQ ID NO: 2821327 - RNA, 19 nt, Artificial Sequence
  Description of Artificial Sequence: Synthetic oligonucleotide
caggaacuaaauaaauuug

SEQ ID NO: 2821328 - RNA, 19 nt, Artificial Sequence
  Description of Artificial Sequence: Synthetic oligonucleotide
auagaacaguucucugggc

SEQ ID NO: 2821329 - RNA, 19 nt, Artificial Sequence
  Description of Artificial Sequence: Synthetic oligonucleotide
guuuggugugaauagaaca

SEQ ID NO: 2821330 - RNA, 19 nt, Artificial Sequence
  Description of Artificial Sequence: Synthetic oligonucleotide
uucugaaugacaggcauga

SEQ ID NO: 2821331 - RNA, 19 nt, Artificial Sequence
  Description of Artificial Sequence: Synthetic oligonucleotide
guuuccuucuccuggcugg

SEQ ID NO: 2821332 - RNA, 19 nt, Artificial Sequence
  Description of Artificial Sequence: Synthetic oligonucleotide
cuuacaacaaacugagaga

SEQ ID NO: 2821333 - RNA, 19 nt, Artificial Sequence
  Description of Artificial Sequence: Synthetic oligonucleotide
auauacagaauacaaucuu

SEQ ID NO: 2821334 - RNA, 19 nt, Artificial Sequence
  Description of Artificial Sequence: Synthetic oligonucleotide
caacacaggaacuaaauaa

SEQ ID NO: 2821335 - RNA, 19 nt, Artificial Sequence
  Description of Artificial Sequence: Synthetic oligonucleotide
agauaugaaccaaauagca

SEQ ID NO: 2821336 - RNA, 19 nt, Artificial Sequence
  Description of Artificial Sequence: Synthetic oligonucleotide
auuccagcuuggcacaaac

SEQ ID NO: 2821337 - RNA, 19 nt, Artificial Sequence
  Description of Artificial Sequence: Synthetic oligonucleotide
gaaccaaauagcaauacaa

SEQ ID NO: 2821338 - RNA, 19 nt, Artificial Sequence
  Description of Artificial Sequence: Synthetic oligonucleotide
acugcuuacacagauuaug

SEQ ID NO: 2821339 - RNA, 19 nt, Artificial Sequence
  Description of Artificial Sequence: Synthetic oligonucleotide
ugugaauagaacaguucuc

SEQ ID NO: 2821340 - RNA, 19 nt, Artificial Sequence
  Description of Artificial Sequence: Synthetic oligonucleotide
uuucaaugcugcuuucccc

SEQ ID NO: 2821341 - RNA, 19 nt, Artificial Sequence
  Description of Artificial Sequence: Synthetic oligonucleotide
cugaaugacaggcaugaug

SEQ ID NO: 2821342 - RNA, 19 nt, Artificial Sequence
  Description of Artificial Sequence: Synthetic oligonucleotide
uacagaauacaaucuuaca

SEQ ID NO: 2821343 - RNA, 19 nt, Artificial Sequence
  Description of Artificial Sequence: Synthetic oligonucleotide
ucucuuuuaugcacuaaaa

SEQ ID NO: 2821344 - RNA, 19 nt, Artificial Sequence
  Description of Artificial Sequence: Synthetic oligonucleotide
aaguaaagacacugauucu

SEQ ID NO: 2821345 - RNA, 19 nt, Artificial Sequence
  Description of Artificial Sequence: Synthetic oligonucleotide
ugaauagaacaguucucug

SEQ ID NO: 2821346 - RNA, 19 nt, Artificial Sequence
  Description of Artificial Sequence: Synthetic oligonucleotide
uuuaaugaucuucuuucuu

SEQ ID NO: 2821347 - RNA, 19 nt, Artificial Sequence
  Description of Artificial Sequence: Synthetic oligonucleotide
aacacaggaacuaaauaaa

SEQ ID NO: 2821348 - RNA, 19 nt, Artificial Sequence
  Description of Artificial Sequence: Synthetic oligonucleotide
gucucuucugcacaaagac

SEQ ID NO: 2821349 - RNA, 19 nt, Artificial Sequence
  Description of Artificial Sequence: Synthetic oligonucleotide
ugcugcuuuccccaauggg

SEQ ID NO: 2821350 - RNA, 19 nt, Artificial Sequence
  Description of Artificial Sequence: Synthetic oligonucleotide
guuucaaugcugcuuuccc

SEQ ID NO: 2821351 - RNA, 19 nt, Artificial Sequence
  Description of Artificial Sequence: Synthetic oligonucleotide
uaugaaccaaauagcaaua

SEQ ID NO: 2821352 - RNA, 19 nt, Artificial Sequence
  Description of Artificial Sequence: Synthetic oligonucleotide
caaacuuuucaaaguggag

SEQ ID NO: 2821353 - RNA, 19 nt, Artificial Sequence
  Description of Artificial Sequence: Synthetic oligonucleotide
acauauauacagaauacaa

SEQ ID NO: 2821354 - RNA, 19 nt, Artificial Sequence
  Description of Artificial Sequence: Synthetic oligonucleotide
uuuucaaaguggagaguga

SEQ ID NO: 2821355 - RNA, 19 nt, Artificial Sequence
  Description of Artificial Sequence: Synthetic oligonucleotide
cagcauuccagcuuggcac

SEQ ID NO: 2821356 - RNA, 19 nt, Artificial Sequence
  Description of Artificial Sequence: Synthetic oligonucleotide
acagauuauguuagcuugc

SEQ ID NO: 2821357 - RNA, 19 nt, Artificial Sequence
  Description of Artificial Sequence: Synthetic oligonucleotide
cacuaaaacaaagacaaga

SEQ ID NO: 2821358 - RNA, 19 nt, Artificial Sequence
  Description of Artificial Sequence: Synthetic oligonucleotide
uuguccuuuaaauuucaaa

SEQ ID NO: 2821359 - RNA, 19 nt, Artificial Sequence
  Description of Artificial Sequence: Synthetic oligonucleotide
gaaagauaaagggcucccg

SEQ ID NO: 2821360 - RNA, 19 nt, Artificial Sequence
  Description of Artificial Sequence: Synthetic oligonucleotide
ugaaagauaaagggcuccc

SEQ ID NO: 2821361 - RNA, 19 nt, Artificial Sequence
  Description of Artificial Sequence: Synthetic oligonucleotide
acuaaaacaaagacaagau

SEQ ID NO: 2821362 - RNA, 19 nt, Artificial Sequence
  Description of Artificial Sequence: Synthetic oligonucleotide
uaccuuuucuauuauucaa

SEQ ID NO: 2821363 - RNA, 19 nt, Artificial Sequence
  Description of Artificial Sequence: Synthetic oligonucleotide
guguauuugguuuggugug

SEQ ID NO: 2821364 - RNA, 19 nt, Artificial Sequence
  Description of Artificial Sequence: Synthetic oligonucleotide
aaaaguaaagacacugauu

SEQ ID NO: 2821365 - RNA, 19 nt, Artificial Sequence
  Description of Artificial Sequence: Synthetic oligonucleotide
uuauguacauggaaacaua

SEQ ID NO: 2821366 - RNA, 19 nt, Artificial Sequence
  Description of Artificial Sequence: Synthetic oligonucleotide
aauccgucucuucugcaca

SEQ ID NO: 2821367 - RNA, 19 nt, Artificial Sequence
  Description of Artificial Sequence: Synthetic oligonucleotide
uuccauaauaauaggugua

SEQ ID NO: 2821368 - RNA, 19 nt, Artificial Sequence
  Description of Artificial Sequence: Synthetic oligonucleotide
ucucuucugcacaaagaca

SEQ ID NO: 2821369 - RNA, 19 nt, Artificial Sequence
  Description of Artificial Sequence: Synthetic oligonucleotide
auagcaauacaaacuuuuc

SEQ ID NO: 2821370 - RNA, 19 nt, Artificial Sequence
  Description of Artificial Sequence: Synthetic oligonucleotide
uuucaaaaguaaagacacu

SEQ ID NO: 2821371 - RNA, 19 nt, Artificial Sequence
  Description of Artificial Sequence: Synthetic oligonucleotide
ugagagagcaugcccuuug

SEQ ID NO: 2821372 - RNA, 19 nt, Artificial Sequence
  Description of Artificial Sequence: Synthetic oligonucleotide
cuaaauaaauuuggacagc

SEQ ID NO: 2821373 - RNA, 19 nt, Artificial Sequence
  Description of Artificial Sequence: Synthetic oligonucleotide
gauuauguuagcuugcauu

SEQ ID NO: 2821374 - RNA, 19 nt, Artificial Sequence
  Description of Artificial Sequence: Synthetic oligonucleotide
augaaccaaauagcaauac

SEQ ID NO: 2821375 - RNA, 19 nt, Artificial Sequence
  Description of Artificial Sequence: Synthetic oligonucleotide
agagcaugcccuuuguccu

SEQ ID NO: 2821376 - RNA, 19 nt, Artificial Sequence
  Description of Artificial Sequence: Synthetic oligonucleotide
auuuccgucguuuccuucu

SEQ ID NO: 2821377 - RNA, 19 nt, Artificial Sequence
  Description of Artificial Sequence: Synthetic oligonucleotide
augauguuuaccuuuucua

SEQ ID NO: 2821378 - RNA, 19 nt, Artificial Sequence
  Description of Artificial Sequence: Synthetic oligonucleotide
auguuuaccuuuucuauua

SEQ ID NO: 2821379 - RNA, 19 nt, Artificial Sequence
  Description of Artificial Sequence: Synthetic oligonucleotide
agugacugcuuacacagau

SEQ ID NO: 2821380 - RNA, 19 nt, Artificial Sequence
  Description of Artificial Sequence: Synthetic oligonucleotide
aacugagagagcaugcccu

SEQ ID NO: 2821381 - RNA, 19 nt, Artificial Sequence
  Description of Artificial Sequence: Synthetic oligonucleotide
acaaacuuuucaaagugga

SEQ ID NO: 2821382 - RNA, 19 nt, Artificial Sequence
  Description of Artificial Sequence: Synthetic oligonucleotide
ucugggcuaguuuucagaa

SEQ ID NO: 2821383 - RNA, 19 nt, Artificial Sequence
  Description of Artificial Sequence: Synthetic oligonucleotide
ggagagugaaagauaaagg

SEQ ID NO: 2821384 - RNA, 19 nt, Artificial Sequence
  Description of Artificial Sequence: Synthetic oligonucleotide
aguaaagacacugauucuu

SEQ ID NO: 2821385 - RNA, 19 nt, Artificial Sequence
  Description of Artificial Sequence: Synthetic oligonucleotide
ugcccuuuguccuuuaaau

SEQ ID NO: 2821386 - RNA, 19 nt, Artificial Sequence
  Description of Artificial Sequence: Synthetic oligonucleotide
aguucucugggcuaguuuu

SEQ ID NO: 2821387 - RNA, 19 nt, Artificial Sequence
  Description of Artificial Sequence: Synthetic oligonucleotide
aaaucaacacaggaacuaa

SEQ ID NO: 2821388 - RNA, 19 nt, Artificial Sequence
  Description of Artificial Sequence: Synthetic oligonucleotide
aaccaaauagcaauacaaa

SEQ ID NO: 2821389 - RNA, 19 nt, Artificial Sequence
  Description of Artificial Sequence: Synthetic oligonucleotide
aaugacaggcaugauguuu

SEQ ID NO: 2821390 - RNA, 19 nt, Artificial Sequence
  Description of Artificial Sequence: Synthetic oligonucleotide
auuuauguacauggaaaca

SEQ ID NO: 2821391 - RNA, 19 nt, Artificial Sequence
  Description of Artificial Sequence: Synthetic oligonucleotide
uacaacaaacugagagagc

SEQ ID NO: 2821392 - RNA, 19 nt, Artificial Sequence
  Description of Artificial Sequence: Synthetic oligonucleotide
uacacagauuauguuagcu

SEQ ID NO: 2821393 - RNA, 19 nt, Artificial Sequence
  Description of Artificial Sequence: Synthetic oligonucleotide
gagugaaagauaaagggcu

SEQ ID NO: 2821394 - RNA, 19 nt, Artificial Sequence
  Description of Artificial Sequence: Synthetic oligonucleotide
auaauagguguauuugguu

SEQ ID NO: 2821395 - RNA, 19 nt, Artificial Sequence
  Description of Artificial Sequence: Synthetic oligonucleotide
ugguuuggugugaauagaa

SEQ ID NO: 2821396 - RNA, 19 nt, Artificial Sequence
  Description of Artificial Sequence: Synthetic oligonucleotide
uugcauucugaaugacagg

SEQ ID NO: 2821397 - RNA, 19 nt, Artificial Sequence
  Description of Artificial Sequence: Synthetic oligonucleotide
uuucaaaguggagagugaa

SEQ ID NO: 2821398 - RNA, 19 nt, Artificial Sequence
  Description of Artificial Sequence: Synthetic oligonucleotide
aaaauccgucucuucugca

SEQ ID NO: 2821399 - RNA, 19 nt, Artificial Sequence
  Description of Artificial Sequence: Synthetic oligonucleotide
aagacaagauaugaaccaa

SEQ ID NO: 2821400 - RNA, 19 nt, Artificial Sequence
  Description of Artificial Sequence: Synthetic oligonucleotide
uaaugaucuucuuucuuuu

SEQ ID NO: 2821401 - RNA, 19 nt, Artificial Sequence
  Description of Artificial Sequence: Synthetic oligonucleotide
guuagugacugcuuacaca

SEQ ID NO: 2821402 - RNA, 19 nt, Artificial Sequence
  Description of Artificial Sequence: Synthetic oligonucleotide
agugaaagauaaagggcuc

SEQ ID NO: 2821403 - RNA, 19 nt, Artificial Sequence
  Description of Artificial Sequence: Synthetic oligonucleotide
agguguauuugguuuggug

SEQ ID NO: 2821404 - RNA, 19 nt, Artificial Sequence
  Description of Artificial Sequence: Synthetic oligonucleotide
ugcgggguuucaaugcugc

SEQ ID NO: 2821405 - RNA, 19 nt, Artificial Sequence
  Description of Artificial Sequence: Synthetic oligonucleotide
gauaugaaccaaauagcaa

SEQ ID NO: 2821406 - RNA, 19 nt, Artificial Sequence
  Description of Artificial Sequence: Synthetic oligonucleotide
gugugaauagaacaguucu

SEQ ID NO: 2821407 - RNA, 19 nt, Artificial Sequence
  Description of Artificial Sequence: Synthetic oligonucleotide
uucaaaguggagagugaaa

SEQ ID NO: 2821408 - RNA, 19 nt, Artificial Sequence
  Description of Artificial Sequence: Synthetic oligonucleotide
aguggagagugaaagauaa

SEQ ID NO: 2821409 - RNA, 19 nt, Artificial Sequence
  Description of Artificial Sequence: Synthetic oligonucleotide
gaaaucaacacaggaacua

SEQ ID NO: 2821410 - RNA, 19 nt, Artificial Sequence
  Description of Artificial Sequence: Synthetic oligonucleotide
acagcauuccagcuuggca

SEQ ID NO: 2821411 - RNA, 19 nt, Artificial Sequence
  Description of Artificial Sequence: Synthetic oligonucleotide
uuacacagauuauguuagc

SEQ ID NO: 2821412 - RNA, 19 nt, Artificial Sequence
  Description of Artificial Sequence: Synthetic oligonucleotide
acacagauuauguuagcuu

SEQ ID NO: 2821413 - RNA, 19 nt, Artificial Sequence
  Description of Artificial Sequence: Synthetic oligonucleotide
caaacugagagagcaugcc

SEQ ID NO: 2821414 - RNA, 19 nt, Artificial Sequence
  Description of Artificial Sequence: Synthetic oligonucleotide
auagguguauuugguuugg

SEQ ID NO: 2821415 - RNA, 19 nt, Artificial Sequence
  Description of Artificial Sequence: Synthetic oligonucleotide
gcugcuuuccccaaugggg

SEQ ID NO: 2821416 - RNA, 19 nt, Artificial Sequence
  Description of Artificial Sequence: Synthetic oligonucleotide
acaagauaugaaccaaaua

SEQ ID NO: 2821417 - RNA, 19 nt, Artificial Sequence
  Description of Artificial Sequence: Synthetic oligonucleotide
uccuggcugguuuuggaug

SEQ ID NO: 2821418 - RNA, 19 nt, Artificial Sequence
  Description of Artificial Sequence: Synthetic oligonucleotide
auuugguuuggugugaaua

SEQ ID NO: 2821419 - RNA, 19 nt, Artificial Sequence
  Description of Artificial Sequence: Synthetic oligonucleotide
uggaugcgggguuucaaug

SEQ ID NO: 2821420 - RNA, 19 nt, Artificial Sequence
  Description of Artificial Sequence: Synthetic oligonucleotide
uguauuugguuugguguga

SEQ ID NO: 2821421 - RNA, 19 nt, Artificial Sequence
  Description of Artificial Sequence: Synthetic oligonucleotide
uagcuugcauucugaauga

SEQ ID NO: 2821422 - RNA, 19 nt, Artificial Sequence
  Description of Artificial Sequence: Synthetic oligonucleotide
agagagcaugcccuuuguc

SEQ ID NO: 2821423 - RNA, 19 nt, Artificial Sequence
  Description of Artificial Sequence: Synthetic oligonucleotide
acugauucuuuucucuuuu

SEQ ID NO: 2821424 - RNA, 19 nt, Artificial Sequence
  Description of Artificial Sequence: Synthetic oligonucleotide
uguuagcuugcauucugaa

SEQ ID NO: 2821425 - RNA, 19 nt, Artificial Sequence
  Description of Artificial Sequence: Synthetic oligonucleotide
augcacuaaaacaaagaca

SEQ ID NO: 2821426 - RNA, 19 nt, Artificial Sequence
  Description of Artificial Sequence: Synthetic oligonucleotide
aaagggcucccgccguuag

SEQ ID NO: 2821427 - RNA, 19 nt, Artificial Sequence
  Description of Artificial Sequence: Synthetic oligonucleotide
uggugugaauagaacaguu

SEQ ID NO: 2821428 - RNA, 19 nt, Artificial Sequence
  Description of Artificial Sequence: Synthetic oligonucleotide
aaauaaauuuggacagcau

SEQ ID NO: 2821429 - RNA, 19 nt, Artificial Sequence
  Description of Artificial Sequence: Synthetic oligonucleotide
gaacaguucucugggcuag

SEQ ID NO: 2821430 - RNA, 19 nt, Artificial Sequence
  Description of Artificial Sequence: Synthetic oligonucleotide
ucuucugcacaaagacaga

SEQ ID NO: 2821431 - RNA, 19 nt, Artificial Sequence
  Description of Artificial Sequence: Synthetic oligonucleotide
gacagauuuccgucguuuc

SEQ ID NO: 2821432 - RNA, 19 nt, Artificial Sequence
  Description of Artificial Sequence: Synthetic oligonucleotide
gugaaagauaaagggcucc

SEQ ID NO: 2821433 - RNA, 19 nt, Artificial Sequence
  Description of Artificial Sequence: Synthetic oligonucleotide
uuuguccuuuaaauuucaa

SEQ ID NO: 2821434 - RNA, 19 nt, Artificial Sequence
  Description of Artificial Sequence: Synthetic oligonucleotide
uuuucucuuuuaugcacua

SEQ ID NO: 2821435 - RNA, 19 nt, Artificial Sequence
  Description of Artificial Sequence: Synthetic oligonucleotide
uuggugugaauagaacagu

SEQ ID NO: 2821436 - RNA, 19 nt, Artificial Sequence
  Description of Artificial Sequence: Synthetic oligonucleotide
uuauguuagcuugcauucu

SEQ ID NO: 2821437 - RNA, 19 nt, Artificial Sequence
  Description of Artificial Sequence: Synthetic oligonucleotide
gaauacaaucuuacaacaa

SEQ ID NO: 2821438 - RNA, 19 nt, Artificial Sequence
  Description of Artificial Sequence: Synthetic oligonucleotide
uuggacagcauuccagcuu

SEQ ID NO: 2821439 - RNA, 19 nt, Artificial Sequence
  Description of Artificial Sequence: Synthetic oligonucleotide
uguuuaccuuuucuauuau

SEQ ID NO: 2821440 - RNA, 19 nt, Artificial Sequence
  Description of Artificial Sequence: Synthetic oligonucleotide
aaucaacacaggaacuaaa

SEQ ID NO: 2821441 - RNA, 19 nt, Artificial Sequence
  Description of Artificial Sequence: Synthetic oligonucleotide
gguguauuugguuuggugu

SEQ ID NO: 2821442 - RNA, 19 nt, Artificial Sequence
  Description of Artificial Sequence: Synthetic oligonucleotide
uaaagacacugauucuuuu

SEQ ID NO: 2821443 - RNA, 19 nt, Artificial Sequence
  Description of Artificial Sequence: Synthetic oligonucleotide
gcuuacacagauuauguua

SEQ ID NO: 2821444 - RNA, 19 nt, Artificial Sequence
  Description of Artificial Sequence: Synthetic oligonucleotide
uugguuuggugugaauaga

SEQ ID NO: 2821445 - RNA, 19 nt, Artificial Sequence
  Description of Artificial Sequence: Synthetic oligonucleotide
auauuucauuuauguacau

SEQ ID NO: 2821446 - RNA, 19 nt, Artificial Sequence
  Description of Artificial Sequence: Synthetic oligonucleotide
ggaacuaaauaaauuugga

SEQ ID NO: 2821447 - RNA, 19 nt, Artificial Sequence
  Description of Artificial Sequence: Synthetic oligonucleotide
agcauuccagcuuggcaca

SEQ ID NO: 2821448 - RNA, 19 nt, Artificial Sequence
  Description of Artificial Sequence: Synthetic oligonucleotide
gauguuuaccuuuucuauu

SEQ ID NO: 2821449 - RNA, 19 nt, Artificial Sequence
  Description of Artificial Sequence: Synthetic oligonucleotide
gugaauagaacaguucucu

SEQ ID NO: 2821450 - RNA, 19 nt, Artificial Sequence
  Description of Artificial Sequence: Synthetic oligonucleotide
agaacaguucucugggcua

SEQ ID NO: 2821451 - RNA, 19 nt, Artificial Sequence
  Description of Artificial Sequence: Synthetic oligonucleotide
uucugcacaaagacagauu

SEQ ID NO: 2821452 - RNA, 19 nt, Artificial Sequence
  Description of Artificial Sequence: Synthetic oligonucleotide
aucaacacaggaacuaaau

SEQ ID NO: 2821453 - RNA, 19 nt, Artificial Sequence
  Description of Artificial Sequence: Synthetic oligonucleotide
gucguuuccuucuccuggc

SEQ ID NO: 2821454 - RNA, 19 nt, Artificial Sequence
  Description of Artificial Sequence: Synthetic oligonucleotide
caaaguggagagugaaaga

SEQ ID NO: 2821455 - RNA, 19 nt, Artificial Sequence
  Description of Artificial Sequence: Synthetic oligonucleotide
acauggaaacauauauaca

SEQ ID NO: 2821456 - RNA, 19 nt, Artificial Sequence
  Description of Artificial Sequence: Synthetic oligonucleotide
augcugcuuuccccaaugg

SEQ ID NO: 2821457 - RNA, 19 nt, Artificial Sequence
  Description of Artificial Sequence: Synthetic oligonucleotide
uccgucguuuccuucuccu

SEQ ID NO: 2821458 - RNA, 19 nt, Artificial Sequence
  Description of Artificial Sequence: Synthetic oligonucleotide
aggcaugauguuuaccuuu

SEQ ID NO: 2821459 - RNA, 19 nt, Artificial Sequence
  Description of Artificial Sequence: Synthetic oligonucleotide
cuuuguccuuuaaauuuca

SEQ ID NO: 2821460 - RNA, 19 nt, Artificial Sequence
  Description of Artificial Sequence: Synthetic oligonucleotide
uuggaugcgggguuucaau

SEQ ID NO: 2821461 - RNA, 19 nt, Artificial Sequence
  Description of Artificial Sequence: Synthetic oligonucleotide
ugcuuacacagauuauguu

SEQ ID NO: 2821462 - RNA, 19 nt, Artificial Sequence
  Description of Artificial Sequence: Synthetic oligonucleotide
caaaaguaaagacacugau

SEQ ID NO: 2821463 - RNA, 19 nt, Artificial Sequence
  Description of Artificial Sequence: Synthetic oligonucleotide
gcugguuuuggaugcgggg

SEQ ID NO: 2821464 - RNA, 19 nt, Artificial Sequence
  Description of Artificial Sequence: Synthetic oligonucleotide
guuuaaugaucuucuuucu

SEQ ID NO: 2821465 - RNA, 19 nt, Artificial Sequence
  Description of Artificial Sequence: Synthetic oligonucleotide
agauuauguuagcuugcau

SEQ ID NO: 2821466 - RNA, 19 nt, Artificial Sequence
  Description of Artificial Sequence: Synthetic oligonucleotide
ggaugcgggguuucaaugc

SEQ ID NO: 2821467 - RNA, 19 nt, Artificial Sequence
  Description of Artificial Sequence: Synthetic oligonucleotide
ccaaauagcaauacaaacu

SEQ ID NO: 2821468 - RNA, 19 nt, Artificial Sequence
  Description of Artificial Sequence: Synthetic oligonucleotide
accuuuucuauuauucaaa

SEQ ID NO: 2821469 - RNA, 19 nt, Artificial Sequence
  Description of Artificial Sequence: Synthetic oligonucleotide
uuccagcuuggcacaaacu

SEQ ID NO: 2821470 - RNA, 19 nt, Artificial Sequence
  Description of Artificial Sequence: Synthetic oligonucleotide
cacaaagacagauuuccgu

SEQ ID NO: 2821471 - RNA, 19 nt, Artificial Sequence
  Description of Artificial Sequence: Synthetic oligonucleotide
ugguuuuggaugcgggguu

SEQ ID NO: 2821472 - RNA, 19 nt, Artificial Sequence
  Description of Artificial Sequence: Synthetic oligonucleotide
uucucugggcuaguuuuca

SEQ ID NO: 2821473 - RNA, 19 nt, Artificial Sequence
  Description of Artificial Sequence: Synthetic oligonucleotide
auucugaaugacaggcaug

SEQ ID NO: 2821474 - RNA, 19 nt, Artificial Sequence
  Description of Artificial Sequence: Synthetic oligonucleotide
gcaauacaaacuuuucaaa

SEQ ID NO: 2821475 - RNA, 19 nt, Artificial Sequence
  Description of Artificial Sequence: Synthetic oligonucleotide
acacaggaacuaaauaaau

SEQ ID NO: 2821476 - RNA, 19 nt, Artificial Sequence
  Description of Artificial Sequence: Synthetic oligonucleotide
aaguggagagugaaagaua

SEQ ID NO: 2821477 - RNA, 19 nt, Artificial Sequence
  Description of Artificial Sequence: Synthetic oligonucleotide
ccuuuaaauuucaaaagua

SEQ ID NO: 2821478 - RNA, 19 nt, Artificial Sequence
  Description of Artificial Sequence: Synthetic oligonucleotide
augacaggcaugauguuua

SEQ ID NO: 2821479 - RNA, 19 nt, Artificial Sequence
  Description of Artificial Sequence: Synthetic oligonucleotide
uuuccgucguuuccuucuc

SEQ ID NO: 2821480 - RNA, 19 nt, Artificial Sequence
  Description of Artificial Sequence: Synthetic oligonucleotide
gacagcauuccagcuuggc

SEQ ID NO: 2821481 - RNA, 19 nt, Artificial Sequence
  Description of Artificial Sequence: Synthetic oligonucleotide
uccuucuccuggcugguuu

SEQ ID NO: 2821482 - RNA, 19 nt, Artificial Sequence
  Description of Artificial Sequence: Synthetic oligonucleotide
aagacagauuuccgucguu

SEQ ID NO: 2821483 - RNA, 19 nt, Artificial Sequence
  Description of Artificial Sequence: Synthetic oligonucleotide
uuuuggaugcgggguuuca

SEQ ID NO: 2821484 - RNA, 19 nt, Artificial Sequence
  Description of Artificial Sequence: Synthetic oligonucleotide
gauuuccgucguuuccuuc

SEQ ID NO: 2821485 - RNA, 19 nt, Artificial Sequence
  Description of Artificial Sequence: Synthetic oligonucleotide
agacaagauaugaaccaaa

SEQ ID NO: 2821486 - RNA, 19 nt, Artificial Sequence
  Description of Artificial Sequence: Synthetic oligonucleotide
ucaaugcugcuuuccccaa

SEQ ID NO: 2821487 - RNA, 19 nt, Artificial Sequence
  Description of Artificial Sequence: Synthetic oligonucleotide
uuccgucguuuccuucucc

SEQ ID NO: 2821488 - RNA, 19 nt, Artificial Sequence
  Description of Artificial Sequence: Synthetic oligonucleotide
uagugacugcuuacacaga

SEQ ID NO: 2821489 - RNA, 19 nt, Artificial Sequence
  Description of Artificial Sequence: Synthetic oligonucleotide
uauuugguuuggugugaau

SEQ ID NO: 2821490 - RNA, 19 nt, Artificial Sequence
  Description of Artificial Sequence: Synthetic oligonucleotide
gacaagauaugaaccaaau

SEQ ID NO: 2821491 - RNA, 19 nt, Artificial Sequence
  Description of Artificial Sequence: Synthetic oligonucleotide
uuuggaugcgggguuucaa

SEQ ID NO: 2821492 - RNA, 19 nt, Artificial Sequence
  Description of Artificial Sequence: Synthetic oligonucleotide
gguuucaaugcugcuuucc

SEQ ID NO: 2821493 - RNA, 19 nt, Artificial Sequence
  Description of Artificial Sequence: Synthetic oligonucleotide
acuuuucaaaguggagagu

SEQ ID NO: 2821494 - RNA, 19 nt, Artificial Sequence
  Description of Artificial Sequence: Synthetic oligonucleotide
ugacaggcaugauguuuac

SEQ ID NO: 2821495 - RNA, 19 nt, Artificial Sequence
  Description of Artificial Sequence: Synthetic oligonucleotide
guacauggaaacauauaua

SEQ ID NO: 2821496 - RNA, 19 nt, Artificial Sequence
  Description of Artificial Sequence: Synthetic oligonucleotide
ggcuaguuuucagaaauca

SEQ ID NO: 2821497 - RNA, 19 nt, Artificial Sequence
  Description of Artificial Sequence: Synthetic oligonucleotide
ccuggcugguuuuggaugc

SEQ ID NO: 2821498 - RNA, 19 nt, Artificial Sequence
  Description of Artificial Sequence: Synthetic oligonucleotide
uuucucuuuuaugcacuaa

SEQ ID NO: 2821499 - RNA, 19 nt, Artificial Sequence
  Description of Artificial Sequence: Synthetic oligonucleotide
augcccuuuguccuuuaaa

SEQ ID NO: 2821500 - RNA, 19 nt, Artificial Sequence
  Description of Artificial Sequence: Synthetic oligonucleotide
agcuugcauucugaaugac

SEQ ID NO: 2821501 - RNA, 19 nt, Artificial Sequence
  Description of Artificial Sequence: Synthetic oligonucleotide
gauaaagggcucccgccgu

SEQ ID NO: 2821502 - RNA, 19 nt, Artificial Sequence
  Description of Artificial Sequence: Synthetic oligonucleotide
gacaggcaugauguuuacc

SEQ ID NO: 2821503 - RNA, 19 nt, Artificial Sequence
  Description of Artificial Sequence: Synthetic oligonucleotide
uggcugguuuuggaugcgg

SEQ ID NO: 2821504 - RNA, 19 nt, Artificial Sequence
  Description of Artificial Sequence: Synthetic oligonucleotide
cugcuuacacagauuaugu

SEQ ID NO: 2821505 - RNA, 19 nt, Artificial Sequence
  Description of Artificial Sequence: Synthetic oligonucleotide
acugagagagcaugcccuu

SEQ ID NO: 2821506 - RNA, 19 nt, Artificial Sequence
  Description of Artificial Sequence: Synthetic oligonucleotide
cucugggcuaguuuucaga

SEQ ID NO: 2821507 - RNA, 19 nt, Artificial Sequence
  Description of Artificial Sequence: Synthetic oligonucleotide
gaugcgggguuucaaugcu

SEQ ID NO: 2821508 - RNA, 19 nt, Artificial Sequence
  Description of Artificial Sequence: Synthetic oligonucleotide
agacagauuuccgucguuu

SEQ ID NO: 2821509 - RNA, 19 nt, Artificial Sequence
  Description of Artificial Sequence: Synthetic oligonucleotide
ggugugaauagaacaguuc

SEQ ID NO: 2821510 - RNA, 19 nt, Artificial Sequence
  Description of Artificial Sequence: Synthetic oligonucleotide
agggcucccgccguuagug

SEQ ID NO: 2821511 - RNA, 19 nt, Artificial Sequence
  Description of Artificial Sequence: Synthetic oligonucleotide
cauucugaaugacaggcau

SEQ ID NO: 2821512 - RNA, 19 nt, Artificial Sequence
  Description of Artificial Sequence: Synthetic oligonucleotide
cuuuucuauuauucaaaau

SEQ ID NO: 2821513 - RNA, 19 nt, Artificial Sequence
  Description of Artificial Sequence: Synthetic oligonucleotide
cagauuauguuagcuugca

SEQ ID NO: 2821514 - RNA, 19 nt, Artificial Sequence
  Description of Artificial Sequence: Synthetic oligonucleotide
ucguuuccuucuccuggcu

SEQ ID NO: 2821515 - RNA, 19 nt, Artificial Sequence
  Description of Artificial Sequence: Synthetic oligonucleotide
guuagcuugcauucugaau

SEQ ID NO: 2821516 - RNA, 19 nt, Artificial Sequence
  Description of Artificial Sequence: Synthetic oligonucleotide
gguuuggugugaauagaac

SEQ ID NO: 2821517 - RNA, 19 nt, Artificial Sequence
  Description of Artificial Sequence: Synthetic oligonucleotide
auguuagcuugcauucuga

SEQ ID NO: 2821518 - RNA, 19 nt, Artificial Sequence
  Description of Artificial Sequence: Synthetic oligonucleotide
aagggcucccgccguuagu

SEQ ID NO: 2821519 - RNA, 19 nt, Artificial Sequence
  Description of Artificial Sequence: Synthetic oligonucleotide
agauuuccgucguuuccuu

SEQ ID NO: 2821520 - RNA, 19 nt, Artificial Sequence
  Description of Artificial Sequence: Synthetic oligonucleotide
cgucguuuccuucuccugg

SEQ ID NO: 2821521 - RNA, 19 nt, Artificial Sequence
  Description of Artificial Sequence: Synthetic oligonucleotide
ccuuuucuauuauucaaaa

SEQ ID NO: 2821522 - RNA, 19 nt, Artificial Sequence
  Description of Artificial Sequence: Synthetic oligonucleotide
aacaguucucugggcuagu

SEQ ID NO: 2821523 - RNA, 19 nt, Artificial Sequence
  Description of Artificial Sequence: Synthetic oligonucleotide
auaaagggcucccgccguu

SEQ ID NO: 2821524 - RNA, 19 nt, Artificial Sequence
  Description of Artificial Sequence: Synthetic oligonucleotide
auccgucucuucugcacaa

SEQ ID NO: 2821525 - RNA, 19 nt, Artificial Sequence
  Description of Artificial Sequence: Synthetic oligonucleotide
uagguguauuugguuuggu

SEQ ID NO: 2821526 - RNA, 19 nt, Artificial Sequence
  Description of Artificial Sequence: Synthetic oligonucleotide
ucugaaugacaggcaugau

SEQ ID NO: 2821527 - RNA, 19 nt, Artificial Sequence
  Description of Artificial Sequence: Synthetic oligonucleotide
guuuaccuuuucuauuauu

SEQ ID NO: 2821528 - RNA, 19 nt, Artificial Sequence
  Description of Artificial Sequence: Synthetic oligonucleotide
gcuugcauucugaaugaca

SEQ ID NO: 2821529 - RNA, 19 nt, Artificial Sequence
  Description of Artificial Sequence: Synthetic oligonucleotide
guauuugguuuggugugaa

SEQ ID NO: 2821530 - RNA, 19 nt, Artificial Sequence
  Description of Artificial Sequence: Synthetic oligonucleotide
gccguuagugacugcuuac

SEQ ID NO: 2821531 - RNA, 19 nt, Artificial Sequence
  Description of Artificial Sequence: Synthetic oligonucleotide
guaaagacacugauucuuu

SEQ ID NO: 2821532 - RNA, 19 nt, Artificial Sequence
  Description of Artificial Sequence: Synthetic oligonucleotide
gcuaguuuucagaaaucaa

SEQ ID NO: 2821533 - RNA, 19 nt, Artificial Sequence
  Description of Artificial Sequence: Synthetic oligonucleotide
uaaagggcucccgccguua

SEQ ID NO: 2821534 - RNA, 19 nt, Artificial Sequence
  Description of Artificial Sequence: Synthetic oligonucleotide
gcacuaaaacaaagacaag

SEQ ID NO: 2821535 - RNA, 19 nt, Artificial Sequence
  Description of Artificial Sequence: Synthetic oligonucleotide
cuggcugguuuuggaugcg

SEQ ID NO: 2821536 - RNA, 19 nt, Artificial Sequence
  Description of Artificial Sequence: Synthetic oligonucleotide
cugauucuuuucucuuuua

SEQ ID NO: 2821537 - RNA, 19 nt, Artificial Sequence
  Description of Artificial Sequence: Synthetic oligonucleotide
gagagagcaugcccuuugu

SEQ ID NO: 2821538 - RNA, 19 nt, Artificial Sequence
  Description of Artificial Sequence: Synthetic oligonucleotide
guuuuggaugcgggguuuc

SEQ ID NO: 2821539 - RNA, 19 nt, Artificial Sequence
  Description of Artificial Sequence: Synthetic oligonucleotide
ggaaacauauauacagaau

SEQ ID NO: 2821540 - RNA, 19 nt, Artificial Sequence
  Description of Artificial Sequence: Synthetic oligonucleotide
cagauuuccgucguuuccu

SEQ ID NO: 2821541 - RNA, 19 nt, Artificial Sequence
  Description of Artificial Sequence: Synthetic oligonucleotide
cuucuccuggcugguuuug

SEQ ID NO: 2821542 - RNA, 19 nt, Artificial Sequence
  Description of Artificial Sequence: Synthetic oligonucleotide
aucuuacaacaaacugaga

SEQ ID NO: 2821543 - RNA, 19 nt, Artificial Sequence
  Description of Artificial Sequence: Synthetic oligonucleotide
cugguuuuggaugcggggu

SEQ ID NO: 2821544 - RNA, 19 nt, Artificial Sequence
  Description of Artificial Sequence: Synthetic oligonucleotide
cguuagugacugcuuacac

SEQ ID NO: 2821545 - RNA, 19 nt, Artificial Sequence
  Description of Artificial Sequence: Synthetic oligonucleotide
ggguuuaaugaucuucuuu

SEQ ID NO: 2821546 - RNA, 19 nt, Artificial Sequence
  Description of Artificial Sequence: Synthetic oligonucleotide
cugggcuaguuuucagaaa

SEQ ID NO: 2821547 - RNA, 19 nt, Artificial Sequence
  Description of Artificial Sequence: Synthetic oligonucleotide
cuucugcacaaagacagau

SEQ ID NO: 2821548 - RNA, 19 nt, Artificial Sequence
  Description of Artificial Sequence: Synthetic oligonucleotide
cucccgccguuagugacug

SEQ ID NO: 2821549 - RNA, 19 nt, Artificial Sequence
  Description of Artificial Sequence: Synthetic oligonucleotide
gggguuucaaugcugcuuu

SEQ ID NO: 2821550 - RNA, 19 nt, Artificial Sequence
  Description of Artificial Sequence: Synthetic oligonucleotide
augcgggguuucaaugcug

SEQ ID NO: 2821551 - RNA, 19 nt, Artificial Sequence
  Description of Artificial Sequence: Synthetic oligonucleotide
acaguucucugggcuaguu

SEQ ID NO: 2821552 - RNA, 19 nt, Artificial Sequence
  Description of Artificial Sequence: Synthetic oligonucleotide
gcauucugaaugacaggca

SEQ ID NO: 2821553 - RNA, 19 nt, Artificial Sequence
  Description of Artificial Sequence: Synthetic oligonucleotide
gaaugacaggcaugauguu

SEQ ID NO: 2821554 - RNA, 19 nt, Artificial Sequence
  Description of Artificial Sequence: Synthetic oligonucleotide
ggcucccgccguuagugac

SEQ ID NO: 2821555 - RNA, 19 nt, Artificial Sequence
  Description of Artificial Sequence: Synthetic oligonucleotide
cacugauucuuuucucuuu

SEQ ID NO: 2821556 - RNA, 19 nt, Artificial Sequence
  Description of Artificial Sequence: Synthetic oligonucleotide
gcaugauguuuaccuuuuc

SEQ ID NO: 2821557 - RNA, 19 nt, Artificial Sequence
  Description of Artificial Sequence: Synthetic oligonucleotide
caacaaacugagagagcau

SEQ ID NO: 2821558 - RNA, 19 nt, Artificial Sequence
  Description of Artificial Sequence: Synthetic oligonucleotide
guggagagugaaagauaaa

SEQ ID NO: 2821559 - RNA, 19 nt, Artificial Sequence
  Description of Artificial Sequence: Synthetic oligonucleotide
agcaugcccuuuguccuuu

SEQ ID NO: 2821560 - RNA, 19 nt, Artificial Sequence
  Description of Artificial Sequence: Synthetic oligonucleotide
caugcccuuuguccuuuaa

SEQ ID NO: 2821561 - RNA, 19 nt, Artificial Sequence
  Description of Artificial Sequence: Synthetic oligonucleotide
gacugcuuacacagauuau

SEQ ID NO: 2821562 - RNA, 19 nt, Artificial Sequence
  Description of Artificial Sequence: Synthetic oligonucleotide
gggcuaguuuucagaaauc

SEQ ID NO: 2821563 - RNA, 19 nt, Artificial Sequence
  Description of Artificial Sequence: Synthetic oligonucleotide
ggguuucaaugcugcuuuc

SEQ ID NO: 2821564 - RNA, 19 nt, Artificial Sequence
  Description of Artificial Sequence: Synthetic oligonucleotide
ccgucguuuccuucuccug

SEQ ID NO: 2821565 - RNA, 19 nt, Artificial Sequence
  Description of Artificial Sequence: Synthetic oligonucleotide
cgucucuucugcacaaaga

SEQ ID NO: 2821566 - RNA, 19 nt, Artificial Sequence
  Description of Artificial Sequence: Synthetic oligonucleotide
caggcaugauguuuaccuu

SEQ ID NO: 2821567 - RNA, 19 nt, Artificial Sequence
  Description of Artificial Sequence: Synthetic oligonucleotide
ccguuagugacugcuuaca

SEQ ID NO: 2821568 - RNA, 19 nt, Artificial Sequence
  Description of Artificial Sequence: Synthetic oligonucleotide
gagcaugcccuuuguccuu

SEQ ID NO: 2821569 - RNA, 19 nt, Artificial Sequence
  Description of Artificial Sequence: Synthetic oligonucleotide
cauuccagcuuggcacaaa

SEQ ID NO: 2821570 - RNA, 19 nt, Artificial Sequence
  Description of Artificial Sequence: Synthetic oligonucleotide
ggcaugauguuuaccuuuu

SEQ ID NO: 2821571 - RNA, 19 nt, Artificial Sequence
  Description of Artificial Sequence: Synthetic oligonucleotide
ucccgccguuagugacugc

SEQ ID NO: 2821572 - RNA, 19 nt, Artificial Sequence
  Description of Artificial Sequence: Synthetic oligonucleotide
gugacugcuuacacagauu

SEQ ID NO: 2821573 - RNA, 19 nt, Artificial Sequence
  Description of Artificial Sequence: Synthetic oligonucleotide
caaugcugcuuuccccaau

SEQ ID NO: 2821574 - RNA, 19 nt, Artificial Sequence
  Description of Artificial Sequence: Synthetic oligonucleotide
gggguuuaaugaucuucuu

SEQ ID NO: 2821575 - RNA, 19 nt, Artificial Sequence
  Description of Artificial Sequence: Synthetic oligonucleotide
gggcucccgccguuaguga

SEQ ID NO: 2821576 - RNA, 19 nt, Artificial Sequence
  Description of Artificial Sequence: Synthetic oligonucleotide
gguuuuggaugcgggguuu

SEQ ID NO: 2821577 - RNA, 19 nt, Artificial Sequence
  Description of Artificial Sequence: Synthetic oligonucleotide
cugagagagcaugcccuuu

SEQ ID NO: 2821578 - RNA, 19 nt, Artificial Sequence
  Description of Artificial Sequence: Synthetic oligonucleotide
cccgccguuagugacugcu

SEQ ID NO: 2821579 - RNA, 19 nt, Artificial Sequence
  Description of Artificial Sequence: Synthetic oligonucleotide
gcgggguuucaaugcugcu

SEQ ID NO: 2821580 - RNA, 19 nt, Artificial Sequence
  Description of Artificial Sequence: Synthetic oligonucleotide
cgccguuagugacugcuua

SEQ ID NO: 2821581 - RNA, 19 nt, Artificial Sequence
  Description of Artificial Sequence: Synthetic oligonucleotide
gcucccgccguuagugacu

SEQ ID NO: 2821582 - RNA, 19 nt, Artificial Sequence
  Description of Artificial Sequence: Synthetic oligonucleotide
ccuucuccuggcugguuuu

SEQ ID NO: 2821583 - RNA, 19 nt, Artificial Sequence
  Description of Artificial Sequence: Synthetic oligonucleotide
gcaugcccuuuguccuuua

SEQ ID NO: 2821584 - RNA, 19 nt, Artificial Sequence
  Description of Artificial Sequence: Synthetic oligonucleotide
cgggguuucaaugcugcuu

SEQ ID NO: 2821585 - RNA, 19 nt, Artificial Sequence
  Description of Artificial Sequence: Synthetic oligonucleotide
ccgccguuagugacugcuu

SEQ ID NO: 2821586 - RNA, 19 nt, Artificial Sequence
  Description of Artificial Sequence: Synthetic oligonucleotide
uuuuauuccacugauaggu

SEQ ID NO: 2821587 - RNA, 19 nt, Artificial Sequence
  Description of Artificial Sequence: Synthetic oligonucleotide
uguguagccaccauuacgc

SEQ ID NO: 2821588 - RNA, 19 nt, Artificial Sequence
  Description of Artificial Sequence: Synthetic oligonucleotide
aguagucccagucaugccg

SEQ ID NO: 2821589 - RNA, 19 nt, Artificial Sequence
  Description of Artificial Sequence: Synthetic oligonucleotide
uugcaagccaggaaguugg

SEQ ID NO: 2821590 - RNA, 19 nt, Artificial Sequence
  Description of Artificial Sequence: Synthetic oligonucleotide
aaguuggggaagcugucgc

SEQ ID NO: 2821591 - RNA, 19 nt, Artificial Sequence
  Description of Artificial Sequence: Synthetic oligonucleotide
aaacugggcaucugcaggg

SEQ ID NO: 2821592 - RNA, 19 nt, Artificial Sequence
  Description of Artificial Sequence: Synthetic oligonucleotide
gaaacugggcaucugcagg

SEQ ID NO: 2821593 - RNA, 19 nt, Artificial Sequence
  Description of Artificial Sequence: Synthetic oligonucleotide
uuguguagccaccauuacg

SEQ ID NO: 2821594 - RNA, 19 nt, Artificial Sequence
  Description of Artificial Sequence: Synthetic oligonucleotide
agccugaugagguaguggg

SEQ ID NO: 2821595 - RNA, 19 nt, Artificial Sequence
  Description of Artificial Sequence: Synthetic oligonucleotide
uuauuccacugauaggucc

SEQ ID NO: 2821596 - RNA, 19 nt, Artificial Sequence
  Description of Artificial Sequence: Synthetic oligonucleotide
uggugggugacccuagagg

SEQ ID NO: 2821597 - RNA, 19 nt, Artificial Sequence
  Description of Artificial Sequence: Synthetic oligonucleotide
augcuugcaagccaggaag

SEQ ID NO: 2821598 - RNA, 19 nt, Artificial Sequence
  Description of Artificial Sequence: Synthetic oligonucleotide
auucgcuucacguagucca

SEQ ID NO: 2821599 - RNA, 19 nt, Artificial Sequence
  Description of Artificial Sequence: Synthetic oligonucleotide
accauuacgcgcuccuugc

SEQ ID NO: 2821600 - RNA, 19 nt, Artificial Sequence
  Description of Artificial Sequence: Synthetic oligonucleotide
uucaaacuccuucauucgc

SEQ ID NO: 2821601 - RNA, 19 nt, Artificial Sequence
  Description of Artificial Sequence: Synthetic oligonucleotide
cuucacguaguccaugugc

SEQ ID NO: 2821602 - RNA, 19 nt, Artificial Sequence
  Description of Artificial Sequence: Synthetic oligonucleotide
uguuguguagccaccauua

SEQ ID NO: 2821603 - RNA, 19 nt, Artificial Sequence
  Description of Artificial Sequence: Synthetic oligonucleotide
cuucauucgcuucacguag

SEQ ID NO: 2821604 - RNA, 19 nt, Artificial Sequence
  Description of Artificial Sequence: Synthetic oligonucleotide
uucacguaguccaugugcu

SEQ ID NO: 2821605 - RNA, 19 nt, Artificial Sequence
  Description of Artificial Sequence: Synthetic oligonucleotide
uccacugauagguccacag

SEQ ID NO: 2821606 - RNA, 19 nt, Artificial Sequence
  Description of Artificial Sequence: Synthetic oligonucleotide
uauuccacugauaggucca

SEQ ID NO: 2821607 - RNA, 19 nt, Artificial Sequence
  Description of Artificial Sequence: Synthetic oligonucleotide
augugcucgcaguaguccc

SEQ ID NO: 2821608 - RNA, 19 nt, Artificial Sequence
  Description of Artificial Sequence: Synthetic oligonucleotide
cugauagguccacaggugg

SEQ ID NO: 2821609 - RNA, 19 nt, Artificial Sequence
  Description of Artificial Sequence: Synthetic oligonucleotide
ggugggugacccuagaggg

SEQ ID NO: 2821610 - RNA, 19 nt, Artificial Sequence
  Description of Artificial Sequence: Synthetic oligonucleotide
cucacucuccuuuuggcag

SEQ ID NO: 2821611 - RNA, 19 nt, Artificial Sequence
  Description of Artificial Sequence: Synthetic oligonucleotide
agagggccaccucagggcc

SEQ ID NO: 2821612 - RNA, 19 nt, Artificial Sequence
  Description of Artificial Sequence: Synthetic oligonucleotide
ucacguucaaacuccuuca

SEQ ID NO: 2821613 - RNA, 19 nt, Artificial Sequence
  Description of Artificial Sequence: Synthetic oligonucleotide
cugggcauuguucaucucc

SEQ ID NO: 2821614 - RNA, 19 nt, Artificial Sequence
  Description of Artificial Sequence: Synthetic oligonucleotide
uccgggaagccguaguccg

SEQ ID NO: 2821615 - RNA, 19 nt, Artificial Sequence
  Description of Artificial Sequence: Synthetic oligonucleotide
gaagcugucgcgcuugcac

SEQ ID NO: 2821616 - RNA, 19 nt, Artificial Sequence
  Description of Artificial Sequence: Synthetic oligonucleotide
uccuucauucgcuucacgu

SEQ ID NO: 2821617 - RNA, 19 nt, Artificial Sequence
  Description of Artificial Sequence: Synthetic oligonucleotide
ucuccuuuuggcagccggg

SEQ ID NO: 2821618 - RNA, 19 nt, Artificial Sequence
  Description of Artificial Sequence: Synthetic oligonucleotide
gaagccguaguccggcggg

SEQ ID NO: 2821619 - RNA, 19 nt, Artificial Sequence
  Description of Artificial Sequence: Synthetic oligonucleotide
cuagagggccaccucaggg

SEQ ID NO: 2821620 - RNA, 19 nt, Artificial Sequence
  Description of Artificial Sequence: Synthetic oligonucleotide
gcaguagucacguugcugc

SEQ ID NO: 2821621 - RNA, 19 nt, Artificial Sequence
  Description of Artificial Sequence: Synthetic oligonucleotide
uccguucacguucaaacuc

SEQ ID NO: 2821622 - RNA, 19 nt, Artificial Sequence
  Description of Artificial Sequence: Synthetic oligonucleotide
cacuugagcagccugauga

SEQ ID NO: 2821623 - RNA, 19 nt, Artificial Sequence
  Description of Artificial Sequence: Synthetic oligonucleotide
uguagccaccauuacgcgc

SEQ ID NO: 2821624 - RNA, 19 nt, Artificial Sequence
  Description of Artificial Sequence: Synthetic oligonucleotide
gaaguuggggaagcugucg

SEQ ID NO: 2821625 - RNA, 19 nt, Artificial Sequence
  Description of Artificial Sequence: Synthetic oligonucleotide
ucgcgcuugcacuugagca

SEQ ID NO: 2821626 - RNA, 19 nt, Artificial Sequence
  Description of Artificial Sequence: Synthetic oligonucleotide
ucaggcuccaccgaggcgu

SEQ ID NO: 2821627 - RNA, 19 nt, Artificial Sequence
  Description of Artificial Sequence: Synthetic oligonucleotide
uaguccggcgggaaacugg

SEQ ID NO: 2821628 - RNA, 19 nt, Artificial Sequence
  Description of Artificial Sequence: Synthetic oligonucleotide
uuguucaucuccuguugug

SEQ ID NO: 2821629 - RNA, 19 nt, Artificial Sequence
  Description of Artificial Sequence: Synthetic oligonucleotide
ucuucccuccguuucuucc

SEQ ID NO: 2821630 - RNA, 19 nt, Artificial Sequence
  Description of Artificial Sequence: Synthetic oligonucleotide
ugcagugucagcugggcau

SEQ ID NO: 2821631 - RNA, 19 nt, Artificial Sequence
  Description of Artificial Sequence: Synthetic oligonucleotide
acguaguccaugugcucgc

SEQ ID NO: 2821632 - RNA, 19 nt, Artificial Sequence
  Description of Artificial Sequence: Synthetic oligonucleotide
aguuggggaagcugucgcg

SEQ ID NO: 2821633 - RNA, 19 nt, Artificial Sequence
  Description of Artificial Sequence: Synthetic oligonucleotide
aauagcgccgggccaggug

SEQ ID NO: 2821634 - RNA, 19 nt, Artificial Sequence
  Description of Artificial Sequence: Synthetic oligonucleotide
cauuguucaucuccuguug

SEQ ID NO: 2821635 - RNA, 19 nt, Artificial Sequence
  Description of Artificial Sequence: Synthetic oligonucleotide
cacguaguccaugugcucg

SEQ ID NO: 2821636 - RNA, 19 nt, Artificial Sequence
  Description of Artificial Sequence: Synthetic oligonucleotide
caagccaggaaguugggga

SEQ ID NO: 2821637 - RNA, 19 nt, Artificial Sequence
  Description of Artificial Sequence: Synthetic oligonucleotide
acuugagcagccugaugag

SEQ ID NO: 2821638 - RNA, 19 nt, Artificial Sequence
  Description of Artificial Sequence: Synthetic oligonucleotide
uccggcgggaaacugggca

SEQ ID NO: 2821639 - RNA, 19 nt, Artificial Sequence
  Description of Artificial Sequence: Synthetic oligonucleotide
uguucaucuccuguugugu

SEQ ID NO: 2821640 - RNA, 19 nt, Artificial Sequence
  Description of Artificial Sequence: Synthetic oligonucleotide
aagcugucgcgcuugcacu

SEQ ID NO: 2821641 - RNA, 19 nt, Artificial Sequence
  Description of Artificial Sequence: Synthetic oligonucleotide
uugcacuugagcagccuga

SEQ ID NO: 2821642 - RNA, 19 nt, Artificial Sequence
  Description of Artificial Sequence: Synthetic oligonucleotide
uccaugugcucgcaguagu

SEQ ID NO: 2821643 - RNA, 19 nt, Artificial Sequence
  Description of Artificial Sequence: Synthetic oligonucleotide
agucaugccgcucaugcuu

SEQ ID NO: 2821644 - RNA, 19 nt, Artificial Sequence
  Description of Artificial Sequence: Synthetic oligonucleotide
uccucacucuccuuuuggc

SEQ ID NO: 2821645 - RNA, 19 nt, Artificial Sequence
  Description of Artificial Sequence: Synthetic oligonucleotide
auuacgcgcuccuugcgcu

SEQ ID NO: 2821646 - RNA, 19 nt, Artificial Sequence
  Description of Artificial Sequence: Synthetic oligonucleotide
cauuacgcgcuccuugcgc

SEQ ID NO: 2821647 - RNA, 19 nt, Artificial Sequence
  Description of Artificial Sequence: Synthetic oligonucleotide
ugggugacccuagagggcc

SEQ ID NO: 2821648 - RNA, 19 nt, Artificial Sequence
  Description of Artificial Sequence: Synthetic oligonucleotide
uccgccuucucuucccucc

SEQ ID NO: 2821649 - RNA, 19 nt, Artificial Sequence
  Description of Artificial Sequence: Synthetic oligonucleotide
gucagcugggcauuguuca

SEQ ID NO: 2821650 - RNA, 19 nt, Artificial Sequence
  Description of Artificial Sequence: Synthetic oligonucleotide
cucuccuuuuggcagccgg

SEQ ID NO: 2821651 - RNA, 19 nt, Artificial Sequence
  Description of Artificial Sequence: Synthetic oligonucleotide
uaguccaugugcucgcagu

SEQ ID NO: 2821652 - RNA, 19 nt, Artificial Sequence
  Description of Artificial Sequence: Synthetic oligonucleotide
ucaucuccuguuguguagc

SEQ ID NO: 2821653 - RNA, 19 nt, Artificial Sequence
  Description of Artificial Sequence: Synthetic oligonucleotide
ucuggagcagccuccguuc

SEQ ID NO: 2821654 - RNA, 19 nt, Artificial Sequence
  Description of Artificial Sequence: Synthetic oligonucleotide
ugucagcugggcauuguuc

SEQ ID NO: 2821655 - RNA, 19 nt, Artificial Sequence
  Description of Artificial Sequence: Synthetic oligonucleotide
cuugcacuugagcagccug

SEQ ID NO: 2821656 - RNA, 19 nt, Artificial Sequence
  Description of Artificial Sequence: Synthetic oligonucleotide
ucacucuccuuuuggcagc

SEQ ID NO: 2821657 - RNA, 19 nt, Artificial Sequence
  Description of Artificial Sequence: Synthetic oligonucleotide
cguucaaacuccuucauuc

SEQ ID NO: 2821658 - RNA, 19 nt, Artificial Sequence
  Description of Artificial Sequence: Synthetic oligonucleotide
caugugcucgcaguagucc

SEQ ID NO: 2821659 - RNA, 19 nt, Artificial Sequence
  Description of Artificial Sequence: Synthetic oligonucleotide
ugcuugcaagccaggaagu

SEQ ID NO: 2821660 - RNA, 19 nt, Artificial Sequence
  Description of Artificial Sequence: Synthetic oligonucleotide
ugugcucgcaguaguccca

SEQ ID NO: 2821661 - RNA, 19 nt, Artificial Sequence
  Description of Artificial Sequence: Synthetic oligonucleotide
uucauucgcuucacguagu

SEQ ID NO: 2821662 - RNA, 19 nt, Artificial Sequence
  Description of Artificial Sequence: Synthetic oligonucleotide
ggaaacugggcaucugcag

SEQ ID NO: 2821663 - RNA, 19 nt, Artificial Sequence
  Description of Artificial Sequence: Synthetic oligonucleotide
cuugagcagccugaugagg

SEQ ID NO: 2821664 - RNA, 19 nt, Artificial Sequence
  Description of Artificial Sequence: Synthetic oligonucleotide
ugcaagccaggaaguuggg

SEQ ID NO: 2821665 - RNA, 19 nt, Artificial Sequence
  Description of Artificial Sequence: Synthetic oligonucleotide
ugccgcucaugcuugcaag

SEQ ID NO: 2821666 - RNA, 19 nt, Artificial Sequence
  Description of Artificial Sequence: Synthetic oligonucleotide
cuccucacucuccuuuugg

SEQ ID NO: 2821667 - RNA, 19 nt, Artificial Sequence
  Description of Artificial Sequence: Synthetic oligonucleotide
uuccucuggagcagccucc

SEQ ID NO: 2821668 - RNA, 19 nt, Artificial Sequence
  Description of Artificial Sequence: Synthetic oligonucleotide
ccuccguucacguucaaac

SEQ ID NO: 2821669 - RNA, 19 nt, Artificial Sequence
  Description of Artificial Sequence: Synthetic oligonucleotide
acugauagguccacaggug

SEQ ID NO: 2821670 - RNA, 19 nt, Artificial Sequence
  Description of Artificial Sequence: Synthetic oligonucleotide
cugaugagguagugggcgc

SEQ ID NO: 2821671 - RNA, 19 nt, Artificial Sequence
  Description of Artificial Sequence: Synthetic oligonucleotide
cuucucuucccuccguuuc

SEQ ID NO: 2821672 - RNA, 19 nt, Artificial Sequence
  Description of Artificial Sequence: Synthetic oligonucleotide
agguagugggcgcaguagu

SEQ ID NO: 2821673 - RNA, 19 nt, Artificial Sequence
  Description of Artificial Sequence: Synthetic oligonucleotide
ucauucgcuucacguaguc

SEQ ID NO: 2821674 - RNA, 19 nt, Artificial Sequence
  Description of Artificial Sequence: Synthetic oligonucleotide
ucacguugcugcaguguca

SEQ ID NO: 2821675 - RNA, 19 nt, Artificial Sequence
  Description of Artificial Sequence: Synthetic oligonucleotide
aacugggcaucugcagggg

SEQ ID NO: 2821676 - RNA, 19 nt, Artificial Sequence
  Description of Artificial Sequence: Synthetic oligonucleotide
gucacguugcugcaguguc

SEQ ID NO: 2821677 - RNA, 19 nt, Artificial Sequence
  Description of Artificial Sequence: Synthetic oligonucleotide
ccagucaugccgcucaugc

SEQ ID NO: 2821678 - RNA, 19 nt, Artificial Sequence
  Description of Artificial Sequence: Synthetic oligonucleotide
guguagccaccauuacgcg

SEQ ID NO: 2821679 - RNA, 19 nt, Artificial Sequence
  Description of Artificial Sequence: Synthetic oligonucleotide
gagguagugggcgcaguag

SEQ ID NO: 2821680 - RNA, 19 nt, Artificial Sequence
  Description of Artificial Sequence: Synthetic oligonucleotide
ccugaugagguagugggcg

SEQ ID NO: 2821681 - RNA, 19 nt, Artificial Sequence
  Description of Artificial Sequence: Synthetic oligonucleotide
caccauuacgcgcuccuug

SEQ ID NO: 2821682 - RNA, 19 nt, Artificial Sequence
  Description of Artificial Sequence: Synthetic oligonucleotide
cauagcugcuccuccucac

SEQ ID NO: 2821683 - RNA, 19 nt, Artificial Sequence
  Description of Artificial Sequence: Synthetic oligonucleotide
auuccacugauagguccac

SEQ ID NO: 2821684 - RNA, 19 nt, Artificial Sequence
  Description of Artificial Sequence: Synthetic oligonucleotide
auagcugcuccuccucacu

SEQ ID NO: 2821685 - RNA, 19 nt, Artificial Sequence
  Description of Artificial Sequence: Synthetic oligonucleotide
guuguguagccaccauuac

SEQ ID NO: 2821686 - RNA, 19 nt, Artificial Sequence
  Description of Artificial Sequence: Synthetic oligonucleotide
aguagucacguugcugcag

SEQ ID NO: 2821687 - RNA, 19 nt, Artificial Sequence
  Description of Artificial Sequence: Synthetic oligonucleotide
ugagguagugggcgcagua

SEQ ID NO: 2821688 - RNA, 19 nt, Artificial Sequence
  Description of Artificial Sequence: Synthetic oligonucleotide
gcaguagucccagucaugc

SEQ ID NO: 2821689 - RNA, 19 nt, Artificial Sequence
  Description of Artificial Sequence: Synthetic oligonucleotide
cuuccucuggagcagccuc

SEQ ID NO: 2821690 - RNA, 19 nt, Artificial Sequence
  Description of Artificial Sequence: Synthetic oligonucleotide
gaugagguagugggcgcag

SEQ ID NO: 2821691 - RNA, 19 nt, Artificial Sequence
  Description of Artificial Sequence: Synthetic oligonucleotide
guuggggaagcugucgcgc

SEQ ID NO: 2821692 - RNA, 19 nt, Artificial Sequence
  Description of Artificial Sequence: Synthetic oligonucleotide
uagugggcgcaguagucac

SEQ ID NO: 2821693 - RNA, 19 nt, Artificial Sequence
  Description of Artificial Sequence: Synthetic oligonucleotide
cuccuuuuggcagccgggg

SEQ ID NO: 2821694 - RNA, 19 nt, Artificial Sequence
  Description of Artificial Sequence: Synthetic oligonucleotide
cucaugcuugcaagccagg

SEQ ID NO: 2821695 - RNA, 19 nt, Artificial Sequence
  Description of Artificial Sequence: Synthetic oligonucleotide
cacguugcugcagugucag

SEQ ID NO: 2821696 - RNA, 19 nt, Artificial Sequence
  Description of Artificial Sequence: Synthetic oligonucleotide
aguccggcgggaaacuggg

SEQ ID NO: 2821697 - RNA, 19 nt, Artificial Sequence
  Description of Artificial Sequence: Synthetic oligonucleotide
uugcgcuccgggaagccgu

SEQ ID NO: 2821698 - RNA, 19 nt, Artificial Sequence
  Description of Artificial Sequence: Synthetic oligonucleotide
gagcagccugaugagguag

SEQ ID NO: 2821699 - RNA, 19 nt, Artificial Sequence
  Description of Artificial Sequence: Synthetic oligonucleotide
uccuuuuggcagccggggu

SEQ ID NO: 2821700 - RNA, 19 nt, Artificial Sequence
  Description of Artificial Sequence: Synthetic oligonucleotide
ugaugagguagugggcgca

SEQ ID NO: 2821701 - RNA, 19 nt, Artificial Sequence
  Description of Artificial Sequence: Synthetic oligonucleotide
caucuccuguuguguagcc

SEQ ID NO: 2821702 - RNA, 19 nt, Artificial Sequence
  Description of Artificial Sequence: Synthetic oligonucleotide
guagucccagucaugccgc

SEQ ID NO: 2821703 - RNA, 19 nt, Artificial Sequence
  Description of Artificial Sequence: Synthetic oligonucleotide
cauucgcuucacguagucc

SEQ ID NO: 2821704 - RNA, 19 nt, Artificial Sequence
  Description of Artificial Sequence: Synthetic oligonucleotide
uccucuggagcagccuccg

SEQ ID NO: 2821705 - RNA, 19 nt, Artificial Sequence
  Description of Artificial Sequence: Synthetic oligonucleotide
ccguucacguucaaacucc

SEQ ID NO: 2821706 - RNA, 19 nt, Artificial Sequence
  Description of Artificial Sequence: Synthetic oligonucleotide
guggugggugacccuagag

SEQ ID NO: 2821707 - RNA, 19 nt, Artificial Sequence
  Description of Artificial Sequence: Synthetic oligonucleotide
uccuguuguguagccacca

SEQ ID NO: 2821708 - RNA, 19 nt, Artificial Sequence
  Description of Artificial Sequence: Synthetic oligonucleotide
uuggggaagcugucgcgcu

SEQ ID NO: 2821709 - RNA, 19 nt, Artificial Sequence
  Description of Artificial Sequence: Synthetic oligonucleotide
cacugauagguccacaggu

SEQ ID NO: 2821710 - RNA, 19 nt, Artificial Sequence
  Description of Artificial Sequence: Synthetic oligonucleotide
uucgcuucacguaguccau

SEQ ID NO: 2821711 - RNA, 19 nt, Artificial Sequence
  Description of Artificial Sequence: Synthetic oligonucleotide
aguccaugugcucgcagua

SEQ ID NO: 2821712 - RNA, 19 nt, Artificial Sequence
  Description of Artificial Sequence: Synthetic oligonucleotide
caguagucccagucaugcc

SEQ ID NO: 2821713 - RNA, 19 nt, Artificial Sequence
  Description of Artificial Sequence: Synthetic oligonucleotide
ugucgcgcuugcacuugag

SEQ ID NO: 2821714 - RNA, 19 nt, Artificial Sequence
  Description of Artificial Sequence: Synthetic oligonucleotide
cucgcaguagucccaguca

SEQ ID NO: 2821715 - RNA, 19 nt, Artificial Sequence
  Description of Artificial Sequence: Synthetic oligonucleotide
gucgcgcuugcacuugagc

SEQ ID NO: 2821716 - RNA, 19 nt, Artificial Sequence
  Description of Artificial Sequence: Synthetic oligonucleotide
cuccuguuguguagccacc

SEQ ID NO: 2821717 - RNA, 19 nt, Artificial Sequence
  Description of Artificial Sequence: Synthetic oligonucleotide
acguucaaacuccuucauu

SEQ ID NO: 2821718 - RNA, 19 nt, Artificial Sequence
  Description of Artificial Sequence: Synthetic oligonucleotide
uucucccuggccccgggau

SEQ ID NO: 2821719 - RNA, 19 nt, Artificial Sequence
  Description of Artificial Sequence: Synthetic oligonucleotide
ucacguaguccaugugcuc

SEQ ID NO: 2821720 - RNA, 19 nt, Artificial Sequence
  Description of Artificial Sequence: Synthetic oligonucleotide
guagccaccauuacgcgcu

SEQ ID NO: 2821721 - RNA, 19 nt, Artificial Sequence
  Description of Artificial Sequence: Synthetic oligonucleotide
gucccagucaugccgcuca

SEQ ID NO: 2821722 - RNA, 19 nt, Artificial Sequence
  Description of Artificial Sequence: Synthetic oligonucleotide
ugagcagccugaugaggua

SEQ ID NO: 2821723 - RNA, 19 nt, Artificial Sequence
  Description of Artificial Sequence: Synthetic oligonucleotide
uagucacguugcugcagug

SEQ ID NO: 2821724 - RNA, 19 nt, Artificial Sequence
  Description of Artificial Sequence: Synthetic oligonucleotide
auacccguuccgccuucuc

SEQ ID NO: 2821725 - RNA, 19 nt, Artificial Sequence
  Description of Artificial Sequence: Synthetic oligonucleotide
agccggggucaccucacuc

SEQ ID NO: 2821726 - RNA, 19 nt, Artificial Sequence
  Description of Artificial Sequence: Synthetic oligonucleotide
ucagcugggcauuguucau

SEQ ID NO: 2821727 - RNA, 19 nt, Artificial Sequence
  Description of Artificial Sequence: Synthetic oligonucleotide
ggaagccguaguccggcgg

SEQ ID NO: 2821728 - RNA, 19 nt, Artificial Sequence
  Description of Artificial Sequence: Synthetic oligonucleotide
cagccugaugagguagugg

SEQ ID NO: 2821729 - RNA, 19 nt, Artificial Sequence
  Description of Artificial Sequence: Synthetic oligonucleotide
caggaaguuggggaagcug

SEQ ID NO: 2821730 - RNA, 19 nt, Artificial Sequence
  Description of Artificial Sequence: Synthetic oligonucleotide
caugcuugcaagccaggaa

SEQ ID NO: 2821731 - RNA, 19 nt, Artificial Sequence
  Description of Artificial Sequence: Synthetic oligonucleotide
guagugggcgcaguaguca

SEQ ID NO: 2821732 - RNA, 19 nt, Artificial Sequence
  Description of Artificial Sequence: Synthetic oligonucleotide
cuugcgcuccgggaagccg

SEQ ID NO: 2821733 - RNA, 19 nt, Artificial Sequence
  Description of Artificial Sequence: Synthetic oligonucleotide
agucacguugcugcagugu

SEQ ID NO: 2821734 - RNA, 19 nt, Artificial Sequence
  Description of Artificial Sequence: Synthetic oligonucleotide
acucccaccuggaagcacu

SEQ ID NO: 2821735 - RNA, 19 nt, Artificial Sequence
  Description of Artificial Sequence: Synthetic oligonucleotide
uggagcagccuccguucac

SEQ ID NO: 2821736 - RNA, 19 nt, Artificial Sequence
  Description of Artificial Sequence: Synthetic oligonucleotide
gucaggcuccaccgaggcg

SEQ ID NO: 2821737 - RNA, 19 nt, Artificial Sequence
  Description of Artificial Sequence: Synthetic oligonucleotide
cuccuucauucgcuucacg

SEQ ID NO: 2821738 - RNA, 19 nt, Artificial Sequence
  Description of Artificial Sequence: Synthetic oligonucleotide
guccaugugcucgcaguag

SEQ ID NO: 2821739 - RNA, 19 nt, Artificial Sequence
  Description of Artificial Sequence: Synthetic oligonucleotide
guagucacguugcugcagu

SEQ ID NO: 2821740 - RNA, 19 nt, Artificial Sequence
  Description of Artificial Sequence: Synthetic oligonucleotide
ucuuccucuggagcagccu

SEQ ID NO: 2821741 - RNA, 19 nt, Artificial Sequence
  Description of Artificial Sequence: Synthetic oligonucleotide
cuccguuucuuccucugga

SEQ ID NO: 2821742 - RNA, 19 nt, Artificial Sequence
  Description of Artificial Sequence: Synthetic oligonucleotide
gucaugccgcucaugcuug

SEQ ID NO: 2821743 - RNA, 19 nt, Artificial Sequence
  Description of Artificial Sequence: Synthetic oligonucleotide
gcucaugcuugcaagccag

SEQ ID NO: 2821744 - RNA, 19 nt, Artificial Sequence
  Description of Artificial Sequence: Synthetic oligonucleotide
uucccuccguuucuuccuc

SEQ ID NO: 2821745 - RNA, 19 nt, Artificial Sequence
  Description of Artificial Sequence: Synthetic oligonucleotide
ggcgcaguagucacguugc

SEQ ID NO: 2821746 - RNA, 19 nt, Artificial Sequence
  Description of Artificial Sequence: Synthetic oligonucleotide
cuccuugcgcuccgggaag

SEQ ID NO: 2821747 - RNA, 19 nt, Artificial Sequence
  Description of Artificial Sequence: Synthetic oligonucleotide
acccguuccgccuucucuu

SEQ ID NO: 2821748 - RNA, 19 nt, Artificial Sequence
  Description of Artificial Sequence: Synthetic oligonucleotide
ucaugccgcucaugcuugc

SEQ ID NO: 2821749 - RNA, 19 nt, Artificial Sequence
  Description of Artificial Sequence: Synthetic oligonucleotide
ccacugauagguccacagg

SEQ ID NO: 2821750 - RNA, 19 nt, Artificial Sequence
  Description of Artificial Sequence: Synthetic oligonucleotide
ggucaggcuccaccgaggc

SEQ ID NO: 2821751 - RNA, 19 nt, Artificial Sequence
  Description of Artificial Sequence: Synthetic oligonucleotide
ugcacuugagcagccugau

SEQ ID NO: 2821752 - RNA, 19 nt, Artificial Sequence
  Description of Artificial Sequence: Synthetic oligonucleotide
cuuuuggcagccgggguca

SEQ ID NO: 2821753 - RNA, 19 nt, Artificial Sequence
  Description of Artificial Sequence: Synthetic oligonucleotide
ccaaauagcgccgggccag

SEQ ID NO: 2821754 - RNA, 19 nt, Artificial Sequence
  Description of Artificial Sequence: Synthetic oligonucleotide
uagcgccgggccaggugcg

SEQ ID NO: 2821755 - RNA, 19 nt, Artificial Sequence
  Description of Artificial Sequence: Synthetic oligonucleotide
agccaggaaguuggggaag

SEQ ID NO: 2821756 - RNA, 19 nt, Artificial Sequence
  Description of Artificial Sequence: Synthetic oligonucleotide
ggggucaggcuccaccgag

SEQ ID NO: 2821757 - RNA, 19 nt, Artificial Sequence
  Description of Artificial Sequence: Synthetic oligonucleotide
gccggggucaccucacucc

SEQ ID NO: 2821758 - RNA, 19 nt, Artificial Sequence
  Description of Artificial Sequence: Synthetic oligonucleotide
ccccaaauagcgccgggcc

SEQ ID NO: 2821759 - RNA, 19 nt, Artificial Sequence
  Description of Artificial Sequence: Synthetic oligonucleotide
uacgcgcuccuugcgcucc

SEQ ID NO: 2821760 - RNA, 19 nt, Artificial Sequence
  Description of Artificial Sequence: Synthetic oligonucleotide
augccgcucaugcuugcaa

SEQ ID NO: 2821761 - RNA, 19 nt, Artificial Sequence
  Description of Artificial Sequence: Synthetic oligonucleotide
aaauagcgccgggccaggu

SEQ ID NO: 2821762 - RNA, 19 nt, Artificial Sequence
  Description of Artificial Sequence: Synthetic oligonucleotide
ucgcuucacguaguccaug

SEQ ID NO: 2821763 - RNA, 19 nt, Artificial Sequence
  Description of Artificial Sequence: Synthetic oligonucleotide
uccacagguggugggugac

SEQ ID NO: 2821764 - RNA, 19 nt, Artificial Sequence
  Description of Artificial Sequence: Synthetic oligonucleotide
agucccagucaugccgcuc

SEQ ID NO: 2821765 - RNA, 19 nt, Artificial Sequence
  Description of Artificial Sequence: Synthetic oligonucleotide
ucucccuggccccgggaua

SEQ ID NO: 2821766 - RNA, 19 nt, Artificial Sequence
  Description of Artificial Sequence: Synthetic oligonucleotide
uuccacugauagguccaca

SEQ ID NO: 2821767 - RNA, 19 nt, Artificial Sequence
  Description of Artificial Sequence: Synthetic oligonucleotide
gugggugacccuagagggc

SEQ ID NO: 2821768 - RNA, 19 nt, Artificial Sequence
  Description of Artificial Sequence: Synthetic oligonucleotide
uuuggcagccggggucacc

SEQ ID NO: 2821769 - RNA, 19 nt, Artificial Sequence
  Description of Artificial Sequence: Synthetic oligonucleotide
agccaccauuacgcgcucc

SEQ ID NO: 2821770 - RNA, 19 nt, Artificial Sequence
  Description of Artificial Sequence: Synthetic oligonucleotide
gcaagccaggaaguugggg

SEQ ID NO: 2821771 - RNA, 19 nt, Artificial Sequence
  Description of Artificial Sequence: Synthetic oligonucleotide
ucagggcccaccucuccuu

SEQ ID NO: 2821772 - RNA, 19 nt, Artificial Sequence
  Description of Artificial Sequence: Synthetic oligonucleotide
ccuuuuggcagccgggguc

SEQ ID NO: 2821773 - RNA, 19 nt, Artificial Sequence
  Description of Artificial Sequence: Synthetic oligonucleotide
agcugucgcgcuugcacuu

SEQ ID NO: 2821774 - RNA, 19 nt, Artificial Sequence
  Description of Artificial Sequence: Synthetic oligonucleotide
cacucuccuuuuggcagcc

SEQ ID NO: 2821775 - RNA, 19 nt, Artificial Sequence
  Description of Artificial Sequence: Synthetic oligonucleotide
acagguggugggugacccu

SEQ ID NO: 2821776 - RNA, 19 nt, Artificial Sequence
  Description of Artificial Sequence: Synthetic oligonucleotide
uccuugcgcuccgggaagc

SEQ ID NO: 2821777 - RNA, 19 nt, Artificial Sequence
  Description of Artificial Sequence: Synthetic oligonucleotide
cucccuggccccgggauac

SEQ ID NO: 2821778 - RNA, 19 nt, Artificial Sequence
  Description of Artificial Sequence: Synthetic oligonucleotide
ggcauuguucaucuccugu

SEQ ID NO: 2821779 - RNA, 19 nt, Artificial Sequence
  Description of Artificial Sequence: Synthetic oligonucleotide
uggggaagcugucgcgcuu

SEQ ID NO: 2821780 - RNA, 19 nt, Artificial Sequence
  Description of Artificial Sequence: Synthetic oligonucleotide
gcucgcaguagucccaguc

SEQ ID NO: 2821781 - RNA, 19 nt, Artificial Sequence
  Description of Artificial Sequence: Synthetic oligonucleotide
ucacucccaccuggaagca

SEQ ID NO: 2821782 - RNA, 19 nt, Artificial Sequence
  Description of Artificial Sequence: Synthetic oligonucleotide
ggggucaccucacucccac

SEQ ID NO: 2821783 - RNA, 19 nt, Artificial Sequence
  Description of Artificial Sequence: Synthetic oligonucleotide
gccgcucaugcuugcaagc

SEQ ID NO: 2821784 - RNA, 19 nt, Artificial Sequence
  Description of Artificial Sequence: Synthetic oligonucleotide
guaguccggcgggaaacug

SEQ ID NO: 2821785 - RNA, 19 nt, Artificial Sequence
  Description of Artificial Sequence: Synthetic oligonucleotide
caguagucacguugcugca

SEQ ID NO: 2821786 - RNA, 19 nt, Artificial Sequence
  Description of Artificial Sequence: Synthetic oligonucleotide
gugcucgcaguagucccag

SEQ ID NO: 2821787 - RNA, 19 nt, Artificial Sequence
  Description of Artificial Sequence: Synthetic oligonucleotide
agguccacagguggugggu

SEQ ID NO: 2821788 - RNA, 19 nt, Artificial Sequence
  Description of Artificial Sequence: Synthetic oligonucleotide
cuccguucacguucaaacu

SEQ ID NO: 2821789 - RNA, 19 nt, Artificial Sequence
  Description of Artificial Sequence: Synthetic oligonucleotide
ucccuccguuucuuccucu

SEQ ID NO: 2821790 - RNA, 19 nt, Artificial Sequence
  Description of Artificial Sequence: Synthetic oligonucleotide
guccacaggugguggguga

SEQ ID NO: 2821791 - RNA, 19 nt, Artificial Sequence
  Description of Artificial Sequence: Synthetic oligonucleotide
cgcgcuugcacuugagcag

SEQ ID NO: 2821792 - RNA, 19 nt, Artificial Sequence
  Description of Artificial Sequence: Synthetic oligonucleotide
accucacucccaccuggaa

SEQ ID NO: 2821793 - RNA, 19 nt, Artificial Sequence
  Description of Artificial Sequence: Synthetic oligonucleotide
ccauuacgcgcuccuugcg

SEQ ID NO: 2821794 - RNA, 19 nt, Artificial Sequence
  Description of Artificial Sequence: Synthetic oligonucleotide
aagccguaguccggcggga

SEQ ID NO: 2821795 - RNA, 19 nt, Artificial Sequence
  Description of Artificial Sequence: Synthetic oligonucleotide
cgggaaacugggcaucugc

SEQ ID NO: 2821796 - RNA, 19 nt, Artificial Sequence
  Description of Artificial Sequence: Synthetic oligonucleotide
cagcugggcauuguucauc

SEQ ID NO: 2821797 - RNA, 19 nt, Artificial Sequence
  Description of Artificial Sequence: Synthetic oligonucleotide
ccuagagggccaccucagg

SEQ ID NO: 2821798 - RNA, 19 nt, Artificial Sequence
  Description of Artificial Sequence: Synthetic oligonucleotide
uuccgccuucucuucccuc

SEQ ID NO: 2821799 - RNA, 19 nt, Artificial Sequence
  Description of Artificial Sequence: Synthetic oligonucleotide
gggaaacugggcaucugca

SEQ ID NO: 2821800 - RNA, 19 nt, Artificial Sequence
  Description of Artificial Sequence: Synthetic oligonucleotide
cuucccuccguuucuuccu

SEQ ID NO: 2821801 - RNA, 19 nt, Artificial Sequence
  Description of Artificial Sequence: Synthetic oligonucleotide
gguagugggcgcaguaguc

SEQ ID NO: 2821802 - RNA, 19 nt, Artificial Sequence
  Description of Artificial Sequence: Synthetic oligonucleotide
agcagccugaugagguagu

SEQ ID NO: 2821803 - RNA, 19 nt, Artificial Sequence
  Description of Artificial Sequence: Synthetic oligonucleotide
gggaagccguaguccggcg

SEQ ID NO: 2821804 - RNA, 19 nt, Artificial Sequence
  Description of Artificial Sequence: Synthetic oligonucleotide
ccuucauucgcuucacgua

SEQ ID NO: 2821805 - RNA, 19 nt, Artificial Sequence
  Description of Artificial Sequence: Synthetic oligonucleotide
agggcccaccucuccuucu

SEQ ID NO: 2821806 - RNA, 19 nt, Artificial Sequence
  Description of Artificial Sequence: Synthetic oligonucleotide
cccuagagggccaccucag

SEQ ID NO: 2821807 - RNA, 19 nt, Artificial Sequence
  Description of Artificial Sequence: Synthetic oligonucleotide
accucagggcccaccucuc

SEQ ID NO: 2821808 - RNA, 19 nt, Artificial Sequence
  Description of Artificial Sequence: Synthetic oligonucleotide
ccgggauacccguuccgcc

SEQ ID NO: 2821809 - RNA, 19 nt, Artificial Sequence
  Description of Artificial Sequence: Synthetic oligonucleotide
acucuccuuuuggcagccg

SEQ ID NO: 2821810 - RNA, 19 nt, Artificial Sequence
  Description of Artificial Sequence: Synthetic oligonucleotide
gggcauuguucaucuccug

SEQ ID NO: 2821811 - RNA, 19 nt, Artificial Sequence
  Description of Artificial Sequence: Synthetic oligonucleotide
ucccagucaugccgcucau

SEQ ID NO: 2821812 - RNA, 19 nt, Artificial Sequence
  Description of Artificial Sequence: Synthetic oligonucleotide
gcuccuugcgcuccgggaa

SEQ ID NO: 2821813 - RNA, 19 nt, Artificial Sequence
  Description of Artificial Sequence: Synthetic oligonucleotide
ggaaguuggggaagcuguc

SEQ ID NO: 2821814 - RNA, 19 nt, Artificial Sequence
  Description of Artificial Sequence: Synthetic oligonucleotide
augagguagugggcgcagu

SEQ ID NO: 2821815 - RNA, 19 nt, Artificial Sequence
  Description of Artificial Sequence: Synthetic oligonucleotide
gcgcuugcacuugagcagc

SEQ ID NO: 2821816 - RNA, 19 nt, Artificial Sequence
  Description of Artificial Sequence: Synthetic oligonucleotide
gggucaggcuccaccgagg

SEQ ID NO: 2821817 - RNA, 19 nt, Artificial Sequence
  Description of Artificial Sequence: Synthetic oligonucleotide
cugcagugucagcugggca

SEQ ID NO: 2821818 - RNA, 19 nt, Artificial Sequence
  Description of Artificial Sequence: Synthetic oligonucleotide
cuccuucucccuggccccg

SEQ ID NO: 2821819 - RNA, 19 nt, Artificial Sequence
  Description of Artificial Sequence: Synthetic oligonucleotide
agcgccgggccaggugcgc

SEQ ID NO: 2821820 - RNA, 19 nt, Artificial Sequence
  Description of Artificial Sequence: Synthetic oligonucleotide
gagggccaccucagggccc

SEQ ID NO: 2821821 - RNA, 19 nt, Artificial Sequence
  Description of Artificial Sequence: Synthetic oligonucleotide
acgcgcuccuugcgcuccg

SEQ ID NO: 2821822 - RNA, 19 nt, Artificial Sequence
  Description of Artificial Sequence: Synthetic oligonucleotide
agggccaccucagggccca

SEQ ID NO: 2821823 - RNA, 19 nt, Artificial Sequence
  Description of Artificial Sequence: Synthetic oligonucleotide
cuggagcagccuccguuca

SEQ ID NO: 2821824 - RNA, 19 nt, Artificial Sequence
  Description of Artificial Sequence: Synthetic oligonucleotide
agguggugggugacccuag

SEQ ID NO: 2821825 - RNA, 19 nt, Artificial Sequence
  Description of Artificial Sequence: Synthetic oligonucleotide
uagccaccauuacgcgcuc

SEQ ID NO: 2821826 - RNA, 19 nt, Artificial Sequence
  Description of Artificial Sequence: Synthetic oligonucleotide
gcauuguucaucuccuguu

SEQ ID NO: 2821827 - RNA, 19 nt, Artificial Sequence
  Description of Artificial Sequence: Synthetic oligonucleotide
ugcgcuccgggaagccgua

SEQ ID NO: 2821828 - RNA, 19 nt, Artificial Sequence
  Description of Artificial Sequence: Synthetic oligonucleotide
gguccacagguggugggug

SEQ ID NO: 2821829 - RNA, 19 nt, Artificial Sequence
  Description of Artificial Sequence: Synthetic oligonucleotide
uuuuggcagccggggucac

SEQ ID NO: 2821830 - RNA, 19 nt, Artificial Sequence
  Description of Artificial Sequence: Synthetic oligonucleotide
agcagccuccguucacguu

SEQ ID NO: 2821831 - RNA, 19 nt, Artificial Sequence
  Description of Artificial Sequence: Synthetic oligonucleotide
ggggaagcugucgcgcuug

SEQ ID NO: 2821832 - RNA, 19 nt, Artificial Sequence
  Description of Artificial Sequence: Synthetic oligonucleotide
gcacuugagcagccugaug

SEQ ID NO: 2821833 - RNA, 19 nt, Artificial Sequence
  Description of Artificial Sequence: Synthetic oligonucleotide
cagccuccguucacguuca

SEQ ID NO: 2821834 - RNA, 19 nt, Artificial Sequence
  Description of Artificial Sequence: Synthetic oligonucleotide
ugcucgcaguagucccagu

SEQ ID NO: 2821835 - RNA, 19 nt, Artificial Sequence
  Description of Artificial Sequence: Synthetic oligonucleotide
ccgcucaugcuugcaagcc

SEQ ID NO: 2821836 - RNA, 19 nt, Artificial Sequence
  Description of Artificial Sequence: Synthetic oligonucleotide
caccucacucccaccugga

SEQ ID NO: 2821837 - RNA, 19 nt, Artificial Sequence
  Description of Artificial Sequence: Synthetic oligonucleotide
aggcuccaccgaggcgucc

SEQ ID NO: 2821838 - RNA, 19 nt, Artificial Sequence
  Description of Artificial Sequence: Synthetic oligonucleotide
cuguuguguagccaccauu

SEQ ID NO: 2821839 - RNA, 19 nt, Artificial Sequence
  Description of Artificial Sequence: Synthetic oligonucleotide
ggcuccaccgaggcguccc

SEQ ID NO: 2821840 - RNA, 19 nt, Artificial Sequence
  Description of Artificial Sequence: Synthetic oligonucleotide
cacucccaccuggaagcac

SEQ ID NO: 2821841 - RNA, 19 nt, Artificial Sequence
  Description of Artificial Sequence: Synthetic oligonucleotide
gccugaugagguagugggc

SEQ ID NO: 2821842 - RNA, 19 nt, Artificial Sequence
  Description of Artificial Sequence: Synthetic oligonucleotide
ccuggccccgggauacccg

SEQ ID NO: 2821843 - RNA, 19 nt, Artificial Sequence
  Description of Artificial Sequence: Synthetic oligonucleotide
caggcuccaccgaggcguc

SEQ ID NO: 2821844 - RNA, 19 nt, Artificial Sequence
  Description of Artificial Sequence: Synthetic oligonucleotide
ccgggaagccguaguccgg

SEQ ID NO: 2821845 - RNA, 19 nt, Artificial Sequence
  Description of Artificial Sequence: Synthetic oligonucleotide
gugggcgcaguagucacgu

SEQ ID NO: 2821846 - RNA, 19 nt, Artificial Sequence
  Description of Artificial Sequence: Synthetic oligonucleotide
gugacccuagagggccacc

SEQ ID NO: 2821847 - RNA, 19 nt, Artificial Sequence
  Description of Artificial Sequence: Synthetic oligonucleotide
gagcagccuccguucacgu

SEQ ID NO: 2821848 - RNA, 19 nt, Artificial Sequence
  Description of Artificial Sequence: Synthetic oligonucleotide
gcagccugaugagguagug

SEQ ID NO: 2821849 - RNA, 19 nt, Artificial Sequence
  Description of Artificial Sequence: Synthetic oligonucleotide
gggaagcugucgcgcuugc

SEQ ID NO: 2821850 - RNA, 19 nt, Artificial Sequence
  Description of Artificial Sequence: Synthetic oligonucleotide
ggcagccggggucaccuca

SEQ ID NO: 2821851 - RNA, 19 nt, Artificial Sequence
  Description of Artificial Sequence: Synthetic oligonucleotide
cucuggagcagccuccguu

SEQ ID NO: 2821852 - RNA, 19 nt, Artificial Sequence
  Description of Artificial Sequence: Synthetic oligonucleotide
cccgggauacccguuccgc

SEQ ID NO: 2821853 - RNA, 19 nt, Artificial Sequence
  Description of Artificial Sequence: Synthetic oligonucleotide
cacguucaaacuccuucau

SEQ ID NO: 2821854 - RNA, 19 nt, Artificial Sequence
  Description of Artificial Sequence: Synthetic oligonucleotide
gguggugggugacccuaga

SEQ ID NO: 2821855 - RNA, 19 nt, Artificial Sequence
  Description of Artificial Sequence: Synthetic oligonucleotide
ccguaguccggcgggaaac

SEQ ID NO: 2821856 - RNA, 19 nt, Artificial Sequence
  Description of Artificial Sequence: Synthetic oligonucleotide
cugucgcgcuugcacuuga

SEQ ID NO: 2821857 - RNA, 19 nt, Artificial Sequence
  Description of Artificial Sequence: Synthetic oligonucleotide
cagguggugggugacccua

SEQ ID NO: 2821858 - RNA, 19 nt, Artificial Sequence
  Description of Artificial Sequence: Synthetic oligonucleotide
cucagggcccaccucuccu

SEQ ID NO: 2821859 - RNA, 19 nt, Artificial Sequence
  Description of Artificial Sequence: Synthetic oligonucleotide
cccaaauagcgccgggcca

SEQ ID NO: 2821860 - RNA, 19 nt, Artificial Sequence
  Description of Artificial Sequence: Synthetic oligonucleotide
caugccgcucaugcuugca

SEQ ID NO: 2821861 - RNA, 19 nt, Artificial Sequence
  Description of Artificial Sequence: Synthetic oligonucleotide
gggucaccucacucccacc

SEQ ID NO: 2821862 - RNA, 19 nt, Artificial Sequence
  Description of Artificial Sequence: Synthetic oligonucleotide
cagucaugccgcucaugcu

SEQ ID NO: 2821863 - RNA, 19 nt, Artificial Sequence
  Description of Artificial Sequence: Synthetic oligonucleotide
ccauagcugcuccuccuca

SEQ ID NO: 2821864 - RNA, 19 nt, Artificial Sequence
  Description of Artificial Sequence: Synthetic oligonucleotide
ccucagggcccaccucucc

SEQ ID NO: 2821865 - RNA, 19 nt, Artificial Sequence
  Description of Artificial Sequence: Synthetic oligonucleotide
gcugucgcgcuugcacuug

SEQ ID NO: 2821866 - RNA, 19 nt, Artificial Sequence
  Description of Artificial Sequence: Synthetic oligonucleotide
ccgccuucucuucccuccg

SEQ ID NO: 2821867 - RNA, 19 nt, Artificial Sequence
  Description of Artificial Sequence: Synthetic oligonucleotide
ggugacccuagagggccac

SEQ ID NO: 2821868 - RNA, 19 nt, Artificial Sequence
  Description of Artificial Sequence: Synthetic oligonucleotide
gccaccauuacgcgcuccu

SEQ ID NO: 2821869 - RNA, 19 nt, Artificial Sequence
  Description of Artificial Sequence: Synthetic oligonucleotide
gauacccguuccgccuucu

SEQ ID NO: 2821870 - RNA, 19 nt, Artificial Sequence
  Description of Artificial Sequence: Synthetic oligonucleotide
ccguuccgccuucucuucc

SEQ ID NO: 2821871 - RNA, 19 nt, Artificial Sequence
  Description of Artificial Sequence: Synthetic oligonucleotide
ggccccgggauacccguuc

SEQ ID NO: 2821872 - RNA, 19 nt, Artificial Sequence
  Description of Artificial Sequence: Synthetic oligonucleotide
gcgcuccuugcgcuccggg

SEQ ID NO: 2821873 - RNA, 19 nt, Artificial Sequence
  Description of Artificial Sequence: Synthetic oligonucleotide
ggauacccguuccgccuuc

SEQ ID NO: 2821874 - RNA, 19 nt, Artificial Sequence
  Description of Artificial Sequence: Synthetic oligonucleotide
cgcaguagucccagucaug

SEQ ID NO: 2821875 - RNA, 19 nt, Artificial Sequence
  Description of Artificial Sequence: Synthetic oligonucleotide
gccccgggauacccguucc

SEQ ID NO: 2821876 - RNA, 19 nt, Artificial Sequence
  Description of Artificial Sequence: Synthetic oligonucleotide
cgcaguagucacguugcug

SEQ ID NO: 2821877 - RNA, 19 nt, Artificial Sequence
  Description of Artificial Sequence: Synthetic oligonucleotide
agccguaguccggcgggaa

SEQ ID NO: 2821878 - RNA, 19 nt, Artificial Sequence
  Description of Artificial Sequence: Synthetic oligonucleotide
ccccgggauacccguuccg

SEQ ID NO: 2821879 - RNA, 19 nt, Artificial Sequence
  Description of Artificial Sequence: Synthetic oligonucleotide
ccucuccuucucccuggcc

SEQ ID NO: 2821880 - RNA, 19 nt, Artificial Sequence
  Description of Artificial Sequence: Synthetic oligonucleotide
gcuccaccgaggcgucccc

SEQ ID NO: 2821881 - RNA, 19 nt, Artificial Sequence
  Description of Artificial Sequence: Synthetic oligonucleotide
ugggcgcaguagucacguu

SEQ ID NO: 2821882 - RNA, 19 nt, Artificial Sequence
  Description of Artificial Sequence: Synthetic oligonucleotide
cuggccccgggauacccgu

SEQ ID NO: 2821883 - RNA, 19 nt, Artificial Sequence
  Description of Artificial Sequence: Synthetic oligonucleotide
uggcagccggggucaccuc

SEQ ID NO: 2821884 - RNA, 19 nt, Artificial Sequence
  Description of Artificial Sequence: Synthetic oligonucleotide
uggccccgggauacccguu

SEQ ID NO: 2821885 - RNA, 19 nt, Artificial Sequence
  Description of Artificial Sequence: Synthetic oligonucleotide
cccguuccgccuucucuuc

SEQ ID NO: 2821886 - RNA, 19 nt, Artificial Sequence
  Description of Artificial Sequence: Synthetic oligonucleotide
guccggcgggaaacugggc

SEQ ID NO: 2821887 - RNA, 19 nt, Artificial Sequence
  Description of Artificial Sequence: Synthetic oligonucleotide
gccaccucagggcccaccu

SEQ ID NO: 2821888 - RNA, 19 nt, Artificial Sequence
  Description of Artificial Sequence: Synthetic oligonucleotide
ccuugcgcuccgggaagcc

SEQ ID NO: 2821889 - RNA, 19 nt, Artificial Sequence
  Description of Artificial Sequence: Synthetic oligonucleotide
ggaagcugucgcgcuugca

SEQ ID NO: 2821890 - RNA, 19 nt, Artificial Sequence
  Description of Artificial Sequence: Synthetic oligonucleotide
gcagccggggucaccucac

SEQ ID NO: 2821891 - RNA, 19 nt, Artificial Sequence
  Description of Artificial Sequence: Synthetic oligonucleotide
cgcuugcacuugagcagcc

SEQ ID NO: 2821892 - RNA, 19 nt, Artificial Sequence
  Description of Artificial Sequence: Synthetic oligonucleotide
gccguaguccggcgggaaa

SEQ ID NO: 2821893 - RNA, 19 nt, Artificial Sequence
  Description of Artificial Sequence: Synthetic oligonucleotide
cgcucaugcuugcaagcca

SEQ ID NO: 2821894 - RNA, 19 nt, Artificial Sequence
  Description of Artificial Sequence: Synthetic oligonucleotide
gcgggaaacugggcaucug

SEQ ID NO: 2821895 - RNA, 19 nt, Artificial Sequence
  Description of Artificial Sequence: Synthetic oligonucleotide
ggccaccucagggcccacc

SEQ ID NO: 2821896 - RNA, 19 nt, Artificial Sequence
  Description of Artificial Sequence: Synthetic oligonucleotide
agccuccguucacguucaa

SEQ ID NO: 2821897 - RNA, 19 nt, Artificial Sequence
  Description of Artificial Sequence: Synthetic oligonucleotide
gggauacccguuccgccuu

SEQ ID NO: 2821898 - RNA, 19 nt, Artificial Sequence
  Description of Artificial Sequence: Synthetic oligonucleotide
cccagucaugccgcucaug

SEQ ID NO: 2821899 - RNA, 19 nt, Artificial Sequence
  Description of Artificial Sequence: Synthetic oligonucleotide
gccuccguucacguucaaa

SEQ ID NO: 2821900 - RNA, 19 nt, Artificial Sequence
  Description of Artificial Sequence: Synthetic oligonucleotide
ggcgggaaacugggcaucu

SEQ ID NO: 2821901 - RNA, 19 nt, Artificial Sequence
  Description of Artificial Sequence: Synthetic oligonucleotide
cgcuucacguaguccaugu

SEQ ID NO: 2821902 - RNA, 19 nt, Artificial Sequence
  Description of Artificial Sequence: Synthetic oligonucleotide
cgcuccuugcgcuccggga

SEQ ID NO: 2821903 - RNA, 19 nt, Artificial Sequence
  Description of Artificial Sequence: Synthetic oligonucleotide
gcuugcacuugagcagccu

SEQ ID NO: 2821904 - RNA, 19 nt, Artificial Sequence
  Description of Artificial Sequence: Synthetic oligonucleotide
cgggauacccguuccgccu

SEQ ID NO: 2821905 - RNA, 19 nt, Artificial Sequence
  Description of Artificial Sequence: Synthetic oligonucleotide
cguucacguucaaacuccu

SEQ ID NO: 2821906 - RNA, 19 nt, Artificial Sequence
  Description of Artificial Sequence: Synthetic oligonucleotide
gcagugucagcugggcauu

SEQ ID NO: 2821907 - RNA, 19 nt, Artificial Sequence
  Description of Artificial Sequence: Synthetic oligonucleotide
ccccauagcugcuccuccu

SEQ ID NO: 2821908 - RNA, 19 nt, Artificial Sequence
  Description of Artificial Sequence: Synthetic oligonucleotide
cgccgggccaggugcgccc

SEQ ID NO: 2821909 - RNA, 19 nt, Artificial Sequence
  Description of Artificial Sequence: Synthetic oligonucleotide
ccuguuguguagccaccau

SEQ ID NO: 2821910 - RNA, 19 nt, Artificial Sequence
  Description of Artificial Sequence: Synthetic oligonucleotide
gcgcaguagucacguugcu

SEQ ID NO: 2821911 - RNA, 19 nt, Artificial Sequence
  Description of Artificial Sequence: Synthetic oligonucleotide
gcgccgggccaggugcgcc

SEQ ID NO: 2821912 - RNA, 19 nt, Artificial Sequence
  Description of Artificial Sequence: Synthetic oligonucleotide
gcgcuccgggaagccguag

SEQ ID NO: 2821913 - RNA, 19 nt, Artificial Sequence
  Description of Artificial Sequence: Synthetic oligonucleotide
ccggcgggaaacugggcau

SEQ ID NO: 2821914 - RNA, 19 nt, Artificial Sequence
  Description of Artificial Sequence: Synthetic oligonucleotide
cagccggggucaccucacu

SEQ ID NO: 2821915 - RNA, 19 nt, Artificial Sequence
  Description of Artificial Sequence: Synthetic oligonucleotide
cguaguccaugugcucgca

SEQ ID NO: 2821916 - RNA, 19 nt, Artificial Sequence
  Description of Artificial Sequence: Synthetic oligonucleotide
cggcgggaaacugggcauc

SEQ ID NO: 2821917 - RNA, 19 nt, Artificial Sequence
  Description of Artificial Sequence: Synthetic oligonucleotide
ccaggaaguuggggaagcu

SEQ ID NO: 2821918 - RNA, 19 nt, Artificial Sequence
  Description of Artificial Sequence: Synthetic oligonucleotide
cguaguccggcgggaaacu

SEQ ID NO: 2821919 - RNA, 19 nt, Artificial Sequence
  Description of Artificial Sequence: Synthetic oligonucleotide
cgcuccgggaagccguagu

SEQ ID NO: 2821920 - RNA, 19 nt, Artificial Sequence
  Description of Artificial Sequence: Synthetic oligonucleotide
ccucuggagcagccuccgu

SEQ ID NO: 2821921 - RNA, 19 nt, Artificial Sequence
  Description of Artificial Sequence: Synthetic oligonucleotide
ccaccauuacgcgcuccuu

SEQ ID NO: 2821922 - RNA, 19 nt, Artificial Sequence
  Description of Artificial Sequence: Synthetic oligonucleotide
gggccaccucagggcccac

SEQ ID NO: 2821923 - RNA, 19 nt, Artificial Sequence
  Description of Artificial Sequence: Synthetic oligonucleotide
aauagaaugugaaaggacc

SEQ ID NO: 2821924 - RNA, 19 nt, Artificial Sequence
  Description of Artificial Sequence: Synthetic oligonucleotide
aacuaugagaacaaaaggc

SEQ ID NO: 2821925 - RNA, 19 nt, Artificial Sequence
  Description of Artificial Sequence: Synthetic oligonucleotide
auuaaauucagucacaaga

SEQ ID NO: 2821926 - RNA, 19 nt, Artificial Sequence
  Description of Artificial Sequence: Synthetic oligonucleotide
uuauguuuaagacaaagca

SEQ ID NO: 2821927 - RNA, 19 nt, Artificial Sequence
  Description of Artificial Sequence: Synthetic oligonucleotide
aaaggcaaccauaagaacc

SEQ ID NO: 2821928 - RNA, 19 nt, Artificial Sequence
  Description of Artificial Sequence: Synthetic oligonucleotide
uguuauaaauuuuauagca

SEQ ID NO: 2821929 - RNA, 19 nt, Artificial Sequence
  Description of Artificial Sequence: Synthetic oligonucleotide
auuguauggagucaagugc

SEQ ID NO: 2821930 - RNA, 19 nt, Artificial Sequence
  Description of Artificial Sequence: Synthetic oligonucleotide
uuaagaaacaacuaugaga

SEQ ID NO: 2821931 - RNA, 19 nt, Artificial Sequence
  Description of Artificial Sequence: Synthetic oligonucleotide
cuagcuuuaaauuguaugg

SEQ ID NO: 2821932 - RNA, 19 nt, Artificial Sequence
  Description of Artificial Sequence: Synthetic oligonucleotide
uuuaagaauuguucaaugg

SEQ ID NO: 2821933 - RNA, 19 nt, Artificial Sequence
  Description of Artificial Sequence: Synthetic oligonucleotide
uuaagaauuguucaauggc

SEQ ID NO: 2821934 - RNA, 19 nt, Artificial Sequence
  Description of Artificial Sequence: Synthetic oligonucleotide
ucagucacaagacagaaca

SEQ ID NO: 2821935 - RNA, 19 nt, Artificial Sequence
  Description of Artificial Sequence: Synthetic oligonucleotide
aauuguauggagucaagug

SEQ ID NO: 2821936 - RNA, 19 nt, Artificial Sequence
  Description of Artificial Sequence: Synthetic oligonucleotide
acuggcagcauucucaacc

SEQ ID NO: 2821937 - RNA, 19 nt, Artificial Sequence
  Description of Artificial Sequence: Synthetic oligonucleotide
uuaacuccaaaucugauuc

SEQ ID NO: 2821938 - RNA, 19 nt, Artificial Sequence
  Description of Artificial Sequence: Synthetic oligonucleotide
gacaaauagaaugugaaag

SEQ ID NO: 2821939 - RNA, 19 nt, Artificial Sequence
  Description of Artificial Sequence: Synthetic oligonucleotide
acauucuuauguuuaagac

SEQ ID NO: 2821940 - RNA, 19 nt, Artificial Sequence
  Description of Artificial Sequence: Synthetic oligonucleotide
uagguauugacaaauagaa

SEQ ID NO: 2821941 - RNA, 19 nt, Artificial Sequence
  Description of Artificial Sequence: Synthetic oligonucleotide
uuuaagaaacaacuaugag

SEQ ID NO: 2821942 - RNA, 19 nt, Artificial Sequence
  Description of Artificial Sequence: Synthetic oligonucleotide
uuugacaacauucccucgg

SEQ ID NO: 2821943 - RNA, 19 nt, Artificial Sequence
  Description of Artificial Sequence: Synthetic oligonucleotide
uugaacucauuuaagaaac

SEQ ID NO: 2821944 - RNA, 19 nt, Artificial Sequence
  Description of Artificial Sequence: Synthetic oligonucleotide
ucuaaguuaacuccaaauc

SEQ ID NO: 2821945 - RNA, 19 nt, Artificial Sequence
  Description of Artificial Sequence: Synthetic oligonucleotide
uaaguuaacuccaaaucug

SEQ ID NO: 2821946 - RNA, 19 nt, Artificial Sequence
  Description of Artificial Sequence: Synthetic oligonucleotide
ucauuuaagaaacaacuau

SEQ ID NO: 2821947 - RNA, 19 nt, Artificial Sequence
  Description of Artificial Sequence: Synthetic oligonucleotide
cauuuucuaaguuaacucc

SEQ ID NO: 2821948 - RNA, 19 nt, Artificial Sequence
  Description of Artificial Sequence: Synthetic oligonucleotide
uguagguauugacaaauag

SEQ ID NO: 2821949 - RNA, 19 nt, Artificial Sequence
  Description of Artificial Sequence: Synthetic oligonucleotide
gauuccaugauuuccauga

SEQ ID NO: 2821950 - RNA, 19 nt, Artificial Sequence
  Description of Artificial Sequence: Synthetic oligonucleotide
aaggcaaccauaagaaccc

SEQ ID NO: 2821951 - RNA, 19 nt, Artificial Sequence
  Description of Artificial Sequence: Synthetic oligonucleotide
acaaaaggcaaccauaaga

SEQ ID NO: 2821952 - RNA, 19 nt, Artificial Sequence
  Description of Artificial Sequence: Synthetic oligonucleotide
uaagaauuguucaauggcu

SEQ ID NO: 2821953 - RNA, 19 nt, Artificial Sequence
  Description of Artificial Sequence: Synthetic oligonucleotide
uuguuauaaauuuuauagc

SEQ ID NO: 2821954 - RNA, 19 nt, Artificial Sequence
  Description of Artificial Sequence: Synthetic oligonucleotide
aaauagaaugugaaaggac

SEQ ID NO: 2821955 - RNA, 19 nt, Artificial Sequence
  Description of Artificial Sequence: Synthetic oligonucleotide
gaaaggaccaguuaucaac

SEQ ID NO: 2821956 - RNA, 19 nt, Artificial Sequence
  Description of Artificial Sequence: Synthetic oligonucleotide
aaauucagucacaagacag

SEQ ID NO: 2821957 - RNA, 19 nt, Artificial Sequence
  Description of Artificial Sequence: Synthetic oligonucleotide
cacuggaucaccuagaauc

SEQ ID NO: 2821958 - RNA, 19 nt, Artificial Sequence
  Description of Artificial Sequence: Synthetic oligonucleotide
cauuuaagaaacaacuaug

SEQ ID NO: 2821959 - RNA, 19 nt, Artificial Sequence
  Description of Artificial Sequence: Synthetic oligonucleotide
acuagcuuuaaauuguaug

SEQ ID NO: 2821960 - RNA, 19 nt, Artificial Sequence
  Description of Artificial Sequence: Synthetic oligonucleotide
cuuauguuuaagacaaagc

SEQ ID NO: 2821961 - RNA, 19 nt, Artificial Sequence
  Description of Artificial Sequence: Synthetic oligonucleotide
cuuuaaauuguauggaguc

SEQ ID NO: 2821962 - RNA, 19 nt, Artificial Sequence
  Description of Artificial Sequence: Synthetic oligonucleotide
auguuuaagacaaagcauc

SEQ ID NO: 2821963 - RNA, 19 nt, Artificial Sequence
  Description of Artificial Sequence: Synthetic oligonucleotide
aacucauuuaagaaacaac

SEQ ID NO: 2821964 - RNA, 19 nt, Artificial Sequence
  Description of Artificial Sequence: Synthetic oligonucleotide
uauguuuaagacaaagcau

SEQ ID NO: 2821965 - RNA, 19 nt, Artificial Sequence
  Description of Artificial Sequence: Synthetic oligonucleotide
uaucauuuguuauaaauuu

SEQ ID NO: 2821966 - RNA, 19 nt, Artificial Sequence
  Description of Artificial Sequence: Synthetic oligonucleotide
cuagacuagcuuuaaauug

SEQ ID NO: 2821967 - RNA, 19 nt, Artificial Sequence
  Description of Artificial Sequence: Synthetic oligonucleotide
acaacuaugagaacaaaag

SEQ ID NO: 2821968 - RNA, 19 nt, Artificial Sequence
  Description of Artificial Sequence: Synthetic oligonucleotide
auauugaacucauuuaaga

SEQ ID NO: 2821969 - RNA, 19 nt, Artificial Sequence
  Description of Artificial Sequence: Synthetic oligonucleotide
uugacaaauagaaugugaa

SEQ ID NO: 2821970 - RNA, 19 nt, Artificial Sequence
  Description of Artificial Sequence: Synthetic oligonucleotide
ucuuauguuuaagacaaag

SEQ ID NO: 2821971 - RNA, 19 nt, Artificial Sequence
  Description of Artificial Sequence: Synthetic oligonucleotide
aagacagaacauucuuugg

SEQ ID NO: 2821972 - RNA, 19 nt, Artificial Sequence
  Description of Artificial Sequence: Synthetic oligonucleotide
aaccauauugaacucauuu

SEQ ID NO: 2821973 - RNA, 19 nt, Artificial Sequence
  Description of Artificial Sequence: Synthetic oligonucleotide
ucugauuccaugauuucca

SEQ ID NO: 2821974 - RNA, 19 nt, Artificial Sequence
  Description of Artificial Sequence: Synthetic oligonucleotide
uguuuaagacaaagcaucc

SEQ ID NO: 2821975 - RNA, 19 nt, Artificial Sequence
  Description of Artificial Sequence: Synthetic oligonucleotide
ugggauuuaagaauuguuc

SEQ ID NO: 2821976 - RNA, 19 nt, Artificial Sequence
  Description of Artificial Sequence: Synthetic oligonucleotide
auuuaagaauuguucaaug

SEQ ID NO: 2821977 - RNA, 19 nt, Artificial Sequence
  Description of Artificial Sequence: Synthetic oligonucleotide
ggcacaacaaaccauauug

SEQ ID NO: 2821978 - RNA, 19 nt, Artificial Sequence
  Description of Artificial Sequence: Synthetic oligonucleotide
acauucuuugguuauggag

SEQ ID NO: 2821979 - RNA, 19 nt, Artificial Sequence
  Description of Artificial Sequence: Synthetic oligonucleotide
auaaauuuuauagcacagg

SEQ ID NO: 2821980 - RNA, 19 nt, Artificial Sequence
  Description of Artificial Sequence: Synthetic oligonucleotide
ucaccuagaaucucaagug

SEQ ID NO: 2821981 - RNA, 19 nt, Artificial Sequence
  Description of Artificial Sequence: Synthetic oligonucleotide
augagaacaaaaggcaacc

SEQ ID NO: 2821982 - RNA, 19 nt, Artificial Sequence
  Description of Artificial Sequence: Synthetic oligonucleotide
uauugaacucauuuaagaa

SEQ ID NO: 2821983 - RNA, 19 nt, Artificial Sequence
  Description of Artificial Sequence: Synthetic oligonucleotide
caacuaugagaacaaaagg

SEQ ID NO: 2821984 - RNA, 19 nt, Artificial Sequence
  Description of Artificial Sequence: Synthetic oligonucleotide
gacaaguguaaacuggcag

SEQ ID NO: 2821985 - RNA, 19 nt, Artificial Sequence
  Description of Artificial Sequence: Synthetic oligonucleotide
auugaacucauuuaagaaa

SEQ ID NO: 2821986 - RNA, 19 nt, Artificial Sequence
  Description of Artificial Sequence: Synthetic oligonucleotide
aucaccuagaaucucaagu

SEQ ID NO: 2821987 - RNA, 19 nt, Artificial Sequence
  Description of Artificial Sequence: Synthetic oligonucleotide
ucaauggcuucucagauau

SEQ ID NO: 2821988 - RNA, 19 nt, Artificial Sequence
  Description of Artificial Sequence: Synthetic oligonucleotide
aacaaaccauauugaacuc

SEQ ID NO: 2821989 - RNA, 19 nt, Artificial Sequence
  Description of Artificial Sequence: Synthetic oligonucleotide
uagacuagcuuuaaauugu

SEQ ID NO: 2821990 - RNA, 19 nt, Artificial Sequence
  Description of Artificial Sequence: Synthetic oligonucleotide
aagacaaagcauccacuag

SEQ ID NO: 2821991 - RNA, 19 nt, Artificial Sequence
  Description of Artificial Sequence: Synthetic oligonucleotide
uaagcacuggaucaccuag

SEQ ID NO: 2821992 - RNA, 19 nt, Artificial Sequence
  Description of Artificial Sequence: Synthetic oligonucleotide
acucauuuaagaaacaacu

SEQ ID NO: 2821993 - RNA, 19 nt, Artificial Sequence
  Description of Artificial Sequence: Synthetic oligonucleotide
aggacauuaaauucaguca

SEQ ID NO: 2821994 - RNA, 19 nt, Artificial Sequence
  Description of Artificial Sequence: Synthetic oligonucleotide
ucaagugggauuuaagaau

SEQ ID NO: 2821995 - RNA, 19 nt, Artificial Sequence
  Description of Artificial Sequence: Synthetic oligonucleotide
agcuuuaaauuguauggag

SEQ ID NO: 2821996 - RNA, 19 nt, Artificial Sequence
  Description of Artificial Sequence: Synthetic oligonucleotide
augggaggacauuaaauuc

SEQ ID NO: 2821997 - RNA, 19 nt, Artificial Sequence
  Description of Artificial Sequence: Synthetic oligonucleotide
uuuuguaaccuauguaggu

SEQ ID NO: 2821998 - RNA, 19 nt, Artificial Sequence
  Description of Artificial Sequence: Synthetic oligonucleotide
accauaagaaccccggaag

SEQ ID NO: 2821999 - RNA, 19 nt, Artificial Sequence
  Description of Artificial Sequence: Synthetic oligonucleotide
agaauuguucaauggcuuc

SEQ ID NO: 2822000 - RNA, 19 nt, Artificial Sequence
  Description of Artificial Sequence: Synthetic oligonucleotide
uuguauggagucaagugcu

SEQ ID NO: 2822001 - RNA, 19 nt, Artificial Sequence
  Description of Artificial Sequence: Synthetic oligonucleotide
cauauugaacucauuuaag

SEQ ID NO: 2822002 - RNA, 19 nt, Artificial Sequence
  Description of Artificial Sequence: Synthetic oligonucleotide
ugggaggacauuaaauuca

SEQ ID NO: 2822003 - RNA, 19 nt, Artificial Sequence
  Description of Artificial Sequence: Synthetic oligonucleotide
uguucaauggcuucucaga

SEQ ID NO: 2822004 - RNA, 19 nt, Artificial Sequence
  Description of Artificial Sequence: Synthetic oligonucleotide
uccaaaucugauuccauga

SEQ ID NO: 2822005 - RNA, 19 nt, Artificial Sequence
  Description of Artificial Sequence: Synthetic oligonucleotide
aaagcauccacuagacuag

SEQ ID NO: 2822006 - RNA, 19 nt, Artificial Sequence
  Description of Artificial Sequence: Synthetic oligonucleotide
acaggagaaccccagaaug

SEQ ID NO: 2822007 - RNA, 19 nt, Artificial Sequence
  Description of Artificial Sequence: Synthetic oligonucleotide
aucugauuccaugauuucc

SEQ ID NO: 2822008 - RNA, 19 nt, Artificial Sequence
  Description of Artificial Sequence: Synthetic oligonucleotide
aacaaaaggcaaccauaag

SEQ ID NO: 2822009 - RNA, 19 nt, Artificial Sequence
  Description of Artificial Sequence: Synthetic oligonucleotide
cauucuuugguuauggaga

SEQ ID NO: 2822010 - RNA, 19 nt, Artificial Sequence
  Description of Artificial Sequence: Synthetic oligonucleotide
ucuuugacaacauucccuc

SEQ ID NO: 2822011 - RNA, 19 nt, Artificial Sequence
  Description of Artificial Sequence: Synthetic oligonucleotide
ucuuugguuauggagagac

SEQ ID NO: 2822012 - RNA, 19 nt, Artificial Sequence
  Description of Artificial Sequence: Synthetic oligonucleotide
cagaauguggccaaugcug

SEQ ID NO: 2822013 - RNA, 19 nt, Artificial Sequence
  Description of Artificial Sequence: Synthetic oligonucleotide
auuuaagaaacaacuauga

SEQ ID NO: 2822014 - RNA, 19 nt, Artificial Sequence
  Description of Artificial Sequence: Synthetic oligonucleotide
uuaagacaaagcauccacu

SEQ ID NO: 2822015 - RNA, 19 nt, Artificial Sequence
  Description of Artificial Sequence: Synthetic oligonucleotide
ugggucuuugacaacauuc

SEQ ID NO: 2822016 - RNA, 19 nt, Artificial Sequence
  Description of Artificial Sequence: Synthetic oligonucleotide
uuugguuauggagagacaa

SEQ ID NO: 2822017 - RNA, 19 nt, Artificial Sequence
  Description of Artificial Sequence: Synthetic oligonucleotide
uuaaauuguauggagucaa

SEQ ID NO: 2822018 - RNA, 19 nt, Artificial Sequence
  Description of Artificial Sequence: Synthetic oligonucleotide
aagaaacaacuaugagaac

SEQ ID NO: 2822019 - RNA, 19 nt, Artificial Sequence
  Description of Artificial Sequence: Synthetic oligonucleotide
uuauggagagacaagugua

SEQ ID NO: 2822020 - RNA, 19 nt, Artificial Sequence
  Description of Artificial Sequence: Synthetic oligonucleotide
agacaaagcauccacuaga

SEQ ID NO: 2822021 - RNA, 19 nt, Artificial Sequence
  Description of Artificial Sequence: Synthetic oligonucleotide
uucuaaguuaacuccaaau

SEQ ID NO: 2822022 - RNA, 19 nt, Artificial Sequence
  Description of Artificial Sequence: Synthetic oligonucleotide
uuuaaauuguauggaguca

SEQ ID NO: 2822023 - RNA, 19 nt, Artificial Sequence
  Description of Artificial Sequence: Synthetic oligonucleotide
aaaucugauuccaugauuu

SEQ ID NO: 2822024 - RNA, 19 nt, Artificial Sequence
  Description of Artificial Sequence: Synthetic oligonucleotide
acuaugagaacaaaaggca

SEQ ID NO: 2822025 - RNA, 19 nt, Artificial Sequence
  Description of Artificial Sequence: Synthetic oligonucleotide
augauuuccaugaacagga

SEQ ID NO: 2822026 - RNA, 19 nt, Artificial Sequence
  Description of Artificial Sequence: Synthetic oligonucleotide
gaacauucuuugguuaugg

SEQ ID NO: 2822027 - RNA, 19 nt, Artificial Sequence
  Description of Artificial Sequence: Synthetic oligonucleotide
aauuguucaauggcuucuc

SEQ ID NO: 2822028 - RNA, 19 nt, Artificial Sequence
  Description of Artificial Sequence: Synthetic oligonucleotide
agacagaacauucuuuggu

SEQ ID NO: 2822029 - RNA, 19 nt, Artificial Sequence
  Description of Artificial Sequence: Synthetic oligonucleotide
cauucuuauguuuaagaca

SEQ ID NO: 2822030 - RNA, 19 nt, Artificial Sequence
  Description of Artificial Sequence: Synthetic oligonucleotide
caaaaggcaaccauaagaa

SEQ ID NO: 2822031 - RNA, 19 nt, Artificial Sequence
  Description of Artificial Sequence: Synthetic oligonucleotide
aaauuguauggagucaagu

SEQ ID NO: 2822032 - RNA, 19 nt, Artificial Sequence
  Description of Artificial Sequence: Synthetic oligonucleotide
aaccauaagaaccccggaa

SEQ ID NO: 2822033 - RNA, 19 nt, Artificial Sequence
  Description of Artificial Sequence: Synthetic oligonucleotide
auaagaaccccggaagggg

SEQ ID NO: 2822034 - RNA, 19 nt, Artificial Sequence
  Description of Artificial Sequence: Synthetic oligonucleotide
uauguagguauugacaaau

SEQ ID NO: 2822035 - RNA, 19 nt, Artificial Sequence
  Description of Artificial Sequence: Synthetic oligonucleotide
uucucagauauucgcagga

SEQ ID NO: 2822036 - RNA, 19 nt, Artificial Sequence
  Description of Artificial Sequence: Synthetic oligonucleotide
aaggaccaguuaucaacac

SEQ ID NO: 2822037 - RNA, 19 nt, Artificial Sequence
  Description of Artificial Sequence: Synthetic oligonucleotide
caaagcauccacuagacua

SEQ ID NO: 2822038 - RNA, 19 nt, Artificial Sequence
  Description of Artificial Sequence: Synthetic oligonucleotide
ggacauuaaauucagucac

SEQ ID NO: 2822039 - RNA, 19 nt, Artificial Sequence
  Description of Artificial Sequence: Synthetic oligonucleotide
ugugaaaggaccaguuauc

SEQ ID NO: 2822040 - RNA, 19 nt, Artificial Sequence
  Description of Artificial Sequence: Synthetic oligonucleotide
augugaaaggaccaguuau

SEQ ID NO: 2822041 - RNA, 19 nt, Artificial Sequence
  Description of Artificial Sequence: Synthetic oligonucleotide
uugguuauggagagacaag

SEQ ID NO: 2822042 - RNA, 19 nt, Artificial Sequence
  Description of Artificial Sequence: Synthetic oligonucleotide
acuagacuagcuuuaaauu

SEQ ID NO: 2822043 - RNA, 19 nt, Artificial Sequence
  Description of Artificial Sequence: Synthetic oligonucleotide
agugcuaucauuuguuaua

SEQ ID NO: 2822044 - RNA, 19 nt, Artificial Sequence
  Description of Artificial Sequence: Synthetic oligonucleotide
aacacauucuuauguuuaa

SEQ ID NO: 2822045 - RNA, 19 nt, Artificial Sequence
  Description of Artificial Sequence: Synthetic oligonucleotide
auuuccaugaacaggagaa

SEQ ID NO: 2822046 - RNA, 19 nt, Artificial Sequence
  Description of Artificial Sequence: Synthetic oligonucleotide
uggaucaccuagaaucuca

SEQ ID NO: 2822047 - RNA, 19 nt, Artificial Sequence
  Description of Artificial Sequence: Synthetic oligonucleotide
aaugugaaaggaccaguua

SEQ ID NO: 2822048 - RNA, 19 nt, Artificial Sequence
  Description of Artificial Sequence: Synthetic oligonucleotide
uuuucuaaguuaacuccaa

SEQ ID NO: 2822049 - RNA, 19 nt, Artificial Sequence
  Description of Artificial Sequence: Synthetic oligonucleotide
ucaagugcuaucauuuguu

SEQ ID NO: 2822050 - RNA, 19 nt, Artificial Sequence
  Description of Artificial Sequence: Synthetic oligonucleotide
aauucagucacaagacaga

SEQ ID NO: 2822051 - RNA, 19 nt, Artificial Sequence
  Description of Artificial Sequence: Synthetic oligonucleotide
cuacauaagcacuggauca

SEQ ID NO: 2822052 - RNA, 19 nt, Artificial Sequence
  Description of Artificial Sequence: Synthetic oligonucleotide
agcauuuucuaaguuaacu

SEQ ID NO: 2822053 - RNA, 19 nt, Artificial Sequence
  Description of Artificial Sequence: Synthetic oligonucleotide
ugacaaauagaaugugaaa

SEQ ID NO: 2822054 - RNA, 19 nt, Artificial Sequence
  Description of Artificial Sequence: Synthetic oligonucleotide
ugagcaacacauucuuaug

SEQ ID NO: 2822055 - RNA, 19 nt, Artificial Sequence
  Description of Artificial Sequence: Synthetic oligonucleotide
aacaacuaugagaacaaaa

SEQ ID NO: 2822056 - RNA, 19 nt, Artificial Sequence
  Description of Artificial Sequence: Synthetic oligonucleotide
uugacaacauucccucggc

SEQ ID NO: 2822057 - RNA, 19 nt, Artificial Sequence
  Description of Artificial Sequence: Synthetic oligonucleotide
gagacaaguguaaacuggc

SEQ ID NO: 2822058 - RNA, 19 nt, Artificial Sequence
  Description of Artificial Sequence: Synthetic oligonucleotide
aacaggagaaccccagaau

SEQ ID NO: 2822059 - RNA, 19 nt, Artificial Sequence
  Description of Artificial Sequence: Synthetic oligonucleotide
uauugacaaauagaaugug

SEQ ID NO: 2822060 - RNA, 19 nt, Artificial Sequence
  Description of Artificial Sequence: Synthetic oligonucleotide
cauaagaaccccggaaggg

SEQ ID NO: 2822061 - RNA, 19 nt, Artificial Sequence
  Description of Artificial Sequence: Synthetic oligonucleotide
ucacaagacagaacauucu

SEQ ID NO: 2822062 - RNA, 19 nt, Artificial Sequence
  Description of Artificial Sequence: Synthetic oligonucleotide
aagugcuaucauuuguuau

SEQ ID NO: 2822063 - RNA, 19 nt, Artificial Sequence
  Description of Artificial Sequence: Synthetic oligonucleotide
cauuaaauucagucacaag

SEQ ID NO: 2822064 - RNA, 19 nt, Artificial Sequence
  Description of Artificial Sequence: Synthetic oligonucleotide
agaaccccagaauguggcc

SEQ ID NO: 2822065 - RNA, 19 nt, Artificial Sequence
  Description of Artificial Sequence: Synthetic oligonucleotide
cuucucagauauucgcagg

SEQ ID NO: 2822066 - RNA, 19 nt, Artificial Sequence
  Description of Artificial Sequence: Synthetic oligonucleotide
cucagauauucgcaggagc

SEQ ID NO: 2822067 - RNA, 19 nt, Artificial Sequence
  Description of Artificial Sequence: Synthetic oligonucleotide
aaguuaacuccaaaucuga

SEQ ID NO: 2822068 - RNA, 19 nt, Artificial Sequence
  Description of Artificial Sequence: Synthetic oligonucleotide
uagaaugugaaaggaccag

SEQ ID NO: 2822069 - RNA, 19 nt, Artificial Sequence
  Description of Artificial Sequence: Synthetic oligonucleotide
uuguaaccuauguagguau

SEQ ID NO: 2822070 - RNA, 19 nt, Artificial Sequence
  Description of Artificial Sequence: Synthetic oligonucleotide
ugguuauggagagacaagu

SEQ ID NO: 2822071 - RNA, 19 nt, Artificial Sequence
  Description of Artificial Sequence: Synthetic oligonucleotide
caccuagaaucucaagugg

SEQ ID NO: 2822072 - RNA, 19 nt, Artificial Sequence
  Description of Artificial Sequence: Synthetic oligonucleotide
cuaaguuaacuccaaaucu

SEQ ID NO: 2822073 - RNA, 19 nt, Artificial Sequence
  Description of Artificial Sequence: Synthetic oligonucleotide
uggcuucucagauauucgc

SEQ ID NO: 2822074 - RNA, 19 nt, Artificial Sequence
  Description of Artificial Sequence: Synthetic oligonucleotide
aacuccaaaucugauucca

SEQ ID NO: 2822075 - RNA, 19 nt, Artificial Sequence
  Description of Artificial Sequence: Synthetic oligonucleotide
auuuucuaaguuaacucca

SEQ ID NO: 2822076 - RNA, 19 nt, Artificial Sequence
  Description of Artificial Sequence: Synthetic oligonucleotide
uggagagacaaguguaaac

SEQ ID NO: 2822077 - RNA, 19 nt, Artificial Sequence
  Description of Artificial Sequence: Synthetic oligonucleotide
auugacaaauagaauguga

SEQ ID NO: 2822078 - RNA, 19 nt, Artificial Sequence
  Description of Artificial Sequence: Synthetic oligonucleotide
aacauucuuugguuaugga

SEQ ID NO: 2822079 - RNA, 19 nt, Artificial Sequence
  Description of Artificial Sequence: Synthetic oligonucleotide
acauaagcacuggaucacc

SEQ ID NO: 2822080 - RNA, 19 nt, Artificial Sequence
  Description of Artificial Sequence: Synthetic oligonucleotide
accauauugaacucauuua

SEQ ID NO: 2822081 - RNA, 19 nt, Artificial Sequence
  Description of Artificial Sequence: Synthetic oligonucleotide
guagguauugacaaauaga

SEQ ID NO: 2822082 - RNA, 19 nt, Artificial Sequence
  Description of Artificial Sequence: Synthetic oligonucleotide
aaauuuuauagcacagguu

SEQ ID NO: 2822083 - RNA, 19 nt, Artificial Sequence
  Description of Artificial Sequence: Synthetic oligonucleotide
gggauuuaagaauuguuca

SEQ ID NO: 2822084 - RNA, 19 nt, Artificial Sequence
  Description of Artificial Sequence: Synthetic oligonucleotide
uuuguaaccuauguaggua

SEQ ID NO: 2822085 - RNA, 19 nt, Artificial Sequence
  Description of Artificial Sequence: Synthetic oligonucleotide
cacauucuuauguuuaaga

SEQ ID NO: 2822086 - RNA, 19 nt, Artificial Sequence
  Description of Artificial Sequence: Synthetic oligonucleotide
accuagaaucucaaguggg

SEQ ID NO: 2822087 - RNA, 19 nt, Artificial Sequence
  Description of Artificial Sequence: Synthetic oligonucleotide
uuucuaaguuaacuccaaa

SEQ ID NO: 2822088 - RNA, 19 nt, Artificial Sequence
  Description of Artificial Sequence: Synthetic oligonucleotide
gauuuccaugaacaggaga

SEQ ID NO: 2822089 - RNA, 19 nt, Artificial Sequence
  Description of Artificial Sequence: Synthetic oligonucleotide
guuauggagagacaagugu

SEQ ID NO: 2822090 - RNA, 19 nt, Artificial Sequence
  Description of Artificial Sequence: Synthetic oligonucleotide
aagcauccacuagacuagc

SEQ ID NO: 2822091 - RNA, 19 nt, Artificial Sequence
  Description of Artificial Sequence: Synthetic oligonucleotide
caaauagaaugugaaagga

SEQ ID NO: 2822092 - RNA, 19 nt, Artificial Sequence
  Description of Artificial Sequence: Synthetic oligonucleotide
aguguaaacuggcagcauu

SEQ ID NO: 2822093 - RNA, 19 nt, Artificial Sequence
  Description of Artificial Sequence: Synthetic oligonucleotide
ugauuuccaugaacaggag

SEQ ID NO: 2822094 - RNA, 19 nt, Artificial Sequence
  Description of Artificial Sequence: Synthetic oligonucleotide
gacaaagcauccacuagac

SEQ ID NO: 2822095 - RNA, 19 nt, Artificial Sequence
  Description of Artificial Sequence: Synthetic oligonucleotide
uuccauuuccaugggagga

SEQ ID NO: 2822096 - RNA, 19 nt, Artificial Sequence
  Description of Artificial Sequence: Synthetic oligonucleotide
cuuugacaacauucccucg

SEQ ID NO: 2822097 - RNA, 19 nt, Artificial Sequence
  Description of Artificial Sequence: Synthetic oligonucleotide
cucaagugggauuuaagaa

SEQ ID NO: 2822098 - RNA, 19 nt, Artificial Sequence
  Description of Artificial Sequence: Synthetic oligonucleotide
gcauuuucuaaguuaacuc

SEQ ID NO: 2822099 - RNA, 19 nt, Artificial Sequence
  Description of Artificial Sequence: Synthetic oligonucleotide
uauggagucaagugcuauc

SEQ ID NO: 2822100 - RNA, 19 nt, Artificial Sequence
  Description of Artificial Sequence: Synthetic oligonucleotide
ugaacaggagaaccccaga

SEQ ID NO: 2822101 - RNA, 19 nt, Artificial Sequence
  Description of Artificial Sequence: Synthetic oligonucleotide
aagaauuguucaauggcuu

SEQ ID NO: 2822102 - RNA, 19 nt, Artificial Sequence
  Description of Artificial Sequence: Synthetic oligonucleotide
uaacuccaaaucugauucc

SEQ ID NO: 2822103 - RNA, 19 nt, Artificial Sequence
  Description of Artificial Sequence: Synthetic oligonucleotide
ugauuccaugauuuccaug

SEQ ID NO: 2822104 - RNA, 19 nt, Artificial Sequence
  Description of Artificial Sequence: Synthetic oligonucleotide
ggaccaguuaucaacacug

SEQ ID NO: 2822105 - RNA, 19 nt, Artificial Sequence
  Description of Artificial Sequence: Synthetic oligonucleotide
auagaaugugaaaggacca

SEQ ID NO: 2822106 - RNA, 19 nt, Artificial Sequence
  Description of Artificial Sequence: Synthetic oligonucleotide
uacauaagcacuggaucac

SEQ ID NO: 2822107 - RNA, 19 nt, Artificial Sequence
  Description of Artificial Sequence: Synthetic oligonucleotide
uucagucacaagacagaac

SEQ ID NO: 2822108 - RNA, 19 nt, Artificial Sequence
  Description of Artificial Sequence: Synthetic oligonucleotide
gcuacauaagcacuggauc

SEQ ID NO: 2822109 - RNA, 19 nt, Artificial Sequence
  Description of Artificial Sequence: Synthetic oligonucleotide
gaucaccuagaaucucaag

SEQ ID NO: 2822110 - RNA, 19 nt, Artificial Sequence
  Description of Artificial Sequence: Synthetic oligonucleotide
gucacaagacagaacauuc

SEQ ID NO: 2822111 - RNA, 19 nt, Artificial Sequence
  Description of Artificial Sequence: Synthetic oligonucleotide
ucucagauauucgcaggag

SEQ ID NO: 2822112 - RNA, 19 nt, Artificial Sequence
  Description of Artificial Sequence: Synthetic oligonucleotide
ugaaaggaccaguuaucaa

SEQ ID NO: 2822113 - RNA, 19 nt, Artificial Sequence
  Description of Artificial Sequence: Synthetic oligonucleotide
agaacaaaaggcaaccaua

SEQ ID NO: 2822114 - RNA, 19 nt, Artificial Sequence
  Description of Artificial Sequence: Synthetic oligonucleotide
acaaaccauauugaacuca

SEQ ID NO: 2822115 - RNA, 19 nt, Artificial Sequence
  Description of Artificial Sequence: Synthetic oligonucleotide
cuaugagaacaaaaggcaa

SEQ ID NO: 2822116 - RNA, 19 nt, Artificial Sequence
  Description of Artificial Sequence: Synthetic oligonucleotide
agcaacacauucuuauguu

SEQ ID NO: 2822117 - RNA, 19 nt, Artificial Sequence
  Description of Artificial Sequence: Synthetic oligonucleotide
gcuucucagauauucgcag

SEQ ID NO: 2822118 - RNA, 19 nt, Artificial Sequence
  Description of Artificial Sequence: Synthetic oligonucleotide
acagaacauucuuugguua

SEQ ID NO: 2822119 - RNA, 19 nt, Artificial Sequence
  Description of Artificial Sequence: Synthetic oligonucleotide
ugagaacaaaaggcaacca

SEQ ID NO: 2822120 - RNA, 19 nt, Artificial Sequence
  Description of Artificial Sequence: Synthetic oligonucleotide
auggagucaagugcuauca

SEQ ID NO: 2822121 - RNA, 19 nt, Artificial Sequence
  Description of Artificial Sequence: Synthetic oligonucleotide
accuauguagguauugaca

SEQ ID NO: 2822122 - RNA, 19 nt, Artificial Sequence
  Description of Artificial Sequence: Synthetic oligonucleotide
gaacaggagaaccccagaa

SEQ ID NO: 2822123 - RNA, 19 nt, Artificial Sequence
  Description of Artificial Sequence: Synthetic oligonucleotide
guaaccuauguagguauug

SEQ ID NO: 2822124 - RNA, 19 nt, Artificial Sequence
  Description of Artificial Sequence: Synthetic oligonucleotide
cauucccucggcuacauaa

SEQ ID NO: 2822125 - RNA, 19 nt, Artificial Sequence
  Description of Artificial Sequence: Synthetic oligonucleotide
uuuccaugggaggacauua

SEQ ID NO: 2822126 - RNA, 19 nt, Artificial Sequence
  Description of Artificial Sequence: Synthetic oligonucleotide
uauucgcaggagcauuuuc

SEQ ID NO: 2822127 - RNA, 19 nt, Artificial Sequence
  Description of Artificial Sequence: Synthetic oligonucleotide
cacaacaaaccauauugaa

SEQ ID NO: 2822128 - RNA, 19 nt, Artificial Sequence
  Description of Artificial Sequence: Synthetic oligonucleotide
agugggauuuaagaauugu

SEQ ID NO: 2822129 - RNA, 19 nt, Artificial Sequence
  Description of Artificial Sequence: Synthetic oligonucleotide
uguaaacuggcagcauucu

SEQ ID NO: 2822130 - RNA, 19 nt, Artificial Sequence
  Description of Artificial Sequence: Synthetic oligonucleotide
ucggcuacauaagcacugg

SEQ ID NO: 2822131 - RNA, 19 nt, Artificial Sequence
  Description of Artificial Sequence: Synthetic oligonucleotide
guauugacaaauagaaugu

SEQ ID NO: 2822132 - RNA, 19 nt, Artificial Sequence
  Description of Artificial Sequence: Synthetic oligonucleotide
ucccucggcuacauaagca

SEQ ID NO: 2822133 - RNA, 19 nt, Artificial Sequence
  Description of Artificial Sequence: Synthetic oligonucleotide
cuaucauuuguuauaaauu

SEQ ID NO: 2822134 - RNA, 19 nt, Artificial Sequence
  Description of Artificial Sequence: Synthetic oligonucleotide
uccaugggaggacauuaaa

SEQ ID NO: 2822135 - RNA, 19 nt, Artificial Sequence
  Description of Artificial Sequence: Synthetic oligonucleotide
gacaacauucccucggcua

SEQ ID NO: 2822136 - RNA, 19 nt, Artificial Sequence
  Description of Artificial Sequence: Synthetic oligonucleotide
gauuuaagaauuguucaau

SEQ ID NO: 2822137 - RNA, 19 nt, Artificial Sequence
  Description of Artificial Sequence: Synthetic oligonucleotide
gagcaacacauucuuaugu

SEQ ID NO: 2822138 - RNA, 19 nt, Artificial Sequence
  Description of Artificial Sequence: Synthetic oligonucleotide
aaucucaagugggauuuaa

SEQ ID NO: 2822139 - RNA, 19 nt, Artificial Sequence
  Description of Artificial Sequence: Synthetic oligonucleotide
gcaaccauaagaaccccgg

SEQ ID NO: 2822140 - RNA, 19 nt, Artificial Sequence
  Description of Artificial Sequence: Synthetic oligonucleotide
gacauuaaauucagucaca

SEQ ID NO: 2822141 - RNA, 19 nt, Artificial Sequence
  Description of Artificial Sequence: Synthetic oligonucleotide
agaacauucuuugguuaug

SEQ ID NO: 2822142 - RNA, 19 nt, Artificial Sequence
  Description of Artificial Sequence: Synthetic oligonucleotide
auucgcaggagcauuuucu

SEQ ID NO: 2822143 - RNA, 19 nt, Artificial Sequence
  Description of Artificial Sequence: Synthetic oligonucleotide
auucagucacaagacagaa

SEQ ID NO: 2822144 - RNA, 19 nt, Artificial Sequence
  Description of Artificial Sequence: Synthetic oligonucleotide
gagaacaaaaggcaaccau

SEQ ID NO: 2822145 - RNA, 19 nt, Artificial Sequence
  Description of Artificial Sequence: Synthetic oligonucleotide
aggagaaccccagaaugug

SEQ ID NO: 2822146 - RNA, 19 nt, Artificial Sequence
  Description of Artificial Sequence: Synthetic oligonucleotide
ugacaacauucccucggcu

SEQ ID NO: 2822147 - RNA, 19 nt, Artificial Sequence
  Description of Artificial Sequence: Synthetic oligonucleotide
agucacaagacagaacauu

SEQ ID NO: 2822148 - RNA, 19 nt, Artificial Sequence
  Description of Artificial Sequence: Synthetic oligonucleotide
augaacaggagaaccccag

SEQ ID NO: 2822149 - RNA, 19 nt, Artificial Sequence
  Description of Artificial Sequence: Synthetic oligonucleotide
caacacauucuuauguuua

SEQ ID NO: 2822150 - RNA, 19 nt, Artificial Sequence
  Description of Artificial Sequence: Synthetic oligonucleotide
acaaagcauccacuagacu

SEQ ID NO: 2822151 - RNA, 19 nt, Artificial Sequence
  Description of Artificial Sequence: Synthetic oligonucleotide
aaccccagaauguggccaa

SEQ ID NO: 2822152 - RNA, 19 nt, Artificial Sequence
  Description of Artificial Sequence: Synthetic oligonucleotide
uucgcaggagcauuuucua

SEQ ID NO: 2822153 - RNA, 19 nt, Artificial Sequence
  Description of Artificial Sequence: Synthetic oligonucleotide
uguauggagucaagugcua

SEQ ID NO: 2822154 - RNA, 19 nt, Artificial Sequence
  Description of Artificial Sequence: Synthetic oligonucleotide
ggucuuugacaacauuccc

SEQ ID NO: 2822155 - RNA, 19 nt, Artificial Sequence
  Description of Artificial Sequence: Synthetic oligonucleotide
ccauaagaaccccggaagg

SEQ ID NO: 2822156 - RNA, 19 nt, Artificial Sequence
  Description of Artificial Sequence: Synthetic oligonucleotide
gugaaaggaccaguuauca

SEQ ID NO: 2822157 - RNA, 19 nt, Artificial Sequence
  Description of Artificial Sequence: Synthetic oligonucleotide
aaacaacuaugagaacaaa

SEQ ID NO: 2822158 - RNA, 19 nt, Artificial Sequence
  Description of Artificial Sequence: Synthetic oligonucleotide
uguaaccuauguagguauu

SEQ ID NO: 2822159 - RNA, 19 nt, Artificial Sequence
  Description of Artificial Sequence: Synthetic oligonucleotide
gggucuuugacaacauucc

SEQ ID NO: 2822160 - RNA, 19 nt, Artificial Sequence
  Description of Artificial Sequence: Synthetic oligonucleotide
ccuauguagguauugacaa

SEQ ID NO: 2822161 - RNA, 19 nt, Artificial Sequence
  Description of Artificial Sequence: Synthetic oligonucleotide
uccauuuccaugggaggac

SEQ ID NO: 2822162 - RNA, 19 nt, Artificial Sequence
  Description of Artificial Sequence: Synthetic oligonucleotide
gcuaucauuuguuauaaau

SEQ ID NO: 2822163 - RNA, 19 nt, Artificial Sequence
  Description of Artificial Sequence: Synthetic oligonucleotide
agcacuggaucaccuagaa

SEQ ID NO: 2822164 - RNA, 19 nt, Artificial Sequence
  Description of Artificial Sequence: Synthetic oligonucleotide
aagugggauuuaagaauug

SEQ ID NO: 2822165 - RNA, 19 nt, Artificial Sequence
  Description of Artificial Sequence: Synthetic oligonucleotide
cacuagacuagcuuuaaau

SEQ ID NO: 2822166 - RNA, 19 nt, Artificial Sequence
  Description of Artificial Sequence: Synthetic oligonucleotide
aucauuuguuauaaauuuu

SEQ ID NO: 2822167 - RNA, 19 nt, Artificial Sequence
  Description of Artificial Sequence: Synthetic oligonucleotide
caugggaggacauuaaauu

SEQ ID NO: 2822168 - RNA, 19 nt, Artificial Sequence
  Description of Artificial Sequence: Synthetic oligonucleotide
uuccaugggaggacauuaa

SEQ ID NO: 2822169 - RNA, 19 nt, Artificial Sequence
  Description of Artificial Sequence: Synthetic oligonucleotide
auaagcacuggaucaccua

SEQ ID NO: 2822170 - RNA, 19 nt, Artificial Sequence
  Description of Artificial Sequence: Synthetic oligonucleotide
accaguuaucaacacugua

SEQ ID NO: 2822171 - RNA, 19 nt, Artificial Sequence
  Description of Artificial Sequence: Synthetic oligonucleotide
guuaacuccaaaucugauu

SEQ ID NO: 2822172 - RNA, 19 nt, Artificial Sequence
  Description of Artificial Sequence: Synthetic oligonucleotide
aucucaagugggauuuaag

SEQ ID NO: 2822173 - RNA, 19 nt, Artificial Sequence
  Description of Artificial Sequence: Synthetic oligonucleotide
guggccaaugcugagcaac

SEQ ID NO: 2822174 - RNA, 19 nt, Artificial Sequence
  Description of Artificial Sequence: Synthetic oligonucleotide
guguaaacuggcagcauuc

SEQ ID NO: 2822175 - RNA, 19 nt, Artificial Sequence
  Description of Artificial Sequence: Synthetic oligonucleotide
ggagcauuuucuaaguuaa

SEQ ID NO: 2822176 - RNA, 19 nt, Artificial Sequence
  Description of Artificial Sequence: Synthetic oligonucleotide
ccauauugaacucauuuaa

SEQ ID NO: 2822177 - RNA, 19 nt, Artificial Sequence
  Description of Artificial Sequence: Synthetic oligonucleotide
caugaacaggagaacccca

SEQ ID NO: 2822178 - RNA, 19 nt, Artificial Sequence
  Description of Artificial Sequence: Synthetic oligonucleotide
aagggguggggagaaccug

SEQ ID NO: 2822179 - RNA, 19 nt, Artificial Sequence
  Description of Artificial Sequence: Synthetic oligonucleotide
agaaccccggaaggggugg

SEQ ID NO: 2822180 - RNA, 19 nt, Artificial Sequence
  Description of Artificial Sequence: Synthetic oligonucleotide
uucuuauguuuaagacaaa

SEQ ID NO: 2822181 - RNA, 19 nt, Artificial Sequence
  Description of Artificial Sequence: Synthetic oligonucleotide
gaaccccagaauguggcca

SEQ ID NO: 2822182 - RNA, 19 nt, Artificial Sequence
  Description of Artificial Sequence: Synthetic oligonucleotide
aggcaaccauaagaacccc

SEQ ID NO: 2822183 - RNA, 19 nt, Artificial Sequence
  Description of Artificial Sequence: Synthetic oligonucleotide
agauauucgcaggagcauu

SEQ ID NO: 2822184 - RNA, 19 nt, Artificial Sequence
  Description of Artificial Sequence: Synthetic oligonucleotide
gguuauggagagacaagug

SEQ ID NO: 2822185 - RNA, 19 nt, Artificial Sequence
  Description of Artificial Sequence: Synthetic oligonucleotide
auucccucggcuacauaag

SEQ ID NO: 2822186 - RNA, 19 nt, Artificial Sequence
  Description of Artificial Sequence: Synthetic oligonucleotide
ggagagacaaguguaaacu

SEQ ID NO: 2822187 - RNA, 19 nt, Artificial Sequence
  Description of Artificial Sequence: Synthetic oligonucleotide
auuuuauagcacagguuuu

SEQ ID NO: 2822188 - RNA, 19 nt, Artificial Sequence
  Description of Artificial Sequence: Synthetic oligonucleotide
auuccaugauuuccaugaa

SEQ ID NO: 2822189 - RNA, 19 nt, Artificial Sequence
  Description of Artificial Sequence: Synthetic oligonucleotide
gucaagugcuaucauuugu

SEQ ID NO: 2822190 - RNA, 19 nt, Artificial Sequence
  Description of Artificial Sequence: Synthetic oligonucleotide
ucgcaggagcauuuucuaa

SEQ ID NO: 2822191 - RNA, 19 nt, Artificial Sequence
  Description of Artificial Sequence: Synthetic oligonucleotide
gggaggacauuaaauucag

SEQ ID NO: 2822192 - RNA, 19 nt, Artificial Sequence
  Description of Artificial Sequence: Synthetic oligonucleotide
ggagaaccccagaaugugg

SEQ ID NO: 2822193 - RNA, 19 nt, Artificial Sequence
  Description of Artificial Sequence: Synthetic oligonucleotide
caaaccauauugaacucau

SEQ ID NO: 2822194 - RNA, 19 nt, Artificial Sequence
  Description of Artificial Sequence: Synthetic oligonucleotide
uggagucaagugcuaucau

SEQ ID NO: 2822195 - RNA, 19 nt, Artificial Sequence
  Description of Artificial Sequence: Synthetic oligonucleotide
aagcacuggaucaccuaga

SEQ ID NO: 2822196 - RNA, 19 nt, Artificial Sequence
  Description of Artificial Sequence: Synthetic oligonucleotide
uccacuagacuagcuuuaa

SEQ ID NO: 2822197 - RNA, 19 nt, Artificial Sequence
  Description of Artificial Sequence: Synthetic oligonucleotide
ugcuaucauuuguuauaaa

SEQ ID NO: 2822198 - RNA, 19 nt, Artificial Sequence
  Description of Artificial Sequence: Synthetic oligonucleotide
cuauguagguauugacaaa

SEQ ID NO: 2822199 - RNA, 19 nt, Artificial Sequence
  Description of Artificial Sequence: Synthetic oligonucleotide
gucuuugacaacauucccu

SEQ ID NO: 2822200 - RNA, 19 nt, Artificial Sequence
  Description of Artificial Sequence: Synthetic oligonucleotide
aguuaacuccaaaucugau

SEQ ID NO: 2822201 - RNA, 19 nt, Artificial Sequence
  Description of Artificial Sequence: Synthetic oligonucleotide
aaguguaaacuggcagcau

SEQ ID NO: 2822202 - RNA, 19 nt, Artificial Sequence
  Description of Artificial Sequence: Synthetic oligonucleotide
cccagaauguggccaaugc

SEQ ID NO: 2822203 - RNA, 19 nt, Artificial Sequence
  Description of Artificial Sequence: Synthetic oligonucleotide
cgcaggagcauuuucuaag

SEQ ID NO: 2822204 - RNA, 19 nt, Artificial Sequence
  Description of Artificial Sequence: Synthetic oligonucleotide
aacauucccucggcuacau

SEQ ID NO: 2822205 - RNA, 19 nt, Artificial Sequence
  Description of Artificial Sequence: Synthetic oligonucleotide
gugcuaucauuuguuauaa

SEQ ID NO: 2822206 - RNA, 19 nt, Artificial Sequence
  Description of Artificial Sequence: Synthetic oligonucleotide
caagugcuaucauuuguua

SEQ ID NO: 2822207 - RNA, 19 nt, Artificial Sequence
  Description of Artificial Sequence: Synthetic oligonucleotide
ccaugaacaggagaacccc

SEQ ID NO: 2822208 - RNA, 19 nt, Artificial Sequence
  Description of Artificial Sequence: Synthetic oligonucleotide
cuuugguuauggagagaca

SEQ ID NO: 2822209 - RNA, 19 nt, Artificial Sequence
  Description of Artificial Sequence: Synthetic oligonucleotide
gagcauuuucuaaguuaac

SEQ ID NO: 2822210 - RNA, 19 nt, Artificial Sequence
  Description of Artificial Sequence: Synthetic oligonucleotide
auggagagacaaguguaaa

SEQ ID NO: 2822211 - RNA, 19 nt, Artificial Sequence
  Description of Artificial Sequence: Synthetic oligonucleotide
guggggagaaccugggucu

SEQ ID NO: 2822212 - RNA, 19 nt, Artificial Sequence
  Description of Artificial Sequence: Synthetic oligonucleotide
uucuuugguuauggagaga

SEQ ID NO: 2822213 - RNA, 19 nt, Artificial Sequence
  Description of Artificial Sequence: Synthetic oligonucleotide
uggcagcauucucaacccu

SEQ ID NO: 2822214 - RNA, 19 nt, Artificial Sequence
  Description of Artificial Sequence: Synthetic oligonucleotide
gaaugugaaaggaccaguu

SEQ ID NO: 2822215 - RNA, 19 nt, Artificial Sequence
  Description of Artificial Sequence: Synthetic oligonucleotide
aaccccggaaggggugggg

SEQ ID NO: 2822216 - RNA, 19 nt, Artificial Sequence
  Description of Artificial Sequence: Synthetic oligonucleotide
ccuagaaucucaaguggga

SEQ ID NO: 2822217 - RNA, 19 nt, Artificial Sequence
  Description of Artificial Sequence: Synthetic oligonucleotide
cccucggcuacauaagcac

SEQ ID NO: 2822218 - RNA, 19 nt, Artificial Sequence
  Description of Artificial Sequence: Synthetic oligonucleotide
cauaagcacuggaucaccu

SEQ ID NO: 2822219 - RNA, 19 nt, Artificial Sequence
  Description of Artificial Sequence: Synthetic oligonucleotide
caaccauaagaaccccgga

SEQ ID NO: 2822220 - RNA, 19 nt, Artificial Sequence
  Description of Artificial Sequence: Synthetic oligonucleotide
aaaccauauugaacucauu

SEQ ID NO: 2822221 - RNA, 19 nt, Artificial Sequence
  Description of Artificial Sequence: Synthetic oligonucleotide
auuuccaugggaggacauu

SEQ ID NO: 2822222 - RNA, 19 nt, Artificial Sequence
  Description of Artificial Sequence: Synthetic oligonucleotide
cauccacuagacuagcuuu

SEQ ID NO: 2822223 - RNA, 19 nt, Artificial Sequence
  Description of Artificial Sequence: Synthetic oligonucleotide
cagaacauucuuugguuau

SEQ ID NO: 2822224 - RNA, 19 nt, Artificial Sequence
  Description of Artificial Sequence: Synthetic oligonucleotide
caggagaaccccagaaugu

SEQ ID NO: 2822225 - RNA, 19 nt, Artificial Sequence
  Description of Artificial Sequence: Synthetic oligonucleotide
gccaaugcugagcaacaca

SEQ ID NO: 2822226 - RNA, 19 nt, Artificial Sequence
  Description of Artificial Sequence: Synthetic oligonucleotide
gauauucgcaggagcauuu

SEQ ID NO: 2822227 - RNA, 19 nt, Artificial Sequence
  Description of Artificial Sequence: Synthetic oligonucleotide
caaaucugauuccaugauu

SEQ ID NO: 2822228 - RNA, 19 nt, Artificial Sequence
  Description of Artificial Sequence: Synthetic oligonucleotide
agacuagcuuuaaauugua

SEQ ID NO: 2822229 - RNA, 19 nt, Artificial Sequence
  Description of Artificial Sequence: Synthetic oligonucleotide
gcacaacaaaccauauuga

SEQ ID NO: 2822230 - RNA, 19 nt, Artificial Sequence
  Description of Artificial Sequence: Synthetic oligonucleotide
gaaccccggaagggguggg

SEQ ID NO: 2822231 - RNA, 19 nt, Artificial Sequence
  Description of Artificial Sequence: Synthetic oligonucleotide
auccacuagacuagcuuua

SEQ ID NO: 2822232 - RNA, 19 nt, Artificial Sequence
  Description of Artificial Sequence: Synthetic oligonucleotide
ggcuucucagauauucgca

SEQ ID NO: 2822233 - RNA, 19 nt, Artificial Sequence
  Description of Artificial Sequence: Synthetic oligonucleotide
auauucgcaggagcauuuu

SEQ ID NO: 2822234 - RNA, 19 nt, Artificial Sequence
  Description of Artificial Sequence: Synthetic oligonucleotide
cuagaaucucaagugggau

SEQ ID NO: 2822235 - RNA, 19 nt, Artificial Sequence
  Description of Artificial Sequence: Synthetic oligonucleotide
agcauccacuagacuagcu

SEQ ID NO: 2822236 - RNA, 19 nt, Artificial Sequence
  Description of Artificial Sequence: Synthetic oligonucleotide
ccaaugcugagcaacacau

SEQ ID NO: 2822237 - RNA, 19 nt, Artificial Sequence
  Description of Artificial Sequence: Synthetic oligonucleotide
gugggauuuaagaauuguu

SEQ ID NO: 2822238 - RNA, 19 nt, Artificial Sequence
  Description of Artificial Sequence: Synthetic oligonucleotide
ggagucaagugcuaucauu

SEQ ID NO: 2822239 - RNA, 19 nt, Artificial Sequence
  Description of Artificial Sequence: Synthetic oligonucleotide
gaccaguuaucaacacugu

SEQ ID NO: 2822240 - RNA, 19 nt, Artificial Sequence
  Description of Artificial Sequence: Synthetic oligonucleotide
gcaggagcauuuucuaagu

SEQ ID NO: 2822241 - RNA, 19 nt, Artificial Sequence
  Description of Artificial Sequence: Synthetic oligonucleotide
gacuagcuuuaaauuguau

SEQ ID NO: 2822242 - RNA, 19 nt, Artificial Sequence
  Description of Artificial Sequence: Synthetic oligonucleotide
gcaacacauucuuauguuu

SEQ ID NO: 2822243 - RNA, 19 nt, Artificial Sequence
  Description of Artificial Sequence: Synthetic oligonucleotide
guauggagucaagugcuau

SEQ ID NO: 2822244 - RNA, 19 nt, Artificial Sequence
  Description of Artificial Sequence: Synthetic oligonucleotide
cugauuccaugauuuccau

SEQ ID NO: 2822245 - RNA, 19 nt, Artificial Sequence
  Description of Artificial Sequence: Synthetic oligonucleotide
ggcuacauaagcacuggau

SEQ ID NO: 2822246 - RNA, 19 nt, Artificial Sequence
  Description of Artificial Sequence: Synthetic oligonucleotide
ggaucaccuagaaucucaa

SEQ ID NO: 2822247 - RNA, 19 nt, Artificial Sequence
  Description of Artificial Sequence: Synthetic oligonucleotide
ggagaaccugggucuuuga

SEQ ID NO: 2822248 - RNA, 19 nt, Artificial Sequence
  Description of Artificial Sequence: Synthetic oligonucleotide
cagucacaagacagaacau

SEQ ID NO: 2822249 - RNA, 19 nt, Artificial Sequence
  Description of Artificial Sequence: Synthetic oligonucleotide
ccaugggaggacauuaaau

SEQ ID NO: 2822250 - RNA, 19 nt, Artificial Sequence
  Description of Artificial Sequence: Synthetic oligonucleotide
cauuuccaugggaggacau

SEQ ID NO: 2822251 - RNA, 19 nt, Artificial Sequence
  Description of Artificial Sequence: Synthetic oligonucleotide
ggccaaugcugagcaacac

SEQ ID NO: 2822252 - RNA, 19 nt, Artificial Sequence
  Description of Artificial Sequence: Synthetic oligonucleotide
ccagaauguggccaaugcu

SEQ ID NO: 2822253 - RNA, 19 nt, Artificial Sequence
  Description of Artificial Sequence: Synthetic oligonucleotide
ccccagaauguggccaaug

SEQ ID NO: 2822254 - RNA, 19 nt, Artificial Sequence
  Description of Artificial Sequence: Synthetic oligonucleotide
ccacuagacuagcuuuaaa

SEQ ID NO: 2822255 - RNA, 19 nt, Artificial Sequence
  Description of Artificial Sequence: Synthetic oligonucleotide
accccagaauguggccaau

SEQ ID NO: 2822256 - RNA, 19 nt, Artificial Sequence
  Description of Artificial Sequence: Synthetic oligonucleotide
cugggucuuugacaacauu

SEQ ID NO: 2822257 - RNA, 19 nt, Artificial Sequence
  Description of Artificial Sequence: Synthetic oligonucleotide
ccucggcuacauaagcacu

SEQ ID NO: 2822258 - RNA, 19 nt, Artificial Sequence
  Description of Artificial Sequence: Synthetic oligonucleotide
ggaggacauuaaauucagu

SEQ ID NO: 2822259 - RNA, 19 nt, Artificial Sequence
  Description of Artificial Sequence: Synthetic oligonucleotide
gcacuggaucaccuagaau

SEQ ID NO: 2822260 - RNA, 19 nt, Artificial Sequence
  Description of Artificial Sequence: Synthetic oligonucleotide
cagcauucucaacccuuuu

SEQ ID NO: 2822261 - RNA, 19 nt, Artificial Sequence
  Description of Artificial Sequence: Synthetic oligonucleotide
ccugggucuuugacaacau

SEQ ID NO: 2822262 - RNA, 19 nt, Artificial Sequence
  Description of Artificial Sequence: Synthetic oligonucleotide
ccggaagggguggggagaa

SEQ ID NO: 2822263 - RNA, 19 nt, Artificial Sequence
  Description of Artificial Sequence: Synthetic oligonucleotide
cggaagggguggggagaac

SEQ ID NO: 2822264 - RNA, 19 nt, Artificial Sequence
  Description of Artificial Sequence: Synthetic oligonucleotide
aaaguauaaacaaacauag

SEQ ID NO: 2822265 - RNA, 19 nt, Artificial Sequence
  Description of Artificial Sequence: Synthetic oligonucleotide
aguauaaacaaacauagga

SEQ ID NO: 2822266 - RNA, 19 nt, Artificial Sequence
  Description of Artificial Sequence: Synthetic oligonucleotide
aaacauaggaaaugcacac

SEQ ID NO: 2822267 - RNA, 19 nt, Artificial Sequence
  Description of Artificial Sequence: Synthetic oligonucleotide
uauaccaccaugcacaugc

SEQ ID NO: 2822268 - RNA, 19 nt, Artificial Sequence
  Description of Artificial Sequence: Synthetic oligonucleotide
gaaggaaaugcccagauag

SEQ ID NO: 2822269 - RNA, 19 nt, Artificial Sequence
  Description of Artificial Sequence: Synthetic oligonucleotide
aaaguuccuaaacauaauc

SEQ ID NO: 2822270 - RNA, 19 nt, Artificial Sequence
  Description of Artificial Sequence: Synthetic oligonucleotide
auagaaauggcucaucuuc

SEQ ID NO: 2822271 - RNA, 19 nt, Artificial Sequence
  Description of Artificial Sequence: Synthetic oligonucleotide
gaaugcaugauagaaaugg

SEQ ID NO: 2822272 - RNA, 19 nt, Artificial Sequence
  Description of Artificial Sequence: Synthetic oligonucleotide
uuaaucuucaaauuucugc

SEQ ID NO: 2822273 - RNA, 19 nt, Artificial Sequence
  Description of Artificial Sequence: Synthetic oligonucleotide
uaaacauaauccaacaaca

SEQ ID NO: 2822274 - RNA, 19 nt, Artificial Sequence
  Description of Artificial Sequence: Synthetic oligonucleotide
aaacaaacauaggaaaugc

SEQ ID NO: 2822275 - RNA, 19 nt, Artificial Sequence
  Description of Artificial Sequence: Synthetic oligonucleotide
aaaaguaugaaaacaaugu

SEQ ID NO: 2822276 - RNA, 19 nt, Artificial Sequence
  Description of Artificial Sequence: Synthetic oligonucleotide
aguaugaaaacaauguagc

SEQ ID NO: 2822277 - RNA, 19 nt, Artificial Sequence
  Description of Artificial Sequence: Synthetic oligonucleotide
uguaaucaaaguauaaaca

SEQ ID NO: 2822278 - RNA, 19 nt, Artificial Sequence
  Description of Artificial Sequence: Synthetic oligonucleotide
augaaaacaauguagcaag

SEQ ID NO: 2822279 - RNA, 19 nt, Artificial Sequence
  Description of Artificial Sequence: Synthetic oligonucleotide
ugagaagacacuagaaggg

SEQ ID NO: 2822280 - RNA, 19 nt, Artificial Sequence
  Description of Artificial Sequence: Synthetic oligonucleotide
uugucagucauuuaaguag

SEQ ID NO: 2822281 - RNA, 19 nt, Artificial Sequence
  Description of Artificial Sequence: Synthetic oligonucleotide
auuuaaguaggaaacauac

SEQ ID NO: 2822282 - RNA, 19 nt, Artificial Sequence
  Description of Artificial Sequence: Synthetic oligonucleotide
uaaucuucaaauuucugcc

SEQ ID NO: 2822283 - RNA, 19 nt, Artificial Sequence
  Description of Artificial Sequence: Synthetic oligonucleotide
ucugacaaaacuugaaaag

SEQ ID NO: 2822284 - RNA, 19 nt, Artificial Sequence
  Description of Artificial Sequence: Synthetic oligonucleotide
acaacaaaaguaugaaaac

SEQ ID NO: 2822285 - RNA, 19 nt, Artificial Sequence
  Description of Artificial Sequence: Synthetic oligonucleotide
uuaaguaggaaacauacuu

SEQ ID NO: 2822286 - RNA, 19 nt, Artificial Sequence
  Description of Artificial Sequence: Synthetic oligonucleotide
aaguuccuaaacauaaucc

SEQ ID NO: 2822287 - RNA, 19 nt, Artificial Sequence
  Description of Artificial Sequence: Synthetic oligonucleotide
uaauccaacaacaaaagua

SEQ ID NO: 2822288 - RNA, 19 nt, Artificial Sequence
  Description of Artificial Sequence: Synthetic oligonucleotide
aaaacuugaaaagccgccc

SEQ ID NO: 2822289 - RNA, 19 nt, Artificial Sequence
  Description of Artificial Sequence: Synthetic oligonucleotide
auaguuaucugacaaaacu

SEQ ID NO: 2822290 - RNA, 19 nt, Artificial Sequence
  Description of Artificial Sequence: Synthetic oligonucleotide
aaacuugaaaagccgcccc

SEQ ID NO: 2822291 - RNA, 19 nt, Artificial Sequence
  Description of Artificial Sequence: Synthetic oligonucleotide
uauaaacaaacauaggaaa

SEQ ID NO: 2822292 - RNA, 19 nt, Artificial Sequence
  Description of Artificial Sequence: Synthetic oligonucleotide
ucuaaagacaaaacaaaac

SEQ ID NO: 2822293 - RNA, 19 nt, Artificial Sequence
  Description of Artificial Sequence: Synthetic oligonucleotide
cuaaacauaauccaacaac

SEQ ID NO: 2822294 - RNA, 19 nt, Artificial Sequence
  Description of Artificial Sequence: Synthetic oligonucleotide
ucaaauuucugccaugaca

SEQ ID NO: 2822295 - RNA, 19 nt, Artificial Sequence
  Description of Artificial Sequence: Synthetic oligonucleotide
uuuggaauggcacagucac

SEQ ID NO: 2822296 - RNA, 19 nt, Artificial Sequence
  Description of Artificial Sequence: Synthetic oligonucleotide
aauuucugccaugacaucg

SEQ ID NO: 2822297 - RNA, 19 nt, Artificial Sequence
  Description of Artificial Sequence: Synthetic oligonucleotide
auacuuaagacaucugaac

SEQ ID NO: 2822298 - RNA, 19 nt, Artificial Sequence
  Description of Artificial Sequence: Synthetic oligonucleotide
cugagaagacacuagaagg

SEQ ID NO: 2822299 - RNA, 19 nt, Artificial Sequence
  Description of Artificial Sequence: Synthetic oligonucleotide
uacuuaagacaucugaacc

SEQ ID NO: 2822300 - RNA, 19 nt, Artificial Sequence
  Description of Artificial Sequence: Synthetic oligonucleotide
aacaacaaaaguaugaaaa

SEQ ID NO: 2822301 - RNA, 19 nt, Artificial Sequence
  Description of Artificial Sequence: Synthetic oligonucleotide
uuguaaucaaaguauaaac

SEQ ID NO: 2822302 - RNA, 19 nt, Artificial Sequence
  Description of Artificial Sequence: Synthetic oligonucleotide
ucaaaguauaaacaaacau

SEQ ID NO: 2822303 - RNA, 19 nt, Artificial Sequence
  Description of Artificial Sequence: Synthetic oligonucleotide
ugacaaaacuugaaaagcc

SEQ ID NO: 2822304 - RNA, 19 nt, Artificial Sequence
  Description of Artificial Sequence: Synthetic oligonucleotide
cuucucaugaaacacuugg

SEQ ID NO: 2822305 - RNA, 19 nt, Artificial Sequence
  Description of Artificial Sequence: Synthetic oligonucleotide
cuaaagacaaaacaaaaca

SEQ ID NO: 2822306 - RNA, 19 nt, Artificial Sequence
  Description of Artificial Sequence: Synthetic oligonucleotide
ggaaugacaguuuugaugc

SEQ ID NO: 2822307 - RNA, 19 nt, Artificial Sequence
  Description of Artificial Sequence: Synthetic oligonucleotide
cuuggguucauuuucauuc

SEQ ID NO: 2822308 - RNA, 19 nt, Artificial Sequence
  Description of Artificial Sequence: Synthetic oligonucleotide
uuucuaaagacaaaacaaa

SEQ ID NO: 2822309 - RNA, 19 nt, Artificial Sequence
  Description of Artificial Sequence: Synthetic oligonucleotide
ugucagucauuuaaguagg

SEQ ID NO: 2822310 - RNA, 19 nt, Artificial Sequence
  Description of Artificial Sequence: Synthetic oligonucleotide
uccaacaacaaaaguauga

SEQ ID NO: 2822311 - RNA, 19 nt, Artificial Sequence
  Description of Artificial Sequence: Synthetic oligonucleotide
caaaaguaugaaaacaaug

SEQ ID NO: 2822312 - RNA, 19 nt, Artificial Sequence
  Description of Artificial Sequence: Synthetic oligonucleotide
uuuuaaucuucaaauuucu

SEQ ID NO: 2822313 - RNA, 19 nt, Artificial Sequence
  Description of Artificial Sequence: Synthetic oligonucleotide
acaaacauaggaaaugcac

SEQ ID NO: 2822314 - RNA, 19 nt, Artificial Sequence
  Description of Artificial Sequence: Synthetic oligonucleotide
aaaacaauguagcaaggua

SEQ ID NO: 2822315 - RNA, 19 nt, Artificial Sequence
  Description of Artificial Sequence: Synthetic oligonucleotide
uaaacaaacauaggaaaug

SEQ ID NO: 2822316 - RNA, 19 nt, Artificial Sequence
  Description of Artificial Sequence: Synthetic oligonucleotide
aacauaauccaacaacaaa

SEQ ID NO: 2822317 - RNA, 19 nt, Artificial Sequence
  Description of Artificial Sequence: Synthetic oligonucleotide
acaguuuugaugcacuuug

SEQ ID NO: 2822318 - RNA, 19 nt, Artificial Sequence
  Description of Artificial Sequence: Synthetic oligonucleotide
aaugacaguuuugaugcac

SEQ ID NO: 2822319 - RNA, 19 nt, Artificial Sequence
  Description of Artificial Sequence: Synthetic oligonucleotide
cauaauccaacaacaaaag

SEQ ID NO: 2822320 - RNA, 19 nt, Artificial Sequence
  Description of Artificial Sequence: Synthetic oligonucleotide
aaaguaugaaaacaaugua

SEQ ID NO: 2822321 - RNA, 19 nt, Artificial Sequence
  Description of Artificial Sequence: Synthetic oligonucleotide
aaugcaugauagaaauggc

SEQ ID NO: 2822322 - RNA, 19 nt, Artificial Sequence
  Description of Artificial Sequence: Synthetic oligonucleotide
aaaugcacacuugucaguc

SEQ ID NO: 2822323 - RNA, 19 nt, Artificial Sequence
  Description of Artificial Sequence: Synthetic oligonucleotide
uucacaaguuuucuaaaga

SEQ ID NO: 2822324 - RNA, 19 nt, Artificial Sequence
  Description of Artificial Sequence: Synthetic oligonucleotide
aauccaacaacaaaaguau

SEQ ID NO: 2822325 - RNA, 19 nt, Artificial Sequence
  Description of Artificial Sequence: Synthetic oligonucleotide
aaguaggaaacauacuuaa

SEQ ID NO: 2822326 - RNA, 19 nt, Artificial Sequence
  Description of Artificial Sequence: Synthetic oligonucleotide
guuuucuaaagacaaaaca

SEQ ID NO: 2822327 - RNA, 19 nt, Artificial Sequence
  Description of Artificial Sequence: Synthetic oligonucleotide
aaauaguuaucugacaaaa

SEQ ID NO: 2822328 - RNA, 19 nt, Artificial Sequence
  Description of Artificial Sequence: Synthetic oligonucleotide
uuuucauucacaaguuuuc

SEQ ID NO: 2822329 - RNA, 19 nt, Artificial Sequence
  Description of Artificial Sequence: Synthetic oligonucleotide
aauaguuaucugacaaaac

SEQ ID NO: 2822330 - RNA, 19 nt, Artificial Sequence
  Description of Artificial Sequence: Synthetic oligonucleotide
aguuccuaaacauaaucca

SEQ ID NO: 2822331 - RNA, 19 nt, Artificial Sequence
  Description of Artificial Sequence: Synthetic oligonucleotide
guaggaaacauacuuaaga

SEQ ID NO: 2822332 - RNA, 19 nt, Artificial Sequence
  Description of Artificial Sequence: Synthetic oligonucleotide
gacaaaacuugaaaagccg

SEQ ID NO: 2822333 - RNA, 19 nt, Artificial Sequence
  Description of Artificial Sequence: Synthetic oligonucleotide
uaugaaaacaauguagcaa

SEQ ID NO: 2822334 - RNA, 19 nt, Artificial Sequence
  Description of Artificial Sequence: Synthetic oligonucleotide
ggcacagucacguaaacgg

SEQ ID NO: 2822335 - RNA, 19 nt, Artificial Sequence
  Description of Artificial Sequence: Synthetic oligonucleotide
ugcaugauagaaauggcuc

SEQ ID NO: 2822336 - RNA, 19 nt, Artificial Sequence
  Description of Artificial Sequence: Synthetic oligonucleotide
aacaaaaguaugaaaacaa

SEQ ID NO: 2822337 - RNA, 19 nt, Artificial Sequence
  Description of Artificial Sequence: Synthetic oligonucleotide
cacuagaagggaaugacag

SEQ ID NO: 2822338 - RNA, 19 nt, Artificial Sequence
  Description of Artificial Sequence: Synthetic oligonucleotide
uuuguaaucaaaguauaaa

SEQ ID NO: 2822339 - RNA, 19 nt, Artificial Sequence
  Description of Artificial Sequence: Synthetic oligonucleotide
ucacagaagaaggaaaugc

SEQ ID NO: 2822340 - RNA, 19 nt, Artificial Sequence
  Description of Artificial Sequence: Synthetic oligonucleotide
ucauucacaaguuuucuaa

SEQ ID NO: 2822341 - RNA, 19 nt, Artificial Sequence
  Description of Artificial Sequence: Synthetic oligonucleotide
uucucaugaaacacuuggg

SEQ ID NO: 2822342 - RNA, 19 nt, Artificial Sequence
  Description of Artificial Sequence: Synthetic oligonucleotide
ugauagaaauggcucaucu

SEQ ID NO: 2822343 - RNA, 19 nt, Artificial Sequence
  Description of Artificial Sequence: Synthetic oligonucleotide
ucacaaguuuucuaaagac

SEQ ID NO: 2822344 - RNA, 19 nt, Artificial Sequence
  Description of Artificial Sequence: Synthetic oligonucleotide
auucacaaguuuucuaaag

SEQ ID NO: 2822345 - RNA, 19 nt, Artificial Sequence
  Description of Artificial Sequence: Synthetic oligonucleotide
uuuaaucuucaaauuucug

SEQ ID NO: 2822346 - RNA, 19 nt, Artificial Sequence
  Description of Artificial Sequence: Synthetic oligonucleotide
acaaaacuugaaaagccgc

SEQ ID NO: 2822347 - RNA, 19 nt, Artificial Sequence
  Description of Artificial Sequence: Synthetic oligonucleotide
aagacaucugaaccuauga

SEQ ID NO: 2822348 - RNA, 19 nt, Artificial Sequence
  Description of Artificial Sequence: Synthetic oligonucleotide
caugacaucggaaugcaug

SEQ ID NO: 2822349 - RNA, 19 nt, Artificial Sequence
  Description of Artificial Sequence: Synthetic oligonucleotide
acuuaagacaucugaaccu

SEQ ID NO: 2822350 - RNA, 19 nt, Artificial Sequence
  Description of Artificial Sequence: Synthetic oligonucleotide
aacggcugcauacuuaaga

SEQ ID NO: 2822351 - RNA, 19 nt, Artificial Sequence
  Description of Artificial Sequence: Synthetic oligonucleotide
caaaacuugaaaagccgcc

SEQ ID NO: 2822352 - RNA, 19 nt, Artificial Sequence
  Description of Artificial Sequence: Synthetic oligonucleotide
acagaagaaggaaaugccc

SEQ ID NO: 2822353 - RNA, 19 nt, Artificial Sequence
  Description of Artificial Sequence: Synthetic oligonucleotide
caaggcucacagaagaagg

SEQ ID NO: 2822354 - RNA, 19 nt, Artificial Sequence
  Description of Artificial Sequence: Synthetic oligonucleotide
uuccuaaacauaauccaac

SEQ ID NO: 2822355 - RNA, 19 nt, Artificial Sequence
  Description of Artificial Sequence: Synthetic oligonucleotide
caaaguauaaacaaacaua

SEQ ID NO: 2822356 - RNA, 19 nt, Artificial Sequence
  Description of Artificial Sequence: Synthetic oligonucleotide
uaucugacaaaacuugaaa

SEQ ID NO: 2822357 - RNA, 19 nt, Artificial Sequence
  Description of Artificial Sequence: Synthetic oligonucleotide
uuuuguaaucaaaguauaa

SEQ ID NO: 2822358 - RNA, 19 nt, Artificial Sequence
  Description of Artificial Sequence: Synthetic oligonucleotide
aggaaaugcacacuuguca

SEQ ID NO: 2822359 - RNA, 19 nt, Artificial Sequence
  Description of Artificial Sequence: Synthetic oligonucleotide
aaucuucaaauuucugcca

SEQ ID NO: 2822360 - RNA, 19 nt, Artificial Sequence
  Description of Artificial Sequence: Synthetic oligonucleotide
acggcugcauacuuaagac

SEQ ID NO: 2822361 - RNA, 19 nt, Artificial Sequence
  Description of Artificial Sequence: Synthetic oligonucleotide
cugacaaaacuugaaaagc

SEQ ID NO: 2822362 - RNA, 19 nt, Artificial Sequence
  Description of Artificial Sequence: Synthetic oligonucleotide
auaggaaaugcacacuugu

SEQ ID NO: 2822363 - RNA, 19 nt, Artificial Sequence
  Description of Artificial Sequence: Synthetic oligonucleotide
uuuaaguaggaaacauacu

SEQ ID NO: 2822364 - RNA, 19 nt, Artificial Sequence
  Description of Artificial Sequence: Synthetic oligonucleotide
aagggaaugacaguuuuga

SEQ ID NO: 2822365 - RNA, 19 nt, Artificial Sequence
  Description of Artificial Sequence: Synthetic oligonucleotide
cacagaagaaggaaaugcc

SEQ ID NO: 2822366 - RNA, 19 nt, Artificial Sequence
  Description of Artificial Sequence: Synthetic oligonucleotide
aaacaauguagcaagguaa

SEQ ID NO: 2822367 - RNA, 19 nt, Artificial Sequence
  Description of Artificial Sequence: Synthetic oligonucleotide
ucugccaugacaucggaau

SEQ ID NO: 2822368 - RNA, 19 nt, Artificial Sequence
  Description of Artificial Sequence: Synthetic oligonucleotide
acauaauccaacaacaaaa

SEQ ID NO: 2822369 - RNA, 19 nt, Artificial Sequence
  Description of Artificial Sequence: Synthetic oligonucleotide
aaauuucugccaugacauc

SEQ ID NO: 2822370 - RNA, 19 nt, Artificial Sequence
  Description of Artificial Sequence: Synthetic oligonucleotide
uaaguaggaaacauacuua

SEQ ID NO: 2822371 - RNA, 19 nt, Artificial Sequence
  Description of Artificial Sequence: Synthetic oligonucleotide
aaguauaaacaaacauagg

SEQ ID NO: 2822372 - RNA, 19 nt, Artificial Sequence
  Description of Artificial Sequence: Synthetic oligonucleotide
uuaucugacaaaacuugaa

SEQ ID NO: 2822373 - RNA, 19 nt, Artificial Sequence
  Description of Artificial Sequence: Synthetic oligonucleotide
uccuaaacauaauccaaca

SEQ ID NO: 2822374 - RNA, 19 nt, Artificial Sequence
  Description of Artificial Sequence: Synthetic oligonucleotide
gaaaugcccagauagcaca

SEQ ID NO: 2822375 - RNA, 19 nt, Artificial Sequence
  Description of Artificial Sequence: Synthetic oligonucleotide
aguuaucugacaaaacuug

SEQ ID NO: 2822376 - RNA, 19 nt, Artificial Sequence
  Description of Artificial Sequence: Synthetic oligonucleotide
auguauaccaccaugcaca

SEQ ID NO: 2822377 - RNA, 19 nt, Artificial Sequence
  Description of Artificial Sequence: Synthetic oligonucleotide
gauagcacacaucugcaca

SEQ ID NO: 2822378 - RNA, 19 nt, Artificial Sequence
  Description of Artificial Sequence: Synthetic oligonucleotide
acuuuggaauggcacaguc

SEQ ID NO: 2822379 - RNA, 19 nt, Artificial Sequence
  Description of Artificial Sequence: Synthetic oligonucleotide
uaagacaucugaaccuaug

SEQ ID NO: 2822380 - RNA, 19 nt, Artificial Sequence
  Description of Artificial Sequence: Synthetic oligonucleotide
aaccugagaagacacuaga

SEQ ID NO: 2822381 - RNA, 19 nt, Artificial Sequence
  Description of Artificial Sequence: Synthetic oligonucleotide
aucugacaaaacuugaaaa

SEQ ID NO: 2822382 - RNA, 19 nt, Artificial Sequence
  Description of Artificial Sequence: Synthetic oligonucleotide
ugaaaagccgccccuuccc

SEQ ID NO: 2822383 - RNA, 19 nt, Artificial Sequence
  Description of Artificial Sequence: Synthetic oligonucleotide
uaguuaucugacaaaacuu

SEQ ID NO: 2822384 - RNA, 19 nt, Artificial Sequence
  Description of Artificial Sequence: Synthetic oligonucleotide
acacuugucagucauuuaa

SEQ ID NO: 2822385 - RNA, 19 nt, Artificial Sequence
  Description of Artificial Sequence: Synthetic oligonucleotide
caaacauaggaaaugcaca

SEQ ID NO: 2822386 - RNA, 19 nt, Artificial Sequence
  Description of Artificial Sequence: Synthetic oligonucleotide
agauagcacacaucugcac

SEQ ID NO: 2822387 - RNA, 19 nt, Artificial Sequence
  Description of Artificial Sequence: Synthetic oligonucleotide
aaauggcucaucuucucau

SEQ ID NO: 2822388 - RNA, 19 nt, Artificial Sequence
  Description of Artificial Sequence: Synthetic oligonucleotide
aagaaggaaaugcccagau

SEQ ID NO: 2822389 - RNA, 19 nt, Artificial Sequence
  Description of Artificial Sequence: Synthetic oligonucleotide
ugcacuuuggaauggcaca

SEQ ID NO: 2822390 - RNA, 19 nt, Artificial Sequence
  Description of Artificial Sequence: Synthetic oligonucleotide
uaaacggcugcauacuuaa

SEQ ID NO: 2822391 - RNA, 19 nt, Artificial Sequence
  Description of Artificial Sequence: Synthetic oligonucleotide
uagaaauggcucaucuucu

SEQ ID NO: 2822392 - RNA, 19 nt, Artificial Sequence
  Description of Artificial Sequence: Synthetic oligonucleotide
agaaauggcucaucuucuc

SEQ ID NO: 2822393 - RNA, 19 nt, Artificial Sequence
  Description of Artificial Sequence: Synthetic oligonucleotide
aaaaccugagaagacacua

SEQ ID NO: 2822394 - RNA, 19 nt, Artificial Sequence
  Description of Artificial Sequence: Synthetic oligonucleotide
acaaguuuucuaaagacaa

SEQ ID NO: 2822395 - RNA, 19 nt, Artificial Sequence
  Description of Artificial Sequence: Synthetic oligonucleotide
ggaaaugcacacuugucag

SEQ ID NO: 2822396 - RNA, 19 nt, Artificial Sequence
  Description of Artificial Sequence: Synthetic oligonucleotide
ucaucuucucaugaaacac

SEQ ID NO: 2822397 - RNA, 19 nt, Artificial Sequence
  Description of Artificial Sequence: Synthetic oligonucleotide
augacaucggaaugcauga

SEQ ID NO: 2822398 - RNA, 19 nt, Artificial Sequence
  Description of Artificial Sequence: Synthetic oligonucleotide
cauguauaccaccaugcac

SEQ ID NO: 2822399 - RNA, 19 nt, Artificial Sequence
  Description of Artificial Sequence: Synthetic oligonucleotide
uggaauggcacagucacgu

SEQ ID NO: 2822400 - RNA, 19 nt, Artificial Sequence
  Description of Artificial Sequence: Synthetic oligonucleotide
ucauuuaaguaggaaacau

SEQ ID NO: 2822401 - RNA, 19 nt, Artificial Sequence
  Description of Artificial Sequence: Synthetic oligonucleotide
gggaaugacaguuuugaug

SEQ ID NO: 2822402 - RNA, 19 nt, Artificial Sequence
  Description of Artificial Sequence: Synthetic oligonucleotide
aacuugaaaagccgccccu

SEQ ID NO: 2822403 - RNA, 19 nt, Artificial Sequence
  Description of Artificial Sequence: Synthetic oligonucleotide
cacacaucugcacagggug

SEQ ID NO: 2822404 - RNA, 19 nt, Artificial Sequence
  Description of Artificial Sequence: Synthetic oligonucleotide
aguuuugaugcacuuugga

SEQ ID NO: 2822405 - RNA, 19 nt, Artificial Sequence
  Description of Artificial Sequence: Synthetic oligonucleotide
uugaaaagccgccccuucc

SEQ ID NO: 2822406 - RNA, 19 nt, Artificial Sequence
  Description of Artificial Sequence: Synthetic oligonucleotide
aggaaacauacuuaagaaa

SEQ ID NO: 2822407 - RNA, 19 nt, Artificial Sequence
  Description of Artificial Sequence: Synthetic oligonucleotide
ggaaacauacuuaagaaaa

SEQ ID NO: 2822408 - RNA, 19 nt, Artificial Sequence
  Description of Artificial Sequence: Synthetic oligonucleotide
cacguaaacggcugcauac

SEQ ID NO: 2822409 - RNA, 19 nt, Artificial Sequence
  Description of Artificial Sequence: Synthetic oligonucleotide
acauaggaaaugcacacuu

SEQ ID NO: 2822410 - RNA, 19 nt, Artificial Sequence
  Description of Artificial Sequence: Synthetic oligonucleotide
acaucggaaugcaugauag

SEQ ID NO: 2822411 - RNA, 19 nt, Artificial Sequence
  Description of Artificial Sequence: Synthetic oligonucleotide
ucccauguauaccaccaug

SEQ ID NO: 2822412 - RNA, 19 nt, Artificial Sequence
  Description of Artificial Sequence: Synthetic oligonucleotide
guucauuuucauucacaag

SEQ ID NO: 2822413 - RNA, 19 nt, Artificial Sequence
  Description of Artificial Sequence: Synthetic oligonucleotide
acuugucagucauuuaagu

SEQ ID NO: 2822414 - RNA, 19 nt, Artificial Sequence
  Description of Artificial Sequence: Synthetic oligonucleotide
aagacacuagaagggaaug

SEQ ID NO: 2822415 - RNA, 19 nt, Artificial Sequence
  Description of Artificial Sequence: Synthetic oligonucleotide
aaacacuuggguucauuuu

SEQ ID NO: 2822416 - RNA, 19 nt, Artificial Sequence
  Description of Artificial Sequence: Synthetic oligonucleotide
guaugaaaacaauguagca

SEQ ID NO: 2822417 - RNA, 19 nt, Artificial Sequence
  Description of Artificial Sequence: Synthetic oligonucleotide
cauacuuaagacaucugaa

SEQ ID NO: 2822418 - RNA, 19 nt, Artificial Sequence
  Description of Artificial Sequence: Synthetic oligonucleotide
auaaacaaacauaggaaau

SEQ ID NO: 2822419 - RNA, 19 nt, Artificial Sequence
  Description of Artificial Sequence: Synthetic oligonucleotide
gacacuagaagggaaugac

SEQ ID NO: 2822420 - RNA, 19 nt, Artificial Sequence
  Description of Artificial Sequence: Synthetic oligonucleotide
aaaccugagaagacacuag

SEQ ID NO: 2822421 - RNA, 19 nt, Artificial Sequence
  Description of Artificial Sequence: Synthetic oligonucleotide
aacaauguagcaagguaaa

SEQ ID NO: 2822422 - RNA, 19 nt, Artificial Sequence
  Description of Artificial Sequence: Synthetic oligonucleotide
ucggaaugcaugauagaaa

SEQ ID NO: 2822423 - RNA, 19 nt, Artificial Sequence
  Description of Artificial Sequence: Synthetic oligonucleotide
aaacauaauccaacaacaa

SEQ ID NO: 2822424 - RNA, 19 nt, Artificial Sequence
  Description of Artificial Sequence: Synthetic oligonucleotide
aaaugcccagauagcacac

SEQ ID NO: 2822425 - RNA, 19 nt, Artificial Sequence
  Description of Artificial Sequence: Synthetic oligonucleotide
uuggaauggcacagucacg

SEQ ID NO: 2822426 - RNA, 19 nt, Artificial Sequence
  Description of Artificial Sequence: Synthetic oligonucleotide
cacaaguuuucuaaagaca

SEQ ID NO: 2822427 - RNA, 19 nt, Artificial Sequence
  Description of Artificial Sequence: Synthetic oligonucleotide
caaauuucugccaugacau

SEQ ID NO: 2822428 - RNA, 19 nt, Artificial Sequence
  Description of Artificial Sequence: Synthetic oligonucleotide
aacaaacauaggaaaugca

SEQ ID NO: 2822429 - RNA, 19 nt, Artificial Sequence
  Description of Artificial Sequence: Synthetic oligonucleotide
cagaagaaggaaaugccca

SEQ ID NO: 2822430 - RNA, 19 nt, Artificial Sequence
  Description of Artificial Sequence: Synthetic oligonucleotide
aacauaggaaaugcacacu

SEQ ID NO: 2822431 - RNA, 19 nt, Artificial Sequence
  Description of Artificial Sequence: Synthetic oligonucleotide
cacuugucagucauuuaag

SEQ ID NO: 2822432 - RNA, 19 nt, Artificial Sequence
  Description of Artificial Sequence: Synthetic oligonucleotide
aaugcacacuugucaguca

SEQ ID NO: 2822433 - RNA, 19 nt, Artificial Sequence
  Description of Artificial Sequence: Synthetic oligonucleotide
acaucugaaccuaugaaaa

SEQ ID NO: 2822434 - RNA, 19 nt, Artificial Sequence
  Description of Artificial Sequence: Synthetic oligonucleotide
cauaggaaaugcacacuug

SEQ ID NO: 2822435 - RNA, 19 nt, Artificial Sequence
  Description of Artificial Sequence: Synthetic oligonucleotide
caacaaaaguaugaaaaca

SEQ ID NO: 2822436 - RNA, 19 nt, Artificial Sequence
  Description of Artificial Sequence: Synthetic oligonucleotide
cagucauuuaaguaggaaa

SEQ ID NO: 2822437 - RNA, 19 nt, Artificial Sequence
  Description of Artificial Sequence: Synthetic oligonucleotide
uaggaaaugcacacuuguc

SEQ ID NO: 2822438 - RNA, 19 nt, Artificial Sequence
  Description of Artificial Sequence: Synthetic oligonucleotide
auuucugccaugacaucgg

SEQ ID NO: 2822439 - RNA, 19 nt, Artificial Sequence
  Description of Artificial Sequence: Synthetic oligonucleotide
auuuucauucacaaguuuu

SEQ ID NO: 2822440 - RNA, 19 nt, Artificial Sequence
  Description of Artificial Sequence: Synthetic oligonucleotide
uuggguucauuuucauuca

SEQ ID NO: 2822441 - RNA, 19 nt, Artificial Sequence
  Description of Artificial Sequence: Synthetic oligonucleotide
aucaaaguauaaacaaaca

SEQ ID NO: 2822442 - RNA, 19 nt, Artificial Sequence
  Description of Artificial Sequence: Synthetic oligonucleotide
gaaauggcucaucuucuca

SEQ ID NO: 2822443 - RNA, 19 nt, Artificial Sequence
  Description of Artificial Sequence: Synthetic oligonucleotide
aaagccgccccuucccaug

SEQ ID NO: 2822444 - RNA, 19 nt, Artificial Sequence
  Description of Artificial Sequence: Synthetic oligonucleotide
aucggaaugcaugauagaa

SEQ ID NO: 2822445 - RNA, 19 nt, Artificial Sequence
  Description of Artificial Sequence: Synthetic oligonucleotide
acuagaagggaaugacagu

SEQ ID NO: 2822446 - RNA, 19 nt, Artificial Sequence
  Description of Artificial Sequence: Synthetic oligonucleotide
ucuucucaugaaacacuug

SEQ ID NO: 2822447 - RNA, 19 nt, Artificial Sequence
  Description of Artificial Sequence: Synthetic oligonucleotide
uucauucacaaguuuucua

SEQ ID NO: 2822448 - RNA, 19 nt, Artificial Sequence
  Description of Artificial Sequence: Synthetic oligonucleotide
ugccaugacaucggaaugc

SEQ ID NO: 2822449 - RNA, 19 nt, Artificial Sequence
  Description of Artificial Sequence: Synthetic oligonucleotide
cagcaggccauccaggggc

SEQ ID NO: 2822450 - RNA, 19 nt, Artificial Sequence
  Description of Artificial Sequence: Synthetic oligonucleotide
uucaaauuucugccaugac

SEQ ID NO: 2822451 - RNA, 19 nt, Artificial Sequence
  Description of Artificial Sequence: Synthetic oligonucleotide
augcacuuuggaauggcac

SEQ ID NO: 2822452 - RNA, 19 nt, Artificial Sequence
  Description of Artificial Sequence: Synthetic oligonucleotide
ccugagaagacacuagaag

SEQ ID NO: 2822453 - RNA, 19 nt, Artificial Sequence
  Description of Artificial Sequence: Synthetic oligonucleotide
agacaucugaaccuaugaa

SEQ ID NO: 2822454 - RNA, 19 nt, Artificial Sequence
  Description of Artificial Sequence: Synthetic oligonucleotide
caguuuugaugcacuuugg

SEQ ID NO: 2822455 - RNA, 19 nt, Artificial Sequence
  Description of Artificial Sequence: Synthetic oligonucleotide
ugcauacuuaagacaucug

SEQ ID NO: 2822456 - RNA, 19 nt, Artificial Sequence
  Description of Artificial Sequence: Synthetic oligonucleotide
gcauacuuaagacaucuga

SEQ ID NO: 2822457 - RNA, 19 nt, Artificial Sequence
  Description of Artificial Sequence: Synthetic oligonucleotide
aaaaguuccuaaacauaau

SEQ ID NO: 2822458 - RNA, 19 nt, Artificial Sequence
  Description of Artificial Sequence: Synthetic oligonucleotide
agaagggaaugacaguuuu

SEQ ID NO: 2822459 - RNA, 19 nt, Artificial Sequence
  Description of Artificial Sequence: Synthetic oligonucleotide
aauggcacagucacguaaa

SEQ ID NO: 2822460 - RNA, 19 nt, Artificial Sequence
  Description of Artificial Sequence: Synthetic oligonucleotide
gaauggcacagucacguaa

SEQ ID NO: 2822461 - RNA, 19 nt, Artificial Sequence
  Description of Artificial Sequence: Synthetic oligonucleotide
uggcacagucacguaaacg

SEQ ID NO: 2822462 - RNA, 19 nt, Artificial Sequence
  Description of Artificial Sequence: Synthetic oligonucleotide
cucaucuucucaugaaaca

SEQ ID NO: 2822463 - RNA, 19 nt, Artificial Sequence
  Description of Artificial Sequence: Synthetic oligonucleotide
acaaaaguaugaaaacaau

SEQ ID NO: 2822464 - RNA, 19 nt, Artificial Sequence
  Description of Artificial Sequence: Synthetic oligonucleotide
cuucccauguauaccacca

SEQ ID NO: 2822465 - RNA, 19 nt, Artificial Sequence
  Description of Artificial Sequence: Synthetic oligonucleotide
uugaugcacuuuggaaugg

SEQ ID NO: 2822466 - RNA, 19 nt, Artificial Sequence
  Description of Artificial Sequence: Synthetic oligonucleotide
aguaggaaacauacuuaag

SEQ ID NO: 2822467 - RNA, 19 nt, Artificial Sequence
  Description of Artificial Sequence: Synthetic oligonucleotide
ucagucauuuaaguaggaa

SEQ ID NO: 2822468 - RNA, 19 nt, Artificial Sequence
  Description of Artificial Sequence: Synthetic oligonucleotide
uuaagacaucugaaccuau

SEQ ID NO: 2822469 - RNA, 19 nt, Artificial Sequence
  Description of Artificial Sequence: Synthetic oligonucleotide
augcacaugcccugcccac

SEQ ID NO: 2822470 - RNA, 19 nt, Artificial Sequence
  Description of Artificial Sequence: Synthetic oligonucleotide
auggcacagucacguaaac

SEQ ID NO: 2822471 - RNA, 19 nt, Artificial Sequence
  Description of Artificial Sequence: Synthetic oligonucleotide
accaugcacaugcccugcc

SEQ ID NO: 2822472 - RNA, 19 nt, Artificial Sequence
  Description of Artificial Sequence: Synthetic oligonucleotide
auggcucaucuucucauga

SEQ ID NO: 2822473 - RNA, 19 nt, Artificial Sequence
  Description of Artificial Sequence: Synthetic oligonucleotide
gagaagacacuagaaggga

SEQ ID NO: 2822474 - RNA, 19 nt, Artificial Sequence
  Description of Artificial Sequence: Synthetic oligonucleotide
guuaucugacaaaacuuga

SEQ ID NO: 2822475 - RNA, 19 nt, Artificial Sequence
  Description of Artificial Sequence: Synthetic oligonucleotide
cuugucagucauuuaagua

SEQ ID NO: 2822476 - RNA, 19 nt, Artificial Sequence
  Description of Artificial Sequence: Synthetic oligonucleotide
augcaugauagaaauggcu

SEQ ID NO: 2822477 - RNA, 19 nt, Artificial Sequence
  Description of Artificial Sequence: Synthetic oligonucleotide
uguauaccaccaugcacau

SEQ ID NO: 2822478 - RNA, 19 nt, Artificial Sequence
  Description of Artificial Sequence: Synthetic oligonucleotide
cccauguauaccaccaugc

SEQ ID NO: 2822479 - RNA, 19 nt, Artificial Sequence
  Description of Artificial Sequence: Synthetic oligonucleotide
augauagaaauggcucauc

SEQ ID NO: 2822480 - RNA, 19 nt, Artificial Sequence
  Description of Artificial Sequence: Synthetic oligonucleotide
acacaucugcacagggugc

SEQ ID NO: 2822481 - RNA, 19 nt, Artificial Sequence
  Description of Artificial Sequence: Synthetic oligonucleotide
gaagggaaugacaguuuug

SEQ ID NO: 2822482 - RNA, 19 nt, Artificial Sequence
  Description of Artificial Sequence: Synthetic oligonucleotide
uaccaccaugcacaugccc

SEQ ID NO: 2822483 - RNA, 19 nt, Artificial Sequence
  Description of Artificial Sequence: Synthetic oligonucleotide
cuucaaauuucugccauga

SEQ ID NO: 2822484 - RNA, 19 nt, Artificial Sequence
  Description of Artificial Sequence: Synthetic oligonucleotide
acaugcccugcccacagca

SEQ ID NO: 2822485 - RNA, 19 nt, Artificial Sequence
  Description of Artificial Sequence: Synthetic oligonucleotide
aaggcucacagaagaagga

SEQ ID NO: 2822486 - RNA, 19 nt, Artificial Sequence
  Description of Artificial Sequence: Synthetic oligonucleotide
gaaaacaauguagcaaggu

SEQ ID NO: 2822487 - RNA, 19 nt, Artificial Sequence
  Description of Artificial Sequence: Synthetic oligonucleotide
ucacguaaacggcugcaua

SEQ ID NO: 2822488 - RNA, 19 nt, Artificial Sequence
  Description of Artificial Sequence: Synthetic oligonucleotide
uggguucauuuucauucac

SEQ ID NO: 2822489 - RNA, 19 nt, Artificial Sequence
  Description of Artificial Sequence: Synthetic oligonucleotide
cuuuggaauggcacaguca

SEQ ID NO: 2822490 - RNA, 19 nt, Artificial Sequence
  Description of Artificial Sequence: Synthetic oligonucleotide
ugaugcacuuuggaauggc

SEQ ID NO: 2822491 - RNA, 19 nt, Artificial Sequence
  Description of Artificial Sequence: Synthetic oligonucleotide
aaaagccgccccuucccau

SEQ ID NO: 2822492 - RNA, 19 nt, Artificial Sequence
  Description of Artificial Sequence: Synthetic oligonucleotide
uuucugccaugacaucgga

SEQ ID NO: 2822493 - RNA, 19 nt, Artificial Sequence
  Description of Artificial Sequence: Synthetic oligonucleotide
uagaagggaaugacaguuu

SEQ ID NO: 2822494 - RNA, 19 nt, Artificial Sequence
  Description of Artificial Sequence: Synthetic oligonucleotide
ugcccugcccacagcacag

SEQ ID NO: 2822495 - RNA, 19 nt, Artificial Sequence
  Description of Artificial Sequence: Synthetic oligonucleotide
gacaucggaaugcaugaua

SEQ ID NO: 2822496 - RNA, 19 nt, Artificial Sequence
  Description of Artificial Sequence: Synthetic oligonucleotide
cuugaaaagccgccccuuc

SEQ ID NO: 2822497 - RNA, 19 nt, Artificial Sequence
  Description of Artificial Sequence: Synthetic oligonucleotide
uccaggggcugcaaggcuc

SEQ ID NO: 2822498 - RNA, 19 nt, Artificial Sequence
  Description of Artificial Sequence: Synthetic oligonucleotide
guuccuaaacauaauccaa

SEQ ID NO: 2822499 - RNA, 19 nt, Artificial Sequence
  Description of Artificial Sequence: Synthetic oligonucleotide
ggggcugcaaggcucacag

SEQ ID NO: 2822500 - RNA, 19 nt, Artificial Sequence
  Description of Artificial Sequence: Synthetic oligonucleotide
cucacagaagaaggaaaug

SEQ ID NO: 2822501 - RNA, 19 nt, Artificial Sequence
  Description of Artificial Sequence: Synthetic oligonucleotide
accaccaugcacaugcccu

SEQ ID NO: 2822502 - RNA, 19 nt, Artificial Sequence
  Description of Artificial Sequence: Synthetic oligonucleotide
gaaacacuuggguucauuu

SEQ ID NO: 2822503 - RNA, 19 nt, Artificial Sequence
  Description of Artificial Sequence: Synthetic oligonucleotide
cugcaaggcucacagaaga

SEQ ID NO: 2822504 - RNA, 19 nt, Artificial Sequence
  Description of Artificial Sequence: Synthetic oligonucleotide
caacaacaaaaguaugaaa

SEQ ID NO: 2822505 - RNA, 19 nt, Artificial Sequence
  Description of Artificial Sequence: Synthetic oligonucleotide
gcaugauagaaauggcuca

SEQ ID NO: 2822506 - RNA, 19 nt, Artificial Sequence
  Description of Artificial Sequence: Synthetic oligonucleotide
acagcacagcaggccaucc

SEQ ID NO: 2822507 - RNA, 19 nt, Artificial Sequence
  Description of Artificial Sequence: Synthetic oligonucleotide
aaugcccagauagcacaca

SEQ ID NO: 2822508 - RNA, 19 nt, Artificial Sequence
  Description of Artificial Sequence: Synthetic oligonucleotide
agacacuagaagggaauga

SEQ ID NO: 2822509 - RNA, 19 nt, Artificial Sequence
  Description of Artificial Sequence: Synthetic oligonucleotide
gaaaagccgccccuuccca

SEQ ID NO: 2822510 - RNA, 19 nt, Artificial Sequence
  Description of Artificial Sequence: Synthetic oligonucleotide
augacaguuuugaugcacu

SEQ ID NO: 2822511 - RNA, 19 nt, Artificial Sequence
  Description of Artificial Sequence: Synthetic oligonucleotide
agaaggaaaugcccagaua

SEQ ID NO: 2822512 - RNA, 19 nt, Artificial Sequence
  Description of Artificial Sequence: Synthetic oligonucleotide
cagauagcacacaucugca

SEQ ID NO: 2822513 - RNA, 19 nt, Artificial Sequence
  Description of Artificial Sequence: Synthetic oligonucleotide
cuuaagacaucugaaccua

SEQ ID NO: 2822514 - RNA, 19 nt, Artificial Sequence
  Description of Artificial Sequence: Synthetic oligonucleotide
acagucacguaaacggcug

SEQ ID NO: 2822515 - RNA, 19 nt, Artificial Sequence
  Description of Artificial Sequence: Synthetic oligonucleotide
cauucacaaguuuucuaaa

SEQ ID NO: 2822516 - RNA, 19 nt, Artificial Sequence
  Description of Artificial Sequence: Synthetic oligonucleotide
gaaaugcacacuugucagu

SEQ ID NO: 2822517 - RNA, 19 nt, Artificial Sequence
  Description of Artificial Sequence: Synthetic oligonucleotide
acuuggguucauuuucauu

SEQ ID NO: 2822518 - RNA, 19 nt, Artificial Sequence
  Description of Artificial Sequence: Synthetic oligonucleotide
ugacaguuuugaugcacuu

SEQ ID NO: 2822519 - RNA, 19 nt, Artificial Sequence
  Description of Artificial Sequence: Synthetic oligonucleotide
gauagaaauggcucaucuu

SEQ ID NO: 2822520 - RNA, 19 nt, Artificial Sequence
  Description of Artificial Sequence: Synthetic oligonucleotide
caaguuuucuaaagacaaa

SEQ ID NO: 2822521 - RNA, 19 nt, Artificial Sequence
  Description of Artificial Sequence: Synthetic oligonucleotide
augcccagauagcacacau

SEQ ID NO: 2822522 - RNA, 19 nt, Artificial Sequence
  Description of Artificial Sequence: Synthetic oligonucleotide
gaugcacuuuggaauggca

SEQ ID NO: 2822523 - RNA, 19 nt, Artificial Sequence
  Description of Artificial Sequence: Synthetic oligonucleotide
cugccaugacaucggaaug

SEQ ID NO: 2822524 - RNA, 19 nt, Artificial Sequence
  Description of Artificial Sequence: Synthetic oligonucleotide
acacuagaagggaaugaca

SEQ ID NO: 2822525 - RNA, 19 nt, Artificial Sequence
  Description of Artificial Sequence: Synthetic oligonucleotide
uucugccaugacaucggaa

SEQ ID NO: 2822526 - RNA, 19 nt, Artificial Sequence
  Description of Artificial Sequence: Synthetic oligonucleotide
gcaaggcucacagaagaag

SEQ ID NO: 2822527 - RNA, 19 nt, Artificial Sequence
  Description of Artificial Sequence: Synthetic oligonucleotide
gaaugacaguuuugaugca

SEQ ID NO: 2822528 - RNA, 19 nt, Artificial Sequence
  Description of Artificial Sequence: Synthetic oligonucleotide
uggcucaucuucucaugaa

SEQ ID NO: 2822529 - RNA, 19 nt, Artificial Sequence
  Description of Artificial Sequence: Synthetic oligonucleotide
augcccugcccacagcaca

SEQ ID NO: 2822530 - RNA, 19 nt, Artificial Sequence
  Description of Artificial Sequence: Synthetic oligonucleotide
agggaaugacaguuuugau

SEQ ID NO: 2822531 - RNA, 19 nt, Artificial Sequence
  Description of Artificial Sequence: Synthetic oligonucleotide
aucuucucaugaaacacuu

SEQ ID NO: 2822532 - RNA, 19 nt, Artificial Sequence
  Description of Artificial Sequence: Synthetic oligonucleotide
ccauccaggggcugcaagg

SEQ ID NO: 2822533 - RNA, 19 nt, Artificial Sequence
  Description of Artificial Sequence: Synthetic oligonucleotide
auccaacaacaaaaguaug

SEQ ID NO: 2822534 - RNA, 19 nt, Artificial Sequence
  Description of Artificial Sequence: Synthetic oligonucleotide
agaagacacuagaagggaa

SEQ ID NO: 2822535 - RNA, 19 nt, Artificial Sequence
  Description of Artificial Sequence: Synthetic oligonucleotide
acguaaacggcugcauacu

SEQ ID NO: 2822536 - RNA, 19 nt, Artificial Sequence
  Description of Artificial Sequence: Synthetic oligonucleotide
caucuucucaugaaacacu

SEQ ID NO: 2822537 - RNA, 19 nt, Artificial Sequence
  Description of Artificial Sequence: Synthetic oligonucleotide
auaccaccaugcacaugcc

SEQ ID NO: 2822538 - RNA, 19 nt, Artificial Sequence
  Description of Artificial Sequence: Synthetic oligonucleotide
gaagacacuagaagggaau

SEQ ID NO: 2822539 - RNA, 19 nt, Artificial Sequence
  Description of Artificial Sequence: Synthetic oligonucleotide
agucacguaaacggcugca

SEQ ID NO: 2822540 - RNA, 19 nt, Artificial Sequence
  Description of Artificial Sequence: Synthetic oligonucleotide
acaauguagcaagguaaaa

SEQ ID NO: 2822541 - RNA, 19 nt, Artificial Sequence
  Description of Artificial Sequence: Synthetic oligonucleotide
cucaugaaacacuuggguu

SEQ ID NO: 2822542 - RNA, 19 nt, Artificial Sequence
  Description of Artificial Sequence: Synthetic oligonucleotide
cuagaagggaaugacaguu

SEQ ID NO: 2822543 - RNA, 19 nt, Artificial Sequence
  Description of Artificial Sequence: Synthetic oligonucleotide
ggaaaugcccagauagcac

SEQ ID NO: 2822544 - RNA, 19 nt, Artificial Sequence
  Description of Artificial Sequence: Synthetic oligonucleotide
acacuuggguucauuuuca

SEQ ID NO: 2822545 - RNA, 19 nt, Artificial Sequence
  Description of Artificial Sequence: Synthetic oligonucleotide
aagccgccccuucccaugu

SEQ ID NO: 2822546 - RNA, 19 nt, Artificial Sequence
  Description of Artificial Sequence: Synthetic oligonucleotide
aaacggcugcauacuuaag

SEQ ID NO: 2822547 - RNA, 19 nt, Artificial Sequence
  Description of Artificial Sequence: Synthetic oligonucleotide
caugcacaugcccugccca

SEQ ID NO: 2822548 - RNA, 19 nt, Artificial Sequence
  Description of Artificial Sequence: Synthetic oligonucleotide
cagucacguaaacggcugc

SEQ ID NO: 2822549 - RNA, 19 nt, Artificial Sequence
  Description of Artificial Sequence: Synthetic oligonucleotide
ugaaacacuuggguucauu

SEQ ID NO: 2822550 - RNA, 19 nt, Artificial Sequence
  Description of Artificial Sequence: Synthetic oligonucleotide
gcacuuuggaauggcacag

SEQ ID NO: 2822551 - RNA, 19 nt, Artificial Sequence
  Description of Artificial Sequence: Synthetic oligonucleotide
gcucaucuucucaugaaac

SEQ ID NO: 2822552 - RNA, 19 nt, Artificial Sequence
  Description of Artificial Sequence: Synthetic oligonucleotide
caugcccugcccacagcac

SEQ ID NO: 2822553 - RNA, 19 nt, Artificial Sequence
  Description of Artificial Sequence: Synthetic oligonucleotide
cugcauacuuaagacaucu

SEQ ID NO: 2822554 - RNA, 19 nt, Artificial Sequence
  Description of Artificial Sequence: Synthetic oligonucleotide
ugcacaugcccugcccaca

SEQ ID NO: 2822555 - RNA, 19 nt, Artificial Sequence
  Description of Artificial Sequence: Synthetic oligonucleotide
aggcucacagaagaaggaa

SEQ ID NO: 2822556 - RNA, 19 nt, Artificial Sequence
  Description of Artificial Sequence: Synthetic oligonucleotide
accugagaagacacuagaa

SEQ ID NO: 2822557 - RNA, 19 nt, Artificial Sequence
  Description of Artificial Sequence: Synthetic oligonucleotide
caucggaaugcaugauaga

SEQ ID NO: 2822558 - RNA, 19 nt, Artificial Sequence
  Description of Artificial Sequence: Synthetic oligonucleotide
ccuucccauguauaccacc

SEQ ID NO: 2822559 - RNA, 19 nt, Artificial Sequence
  Description of Artificial Sequence: Synthetic oligonucleotide
cacagucacguaaacggcu

SEQ ID NO: 2822560 - RNA, 19 nt, Artificial Sequence
  Description of Artificial Sequence: Synthetic oligonucleotide
acuugaaaagccgccccuu

SEQ ID NO: 2822561 - RNA, 19 nt, Artificial Sequence
  Description of Artificial Sequence: Synthetic oligonucleotide
guaaacggcugcauacuua

SEQ ID NO: 2822562 - RNA, 19 nt, Artificial Sequence
  Description of Artificial Sequence: Synthetic oligonucleotide
ccaacaacaaaaguaugaa

SEQ ID NO: 2822563 - RNA, 19 nt, Artificial Sequence
  Description of Artificial Sequence: Synthetic oligonucleotide
ggcucaucuucucaugaaa

SEQ ID NO: 2822564 - RNA, 19 nt, Artificial Sequence
  Description of Artificial Sequence: Synthetic oligonucleotide
ugacaucggaaugcaugau

SEQ ID NO: 2822565 - RNA, 19 nt, Artificial Sequence
  Description of Artificial Sequence: Synthetic oligonucleotide
ggcugcauacuuaagacau

SEQ ID NO: 2822566 - RNA, 19 nt, Artificial Sequence
  Description of Artificial Sequence: Synthetic oligonucleotide
ccuaaacauaauccaacaa

SEQ ID NO: 2822567 - RNA, 19 nt, Artificial Sequence
  Description of Artificial Sequence: Synthetic oligonucleotide
gcacagucacguaaacggc

SEQ ID NO: 2822568 - RNA, 19 nt, Artificial Sequence
  Description of Artificial Sequence: Synthetic oligonucleotide
caggccauccaggggcugc

SEQ ID NO: 2822569 - RNA, 19 nt, Artificial Sequence
  Description of Artificial Sequence: Synthetic oligonucleotide
caccaugcacaugcccugc

SEQ ID NO: 2822570 - RNA, 19 nt, Artificial Sequence
  Description of Artificial Sequence: Synthetic oligonucleotide
gucagucauuuaaguagga

SEQ ID NO: 2822571 - RNA, 19 nt, Artificial Sequence
  Description of Artificial Sequence: Synthetic oligonucleotide
caugauagaaauggcucau

SEQ ID NO: 2822572 - RNA, 19 nt, Artificial Sequence
  Description of Artificial Sequence: Synthetic oligonucleotide
cauuuucauucacaaguuu

SEQ ID NO: 2822573 - RNA, 19 nt, Artificial Sequence
  Description of Artificial Sequence: Synthetic oligonucleotide
gacaguuuugaugcacuuu

SEQ ID NO: 2822574 - RNA, 19 nt, Artificial Sequence
  Description of Artificial Sequence: Synthetic oligonucleotide
guauaccaccaugcacaug

SEQ ID NO: 2822575 - RNA, 19 nt, Artificial Sequence
  Description of Artificial Sequence: Synthetic oligonucleotide
ccauguauaccaccaugca

SEQ ID NO: 2822576 - RNA, 19 nt, Artificial Sequence
  Description of Artificial Sequence: Synthetic oligonucleotide
cacaugcccugcccacagc

SEQ ID NO: 2822577 - RNA, 19 nt, Artificial Sequence
  Description of Artificial Sequence: Synthetic oligonucleotide
ccaugcacaugcccugccc

SEQ ID NO: 2822578 - RNA, 19 nt, Artificial Sequence
  Description of Artificial Sequence: Synthetic oligonucleotide
cacagcacagcaggccauc

SEQ ID NO: 2822579 - RNA, 19 nt, Artificial Sequence
  Description of Artificial Sequence: Synthetic oligonucleotide
ggcucacagaagaaggaaa

SEQ ID NO: 2822580 - RNA, 19 nt, Artificial Sequence
  Description of Artificial Sequence: Synthetic oligonucleotide
ccaccaugcacaugcccug

SEQ ID NO: 2822581 - RNA, 19 nt, Artificial Sequence
  Description of Artificial Sequence: Synthetic oligonucleotide
ccccuucccauguauacca

SEQ ID NO: 2822582 - RNA, 19 nt, Artificial Sequence
  Description of Artificial Sequence: Synthetic oligonucleotide
ccugcccacagcacagcag

SEQ ID NO: 2822583 - RNA, 19 nt, Artificial Sequence
  Description of Artificial Sequence: Synthetic oligonucleotide
cacacuugucagucauuua

SEQ ID NO: 2822584 - RNA, 19 nt, Artificial Sequence
  Description of Artificial Sequence: Synthetic oligonucleotide
gccaugacaucggaaugca

SEQ ID NO: 2822585 - RNA, 19 nt, Artificial Sequence
  Description of Artificial Sequence: Synthetic oligonucleotide
cggaaugcaugauagaaau

SEQ ID NO: 2822586 - RNA, 19 nt, Artificial Sequence
  Description of Artificial Sequence: Synthetic oligonucleotide
gccccuucccauguauacc

SEQ ID NO: 2822587 - RNA, 19 nt, Artificial Sequence
  Description of Artificial Sequence: Synthetic oligonucleotide
gcugcauacuuaagacauc

SEQ ID NO: 2822588 - RNA, 19 nt, Artificial Sequence
  Description of Artificial Sequence: Synthetic oligonucleotide
aggggcugcaaggcucaca

SEQ ID NO: 2822589 - RNA, 19 nt, Artificial Sequence
  Description of Artificial Sequence: Synthetic oligonucleotide
aggccauccaggggcugca

SEQ ID NO: 2822590 - RNA, 19 nt, Artificial Sequence
  Description of Artificial Sequence: Synthetic oligonucleotide
cgccccuucccauguauac

SEQ ID NO: 2822591 - RNA, 19 nt, Artificial Sequence
  Description of Artificial Sequence: Synthetic oligonucleotide
gucacguaaacggcugcau

SEQ ID NO: 2822592 - RNA, 19 nt, Artificial Sequence
  Description of Artificial Sequence: Synthetic oligonucleotide
ggaauggcacagucacgua

SEQ ID NO: 2822593 - RNA, 19 nt, Artificial Sequence
  Description of Artificial Sequence: Synthetic oligonucleotide
cccuucccauguauaccac

SEQ ID NO: 2822594 - RNA, 19 nt, Artificial Sequence
  Description of Artificial Sequence: Synthetic oligonucleotide
cacuuggguucauuuucau

SEQ ID NO: 2822595 - RNA, 19 nt, Artificial Sequence
  Description of Artificial Sequence: Synthetic oligonucleotide
cacuuuggaauggcacagu

SEQ ID NO: 2822596 - RNA, 19 nt, Artificial Sequence
  Description of Artificial Sequence: Synthetic oligonucleotide
cggcugcauacuuaagaca

SEQ ID NO: 2822597 - RNA, 19 nt, Artificial Sequence
  Description of Artificial Sequence: Synthetic oligonucleotide
gcacacaucugcacagggu

SEQ ID NO: 2822598 - RNA, 19 nt, Artificial Sequence
  Description of Artificial Sequence: Synthetic oligonucleotide
gggcugcaaggcucacaga

SEQ ID NO: 2822599 - RNA, 19 nt, Artificial Sequence
  Description of Artificial Sequence: Synthetic oligonucleotide
agccgccccuucccaugua

SEQ ID NO: 2822600 - RNA, 19 nt, Artificial Sequence
  Description of Artificial Sequence: Synthetic oligonucleotide
gcaggccauccaggggcug

SEQ ID NO: 2822601 - RNA, 19 nt, Artificial Sequence
  Description of Artificial Sequence: Synthetic oligonucleotide
cguaaacggcugcauacuu

SEQ ID NO: 2822602 - RNA, 19 nt, Artificial Sequence
  Description of Artificial Sequence: Synthetic oligonucleotide
gccgccccuucccauguau

SEQ ID NO: 2822603 - RNA, 19 nt, Artificial Sequence
  Description of Artificial Sequence: Synthetic oligonucleotide
ccaugacaucggaaugcau

SEQ ID NO: 2822604 - RNA, 19 nt, Artificial Sequence
  Description of Artificial Sequence: Synthetic oligonucleotide
ccgccccuucccauguaua

SEQ ID NO: 2822605 - RNA, 19 nt, Artificial Sequence
  Description of Artificial Sequence: Synthetic oligonucleotide
ggccauccaggggcugcaa

SEQ ID NO: 2822606 - RNA, 19 nt, Artificial Sequence
  Description of Artificial Sequence: Synthetic oligonucleotide
aucaauuuuaaauucaggc

SEQ ID NO: 2822607 - RNA, 19 nt, Artificial Sequence
  Description of Artificial Sequence: Synthetic oligonucleotide
uuuaaauucaggcagacug

SEQ ID NO: 2822608 - RNA, 19 nt, Artificial Sequence
  Description of Artificial Sequence: Synthetic oligonucleotide
aaugcauauuucuugcggc

SEQ ID NO: 2822609 - RNA, 19 nt, Artificial Sequence
  Description of Artificial Sequence: Synthetic oligonucleotide
aaagcuuuugauuuuagga

SEQ ID NO: 2822610 - RNA, 19 nt, Artificial Sequence
  Description of Artificial Sequence: Synthetic oligonucleotide
aaauaaaagcuuuugauuu

SEQ ID NO: 2822611 - RNA, 19 nt, Artificial Sequence
  Description of Artificial Sequence: Synthetic oligonucleotide
uuugauuuuaggauggcag

SEQ ID NO: 2822612 - RNA, 19 nt, Artificial Sequence
  Description of Artificial Sequence: Synthetic oligonucleotide
auguuaauucuauuaagcc

SEQ ID NO: 2822613 - RNA, 19 nt, Artificial Sequence
  Description of Artificial Sequence: Synthetic oligonucleotide
aauucaggcagacugauga

SEQ ID NO: 2822614 - RNA, 19 nt, Artificial Sequence
  Description of Artificial Sequence: Synthetic oligonucleotide
aaaauaaaagcuuuugauu

SEQ ID NO: 2822615 - RNA, 19 nt, Artificial Sequence
  Description of Artificial Sequence: Synthetic oligonucleotide
caauuuuaaauucaggcag

SEQ ID NO: 2822616 - RNA, 19 nt, Artificial Sequence
  Description of Artificial Sequence: Synthetic oligonucleotide
uucagcagcaaaauaaaag

SEQ ID NO: 2822617 - RNA, 19 nt, Artificial Sequence
  Description of Artificial Sequence: Synthetic oligonucleotide
ucaauuuuaaauucaggca

SEQ ID NO: 2822618 - RNA, 19 nt, Artificial Sequence
  Description of Artificial Sequence: Synthetic oligonucleotide
uuugcuuccacauaaggac

SEQ ID NO: 2822619 - RNA, 19 nt, Artificial Sequence
  Description of Artificial Sequence: Synthetic oligonucleotide
aaaagcuuuugauuuuagg

SEQ ID NO: 2822620 - RNA, 19 nt, Artificial Sequence
  Description of Artificial Sequence: Synthetic oligonucleotide
cauguuaauucuauuaagc

SEQ ID NO: 2822621 - RNA, 19 nt, Artificial Sequence
  Description of Artificial Sequence: Synthetic oligonucleotide
aagacugagacugagaggu

SEQ ID NO: 2822622 - RNA, 19 nt, Artificial Sequence
  Description of Artificial Sequence: Synthetic oligonucleotide
uuugaaugcauauuucuug

SEQ ID NO: 2822623 - RNA, 19 nt, Artificial Sequence
  Description of Artificial Sequence: Synthetic oligonucleotide
uuuguucuugucuuaaucc

SEQ ID NO: 2822624 - RNA, 19 nt, Artificial Sequence
  Description of Artificial Sequence: Synthetic oligonucleotide
uguuaauucuauuaagcca

SEQ ID NO: 2822625 - RNA, 19 nt, Artificial Sequence
  Description of Artificial Sequence: Synthetic oligonucleotide
ucuuuguucacucucacuc

SEQ ID NO: 2822626 - RNA, 19 nt, Artificial Sequence
  Description of Artificial Sequence: Synthetic oligonucleotide
ucuucauuaauauaccagu

SEQ ID NO: 2822627 - RNA, 19 nt, Artificial Sequence
  Description of Artificial Sequence: Synthetic oligonucleotide
uguuguauggaguaucugc

SEQ ID NO: 2822628 - RNA, 19 nt, Artificial Sequence
  Description of Artificial Sequence: Synthetic oligonucleotide
cauuaauauaccaguauag

SEQ ID NO: 2822629 - RNA, 19 nt, Artificial Sequence
  Description of Artificial Sequence: Synthetic oligonucleotide
aauucuauuaagccaccug

SEQ ID NO: 2822630 - RNA, 19 nt, Artificial Sequence
  Description of Artificial Sequence: Synthetic oligonucleotide
uaucaauuuuaaauucagg

SEQ ID NO: 2822631 - RNA, 19 nt, Artificial Sequence
  Description of Artificial Sequence: Synthetic oligonucleotide
guggguauguaucauaggg

SEQ ID NO: 2822632 - RNA, 19 nt, Artificial Sequence
  Description of Artificial Sequence: Synthetic oligonucleotide
acuccaguaaucuuuguuc

SEQ ID NO: 2822633 - RNA, 19 nt, Artificial Sequence
  Description of Artificial Sequence: Synthetic oligonucleotide
gaaugcauauuucuugcgg

SEQ ID NO: 2822634 - RNA, 19 nt, Artificial Sequence
  Description of Artificial Sequence: Synthetic oligonucleotide
uugauuuuaggauggcagg

SEQ ID NO: 2822635 - RNA, 19 nt, Artificial Sequence
  Description of Artificial Sequence: Synthetic oligonucleotide
auccucuucauuaauauac

SEQ ID NO: 2822636 - RNA, 19 nt, Artificial Sequence
  Description of Artificial Sequence: Synthetic oligonucleotide
guuaauucuauuaagccac

SEQ ID NO: 2822637 - RNA, 19 nt, Artificial Sequence
  Description of Artificial Sequence: Synthetic oligonucleotide
aagcuuuugauuuuaggau

SEQ ID NO: 2822638 - RNA, 19 nt, Artificial Sequence
  Description of Artificial Sequence: Synthetic oligonucleotide
acuggcgcaacucauagag

SEQ ID NO: 2822639 - RNA, 19 nt, Artificial Sequence
  Description of Artificial Sequence: Synthetic oligonucleotide
caugugaagacugagacug

SEQ ID NO: 2822640 - RNA, 19 nt, Artificial Sequence
  Description of Artificial Sequence: Synthetic oligonucleotide
aacucauagagggaggccg

SEQ ID NO: 2822641 - RNA, 19 nt, Artificial Sequence
  Description of Artificial Sequence: Synthetic oligonucleotide
ucauuaauauaccaguaua

SEQ ID NO: 2822642 - RNA, 19 nt, Artificial Sequence
  Description of Artificial Sequence: Synthetic oligonucleotide
cuaucaauuuuaaauucag

SEQ ID NO: 2822643 - RNA, 19 nt, Artificial Sequence
  Description of Artificial Sequence: Synthetic oligonucleotide
auucuauuaagccaccugu

SEQ ID NO: 2822644 - RNA, 19 nt, Artificial Sequence
  Description of Artificial Sequence: Synthetic oligonucleotide
uuucuugcggcauucacug

SEQ ID NO: 2822645 - RNA, 19 nt, Artificial Sequence
  Description of Artificial Sequence: Synthetic oligonucleotide
uggcgcaacucauagaggg

SEQ ID NO: 2822646 - RNA, 19 nt, Artificial Sequence
  Description of Artificial Sequence: Synthetic oligonucleotide
uggguauguaucauagggg

SEQ ID NO: 2822647 - RNA, 19 nt, Artificial Sequence
  Description of Artificial Sequence: Synthetic oligonucleotide
aaacuccucaugugaagac

SEQ ID NO: 2822648 - RNA, 19 nt, Artificial Sequence
  Description of Artificial Sequence: Synthetic oligonucleotide
uugaaugcauauuucuugc

SEQ ID NO: 2822649 - RNA, 19 nt, Artificial Sequence
  Description of Artificial Sequence: Synthetic oligonucleotide
uuaaauucaggcagacuga

SEQ ID NO: 2822650 - RNA, 19 nt, Artificial Sequence
  Description of Artificial Sequence: Synthetic oligonucleotide
cucuucauuaauauaccag

SEQ ID NO: 2822651 - RNA, 19 nt, Artificial Sequence
  Description of Artificial Sequence: Synthetic oligonucleotide
uccacauaaggacuggcgc

SEQ ID NO: 2822652 - RNA, 19 nt, Artificial Sequence
  Description of Artificial Sequence: Synthetic oligonucleotide
uucauuaauauaccaguau

SEQ ID NO: 2822653 - RNA, 19 nt, Artificial Sequence
  Description of Artificial Sequence: Synthetic oligonucleotide
uuccacauaaggacuggcg

SEQ ID NO: 2822654 - RNA, 19 nt, Artificial Sequence
  Description of Artificial Sequence: Synthetic oligonucleotide
agcuuuugauuuuaggaug

SEQ ID NO: 2822655 - RNA, 19 nt, Artificial Sequence
  Description of Artificial Sequence: Synthetic oligonucleotide
ucuauuaagccaccuguuc

SEQ ID NO: 2822656 - RNA, 19 nt, Artificial Sequence
  Description of Artificial Sequence: Synthetic oligonucleotide
ugaaugcauauuucuugcg

SEQ ID NO: 2822657 - RNA, 19 nt, Artificial Sequence
  Description of Artificial Sequence: Synthetic oligonucleotide
gucaucaagauguucagca

SEQ ID NO: 2822658 - RNA, 19 nt, Artificial Sequence
  Description of Artificial Sequence: Synthetic oligonucleotide
uguucaugucaucaagaug

SEQ ID NO: 2822659 - RNA, 19 nt, Artificial Sequence
  Description of Artificial Sequence: Synthetic oligonucleotide
uggaguaucugcuucuucu

SEQ ID NO: 2822660 - RNA, 19 nt, Artificial Sequence
  Description of Artificial Sequence: Synthetic oligonucleotide
ugagaggucucuguggagg

SEQ ID NO: 2822661 - RNA, 19 nt, Artificial Sequence
  Description of Artificial Sequence: Synthetic oligonucleotide
ugaugaauccuucugcuuu

SEQ ID NO: 2822662 - RNA, 19 nt, Artificial Sequence
  Description of Artificial Sequence: Synthetic oligonucleotide
ucuugcggcauucacuggc

SEQ ID NO: 2822663 - RNA, 19 nt, Artificial Sequence
  Description of Artificial Sequence: Synthetic oligonucleotide
auuuuaaauucaggcagac

SEQ ID NO: 2822664 - RNA, 19 nt, Artificial Sequence
  Description of Artificial Sequence: Synthetic oligonucleotide
gacugaugaauccuucugc

SEQ ID NO: 2822665 - RNA, 19 nt, Artificial Sequence
  Description of Artificial Sequence: Synthetic oligonucleotide
guucaugucaucaagaugu

SEQ ID NO: 2822666 - RNA, 19 nt, Artificial Sequence
  Description of Artificial Sequence: Synthetic oligonucleotide
uguucagcagcaaaauaaa

SEQ ID NO: 2822667 - RNA, 19 nt, Artificial Sequence
  Description of Artificial Sequence: Synthetic oligonucleotide
uguauggaguaucugcuuc

SEQ ID NO: 2822668 - RNA, 19 nt, Artificial Sequence
  Description of Artificial Sequence: Synthetic oligonucleotide
agcauguuaauucuauuaa

SEQ ID NO: 2822669 - RNA, 19 nt, Artificial Sequence
  Description of Artificial Sequence: Synthetic oligonucleotide
aauuuuaaauucaggcaga

SEQ ID NO: 2822670 - RNA, 19 nt, Artificial Sequence
  Description of Artificial Sequence: Synthetic oligonucleotide
uuuguucacucucacucca

SEQ ID NO: 2822671 - RNA, 19 nt, Artificial Sequence
  Description of Artificial Sequence: Synthetic oligonucleotide
uguguguguguguaggagc

SEQ ID NO: 2822672 - RNA, 19 nt, Artificial Sequence
  Description of Artificial Sequence: Synthetic oligonucleotide
uuucgguuguuguauggag

SEQ ID NO: 2822673 - RNA, 19 nt, Artificial Sequence
  Description of Artificial Sequence: Synthetic oligonucleotide
aguaacuuccuggcgaaac

SEQ ID NO: 2822674 - RNA, 19 nt, Artificial Sequence
  Description of Artificial Sequence: Synthetic oligonucleotide
cucuaucaauuuuaaauuc

SEQ ID NO: 2822675 - RNA, 19 nt, Artificial Sequence
  Description of Artificial Sequence: Synthetic oligonucleotide
uaaaagcuuuugauuuuag

SEQ ID NO: 2822676 - RNA, 19 nt, Artificial Sequence
  Description of Artificial Sequence: Synthetic oligonucleotide
caucaagauguucagcagc

SEQ ID NO: 2822677 - RNA, 19 nt, Artificial Sequence
  Description of Artificial Sequence: Synthetic oligonucleotide
aguaucugcuucuucuuug

SEQ ID NO: 2822678 - RNA, 19 nt, Artificial Sequence
  Description of Artificial Sequence: Synthetic oligonucleotide
uuguucuugucuuaauccu

SEQ ID NO: 2822679 - RNA, 19 nt, Artificial Sequence
  Description of Artificial Sequence: Synthetic oligonucleotide
uccucuucauuaauauacc

SEQ ID NO: 2822680 - RNA, 19 nt, Artificial Sequence
  Description of Artificial Sequence: Synthetic oligonucleotide
uuaauucuauuaagccacc

SEQ ID NO: 2822681 - RNA, 19 nt, Artificial Sequence
  Description of Artificial Sequence: Synthetic oligonucleotide
gauggcaggcuuugaaugc

SEQ ID NO: 2822682 - RNA, 19 nt, Artificial Sequence
  Description of Artificial Sequence: Synthetic oligonucleotide
uuaauccucucucucucug

SEQ ID NO: 2822683 - RNA, 19 nt, Artificial Sequence
  Description of Artificial Sequence: Synthetic oligonucleotide
uguuucgguuguuguaugg

SEQ ID NO: 2822684 - RNA, 19 nt, Artificial Sequence
  Description of Artificial Sequence: Synthetic oligonucleotide
agcaaaauaaaagcuuuug

SEQ ID NO: 2822685 - RNA, 19 nt, Artificial Sequence
  Description of Artificial Sequence: Synthetic oligonucleotide
ucaucaagauguucagcag

SEQ ID NO: 2822686 - RNA, 19 nt, Artificial Sequence
  Description of Artificial Sequence: Synthetic oligonucleotide
auacccugcagucagcaug

SEQ ID NO: 2822687 - RNA, 19 nt, Artificial Sequence
  Description of Artificial Sequence: Synthetic oligonucleotide
cuugucuuaauccucucuc

SEQ ID NO: 2822688 - RNA, 19 nt, Artificial Sequence
  Description of Artificial Sequence: Synthetic oligonucleotide
ucuuaauccucucucucuc

SEQ ID NO: 2822689 - RNA, 19 nt, Artificial Sequence
  Description of Artificial Sequence: Synthetic oligonucleotide
ugauuuuaggauggcaggc

SEQ ID NO: 2822690 - RNA, 19 nt, Artificial Sequence
  Description of Artificial Sequence: Synthetic oligonucleotide
uucacucucacuccaguaa

SEQ ID NO: 2822691 - RNA, 19 nt, Artificial Sequence
  Description of Artificial Sequence: Synthetic oligonucleotide
gacugagaggucucugugg

SEQ ID NO: 2822692 - RNA, 19 nt, Artificial Sequence
  Description of Artificial Sequence: Synthetic oligonucleotide
aauccucucucucucugca

SEQ ID NO: 2822693 - RNA, 19 nt, Artificial Sequence
  Description of Artificial Sequence: Synthetic oligonucleotide
ucucacuccaguaaucuuu

SEQ ID NO: 2822694 - RNA, 19 nt, Artificial Sequence
  Description of Artificial Sequence: Synthetic oligonucleotide
ucauccucuucauuaauau

SEQ ID NO: 2822695 - RNA, 19 nt, Artificial Sequence
  Description of Artificial Sequence: Synthetic oligonucleotide
cuuuguucacucucacucc

SEQ ID NO: 2822696 - RNA, 19 nt, Artificial Sequence
  Description of Artificial Sequence: Synthetic oligonucleotide
uauuucuugcggcauucac

SEQ ID NO: 2822697 - RNA, 19 nt, Artificial Sequence
  Description of Artificial Sequence: Synthetic oligonucleotide
uuuucauccucuucauuaa

SEQ ID NO: 2822698 - RNA, 19 nt, Artificial Sequence
  Description of Artificial Sequence: Synthetic oligonucleotide
agacugaugaauccuucug

SEQ ID NO: 2822699 - RNA, 19 nt, Artificial Sequence
  Description of Artificial Sequence: Synthetic oligonucleotide
ucucucucucugcauaccc

SEQ ID NO: 2822700 - RNA, 19 nt, Artificial Sequence
  Description of Artificial Sequence: Synthetic oligonucleotide
uguucuugucuuaauccuc

SEQ ID NO: 2822701 - RNA, 19 nt, Artificial Sequence
  Description of Artificial Sequence: Synthetic oligonucleotide
uauuaagccaccuguucau

SEQ ID NO: 2822702 - RNA, 19 nt, Artificial Sequence
  Description of Artificial Sequence: Synthetic oligonucleotide
uuuugauuuuaggauggca

SEQ ID NO: 2822703 - RNA, 19 nt, Artificial Sequence
  Description of Artificial Sequence: Synthetic oligonucleotide
ucaggcagacugaugaauc

SEQ ID NO: 2822704 - RNA, 19 nt, Artificial Sequence
  Description of Artificial Sequence: Synthetic oligonucleotide
ucuugucuuaauccucucu

SEQ ID NO: 2822705 - RNA, 19 nt, Artificial Sequence
  Description of Artificial Sequence: Synthetic oligonucleotide
uaaggacuggcgcaacuca

SEQ ID NO: 2822706 - RNA, 19 nt, Artificial Sequence
  Description of Artificial Sequence: Synthetic oligonucleotide
aagauguucagcagcaaaa

SEQ ID NO: 2822707 - RNA, 19 nt, Artificial Sequence
  Description of Artificial Sequence: Synthetic oligonucleotide
ugugaagacugagacugag

SEQ ID NO: 2822708 - RNA, 19 nt, Artificial Sequence
  Description of Artificial Sequence: Synthetic oligonucleotide
uguguguguaggagcggcg

SEQ ID NO: 2822709 - RNA, 19 nt, Artificial Sequence
  Description of Artificial Sequence: Synthetic oligonucleotide
uuuaggauggcaggcuuug

SEQ ID NO: 2822710 - RNA, 19 nt, Artificial Sequence
  Description of Artificial Sequence: Synthetic oligonucleotide
ugucuuaauccucucucuc

SEQ ID NO: 2822711 - RNA, 19 nt, Artificial Sequence
  Description of Artificial Sequence: Synthetic oligonucleotide
auguucagcagcaaaauaa

SEQ ID NO: 2822712 - RNA, 19 nt, Artificial Sequence
  Description of Artificial Sequence: Synthetic oligonucleotide
guaggagcggcgcugacug

SEQ ID NO: 2822713 - RNA, 19 nt, Artificial Sequence
  Description of Artificial Sequence: Synthetic oligonucleotide
uucgguuguuguauggagu

SEQ ID NO: 2822714 - RNA, 19 nt, Artificial Sequence
  Description of Artificial Sequence: Synthetic oligonucleotide
ugcuuccacauaaggacug

SEQ ID NO: 2822715 - RNA, 19 nt, Artificial Sequence
  Description of Artificial Sequence: Synthetic oligonucleotide
uuaagccaccuguucaugu

SEQ ID NO: 2822716 - RNA, 19 nt, Artificial Sequence
  Description of Artificial Sequence: Synthetic oligonucleotide
cuauuaagccaccuguuca

SEQ ID NO: 2822717 - RNA, 19 nt, Artificial Sequence
  Description of Artificial Sequence: Synthetic oligonucleotide
accuguucaugucaucaag

SEQ ID NO: 2822718 - RNA, 19 nt, Artificial Sequence
  Description of Artificial Sequence: Synthetic oligonucleotide
uucauccucuucauuaaua

SEQ ID NO: 2822719 - RNA, 19 nt, Artificial Sequence
  Description of Artificial Sequence: Synthetic oligonucleotide
ucucuguggaggacagccg

SEQ ID NO: 2822720 - RNA, 19 nt, Artificial Sequence
  Description of Artificial Sequence: Synthetic oligonucleotide
uugucuuaauccucucucu

SEQ ID NO: 2822721 - RNA, 19 nt, Artificial Sequence
  Description of Artificial Sequence: Synthetic oligonucleotide
ucaugugaagacugagacu

SEQ ID NO: 2822722 - RNA, 19 nt, Artificial Sequence
  Description of Artificial Sequence: Synthetic oligonucleotide
auaaggacuggcgcaacuc

SEQ ID NO: 2822723 - RNA, 19 nt, Artificial Sequence
  Description of Artificial Sequence: Synthetic oligonucleotide
gcauguuaauucuauuaag

SEQ ID NO: 2822724 - RNA, 19 nt, Artificial Sequence
  Description of Artificial Sequence: Synthetic oligonucleotide
cucuguggaggacagccgg

SEQ ID NO: 2822725 - RNA, 19 nt, Artificial Sequence
  Description of Artificial Sequence: Synthetic oligonucleotide
uugcuuccacauaaggacu

SEQ ID NO: 2822726 - RNA, 19 nt, Artificial Sequence
  Description of Artificial Sequence: Synthetic oligonucleotide
guaaucuuuguucuugucu

SEQ ID NO: 2822727 - RNA, 19 nt, Artificial Sequence
  Description of Artificial Sequence: Synthetic oligonucleotide
cauagagggaggccguggg

SEQ ID NO: 2822728 - RNA, 19 nt, Artificial Sequence
  Description of Artificial Sequence: Synthetic oligonucleotide
guguguguguguaggagcg

SEQ ID NO: 2822729 - RNA, 19 nt, Artificial Sequence
  Description of Artificial Sequence: Synthetic oligonucleotide
aggcuuugaaugcauauuu

SEQ ID NO: 2822730 - RNA, 19 nt, Artificial Sequence
  Description of Artificial Sequence: Synthetic oligonucleotide
aagccaccuguucauguca

SEQ ID NO: 2822731 - RNA, 19 nt, Artificial Sequence
  Description of Artificial Sequence: Synthetic oligonucleotide
gucucuguggaggacagcc

SEQ ID NO: 2822732 - RNA, 19 nt, Artificial Sequence
  Description of Artificial Sequence: Synthetic oligonucleotide
uuuuaaauucaggcagacu

SEQ ID NO: 2822733 - RNA, 19 nt, Artificial Sequence
  Description of Artificial Sequence: Synthetic oligonucleotide
uucuauuaagccaccuguu

SEQ ID NO: 2822734 - RNA, 19 nt, Artificial Sequence
  Description of Artificial Sequence: Synthetic oligonucleotide
ggcucuaucaauuuuaaau

SEQ ID NO: 2822735 - RNA, 19 nt, Artificial Sequence
  Description of Artificial Sequence: Synthetic oligonucleotide
ucuuguuucgguuguugua

SEQ ID NO: 2822736 - RNA, 19 nt, Artificial Sequence
  Description of Artificial Sequence: Synthetic oligonucleotide
uaauccucucucucucugc

SEQ ID NO: 2822737 - RNA, 19 nt, Artificial Sequence
  Description of Artificial Sequence: Synthetic oligonucleotide
gaaacuccucaugugaaga

SEQ ID NO: 2822738 - RNA, 19 nt, Artificial Sequence
  Description of Artificial Sequence: Synthetic oligonucleotide
ucgguuguuguauggagua

SEQ ID NO: 2822739 - RNA, 19 nt, Artificial Sequence
  Description of Artificial Sequence: Synthetic oligonucleotide
gagggcgugucuuguuucg

SEQ ID NO: 2822740 - RNA, 19 nt, Artificial Sequence
  Description of Artificial Sequence: Synthetic oligonucleotide
augcauauuucuugcggca

SEQ ID NO: 2822741 - RNA, 19 nt, Artificial Sequence
  Description of Artificial Sequence: Synthetic oligonucleotide
gcuuuugauuuuaggaugg

SEQ ID NO: 2822742 - RNA, 19 nt, Artificial Sequence
  Description of Artificial Sequence: Synthetic oligonucleotide
aacuccucaugugaagacu

SEQ ID NO: 2822743 - RNA, 19 nt, Artificial Sequence
  Description of Artificial Sequence: Synthetic oligonucleotide
agacugagaggucucugug

SEQ ID NO: 2822744 - RNA, 19 nt, Artificial Sequence
  Description of Artificial Sequence: Synthetic oligonucleotide
uacccugcagucagcaugu

SEQ ID NO: 2822745 - RNA, 19 nt, Artificial Sequence
  Description of Artificial Sequence: Synthetic oligonucleotide
cugcauacccugcagucag

SEQ ID NO: 2822746 - RNA, 19 nt, Artificial Sequence
  Description of Artificial Sequence: Synthetic oligonucleotide
ucacucucacuccaguaau

SEQ ID NO: 2822747 - RNA, 19 nt, Artificial Sequence
  Description of Artificial Sequence: Synthetic oligonucleotide
caggcagacugaugaaucc

SEQ ID NO: 2822748 - RNA, 19 nt, Artificial Sequence
  Description of Artificial Sequence: Synthetic oligonucleotide
ugcuuugcuuccacauaag

SEQ ID NO: 2822749 - RNA, 19 nt, Artificial Sequence
  Description of Artificial Sequence: Synthetic oligonucleotide
ucauagagggaggccgugg

SEQ ID NO: 2822750 - RNA, 19 nt, Artificial Sequence
  Description of Artificial Sequence: Synthetic oligonucleotide
aucaagauguucagcagca

SEQ ID NO: 2822751 - RNA, 19 nt, Artificial Sequence
  Description of Artificial Sequence: Synthetic oligonucleotide
ucucugcauacccugcagu

SEQ ID NO: 2822752 - RNA, 19 nt, Artificial Sequence
  Description of Artificial Sequence: Synthetic oligonucleotide
uaggauggcaggcuuugaa

SEQ ID NO: 2822753 - RNA, 19 nt, Artificial Sequence
  Description of Artificial Sequence: Synthetic oligonucleotide
uguguguguguguguguag

SEQ ID NO: 2822754 - RNA, 19 nt, Artificial Sequence
  Description of Artificial Sequence: Synthetic oligonucleotide
uaaauucaggcagacugau

SEQ ID NO: 2822755 - RNA, 19 nt, Artificial Sequence
  Description of Artificial Sequence: Synthetic oligonucleotide
uucuuuguucacucucacu

SEQ ID NO: 2822756 - RNA, 19 nt, Artificial Sequence
  Description of Artificial Sequence: Synthetic oligonucleotide
ugugcuuugcuuccacaua

SEQ ID NO: 2822757 - RNA, 19 nt, Artificial Sequence
  Description of Artificial Sequence: Synthetic oligonucleotide
auuucuugcggcauucacu

SEQ ID NO: 2822758 - RNA, 19 nt, Artificial Sequence
  Description of Artificial Sequence: Synthetic oligonucleotide
uguguguguguguguagga

SEQ ID NO: 2822759 - RNA, 19 nt, Artificial Sequence
  Description of Artificial Sequence: Synthetic oligonucleotide
auggaguaucugcuucuuc

SEQ ID NO: 2822760 - RNA, 19 nt, Artificial Sequence
  Description of Artificial Sequence: Synthetic oligonucleotide
ggauggcaggcuuugaaug

SEQ ID NO: 2822761 - RNA, 19 nt, Artificial Sequence
  Description of Artificial Sequence: Synthetic oligonucleotide
guguguguguguguguagg

SEQ ID NO: 2822762 - RNA, 19 nt, Artificial Sequence
  Description of Artificial Sequence: Synthetic oligonucleotide
auuuuaggauggcaggcuu

SEQ ID NO: 2822763 - RNA, 19 nt, Artificial Sequence
  Description of Artificial Sequence: Synthetic oligonucleotide
gcuuugcuuccacauaagg

SEQ ID NO: 2822764 - RNA, 19 nt, Artificial Sequence
  Description of Artificial Sequence: Synthetic oligonucleotide
uuuuaggauggcaggcuuu

SEQ ID NO: 2822765 - RNA, 19 nt, Artificial Sequence
  Description of Artificial Sequence: Synthetic oligonucleotide
ucugcauacccugcaguca

SEQ ID NO: 2822766 - RNA, 19 nt, Artificial Sequence
  Description of Artificial Sequence: Synthetic oligonucleotide
uccucaugugaagacugag

SEQ ID NO: 2822767 - RNA, 19 nt, Artificial Sequence
  Description of Artificial Sequence: Synthetic oligonucleotide
uuucauccucuucauuaau

SEQ ID NO: 2822768 - RNA, 19 nt, Artificial Sequence
  Description of Artificial Sequence: Synthetic oligonucleotide
uaagccaccuguucauguc

SEQ ID NO: 2822769 - RNA, 19 nt, Artificial Sequence
  Description of Artificial Sequence: Synthetic oligonucleotide
uaauucuauuaagccaccu

SEQ ID NO: 2822770 - RNA, 19 nt, Artificial Sequence
  Description of Artificial Sequence: Synthetic oligonucleotide
auaaaagcuuuugauuuua

SEQ ID NO: 2822771 - RNA, 19 nt, Artificial Sequence
  Description of Artificial Sequence: Synthetic oligonucleotide
cucugcauacccugcaguc

SEQ ID NO: 2822772 - RNA, 19 nt, Artificial Sequence
  Description of Artificial Sequence: Synthetic oligonucleotide
ugacuggcggucuugcgaa

SEQ ID NO: 2822773 - RNA, 19 nt, Artificial Sequence
  Description of Artificial Sequence: Synthetic oligonucleotide
cuucauuaauauaccagua

SEQ ID NO: 2822774 - RNA, 19 nt, Artificial Sequence
  Description of Artificial Sequence: Synthetic oligonucleotide
uguguguaggagcggcgcu

SEQ ID NO: 2822775 - RNA, 19 nt, Artificial Sequence
  Description of Artificial Sequence: Synthetic oligonucleotide
uuguuucgguuguuguaug

SEQ ID NO: 2822776 - RNA, 19 nt, Artificial Sequence
  Description of Artificial Sequence: Synthetic oligonucleotide
gauguucagcagcaaaaua

SEQ ID NO: 2822777 - RNA, 19 nt, Artificial Sequence
  Description of Artificial Sequence: Synthetic oligonucleotide
cuucuuuguucacucucac

SEQ ID NO: 2822778 - RNA, 19 nt, Artificial Sequence
  Description of Artificial Sequence: Synthetic oligonucleotide
cauauuucuugcggcauuc

SEQ ID NO: 2822779 - RNA, 19 nt, Artificial Sequence
  Description of Artificial Sequence: Synthetic oligonucleotide
acucucacuccaguaaucu

SEQ ID NO: 2822780 - RNA, 19 nt, Artificial Sequence
  Description of Artificial Sequence: Synthetic oligonucleotide
cagcauguuaauucuauua

SEQ ID NO: 2822781 - RNA, 19 nt, Artificial Sequence
  Description of Artificial Sequence: Synthetic oligonucleotide
uccucucucucucugcaua

SEQ ID NO: 2822782 - RNA, 19 nt, Artificial Sequence
  Description of Artificial Sequence: Synthetic oligonucleotide
aggauggcaggcuuugaau

SEQ ID NO: 2822783 - RNA, 19 nt, Artificial Sequence
  Description of Artificial Sequence: Synthetic oligonucleotide
cuuuugauuuuaggauggc

SEQ ID NO: 2822784 - RNA, 19 nt, Artificial Sequence
  Description of Artificial Sequence: Synthetic oligonucleotide
acuccucaugugaagacug

SEQ ID NO: 2822785 - RNA, 19 nt, Artificial Sequence
  Description of Artificial Sequence: Synthetic oligonucleotide
agauguucagcagcaaaau

SEQ ID NO: 2822786 - RNA, 19 nt, Artificial Sequence
  Description of Artificial Sequence: Synthetic oligonucleotide
ugcggcauucacuggcucu

SEQ ID NO: 2822787 - RNA, 19 nt, Artificial Sequence
  Description of Artificial Sequence: Synthetic oligonucleotide
ucagcauguuaauucuauu

SEQ ID NO: 2822788 - RNA, 19 nt, Artificial Sequence
  Description of Artificial Sequence: Synthetic oligonucleotide
gugcuuugcuuccacauaa

SEQ ID NO: 2822789 - RNA, 19 nt, Artificial Sequence
  Description of Artificial Sequence: Synthetic oligonucleotide
uggcgaaacuccucaugug

SEQ ID NO: 2822790 - RNA, 19 nt, Artificial Sequence
  Description of Artificial Sequence: Synthetic oligonucleotide
uucaggcagacugaugaau

SEQ ID NO: 2822791 - RNA, 19 nt, Artificial Sequence
  Description of Artificial Sequence: Synthetic oligonucleotide
uguggaggacagccggcug

SEQ ID NO: 2822792 - RNA, 19 nt, Artificial Sequence
  Description of Artificial Sequence: Synthetic oligonucleotide
uguguguguguaggagcgg

SEQ ID NO: 2822793 - RNA, 19 nt, Artificial Sequence
  Description of Artificial Sequence: Synthetic oligonucleotide
uuguuguauggaguaucug

SEQ ID NO: 2822794 - RNA, 19 nt, Artificial Sequence
  Description of Artificial Sequence: Synthetic oligonucleotide
ggggacacagcacugcccc

SEQ ID NO: 2822795 - RNA, 19 nt, Artificial Sequence
  Description of Artificial Sequence: Synthetic oligonucleotide
uaacuuccuggcgaaacuc

SEQ ID NO: 2822796 - RNA, 19 nt, Artificial Sequence
  Description of Artificial Sequence: Synthetic oligonucleotide
uucuugcggcauucacugg

SEQ ID NO: 2822797 - RNA, 19 nt, Artificial Sequence
  Description of Artificial Sequence: Synthetic oligonucleotide
uuguauggaguaucugcuu

SEQ ID NO: 2822798 - RNA, 19 nt, Artificial Sequence
  Description of Artificial Sequence: Synthetic oligonucleotide
cuggcggucuugcgaaugg

SEQ ID NO: 2822799 - RNA, 19 nt, Artificial Sequence
  Description of Artificial Sequence: Synthetic oligonucleotide
ugagacugagaggucucug

SEQ ID NO: 2822800 - RNA, 19 nt, Artificial Sequence
  Description of Artificial Sequence: Synthetic oligonucleotide
ugugugugugugugugugu

SEQ ID NO: 2822801 - RNA, 19 nt, Artificial Sequence
  Description of Artificial Sequence: Synthetic oligonucleotide
guguguguguguguaggag

SEQ ID NO: 2822802 - RNA, 19 nt, Artificial Sequence
  Description of Artificial Sequence: Synthetic oligonucleotide
auuaagccaccuguucaug

SEQ ID NO: 2822803 - RNA, 19 nt, Artificial Sequence
  Description of Artificial Sequence: Synthetic oligonucleotide
caagauguucagcagcaaa

SEQ ID NO: 2822804 - RNA, 19 nt, Artificial Sequence
  Description of Artificial Sequence: Synthetic oligonucleotide
cuggcgcaacucauagagg

SEQ ID NO: 2822805 - RNA, 19 nt, Artificial Sequence
  Description of Artificial Sequence: Synthetic oligonucleotide
acugagacugagaggucuc

SEQ ID NO: 2822806 - RNA, 19 nt, Artificial Sequence
  Description of Artificial Sequence: Synthetic oligonucleotide
ggacuggcgcaacucauag

SEQ ID NO: 2822807 - RNA, 19 nt, Artificial Sequence
  Description of Artificial Sequence: Synthetic oligonucleotide
ugcauauuucuugcggcau

SEQ ID NO: 2822808 - RNA, 19 nt, Artificial Sequence
  Description of Artificial Sequence: Synthetic oligonucleotide
gaggccguggguauguauc

SEQ ID NO: 2822809 - RNA, 19 nt, Artificial Sequence
  Description of Artificial Sequence: Synthetic oligonucleotide
ggcgaaacuccucauguga

SEQ ID NO: 2822810 - RNA, 19 nt, Artificial Sequence
  Description of Artificial Sequence: Synthetic oligonucleotide
guuguauggaguaucugcu

SEQ ID NO: 2822811 - RNA, 19 nt, Artificial Sequence
  Description of Artificial Sequence: Synthetic oligonucleotide
uguaggagcggcgcugacu

SEQ ID NO: 2822812 - RNA, 19 nt, Artificial Sequence
  Description of Artificial Sequence: Synthetic oligonucleotide
acuggcucuaucaauuuua

SEQ ID NO: 2822813 - RNA, 19 nt, Artificial Sequence
  Description of Artificial Sequence: Synthetic oligonucleotide
gugugugugugugugugug

SEQ ID NO: 2822814 - RNA, 19 nt, Artificial Sequence
  Description of Artificial Sequence: Synthetic oligonucleotide
uucaugucaucaagauguu

SEQ ID NO: 2822815 - RNA, 19 nt, Artificial Sequence
  Description of Artificial Sequence: Synthetic oligonucleotide
gauuuuaggauggcaggcu

SEQ ID NO: 2822816 - RNA, 19 nt, Artificial Sequence
  Description of Artificial Sequence: Synthetic oligonucleotide
gagaggucucuguggagga

SEQ ID NO: 2822817 - RNA, 19 nt, Artificial Sequence
  Description of Artificial Sequence: Synthetic oligonucleotide
uccaguaaucuuuguucuu

SEQ ID NO: 2822818 - RNA, 19 nt, Artificial Sequence
  Description of Artificial Sequence: Synthetic oligonucleotide
cuuccacauaaggacuggc

SEQ ID NO: 2822819 - RNA, 19 nt, Artificial Sequence
  Description of Artificial Sequence: Synthetic oligonucleotide
guguguguguaggagcggc

SEQ ID NO: 2822820 - RNA, 19 nt, Artificial Sequence
  Description of Artificial Sequence: Synthetic oligonucleotide
acauaaggacuggcgcaac

SEQ ID NO: 2822821 - RNA, 19 nt, Artificial Sequence
  Description of Artificial Sequence: Synthetic oligonucleotide
uguguaggagcggcgcuga

SEQ ID NO: 2822822 - RNA, 19 nt, Artificial Sequence
  Description of Artificial Sequence: Synthetic oligonucleotide
ucaugucaucaagauguuc

SEQ ID NO: 2822823 - RNA, 19 nt, Artificial Sequence
  Description of Artificial Sequence: Synthetic oligonucleotide
auagagggaggccgugggu

SEQ ID NO: 2822824 - RNA, 19 nt, Artificial Sequence
  Description of Artificial Sequence: Synthetic oligonucleotide
gagacugagaggucucugu

SEQ ID NO: 2822825 - RNA, 19 nt, Artificial Sequence
  Description of Artificial Sequence: Synthetic oligonucleotide
gcuuugaaugcauauuucu

SEQ ID NO: 2822826 - RNA, 19 nt, Artificial Sequence
  Description of Artificial Sequence: Synthetic oligonucleotide
ccugcagucagcauguuaa

SEQ ID NO: 2822827 - RNA, 19 nt, Artificial Sequence
  Description of Artificial Sequence: Synthetic oligonucleotide
gucuuaauccucucucucu

SEQ ID NO: 2822828 - RNA, 19 nt, Artificial Sequence
  Description of Artificial Sequence: Synthetic oligonucleotide
auucaggcagacugaugaa

SEQ ID NO: 2822829 - RNA, 19 nt, Artificial Sequence
  Description of Artificial Sequence: Synthetic oligonucleotide
caacucauagagggaggcc

SEQ ID NO: 2822830 - RNA, 19 nt, Artificial Sequence
  Description of Artificial Sequence: Synthetic oligonucleotide
cuuugaaugcauauuucuu

SEQ ID NO: 2822831 - RNA, 19 nt, Artificial Sequence
  Description of Artificial Sequence: Synthetic oligonucleotide
ugcauacccugcagucagc

SEQ ID NO: 2822832 - RNA, 19 nt, Artificial Sequence
  Description of Artificial Sequence: Synthetic oligonucleotide
guuucgguuguuguaugga

SEQ ID NO: 2822833 - RNA, 19 nt, Artificial Sequence
  Description of Artificial Sequence: Synthetic oligonucleotide
aggccguggguauguauca

SEQ ID NO: 2822834 - RNA, 19 nt, Artificial Sequence
  Description of Artificial Sequence: Synthetic oligonucleotide
cugacuggcggucuugcga

SEQ ID NO: 2822835 - RNA, 19 nt, Artificial Sequence
  Description of Artificial Sequence: Synthetic oligonucleotide
ccguggguauguaucauag

SEQ ID NO: 2822836 - RNA, 19 nt, Artificial Sequence
  Description of Artificial Sequence: Synthetic oligonucleotide
uagagggaggccgugggua

SEQ ID NO: 2822837 - RNA, 19 nt, Artificial Sequence
  Description of Artificial Sequence: Synthetic oligonucleotide
uucuugucuuaauccucuc

SEQ ID NO: 2822838 - RNA, 19 nt, Artificial Sequence
  Description of Artificial Sequence: Synthetic oligonucleotide
cauucacuggcucuaucaa

SEQ ID NO: 2822839 - RNA, 19 nt, Artificial Sequence
  Description of Artificial Sequence: Synthetic oligonucleotide
cacucucacuccaguaauc

SEQ ID NO: 2822840 - RNA, 19 nt, Artificial Sequence
  Description of Artificial Sequence: Synthetic oligonucleotide
acagccggcugugcuuugc

SEQ ID NO: 2822841 - RNA, 19 nt, Artificial Sequence
  Description of Artificial Sequence: Synthetic oligonucleotide
gguuguuguauggaguauc

SEQ ID NO: 2822842 - RNA, 19 nt, Artificial Sequence
  Description of Artificial Sequence: Synthetic oligonucleotide
gcucuaucaauuuuaaauu

SEQ ID NO: 2822843 - RNA, 19 nt, Artificial Sequence
  Description of Artificial Sequence: Synthetic oligonucleotide
guaacuuccuggcgaaacu

SEQ ID NO: 2822844 - RNA, 19 nt, Artificial Sequence
  Description of Artificial Sequence: Synthetic oligonucleotide
guguguguaggagcggcgc

SEQ ID NO: 2822845 - RNA, 19 nt, Artificial Sequence
  Description of Artificial Sequence: Synthetic oligonucleotide
uggcucuaucaauuuuaaa

SEQ ID NO: 2822846 - RNA, 19 nt, Artificial Sequence
  Description of Artificial Sequence: Synthetic oligonucleotide
ucacuggcucuaucaauuu

SEQ ID NO: 2822847 - RNA, 19 nt, Artificial Sequence
  Description of Artificial Sequence: Synthetic oligonucleotide
guauggaguaucugcuucu

SEQ ID NO: 2822848 - RNA, 19 nt, Artificial Sequence
  Description of Artificial Sequence: Synthetic oligonucleotide
aaggacuggcgcaacucau

SEQ ID NO: 2822849 - RNA, 19 nt, Artificial Sequence
  Description of Artificial Sequence: Synthetic oligonucleotide
aggcagacugaugaauccu

SEQ ID NO: 2822850 - RNA, 19 nt, Artificial Sequence
  Description of Artificial Sequence: Synthetic oligonucleotide
gcaacucauagagggaggc

SEQ ID NO: 2822851 - RNA, 19 nt, Artificial Sequence
  Description of Artificial Sequence: Synthetic oligonucleotide
ugcagucagcauguuaauu

SEQ ID NO: 2822852 - RNA, 19 nt, Artificial Sequence
  Description of Artificial Sequence: Synthetic oligonucleotide
uauggaguaucugcuucuu

SEQ ID NO: 2822853 - RNA, 19 nt, Artificial Sequence
  Description of Artificial Sequence: Synthetic oligonucleotide
auggcaggcuuugaaugca

SEQ ID NO: 2822854 - RNA, 19 nt, Artificial Sequence
  Description of Artificial Sequence: Synthetic oligonucleotide
ucaagauguucagcagcaa

SEQ ID NO: 2822855 - RNA, 19 nt, Artificial Sequence
  Description of Artificial Sequence: Synthetic oligonucleotide
agagggaggccguggguau

SEQ ID NO: 2822856 - RNA, 19 nt, Artificial Sequence
  Description of Artificial Sequence: Synthetic oligonucleotide
gacugagacugagaggucu

SEQ ID NO: 2822857 - RNA, 19 nt, Artificial Sequence
  Description of Artificial Sequence: Synthetic oligonucleotide
cuggcucuaucaauuuuaa

SEQ ID NO: 2822858 - RNA, 19 nt, Artificial Sequence
  Description of Artificial Sequence: Synthetic oligonucleotide
guuguuguauggaguaucu

SEQ ID NO: 2822859 - RNA, 19 nt, Artificial Sequence
  Description of Artificial Sequence: Synthetic oligonucleotide
uggaggacagccggcugug

SEQ ID NO: 2822860 - RNA, 19 nt, Artificial Sequence
  Description of Artificial Sequence: Synthetic oligonucleotide
guaucugcuucuucuuugu

SEQ ID NO: 2822861 - RNA, 19 nt, Artificial Sequence
  Description of Artificial Sequence: Synthetic oligonucleotide
cuggcgaaacuccucaugu

SEQ ID NO: 2822862 - RNA, 19 nt, Artificial Sequence
  Description of Artificial Sequence: Synthetic oligonucleotide
uuaggauggcaggcuuuga

SEQ ID NO: 2822863 - RNA, 19 nt, Artificial Sequence
  Description of Artificial Sequence: Synthetic oligonucleotide
gcgcaacucauagagggag

SEQ ID NO: 2822864 - RNA, 19 nt, Artificial Sequence
  Description of Artificial Sequence: Synthetic oligonucleotide
uggcggucuugcgaauggg

SEQ ID NO: 2822865 - RNA, 19 nt, Artificial Sequence
  Description of Artificial Sequence: Synthetic oligonucleotide
cuuguuucgguuguuguau

SEQ ID NO: 2822866 - RNA, 19 nt, Artificial Sequence
  Description of Artificial Sequence: Synthetic oligonucleotide
cuguucaugucaucaagau

SEQ ID NO: 2822867 - RNA, 19 nt, Artificial Sequence
  Description of Artificial Sequence: Synthetic oligonucleotide
ucacuccaguaaucuuugu

SEQ ID NO: 2822868 - RNA, 19 nt, Artificial Sequence
  Description of Artificial Sequence: Synthetic oligonucleotide
aggagggcgugucuuguuu

SEQ ID NO: 2822869 - RNA, 19 nt, Artificial Sequence
  Description of Artificial Sequence: Synthetic oligonucleotide
guucagcagcaaaauaaaa

SEQ ID NO: 2822870 - RNA, 19 nt, Artificial Sequence
  Description of Artificial Sequence: Synthetic oligonucleotide
cucucucucucugcauacc

SEQ ID NO: 2822871 - RNA, 19 nt, Artificial Sequence
  Description of Artificial Sequence: Synthetic oligonucleotide
acuggcggucuugcgaaug

SEQ ID NO: 2822872 - RNA, 19 nt, Artificial Sequence
  Description of Artificial Sequence: Synthetic oligonucleotide
guguguaggagcggcgcug

SEQ ID NO: 2822873 - RNA, 19 nt, Artificial Sequence
  Description of Artificial Sequence: Synthetic oligonucleotide
gagcggcgcugacuggcgg

SEQ ID NO: 2822874 - RNA, 19 nt, Artificial Sequence
  Description of Artificial Sequence: Synthetic oligonucleotide
gucuuguuucgguuguugu

SEQ ID NO: 2822875 - RNA, 19 nt, Artificial Sequence
  Description of Artificial Sequence: Synthetic oligonucleotide
agggcgugucuuguuucgg

SEQ ID NO: 2822876 - RNA, 19 nt, Artificial Sequence
  Description of Artificial Sequence: Synthetic oligonucleotide
acucauagagggaggccgu

SEQ ID NO: 2822877 - RNA, 19 nt, Artificial Sequence
  Description of Artificial Sequence: Synthetic oligonucleotide
ccuguucaugucaucaaga

SEQ ID NO: 2822878 - RNA, 19 nt, Artificial Sequence
  Description of Artificial Sequence: Synthetic oligonucleotide
gacuggcgcaacucauaga

SEQ ID NO: 2822879 - RNA, 19 nt, Artificial Sequence
  Description of Artificial Sequence: Synthetic oligonucleotide
aggacagccggcugugcuu

SEQ ID NO: 2822880 - RNA, 19 nt, Artificial Sequence
  Description of Artificial Sequence: Synthetic oligonucleotide
ggcggucuugcgaaugggg

SEQ ID NO: 2822881 - RNA, 19 nt, Artificial Sequence
  Description of Artificial Sequence: Synthetic oligonucleotide
gcgugucuuguuucgguug

SEQ ID NO: 2822882 - RNA, 19 nt, Artificial Sequence
  Description of Artificial Sequence: Synthetic oligonucleotide
cacauaaggacuggcgcaa

SEQ ID NO: 2822883 - RNA, 19 nt, Artificial Sequence
  Description of Artificial Sequence: Synthetic oligonucleotide
gugaagacugagacugaga

SEQ ID NO: 2822884 - RNA, 19 nt, Artificial Sequence
  Description of Artificial Sequence: Synthetic oligonucleotide
cccaguaacuuccuggcga

SEQ ID NO: 2822885 - RNA, 19 nt, Artificial Sequence
  Description of Artificial Sequence: Synthetic oligonucleotide
gcuuccacauaaggacugg

SEQ ID NO: 2822886 - RNA, 19 nt, Artificial Sequence
  Description of Artificial Sequence: Synthetic oligonucleotide
uugcggcauucacuggcuc

SEQ ID NO: 2822887 - RNA, 19 nt, Artificial Sequence
  Description of Artificial Sequence: Synthetic oligonucleotide
cuuaauccucucucucucu

SEQ ID NO: 2822888 - RNA, 19 nt, Artificial Sequence
  Description of Artificial Sequence: Synthetic oligonucleotide
cgaaacuccucaugugaag

SEQ ID NO: 2822889 - RNA, 19 nt, Artificial Sequence
  Description of Artificial Sequence: Synthetic oligonucleotide
ccacauaaggacuggcgca

SEQ ID NO: 2822890 - RNA, 19 nt, Artificial Sequence
  Description of Artificial Sequence: Synthetic oligonucleotide
agacugagacugagagguc

SEQ ID NO: 2822891 - RNA, 19 nt, Artificial Sequence
  Description of Artificial Sequence: Synthetic oligonucleotide
cuccucaugugaagacuga

SEQ ID NO: 2822892 - RNA, 19 nt, Artificial Sequence
  Description of Artificial Sequence: Synthetic oligonucleotide
ccucuucauuaauauacca

SEQ ID NO: 2822893 - RNA, 19 nt, Artificial Sequence
  Description of Artificial Sequence: Synthetic oligonucleotide
cagacugaugaauccuucu

SEQ ID NO: 2822894 - RNA, 19 nt, Artificial Sequence
  Description of Artificial Sequence: Synthetic oligonucleotide
cucauagagggaggccgug

SEQ ID NO: 2822895 - RNA, 19 nt, Artificial Sequence
  Description of Artificial Sequence: Synthetic oligonucleotide
gucagcauguuaauucuau

SEQ ID NO: 2822896 - RNA, 19 nt, Artificial Sequence
  Description of Artificial Sequence: Synthetic oligonucleotide
ggcuuugaaugcauauuuc

SEQ ID NO: 2822897 - RNA, 19 nt, Artificial Sequence
  Description of Artificial Sequence: Synthetic oligonucleotide
gaggacagccggcugugcu

SEQ ID NO: 2822898 - RNA, 19 nt, Artificial Sequence
  Description of Artificial Sequence: Synthetic oligonucleotide
gcugacuggcggucuugcg

SEQ ID NO: 2822899 - RNA, 19 nt, Artificial Sequence
  Description of Artificial Sequence: Synthetic oligonucleotide
agcggcgcugacuggcggu

SEQ ID NO: 2822900 - RNA, 19 nt, Artificial Sequence
  Description of Artificial Sequence: Synthetic oligonucleotide
ccucaugugaagacugaga

SEQ ID NO: 2822901 - RNA, 19 nt, Artificial Sequence
  Description of Artificial Sequence: Synthetic oligonucleotide
caccuguucaugucaucaa

SEQ ID NO: 2822902 - RNA, 19 nt, Artificial Sequence
  Description of Artificial Sequence: Synthetic oligonucleotide
auccucucucucucugcau

SEQ ID NO: 2822903 - RNA, 19 nt, Artificial Sequence
  Description of Artificial Sequence: Synthetic oligonucleotide
cugugcuuugcuuccacau

SEQ ID NO: 2822904 - RNA, 19 nt, Artificial Sequence
  Description of Artificial Sequence: Synthetic oligonucleotide
cguggguauguaucauagg

SEQ ID NO: 2822905 - RNA, 19 nt, Artificial Sequence
  Description of Artificial Sequence: Synthetic oligonucleotide
ccuggcgaaacuccucaug

SEQ ID NO: 2822906 - RNA, 19 nt, Artificial Sequence
  Description of Artificial Sequence: Synthetic oligonucleotide
gugugugugugugugugua

SEQ ID NO: 2822907 - RNA, 19 nt, Artificial Sequence
  Description of Artificial Sequence: Synthetic oligonucleotide
ccggcugugcuuugcuucc

SEQ ID NO: 2822908 - RNA, 19 nt, Artificial Sequence
  Description of Artificial Sequence: Synthetic oligonucleotide
uccuggcgaaacuccucau

SEQ ID NO: 2822909 - RNA, 19 nt, Artificial Sequence
  Description of Artificial Sequence: Synthetic oligonucleotide
cauaaggacuggcgcaacu

SEQ ID NO: 2822910 - RNA, 19 nt, Artificial Sequence
  Description of Artificial Sequence: Synthetic oligonucleotide
ccucucucucucugcauac

SEQ ID NO: 2822911 - RNA, 19 nt, Artificial Sequence
  Description of Artificial Sequence: Synthetic oligonucleotide
gccggcugugcuuugcuuc

SEQ ID NO: 2822912 - RNA, 19 nt, Artificial Sequence
  Description of Artificial Sequence: Synthetic oligonucleotide
ggagggcgugucuuguuuc

SEQ ID NO: 2822913 - RNA, 19 nt, Artificial Sequence
  Description of Artificial Sequence: Synthetic oligonucleotide
agggaggccguggguaugu

SEQ ID NO: 2822914 - RNA, 19 nt, Artificial Sequence
  Description of Artificial Sequence: Synthetic oligonucleotide
agucagcauguuaauucua

SEQ ID NO: 2822915 - RNA, 19 nt, Artificial Sequence
  Description of Artificial Sequence: Synthetic oligonucleotide
gggaggagggcgugucuug

SEQ ID NO: 2822916 - RNA, 19 nt, Artificial Sequence
  Description of Artificial Sequence: Synthetic oligonucleotide
cgcaacucauagagggagg

SEQ ID NO: 2822917 - RNA, 19 nt, Artificial Sequence
  Description of Artificial Sequence: Synthetic oligonucleotide
augugaagacugagacuga

SEQ ID NO: 2822918 - RNA, 19 nt, Artificial Sequence
  Description of Artificial Sequence: Synthetic oligonucleotide
cuugcggcauucacuggcu

SEQ ID NO: 2822919 - RNA, 19 nt, Artificial Sequence
  Description of Artificial Sequence: Synthetic oligonucleotide
gagggaggccguggguaug

SEQ ID NO: 2822920 - RNA, 19 nt, Artificial Sequence
  Description of Artificial Sequence: Synthetic oligonucleotide
gacagccggcugugcuuug

SEQ ID NO: 2822921 - RNA, 19 nt, Artificial Sequence
  Description of Artificial Sequence: Synthetic oligonucleotide
cacuccaguaaucuuuguu

SEQ ID NO: 2822922 - RNA, 19 nt, Artificial Sequence
  Description of Artificial Sequence: Synthetic oligonucleotide
cagcaaaauaaaagcuuuu

SEQ ID NO: 2822923 - RNA, 19 nt, Artificial Sequence
  Description of Artificial Sequence: Synthetic oligonucleotide
gcagacugaugaauccuuc

SEQ ID NO: 2822924 - RNA, 19 nt, Artificial Sequence
  Description of Artificial Sequence: Synthetic oligonucleotide
ccaccuguucaugucauca

SEQ ID NO: 2822925 - RNA, 19 nt, Artificial Sequence
  Description of Artificial Sequence: Synthetic oligonucleotide
ccccaguaacuuccuggcg

SEQ ID NO: 2822926 - RNA, 19 nt, Artificial Sequence
  Description of Artificial Sequence: Synthetic oligonucleotide
aggacuggcgcaacucaua

SEQ ID NO: 2822927 - RNA, 19 nt, Artificial Sequence
  Description of Artificial Sequence: Synthetic oligonucleotide
cugaugaauccuucugcuu

SEQ ID NO: 2822928 - RNA, 19 nt, Artificial Sequence
  Description of Artificial Sequence: Synthetic oligonucleotide
gcugugcuuugcuuccaca

SEQ ID NO: 2822929 - RNA, 19 nt, Artificial Sequence
  Description of Artificial Sequence: Synthetic oligonucleotide
gcaggcuuugaaugcauau

SEQ ID NO: 2822930 - RNA, 19 nt, Artificial Sequence
  Description of Artificial Sequence: Synthetic oligonucleotide
ggcauucacuggcucuauc

SEQ ID NO: 2822931 - RNA, 19 nt, Artificial Sequence
  Description of Artificial Sequence: Synthetic oligonucleotide
gcauacccugcagucagca

SEQ ID NO: 2822932 - RNA, 19 nt, Artificial Sequence
  Description of Artificial Sequence: Synthetic oligonucleotide
ggcugugcuuugcuuccac

SEQ ID NO: 2822933 - RNA, 19 nt, Artificial Sequence
  Description of Artificial Sequence: Synthetic oligonucleotide
ggagcggcgcugacuggcg

SEQ ID NO: 2822934 - RNA, 19 nt, Artificial Sequence
  Description of Artificial Sequence: Synthetic oligonucleotide
agccaccuguucaugucau

SEQ ID NO: 2822935 - RNA, 19 nt, Artificial Sequence
  Description of Artificial Sequence: Synthetic oligonucleotide
ccaguaacuuccuggcgaa

SEQ ID NO: 2822936 - RNA, 19 nt, Artificial Sequence
  Description of Artificial Sequence: Synthetic oligonucleotide
gcgaaacuccucaugugaa

SEQ ID NO: 2822937 - RNA, 19 nt, Artificial Sequence
  Description of Artificial Sequence: Synthetic oligonucleotide
agccggcugugcuuugcuu

SEQ ID NO: 2822938 - RNA, 19 nt, Artificial Sequence
  Description of Artificial Sequence: Synthetic oligonucleotide
ggaguaucugcuucuucuu

SEQ ID NO: 2822939 - RNA, 19 nt, Artificial Sequence
  Description of Artificial Sequence: Synthetic oligonucleotide
guguaggagcggcgcugac

SEQ ID NO: 2822940 - RNA, 19 nt, Artificial Sequence
  Description of Artificial Sequence: Synthetic oligonucleotide
caggcuuugaaugcauauu

SEQ ID NO: 2822941 - RNA, 19 nt, Artificial Sequence
  Description of Artificial Sequence: Synthetic oligonucleotide
ggcgcaacucauagaggga

SEQ ID NO: 2822942 - RNA, 19 nt, Artificial Sequence
  Description of Artificial Sequence: Synthetic oligonucleotide
gccguggguauguaucaua

SEQ ID NO: 2822943 - RNA, 19 nt, Artificial Sequence
  Description of Artificial Sequence: Synthetic oligonucleotide
cucucacuccaguaaucuu

SEQ ID NO: 2822944 - RNA, 19 nt, Artificial Sequence
  Description of Artificial Sequence: Synthetic oligonucleotide
gcauauuucuugcggcauu

SEQ ID NO: 2822945 - RNA, 19 nt, Artificial Sequence
  Description of Artificial Sequence: Synthetic oligonucleotide
cauacccugcagucagcau

SEQ ID NO: 2822946 - RNA, 19 nt, Artificial Sequence
  Description of Artificial Sequence: Synthetic oligonucleotide
cugagacugagaggucucu

SEQ ID NO: 2822947 - RNA, 19 nt, Artificial Sequence
  Description of Artificial Sequence: Synthetic oligonucleotide
gccaccuguucaugucauc

SEQ ID NO: 2822948 - RNA, 19 nt, Artificial Sequence
  Description of Artificial Sequence: Synthetic oligonucleotide
cugcagucagcauguuaau

SEQ ID NO: 2822949 - RNA, 19 nt, Artificial Sequence
  Description of Artificial Sequence: Synthetic oligonucleotide
cacuggcucuaucaauuuu

SEQ ID NO: 2822950 - RNA, 19 nt, Artificial Sequence
  Description of Artificial Sequence: Synthetic oligonucleotide
gaggagggcgugucuuguu

SEQ ID NO: 2822951 - RNA, 19 nt, Artificial Sequence
  Description of Artificial Sequence: Synthetic oligonucleotide
ggucucuguggaggacagc

SEQ ID NO: 2822952 - RNA, 19 nt, Artificial Sequence
  Description of Artificial Sequence: Synthetic oligonucleotide
gggcgugucuuguuucggu

SEQ ID NO: 2822953 - RNA, 19 nt, Artificial Sequence
  Description of Artificial Sequence: Synthetic oligonucleotide
ggaggacagccggcugugc

SEQ ID NO: 2822954 - RNA, 19 nt, Artificial Sequence
  Description of Artificial Sequence: Synthetic oligonucleotide
gcggcauucacuggcucua

SEQ ID NO: 2822955 - RNA, 19 nt, Artificial Sequence
  Description of Artificial Sequence: Synthetic oligonucleotide
ggcagacugaugaauccuu

SEQ ID NO: 2822956 - RNA, 19 nt, Artificial Sequence
  Description of Artificial Sequence: Synthetic oligonucleotide
ggcgugucuuguuucgguu

SEQ ID NO: 2822957 - RNA, 19 nt, Artificial Sequence
  Description of Artificial Sequence: Synthetic oligonucleotide
caguaacuuccuggcgaaa

SEQ ID NO: 2822958 - RNA, 19 nt, Artificial Sequence
  Description of Artificial Sequence: Synthetic oligonucleotide
gacuggcggucuugcgaau

SEQ ID NO: 2822959 - RNA, 19 nt, Artificial Sequence
  Description of Artificial Sequence: Synthetic oligonucleotide
ggcaggcuuugaaugcaua

SEQ ID NO: 2822960 - RNA, 19 nt, Artificial Sequence
  Description of Artificial Sequence: Synthetic oligonucleotide
ggaggagggcgugucuugu

SEQ ID NO: 2822961 - RNA, 19 nt, Artificial Sequence
  Description of Artificial Sequence: Synthetic oligonucleotide
cgugucuuguuucgguugu

SEQ ID NO: 2822962 - RNA, 19 nt, Artificial Sequence
  Description of Artificial Sequence: Synthetic oligonucleotide
ggaggccguggguauguau

SEQ ID NO: 2822963 - RNA, 19 nt, Artificial Sequence
  Description of Artificial Sequence: Synthetic oligonucleotide
cgcugacuggcggucuugc

SEQ ID NO: 2822964 - RNA, 19 nt, Artificial Sequence
  Description of Artificial Sequence: Synthetic oligonucleotide
cagccggcugugcuuugcu

SEQ ID NO: 2822965 - RNA, 19 nt, Artificial Sequence
  Description of Artificial Sequence: Synthetic oligonucleotide
gcgcugacuggcggucuug

SEQ ID NO: 2822966 - RNA, 19 nt, Artificial Sequence
  Description of Artificial Sequence: Synthetic oligonucleotide
cccugcagucagcauguua

SEQ ID NO: 2822967 - RNA, 19 nt, Artificial Sequence
  Description of Artificial Sequence: Synthetic oligonucleotide
gcggcgcugacuggcgguc

SEQ ID NO: 2822968 - RNA, 19 nt, Artificial Sequence
  Description of Artificial Sequence: Synthetic oligonucleotide
ggacagccggcugugcuuu

SEQ ID NO: 2822969 - RNA, 19 nt, Artificial Sequence
  Description of Artificial Sequence: Synthetic oligonucleotide
ggggaggagggcgugucuu

SEQ ID NO: 2822970 - RNA, 19 nt, Artificial Sequence
  Description of Artificial Sequence: Synthetic oligonucleotide
acccugcagucagcauguu

SEQ ID NO: 2822971 - RNA, 19 nt, Artificial Sequence
  Description of Artificial Sequence: Synthetic oligonucleotide
ggcgcugacuggcggucuu

SEQ ID NO: 2822972 - RNA, 19 nt, Artificial Sequence
  Description of Artificial Sequence: Synthetic oligonucleotide
ggccguggguauguaucau

SEQ ID NO: 2822973 - RNA, 19 nt, Artificial Sequence
  Description of Artificial Sequence: Synthetic oligonucleotide
gggaggccguggguaugua

SEQ ID NO: 2822974 - RNA, 19 nt, Artificial Sequence
  Description of Artificial Sequence: Synthetic oligonucleotide
cgguuguuguauggaguau

SEQ ID NO: 2822975 - RNA, 19 nt, Artificial Sequence
  Description of Artificial Sequence: Synthetic oligonucleotide
cggcugugcuuugcuucca

SEQ ID NO: 2822976 - RNA, 19 nt, Artificial Sequence
  Description of Artificial Sequence: Synthetic oligonucleotide
cggcauucacuggcucuau

SEQ ID NO: 2822977 - RNA, 19 nt, Artificial Sequence
  Description of Artificial Sequence: Synthetic oligonucleotide
cggcgcugacuggcggucu

SEQ ID NO: 2822978 - RNA, 19 nt, Artificial Sequence
  Description of Artificial Sequence: Synthetic oligonucleotide
acaagaauugaucugaucc

SEQ ID NO: 2822979 - RNA, 19 nt, Artificial Sequence
  Description of Artificial Sequence: Synthetic oligonucleotide
uccaacauggaguugaugg

SEQ ID NO: 2822980 - RNA, 19 nt, Artificial Sequence
  Description of Artificial Sequence: Synthetic oligonucleotide
aggaacauggccuagagag

SEQ ID NO: 2822981 - RNA, 19 nt, Artificial Sequence
  Description of Artificial Sequence: Synthetic oligonucleotide
ggaaagaugaaacucagcg

SEQ ID NO: 2822982 - RNA, 19 nt, Artificial Sequence
  Description of Artificial Sequence: Synthetic oligonucleotide
aagugaaugaguuguagga

SEQ ID NO: 2822983 - RNA, 19 nt, Artificial Sequence
  Description of Artificial Sequence: Synthetic oligonucleotide
uggagucuaagccagguag

SEQ ID NO: 2822984 - RNA, 19 nt, Artificial Sequence
  Description of Artificial Sequence: Synthetic oligonucleotide
ugaaugaguuguaggaccg

SEQ ID NO: 2822985 - RNA, 19 nt, Artificial Sequence
  Description of Artificial Sequence: Synthetic oligonucleotide
ugaguuguaggaccgacgc

SEQ ID NO: 2822986 - RNA, 19 nt, Artificial Sequence
  Description of Artificial Sequence: Synthetic oligonucleotide
auugaucugauccaacaug

SEQ ID NO: 2822987 - RNA, 19 nt, Artificial Sequence
  Description of Artificial Sequence: Synthetic oligonucleotide
gaucugauccaacauggag

SEQ ID NO: 2822988 - RNA, 19 nt, Artificial Sequence
  Description of Artificial Sequence: Synthetic oligonucleotide
cugagauggagucuaagcc

SEQ ID NO: 2822989 - RNA, 19 nt, Artificial Sequence
  Description of Artificial Sequence: Synthetic oligonucleotide
aaugaguuguaggaccgac

SEQ ID NO: 2822990 - RNA, 19 nt, Artificial Sequence
  Description of Artificial Sequence: Synthetic oligonucleotide
ugagauggagucuaagcca

SEQ ID NO: 2822991 - RNA, 19 nt, Artificial Sequence
  Description of Artificial Sequence: Synthetic oligonucleotide
caagugaaugaguuguagg

SEQ ID NO: 2822992 - RNA, 19 nt, Artificial Sequence
  Description of Artificial Sequence: Synthetic oligonucleotide
gacauugcgggcucgggcg

SEQ ID NO: 2822993 - RNA, 19 nt, Artificial Sequence
  Description of Artificial Sequence: Synthetic oligonucleotide
aauugaucugauccaacau

SEQ ID NO: 2822994 - RNA, 19 nt, Artificial Sequence
  Description of Artificial Sequence: Synthetic oligonucleotide
uccagacaagaauugaucu

SEQ ID NO: 2822995 - RNA, 19 nt, Artificial Sequence
  Description of Artificial Sequence: Synthetic oligonucleotide
ugaaacucagcgaccgccg

SEQ ID NO: 2822996 - RNA, 19 nt, Artificial Sequence
  Description of Artificial Sequence: Synthetic oligonucleotide
augaaacucagcgaccgcc

SEQ ID NO: 2822997 - RNA, 19 nt, Artificial Sequence
  Description of Artificial Sequence: Synthetic oligonucleotide
gacgccuggcuccagaagg

SEQ ID NO: 2822998 - RNA, 19 nt, Artificial Sequence
  Description of Artificial Sequence: Synthetic oligonucleotide
gugaaugaguuguaggacc

SEQ ID NO: 2822999 - RNA, 19 nt, Artificial Sequence
  Description of Artificial Sequence: Synthetic oligonucleotide
ugauccaacauggaguuga

SEQ ID NO: 2823000 - RNA, 19 nt, Artificial Sequence
  Description of Artificial Sequence: Synthetic oligonucleotide
aguugauggcagcauacuc

SEQ ID NO: 2823001 - RNA, 19 nt, Artificial Sequence
  Description of Artificial Sequence: Synthetic oligonucleotide
agccagguagcaucuaccc

SEQ ID NO: 2823002 - RNA, 19 nt, Artificial Sequence
  Description of Artificial Sequence: Synthetic oligonucleotide
aagaugaaacucagcgacc

SEQ ID NO: 2823003 - RNA, 19 nt, Artificial Sequence
  Description of Artificial Sequence: Synthetic oligonucleotide
uggaauuccagucgugucu

SEQ ID NO: 2823004 - RNA, 19 nt, Artificial Sequence
  Description of Artificial Sequence: Synthetic oligonucleotide
gaauugaucugauccaaca

SEQ ID NO: 2823005 - RNA, 19 nt, Artificial Sequence
  Description of Artificial Sequence: Synthetic oligonucleotide
agugaaugaguuguaggac

SEQ ID NO: 2823006 - RNA, 19 nt, Artificial Sequence
  Description of Artificial Sequence: Synthetic oligonucleotide
agaugaaacucagcgaccg

SEQ ID NO: 2823007 - RNA, 19 nt, Artificial Sequence
  Description of Artificial Sequence: Synthetic oligonucleotide
uuggacuccagcaauuccu

SEQ ID NO: 2823008 - RNA, 19 nt, Artificial Sequence
  Description of Artificial Sequence: Synthetic oligonucleotide
guagcaucuacccaggcca

SEQ ID NO: 2823009 - RNA, 19 nt, Artificial Sequence
  Description of Artificial Sequence: Synthetic oligonucleotide
gaaagaugaaacucagcga

SEQ ID NO: 2823010 - RNA, 19 nt, Artificial Sequence
  Description of Artificial Sequence: Synthetic oligonucleotide
auuccagucgugucugucg

SEQ ID NO: 2823011 - RNA, 19 nt, Artificial Sequence
  Description of Artificial Sequence: Synthetic oligonucleotide
gucauucucgccuuccgcg

SEQ ID NO: 2823012 - RNA, 19 nt, Artificial Sequence
  Description of Artificial Sequence: Synthetic oligonucleotide
agacaagugaaugaguugu

SEQ ID NO: 2823013 - RNA, 19 nt, Artificial Sequence
  Description of Artificial Sequence: Synthetic oligonucleotide
uugauggcagcauacucug

SEQ ID NO: 2823014 - RNA, 19 nt, Artificial Sequence
  Description of Artificial Sequence: Synthetic oligonucleotide
aaacucagcgaccgccgcg

SEQ ID NO: 2823015 - RNA, 19 nt, Artificial Sequence
  Description of Artificial Sequence: Synthetic oligonucleotide
gaacauggccuagagaggc

SEQ ID NO: 2823016 - RNA, 19 nt, Artificial Sequence
  Description of Artificial Sequence: Synthetic oligonucleotide
aacucagcgaccgccgcgc

SEQ ID NO: 2823017 - RNA, 19 nt, Artificial Sequence
  Description of Artificial Sequence: Synthetic oligonucleotide
aggccaguaccugagaugg

SEQ ID NO: 2823018 - RNA, 19 nt, Artificial Sequence
  Description of Artificial Sequence: Synthetic oligonucleotide
uccagcaauuccuggaggc

SEQ ID NO: 2823019 - RNA, 19 nt, Artificial Sequence
  Description of Artificial Sequence: Synthetic oligonucleotide
aggaccgacgccuggcucc

SEQ ID NO: 2823020 - RNA, 19 nt, Artificial Sequence
  Description of Artificial Sequence: Synthetic oligonucleotide
aagcuguugcuggaauucc

SEQ ID NO: 2823021 - RNA, 19 nt, Artificial Sequence
  Description of Artificial Sequence: Synthetic oligonucleotide
uguugcuggaauuccaguc

SEQ ID NO: 2823022 - RNA, 19 nt, Artificial Sequence
  Description of Artificial Sequence: Synthetic oligonucleotide
uacucugcuuccccgaagc

SEQ ID NO: 2823023 - RNA, 19 nt, Artificial Sequence
  Description of Artificial Sequence: Synthetic oligonucleotide
aaggccaguaccugagaug

SEQ ID NO: 2823024 - RNA, 19 nt, Artificial Sequence
  Description of Artificial Sequence: Synthetic oligonucleotide
gaagcugucauucucgccu

SEQ ID NO: 2823025 - RNA, 19 nt, Artificial Sequence
  Description of Artificial Sequence: Synthetic oligonucleotide
ucuacccaggccaggaaca

SEQ ID NO: 2823026 - RNA, 19 nt, Artificial Sequence
  Description of Artificial Sequence: Synthetic oligonucleotide
ucugauccaacauggaguu

SEQ ID NO: 2823027 - RNA, 19 nt, Artificial Sequence
  Description of Artificial Sequence: Synthetic oligonucleotide
aguuguaggaccgacgccu

SEQ ID NO: 2823028 - RNA, 19 nt, Artificial Sequence
  Description of Artificial Sequence: Synthetic oligonucleotide
aagccagguagcaucuacc

SEQ ID NO: 2823029 - RNA, 19 nt, Artificial Sequence
  Description of Artificial Sequence: Synthetic oligonucleotide
uccagaagggaugaugggc

SEQ ID NO: 2823030 - RNA, 19 nt, Artificial Sequence
  Description of Artificial Sequence: Synthetic oligonucleotide
gagauggagucuaagccag

SEQ ID NO: 2823031 - RNA, 19 nt, Artificial Sequence
  Description of Artificial Sequence: Synthetic oligonucleotide
ucuaagccagguagcaucu

SEQ ID NO: 2823032 - RNA, 19 nt, Artificial Sequence
  Description of Artificial Sequence: Synthetic oligonucleotide
aauuccagucgugucuguc

SEQ ID NO: 2823033 - RNA, 19 nt, Artificial Sequence
  Description of Artificial Sequence: Synthetic oligonucleotide
ugucgguuggacuccagca

SEQ ID NO: 2823034 - RNA, 19 nt, Artificial Sequence
  Description of Artificial Sequence: Synthetic oligonucleotide
agcauacucugcuuccccg

SEQ ID NO: 2823035 - RNA, 19 nt, Artificial Sequence
  Description of Artificial Sequence: Synthetic oligonucleotide
uaagccagguagcaucuac

SEQ ID NO: 2823036 - RNA, 19 nt, Artificial Sequence
  Description of Artificial Sequence: Synthetic oligonucleotide
agucgugucugucgguugg

SEQ ID NO: 2823037 - RNA, 19 nt, Artificial Sequence
  Description of Artificial Sequence: Synthetic oligonucleotide
aagaauugaucugauccaa

SEQ ID NO: 2823038 - RNA, 19 nt, Artificial Sequence
  Description of Artificial Sequence: Synthetic oligonucleotide
aacauggaguugauggcag

SEQ ID NO: 2823039 - RNA, 19 nt, Artificial Sequence
  Description of Artificial Sequence: Synthetic oligonucleotide
ggaucugaaggccaguacc

SEQ ID NO: 2823040 - RNA, 19 nt, Artificial Sequence
  Description of Artificial Sequence: Synthetic oligonucleotide
ucugaaggccaguaccuga

SEQ ID NO: 2823041 - RNA, 19 nt, Artificial Sequence
  Description of Artificial Sequence: Synthetic oligonucleotide
caagaauugaucugaucca

SEQ ID NO: 2823042 - RNA, 19 nt, Artificial Sequence
  Description of Artificial Sequence: Synthetic oligonucleotide
guccuggcgaccuaggggc

SEQ ID NO: 2823043 - RNA, 19 nt, Artificial Sequence
  Description of Artificial Sequence: Synthetic oligonucleotide
ugucauucucgccuuccgc

SEQ ID NO: 2823044 - RNA, 19 nt, Artificial Sequence
  Description of Artificial Sequence: Synthetic oligonucleotide
acauggaguugauggcagc

SEQ ID NO: 2823045 - RNA, 19 nt, Artificial Sequence
  Description of Artificial Sequence: Synthetic oligonucleotide
acaagugaaugaguuguag

SEQ ID NO: 2823046 - RNA, 19 nt, Artificial Sequence
  Description of Artificial Sequence: Synthetic oligonucleotide
gucuaagccagguagcauc

SEQ ID NO: 2823047 - RNA, 19 nt, Artificial Sequence
  Description of Artificial Sequence: Synthetic oligonucleotide
gaagggaugaugggcagug

SEQ ID NO: 2823048 - RNA, 19 nt, Artificial Sequence
  Description of Artificial Sequence: Synthetic oligonucleotide
gaugaugggcaguggggcc

SEQ ID NO: 2823049 - RNA, 19 nt, Artificial Sequence
  Description of Artificial Sequence: Synthetic oligonucleotide
cacggaaagaugaaacuca

SEQ ID NO: 2823050 - RNA, 19 nt, Artificial Sequence
  Description of Artificial Sequence: Synthetic oligonucleotide
augccuagguccccguugg

SEQ ID NO: 2823051 - RNA, 19 nt, Artificial Sequence
  Description of Artificial Sequence: Synthetic oligonucleotide
agaauugaucugauccaac

SEQ ID NO: 2823052 - RNA, 19 nt, Artificial Sequence
  Description of Artificial Sequence: Synthetic oligonucleotide
uggacuccagcaauuccug

SEQ ID NO: 2823053 - RNA, 19 nt, Artificial Sequence
  Description of Artificial Sequence: Synthetic oligonucleotide
ucguucuucuccuccaggu

SEQ ID NO: 2823054 - RNA, 19 nt, Artificial Sequence
  Description of Artificial Sequence: Synthetic oligonucleotide
uggggcccgacauugcggg

SEQ ID NO: 2823055 - RNA, 19 nt, Artificial Sequence
  Description of Artificial Sequence: Synthetic oligonucleotide
aauuccuggaggcgggcau

SEQ ID NO: 2823056 - RNA, 19 nt, Artificial Sequence
  Description of Artificial Sequence: Synthetic oligonucleotide
gaggcgggcauggaggugg

SEQ ID NO: 2823057 - RNA, 19 nt, Artificial Sequence
  Description of Artificial Sequence: Synthetic oligonucleotide
cugaaggccaguaccugag

SEQ ID NO: 2823058 - RNA, 19 nt, Artificial Sequence
  Description of Artificial Sequence: Synthetic oligonucleotide
ucauucucgccuuccgcgc

SEQ ID NO: 2823059 - RNA, 19 nt, Artificial Sequence
  Description of Artificial Sequence: Synthetic oligonucleotide
ccagguagcaucuacccag

SEQ ID NO: 2823060 - RNA, 19 nt, Artificial Sequence
  Description of Artificial Sequence: Synthetic oligonucleotide
gugucugucgguuggacuc

SEQ ID NO: 2823061 - RNA, 19 nt, Artificial Sequence
  Description of Artificial Sequence: Synthetic oligonucleotide
ugaucugauccaacaugga

SEQ ID NO: 2823062 - RNA, 19 nt, Artificial Sequence
  Description of Artificial Sequence: Synthetic oligonucleotide
cuaggggcuggcaucacug

SEQ ID NO: 2823063 - RNA, 19 nt, Artificial Sequence
  Description of Artificial Sequence: Synthetic oligonucleotide
cuccccaagcuguugcugg

SEQ ID NO: 2823064 - RNA, 19 nt, Artificial Sequence
  Description of Artificial Sequence: Synthetic oligonucleotide
guuggggcccgacauugcg

SEQ ID NO: 2823065 - RNA, 19 nt, Artificial Sequence
  Description of Artificial Sequence: Synthetic oligonucleotide
cagacaagugaaugaguug

SEQ ID NO: 2823066 - RNA, 19 nt, Artificial Sequence
  Description of Artificial Sequence: Synthetic oligonucleotide
cagacaagaauugaucuga

SEQ ID NO: 2823067 - RNA, 19 nt, Artificial Sequence
  Description of Artificial Sequence: Synthetic oligonucleotide
uuggggcccgacauugcgg

SEQ ID NO: 2823068 - RNA, 19 nt, Artificial Sequence
  Description of Artificial Sequence: Synthetic oligonucleotide
gacaagaauugaucugauc

SEQ ID NO: 2823069 - RNA, 19 nt, Artificial Sequence
  Description of Artificial Sequence: Synthetic oligonucleotide
auucucgccuuccgcgccc

SEQ ID NO: 2823070 - RNA, 19 nt, Artificial Sequence
  Description of Artificial Sequence: Synthetic oligonucleotide
ggcugguagacccacuggg

SEQ ID NO: 2823071 - RNA, 19 nt, Artificial Sequence
  Description of Artificial Sequence: Synthetic oligonucleotide
uugcuggaauuccagucgu

SEQ ID NO: 2823072 - RNA, 19 nt, Artificial Sequence
  Description of Artificial Sequence: Synthetic oligonucleotide
gaugaaacucagcgaccgc

SEQ ID NO: 2823073 - RNA, 19 nt, Artificial Sequence
  Description of Artificial Sequence: Synthetic oligonucleotide
guuggacuccagcaauucc

SEQ ID NO: 2823074 - RNA, 19 nt, Artificial Sequence
  Description of Artificial Sequence: Synthetic oligonucleotide
acauugcgggcucgggcgc

SEQ ID NO: 2823075 - RNA, 19 nt, Artificial Sequence
  Description of Artificial Sequence: Synthetic oligonucleotide
auggagguggucguucuuc

SEQ ID NO: 2823076 - RNA, 19 nt, Artificial Sequence
  Description of Artificial Sequence: Synthetic oligonucleotide
auggccuagagaggcaagg

SEQ ID NO: 2823077 - RNA, 19 nt, Artificial Sequence
  Description of Artificial Sequence: Synthetic oligonucleotide
gaaacucagcgaccgccgc

SEQ ID NO: 2823078 - RNA, 19 nt, Artificial Sequence
  Description of Artificial Sequence: Synthetic oligonucleotide
uuguaggaccgacgccugg

SEQ ID NO: 2823079 - RNA, 19 nt, Artificial Sequence
  Description of Artificial Sequence: Synthetic oligonucleotide
gguagcaucuacccaggcc

SEQ ID NO: 2823080 - RNA, 19 nt, Artificial Sequence
  Description of Artificial Sequence: Synthetic oligonucleotide
caguaccugagauggaguc

SEQ ID NO: 2823081 - RNA, 19 nt, Artificial Sequence
  Description of Artificial Sequence: Synthetic oligonucleotide
uguaggaccgacgccuggc

SEQ ID NO: 2823082 - RNA, 19 nt, Artificial Sequence
  Description of Artificial Sequence: Synthetic oligonucleotide
gcuccagaagggaugaugg

SEQ ID NO: 2823083 - RNA, 19 nt, Artificial Sequence
  Description of Artificial Sequence: Synthetic oligonucleotide
agguagcaucuacccaggc

SEQ ID NO: 2823084 - RNA, 19 nt, Artificial Sequence
  Description of Artificial Sequence: Synthetic oligonucleotide
ucgguuggacuccagcaau

SEQ ID NO: 2823085 - RNA, 19 nt, Artificial Sequence
  Description of Artificial Sequence: Synthetic oligonucleotide
agaggccacggaaagauga

SEQ ID NO: 2823086 - RNA, 19 nt, Artificial Sequence
  Description of Artificial Sequence: Synthetic oligonucleotide
augaugggcaguggggccg

SEQ ID NO: 2823087 - RNA, 19 nt, Artificial Sequence
  Description of Artificial Sequence: Synthetic oligonucleotide
cuccagaagggaugauggg

SEQ ID NO: 2823088 - RNA, 19 nt, Artificial Sequence
  Description of Artificial Sequence: Synthetic oligonucleotide
uggccuagagaggcaaggg

SEQ ID NO: 2823089 - RNA, 19 nt, Artificial Sequence
  Description of Artificial Sequence: Synthetic oligonucleotide
uggaguugauggcagcaua

SEQ ID NO: 2823090 - RNA, 19 nt, Artificial Sequence
  Description of Artificial Sequence: Synthetic oligonucleotide
augaguuguaggaccgacg

SEQ ID NO: 2823091 - RNA, 19 nt, Artificial Sequence
  Description of Artificial Sequence: Synthetic oligonucleotide
aggggcuggcaucacuggg

SEQ ID NO: 2823092 - RNA, 19 nt, Artificial Sequence
  Description of Artificial Sequence: Synthetic oligonucleotide
gguccaggcugguagaccc

SEQ ID NO: 2823093 - RNA, 19 nt, Artificial Sequence
  Description of Artificial Sequence: Synthetic oligonucleotide
uaggggcuggcaucacugg

SEQ ID NO: 2823094 - RNA, 19 nt, Artificial Sequence
  Description of Artificial Sequence: Synthetic oligonucleotide
acggaaagaugaaacucag

SEQ ID NO: 2823095 - RNA, 19 nt, Artificial Sequence
  Description of Artificial Sequence: Synthetic oligonucleotide
uagcaucuacccaggccag

SEQ ID NO: 2823096 - RNA, 19 nt, Artificial Sequence
  Description of Artificial Sequence: Synthetic oligonucleotide
cugucauucucgccuuccg

SEQ ID NO: 2823097 - RNA, 19 nt, Artificial Sequence
  Description of Artificial Sequence: Synthetic oligonucleotide
cagguagcaucuacccagg

SEQ ID NO: 2823098 - RNA, 19 nt, Artificial Sequence
  Description of Artificial Sequence: Synthetic oligonucleotide
caugccuagguccccguug

SEQ ID NO: 2823099 - RNA, 19 nt, Artificial Sequence
  Description of Artificial Sequence: Synthetic oligonucleotide
gaguuguaggaccgacgcc

SEQ ID NO: 2823100 - RNA, 19 nt, Artificial Sequence
  Description of Artificial Sequence: Synthetic oligonucleotide
uagagaggcaagggugggg

SEQ ID NO: 2823101 - RNA, 19 nt, Artificial Sequence
  Description of Artificial Sequence: Synthetic oligonucleotide
gucguucuucuccuccagg

SEQ ID NO: 2823102 - RNA, 19 nt, Artificial Sequence
  Description of Artificial Sequence: Synthetic oligonucleotide
aggcugguagacccacugg

SEQ ID NO: 2823103 - RNA, 19 nt, Artificial Sequence
  Description of Artificial Sequence: Synthetic oligonucleotide
uggcagcauacucugcuuc

SEQ ID NO: 2823104 - RNA, 19 nt, Artificial Sequence
  Description of Artificial Sequence: Synthetic oligonucleotide
cuggaauuccagucguguc

SEQ ID NO: 2823105 - RNA, 19 nt, Artificial Sequence
  Description of Artificial Sequence: Synthetic oligonucleotide
auacucugcuuccccgaag

SEQ ID NO: 2823106 - RNA, 19 nt, Artificial Sequence
  Description of Artificial Sequence: Synthetic oligonucleotide
guggucguucuucuccucc

SEQ ID NO: 2823107 - RNA, 19 nt, Artificial Sequence
  Description of Artificial Sequence: Synthetic oligonucleotide
uuccccgaagcugucauuc

SEQ ID NO: 2823108 - RNA, 19 nt, Artificial Sequence
  Description of Artificial Sequence: Synthetic oligonucleotide
ugaaggccaguaccugaga

SEQ ID NO: 2823109 - RNA, 19 nt, Artificial Sequence
  Description of Artificial Sequence: Synthetic oligonucleotide
cuccaggugguccagacaa

SEQ ID NO: 2823110 - RNA, 19 nt, Artificial Sequence
  Description of Artificial Sequence: Synthetic oligonucleotide
uggucguucuucuccucca

SEQ ID NO: 2823111 - RNA, 19 nt, Artificial Sequence
  Description of Artificial Sequence: Synthetic oligonucleotide
cuagguccccguuggggcc

SEQ ID NO: 2823112 - RNA, 19 nt, Artificial Sequence
  Description of Artificial Sequence: Synthetic oligonucleotide
ccaacauggaguugauggc

SEQ ID NO: 2823113 - RNA, 19 nt, Artificial Sequence
  Description of Artificial Sequence: Synthetic oligonucleotide
ugguccagacaagaauuga

SEQ ID NO: 2823114 - RNA, 19 nt, Artificial Sequence
  Description of Artificial Sequence: Synthetic oligonucleotide
guugauggcagcauacucu

SEQ ID NO: 2823115 - RNA, 19 nt, Artificial Sequence
  Description of Artificial Sequence: Synthetic oligonucleotide
guccagacaagaauugauc

SEQ ID NO: 2823116 - RNA, 19 nt, Artificial Sequence
  Description of Artificial Sequence: Synthetic oligonucleotide
gagucuaagccagguagca

SEQ ID NO: 2823117 - RNA, 19 nt, Artificial Sequence
  Description of Artificial Sequence: Synthetic oligonucleotide
ugauggcagcauacucugc

SEQ ID NO: 2823118 - RNA, 19 nt, Artificial Sequence
  Description of Artificial Sequence: Synthetic oligonucleotide
cuagagaggcaaggguggg

SEQ ID NO: 2823119 - RNA, 19 nt, Artificial Sequence
  Description of Artificial Sequence: Synthetic oligonucleotide
agcaauuccuggaggcggg

SEQ ID NO: 2823120 - RNA, 19 nt, Artificial Sequence
  Description of Artificial Sequence: Synthetic oligonucleotide
uccaggugguccagacaag

SEQ ID NO: 2823121 - RNA, 19 nt, Artificial Sequence
  Description of Artificial Sequence: Synthetic oligonucleotide
ugcuggaauuccagucgug

SEQ ID NO: 2823122 - RNA, 19 nt, Artificial Sequence
  Description of Artificial Sequence: Synthetic oligonucleotide
aguaccugagauggagucu

SEQ ID NO: 2823123 - RNA, 19 nt, Artificial Sequence
  Description of Artificial Sequence: Synthetic oligonucleotide
ccagacaagaauugaucug

SEQ ID NO: 2823124 - RNA, 19 nt, Artificial Sequence
  Description of Artificial Sequence: Synthetic oligonucleotide
uccgccggcaugccuaggu

SEQ ID NO: 2823125 - RNA, 19 nt, Artificial Sequence
  Description of Artificial Sequence: Synthetic oligonucleotide
ucagcgaccgccgcgcgga

SEQ ID NO: 2823126 - RNA, 19 nt, Artificial Sequence
  Description of Artificial Sequence: Synthetic oligonucleotide
caggcugguagacccacug

SEQ ID NO: 2823127 - RNA, 19 nt, Artificial Sequence
  Description of Artificial Sequence: Synthetic oligonucleotide
cauucucgccuuccgcgcc

SEQ ID NO: 2823128 - RNA, 19 nt, Artificial Sequence
  Description of Artificial Sequence: Synthetic oligonucleotide
agguggucguucuucuccu

SEQ ID NO: 2823129 - RNA, 19 nt, Artificial Sequence
  Description of Artificial Sequence: Synthetic oligonucleotide
caacauggaguugauggca

SEQ ID NO: 2823130 - RNA, 19 nt, Artificial Sequence
  Description of Artificial Sequence: Synthetic oligonucleotide
ggcagcauacucugcuucc

SEQ ID NO: 2823131 - RNA, 19 nt, Artificial Sequence
  Description of Artificial Sequence: Synthetic oligonucleotide
ggaacauggccuagagagg

SEQ ID NO: 2823132 - RNA, 19 nt, Artificial Sequence
  Description of Artificial Sequence: Synthetic oligonucleotide
ugucugucgguuggacucc

SEQ ID NO: 2823133 - RNA, 19 nt, Artificial Sequence
  Description of Artificial Sequence: Synthetic oligonucleotide
aagcugucauucucgccuu

SEQ ID NO: 2823134 - RNA, 19 nt, Artificial Sequence
  Description of Artificial Sequence: Synthetic oligonucleotide
uccuccaggugguccagac

SEQ ID NO: 2823135 - RNA, 19 nt, Artificial Sequence
  Description of Artificial Sequence: Synthetic oligonucleotide
cccgaagcugucauucucg

SEQ ID NO: 2823136 - RNA, 19 nt, Artificial Sequence
  Description of Artificial Sequence: Synthetic oligonucleotide
gggaugaugggcagugggg

SEQ ID NO: 2823137 - RNA, 19 nt, Artificial Sequence
  Description of Artificial Sequence: Synthetic oligonucleotide
gaucugaaggccaguaccu

SEQ ID NO: 2823138 - RNA, 19 nt, Artificial Sequence
  Description of Artificial Sequence: Synthetic oligonucleotide
ccuagguccccguuggggc

SEQ ID NO: 2823139 - RNA, 19 nt, Artificial Sequence
  Description of Artificial Sequence: Synthetic oligonucleotide
cucugcuuccccgaagcug

SEQ ID NO: 2823140 - RNA, 19 nt, Artificial Sequence
  Description of Artificial Sequence: Synthetic oligonucleotide
ggaauuccagucgugucug

SEQ ID NO: 2823141 - RNA, 19 nt, Artificial Sequence
  Description of Artificial Sequence: Synthetic oligonucleotide
cauggccuagagaggcaag

SEQ ID NO: 2823142 - RNA, 19 nt, Artificial Sequence
  Description of Artificial Sequence: Synthetic oligonucleotide
ugggcaguggggccguggu

SEQ ID NO: 2823143 - RNA, 19 nt, Artificial Sequence
  Description of Artificial Sequence: Synthetic oligonucleotide
gugguccagacaagaauug

SEQ ID NO: 2823144 - RNA, 19 nt, Artificial Sequence
  Description of Artificial Sequence: Synthetic oligonucleotide
aucugaaggccaguaccug

SEQ ID NO: 2823145 - RNA, 19 nt, Artificial Sequence
  Description of Artificial Sequence: Synthetic oligonucleotide
uggaggcgggcauggaggu

SEQ ID NO: 2823146 - RNA, 19 nt, Artificial Sequence
  Description of Artificial Sequence: Synthetic oligonucleotide
ucugucgguuggacuccag

SEQ ID NO: 2823147 - RNA, 19 nt, Artificial Sequence
  Description of Artificial Sequence: Synthetic oligonucleotide
ucgggcgccgcagaggcca

SEQ ID NO: 2823148 - RNA, 19 nt, Artificial Sequence
  Description of Artificial Sequence: Synthetic oligonucleotide
gccaguaccugagauggag

SEQ ID NO: 2823149 - RNA, 19 nt, Artificial Sequence
  Description of Artificial Sequence: Synthetic oligonucleotide
gccuagagaggcaagggug

SEQ ID NO: 2823150 - RNA, 19 nt, Artificial Sequence
  Description of Artificial Sequence: Synthetic oligonucleotide
uccgcgcccgcauccgccg

SEQ ID NO: 2823151 - RNA, 19 nt, Artificial Sequence
  Description of Artificial Sequence: Synthetic oligonucleotide
uuccgcgcccgcauccgcc

SEQ ID NO: 2823152 - RNA, 19 nt, Artificial Sequence
  Description of Artificial Sequence: Synthetic oligonucleotide
aguggggccgugguccagg

SEQ ID NO: 2823153 - RNA, 19 nt, Artificial Sequence
  Description of Artificial Sequence: Synthetic oligonucleotide
ggaguugauggcagcauac

SEQ ID NO: 2823154 - RNA, 19 nt, Artificial Sequence
  Description of Artificial Sequence: Synthetic oligonucleotide
ugccuagguccccguuggg

SEQ ID NO: 2823155 - RNA, 19 nt, Artificial Sequence
  Description of Artificial Sequence: Synthetic oligonucleotide
ggcaguggggccguggucc

SEQ ID NO: 2823156 - RNA, 19 nt, Artificial Sequence
  Description of Artificial Sequence: Synthetic oligonucleotide
ggagucuaagccagguagc

SEQ ID NO: 2823157 - RNA, 19 nt, Artificial Sequence
  Description of Artificial Sequence: Synthetic oligonucleotide
gaaggccaguaccugagau

SEQ ID NO: 2823158 - RNA, 19 nt, Artificial Sequence
  Description of Artificial Sequence: Synthetic oligonucleotide
aacauggccuagagaggca

SEQ ID NO: 2823159 - RNA, 19 nt, Artificial Sequence
  Description of Artificial Sequence: Synthetic oligonucleotide
gucgguuggacuccagcaa

SEQ ID NO: 2823160 - RNA, 19 nt, Artificial Sequence
  Description of Artificial Sequence: Synthetic oligonucleotide
gauggagucuaagccaggu

SEQ ID NO: 2823161 - RNA, 19 nt, Artificial Sequence
  Description of Artificial Sequence: Synthetic oligonucleotide
uccccaagcuguugcugga

SEQ ID NO: 2823162 - RNA, 19 nt, Artificial Sequence
  Description of Artificial Sequence: Synthetic oligonucleotide
gcugguagacccacugggg

SEQ ID NO: 2823163 - RNA, 19 nt, Artificial Sequence
  Description of Artificial Sequence: Synthetic oligonucleotide
accugagauggagucuaag

SEQ ID NO: 2823164 - RNA, 19 nt, Artificial Sequence
  Description of Artificial Sequence: Synthetic oligonucleotide
agcaucuacccaggccagg

SEQ ID NO: 2823165 - RNA, 19 nt, Artificial Sequence
  Description of Artificial Sequence: Synthetic oligonucleotide
gcgggcauggagguggucg

SEQ ID NO: 2823166 - RNA, 19 nt, Artificial Sequence
  Description of Artificial Sequence: Synthetic oligonucleotide
ccagaagggaugaugggca

SEQ ID NO: 2823167 - RNA, 19 nt, Artificial Sequence
  Description of Artificial Sequence: Synthetic oligonucleotide
guaccugagauggagucua

SEQ ID NO: 2823168 - RNA, 19 nt, Artificial Sequence
  Description of Artificial Sequence: Synthetic oligonucleotide
gaaugaguuguaggaccga

SEQ ID NO: 2823169 - RNA, 19 nt, Artificial Sequence
  Description of Artificial Sequence: Synthetic oligonucleotide
auggagucuaagccaggua

SEQ ID NO: 2823170 - RNA, 19 nt, Artificial Sequence
  Description of Artificial Sequence: Synthetic oligonucleotide
agauggagucuaagccagg

SEQ ID NO: 2823171 - RNA, 19 nt, Artificial Sequence
  Description of Artificial Sequence: Synthetic oligonucleotide
gaccgccgcgcggaaagcg

SEQ ID NO: 2823172 - RNA, 19 nt, Artificial Sequence
  Description of Artificial Sequence: Synthetic oligonucleotide
agaagggaugaugggcagu

SEQ ID NO: 2823173 - RNA, 19 nt, Artificial Sequence
  Description of Artificial Sequence: Synthetic oligonucleotide
uaggaccgacgccuggcuc

SEQ ID NO: 2823174 - RNA, 19 nt, Artificial Sequence
  Description of Artificial Sequence: Synthetic oligonucleotide
ggccacggaaagaugaaac

SEQ ID NO: 2823175 - RNA, 19 nt, Artificial Sequence
  Description of Artificial Sequence: Synthetic oligonucleotide
ggggcuggcaucacugggg

SEQ ID NO: 2823176 - RNA, 19 nt, Artificial Sequence
  Description of Artificial Sequence: Synthetic oligonucleotide
uccaggcugguagacccac

SEQ ID NO: 2823177 - RNA, 19 nt, Artificial Sequence
  Description of Artificial Sequence: Synthetic oligonucleotide
acucugcuuccccgaagcu

SEQ ID NO: 2823178 - RNA, 19 nt, Artificial Sequence
  Description of Artificial Sequence: Synthetic oligonucleotide
guuguaggaccgacgccug

SEQ ID NO: 2823179 - RNA, 19 nt, Artificial Sequence
  Description of Artificial Sequence: Synthetic oligonucleotide
auggcagcauacucugcuu

SEQ ID NO: 2823180 - RNA, 19 nt, Artificial Sequence
  Description of Artificial Sequence: Synthetic oligonucleotide
acauggccuagagaggcaa

SEQ ID NO: 2823181 - RNA, 19 nt, Artificial Sequence
  Description of Artificial Sequence: Synthetic oligonucleotide
uccccguuggggcccgaca

SEQ ID NO: 2823182 - RNA, 19 nt, Artificial Sequence
  Description of Artificial Sequence: Synthetic oligonucleotide
cagucgugucugucgguug

SEQ ID NO: 2823183 - RNA, 19 nt, Artificial Sequence
  Description of Artificial Sequence: Synthetic oligonucleotide
auggaguugauggcagcau

SEQ ID NO: 2823184 - RNA, 19 nt, Artificial Sequence
  Description of Artificial Sequence: Synthetic oligonucleotide
ccacggaaagaugaaacuc

SEQ ID NO: 2823185 - RNA, 19 nt, Artificial Sequence
  Description of Artificial Sequence: Synthetic oligonucleotide
acgccuggcuccagaaggg

SEQ ID NO: 2823186 - RNA, 19 nt, Artificial Sequence
  Description of Artificial Sequence: Synthetic oligonucleotide
gaccuaggggcuggcauca

SEQ ID NO: 2823187 - RNA, 19 nt, Artificial Sequence
  Description of Artificial Sequence: Synthetic oligonucleotide
ggcuccagaagggaugaug

SEQ ID NO: 2823188 - RNA, 19 nt, Artificial Sequence
  Description of Artificial Sequence: Synthetic oligonucleotide
ccaggaacauggccuagag

SEQ ID NO: 2823189 - RNA, 19 nt, Artificial Sequence
  Description of Artificial Sequence: Synthetic oligonucleotide
ggucguucuucuccuccag

SEQ ID NO: 2823190 - RNA, 19 nt, Artificial Sequence
  Description of Artificial Sequence: Synthetic oligonucleotide
cucagcgaccgccgcgcgg

SEQ ID NO: 2823191 - RNA, 19 nt, Artificial Sequence
  Description of Artificial Sequence: Synthetic oligonucleotide
agucuaagccagguagcau

SEQ ID NO: 2823192 - RNA, 19 nt, Artificial Sequence
  Description of Artificial Sequence: Synthetic oligonucleotide
cagaggccacggaaagaug

SEQ ID NO: 2823193 - RNA, 19 nt, Artificial Sequence
  Description of Artificial Sequence: Synthetic oligonucleotide
agacaagaauugaucugau

SEQ ID NO: 2823194 - RNA, 19 nt, Artificial Sequence
  Description of Artificial Sequence: Synthetic oligonucleotide
gggaucugaaggccaguac

SEQ ID NO: 2823195 - RNA, 19 nt, Artificial Sequence
  Description of Artificial Sequence: Synthetic oligonucleotide
auccaacauggaguugaug

SEQ ID NO: 2823196 - RNA, 19 nt, Artificial Sequence
  Description of Artificial Sequence: Synthetic oligonucleotide
ccgugguccaggcugguag

SEQ ID NO: 2823197 - RNA, 19 nt, Artificial Sequence
  Description of Artificial Sequence: Synthetic oligonucleotide
cuggcgaccuaggggcugg

SEQ ID NO: 2823198 - RNA, 19 nt, Artificial Sequence
  Description of Artificial Sequence: Synthetic oligonucleotide
ccagcaauuccuggaggcg

SEQ ID NO: 2823199 - RNA, 19 nt, Artificial Sequence
  Description of Artificial Sequence: Synthetic oligonucleotide
gacaagugaaugaguugua

SEQ ID NO: 2823200 - RNA, 19 nt, Artificial Sequence
  Description of Artificial Sequence: Synthetic oligonucleotide
cauccgccggcaugccuag

SEQ ID NO: 2823201 - RNA, 19 nt, Artificial Sequence
  Description of Artificial Sequence: Synthetic oligonucleotide
acucagcgaccgccgcgcg

SEQ ID NO: 2823202 - RNA, 19 nt, Artificial Sequence
  Description of Artificial Sequence: Synthetic oligonucleotide
aggccaggaacauggccua

SEQ ID NO: 2823203 - RNA, 19 nt, Artificial Sequence
  Description of Artificial Sequence: Synthetic oligonucleotide
uucucgccuuccgcgcccg

SEQ ID NO: 2823204 - RNA, 19 nt, Artificial Sequence
  Description of Artificial Sequence: Synthetic oligonucleotide
cauacucugcuuccccgaa

SEQ ID NO: 2823205 - RNA, 19 nt, Artificial Sequence
  Description of Artificial Sequence: Synthetic oligonucleotide
ucgugucugucgguuggac

SEQ ID NO: 2823206 - RNA, 19 nt, Artificial Sequence
  Description of Artificial Sequence: Synthetic oligonucleotide
uacccaggccaggaacaug

SEQ ID NO: 2823207 - RNA, 19 nt, Artificial Sequence
  Description of Artificial Sequence: Synthetic oligonucleotide
gaguugauggcagcauacu

SEQ ID NO: 2823208 - RNA, 19 nt, Artificial Sequence
  Description of Artificial Sequence: Synthetic oligonucleotide
uagguccccguuggggccc

SEQ ID NO: 2823209 - RNA, 19 nt, Artificial Sequence
  Description of Artificial Sequence: Synthetic oligonucleotide
gccuagguccccguugggg

SEQ ID NO: 2823210 - RNA, 19 nt, Artificial Sequence
  Description of Artificial Sequence: Synthetic oligonucleotide
ccgaagcugucauucucgc

SEQ ID NO: 2823211 - RNA, 19 nt, Artificial Sequence
  Description of Artificial Sequence: Synthetic oligonucleotide
caggaacauggccuagaga

SEQ ID NO: 2823212 - RNA, 19 nt, Artificial Sequence
  Description of Artificial Sequence: Synthetic oligonucleotide
ucgccuuccgcgcccgcau

SEQ ID NO: 2823213 - RNA, 19 nt, Artificial Sequence
  Description of Artificial Sequence: Synthetic oligonucleotide
auugcgggcucgggcgccg

SEQ ID NO: 2823214 - RNA, 19 nt, Artificial Sequence
  Description of Artificial Sequence: Synthetic oligonucleotide
uccuggcgaccuaggggcu

SEQ ID NO: 2823215 - RNA, 19 nt, Artificial Sequence
  Description of Artificial Sequence: Synthetic oligonucleotide
gcgaccgccgcgcggaaag

SEQ ID NO: 2823216 - RNA, 19 nt, Artificial Sequence
  Description of Artificial Sequence: Synthetic oligonucleotide
gcugucauucucgccuucc

SEQ ID NO: 2823217 - RNA, 19 nt, Artificial Sequence
  Description of Artificial Sequence: Synthetic oligonucleotide
accgccgcgcggaaagcgg

SEQ ID NO: 2823218 - RNA, 19 nt, Artificial Sequence
  Description of Artificial Sequence: Synthetic oligonucleotide
ugcuuccccgaagcuguca

SEQ ID NO: 2823219 - RNA, 19 nt, Artificial Sequence
  Description of Artificial Sequence: Synthetic oligonucleotide
accgacgccuggcuccaga

SEQ ID NO: 2823220 - RNA, 19 nt, Artificial Sequence
  Description of Artificial Sequence: Synthetic oligonucleotide
ccuggaggcgggcauggag

SEQ ID NO: 2823221 - RNA, 19 nt, Artificial Sequence
  Description of Artificial Sequence: Synthetic oligonucleotide
cguccuggcgaccuagggg

SEQ ID NO: 2823222 - RNA, 19 nt, Artificial Sequence
  Description of Artificial Sequence: Synthetic oligonucleotide
gguuggacuccagcaauuc

SEQ ID NO: 2823223 - RNA, 19 nt, Artificial Sequence
  Description of Artificial Sequence: Synthetic oligonucleotide
gcauacucugcuuccccga

SEQ ID NO: 2823224 - RNA, 19 nt, Artificial Sequence
  Description of Artificial Sequence: Synthetic oligonucleotide
gaggccacggaaagaugaa

SEQ ID NO: 2823225 - RNA, 19 nt, Artificial Sequence
  Description of Artificial Sequence: Synthetic oligonucleotide
cuuccgcgcccgcauccgc

SEQ ID NO: 2823226 - RNA, 19 nt, Artificial Sequence
  Description of Artificial Sequence: Synthetic oligonucleotide
cggaaagaugaaacucagc

SEQ ID NO: 2823227 - RNA, 19 nt, Artificial Sequence
  Description of Artificial Sequence: Synthetic oligonucleotide
ugaugggcaguggggccgu

SEQ ID NO: 2823228 - RNA, 19 nt, Artificial Sequence
  Description of Artificial Sequence: Synthetic oligonucleotide
gcguccuggcgaccuaggg

SEQ ID NO: 2823229 - RNA, 19 nt, Artificial Sequence
  Description of Artificial Sequence: Synthetic oligonucleotide
gccacggaaagaugaaacu

SEQ ID NO: 2823230 - RNA, 19 nt, Artificial Sequence
  Description of Artificial Sequence: Synthetic oligonucleotide
cauugcgggcucgggcgcc

SEQ ID NO: 2823231 - RNA, 19 nt, Artificial Sequence
  Description of Artificial Sequence: Synthetic oligonucleotide
cugauccaacauggaguug

SEQ ID NO: 2823232 - RNA, 19 nt, Artificial Sequence
  Description of Artificial Sequence: Synthetic oligonucleotide
aggccacggaaagaugaaa

SEQ ID NO: 2823233 - RNA, 19 nt, Artificial Sequence
  Description of Artificial Sequence: Synthetic oligonucleotide
gccagguagcaucuaccca

SEQ ID NO: 2823234 - RNA, 19 nt, Artificial Sequence
  Description of Artificial Sequence: Synthetic oligonucleotide
cuguugcuggaauuccagu

SEQ ID NO: 2823235 - RNA, 19 nt, Artificial Sequence
  Description of Artificial Sequence: Synthetic oligonucleotide
gugguccaggcugguagac

SEQ ID NO: 2823236 - RNA, 19 nt, Artificial Sequence
  Description of Artificial Sequence: Synthetic oligonucleotide
gaauuccagucgugucugu

SEQ ID NO: 2823237 - RNA, 19 nt, Artificial Sequence
  Description of Artificial Sequence: Synthetic oligonucleotide
gcaucuacccaggccagga

SEQ ID NO: 2823238 - RNA, 19 nt, Artificial Sequence
  Description of Artificial Sequence: Synthetic oligonucleotide
cgacauugcgggcucgggc

SEQ ID NO: 2823239 - RNA, 19 nt, Artificial Sequence
  Description of Artificial Sequence: Synthetic oligonucleotide
caauuccuggaggcgggca

SEQ ID NO: 2823240 - RNA, 19 nt, Artificial Sequence
  Description of Artificial Sequence: Synthetic oligonucleotide
guaggaccgacgccuggcu

SEQ ID NO: 2823241 - RNA, 19 nt, Artificial Sequence
  Description of Artificial Sequence: Synthetic oligonucleotide
cgaagcugucauucucgcc

SEQ ID NO: 2823242 - RNA, 19 nt, Artificial Sequence
  Description of Artificial Sequence: Synthetic oligonucleotide
cccgcauccgccggcaugc

SEQ ID NO: 2823243 - RNA, 19 nt, Artificial Sequence
  Description of Artificial Sequence: Synthetic oligonucleotide
guggggccgugguccaggc

SEQ ID NO: 2823244 - RNA, 19 nt, Artificial Sequence
  Description of Artificial Sequence: Synthetic oligonucleotide
gccggcaugccuagguccc

SEQ ID NO: 2823245 - RNA, 19 nt, Artificial Sequence
  Description of Artificial Sequence: Synthetic oligonucleotide
ccgcagaggccacggaaag

SEQ ID NO: 2823246 - RNA, 19 nt, Artificial Sequence
  Description of Artificial Sequence: Synthetic oligonucleotide
uggggccgugguccaggcu

SEQ ID NO: 2823247 - RNA, 19 nt, Artificial Sequence
  Description of Artificial Sequence: Synthetic oligonucleotide
ggcauggagguggucguuc

SEQ ID NO: 2823248 - RNA, 19 nt, Artificial Sequence
  Description of Artificial Sequence: Synthetic oligonucleotide
gguccagacaagaauugau

SEQ ID NO: 2823249 - RNA, 19 nt, Artificial Sequence
  Description of Artificial Sequence: Synthetic oligonucleotide
ggccuagagaggcaagggu

SEQ ID NO: 2823250 - RNA, 19 nt, Artificial Sequence
  Description of Artificial Sequence: Synthetic oligonucleotide
ucucgccuuccgcgcccgc

SEQ ID NO: 2823251 - RNA, 19 nt, Artificial Sequence
  Description of Artificial Sequence: Synthetic oligonucleotide
gcagaggccacggaaagau

SEQ ID NO: 2823252 - RNA, 19 nt, Artificial Sequence
  Description of Artificial Sequence: Synthetic oligonucleotide
ggcgccgcagaggccacgg

SEQ ID NO: 2823253 - RNA, 19 nt, Artificial Sequence
  Description of Artificial Sequence: Synthetic oligonucleotide
gccuuccgcgcccgcaucc

SEQ ID NO: 2823254 - RNA, 19 nt, Artificial Sequence
  Description of Artificial Sequence: Synthetic oligonucleotide
gauccaacauggaguugau

SEQ ID NO: 2823255 - RNA, 19 nt, Artificial Sequence
  Description of Artificial Sequence: Synthetic oligonucleotide
cucgggcgccgcagaggcc

SEQ ID NO: 2823256 - RNA, 19 nt, Artificial Sequence
  Description of Artificial Sequence: Synthetic oligonucleotide
cgccggcaugccuaggucc

SEQ ID NO: 2823257 - RNA, 19 nt, Artificial Sequence
  Description of Artificial Sequence: Synthetic oligonucleotide
ccguuggggcccgacauug

SEQ ID NO: 2823258 - RNA, 19 nt, Artificial Sequence
  Description of Artificial Sequence: Synthetic oligonucleotide
gguggucguucuucuccuc

SEQ ID NO: 2823259 - RNA, 19 nt, Artificial Sequence
  Description of Artificial Sequence: Synthetic oligonucleotide
ccccgaagcugucauucuc

SEQ ID NO: 2823260 - RNA, 19 nt, Artificial Sequence
  Description of Artificial Sequence: Synthetic oligonucleotide
ggcucgggcgccgcagagg

SEQ ID NO: 2823261 - RNA, 19 nt, Artificial Sequence
  Description of Artificial Sequence: Synthetic oligonucleotide
gcaauuccuggaggcgggc

SEQ ID NO: 2823262 - RNA, 19 nt, Artificial Sequence
  Description of Artificial Sequence: Synthetic oligonucleotide
gucgugucugucgguugga

SEQ ID NO: 2823263 - RNA, 19 nt, Artificial Sequence
  Description of Artificial Sequence: Synthetic oligonucleotide
uccuggaggcgggcaugga

SEQ ID NO: 2823264 - RNA, 19 nt, Artificial Sequence
  Description of Artificial Sequence: Synthetic oligonucleotide
cgaccuaggggcuggcauc

SEQ ID NO: 2823265 - RNA, 19 nt, Artificial Sequence
  Description of Artificial Sequence: Synthetic oligonucleotide
gggccgugguccaggcugg

SEQ ID NO: 2823266 - RNA, 19 nt, Artificial Sequence
  Description of Artificial Sequence: Synthetic oligonucleotide
ggcguccuggcgaccuagg

SEQ ID NO: 2823267 - RNA, 19 nt, Artificial Sequence
  Description of Artificial Sequence: Synthetic oligonucleotide
ccgccgcgcggaaagcggg

SEQ ID NO: 2823268 - RNA, 19 nt, Artificial Sequence
  Description of Artificial Sequence: Synthetic oligonucleotide
gucugucgguuggacucca

SEQ ID NO: 2823269 - RNA, 19 nt, Artificial Sequence
  Description of Artificial Sequence: Synthetic oligonucleotide
ggggaucugaaggccagua

SEQ ID NO: 2823270 - RNA, 19 nt, Artificial Sequence
  Description of Artificial Sequence: Synthetic oligonucleotide
gcccgcauccgccggcaug

SEQ ID NO: 2823271 - RNA, 19 nt, Artificial Sequence
  Description of Artificial Sequence: Synthetic oligonucleotide
ccgacauugcgggcucggg

SEQ ID NO: 2823272 - RNA, 19 nt, Artificial Sequence
  Description of Artificial Sequence: Synthetic oligonucleotide
agguccccguuggggcccg

SEQ ID NO: 2823273 - RNA, 19 nt, Artificial Sequence
  Description of Artificial Sequence: Synthetic oligonucleotide
gaugggcaguggggccgug

SEQ ID NO: 2823274 - RNA, 19 nt, Artificial Sequence
  Description of Artificial Sequence: Synthetic oligonucleotide
cccgacauugcgggcucgg

SEQ ID NO: 2823275 - RNA, 19 nt, Artificial Sequence
  Description of Artificial Sequence: Synthetic oligonucleotide
cccaggccaggaacauggc

SEQ ID NO: 2823276 - RNA, 19 nt, Artificial Sequence
  Description of Artificial Sequence: Synthetic oligonucleotide
gcauccgccggcaugccua

SEQ ID NO: 2823277 - RNA, 19 nt, Artificial Sequence
  Description of Artificial Sequence: Synthetic oligonucleotide
gcauggagguggucguucu

SEQ ID NO: 2823278 - RNA, 19 nt, Artificial Sequence
  Description of Artificial Sequence: Synthetic oligonucleotide
gggcucgggcgccgcagag

SEQ ID NO: 2823279 - RNA, 19 nt, Artificial Sequence
  Description of Artificial Sequence: Synthetic oligonucleotide
cucgccuuccgcgcccgca

SEQ ID NO: 2823280 - RNA, 19 nt, Artificial Sequence
  Description of Artificial Sequence: Synthetic oligonucleotide
ccuuccgcgcccgcauccg

SEQ ID NO: 2823281 - RNA, 19 nt, Artificial Sequence
  Description of Artificial Sequence: Synthetic oligonucleotide
guccaggcugguagaccca

SEQ ID NO: 2823282 - RNA, 19 nt, Artificial Sequence
  Description of Artificial Sequence: Synthetic oligonucleotide
gccgcagaggccacggaaa

SEQ ID NO: 2823283 - RNA, 19 nt, Artificial Sequence
  Description of Artificial Sequence: Synthetic oligonucleotide
ggccaggaacauggccuag

SEQ ID NO: 2823284 - RNA, 19 nt, Artificial Sequence
  Description of Artificial Sequence: Synthetic oligonucleotide
auccgccggcaugccuagg

SEQ ID NO: 2823285 - RNA, 19 nt, Artificial Sequence
  Description of Artificial Sequence: Synthetic oligonucleotide
ccuccccaagcuguugcug

SEQ ID NO: 2823286 - RNA, 19 nt, Artificial Sequence
  Description of Artificial Sequence: Synthetic oligonucleotide
uggcgaccuaggggcuggc

SEQ ID NO: 2823287 - RNA, 19 nt, Artificial Sequence
  Description of Artificial Sequence: Synthetic oligonucleotide
cuaagccagguagcaucua

SEQ ID NO: 2823288 - RNA, 19 nt, Artificial Sequence
  Description of Artificial Sequence: Synthetic oligonucleotide
ggcccgacauugcgggcuc

SEQ ID NO: 2823289 - RNA, 19 nt, Artificial Sequence
  Description of Artificial Sequence: Synthetic oligonucleotide
gcuuccccgaagcugucau

SEQ ID NO: 2823290 - RNA, 19 nt, Artificial Sequence
  Description of Artificial Sequence: Synthetic oligonucleotide
gcgaccuaggggcuggcau

SEQ ID NO: 2823291 - RNA, 19 nt, Artificial Sequence
  Description of Artificial Sequence: Synthetic oligonucleotide
cguuggggcccgacauugc

SEQ ID NO: 2823292 - RNA, 19 nt, Artificial Sequence
  Description of Artificial Sequence: Synthetic oligonucleotide
gcaguggggccguggucca

SEQ ID NO: 2823293 - RNA, 19 nt, Artificial Sequence
  Description of Artificial Sequence: Synthetic oligonucleotide
ggggcccgacauugcgggc

SEQ ID NO: 2823294 - RNA, 19 nt, Artificial Sequence
  Description of Artificial Sequence: Synthetic oligonucleotide
ccaguaccugagauggagu

SEQ ID NO: 2823295 - RNA, 19 nt, Artificial Sequence
  Description of Artificial Sequence: Synthetic oligonucleotide
gccgcgcggaaagcgggag

SEQ ID NO: 2823296 - RNA, 19 nt, Artificial Sequence
  Description of Artificial Sequence: Synthetic oligonucleotide
caguggggccgugguccag

SEQ ID NO: 2823297 - RNA, 19 nt, Artificial Sequence
  Description of Artificial Sequence: Synthetic oligonucleotide
uugcgggcucgggcgccgc

SEQ ID NO: 2823298 - RNA, 19 nt, Artificial Sequence
  Description of Artificial Sequence: Synthetic oligonucleotide
ggaggcgggcauggaggug

SEQ ID NO: 2823299 - RNA, 19 nt, Artificial Sequence
  Description of Artificial Sequence: Synthetic oligonucleotide
uggcuccagaagggaugau

SEQ ID NO: 2823300 - RNA, 19 nt, Artificial Sequence
  Description of Artificial Sequence: Synthetic oligonucleotide
ccgcgcggaaagcgggagc

SEQ ID NO: 2823301 - RNA, 19 nt, Artificial Sequence
  Description of Artificial Sequence: Synthetic oligonucleotide
gggcaguggggccgugguc

SEQ ID NO: 2823302 - RNA, 19 nt, Artificial Sequence
  Description of Artificial Sequence: Synthetic oligonucleotide
cuacccaggccaggaacau

SEQ ID NO: 2823303 - RNA, 19 nt, Artificial Sequence
  Description of Artificial Sequence: Synthetic oligonucleotide
cgacgccuggcuccagaag

SEQ ID NO: 2823304 - RNA, 19 nt, Artificial Sequence
  Description of Artificial Sequence: Synthetic oligonucleotide
ccuccaggugguccagaca

SEQ ID NO: 2823305 - RNA, 19 nt, Artificial Sequence
  Description of Artificial Sequence: Synthetic oligonucleotide
ccuggcgaccuaggggcug

SEQ ID NO: 2823306 - RNA, 19 nt, Artificial Sequence
  Description of Artificial Sequence: Synthetic oligonucleotide
ggaccgacgccuggcucca

SEQ ID NO: 2823307 - RNA, 19 nt, Artificial Sequence
  Description of Artificial Sequence: Synthetic oligonucleotide
agcgaccgccgcgcggaaa

SEQ ID NO: 2823308 - RNA, 19 nt, Artificial Sequence
  Description of Artificial Sequence: Synthetic oligonucleotide
cauggagguggucguucuu

SEQ ID NO: 2823309 - RNA, 19 nt, Artificial Sequence
  Description of Artificial Sequence: Synthetic oligonucleotide
guccccguuggggcccgac

SEQ ID NO: 2823310 - RNA, 19 nt, Artificial Sequence
  Description of Artificial Sequence: Synthetic oligonucleotide
ccaagcuguugcuggaauu

SEQ ID NO: 2823311 - RNA, 19 nt, Artificial Sequence
  Description of Artificial Sequence: Synthetic oligonucleotide
cuuccccgaagcugucauu

SEQ ID NO: 2823312 - RNA, 19 nt, Artificial Sequence
  Description of Artificial Sequence: Synthetic oligonucleotide
gggcccgacauugcgggcu

SEQ ID NO: 2823313 - RNA, 19 nt, Artificial Sequence
  Description of Artificial Sequence: Synthetic oligonucleotide
aggcgggcauggagguggu

SEQ ID NO: 2823314 - RNA, 19 nt, Artificial Sequence
  Description of Artificial Sequence: Synthetic oligonucleotide
cggcaugccuagguccccg

SEQ ID NO: 2823315 - RNA, 19 nt, Artificial Sequence
  Description of Artificial Sequence: Synthetic oligonucleotide
ccgccggcaugccuagguc

SEQ ID NO: 2823316 - RNA, 19 nt, Artificial Sequence
  Description of Artificial Sequence: Synthetic oligonucleotide
gcgggcucgggcgccgcag

SEQ ID NO: 2823317 - RNA, 19 nt, Artificial Sequence
  Description of Artificial Sequence: Synthetic oligonucleotide
gggccuccccaagcuguug

SEQ ID NO: 2823318 - RNA, 19 nt, Artificial Sequence
  Description of Artificial Sequence: Synthetic oligonucleotide
gcccgacauugcgggcucg

SEQ ID NO: 2823319 - RNA, 19 nt, Artificial Sequence
  Description of Artificial Sequence: Synthetic oligonucleotide
ccggcaugccuaggucccc

SEQ ID NO: 2823320 - RNA, 19 nt, Artificial Sequence
  Description of Artificial Sequence: Synthetic oligonucleotide
cgugucugucgguuggacu

SEQ ID NO: 2823321 - RNA, 19 nt, Artificial Sequence
  Description of Artificial Sequence: Synthetic oligonucleotide
ccgacgccuggcuccagaa

SEQ ID NO: 2823322 - RNA, 19 nt, Artificial Sequence
  Description of Artificial Sequence: Synthetic oligonucleotide
ggccaguaccugagaugga

SEQ ID NO: 2823323 - RNA, 19 nt, Artificial Sequence
  Description of Artificial Sequence: Synthetic oligonucleotide
ggcaugccuagguccccgu

SEQ ID NO: 2823324 - RNA, 19 nt, Artificial Sequence
  Description of Artificial Sequence: Synthetic oligonucleotide
ccuaggggcuggcaucacu

SEQ ID NO: 2823325 - RNA, 19 nt, Artificial Sequence
  Description of Artificial Sequence: Synthetic oligonucleotide
ggcgaccuaggggcuggca

SEQ ID NO: 2823326 - RNA, 19 nt, Artificial Sequence
  Description of Artificial Sequence: Synthetic oligonucleotide
gggcgccgcagaggccacg

SEQ ID NO: 2823327 - RNA, 19 nt, Artificial Sequence
  Description of Artificial Sequence: Synthetic oligonucleotide
cccaagcuguugcuggaau

SEQ ID NO: 2823328 - RNA, 19 nt, Artificial Sequence
  Description of Artificial Sequence: Synthetic oligonucleotide
cgccgcagaggccacggaa

SEQ ID NO: 2823329 - RNA, 19 nt, Artificial Sequence
  Description of Artificial Sequence: Synthetic oligonucleotide
ccagucgugucugucgguu

SEQ ID NO: 2823330 - RNA, 19 nt, Artificial Sequence
  Description of Artificial Sequence: Synthetic oligonucleotide
ccgcgcccgcauccgccgg

SEQ ID NO: 2823331 - RNA, 19 nt, Artificial Sequence
  Description of Artificial Sequence: Synthetic oligonucleotide
gccuggcuccagaagggau

SEQ ID NO: 2823332 - RNA, 19 nt, Artificial Sequence
  Description of Artificial Sequence: Synthetic oligonucleotide
gcaugccuagguccccguu

SEQ ID NO: 2823333 - RNA, 19 nt, Artificial Sequence
  Description of Artificial Sequence: Synthetic oligonucleotide
cgcgcccgcauccgccggc

SEQ ID NO: 2823334 - RNA, 19 nt, Artificial Sequence
  Description of Artificial Sequence: Synthetic oligonucleotide
cgcagaggccacggaaaga

SEQ ID NO: 2823335 - RNA, 19 nt, Artificial Sequence
  Description of Artificial Sequence: Synthetic oligonucleotide
ccccguuggggcccgacau

SEQ ID NO: 2823336 - RNA, 19 nt, Artificial Sequence
  Description of Artificial Sequence: Synthetic oligonucleotide
ccccaagcuguugcuggaa

SEQ ID NO: 2823337 - RNA, 19 nt, Artificial Sequence
  Description of Artificial Sequence: Synthetic oligonucleotide
cgggcauggagguggucgu

SEQ ID NO: 2823338 - RNA, 19 nt, Artificial Sequence
  Description of Artificial Sequence: Synthetic oligonucleotide
cgcgcggaaagcgggagcu

SEQ ID NO: 2823339 - RNA, 19 nt, Artificial Sequence
  Description of Artificial Sequence: Synthetic oligonucleotide
ggggcguccuggcgaccua

SEQ ID NO: 2823340 - RNA, 19 nt, Artificial Sequence
  Description of Artificial Sequence: Synthetic oligonucleotide
gcgccgcagaggccacgga

SEQ ID NO: 2823341 - RNA, 19 nt, Artificial Sequence
  Description of Artificial Sequence: Synthetic oligonucleotide
ccaggcugguagacccacu

SEQ ID NO: 2823342 - RNA, 19 nt, Artificial Sequence
  Description of Artificial Sequence: Synthetic oligonucleotide
ccgcauccgccggcaugcc

SEQ ID NO: 2823343 - RNA, 19 nt, Artificial Sequence
  Description of Artificial Sequence: Synthetic oligonucleotide
ggcgggcauggaggugguc

SEQ ID NO: 2823344 - RNA, 19 nt, Artificial Sequence
  Description of Artificial Sequence: Synthetic oligonucleotide
cagcgaccgccgcgcggaa

SEQ ID NO: 2823345 - RNA, 19 nt, Artificial Sequence
  Description of Artificial Sequence: Synthetic oligonucleotide
cgaccgccgcgcggaaagc

SEQ ID NO: 2823346 - RNA, 19 nt, Artificial Sequence
  Description of Artificial Sequence: Synthetic oligonucleotide
gccgugguccaggcuggua

SEQ ID NO: 2823347 - RNA, 19 nt, Artificial Sequence
  Description of Artificial Sequence: Synthetic oligonucleotide
gcgcccgcauccgccggca

SEQ ID NO: 2823348 - RNA, 19 nt, Artificial Sequence
  Description of Artificial Sequence: Synthetic oligonucleotide
cgccuuccgcgcccgcauc

SEQ ID NO: 2823349 - RNA, 19 nt, Artificial Sequence
  Description of Artificial Sequence: Synthetic oligonucleotide
cgguuggacuccagcaauu

SEQ ID NO: 2823350 - RNA, 19 nt, Artificial Sequence
  Description of Artificial Sequence: Synthetic oligonucleotide
cgccuggcuccagaaggga

SEQ ID NO: 2823351 - RNA, 19 nt, Artificial Sequence
  Description of Artificial Sequence: Synthetic oligonucleotide
cgccgcgcggaaagcggga

SEQ ID NO: 2823352 - RNA, 19 nt, Artificial Sequence
  Description of Artificial Sequence: Synthetic oligonucleotide
gggcauggagguggucguu

SEQ ID NO: 2823353 - RNA, 19 nt, Artificial Sequence
  Description of Artificial Sequence: Synthetic oligonucleotide
cgggcgccgcagaggccac

SEQ ID NO: 2823354 - RNA, 19 nt, Artificial Sequence
  Description of Artificial Sequence: Synthetic oligonucleotide
cccguuggggcccgacauu

SEQ ID NO: 2823355 - RNA, 19 nt, Artificial Sequence
  Description of Artificial Sequence: Synthetic oligonucleotide
cgggcucgggcgccgcaga

SEQ ID NO: 2823356 - RNA, 19 nt, Artificial Sequence
  Description of Artificial Sequence: Synthetic oligonucleotide
cgcauccgccggcaugccu

SEQ ID NO: 2823357 - RNA, 19 nt, Artificial Sequence
  Description of Artificial Sequence: Synthetic oligonucleotide
ggccgugguccaggcuggu

SEQ ID NO: 2823358 - RNA, 19 nt, Artificial Sequence
  Description of Artificial Sequence: Synthetic oligonucleotide
gguccccguuggggcccga

SEQ ID NO: 2823359 - RNA, 19 nt, Artificial Sequence
  Description of Artificial Sequence: Synthetic oligonucleotide
cgcccgcauccgccggcau

SEQ ID NO: 2823360 - RNA, 19 nt, Artificial Sequence
  Description of Artificial Sequence: Synthetic oligonucleotide
ugugaauaaacuuguaugg

SEQ ID NO: 2823361 - RNA, 19 nt, Artificial Sequence
  Description of Artificial Sequence: Synthetic oligonucleotide
uuccuauuuacucagauca

SEQ ID NO: 2823362 - RNA, 19 nt, Artificial Sequence
  Description of Artificial Sequence: Synthetic oligonucleotide
ugaauaaacuuguauggcg

SEQ ID NO: 2823363 - RNA, 19 nt, Artificial Sequence
  Description of Artificial Sequence: Synthetic oligonucleotide
agcauguccacacaaagac

SEQ ID NO: 2823364 - RNA, 19 nt, Artificial Sequence
  Description of Artificial Sequence: Synthetic oligonucleotide
auuuacucagaucaguuuc

SEQ ID NO: 2823365 - RNA, 19 nt, Artificial Sequence
  Description of Artificial Sequence: Synthetic oligonucleotide
aauaaacuuguauggcggg

SEQ ID NO: 2823366 - RNA, 19 nt, Artificial Sequence
  Description of Artificial Sequence: Synthetic oligonucleotide
augugaauaaacuuguaug

SEQ ID NO: 2823367 - RNA, 19 nt, Artificial Sequence
  Description of Artificial Sequence: Synthetic oligonucleotide
acuuugaugauuuucuucu

SEQ ID NO: 2823368 - RNA, 19 nt, Artificial Sequence
  Description of Artificial Sequence: Synthetic oligonucleotide
uucuucuuguugcugaggg

SEQ ID NO: 2823369 - RNA, 19 nt, Artificial Sequence
  Description of Artificial Sequence: Synthetic oligonucleotide
cuuuucuuggcucagcagg

SEQ ID NO: 2823370 - RNA, 19 nt, Artificial Sequence
  Description of Artificial Sequence: Synthetic oligonucleotide
gaauaaacuuguauggcgg

SEQ ID NO: 2823371 - RNA, 19 nt, Artificial Sequence
  Description of Artificial Sequence: Synthetic oligonucleotide
gaugcuaaugccuuucagc

SEQ ID NO: 2823372 - RNA, 19 nt, Artificial Sequence
  Description of Artificial Sequence: Synthetic oligonucleotide
ucuggguagaugcuaaugc

SEQ ID NO: 2823373 - RNA, 19 nt, Artificial Sequence
  Description of Artificial Sequence: Synthetic oligonucleotide
uuuacuaacagguucccuc

SEQ ID NO: 2823374 - RNA, 19 nt, Artificial Sequence
  Description of Artificial Sequence: Synthetic oligonucleotide
agggucucuggguagaugc

SEQ ID NO: 2823375 - RNA, 19 nt, Artificial Sequence
  Description of Artificial Sequence: Synthetic oligonucleotide
uuacuaacagguucccucg

SEQ ID NO: 2823376 - RNA, 19 nt, Artificial Sequence
  Description of Artificial Sequence: Synthetic oligonucleotide
uucagcaugugaauaaacu

SEQ ID NO: 2823377 - RNA, 19 nt, Artificial Sequence
  Description of Artificial Sequence: Synthetic oligonucleotide
acaccaccagcacagaggc

SEQ ID NO: 2823378 - RNA, 19 nt, Artificial Sequence
  Description of Artificial Sequence: Synthetic oligonucleotide
cacagaaacacacaccacc

SEQ ID NO: 2823379 - RNA, 19 nt, Artificial Sequence
  Description of Artificial Sequence: Synthetic oligonucleotide
acucagaucaguuucuucu

SEQ ID NO: 2823380 - RNA, 19 nt, Artificial Sequence
  Description of Artificial Sequence: Synthetic oligonucleotide
aaacacacaccaccagcac

SEQ ID NO: 2823381 - RNA, 19 nt, Artificial Sequence
  Description of Artificial Sequence: Synthetic oligonucleotide
cacacaaagacagucacag

SEQ ID NO: 2823382 - RNA, 19 nt, Artificial Sequence
  Description of Artificial Sequence: Synthetic oligonucleotide
aaugccuuucagcauguga

SEQ ID NO: 2823383 - RNA, 19 nt, Artificial Sequence
  Description of Artificial Sequence: Synthetic oligonucleotide
gucacagaaacacacacca

SEQ ID NO: 2823384 - RNA, 19 nt, Artificial Sequence
  Description of Artificial Sequence: Synthetic oligonucleotide
augcuaaugccuuucagca

SEQ ID NO: 2823385 - RNA, 19 nt, Artificial Sequence
  Description of Artificial Sequence: Synthetic oligonucleotide
ugugcuucuucucugccug

SEQ ID NO: 2823386 - RNA, 19 nt, Artificial Sequence
  Description of Artificial Sequence: Synthetic oligonucleotide
uuuucuuggcucagcaggc

SEQ ID NO: 2823387 - RNA, 19 nt, Artificial Sequence
  Description of Artificial Sequence: Synthetic oligonucleotide
aacagguucccucgugcac

SEQ ID NO: 2823388 - RNA, 19 nt, Artificial Sequence
  Description of Artificial Sequence: Synthetic oligonucleotide
cagcaugugaauaaacuug

SEQ ID NO: 2823389 - RNA, 19 nt, Artificial Sequence
  Description of Artificial Sequence: Synthetic oligonucleotide
ucucuccggacuuugauga

SEQ ID NO: 2823390 - RNA, 19 nt, Artificial Sequence
  Description of Artificial Sequence: Synthetic oligonucleotide
uuuacucagaucaguuucu

SEQ ID NO: 2823391 - RNA, 19 nt, Artificial Sequence
  Description of Artificial Sequence: Synthetic oligonucleotide
uugaugauuuucuucuugu

SEQ ID NO: 2823392 - RNA, 19 nt, Artificial Sequence
  Description of Artificial Sequence: Synthetic oligonucleotide
aaacuuguauggcgggguc

SEQ ID NO: 2823393 - RNA, 19 nt, Artificial Sequence
  Description of Artificial Sequence: Synthetic oligonucleotide
guugcugagggucucuggg

SEQ ID NO: 2823394 - RNA, 19 nt, Artificial Sequence
  Description of Artificial Sequence: Synthetic oligonucleotide
uccacacaaagacagucac

SEQ ID NO: 2823395 - RNA, 19 nt, Artificial Sequence
  Description of Artificial Sequence: Synthetic oligonucleotide
cacaccaccagcacagagg

SEQ ID NO: 2823396 - RNA, 19 nt, Artificial Sequence
  Description of Artificial Sequence: Synthetic oligonucleotide
ugccgcauuuacuaacagg

SEQ ID NO: 2823397 - RNA, 19 nt, Artificial Sequence
  Description of Artificial Sequence: Synthetic oligonucleotide
uccuauuuacucagaucag

SEQ ID NO: 2823398 - RNA, 19 nt, Artificial Sequence
  Description of Artificial Sequence: Synthetic oligonucleotide
uggguagaugcuaaugccu

SEQ ID NO: 2823399 - RNA, 19 nt, Artificial Sequence
  Description of Artificial Sequence: Synthetic oligonucleotide
cacaaagacagucacagaa

SEQ ID NO: 2823400 - RNA, 19 nt, Artificial Sequence
  Description of Artificial Sequence: Synthetic oligonucleotide
gacuuugaugauuuucuuc

SEQ ID NO: 2823401 - RNA, 19 nt, Artificial Sequence
  Description of Artificial Sequence: Synthetic oligonucleotide
agucacagaaacacacacc

SEQ ID NO: 2823402 - RNA, 19 nt, Artificial Sequence
  Description of Artificial Sequence: Synthetic oligonucleotide
cuggguagaugcuaaugcc

SEQ ID NO: 2823403 - RNA, 19 nt, Artificial Sequence
  Description of Artificial Sequence: Synthetic oligonucleotide
uuuccuauuuacucagauc

SEQ ID NO: 2823404 - RNA, 19 nt, Artificial Sequence
  Description of Artificial Sequence: Synthetic oligonucleotide
agcacagaggccccgauga

SEQ ID NO: 2823405 - RNA, 19 nt, Artificial Sequence
  Description of Artificial Sequence: Synthetic oligonucleotide
acagaggccccgaugaggc

SEQ ID NO: 2823406 - RNA, 19 nt, Artificial Sequence
  Description of Artificial Sequence: Synthetic oligonucleotide
cuaacagguucccucgugc

SEQ ID NO: 2823407 - RNA, 19 nt, Artificial Sequence
  Description of Artificial Sequence: Synthetic oligonucleotide
ucugccgcauuuacuaaca

SEQ ID NO: 2823408 - RNA, 19 nt, Artificial Sequence
  Description of Artificial Sequence: Synthetic oligonucleotide
uuucagcaugugaauaaac

SEQ ID NO: 2823409 - RNA, 19 nt, Artificial Sequence
  Description of Artificial Sequence: Synthetic oligonucleotide
auaaacuuguauggcgggg

SEQ ID NO: 2823410 - RNA, 19 nt, Artificial Sequence
  Description of Artificial Sequence: Synthetic oligonucleotide
accaucuuugucucuccgg

SEQ ID NO: 2823411 - RNA, 19 nt, Artificial Sequence
  Description of Artificial Sequence: Synthetic oligonucleotide
uccuuuucuuggcucagca

SEQ ID NO: 2823412 - RNA, 19 nt, Artificial Sequence
  Description of Artificial Sequence: Synthetic oligonucleotide
gugaauaaacuuguauggc

SEQ ID NO: 2823413 - RNA, 19 nt, Artificial Sequence
  Description of Artificial Sequence: Synthetic oligonucleotide
gaaacacacaccaccagca

SEQ ID NO: 2823414 - RNA, 19 nt, Artificial Sequence
  Description of Artificial Sequence: Synthetic oligonucleotide
aucuuugucucuccggacu

SEQ ID NO: 2823415 - RNA, 19 nt, Artificial Sequence
  Description of Artificial Sequence: Synthetic oligonucleotide
uauuuacucagaucaguuu

SEQ ID NO: 2823416 - RNA, 19 nt, Artificial Sequence
  Description of Artificial Sequence: Synthetic oligonucleotide
uauggcggggucuugugcu

SEQ ID NO: 2823417 - RNA, 19 nt, Artificial Sequence
  Description of Artificial Sequence: Synthetic oligonucleotide
gcuaaugccuuucagcaug

SEQ ID NO: 2823418 - RNA, 19 nt, Artificial Sequence
  Description of Artificial Sequence: Synthetic oligonucleotide
agaccaucuuugucucucc

SEQ ID NO: 2823419 - RNA, 19 nt, Artificial Sequence
  Description of Artificial Sequence: Synthetic oligonucleotide
agaugcuaaugccuuucag

SEQ ID NO: 2823420 - RNA, 19 nt, Artificial Sequence
  Description of Artificial Sequence: Synthetic oligonucleotide
cuucuuguugcugaggguc

SEQ ID NO: 2823421 - RNA, 19 nt, Artificial Sequence
  Description of Artificial Sequence: Synthetic oligonucleotide
uaaacuuguauggcggggu

SEQ ID NO: 2823422 - RNA, 19 nt, Artificial Sequence
  Description of Artificial Sequence: Synthetic oligonucleotide
ucuuggcucagcaggccag

SEQ ID NO: 2823423 - RNA, 19 nt, Artificial Sequence
  Description of Artificial Sequence: Synthetic oligonucleotide
gacucugccgcauuuacua

SEQ ID NO: 2823424 - RNA, 19 nt, Artificial Sequence
  Description of Artificial Sequence: Synthetic oligonucleotide
uguugcugagggucucugg

SEQ ID NO: 2823425 - RNA, 19 nt, Artificial Sequence
  Description of Artificial Sequence: Synthetic oligonucleotide
acacacaccaccagcacag

SEQ ID NO: 2823426 - RNA, 19 nt, Artificial Sequence
  Description of Artificial Sequence: Synthetic oligonucleotide
uguccacacaaagacaguc

SEQ ID NO: 2823427 - RNA, 19 nt, Artificial Sequence
  Description of Artificial Sequence: Synthetic oligonucleotide
agcaugugaauaaacuugu

SEQ ID NO: 2823428 - RNA, 19 nt, Artificial Sequence
  Description of Artificial Sequence: Synthetic oligonucleotide
cuucucugccugcuggugg

SEQ ID NO: 2823429 - RNA, 19 nt, Artificial Sequence
  Description of Artificial Sequence: Synthetic oligonucleotide
acuaacagguucccucgug

SEQ ID NO: 2823430 - RNA, 19 nt, Artificial Sequence
  Description of Artificial Sequence: Synthetic oligonucleotide
uagaugcuaaugccuuuca

SEQ ID NO: 2823431 - RNA, 19 nt, Artificial Sequence
  Description of Artificial Sequence: Synthetic oligonucleotide
gaccaucuuugucucuccg

SEQ ID NO: 2823432 - RNA, 19 nt, Artificial Sequence
  Description of Artificial Sequence: Synthetic oligonucleotide
uucuuguugcugagggucu

SEQ ID NO: 2823433 - RNA, 19 nt, Artificial Sequence
  Description of Artificial Sequence: Synthetic oligonucleotide
gauuuucuucuuguugcug

SEQ ID NO: 2823434 - RNA, 19 nt, Artificial Sequence
  Description of Artificial Sequence: Synthetic oligonucleotide
uaacagguucccucgugca

SEQ ID NO: 2823435 - RNA, 19 nt, Artificial Sequence
  Description of Artificial Sequence: Synthetic oligonucleotide
ugcacucucccuccggaga

SEQ ID NO: 2823436 - RNA, 19 nt, Artificial Sequence
  Description of Artificial Sequence: Synthetic oligonucleotide
gcauuuacuaacagguucc

SEQ ID NO: 2823437 - RNA, 19 nt, Artificial Sequence
  Description of Artificial Sequence: Synthetic oligonucleotide
uucucugccugcugguggc

SEQ ID NO: 2823438 - RNA, 19 nt, Artificial Sequence
  Description of Artificial Sequence: Synthetic oligonucleotide
ucacagaaacacacaccac

SEQ ID NO: 2823439 - RNA, 19 nt, Artificial Sequence
  Description of Artificial Sequence: Synthetic oligonucleotide
ucagaucaguuucuucuuu

SEQ ID NO: 2823440 - RNA, 19 nt, Artificial Sequence
  Description of Artificial Sequence: Synthetic oligonucleotide
uguauggcggggucuugug

SEQ ID NO: 2823441 - RNA, 19 nt, Artificial Sequence
  Description of Artificial Sequence: Synthetic oligonucleotide
ugcugguggcagcaugucc

SEQ ID NO: 2823442 - RNA, 19 nt, Artificial Sequence
  Description of Artificial Sequence: Synthetic oligonucleotide
gcagcauguccacacaaag

SEQ ID NO: 2823443 - RNA, 19 nt, Artificial Sequence
  Description of Artificial Sequence: Synthetic oligonucleotide
ugaugauuuucuucuuguu

SEQ ID NO: 2823444 - RNA, 19 nt, Artificial Sequence
  Description of Artificial Sequence: Synthetic oligonucleotide
cauuuacuaacagguuccc

SEQ ID NO: 2823445 - RNA, 19 nt, Artificial Sequence
  Description of Artificial Sequence: Synthetic oligonucleotide
uugugcuucuucucugccu

SEQ ID NO: 2823446 - RNA, 19 nt, Artificial Sequence
  Description of Artificial Sequence: Synthetic oligonucleotide
augccuuucagcaugugaa

SEQ ID NO: 2823447 - RNA, 19 nt, Artificial Sequence
  Description of Artificial Sequence: Synthetic oligonucleotide
acacaccaccagcacagag

SEQ ID NO: 2823448 - RNA, 19 nt, Artificial Sequence
  Description of Artificial Sequence: Synthetic oligonucleotide
cuugugcuucuucucugcc

SEQ ID NO: 2823449 - RNA, 19 nt, Artificial Sequence
  Description of Artificial Sequence: Synthetic oligonucleotide
ucuucuuguugcugagggu

SEQ ID NO: 2823450 - RNA, 19 nt, Artificial Sequence
  Description of Artificial Sequence: Synthetic oligonucleotide
ugucucuccggacuuugau

SEQ ID NO: 2823451 - RNA, 19 nt, Artificial Sequence
  Description of Artificial Sequence: Synthetic oligonucleotide
ucuuugucucuccggacuu

SEQ ID NO: 2823452 - RNA, 19 nt, Artificial Sequence
  Description of Artificial Sequence: Synthetic oligonucleotide
gucucuccggacuuugaug

SEQ ID NO: 2823453 - RNA, 19 nt, Artificial Sequence
  Description of Artificial Sequence: Synthetic oligonucleotide
cagaaacacacaccaccag

SEQ ID NO: 2823454 - RNA, 19 nt, Artificial Sequence
  Description of Artificial Sequence: Synthetic oligonucleotide
gagaccaucuuugucucuc

SEQ ID NO: 2823455 - RNA, 19 nt, Artificial Sequence
  Description of Artificial Sequence: Synthetic oligonucleotide
aacuuguauggcggggucu

SEQ ID NO: 2823456 - RNA, 19 nt, Artificial Sequence
  Description of Artificial Sequence: Synthetic oligonucleotide
cucugccgcauuuacuaac

SEQ ID NO: 2823457 - RNA, 19 nt, Artificial Sequence
  Description of Artificial Sequence: Synthetic oligonucleotide
uacucagaucaguuucuuc

SEQ ID NO: 2823458 - RNA, 19 nt, Artificial Sequence
  Description of Artificial Sequence: Synthetic oligonucleotide
ugcugagggucucugggua

SEQ ID NO: 2823459 - RNA, 19 nt, Artificial Sequence
  Description of Artificial Sequence: Synthetic oligonucleotide
acaaagacagucacagaaa

SEQ ID NO: 2823460 - RNA, 19 nt, Artificial Sequence
  Description of Artificial Sequence: Synthetic oligonucleotide
agcaggccagacucugccg

SEQ ID NO: 2823461 - RNA, 19 nt, Artificial Sequence
  Description of Artificial Sequence: Synthetic oligonucleotide
caugugaauaaacuuguau

SEQ ID NO: 2823462 - RNA, 19 nt, Artificial Sequence
  Description of Artificial Sequence: Synthetic oligonucleotide
uccggagaccaucuuuguc

SEQ ID NO: 2823463 - RNA, 19 nt, Artificial Sequence
  Description of Artificial Sequence: Synthetic oligonucleotide
cacagaggccccgaugagg

SEQ ID NO: 2823464 - RNA, 19 nt, Artificial Sequence
  Description of Artificial Sequence: Synthetic oligonucleotide
ucgugcacucucccuccgg

SEQ ID NO: 2823465 - RNA, 19 nt, Artificial Sequence
  Description of Artificial Sequence: Synthetic oligonucleotide
guagaugcuaaugccuuuc

SEQ ID NO: 2823466 - RNA, 19 nt, Artificial Sequence
  Description of Artificial Sequence: Synthetic oligonucleotide
ggcucagcaggccagacuc

SEQ ID NO: 2823467 - RNA, 19 nt, Artificial Sequence
  Description of Artificial Sequence: Synthetic oligonucleotide
cagacucugccgcauuuac

SEQ ID NO: 2823468 - RNA, 19 nt, Artificial Sequence
  Description of Artificial Sequence: Synthetic oligonucleotide
uacuaacagguucccucgu

SEQ ID NO: 2823469 - RNA, 19 nt, Artificial Sequence
  Description of Artificial Sequence: Synthetic oligonucleotide
auuuacuaacagguucccu

SEQ ID NO: 2823470 - RNA, 19 nt, Artificial Sequence
  Description of Artificial Sequence: Synthetic oligonucleotide
gguggcagcauguccacac

SEQ ID NO: 2823471 - RNA, 19 nt, Artificial Sequence
  Description of Artificial Sequence: Synthetic oligonucleotide
uucuucucugccugcuggu

SEQ ID NO: 2823472 - RNA, 19 nt, Artificial Sequence
  Description of Artificial Sequence: Synthetic oligonucleotide
ugcuaaugccuuucagcau

SEQ ID NO: 2823473 - RNA, 19 nt, Artificial Sequence
  Description of Artificial Sequence: Synthetic oligonucleotide
acagguucccucgugcacu

SEQ ID NO: 2823474 - RNA, 19 nt, Artificial Sequence
  Description of Artificial Sequence: Synthetic oligonucleotide
guauggcggggucuugugc

SEQ ID NO: 2823475 - RNA, 19 nt, Artificial Sequence
  Description of Artificial Sequence: Synthetic oligonucleotide
uggcagcauguccacacaa

SEQ ID NO: 2823476 - RNA, 19 nt, Artificial Sequence
  Description of Artificial Sequence: Synthetic oligonucleotide
ucuucucugccugcuggug

SEQ ID NO: 2823477 - RNA, 19 nt, Artificial Sequence
  Description of Artificial Sequence: Synthetic oligonucleotide
ugccuuucagcaugugaau

SEQ ID NO: 2823478 - RNA, 19 nt, Artificial Sequence
  Description of Artificial Sequence: Synthetic oligonucleotide
uucccucgugcacucuccc

SEQ ID NO: 2823479 - RNA, 19 nt, Artificial Sequence
  Description of Artificial Sequence: Synthetic oligonucleotide
cucuggguagaugcuaaug

SEQ ID NO: 2823480 - RNA, 19 nt, Artificial Sequence
  Description of Artificial Sequence: Synthetic oligonucleotide
cugggguccuuuucuuggc

SEQ ID NO: 2823481 - RNA, 19 nt, Artificial Sequence
  Description of Artificial Sequence: Synthetic oligonucleotide
cagcauguccacacaaaga

SEQ ID NO: 2823482 - RNA, 19 nt, Artificial Sequence
  Description of Artificial Sequence: Synthetic oligonucleotide
ugggguccuuuucuuggcu

SEQ ID NO: 2823483 - RNA, 19 nt, Artificial Sequence
  Description of Artificial Sequence: Synthetic oligonucleotide
cuauuuacucagaucaguu

SEQ ID NO: 2823484 - RNA, 19 nt, Artificial Sequence
  Description of Artificial Sequence: Synthetic oligonucleotide
uuguauggcggggucuugu

SEQ ID NO: 2823485 - RNA, 19 nt, Artificial Sequence
  Description of Artificial Sequence: Synthetic oligonucleotide
uugucucuccggacuuuga

SEQ ID NO: 2823486 - RNA, 19 nt, Artificial Sequence
  Description of Artificial Sequence: Synthetic oligonucleotide
cgcauuuacuaacagguuc

SEQ ID NO: 2823487 - RNA, 19 nt, Artificial Sequence
  Description of Artificial Sequence: Synthetic oligonucleotide
cucugggguccuuuucuug

SEQ ID NO: 2823488 - RNA, 19 nt, Artificial Sequence
  Description of Artificial Sequence: Synthetic oligonucleotide
ugaggccagccgccacugg

SEQ ID NO: 2823489 - RNA, 19 nt, Artificial Sequence
  Description of Artificial Sequence: Synthetic oligonucleotide
agaggccccgaugaggcca

SEQ ID NO: 2823490 - RNA, 19 nt, Artificial Sequence
  Description of Artificial Sequence: Synthetic oligonucleotide
ugcuucuucucugccugcu

SEQ ID NO: 2823491 - RNA, 19 nt, Artificial Sequence
  Description of Artificial Sequence: Synthetic oligonucleotide
gccgcauuuacuaacaggu

SEQ ID NO: 2823492 - RNA, 19 nt, Artificial Sequence
  Description of Artificial Sequence: Synthetic oligonucleotide
cucagcaggccagacucug

SEQ ID NO: 2823493 - RNA, 19 nt, Artificial Sequence
  Description of Artificial Sequence: Synthetic oligonucleotide
guccacacaaagacaguca

SEQ ID NO: 2823494 - RNA, 19 nt, Artificial Sequence
  Description of Artificial Sequence: Synthetic oligonucleotide
acuuguauggcggggucuu

SEQ ID NO: 2823495 - RNA, 19 nt, Artificial Sequence
  Description of Artificial Sequence: Synthetic oligonucleotide
gaugaggccagccgccacu

SEQ ID NO: 2823496 - RNA, 19 nt, Artificial Sequence
  Description of Artificial Sequence: Synthetic oligonucleotide
cugccgcauuuacuaacag

SEQ ID NO: 2823497 - RNA, 19 nt, Artificial Sequence
  Description of Artificial Sequence: Synthetic oligonucleotide
ucuccggacuuugaugauu

SEQ ID NO: 2823498 - RNA, 19 nt, Artificial Sequence
  Description of Artificial Sequence: Synthetic oligonucleotide
cugguggcagcauguccac

SEQ ID NO: 2823499 - RNA, 19 nt, Artificial Sequence
  Description of Artificial Sequence: Synthetic oligonucleotide
ucuuguugcugagggucuc

SEQ ID NO: 2823500 - RNA, 19 nt, Artificial Sequence
  Description of Artificial Sequence: Synthetic oligonucleotide
ucucuggguagaugcuaau

SEQ ID NO: 2823501 - RNA, 19 nt, Artificial Sequence
  Description of Artificial Sequence: Synthetic oligonucleotide
gugcacucucccuccggag

SEQ ID NO: 2823502 - RNA, 19 nt, Artificial Sequence
  Description of Artificial Sequence: Synthetic oligonucleotide
acucugccgcauuuacuaa

SEQ ID NO: 2823503 - RNA, 19 nt, Artificial Sequence
  Description of Artificial Sequence: Synthetic oligonucleotide
ccuuuucuuggcucagcag

SEQ ID NO: 2823504 - RNA, 19 nt, Artificial Sequence
  Description of Artificial Sequence: Synthetic oligonucleotide
guucccucgugcacucucc

SEQ ID NO: 2823505 - RNA, 19 nt, Artificial Sequence
  Description of Artificial Sequence: Synthetic oligonucleotide
gcugagggucucuggguag

SEQ ID NO: 2823506 - RNA, 19 nt, Artificial Sequence
  Description of Artificial Sequence: Synthetic oligonucleotide
cucgugcacucucccuccg

SEQ ID NO: 2823507 - RNA, 19 nt, Artificial Sequence
  Description of Artificial Sequence: Synthetic oligonucleotide
uaaugccuuucagcaugug

SEQ ID NO: 2823508 - RNA, 19 nt, Artificial Sequence
  Description of Artificial Sequence: Synthetic oligonucleotide
ccuuucagcaugugaauaa

SEQ ID NO: 2823509 - RNA, 19 nt, Artificial Sequence
  Description of Artificial Sequence: Synthetic oligonucleotide
ucccucgugcacucucccu

SEQ ID NO: 2823510 - RNA, 19 nt, Artificial Sequence
  Description of Artificial Sequence: Synthetic oligonucleotide
ccaucuuugucucuccgga

SEQ ID NO: 2823511 - RNA, 19 nt, Artificial Sequence
  Description of Artificial Sequence: Synthetic oligonucleotide
gagggucucuggguagaug

SEQ ID NO: 2823512 - RNA, 19 nt, Artificial Sequence
  Description of Artificial Sequence: Synthetic oligonucleotide
cagcacagaggccccgaug

SEQ ID NO: 2823513 - RNA, 19 nt, Artificial Sequence
  Description of Artificial Sequence: Synthetic oligonucleotide
agacucugccgcauuuacu

SEQ ID NO: 2823514 - RNA, 19 nt, Artificial Sequence
  Description of Artificial Sequence: Synthetic oligonucleotide
gccccgaugaggccagccg

SEQ ID NO: 2823515 - RNA, 19 nt, Artificial Sequence
  Description of Artificial Sequence: Synthetic oligonucleotide
ggguccuuuucuuggcuca

SEQ ID NO: 2823516 - RNA, 19 nt, Artificial Sequence
  Description of Artificial Sequence: Synthetic oligonucleotide
gugcuucuucucugccugc

SEQ ID NO: 2823517 - RNA, 19 nt, Artificial Sequence
  Description of Artificial Sequence: Synthetic oligonucleotide
augaggccagccgccacug

SEQ ID NO: 2823518 - RNA, 19 nt, Artificial Sequence
  Description of Artificial Sequence: Synthetic oligonucleotide
acucucccuccggagacca

SEQ ID NO: 2823519 - RNA, 19 nt, Artificial Sequence
  Description of Artificial Sequence: Synthetic oligonucleotide
guccuuuucuuggcucagc

SEQ ID NO: 2823520 - RNA, 19 nt, Artificial Sequence
  Description of Artificial Sequence: Synthetic oligonucleotide
cagguucccucgugcacuc

SEQ ID NO: 2823521 - RNA, 19 nt, Artificial Sequence
  Description of Artificial Sequence: Synthetic oligonucleotide
gaggccagccgccacuggu

SEQ ID NO: 2823522 - RNA, 19 nt, Artificial Sequence
  Description of Artificial Sequence: Synthetic oligonucleotide
gucucuggguagaugcuaa

SEQ ID NO: 2823523 - RNA, 19 nt, Artificial Sequence
  Description of Artificial Sequence: Synthetic oligonucleotide
cuaaugccuuucagcaugu

SEQ ID NO: 2823524 - RNA, 19 nt, Artificial Sequence
  Description of Artificial Sequence: Synthetic oligonucleotide
auguccacacaaagacagu

SEQ ID NO: 2823525 - RNA, 19 nt, Artificial Sequence
  Description of Artificial Sequence: Synthetic oligonucleotide
gcacucucccuccggagac

SEQ ID NO: 2823526 - RNA, 19 nt, Artificial Sequence
  Description of Artificial Sequence: Synthetic oligonucleotide
gaggccccgaugaggccag

SEQ ID NO: 2823527 - RNA, 19 nt, Artificial Sequence
  Description of Artificial Sequence: Synthetic oligonucleotide
uuggcucagcaggccagac

SEQ ID NO: 2823528 - RNA, 19 nt, Artificial Sequence
  Description of Artificial Sequence: Synthetic oligonucleotide
gguucccucgugcacucuc

SEQ ID NO: 2823529 - RNA, 19 nt, Artificial Sequence
  Description of Artificial Sequence: Synthetic oligonucleotide
guggcagcauguccacaca

SEQ ID NO: 2823530 - RNA, 19 nt, Artificial Sequence
  Description of Artificial Sequence: Synthetic oligonucleotide
cuuguauggcggggucuug

SEQ ID NO: 2823531 - RNA, 19 nt, Artificial Sequence
  Description of Artificial Sequence: Synthetic oligonucleotide
ccggagaccaucuuugucu

SEQ ID NO: 2823532 - RNA, 19 nt, Artificial Sequence
  Description of Artificial Sequence: Synthetic oligonucleotide
cagaggccccgaugaggcc

SEQ ID NO: 2823533 - RNA, 19 nt, Artificial Sequence
  Description of Artificial Sequence: Synthetic oligonucleotide
gguccuuuucuuggcucag

SEQ ID NO: 2823534 - RNA, 19 nt, Artificial Sequence
  Description of Artificial Sequence: Synthetic oligonucleotide
caccaccagcacagaggcc

SEQ ID NO: 2823535 - RNA, 19 nt, Artificial Sequence
  Description of Artificial Sequence: Synthetic oligonucleotide
cccgaugaggccagccgcc

SEQ ID NO: 2823536 - RNA, 19 nt, Artificial Sequence
  Description of Artificial Sequence: Synthetic oligonucleotide
ccucgugcacucucccucc

SEQ ID NO: 2823537 - RNA, 19 nt, Artificial Sequence
  Description of Artificial Sequence: Synthetic oligonucleotide
gggguccuuuucuuggcuc

SEQ ID NO: 2823538 - RNA, 19 nt, Artificial Sequence
  Description of Artificial Sequence: Synthetic oligonucleotide
ccggacuuugaugauuuuc

SEQ ID NO: 2823539 - RNA, 19 nt, Artificial Sequence
  Description of Artificial Sequence: Synthetic oligonucleotide
cucagaucaguuucuucuu

SEQ ID NO: 2823540 - RNA, 19 nt, Artificial Sequence
  Description of Artificial Sequence: Synthetic oligonucleotide
ugagggucucuggguagau

SEQ ID NO: 2823541 - RNA, 19 nt, Artificial Sequence
  Description of Artificial Sequence: Synthetic oligonucleotide
ccccgaugaggccagccgc

SEQ ID NO: 2823542 - RNA, 19 nt, Artificial Sequence
  Description of Artificial Sequence: Synthetic oligonucleotide
ggggucuugugcuucuucu

SEQ ID NO: 2823543 - RNA, 19 nt, Artificial Sequence
  Description of Artificial Sequence: Synthetic oligonucleotide
cuuugaugauuuucuucuu

SEQ ID NO: 2823544 - RNA, 19 nt, Artificial Sequence
  Description of Artificial Sequence: Synthetic oligonucleotide
ugguggcagcauguccaca

SEQ ID NO: 2823545 - RNA, 19 nt, Artificial Sequence
  Description of Artificial Sequence: Synthetic oligonucleotide
cacucucccuccggagacc

SEQ ID NO: 2823546 - RNA, 19 nt, Artificial Sequence
  Description of Artificial Sequence: Synthetic oligonucleotide
cuccggacuuugaugauuu

SEQ ID NO: 2823547 - RNA, 19 nt, Artificial Sequence
  Description of Artificial Sequence: Synthetic oligonucleotide
gcacagaggccccgaugag

SEQ ID NO: 2823548 - RNA, 19 nt, Artificial Sequence
  Description of Artificial Sequence: Synthetic oligonucleotide
uccggacuuugaugauuuu

SEQ ID NO: 2823549 - RNA, 19 nt, Artificial Sequence
  Description of Artificial Sequence: Synthetic oligonucleotide
cugagggucucuggguaga

SEQ ID NO: 2823550 - RNA, 19 nt, Artificial Sequence
  Description of Artificial Sequence: Synthetic oligonucleotide
auggcggggucuugugcuu

SEQ ID NO: 2823551 - RNA, 19 nt, Artificial Sequence
  Description of Artificial Sequence: Synthetic oligonucleotide
accagcacagaggccccga

SEQ ID NO: 2823552 - RNA, 19 nt, Artificial Sequence
  Description of Artificial Sequence: Synthetic oligonucleotide
cccucgugcacucucccuc

SEQ ID NO: 2823553 - RNA, 19 nt, Artificial Sequence
  Description of Artificial Sequence: Synthetic oligonucleotide
accaccgcccggccccucu

SEQ ID NO: 2823554 - RNA, 19 nt, Artificial Sequence
  Description of Artificial Sequence: Synthetic oligonucleotide
caggccagacucugccgca

SEQ ID NO: 2823555 - RNA, 19 nt, Artificial Sequence
  Description of Artificial Sequence: Synthetic oligonucleotide
ccacacaaagacagucaca

SEQ ID NO: 2823556 - RNA, 19 nt, Artificial Sequence
  Description of Artificial Sequence: Synthetic oligonucleotide
cuuggcucagcaggccaga

SEQ ID NO: 2823557 - RNA, 19 nt, Artificial Sequence
  Description of Artificial Sequence: Synthetic oligonucleotide
caccagcacagaggccccg

SEQ ID NO: 2823558 - RNA, 19 nt, Artificial Sequence
  Description of Artificial Sequence: Synthetic oligonucleotide
caccgcccggccccucugg

SEQ ID NO: 2823559 - RNA, 19 nt, Artificial Sequence
  Description of Artificial Sequence: Synthetic oligonucleotide
uggcggggucuugugcuuc

SEQ ID NO: 2823560 - RNA, 19 nt, Artificial Sequence
  Description of Artificial Sequence: Synthetic oligonucleotide
ggcagcauguccacacaaa

SEQ ID NO: 2823561 - RNA, 19 nt, Artificial Sequence
  Description of Artificial Sequence: Synthetic oligonucleotide
cagccgccacuggugacac

SEQ ID NO: 2823562 - RNA, 19 nt, Artificial Sequence
  Description of Artificial Sequence: Synthetic oligonucleotide
cggagaccaucuuugucuc

SEQ ID NO: 2823563 - RNA, 19 nt, Artificial Sequence
  Description of Artificial Sequence: Synthetic oligonucleotide
cugccugcugguggcagca

SEQ ID NO: 2823564 - RNA, 19 nt, Artificial Sequence
  Description of Artificial Sequence: Synthetic oligonucleotide
ggacuuugaugauuuucuu

SEQ ID NO: 2823565 - RNA, 19 nt, Artificial Sequence
  Description of Artificial Sequence: Synthetic oligonucleotide
gguagaugcuaaugccuuu

SEQ ID NO: 2823566 - RNA, 19 nt, Artificial Sequence
  Description of Artificial Sequence: Synthetic oligonucleotide
gccuuucagcaugugaaua

SEQ ID NO: 2823567 - RNA, 19 nt, Artificial Sequence
  Description of Artificial Sequence: Synthetic oligonucleotide
ucccuccggagaccaucuu

SEQ ID NO: 2823568 - RNA, 19 nt, Artificial Sequence
  Description of Artificial Sequence: Synthetic oligonucleotide
ggucucuggguagaugcua

SEQ ID NO: 2823569 - RNA, 19 nt, Artificial Sequence
  Description of Artificial Sequence: Synthetic oligonucleotide
cucccuccggagaccaucu

SEQ ID NO: 2823570 - RNA, 19 nt, Artificial Sequence
  Description of Artificial Sequence: Synthetic oligonucleotide
aggccagacucugccgcau

SEQ ID NO: 2823571 - RNA, 19 nt, Artificial Sequence
  Description of Artificial Sequence: Synthetic oligonucleotide
cuuguugcugagggucucu

SEQ ID NO: 2823572 - RNA, 19 nt, Artificial Sequence
  Description of Artificial Sequence: Synthetic oligonucleotide
ggguagaugcuaaugccuu

SEQ ID NO: 2823573 - RNA, 19 nt, Artificial Sequence
  Description of Artificial Sequence: Synthetic oligonucleotide
cuccggagaccaucuuugu

SEQ ID NO: 2823574 - RNA, 19 nt, Artificial Sequence
  Description of Artificial Sequence: Synthetic oligonucleotide
gcaugugaauaaacuugua

SEQ ID NO: 2823575 - RNA, 19 nt, Artificial Sequence
  Description of Artificial Sequence: Synthetic oligonucleotide
ccugcugguggcagcaugu

SEQ ID NO: 2823576 - RNA, 19 nt, Artificial Sequence
  Description of Artificial Sequence: Synthetic oligonucleotide
ggagaccaucuuugucucu

SEQ ID NO: 2823577 - RNA, 19 nt, Artificial Sequence
  Description of Artificial Sequence: Synthetic oligonucleotide
ggccccgaugaggccagcc

SEQ ID NO: 2823578 - RNA, 19 nt, Artificial Sequence
  Description of Artificial Sequence: Synthetic oligonucleotide
aggccccgaugaggccagc

SEQ ID NO: 2823579 - RNA, 19 nt, Artificial Sequence
  Description of Artificial Sequence: Synthetic oligonucleotide
gccgccacuggugacacau

SEQ ID NO: 2823580 - RNA, 19 nt, Artificial Sequence
  Description of Artificial Sequence: Synthetic oligonucleotide
agccgccacuggugacaca

SEQ ID NO: 2823581 - RNA, 19 nt, Artificial Sequence
  Description of Artificial Sequence: Synthetic oligonucleotide
ccagccgccacuggugaca

SEQ ID NO: 2823582 - RNA, 19 nt, Artificial Sequence
  Description of Artificial Sequence: Synthetic oligonucleotide
cgugcacucucccuccgga

SEQ ID NO: 2823583 - RNA, 19 nt, Artificial Sequence
  Description of Artificial Sequence: Synthetic oligonucleotide
cucuccggacuuugaugau

SEQ ID NO: 2823584 - RNA, 19 nt, Artificial Sequence
  Description of Artificial Sequence: Synthetic oligonucleotide
gccagccgccacuggugac

SEQ ID NO: 2823585 - RNA, 19 nt, Artificial Sequence
  Description of Artificial Sequence: Synthetic oligonucleotide
ccgcccggccccucugggg

SEQ ID NO: 2823586 - RNA, 19 nt, Artificial Sequence
  Description of Artificial Sequence: Synthetic oligonucleotide
cuuugucucuccggacuuu

SEQ ID NO: 2823587 - RNA, 19 nt, Artificial Sequence
  Description of Artificial Sequence: Synthetic oligonucleotide
ccccucugggguccuuuuc

SEQ ID NO: 2823588 - RNA, 19 nt, Artificial Sequence
  Description of Artificial Sequence: Synthetic oligonucleotide
cgaugaggccagccgccac

SEQ ID NO: 2823589 - RNA, 19 nt, Artificial Sequence
  Description of Artificial Sequence: Synthetic oligonucleotide
cggggucuugugcuucuuc

SEQ ID NO: 2823590 - RNA, 19 nt, Artificial Sequence
  Description of Artificial Sequence: Synthetic oligonucleotide
ggcggggucuugugcuucu

SEQ ID NO: 2823591 - RNA, 19 nt, Artificial Sequence
  Description of Artificial Sequence: Synthetic oligonucleotide
gggucucuggguagaugcu

SEQ ID NO: 2823592 - RNA, 19 nt, Artificial Sequence
  Description of Artificial Sequence: Synthetic oligonucleotide
gccagacucugccgcauuu

SEQ ID NO: 2823593 - RNA, 19 nt, Artificial Sequence
  Description of Artificial Sequence: Synthetic oligonucleotide
ccagacucugccgcauuua

SEQ ID NO: 2823594 - RNA, 19 nt, Artificial Sequence
  Description of Artificial Sequence: Synthetic oligonucleotide
ccgccacuggugacacauc

SEQ ID NO: 2823595 - RNA, 19 nt, Artificial Sequence
  Description of Artificial Sequence: Synthetic oligonucleotide
ccgcauuuacuaacagguu

SEQ ID NO: 2823596 - RNA, 19 nt, Artificial Sequence
  Description of Artificial Sequence: Synthetic oligonucleotide
cccggccccucuggggucc

SEQ ID NO: 2823597 - RNA, 19 nt, Artificial Sequence
  Description of Artificial Sequence: Synthetic oligonucleotide
ccgaugaggccagccgcca

SEQ ID NO: 2823598 - RNA, 19 nt, Artificial Sequence
  Description of Artificial Sequence: Synthetic oligonucleotide
ccaccgcccggccccucug

SEQ ID NO: 2823599 - RNA, 19 nt, Artificial Sequence
  Description of Artificial Sequence: Synthetic oligonucleotide
gcucagcaggccagacucu

SEQ ID NO: 2823600 - RNA, 19 nt, Artificial Sequence
  Description of Artificial Sequence: Synthetic oligonucleotide
cccuccggagaccaucuuu

SEQ ID NO: 2823601 - RNA, 19 nt, Artificial Sequence
  Description of Artificial Sequence: Synthetic oligonucleotide
cgccaccaccgcccggccc

SEQ ID NO: 2823602 - RNA, 19 nt, Artificial Sequence
  Description of Artificial Sequence: Synthetic oligonucleotide
ccucugggguccuuuucuu

SEQ ID NO: 2823603 - RNA, 19 nt, Artificial Sequence
  Description of Artificial Sequence: Synthetic oligonucleotide
gcccggccccucugggguc

SEQ ID NO: 2823604 - RNA, 19 nt, Artificial Sequence
  Description of Artificial Sequence: Synthetic oligonucleotide
cucucccuccggagaccau

SEQ ID NO: 2823605 - RNA, 19 nt, Artificial Sequence
  Description of Artificial Sequence: Synthetic oligonucleotide
ggccagacucugccgcauu

SEQ ID NO: 2823606 - RNA, 19 nt, Artificial Sequence
  Description of Artificial Sequence: Synthetic oligonucleotide
caccaccgcccggccccuc

SEQ ID NO: 2823607 - RNA, 19 nt, Artificial Sequence
  Description of Artificial Sequence: Synthetic oligonucleotide
ccagcacagaggccccgau

SEQ ID NO: 2823608 - RNA, 19 nt, Artificial Sequence
  Description of Artificial Sequence: Synthetic oligonucleotide
gccccucugggguccuuuu

SEQ ID NO: 2823609 - RNA, 19 nt, Artificial Sequence
  Description of Artificial Sequence: Synthetic oligonucleotide
cgcccggccccucuggggu

SEQ ID NO: 2823610 - RNA, 19 nt, Artificial Sequence
  Description of Artificial Sequence: Synthetic oligonucleotide
ggccccucugggguccuuu

SEQ ID NO: 2823611 - RNA, 19 nt, Artificial Sequence
  Description of Artificial Sequence: Synthetic oligonucleotide
gcggggucuugugcuucuu

SEQ ID NO: 2823612 - RNA, 19 nt, Artificial Sequence
  Description of Artificial Sequence: Synthetic oligonucleotide
ccaccaccgcccggccccu

SEQ ID NO: 2823613 - RNA, 19 nt, Artificial Sequence
  Description of Artificial Sequence: Synthetic oligonucleotide
ccggccccucugggguccu

SEQ ID NO: 2823614 - RNA, 19 nt, Artificial Sequence
  Description of Artificial Sequence: Synthetic oligonucleotide
  modified_base (12)..(12): a, c, u, g, unknown or other
uauacaugcauncacauac

SEQ ID NO: 2823615 - RNA, 19 nt, Artificial Sequence
  Description of Artificial Sequence: Synthetic oligonucleotide
ucuucuaucugcuuuauag

SEQ ID NO: 2823616 - RNA, 19 nt, Artificial Sequence
  Description of Artificial Sequence: Synthetic oligonucleotide
aaguguaacuuucaauggc

SEQ ID NO: 2823617 - RNA, 19 nt, Artificial Sequence
  Description of Artificial Sequence: Synthetic oligonucleotide
auggcuucgacacugaggc

SEQ ID NO: 2823618 - RNA, 19 nt, Artificial Sequence
  Description of Artificial Sequence: Synthetic oligonucleotide
uucaagauugaaaagcucc

SEQ ID NO: 2823619 - RNA, 19 nt, Artificial Sequence
  Description of Artificial Sequence: Synthetic oligonucleotide
aaaguguaacuuucaaugg

SEQ ID NO: 2823620 - RNA, 19 nt, Artificial Sequence
  Description of Artificial Sequence: Synthetic oligonucleotide
ugcauuuguacacauagcc

SEQ ID NO: 2823621 - RNA, 19 nt, Artificial Sequence
  Description of Artificial Sequence: Synthetic oligonucleotide
agugcauuuguacacauag

SEQ ID NO: 2823622 - RNA, 19 nt, Artificial Sequence
  Description of Artificial Sequence: Synthetic oligonucleotide
  modified_base (10)..(10): a, c, u, g, unknown or other
uacaugcauncacauacgg

SEQ ID NO: 2823623 - RNA, 19 nt, Artificial Sequence
  Description of Artificial Sequence: Synthetic oligonucleotide
aagauugaaaagcuccuug

SEQ ID NO: 2823624 - RNA, 19 nt, Artificial Sequence
  Description of Artificial Sequence: Synthetic oligonucleotide
cauaggacagcuuugacuc

SEQ ID NO: 2823625 - RNA, 19 nt, Artificial Sequence
  Description of Artificial Sequence: Synthetic oligonucleotide
uuuauccacagacacauuc

SEQ ID NO: 2823626 - RNA, 19 nt, Artificial Sequence
  Description of Artificial Sequence: Synthetic oligonucleotide
aacaccagcggguucuccc

SEQ ID NO: 2823627 - RNA, 19 nt, Artificial Sequence
  Description of Artificial Sequence: Synthetic oligonucleotide
aaugcacccgucuucaucu

SEQ ID NO: 2823628 - RNA, 19 nt, Artificial Sequence
  Description of Artificial Sequence: Synthetic oligonucleotide
uuuauagacuucucuaucu

SEQ ID NO: 2823629 - RNA, 19 nt, Artificial Sequence
  Description of Artificial Sequence: Synthetic oligonucleotide
cacaccuucauuuccaagg

SEQ ID NO: 2823630 - RNA, 19 nt, Artificial Sequence
  Description of Artificial Sequence: Synthetic oligonucleotide
ucuaucucaacucugcuuu

SEQ ID NO: 2823631 - RNA, 19 nt, Artificial Sequence
  Description of Artificial Sequence: Synthetic oligonucleotide
cacgauuugcuuuucagag

SEQ ID NO: 2823632 - RNA, 19 nt, Artificial Sequence
  Description of Artificial Sequence: Synthetic oligonucleotide
caucuuugcacuuggacag

SEQ ID NO: 2823633 - RNA, 19 nt, Artificial Sequence
  Description of Artificial Sequence: Synthetic oligonucleotide
uagucuagguucuugggag

SEQ ID NO: 2823634 - RNA, 19 nt, Artificial Sequence
  Description of Artificial Sequence: Synthetic oligonucleotide
agagucucaagaaugcacc

SEQ ID NO: 2823635 - RNA, 19 nt, Artificial Sequence
  Description of Artificial Sequence: Synthetic oligonucleotide
ucgacacugaggcagaaca

SEQ ID NO: 2823636 - RNA, 19 nt, Artificial Sequence
  Description of Artificial Sequence: Synthetic oligonucleotide
aacaagucccucuuguagu

SEQ ID NO: 2823637 - RNA, 19 nt, Artificial Sequence
  Description of Artificial Sequence: Synthetic oligonucleotide
gaacaagucccucuuguag

SEQ ID NO: 2823638 - RNA, 19 nt, Artificial Sequence
  Description of Artificial Sequence: Synthetic oligonucleotide
aagaggaugcaguuguugu

SEQ ID NO: 2823639 - RNA, 19 nt, Artificial Sequence
  Description of Artificial Sequence: Synthetic oligonucleotide
uucuaucugcuuuauagac

SEQ ID NO: 2823640 - RNA, 19 nt, Artificial Sequence
  Description of Artificial Sequence: Synthetic oligonucleotide
uucgaggagacacagcgca

SEQ ID NO: 2823641 - RNA, 19 nt, Artificial Sequence
  Description of Artificial Sequence: Synthetic oligonucleotide
uucucuaucucaacucugc

SEQ ID NO: 2823642 - RNA, 19 nt, Artificial Sequence
  Description of Artificial Sequence: Synthetic oligonucleotide
ucuuuauccacagacacau

SEQ ID NO: 2823643 - RNA, 19 nt, Artificial Sequence
  Description of Artificial Sequence: Synthetic oligonucleotide
acauagccaaggcugaggg

SEQ ID NO: 2823644 - RNA, 19 nt, Artificial Sequence
  Description of Artificial Sequence: Synthetic oligonucleotide
ucaagauugaaaagcuccu

SEQ ID NO: 2823645 - RNA, 19 nt, Artificial Sequence
  Description of Artificial Sequence: Synthetic oligonucleotide
uguacacauagccaaggcu

SEQ ID NO: 2823646 - RNA, 19 nt, Artificial Sequence
  Description of Artificial Sequence: Synthetic oligonucleotide
  modified_base (8)..(8): a, c, u, g, unknown or other
caugcauncacauacggga

SEQ ID NO: 2823647 - RNA, 19 nt, Artificial Sequence
  Description of Artificial Sequence: Synthetic oligonucleotide
uguagucuagguucuuggg

SEQ ID NO: 2823648 - RNA, 19 nt, Artificial Sequence
  Description of Artificial Sequence: Synthetic oligonucleotide
gacacauucgaggagacac

SEQ ID NO: 2823649 - RNA, 19 nt, Artificial Sequence
  Description of Artificial Sequence: Synthetic oligonucleotide
uuuguacacauagccaagg

SEQ ID NO: 2823650 - RNA, 19 nt, Artificial Sequence
  Description of Artificial Sequence: Synthetic oligonucleotide
uucaucuuugcacuuggac

SEQ ID NO: 2823651 - RNA, 19 nt, Artificial Sequence
  Description of Artificial Sequence: Synthetic oligonucleotide
auagccaaggcugagggag

SEQ ID NO: 2823652 - RNA, 19 nt, Artificial Sequence
  Description of Artificial Sequence: Synthetic oligonucleotide
ugagggagcagccuguaca

SEQ ID NO: 2823653 - RNA, 19 nt, Artificial Sequence
  Description of Artificial Sequence: Synthetic oligonucleotide
caggacaucuucuaucugc

SEQ ID NO: 2823654 - RNA, 19 nt, Artificial Sequence
  Description of Artificial Sequence: Synthetic oligonucleotide
uuugacuccaccucccaca

SEQ ID NO: 2823655 - RNA, 19 nt, Artificial Sequence
  Description of Artificial Sequence: Synthetic oligonucleotide
  modified_base (2)..(2): a, c, u, g, unknown or other
uncacauacgggagcacag

SEQ ID NO: 2823656 - RNA, 19 nt, Artificial Sequence
  Description of Artificial Sequence: Synthetic oligonucleotide
guacacauagccaaggcug

SEQ ID NO: 2823657 - RNA, 19 nt, Artificial Sequence
  Description of Artificial Sequence: Synthetic oligonucleotide
guuguuguccuccuggcug

SEQ ID NO: 2823658 - RNA, 19 nt, Artificial Sequence
  Description of Artificial Sequence: Synthetic oligonucleotide
agauugaaaagcuccuugu

SEQ ID NO: 2823659 - RNA, 19 nt, Artificial Sequence
  Description of Artificial Sequence: Synthetic oligonucleotide
uucaauggcuucgacacug

SEQ ID NO: 2823660 - RNA, 19 nt, Artificial Sequence
  Description of Artificial Sequence: Synthetic oligonucleotide
ugcuuuauagacuucucua

SEQ ID NO: 2823661 - RNA, 19 nt, Artificial Sequence
  Description of Artificial Sequence: Synthetic oligonucleotide
uuauagacuucucuaucuc

SEQ ID NO: 2823662 - RNA, 19 nt, Artificial Sequence
  Description of Artificial Sequence: Synthetic oligonucleotide
acuuucaauggcuucgaca

SEQ ID NO: 2823663 - RNA, 19 nt, Artificial Sequence
  Description of Artificial Sequence: Synthetic oligonucleotide
uucuuuauccacagacaca

SEQ ID NO: 2823664 - RNA, 19 nt, Artificial Sequence
  Description of Artificial Sequence: Synthetic oligonucleotide
uuucaggacaucuucuauc

SEQ ID NO: 2823665 - RNA, 19 nt, Artificial Sequence
  Description of Artificial Sequence: Synthetic oligonucleotide
cauuuguacacauagccaa

SEQ ID NO: 2823666 - RNA, 19 nt, Artificial Sequence
  Description of Artificial Sequence: Synthetic oligonucleotide
gcuuucaagauugaaaagc

SEQ ID NO: 2823667 - RNA, 19 nt, Artificial Sequence
  Description of Artificial Sequence: Synthetic oligonucleotide
cagagagucgcccagcggc

SEQ ID NO: 2823668 - RNA, 19 nt, Artificial Sequence
  Description of Artificial Sequence: Synthetic oligonucleotide
uugggagugcauuuguaca

SEQ ID NO: 2823669 - RNA, 19 nt, Artificial Sequence
  Description of Artificial Sequence: Synthetic oligonucleotide
  modified_base (6)..(6): a, c, u, g, unknown or other
ugcauncacauacgggagc

SEQ ID NO: 2823670 - RNA, 19 nt, Artificial Sequence
  Description of Artificial Sequence: Synthetic oligonucleotide
cuuuauagacuucucuauc

SEQ ID NO: 2823671 - RNA, 19 nt, Artificial Sequence
  Description of Artificial Sequence: Synthetic oligonucleotide
gauugaaaagcuccuuguc

SEQ ID NO: 2823672 - RNA, 19 nt, Artificial Sequence
  Description of Artificial Sequence: Synthetic oligonucleotide
cuugggagugcauuuguac

SEQ ID NO: 2823673 - RNA, 19 nt, Artificial Sequence
  Description of Artificial Sequence: Synthetic oligonucleotide
ugcuuucaagauugaaaag

SEQ ID NO: 2823674 - RNA, 19 nt, Artificial Sequence
  Description of Artificial Sequence: Synthetic oligonucleotide
uuguacacauagccaaggc

SEQ ID NO: 2823675 - RNA, 19 nt, Artificial Sequence
  Description of Artificial Sequence: Synthetic oligonucleotide
cugaggcagaacaaguccc

SEQ ID NO: 2823676 - RNA, 19 nt, Artificial Sequence
  Description of Artificial Sequence: Synthetic oligonucleotide
acaagucccucuuguaguc

SEQ ID NO: 2823677 - RNA, 19 nt, Artificial Sequence
  Description of Artificial Sequence: Synthetic oligonucleotide
uuucaagauugaaaagcuc

SEQ ID NO: 2823678 - RNA, 19 nt, Artificial Sequence
  Description of Artificial Sequence: Synthetic oligonucleotide
uguaacuuucaauggcuuc

SEQ ID NO: 2823679 - RNA, 19 nt, Artificial Sequence
  Description of Artificial Sequence: Synthetic oligonucleotide
uacacauagccaaggcuga

SEQ ID NO: 2823680 - RNA, 19 nt, Artificial Sequence
  Description of Artificial Sequence: Synthetic oligonucleotide
  modified_base (9)..(9): a, c, u, g, unknown or other
acaugcauncacauacggg

SEQ ID NO: 2823681 - RNA, 19 nt, Artificial Sequence
  Description of Artificial Sequence: Synthetic oligonucleotide
acaggacagagucucaaga

SEQ ID NO: 2823682 - RNA, 19 nt, Artificial Sequence
  Description of Artificial Sequence: Synthetic oligonucleotide
cugcuuucaagauugaaaa

SEQ ID NO: 2823683 - RNA, 19 nt, Artificial Sequence
  Description of Artificial Sequence: Synthetic oligonucleotide
gacagagucucaagaaugc

SEQ ID NO: 2823684 - RNA, 19 nt, Artificial Sequence
  Description of Artificial Sequence: Synthetic oligonucleotide
agacuucucuaucucaacu

SEQ ID NO: 2823685 - RNA, 19 nt, Artificial Sequence
  Description of Artificial Sequence: Synthetic oligonucleotide
auaggacagcuuugacucc

SEQ ID NO: 2823686 - RNA, 19 nt, Artificial Sequence
  Description of Artificial Sequence: Synthetic oligonucleotide
ggagacacagcgcaagagg

SEQ ID NO: 2823687 - RNA, 19 nt, Artificial Sequence
  Description of Artificial Sequence: Synthetic oligonucleotide
gacuucucuaucucaacuc

SEQ ID NO: 2823688 - RNA, 19 nt, Artificial Sequence
  Description of Artificial Sequence: Synthetic oligonucleotide
aagaaugcacccgucuuca

SEQ ID NO: 2823689 - RNA, 19 nt, Artificial Sequence
  Description of Artificial Sequence: Synthetic oligonucleotide
acccaggucagagagucgc

SEQ ID NO: 2823690 - RNA, 19 nt, Artificial Sequence
  Description of Artificial Sequence: Synthetic oligonucleotide
cagagucucaagaaugcac

SEQ ID NO: 2823691 - RNA, 19 nt, Artificial Sequence
  Description of Artificial Sequence: Synthetic oligonucleotide
cauacgggagcacagcuuc

SEQ ID NO: 2823692 - RNA, 19 nt, Artificial Sequence
  Description of Artificial Sequence: Synthetic oligonucleotide
ucuuccggcacgauuugcu

SEQ ID NO: 2823693 - RNA, 19 nt, Artificial Sequence
  Description of Artificial Sequence: Synthetic oligonucleotide
ugggagugcauuuguacac

SEQ ID NO: 2823694 - RNA, 19 nt, Artificial Sequence
  Description of Artificial Sequence: Synthetic oligonucleotide
acagcgcgcgcacaggaac

SEQ ID NO: 2823695 - RNA, 19 nt, Artificial Sequence
  Description of Artificial Sequence: Synthetic oligonucleotide
aguguaacuuucaauggcu

SEQ ID NO: 2823696 - RNA, 19 nt, Artificial Sequence
  Description of Artificial Sequence: Synthetic oligonucleotide
gagggagcagccuguacag

SEQ ID NO: 2823697 - RNA, 19 nt, Artificial Sequence
  Description of Artificial Sequence: Synthetic oligonucleotide
gagucucaagaaugcaccc

SEQ ID NO: 2823698 - RNA, 19 nt, Artificial Sequence
  Description of Artificial Sequence: Synthetic oligonucleotide
acaccagcggguucucccc

SEQ ID NO: 2823699 - RNA, 19 nt, Artificial Sequence
  Description of Artificial Sequence: Synthetic oligonucleotide
agucucaagaaugcacccg

SEQ ID NO: 2823700 - RNA, 19 nt, Artificial Sequence
  Description of Artificial Sequence: Synthetic oligonucleotide
cuuucaagauugaaaagcu

SEQ ID NO: 2823701 - RNA, 19 nt, Artificial Sequence
  Description of Artificial Sequence: Synthetic oligonucleotide
guagucuagguucuuggga

SEQ ID NO: 2823702 - RNA, 19 nt, Artificial Sequence
  Description of Artificial Sequence: Synthetic oligonucleotide
ucucuaucucaacucugcu

SEQ ID NO: 2823703 - RNA, 19 nt, Artificial Sequence
  Description of Artificial Sequence: Synthetic oligonucleotide
ccucuuguagucuagguuc

SEQ ID NO: 2823704 - RNA, 19 nt, Artificial Sequence
  Description of Artificial Sequence: Synthetic oligonucleotide
aggacagagucucaagaau

SEQ ID NO: 2823705 - RNA, 19 nt, Artificial Sequence
  Description of Artificial Sequence: Synthetic oligonucleotide
uucuugggagugcauuugu

SEQ ID NO: 2823706 - RNA, 19 nt, Artificial Sequence
  Description of Artificial Sequence: Synthetic oligonucleotide
cuucuaucugcuuuauaga

SEQ ID NO: 2823707 - RNA, 19 nt, Artificial Sequence
  Description of Artificial Sequence: Synthetic oligonucleotide
caagaaugcacccgucuuc

SEQ ID NO: 2823708 - RNA, 19 nt, Artificial Sequence
  Description of Artificial Sequence: Synthetic oligonucleotide
acccuaaaguguaacuuuc

SEQ ID NO: 2823709 - RNA, 19 nt, Artificial Sequence
  Description of Artificial Sequence: Synthetic oligonucleotide
  modified_base (11)..(11): a, c, u, g, unknown or other
auacaugcauncacauacg

SEQ ID NO: 2823710 - RNA, 19 nt, Artificial Sequence
  Description of Artificial Sequence: Synthetic oligonucleotide
cuguacaggacagagucuc

SEQ ID NO: 2823711 - RNA, 19 nt, Artificial Sequence
  Description of Artificial Sequence: Synthetic oligonucleotide
gaaugcacccgucuucauc

SEQ ID NO: 2823712 - RNA, 19 nt, Artificial Sequence
  Description of Artificial Sequence: Synthetic oligonucleotide
auuuguacacauagccaag

SEQ ID NO: 2823713 - RNA, 19 nt, Artificial Sequence
  Description of Artificial Sequence: Synthetic oligonucleotide
uugacuccaccucccacac

SEQ ID NO: 2823714 - RNA, 19 nt, Artificial Sequence
  Description of Artificial Sequence: Synthetic oligonucleotide
  modified_base (7)..(7): a, c, u, g, unknown or other
augcauncacauacgggag

SEQ ID NO: 2823715 - RNA, 19 nt, Artificial Sequence
  Description of Artificial Sequence: Synthetic oligonucleotide
ugcagcggccagcauagga

SEQ ID NO: 2823716 - RNA, 19 nt, Artificial Sequence
  Description of Artificial Sequence: Synthetic oligonucleotide
uguacaggacagagucuca

SEQ ID NO: 2823717 - RNA, 19 nt, Artificial Sequence
  Description of Artificial Sequence: Synthetic oligonucleotide
ucuguucuuuauccacaga

SEQ ID NO: 2823718 - RNA, 19 nt, Artificial Sequence
  Description of Artificial Sequence: Synthetic oligonucleotide
ggucacccaggucagagag

SEQ ID NO: 2823719 - RNA, 19 nt, Artificial Sequence
  Description of Artificial Sequence: Synthetic oligonucleotide
  modified_base (3)..(3): a, c, u, g, unknown or other
auncacauacgggagcaca

SEQ ID NO: 2823720 - RNA, 19 nt, Artificial Sequence
  Description of Artificial Sequence: Synthetic oligonucleotide
uagacuucucuaucucaac

SEQ ID NO: 2823721 - RNA, 19 nt, Artificial Sequence
  Description of Artificial Sequence: Synthetic oligonucleotide
aggacccuaaaguguaacu

SEQ ID NO: 2823722 - RNA, 19 nt, Artificial Sequence
  Description of Artificial Sequence: Synthetic oligonucleotide
uuucaauggcuucgacacu

SEQ ID NO: 2823723 - RNA, 19 nt, Artificial Sequence
  Description of Artificial Sequence: Synthetic oligonucleotide
auucgaggagacacagcgc

SEQ ID NO: 2823724 - RNA, 19 nt, Artificial Sequence
  Description of Artificial Sequence: Synthetic oligonucleotide
ugcacuuggacagcuucug

SEQ ID NO: 2823725 - RNA, 19 nt, Artificial Sequence
  Description of Artificial Sequence: Synthetic oligonucleotide
acacagcgcaagaggaugc

SEQ ID NO: 2823726 - RNA, 19 nt, Artificial Sequence
  Description of Artificial Sequence: Synthetic oligonucleotide
ggcacgauuugcuuuucag

SEQ ID NO: 2823727 - RNA, 19 nt, Artificial Sequence
  Description of Artificial Sequence: Synthetic oligonucleotide
ucaggacaucuucuaucug

SEQ ID NO: 2823728 - RNA, 19 nt, Artificial Sequence
  Description of Artificial Sequence: Synthetic oligonucleotide
cacauucgaggagacacag

SEQ ID NO: 2823729 - RNA, 19 nt, Artificial Sequence
  Description of Artificial Sequence: Synthetic oligonucleotide
agcuuugacuccaccuccc

SEQ ID NO: 2823730 - RNA, 19 nt, Artificial Sequence
  Description of Artificial Sequence: Synthetic oligonucleotide
auagacuucucuaucucaa

SEQ ID NO: 2823731 - RNA, 19 nt, Artificial Sequence
  Description of Artificial Sequence: Synthetic oligonucleotide
acgggagcacagcuucagc

SEQ ID NO: 2823732 - RNA, 19 nt, Artificial Sequence
  Description of Artificial Sequence: Synthetic oligonucleotide
ucaauggcuucgacacuga

SEQ ID NO: 2823733 - RNA, 19 nt, Artificial Sequence
  Description of Artificial Sequence: Synthetic oligonucleotide
cuccuugucuuccggcacg

SEQ ID NO: 2823734 - RNA, 19 nt, Artificial Sequence
  Description of Artificial Sequence: Synthetic oligonucleotide
agagagucgcccagcggcc

SEQ ID NO: 2823735 - RNA, 19 nt, Artificial Sequence
  Description of Artificial Sequence: Synthetic oligonucleotide
ggacagagucucaagaaug

SEQ ID NO: 2823736 - RNA, 19 nt, Artificial Sequence
  Description of Artificial Sequence: Synthetic oligonucleotide
cacauagccaaggcugagg

SEQ ID NO: 2823737 - RNA, 19 nt, Artificial Sequence
  Description of Artificial Sequence: Synthetic oligonucleotide
ggcuucgacacugaggcag

SEQ ID NO: 2823738 - RNA, 19 nt, Artificial Sequence
  Description of Artificial Sequence: Synthetic oligonucleotide
caagaggaugcaguuguug

SEQ ID NO: 2823739 - RNA, 19 nt, Artificial Sequence
  Description of Artificial Sequence: Synthetic oligonucleotide
aggucagagagucgcccag

SEQ ID NO: 2823740 - RNA, 19 nt, Artificial Sequence
  Description of Artificial Sequence: Synthetic oligonucleotide
aggcagaacaagucccucu

SEQ ID NO: 2823741 - RNA, 19 nt, Artificial Sequence
  Description of Artificial Sequence: Synthetic oligonucleotide
ucuagguucuugggagugc

SEQ ID NO: 2823742 - RNA, 19 nt, Artificial Sequence
  Description of Artificial Sequence: Synthetic oligonucleotide
gacaucuucuaucugcuuu

SEQ ID NO: 2823743 - RNA, 19 nt, Artificial Sequence
  Description of Artificial Sequence: Synthetic oligonucleotide
ucuugggagugcauuugua

SEQ ID NO: 2823744 - RNA, 19 nt, Artificial Sequence
  Description of Artificial Sequence: Synthetic oligonucleotide
ugucuuccggcacgauuug

SEQ ID NO: 2823745 - RNA, 19 nt, Artificial Sequence
  Description of Artificial Sequence: Synthetic oligonucleotide
agaacaagucccucuugua

SEQ ID NO: 2823746 - RNA, 19 nt, Artificial Sequence
  Description of Artificial Sequence: Synthetic oligonucleotide
ugcaguuguuguccuccug

SEQ ID NO: 2823747 - RNA, 19 nt, Artificial Sequence
  Description of Artificial Sequence: Synthetic oligonucleotide
acauucgaggagacacagc

SEQ ID NO: 2823748 - RNA, 19 nt, Artificial Sequence
  Description of Artificial Sequence: Synthetic oligonucleotide
cuuugacuccaccucccac

SEQ ID NO: 2823749 - RNA, 19 nt, Artificial Sequence
  Description of Artificial Sequence: Synthetic oligonucleotide
uacgggagcacagcuucag

SEQ ID NO: 2823750 - RNA, 19 nt, Artificial Sequence
  Description of Artificial Sequence: Synthetic oligonucleotide
cuaaaguguaacuuucaau

SEQ ID NO: 2823751 - RNA, 19 nt, Artificial Sequence
  Description of Artificial Sequence: Synthetic oligonucleotide
agucuagguucuugggagu

SEQ ID NO: 2823752 - RNA, 19 nt, Artificial Sequence
  Description of Artificial Sequence: Synthetic oligonucleotide
ggagcacagcuucagcugc

SEQ ID NO: 2823753 - RNA, 19 nt, Artificial Sequence
  Description of Artificial Sequence: Synthetic oligonucleotide
aggagacacagcgcaagag

SEQ ID NO: 2823754 - RNA, 19 nt, Artificial Sequence
  Description of Artificial Sequence: Synthetic oligonucleotide
ucucaagaaugcacccguc

SEQ ID NO: 2823755 - RNA, 19 nt, Artificial Sequence
  Description of Artificial Sequence: Synthetic oligonucleotide
ucccucuuguagucuaggu

SEQ ID NO: 2823756 - RNA, 19 nt, Artificial Sequence
  Description of Artificial Sequence: Synthetic oligonucleotide
cccgucuucaucuuugcac

SEQ ID NO: 2823757 - RNA, 19 nt, Artificial Sequence
  Description of Artificial Sequence: Synthetic oligonucleotide
uagccaaggcugagggagc

SEQ ID NO: 2823758 - RNA, 19 nt, Artificial Sequence
  Description of Artificial Sequence: Synthetic oligonucleotide
agcgcaagaggaugcaguu

SEQ ID NO: 2823759 - RNA, 19 nt, Artificial Sequence
  Description of Artificial Sequence: Synthetic oligonucleotide
uccggcacgauuugcuuuu

SEQ ID NO: 2823760 - RNA, 19 nt, Artificial Sequence
  Description of Artificial Sequence: Synthetic oligonucleotide
guucuugggagugcauuug

SEQ ID NO: 2823761 - RNA, 19 nt, Artificial Sequence
  Description of Artificial Sequence: Synthetic oligonucleotide
accuucauuuccaaggcuu

SEQ ID NO: 2823762 - RNA, 19 nt, Artificial Sequence
  Description of Artificial Sequence: Synthetic oligonucleotide
acagagucucaagaaugca

SEQ ID NO: 2823763 - RNA, 19 nt, Artificial Sequence
  Description of Artificial Sequence: Synthetic oligonucleotide
cagacacauucgaggagac

SEQ ID NO: 2823764 - RNA, 19 nt, Artificial Sequence
  Description of Artificial Sequence: Synthetic oligonucleotide
gugcauuuguacacauagc

SEQ ID NO: 2823765 - RNA, 19 nt, Artificial Sequence
  Description of Artificial Sequence: Synthetic oligonucleotide
auccacagacacauucgag

SEQ ID NO: 2823766 - RNA, 19 nt, Artificial Sequence
  Description of Artificial Sequence: Synthetic oligonucleotide
acacugaggcagaacaagu

SEQ ID NO: 2823767 - RNA, 19 nt, Artificial Sequence
  Description of Artificial Sequence: Synthetic oligonucleotide
aggaugcaguuguuguccu

SEQ ID NO: 2823768 - RNA, 19 nt, Artificial Sequence
  Description of Artificial Sequence: Synthetic oligonucleotide
caauggcuucgacacugag

SEQ ID NO: 2823769 - RNA, 19 nt, Artificial Sequence
  Description of Artificial Sequence: Synthetic oligonucleotide
gacccuaaaguguaacuuu

SEQ ID NO: 2823770 - RNA, 19 nt, Artificial Sequence
  Description of Artificial Sequence: Synthetic oligonucleotide
gggagcacagcuucagcug

SEQ ID NO: 2823771 - RNA, 19 nt, Artificial Sequence
  Description of Artificial Sequence: Synthetic oligonucleotide
gaggacccuaaaguguaac

SEQ ID NO: 2823772 - RNA, 19 nt, Artificial Sequence
  Description of Artificial Sequence: Synthetic oligonucleotide
cagaggacccuaaagugua

SEQ ID NO: 2823773 - RNA, 19 nt, Artificial Sequence
  Description of Artificial Sequence: Synthetic oligonucleotide
gucucaagaaugcacccgu

SEQ ID NO: 2823774 - RNA, 19 nt, Artificial Sequence
  Description of Artificial Sequence: Synthetic oligonucleotide
gucuagguucuugggagug

SEQ ID NO: 2823775 - RNA, 19 nt, Artificial Sequence
  Description of Artificial Sequence: Synthetic oligonucleotide
accagcggguucuccccgg

SEQ ID NO: 2823776 - RNA, 19 nt, Artificial Sequence
  Description of Artificial Sequence: Synthetic oligonucleotide
ucgaggagacacagcgcaa

SEQ ID NO: 2823777 - RNA, 19 nt, Artificial Sequence
  Description of Artificial Sequence: Synthetic oligonucleotide
gcacgauuugcuuuucaga

SEQ ID NO: 2823778 - RNA, 19 nt, Artificial Sequence
  Description of Artificial Sequence: Synthetic oligonucleotide
gcgcacaggaacaccagcg

SEQ ID NO: 2823779 - RNA, 19 nt, Artificial Sequence
  Description of Artificial Sequence: Synthetic oligonucleotide
agcagccuguacaggacag

SEQ ID NO: 2823780 - RNA, 19 nt, Artificial Sequence
  Description of Artificial Sequence: Synthetic oligonucleotide
gauuugcuuuucagaggac

SEQ ID NO: 2823781 - RNA, 19 nt, Artificial Sequence
  Description of Artificial Sequence: Synthetic oligonucleotide
gcauuuguacacauagcca

SEQ ID NO: 2823782 - RNA, 19 nt, Artificial Sequence
  Description of Artificial Sequence: Synthetic oligonucleotide
gcugcagcggccagcauag

SEQ ID NO: 2823783 - RNA, 19 nt, Artificial Sequence
  Description of Artificial Sequence: Synthetic oligonucleotide
uuccggcacgauuugcuuu

SEQ ID NO: 2823784 - RNA, 19 nt, Artificial Sequence
  Description of Artificial Sequence: Synthetic oligonucleotide
acagcgcaagaggaugcag

SEQ ID NO: 2823785 - RNA, 19 nt, Artificial Sequence
  Description of Artificial Sequence: Synthetic oligonucleotide
  modified_base (4)..(4): a, c, u, g, unknown or other
cauncacauacgggagcac

SEQ ID NO: 2823786 - RNA, 19 nt, Artificial Sequence
  Description of Artificial Sequence: Synthetic oligonucleotide
uucgacacugaggcagaac

SEQ ID NO: 2823787 - RNA, 19 nt, Artificial Sequence
  Description of Artificial Sequence: Synthetic oligonucleotide
cacccgucuucaucuuugc

SEQ ID NO: 2823788 - RNA, 19 nt, Artificial Sequence
  Description of Artificial Sequence: Synthetic oligonucleotide
gucccucuuguagucuagg

SEQ ID NO: 2823789 - RNA, 19 nt, Artificial Sequence
  Description of Artificial Sequence: Synthetic oligonucleotide
cagaacaagucccucuugu

SEQ ID NO: 2823790 - RNA, 19 nt, Artificial Sequence
  Description of Artificial Sequence: Synthetic oligonucleotide
cuagguucuugggagugca

SEQ ID NO: 2823791 - RNA, 19 nt, Artificial Sequence
  Description of Artificial Sequence: Synthetic oligonucleotide
augcaguuguuguccuccu

SEQ ID NO: 2823792 - RNA, 19 nt, Artificial Sequence
  Description of Artificial Sequence: Synthetic oligonucleotide
ugacuccaccucccacacc

SEQ ID NO: 2823793 - RNA, 19 nt, Artificial Sequence
  Description of Artificial Sequence: Synthetic oligonucleotide
cugcuuuauagacuucucu

SEQ ID NO: 2823794 - RNA, 19 nt, Artificial Sequence
  Description of Artificial Sequence: Synthetic oligonucleotide
acacauucgaggagacaca

SEQ ID NO: 2823795 - RNA, 19 nt, Artificial Sequence
  Description of Artificial Sequence: Synthetic oligonucleotide
gcuuuauagacuucucuau

SEQ ID NO: 2823796 - RNA, 19 nt, Artificial Sequence
  Description of Artificial Sequence: Synthetic oligonucleotide
cucaagaaugcacccgucu

SEQ ID NO: 2823797 - RNA, 19 nt, Artificial Sequence
  Description of Artificial Sequence: Synthetic oligonucleotide
  modified_base (5)..(5): a, c, u, g, unknown or other
gcauncacauacgggagca

SEQ ID NO: 2823798 - RNA, 19 nt, Artificial Sequence
  Description of Artificial Sequence: Synthetic oligonucleotide
agguucuugggagugcauu

SEQ ID NO: 2823799 - RNA, 19 nt, Artificial Sequence
  Description of Artificial Sequence: Synthetic oligonucleotide
ccagcauaggacagcuuug

SEQ ID NO: 2823800 - RNA, 19 nt, Artificial Sequence
  Description of Artificial Sequence: Synthetic oligonucleotide
ccagcggccggcgacagcg

SEQ ID NO: 2823801 - RNA, 19 nt, Artificial Sequence
  Description of Artificial Sequence: Synthetic oligonucleotide
acccgucuucaucuuugca

SEQ ID NO: 2823802 - RNA, 19 nt, Artificial Sequence
  Description of Artificial Sequence: Synthetic oligonucleotide
ugcacccgucuucaucuuu

SEQ ID NO: 2823803 - RNA, 19 nt, Artificial Sequence
  Description of Artificial Sequence: Synthetic oligonucleotide
acaggaacaccagcggguu

SEQ ID NO: 2823804 - RNA, 19 nt, Artificial Sequence
  Description of Artificial Sequence: Synthetic oligonucleotide
agggagcagccuguacagg

SEQ ID NO: 2823805 - RNA, 19 nt, Artificial Sequence
  Description of Artificial Sequence: Synthetic oligonucleotide
uagguucuugggagugcau

SEQ ID NO: 2823806 - RNA, 19 nt, Artificial Sequence
  Description of Artificial Sequence: Synthetic oligonucleotide
cauagccaaggcugaggga

SEQ ID NO: 2823807 - RNA, 19 nt, Artificial Sequence
  Description of Artificial Sequence: Synthetic oligonucleotide
agacacauucgaggagaca

SEQ ID NO: 2823808 - RNA, 19 nt, Artificial Sequence
  Description of Artificial Sequence: Synthetic oligonucleotide
ggcgacagcgcgcgcacag

SEQ ID NO: 2823809 - RNA, 19 nt, Artificial Sequence
  Description of Artificial Sequence: Synthetic oligonucleotide
cagcauaggacagcuuuga

SEQ ID NO: 2823810 - RNA, 19 nt, Artificial Sequence
  Description of Artificial Sequence: Synthetic oligonucleotide
caccagcggguucuccccg

SEQ ID NO: 2823811 - RNA, 19 nt, Artificial Sequence
  Description of Artificial Sequence: Synthetic oligonucleotide
caggucagagagucgccca

SEQ ID NO: 2823812 - RNA, 19 nt, Artificial Sequence
  Description of Artificial Sequence: Synthetic oligonucleotide
gcagaacaagucccucuug

SEQ ID NO: 2823813 - RNA, 19 nt, Artificial Sequence
  Description of Artificial Sequence: Synthetic oligonucleotide
cacccaggucagagagucg

SEQ ID NO: 2823814 - RNA, 19 nt, Artificial Sequence
  Description of Artificial Sequence: Synthetic oligonucleotide
cugagggagcagccuguac

SEQ ID NO: 2823815 - RNA, 19 nt, Artificial Sequence
  Description of Artificial Sequence: Synthetic oligonucleotide
agaaugcacccgucuucau

SEQ ID NO: 2823816 - RNA, 19 nt, Artificial Sequence
  Description of Artificial Sequence: Synthetic oligonucleotide
agucccucuuguagucuag

SEQ ID NO: 2823817 - RNA, 19 nt, Artificial Sequence
  Description of Artificial Sequence: Synthetic oligonucleotide
ucgcccagcggccggcgac

SEQ ID NO: 2823818 - RNA, 19 nt, Artificial Sequence
  Description of Artificial Sequence: Synthetic oligonucleotide
cagcggccagcauaggaca

SEQ ID NO: 2823819 - RNA, 19 nt, Artificial Sequence
  Description of Artificial Sequence: Synthetic oligonucleotide
agacacagcgcaagaggau

SEQ ID NO: 2823820 - RNA, 19 nt, Artificial Sequence
  Description of Artificial Sequence: Synthetic oligonucleotide
cacauacgggagcacagcu

SEQ ID NO: 2823821 - RNA, 19 nt, Artificial Sequence
  Description of Artificial Sequence: Synthetic oligonucleotide
uggcuucgacacugaggca

SEQ ID NO: 2823822 - RNA, 19 nt, Artificial Sequence
  Description of Artificial Sequence: Synthetic oligonucleotide
ccaaggcugagggagcagc

SEQ ID NO: 2823823 - RNA, 19 nt, Artificial Sequence
  Description of Artificial Sequence: Synthetic oligonucleotide
ucuuguagucuagguucuu

SEQ ID NO: 2823824 - RNA, 19 nt, Artificial Sequence
  Description of Artificial Sequence: Synthetic oligonucleotide
acauacgggagcacagcuu

SEQ ID NO: 2823825 - RNA, 19 nt, Artificial Sequence
  Description of Artificial Sequence: Synthetic oligonucleotide
agcggccagcauaggacag

SEQ ID NO: 2823826 - RNA, 19 nt, Artificial Sequence
  Description of Artificial Sequence: Synthetic oligonucleotide
gucuuccggcacgauuugc

SEQ ID NO: 2823827 - RNA, 19 nt, Artificial Sequence
  Description of Artificial Sequence: Synthetic oligonucleotide
gcacccgucuucaucuuug

SEQ ID NO: 2823828 - RNA, 19 nt, Artificial Sequence
  Description of Artificial Sequence: Synthetic oligonucleotide
cagcgcaagaggaugcagu

SEQ ID NO: 2823829 - RNA, 19 nt, Artificial Sequence
  Description of Artificial Sequence: Synthetic oligonucleotide
gccagcauaggacagcuuu

SEQ ID NO: 2823830 - RNA, 19 nt, Artificial Sequence
  Description of Artificial Sequence: Synthetic oligonucleotide
ccaggucagagagucgccc

SEQ ID NO: 2823831 - RNA, 19 nt, Artificial Sequence
  Description of Artificial Sequence: Synthetic oligonucleotide
gagugcauuuguacacaua

SEQ ID NO: 2823832 - RNA, 19 nt, Artificial Sequence
  Description of Artificial Sequence: Synthetic oligonucleotide
uguuguccuccuggcuggu

SEQ ID NO: 2823833 - RNA, 19 nt, Artificial Sequence
  Description of Artificial Sequence: Synthetic oligonucleotide
ggucagagagucgcccagc

SEQ ID NO: 2823834 - RNA, 19 nt, Artificial Sequence
  Description of Artificial Sequence: Synthetic oligonucleotide
gggagugcauuuguacaca

SEQ ID NO: 2823835 - RNA, 19 nt, Artificial Sequence
  Description of Artificial Sequence: Synthetic oligonucleotide
cagcggguucuccccggcc

SEQ ID NO: 2823836 - RNA, 19 nt, Artificial Sequence
  Description of Artificial Sequence: Synthetic oligonucleotide
gguucuccccggccggggc

SEQ ID NO: 2823837 - RNA, 19 nt, Artificial Sequence
  Description of Artificial Sequence: Synthetic oligonucleotide
auacgggagcacagcuuca

SEQ ID NO: 2823838 - RNA, 19 nt, Artificial Sequence
  Description of Artificial Sequence: Synthetic oligonucleotide
cagcgcgcgcacaggaaca

SEQ ID NO: 2823839 - RNA, 19 nt, Artificial Sequence
  Description of Artificial Sequence: Synthetic oligonucleotide
ggaugcaguuguuguccuc

SEQ ID NO: 2823840 - RNA, 19 nt, Artificial Sequence
  Description of Artificial Sequence: Synthetic oligonucleotide
gcggguucuccccggccgg

SEQ ID NO: 2823841 - RNA, 19 nt, Artificial Sequence
  Description of Artificial Sequence: Synthetic oligonucleotide
cgaggagacacagcgcaag

SEQ ID NO: 2823842 - RNA, 19 nt, Artificial Sequence
  Description of Artificial Sequence: Synthetic oligonucleotide
agaggacccuaaaguguaa

SEQ ID NO: 2823843 - RNA, 19 nt, Artificial Sequence
  Description of Artificial Sequence: Synthetic oligonucleotide
ccgucuucaucuuugcacu

SEQ ID NO: 2823844 - RNA, 19 nt, Artificial Sequence
  Description of Artificial Sequence: Synthetic oligonucleotide
cacagcgcaagaggaugca

SEQ ID NO: 2823845 - RNA, 19 nt, Artificial Sequence
  Description of Artificial Sequence: Synthetic oligonucleotide
caagauugaaaagcuccuu

SEQ ID NO: 2823846 - RNA, 19 nt, Artificial Sequence
  Description of Artificial Sequence: Synthetic oligonucleotide
cccaggucagagagucgcc

SEQ ID NO: 2823847 - RNA, 19 nt, Artificial Sequence
  Description of Artificial Sequence: Synthetic oligonucleotide
ggacccuaaaguguaacuu

SEQ ID NO: 2823848 - RNA, 19 nt, Artificial Sequence
  Description of Artificial Sequence: Synthetic oligonucleotide
agucgcccagcggccggcg

SEQ ID NO: 2823849 - RNA, 19 nt, Artificial Sequence
  Description of Artificial Sequence: Synthetic oligonucleotide
gacagcgcgcgcacaggaa

SEQ ID NO: 2823850 - RNA, 19 nt, Artificial Sequence
  Description of Artificial Sequence: Synthetic oligonucleotide
gcgcaagaggaugcaguug

SEQ ID NO: 2823851 - RNA, 19 nt, Artificial Sequence
  Description of Artificial Sequence: Synthetic oligonucleotide
caccuucauuuccaaggcu

SEQ ID NO: 2823852 - RNA, 19 nt, Artificial Sequence
  Description of Artificial Sequence: Synthetic oligonucleotide
cgcaagaggaugcaguugu

SEQ ID NO: 2823853 - RNA, 19 nt, Artificial Sequence
  Description of Artificial Sequence: Synthetic oligonucleotide
ggagugcauuuguacacau

SEQ ID NO: 2823854 - RNA, 19 nt, Artificial Sequence
  Description of Artificial Sequence: Synthetic oligonucleotide
guuguccuccuggcugguc

SEQ ID NO: 2823855 - RNA, 19 nt, Artificial Sequence
  Description of Artificial Sequence: Synthetic oligonucleotide
cgcgcacaggaacaccagc

SEQ ID NO: 2823856 - RNA, 19 nt, Artificial Sequence
  Description of Artificial Sequence: Synthetic oligonucleotide
cuuccggcacgauuugcuu

SEQ ID NO: 2823857 - RNA, 19 nt, Artificial Sequence
  Description of Artificial Sequence: Synthetic oligonucleotide
gcggccagcauaggacagc

SEQ ID NO: 2823858 - RNA, 19 nt, Artificial Sequence
  Description of Artificial Sequence: Synthetic oligonucleotide
gcuucgacacugaggcaga

SEQ ID NO: 2823859 - RNA, 19 nt, Artificial Sequence
  Description of Artificial Sequence: Synthetic oligonucleotide
cagcggccggcgacagcgc

SEQ ID NO: 2823860 - RNA, 19 nt, Artificial Sequence
  Description of Artificial Sequence: Synthetic oligonucleotide
gcuuuucagaggacccuaa

SEQ ID NO: 2823861 - RNA, 19 nt, Artificial Sequence
  Description of Artificial Sequence: Synthetic oligonucleotide
ggguucuccccggccgggg

SEQ ID NO: 2823862 - RNA, 19 nt, Artificial Sequence
  Description of Artificial Sequence: Synthetic oligonucleotide
gcgacagcgcgcgcacagg

SEQ ID NO: 2823863 - RNA, 19 nt, Artificial Sequence
  Description of Artificial Sequence: Synthetic oligonucleotide
cuuuauccacagacacauu

SEQ ID NO: 2823864 - RNA, 19 nt, Artificial Sequence
  Description of Artificial Sequence: Synthetic oligonucleotide
cuucgacacugaggcagaa

SEQ ID NO: 2823865 - RNA, 19 nt, Artificial Sequence
  Description of Artificial Sequence: Synthetic oligonucleotide
cugcagcggccagcauagg

SEQ ID NO: 2823866 - RNA, 19 nt, Artificial Sequence
  Description of Artificial Sequence: Synthetic oligonucleotide
ccagcggguucuccccggc

SEQ ID NO: 2823867 - RNA, 19 nt, Artificial Sequence
  Description of Artificial Sequence: Synthetic oligonucleotide
gcagccuguacaggacaga

SEQ ID NO: 2823868 - RNA, 19 nt, Artificial Sequence
  Description of Artificial Sequence: Synthetic oligonucleotide
gcacuuggacagcuucugu

SEQ ID NO: 2823869 - RNA, 19 nt, Artificial Sequence
  Description of Artificial Sequence: Synthetic oligonucleotide
ccuucauuuccaaggcuuu

SEQ ID NO: 2823870 - RNA, 19 nt, Artificial Sequence
  Description of Artificial Sequence: Synthetic oligonucleotide
ccuguacaggacagagucu

SEQ ID NO: 2823871 - RNA, 19 nt, Artificial Sequence
  Description of Artificial Sequence: Synthetic oligonucleotide
gucgcccagcggccggcga

SEQ ID NO: 2823872 - RNA, 19 nt, Artificial Sequence
  Description of Artificial Sequence: Synthetic oligonucleotide
gccggggccgccuucugcu

SEQ ID NO: 2823873 - RNA, 19 nt, Artificial Sequence
  Description of Artificial Sequence: Synthetic oligonucleotide
cccacaccuucauuuccaa

SEQ ID NO: 2823874 - RNA, 19 nt, Artificial Sequence
  Description of Artificial Sequence: Synthetic oligonucleotide
cccucuuguagucuagguu

SEQ ID NO: 2823875 - RNA, 19 nt, Artificial Sequence
  Description of Artificial Sequence: Synthetic oligonucleotide
ggacaucuucuaucugcuu

SEQ ID NO: 2823876 - RNA, 19 nt, Artificial Sequence
  Description of Artificial Sequence: Synthetic oligonucleotide
gccggcgacagcgcgcgca

SEQ ID NO: 2823877 - RNA, 19 nt, Artificial Sequence
  Description of Artificial Sequence: Synthetic oligonucleotide
cgacagcgcgcgcacagga

SEQ ID NO: 2823878 - RNA, 19 nt, Artificial Sequence
  Description of Artificial Sequence: Synthetic oligonucleotide
ggcugagggagcagccugu

SEQ ID NO: 2823879 - RNA, 19 nt, Artificial Sequence
  Description of Artificial Sequence: Synthetic oligonucleotide
gcggccggcgacagcgcgc

SEQ ID NO: 2823880 - RNA, 19 nt, Artificial Sequence
  Description of Artificial Sequence: Synthetic oligonucleotide
gcgcgcgcacaggaacacc

SEQ ID NO: 2823881 - RNA, 19 nt, Artificial Sequence
  Description of Artificial Sequence: Synthetic oligonucleotide
cggccggcgacagcgcgcg

SEQ ID NO: 2823882 - RNA, 19 nt, Artificial Sequence
  Description of Artificial Sequence: Synthetic oligonucleotide
gcugagggagcagccugua

SEQ ID NO: 2823883 - RNA, 19 nt, Artificial Sequence
  Description of Artificial Sequence: Synthetic oligonucleotide
gcuggucacccaggucaga

SEQ ID NO: 2823884 - RNA, 19 nt, Artificial Sequence
  Description of Artificial Sequence: Synthetic oligonucleotide
cccagcggccggcgacagc

SEQ ID NO: 2823885 - RNA, 19 nt, Artificial Sequence
  Description of Artificial Sequence: Synthetic oligonucleotide
cggguucuccccggccggg

SEQ ID NO: 2823886 - RNA, 19 nt, Artificial Sequence
  Description of Artificial Sequence: Synthetic oligonucleotide
ccggggccgccuucugcuc

SEQ ID NO: 2823887 - RNA, 19 nt, Artificial Sequence
  Description of Artificial Sequence: Synthetic oligonucleotide
cggcacgauuugcuuuuca

SEQ ID NO: 2823888 - RNA, 19 nt, Artificial Sequence
  Description of Artificial Sequence: Synthetic oligonucleotide
gcaagaggaugcaguuguu

SEQ ID NO: 2823889 - RNA, 19 nt, Artificial Sequence
  Description of Artificial Sequence: Synthetic oligonucleotide
caccucccacaccuucauu

SEQ ID NO: 2823890 - RNA, 19 nt, Artificial Sequence
  Description of Artificial Sequence: Synthetic oligonucleotide
ccggcacgauuugcuuuuc

SEQ ID NO: 2823891 - RNA, 19 nt, Artificial Sequence
  Description of Artificial Sequence: Synthetic oligonucleotide
ggccggcgacagcgcgcgc

SEQ ID NO: 2823892 - RNA, 19 nt, Artificial Sequence
  Description of Artificial Sequence: Synthetic oligonucleotide
cccggccggggccgccuuc

SEQ ID NO: 2823893 - RNA, 19 nt, Artificial Sequence
  Description of Artificial Sequence: Synthetic oligonucleotide
ggccagcauaggacagcuu

SEQ ID NO: 2823894 - RNA, 19 nt, Artificial Sequence
  Description of Artificial Sequence: Synthetic oligonucleotide
ccggccggggccgccuucu

SEQ ID NO: 2823895 - RNA, 19 nt, Artificial Sequence
  Description of Artificial Sequence: Synthetic oligonucleotide
cggcgacagcgcgcgcaca

SEQ ID NO: 2823896 - RNA, 19 nt, Artificial Sequence
  Description of Artificial Sequence: Synthetic oligonucleotide
ccccggccggggccgccuu

SEQ ID NO: 2823897 - RNA, 19 nt, Artificial Sequence
  Description of Artificial Sequence: Synthetic oligonucleotide
  modified_base (1)..(1): a, c, u, g, unknown or other
ncacauacgggagcacagc

SEQ ID NO: 2823898 - RNA, 19 nt, Artificial Sequence
  Description of Artificial Sequence: Synthetic oligonucleotide
aaaggguucauauucgcgc

SEQ ID NO: 2823899 - RNA, 19 nt, Artificial Sequence
  Description of Artificial Sequence: Synthetic oligonucleotide
ugugagaacacacagauga

SEQ ID NO: 2823900 - RNA, 19 nt, Artificial Sequence
  Description of Artificial Sequence: Synthetic oligonucleotide
aguuaaaggguucauauuc

SEQ ID NO: 2823901 - RNA, 19 nt, Artificial Sequence
  Description of Artificial Sequence: Synthetic oligonucleotide
aagauuaauguugacaauc

SEQ ID NO: 2823902 - RNA, 19 nt, Artificial Sequence
  Description of Artificial Sequence: Synthetic oligonucleotide
auugucaacagccagaacu

SEQ ID NO: 2823903 - RNA, 19 nt, Artificial Sequence
  Description of Artificial Sequence: Synthetic oligonucleotide
uuaauguugacaaucuccc

SEQ ID NO: 2823904 - RNA, 19 nt, Artificial Sequence
  Description of Artificial Sequence: Synthetic oligonucleotide
auuaauguugacaaucucc

SEQ ID NO: 2823905 - RNA, 19 nt, Artificial Sequence
  Description of Artificial Sequence: Synthetic oligonucleotide
cuuaauuccauugaaauug

SEQ ID NO: 2823906 - RNA, 19 nt, Artificial Sequence
  Description of Artificial Sequence: Synthetic oligonucleotide
ugacacaugguccacacgg

SEQ ID NO: 2823907 - RNA, 19 nt, Artificial Sequence
  Description of Artificial Sequence: Synthetic oligonucleotide
aaucccuuggacuugcccg

SEQ ID NO: 2823908 - RNA, 19 nt, Artificial Sequence
  Description of Artificial Sequence: Synthetic oligonucleotide
ucucacaagauuaauguug

SEQ ID NO: 2823909 - RNA, 19 nt, Artificial Sequence
  Description of Artificial Sequence: Synthetic oligonucleotide
cuuccuuugaucuuaauuc

SEQ ID NO: 2823910 - RNA, 19 nt, Artificial Sequence
  Description of Artificial Sequence: Synthetic oligonucleotide
uuugaucuuaauuccauug

SEQ ID NO: 2823911 - RNA, 19 nt, Artificial Sequence
  Description of Artificial Sequence: Synthetic oligonucleotide
acaagauuaauguugacaa

SEQ ID NO: 2823912 - RNA, 19 nt, Artificial Sequence
  Description of Artificial Sequence: Synthetic oligonucleotide
ugucaguucauaaggaagc

SEQ ID NO: 2823913 - RNA, 19 nt, Artificial Sequence
  Description of Artificial Sequence: Synthetic oligonucleotide
aaggguucauauucgcgcc

SEQ ID NO: 2823914 - RNA, 19 nt, Artificial Sequence
  Description of Artificial Sequence: Synthetic oligonucleotide
uguuuuagcaccacagccc

SEQ ID NO: 2823915 - RNA, 19 nt, Artificial Sequence
  Description of Artificial Sequence: Synthetic oligonucleotide
ugaaauugucaacagccag

SEQ ID NO: 2823916 - RNA, 19 nt, Artificial Sequence
  Description of Artificial Sequence: Synthetic oligonucleotide
auggagguguuuuagcacc

SEQ ID NO: 2823917 - RNA, 19 nt, Artificial Sequence
  Description of Artificial Sequence: Synthetic oligonucleotide
uuuauggugggcuugacau

SEQ ID NO: 2823918 - RNA, 19 nt, Artificial Sequence
  Description of Artificial Sequence: Synthetic oligonucleotide
uuaguuaaaggguucauau

SEQ ID NO: 2823919 - RNA, 19 nt, Artificial Sequence
  Description of Artificial Sequence: Synthetic oligonucleotide
ucucucacaagauuaaugu

SEQ ID NO: 2823920 - RNA, 19 nt, Artificial Sequence
  Description of Artificial Sequence: Synthetic oligonucleotide
cuucaccuuaguuaaaggg

SEQ ID NO: 2823921 - RNA, 19 nt, Artificial Sequence
  Description of Artificial Sequence: Synthetic oligonucleotide
auugugagaacacacagau

SEQ ID NO: 2823922 - RNA, 19 nt, Artificial Sequence
  Description of Artificial Sequence: Synthetic oligonucleotide
uaaaggguucauauucgcg

SEQ ID NO: 2823923 - RNA, 19 nt, Artificial Sequence
  Description of Artificial Sequence: Synthetic oligonucleotide
uucaccuuaguuaaagggu

SEQ ID NO: 2823924 - RNA, 19 nt, Artificial Sequence
  Description of Artificial Sequence: Synthetic oligonucleotide
aaacagaaucccuuggacu

SEQ ID NO: 2823925 - RNA, 19 nt, Artificial Sequence
  Description of Artificial Sequence: Synthetic oligonucleotide
ucguugaucagcuucaccu

SEQ ID NO: 2823926 - RNA, 19 nt, Artificial Sequence
  Description of Artificial Sequence: Synthetic oligonucleotide
agcaccacagcccuucucc

SEQ ID NO: 2823927 - RNA, 19 nt, Artificial Sequence
  Description of Artificial Sequence: Synthetic oligonucleotide
uccaagaaagauccaggcg

SEQ ID NO: 2823928 - RNA, 19 nt, Artificial Sequence
  Description of Artificial Sequence: Synthetic oligonucleotide
aaucuccccauauugugag

SEQ ID NO: 2823929 - RNA, 19 nt, Artificial Sequence
  Description of Artificial Sequence: Synthetic oligonucleotide
acagccagaacugugcucc

SEQ ID NO: 2823930 - RNA, 19 nt, Artificial Sequence
  Description of Artificial Sequence: Synthetic oligonucleotide
ugacaaucuccccauauug

SEQ ID NO: 2823931 - RNA, 19 nt, Artificial Sequence
  Description of Artificial Sequence: Synthetic oligonucleotide
ucauauucgcgccuucgcg

SEQ ID NO: 2823932 - RNA, 19 nt, Artificial Sequence
  Description of Artificial Sequence: Synthetic oligonucleotide
aauuccauugaaauuguca

SEQ ID NO: 2823933 - RNA, 19 nt, Artificial Sequence
  Description of Artificial Sequence: Synthetic oligonucleotide
uguccuuguauuccgagug

SEQ ID NO: 2823934 - RNA, 19 nt, Artificial Sequence
  Description of Artificial Sequence: Synthetic oligonucleotide
aucuuaauuccauugaaau

SEQ ID NO: 2823935 - RNA, 19 nt, Artificial Sequence
  Description of Artificial Sequence: Synthetic oligonucleotide
aacagaaucccuuggacuu

SEQ ID NO: 2823936 - RNA, 19 nt, Artificial Sequence
  Description of Artificial Sequence: Synthetic oligonucleotide
uccauugaaauugucaaca

SEQ ID NO: 2823937 - RNA, 19 nt, Artificial Sequence
  Description of Artificial Sequence: Synthetic oligonucleotide
uagcacaggaaacagaauc

SEQ ID NO: 2823938 - RNA, 19 nt, Artificial Sequence
  Description of Artificial Sequence: Synthetic oligonucleotide
ucauucaguucguugauca

SEQ ID NO: 2823939 - RNA, 19 nt, Artificial Sequence
  Description of Artificial Sequence: Synthetic oligonucleotide
uugaucuuaauuccauuga

SEQ ID NO: 2823940 - RNA, 19 nt, Artificial Sequence
  Description of Artificial Sequence: Synthetic oligonucleotide
ugaucuucguagcacagga

SEQ ID NO: 2823941 - RNA, 19 nt, Artificial Sequence
  Description of Artificial Sequence: Synthetic oligonucleotide
auucaguucguugaucagc

SEQ ID NO: 2823942 - RNA, 19 nt, Artificial Sequence
  Description of Artificial Sequence: Synthetic oligonucleotide
ucagcuucaccuuaguuaa

SEQ ID NO: 2823943 - RNA, 19 nt, Artificial Sequence
  Description of Artificial Sequence: Synthetic oligonucleotide
auuccgagugccaagacac

SEQ ID NO: 2823944 - RNA, 19 nt, Artificial Sequence
  Description of Artificial Sequence: Synthetic oligonucleotide
ugucuucugauuccugagg

SEQ ID NO: 2823945 - RNA, 19 nt, Artificial Sequence
  Description of Artificial Sequence: Synthetic oligonucleotide
agugccaagacaccuuuuc

SEQ ID NO: 2823946 - RNA, 19 nt, Artificial Sequence
  Description of Artificial Sequence: Synthetic oligonucleotide
ccucaguagaacuugaugg

SEQ ID NO: 2823947 - RNA, 19 nt, Artificial Sequence
  Description of Artificial Sequence: Synthetic oligonucleotide
uugucaacagccagaacug

SEQ ID NO: 2823948 - RNA, 19 nt, Artificial Sequence
  Description of Artificial Sequence: Synthetic oligonucleotide
uuaaaggguucauauucgc

SEQ ID NO: 2823949 - RNA, 19 nt, Artificial Sequence
  Description of Artificial Sequence: Synthetic oligonucleotide
agcccuccaagaaagaucc

SEQ ID NO: 2823950 - RNA, 19 nt, Artificial Sequence
  Description of Artificial Sequence: Synthetic oligonucleotide
uauugugagaacacacaga

SEQ ID NO: 2823951 - RNA, 19 nt, Artificial Sequence
  Description of Artificial Sequence: Synthetic oligonucleotide
gauaguucuuccuuugauc

SEQ ID NO: 2823952 - RNA, 19 nt, Artificial Sequence
  Description of Artificial Sequence: Synthetic oligonucleotide
cucucgcucauucaguucg

SEQ ID NO: 2823953 - RNA, 19 nt, Artificial Sequence
  Description of Artificial Sequence: Synthetic oligonucleotide
ugauggagguguuuuagca

SEQ ID NO: 2823954 - RNA, 19 nt, Artificial Sequence
  Description of Artificial Sequence: Synthetic oligonucleotide
uugaaauugucaacagcca

SEQ ID NO: 2823955 - RNA, 19 nt, Artificial Sequence
  Description of Artificial Sequence: Synthetic oligonucleotide
agcacaggaaacagaaucc

SEQ ID NO: 2823956 - RNA, 19 nt, Artificial Sequence
  Description of Artificial Sequence: Synthetic oligonucleotide
gaaacagaaucccuuggac

SEQ ID NO: 2823957 - RNA, 19 nt, Artificial Sequence
  Description of Artificial Sequence: Synthetic oligonucleotide
uucaguucguugaucagcu

SEQ ID NO: 2823958 - RNA, 19 nt, Artificial Sequence
  Description of Artificial Sequence: Synthetic oligonucleotide
guguuuuagcaccacagcc

SEQ ID NO: 2823959 - RNA, 19 nt, Artificial Sequence
  Description of Artificial Sequence: Synthetic oligonucleotide
ugaucuuaauuccauugaa

SEQ ID NO: 2823960 - RNA, 19 nt, Artificial Sequence
  Description of Artificial Sequence: Synthetic oligonucleotide
guuaaaggguucauauucg

SEQ ID NO: 2823961 - RNA, 19 nt, Artificial Sequence
  Description of Artificial Sequence: Synthetic oligonucleotide
uuuugugcuuuaugguggg

SEQ ID NO: 2823962 - RNA, 19 nt, Artificial Sequence
  Description of Artificial Sequence: Synthetic oligonucleotide
ucuuccuuugaucuuaauu

SEQ ID NO: 2823963 - RNA, 19 nt, Artificial Sequence
  Description of Artificial Sequence: Synthetic oligonucleotide
aguagaacuugauggaggu

SEQ ID NO: 2823964 - RNA, 19 nt, Artificial Sequence
  Description of Artificial Sequence: Synthetic oligonucleotide
gguaguuugacacaugguc

SEQ ID NO: 2823965 - RNA, 19 nt, Artificial Sequence
  Description of Artificial Sequence: Synthetic oligonucleotide
uuaauuccauugaaauugu

SEQ ID NO: 2823966 - RNA, 19 nt, Artificial Sequence
  Description of Artificial Sequence: Synthetic oligonucleotide
ccaagaaagauccaggcgc

SEQ ID NO: 2823967 - RNA, 19 nt, Artificial Sequence
  Description of Artificial Sequence: Synthetic oligonucleotide
cugucaguucauaaggaag

SEQ ID NO: 2823968 - RNA, 19 nt, Artificial Sequence
  Description of Artificial Sequence: Synthetic oligonucleotide
acaaucuccccauauugug

SEQ ID NO: 2823969 - RNA, 19 nt, Artificial Sequence
  Description of Artificial Sequence: Synthetic oligonucleotide
auaaggaagcccuccaaga

SEQ ID NO: 2823970 - RNA, 19 nt, Artificial Sequence
  Description of Artificial Sequence: Synthetic oligonucleotide
caguagaacuugauggagg

SEQ ID NO: 2823971 - RNA, 19 nt, Artificial Sequence
  Description of Artificial Sequence: Synthetic oligonucleotide
uaguuugacacauggucca

SEQ ID NO: 2823972 - RNA, 19 nt, Artificial Sequence
  Description of Artificial Sequence: Synthetic oligonucleotide
uauuccgagugccaagaca

SEQ ID NO: 2823973 - RNA, 19 nt, Artificial Sequence
  Description of Artificial Sequence: Synthetic oligonucleotide
guaguuugacacauggucc

SEQ ID NO: 2823974 - RNA, 19 nt, Artificial Sequence
  Description of Artificial Sequence: Synthetic oligonucleotide
uuuuccgccaccccgaguu

SEQ ID NO: 2823975 - RNA, 19 nt, Artificial Sequence
  Description of Artificial Sequence: Synthetic oligonucleotide
ucuuaauuccauugaaauu

SEQ ID NO: 2823976 - RNA, 19 nt, Artificial Sequence
  Description of Artificial Sequence: Synthetic oligonucleotide
uucauauucgcgccuucgc

SEQ ID NO: 2823977 - RNA, 19 nt, Artificial Sequence
  Description of Artificial Sequence: Synthetic oligonucleotide
aauugucaacagccagaac

SEQ ID NO: 2823978 - RNA, 19 nt, Artificial Sequence
  Description of Artificial Sequence: Synthetic oligonucleotide
aaauugucaacagccagaa

SEQ ID NO: 2823979 - RNA, 19 nt, Artificial Sequence
  Description of Artificial Sequence: Synthetic oligonucleotide
cauaaggaagcccuccaag

SEQ ID NO: 2823980 - RNA, 19 nt, Artificial Sequence
  Description of Artificial Sequence: Synthetic oligonucleotide
ucaguagaacuugauggag

SEQ ID NO: 2823981 - RNA, 19 nt, Artificial Sequence
  Description of Artificial Sequence: Synthetic oligonucleotide
ucuucguagcacaggaaac

SEQ ID NO: 2823982 - RNA, 19 nt, Artificial Sequence
  Description of Artificial Sequence: Synthetic oligonucleotide
aggaaacagaaucccuugg

SEQ ID NO: 2823983 - RNA, 19 nt, Artificial Sequence
  Description of Artificial Sequence: Synthetic oligonucleotide
ugagaacacacagaugaug

SEQ ID NO: 2823984 - RNA, 19 nt, Artificial Sequence
  Description of Artificial Sequence: Synthetic oligonucleotide
cauauucgcgccuucgcgc

SEQ ID NO: 2823985 - RNA, 19 nt, Artificial Sequence
  Description of Artificial Sequence: Synthetic oligonucleotide
uucauaaggaagcccucca

SEQ ID NO: 2823986 - RNA, 19 nt, Artificial Sequence
  Description of Artificial Sequence: Synthetic oligonucleotide
uuccugaggagcccgguag

SEQ ID NO: 2823987 - RNA, 19 nt, Artificial Sequence
  Description of Artificial Sequence: Synthetic oligonucleotide
uugaucagcuucaccuuag

SEQ ID NO: 2823988 - RNA, 19 nt, Artificial Sequence
  Description of Artificial Sequence: Synthetic oligonucleotide
uucuccuggagcucucugg

SEQ ID NO: 2823989 - RNA, 19 nt, Artificial Sequence
  Description of Artificial Sequence: Synthetic oligonucleotide
ucugaucuucguagcacag

SEQ ID NO: 2823990 - RNA, 19 nt, Artificial Sequence
  Description of Artificial Sequence: Synthetic oligonucleotide
uuugacacaugguccacac

SEQ ID NO: 2823991 - RNA, 19 nt, Artificial Sequence
  Description of Artificial Sequence: Synthetic oligonucleotide
uaaggaagcccuccaagaa

SEQ ID NO: 2823992 - RNA, 19 nt, Artificial Sequence
  Description of Artificial Sequence: Synthetic oligonucleotide
cuucuugucucucacaaga

SEQ ID NO: 2823993 - RNA, 19 nt, Artificial Sequence
  Description of Artificial Sequence: Synthetic oligonucleotide
agaacacacagaugauguc

SEQ ID NO: 2823994 - RNA, 19 nt, Artificial Sequence
  Description of Artificial Sequence: Synthetic oligonucleotide
uccuuugaucuuaauucca

SEQ ID NO: 2823995 - RNA, 19 nt, Artificial Sequence
  Description of Artificial Sequence: Synthetic oligonucleotide
uucugucaguucauaagga

SEQ ID NO: 2823996 - RNA, 19 nt, Artificial Sequence
  Description of Artificial Sequence: Synthetic oligonucleotide
uauggugggcuugacaucu

SEQ ID NO: 2823997 - RNA, 19 nt, Artificial Sequence
  Description of Artificial Sequence: Synthetic oligonucleotide
ucaccuuaguuaaaggguu

SEQ ID NO: 2823998 - RNA, 19 nt, Artificial Sequence
  Description of Artificial Sequence: Synthetic oligonucleotide
gauggagguguuuuagcac

SEQ ID NO: 2823999 - RNA, 19 nt, Artificial Sequence
  Description of Artificial Sequence: Synthetic oligonucleotide
ucugucaguucauaaggaa

SEQ ID NO: 2824000 - RNA, 19 nt, Artificial Sequence
  Description of Artificial Sequence: Synthetic oligonucleotide
cauauugugagaacacaca

SEQ ID NO: 2824001 - RNA, 19 nt, Artificial Sequence
  Description of Artificial Sequence: Synthetic oligonucleotide
aagacaccuuuuccgccac

SEQ ID NO: 2824002 - RNA, 19 nt, Artificial Sequence
  Description of Artificial Sequence: Synthetic oligonucleotide
aucuucguagcacaggaaa

SEQ ID NO: 2824003 - RNA, 19 nt, Artificial Sequence
  Description of Artificial Sequence: Synthetic oligonucleotide
gaaauugucaacagccaga

SEQ ID NO: 2824004 - RNA, 19 nt, Artificial Sequence
  Description of Artificial Sequence: Synthetic oligonucleotide
acagcccuucuccuggagc

SEQ ID NO: 2824005 - RNA, 19 nt, Artificial Sequence
  Description of Artificial Sequence: Synthetic oligonucleotide
uugauggagguguuuuagc

SEQ ID NO: 2824006 - RNA, 19 nt, Artificial Sequence
  Description of Artificial Sequence: Synthetic oligonucleotide
ugaggagcccgguaguuug

SEQ ID NO: 2824007 - RNA, 19 nt, Artificial Sequence
  Description of Artificial Sequence: Synthetic oligonucleotide
accucaguagaacuugaug

SEQ ID NO: 2824008 - RNA, 19 nt, Artificial Sequence
  Description of Artificial Sequence: Synthetic oligonucleotide
acuucauccaugucuucug

SEQ ID NO: 2824009 - RNA, 19 nt, Artificial Sequence
  Description of Artificial Sequence: Synthetic oligonucleotide
accacagcccuucuccugg

SEQ ID NO: 2824010 - RNA, 19 nt, Artificial Sequence
  Description of Artificial Sequence: Synthetic oligonucleotide
uaauguugacaaucucccc

SEQ ID NO: 2824011 - RNA, 19 nt, Artificial Sequence
  Description of Artificial Sequence: Synthetic oligonucleotide
cucacaagauuaauguuga

SEQ ID NO: 2824012 - RNA, 19 nt, Artificial Sequence
  Description of Artificial Sequence: Synthetic oligonucleotide
ugugcuccucugaucuucg

SEQ ID NO: 2824013 - RNA, 19 nt, Artificial Sequence
  Description of Artificial Sequence: Synthetic oligonucleotide
uguauuccgagugccaaga

SEQ ID NO: 2824014 - RNA, 19 nt, Artificial Sequence
  Description of Artificial Sequence: Synthetic oligonucleotide
agauuaauguugacaaucu

SEQ ID NO: 2824015 - RNA, 19 nt, Artificial Sequence
  Description of Artificial Sequence: Synthetic oligonucleotide
cauccaugucuucugauuc

SEQ ID NO: 2824016 - RNA, 19 nt, Artificial Sequence
  Description of Artificial Sequence: Synthetic oligonucleotide
augucuucugauuccugag

SEQ ID NO: 2824017 - RNA, 19 nt, Artificial Sequence
  Description of Artificial Sequence: Synthetic oligonucleotide
cuugauggagguguuuuag

SEQ ID NO: 2824018 - RNA, 19 nt, Artificial Sequence
  Description of Artificial Sequence: Synthetic oligonucleotide
gagcccgguaguuugacac

SEQ ID NO: 2824019 - RNA, 19 nt, Artificial Sequence
  Description of Artificial Sequence: Synthetic oligonucleotide
uucguagcacaggaaacag

SEQ ID NO: 2824020 - RNA, 19 nt, Artificial Sequence
  Description of Artificial Sequence: Synthetic oligonucleotide
cuugucucucacaagauua

SEQ ID NO: 2824021 - RNA, 19 nt, Artificial Sequence
  Description of Artificial Sequence: Synthetic oligonucleotide
ucuucuugucucucacaag

SEQ ID NO: 2824022 - RNA, 19 nt, Artificial Sequence
  Description of Artificial Sequence: Synthetic oligonucleotide
uuguauuccgagugccaag

SEQ ID NO: 2824023 - RNA, 19 nt, Artificial Sequence
  Description of Artificial Sequence: Synthetic oligonucleotide
agaacugugcuccucugau

SEQ ID NO: 2824024 - RNA, 19 nt, Artificial Sequence
  Description of Artificial Sequence: Synthetic oligonucleotide
acagaugaugucuccuucu

SEQ ID NO: 2824025 - RNA, 19 nt, Artificial Sequence
  Description of Artificial Sequence: Synthetic oligonucleotide
ucaguucauaaggaagccc

SEQ ID NO: 2824026 - RNA, 19 nt, Artificial Sequence
  Description of Artificial Sequence: Synthetic oligonucleotide
uuuagcaccacagcccuuc

SEQ ID NO: 2824027 - RNA, 19 nt, Artificial Sequence
  Description of Artificial Sequence: Synthetic oligonucleotide
uugacacaugguccacacg

SEQ ID NO: 2824028 - RNA, 19 nt, Artificial Sequence
  Description of Artificial Sequence: Synthetic oligonucleotide
gacaccucaguagaacuug

SEQ ID NO: 2824029 - RNA, 19 nt, Artificial Sequence
  Description of Artificial Sequence: Synthetic oligonucleotide
agcuucaccuuaguuaaag

SEQ ID NO: 2824030 - RNA, 19 nt, Artificial Sequence
  Description of Artificial Sequence: Synthetic oligonucleotide
agguguuuuagcaccacag

SEQ ID NO: 2824031 - RNA, 19 nt, Artificial Sequence
  Description of Artificial Sequence: Synthetic oligonucleotide
ucuggucacuucauccaug

SEQ ID NO: 2824032 - RNA, 19 nt, Artificial Sequence
  Description of Artificial Sequence: Synthetic oligonucleotide
gagccucucgcucauucag

SEQ ID NO: 2824033 - RNA, 19 nt, Artificial Sequence
  Description of Artificial Sequence: Synthetic oligonucleotide
cacaagauuaauguugaca

SEQ ID NO: 2824034 - RNA, 19 nt, Artificial Sequence
  Description of Artificial Sequence: Synthetic oligonucleotide
uucguugaucagcuucacc

SEQ ID NO: 2824035 - RNA, 19 nt, Artificial Sequence
  Description of Artificial Sequence: Synthetic oligonucleotide
caggaaacagaaucccuug

SEQ ID NO: 2824036 - RNA, 19 nt, Artificial Sequence
  Description of Artificial Sequence: Synthetic oligonucleotide
gaaucccuuggacuugccc

SEQ ID NO: 2824037 - RNA, 19 nt, Artificial Sequence
  Description of Artificial Sequence: Synthetic oligonucleotide
aagauccaggcgcuguccu

SEQ ID NO: 2824038 - RNA, 19 nt, Artificial Sequence
  Description of Artificial Sequence: Synthetic oligonucleotide
uccccauauugugagaaca

SEQ ID NO: 2824039 - RNA, 19 nt, Artificial Sequence
  Description of Artificial Sequence: Synthetic oligonucleotide
ucauaaggaagcccuccaa

SEQ ID NO: 2824040 - RNA, 19 nt, Artificial Sequence
  Description of Artificial Sequence: Synthetic oligonucleotide
aacuugauggagguguuuu

SEQ ID NO: 2824041 - RNA, 19 nt, Artificial Sequence
  Description of Artificial Sequence: Synthetic oligonucleotide
uugucucucacaagauuaa

SEQ ID NO: 2824042 - RNA, 19 nt, Artificial Sequence
  Description of Artificial Sequence: Synthetic oligonucleotide
gucuccuucugucaguuca

SEQ ID NO: 2824043 - RNA, 19 nt, Artificial Sequence
  Description of Artificial Sequence: Synthetic oligonucleotide
ucuugucucucacaagauu

SEQ ID NO: 2824044 - RNA, 19 nt, Artificial Sequence
  Description of Artificial Sequence: Synthetic oligonucleotide
ucagacaccucaguagaac

SEQ ID NO: 2824045 - RNA, 19 nt, Artificial Sequence
  Description of Artificial Sequence: Synthetic oligonucleotide
cucaguagaacuugaugga

SEQ ID NO: 2824046 - RNA, 19 nt, Artificial Sequence
  Description of Artificial Sequence: Synthetic oligonucleotide
caccuuuuccgccaccccg

SEQ ID NO: 2824047 - RNA, 19 nt, Artificial Sequence
  Description of Artificial Sequence: Synthetic oligonucleotide
aggaagcccuccaagaaag

SEQ ID NO: 2824048 - RNA, 19 nt, Artificial Sequence
  Description of Artificial Sequence: Synthetic oligonucleotide
guucauauucgcgccuucg

SEQ ID NO: 2824049 - RNA, 19 nt, Artificial Sequence
  Description of Artificial Sequence: Synthetic oligonucleotide
acaccuuuuccgccacccc

SEQ ID NO: 2824050 - RNA, 19 nt, Artificial Sequence
  Description of Artificial Sequence: Synthetic oligonucleotide
caguucguugaucagcuuc

SEQ ID NO: 2824051 - RNA, 19 nt, Artificial Sequence
  Description of Artificial Sequence: Synthetic oligonucleotide
uugugcuuuauggugggcu

SEQ ID NO: 2824052 - RNA, 19 nt, Artificial Sequence
  Description of Artificial Sequence: Synthetic oligonucleotide
ucauccaugucuucugauu

SEQ ID NO: 2824053 - RNA, 19 nt, Artificial Sequence
  Description of Artificial Sequence: Synthetic oligonucleotide
ugauuccugaggagcccgg

SEQ ID NO: 2824054 - RNA, 19 nt, Artificial Sequence
  Description of Artificial Sequence: Synthetic oligonucleotide
uccucugaucuucguagca

SEQ ID NO: 2824055 - RNA, 19 nt, Artificial Sequence
  Description of Artificial Sequence: Synthetic oligonucleotide
uugugagaacacacagaug

SEQ ID NO: 2824056 - RNA, 19 nt, Artificial Sequence
  Description of Artificial Sequence: Synthetic oligonucleotide
gaucuuaauuccauugaaa

SEQ ID NO: 2824057 - RNA, 19 nt, Artificial Sequence
  Description of Artificial Sequence: Synthetic oligonucleotide
uccuuguauuccgagugcc

SEQ ID NO: 2824058 - RNA, 19 nt, Artificial Sequence
  Description of Artificial Sequence: Synthetic oligonucleotide
gucucucacaagauuaaug

SEQ ID NO: 2824059 - RNA, 19 nt, Artificial Sequence
  Description of Artificial Sequence: Synthetic oligonucleotide
guucauaaggaagcccucc

SEQ ID NO: 2824060 - RNA, 19 nt, Artificial Sequence
  Description of Artificial Sequence: Synthetic oligonucleotide
acggauaguucuuccuuug

SEQ ID NO: 2824061 - RNA, 19 nt, Artificial Sequence
  Description of Artificial Sequence: Synthetic oligonucleotide
gucuucugauuccugagga

SEQ ID NO: 2824062 - RNA, 19 nt, Artificial Sequence
  Description of Artificial Sequence: Synthetic oligonucleotide
gcuccucugaucuucguag

SEQ ID NO: 2824063 - RNA, 19 nt, Artificial Sequence
  Description of Artificial Sequence: Synthetic oligonucleotide
gagaacacacagaugaugu

SEQ ID NO: 2824064 - RNA, 19 nt, Artificial Sequence
  Description of Artificial Sequence: Synthetic oligonucleotide
gaaagauccaggcgcuguc

SEQ ID NO: 2824065 - RNA, 19 nt, Artificial Sequence
  Description of Artificial Sequence: Synthetic oligonucleotide
cauucaguucguugaucag

SEQ ID NO: 2824066 - RNA, 19 nt, Artificial Sequence
  Description of Artificial Sequence: Synthetic oligonucleotide
ucgcucauucaguucguug

SEQ ID NO: 2824067 - RNA, 19 nt, Artificial Sequence
  Description of Artificial Sequence: Synthetic oligonucleotide
uugagccucucgcucauuc

SEQ ID NO: 2824068 - RNA, 19 nt, Artificial Sequence
  Description of Artificial Sequence: Synthetic oligonucleotide
auguugacaaucuccccau

SEQ ID NO: 2824069 - RNA, 19 nt, Artificial Sequence
  Description of Artificial Sequence: Synthetic oligonucleotide
ccauauugugagaacacac

SEQ ID NO: 2824070 - RNA, 19 nt, Artificial Sequence
  Description of Artificial Sequence: Synthetic oligonucleotide
aucuucagacaccucagua

SEQ ID NO: 2824071 - RNA, 19 nt, Artificial Sequence
  Description of Artificial Sequence: Synthetic oligonucleotide
uaguuaaaggguucauauu

SEQ ID NO: 2824072 - RNA, 19 nt, Artificial Sequence
  Description of Artificial Sequence: Synthetic oligonucleotide
gacaccuuuuccgccaccc

SEQ ID NO: 2824073 - RNA, 19 nt, Artificial Sequence
  Description of Artificial Sequence: Synthetic oligonucleotide
uaauuccauugaaauuguc

SEQ ID NO: 2824074 - RNA, 19 nt, Artificial Sequence
  Description of Artificial Sequence: Synthetic oligonucleotide
ucguagcacaggaaacaga

SEQ ID NO: 2824075 - RNA, 19 nt, Artificial Sequence
  Description of Artificial Sequence: Synthetic oligonucleotide
gucuucuugucucucacaa

SEQ ID NO: 2824076 - RNA, 19 nt, Artificial Sequence
  Description of Artificial Sequence: Synthetic oligonucleotide
aguucguugaucagcuuca

SEQ ID NO: 2824077 - RNA, 19 nt, Artificial Sequence
  Description of Artificial Sequence: Synthetic oligonucleotide
ucuccccauauugugagaa

SEQ ID NO: 2824078 - RNA, 19 nt, Artificial Sequence
  Description of Artificial Sequence: Synthetic oligonucleotide
gaacacacagaugaugucu

SEQ ID NO: 2824079 - RNA, 19 nt, Artificial Sequence
  Description of Artificial Sequence: Synthetic oligonucleotide
uucuugucucucacaagau

SEQ ID NO: 2824080 - RNA, 19 nt, Artificial Sequence
  Description of Artificial Sequence: Synthetic oligonucleotide
aguuugacacaugguccac

SEQ ID NO: 2824081 - RNA, 19 nt, Artificial Sequence
  Description of Artificial Sequence: Synthetic oligonucleotide
ugugcuuuauggugggcuu

SEQ ID NO: 2824082 - RNA, 19 nt, Artificial Sequence
  Description of Artificial Sequence: Synthetic oligonucleotide
ucugauuccugaggagccc

SEQ ID NO: 2824083 - RNA, 19 nt, Artificial Sequence
  Description of Artificial Sequence: Synthetic oligonucleotide
cagaugaugucuccuucug

SEQ ID NO: 2824084 - RNA, 19 nt, Artificial Sequence
  Description of Artificial Sequence: Synthetic oligonucleotide
gugccaagacaccuuuucc

SEQ ID NO: 2824085 - RNA, 19 nt, Artificial Sequence
  Description of Artificial Sequence: Synthetic oligonucleotide
uggagguguuuuagcacca

SEQ ID NO: 2824086 - RNA, 19 nt, Artificial Sequence
  Description of Artificial Sequence: Synthetic oligonucleotide
uccuucugucaguucauaa

SEQ ID NO: 2824087 - RNA, 19 nt, Artificial Sequence
  Description of Artificial Sequence: Synthetic oligonucleotide
ugggcuugacaucuucauc

SEQ ID NO: 2824088 - RNA, 19 nt, Artificial Sequence
  Description of Artificial Sequence: Synthetic oligonucleotide
gucaguucauaaggaagcc

SEQ ID NO: 2824089 - RNA, 19 nt, Artificial Sequence
  Description of Artificial Sequence: Synthetic oligonucleotide
aguucauaaggaagcccuc

SEQ ID NO: 2824090 - RNA, 19 nt, Artificial Sequence
  Description of Artificial Sequence: Synthetic oligonucleotide
cugaucuucguagcacagg

SEQ ID NO: 2824091 - RNA, 19 nt, Artificial Sequence
  Description of Artificial Sequence: Synthetic oligonucleotide
ccuccaagaaagauccagg

SEQ ID NO: 2824092 - RNA, 19 nt, Artificial Sequence
  Description of Artificial Sequence: Synthetic oligonucleotide
aguucuuccuuugaucuua

SEQ ID NO: 2824093 - RNA, 19 nt, Artificial Sequence
  Description of Artificial Sequence: Synthetic oligonucleotide
uucagacaccucaguagaa

SEQ ID NO: 2824094 - RNA, 19 nt, Artificial Sequence
  Description of Artificial Sequence: Synthetic oligonucleotide
gauccaggcgcuguccuug

SEQ ID NO: 2824095 - RNA, 19 nt, Artificial Sequence
  Description of Artificial Sequence: Synthetic oligonucleotide
caguucauaaggaagcccu

SEQ ID NO: 2824096 - RNA, 19 nt, Artificial Sequence
  Description of Artificial Sequence: Synthetic oligonucleotide
gaguugagccucucgcuca

SEQ ID NO: 2824097 - RNA, 19 nt, Artificial Sequence
  Description of Artificial Sequence: Synthetic oligonucleotide
ugguccacacggauaguuc

SEQ ID NO: 2824098 - RNA, 19 nt, Artificial Sequence
  Description of Artificial Sequence: Synthetic oligonucleotide
guuuuagcaccacagcccu

SEQ ID NO: 2824099 - RNA, 19 nt, Artificial Sequence
  Description of Artificial Sequence: Synthetic oligonucleotide
ggaaacagaaucccuugga

SEQ ID NO: 2824100 - RNA, 19 nt, Artificial Sequence
  Description of Artificial Sequence: Synthetic oligonucleotide
acacggauaguucuuccuu

SEQ ID NO: 2824101 - RNA, 19 nt, Artificial Sequence
  Description of Artificial Sequence: Synthetic oligonucleotide
uugcccgucuucuugucuc

SEQ ID NO: 2824102 - RNA, 19 nt, Artificial Sequence
  Description of Artificial Sequence: Synthetic oligonucleotide
caagacaccuuuuccgcca

SEQ ID NO: 2824103 - RNA, 19 nt, Artificial Sequence
  Description of Artificial Sequence: Synthetic oligonucleotide
uccaugucuucugauuccu

SEQ ID NO: 2824104 - RNA, 19 nt, Artificial Sequence
  Description of Artificial Sequence: Synthetic oligonucleotide
ccgguaguuugacacaugg

SEQ ID NO: 2824105 - RNA, 19 nt, Artificial Sequence
  Description of Artificial Sequence: Synthetic oligonucleotide
gcuucaccuuaguuaaagg

SEQ ID NO: 2824106 - RNA, 19 nt, Artificial Sequence
  Description of Artificial Sequence: Synthetic oligonucleotide
caaucuccccauauuguga

SEQ ID NO: 2824107 - RNA, 19 nt, Artificial Sequence
  Description of Artificial Sequence: Synthetic oligonucleotide
uccgagugccaagacaccu

SEQ ID NO: 2824108 - RNA, 19 nt, Artificial Sequence
  Description of Artificial Sequence: Synthetic oligonucleotide
cugauuccugaggagcccg

SEQ ID NO: 2824109 - RNA, 19 nt, Artificial Sequence
  Description of Artificial Sequence: Synthetic oligonucleotide
aagaaagauccaggcgcug

SEQ ID NO: 2824110 - RNA, 19 nt, Artificial Sequence
  Description of Artificial Sequence: Synthetic oligonucleotide
ugagccucucgcucauuca

SEQ ID NO: 2824111 - RNA, 19 nt, Artificial Sequence
  Description of Artificial Sequence: Synthetic oligonucleotide
gccaagacaccuuuuccgc

SEQ ID NO: 2824112 - RNA, 19 nt, Artificial Sequence
  Description of Artificial Sequence: Synthetic oligonucleotide
ucacaagauuaauguugac

SEQ ID NO: 2824113 - RNA, 19 nt, Artificial Sequence
  Description of Artificial Sequence: Synthetic oligonucleotide
ugcuuuauggugggcuuga

SEQ ID NO: 2824114 - RNA, 19 nt, Artificial Sequence
  Description of Artificial Sequence: Synthetic oligonucleotide
uucauccaugucuucugau

SEQ ID NO: 2824115 - RNA, 19 nt, Artificial Sequence
  Description of Artificial Sequence: Synthetic oligonucleotide
acacagaugaugucuccuu

SEQ ID NO: 2824116 - RNA, 19 nt, Artificial Sequence
  Description of Artificial Sequence: Synthetic oligonucleotide
cacagaugaugucuccuuc

SEQ ID NO: 2824117 - RNA, 19 nt, Artificial Sequence
  Description of Artificial Sequence: Synthetic oligonucleotide
accuuaguuaaaggguuca

SEQ ID NO: 2824118 - RNA, 19 nt, Artificial Sequence
  Description of Artificial Sequence: Synthetic oligonucleotide
cuucguagcacaggaaaca

SEQ ID NO: 2824119 - RNA, 19 nt, Artificial Sequence
  Description of Artificial Sequence: Synthetic oligonucleotide
cuccucugaucuucguagc

SEQ ID NO: 2824120 - RNA, 19 nt, Artificial Sequence
  Description of Artificial Sequence: Synthetic oligonucleotide
gagcucucuggucacuuca

SEQ ID NO: 2824121 - RNA, 19 nt, Artificial Sequence
  Description of Artificial Sequence: Synthetic oligonucleotide
aucccuuggacuugcccgu

SEQ ID NO: 2824122 - RNA, 19 nt, Artificial Sequence
  Description of Artificial Sequence: Synthetic oligonucleotide
gagguguuuuagcaccaca

SEQ ID NO: 2824123 - RNA, 19 nt, Artificial Sequence
  Description of Artificial Sequence: Synthetic oligonucleotide
guccuuguauuccgagugc

SEQ ID NO: 2824124 - RNA, 19 nt, Artificial Sequence
  Description of Artificial Sequence: Synthetic oligonucleotide
uuccgagugccaagacacc

SEQ ID NO: 2824125 - RNA, 19 nt, Artificial Sequence
  Description of Artificial Sequence: Synthetic oligonucleotide
cuuuauggugggcuugaca

SEQ ID NO: 2824126 - RNA, 19 nt, Artificial Sequence
  Description of Artificial Sequence: Synthetic oligonucleotide
cucugaucuucguagcaca

SEQ ID NO: 2824127 - RNA, 19 nt, Artificial Sequence
  Description of Artificial Sequence: Synthetic oligonucleotide
agacaccuuuuccgccacc

SEQ ID NO: 2824128 - RNA, 19 nt, Artificial Sequence
  Description of Artificial Sequence: Synthetic oligonucleotide
ugcuccucugaucuucgua

SEQ ID NO: 2824129 - RNA, 19 nt, Artificial Sequence
  Description of Artificial Sequence: Synthetic oligonucleotide
ucuccuucugucaguucau

SEQ ID NO: 2824130 - RNA, 19 nt, Artificial Sequence
  Description of Artificial Sequence: Synthetic oligonucleotide
ccauugaaauugucaacag

SEQ ID NO: 2824131 - RNA, 19 nt, Artificial Sequence
  Description of Artificial Sequence: Synthetic oligonucleotide
caccuuaguuaaaggguuc

SEQ ID NO: 2824132 - RNA, 19 nt, Artificial Sequence
  Description of Artificial Sequence: Synthetic oligonucleotide
gaacugugcuccucugauc

SEQ ID NO: 2824133 - RNA, 19 nt, Artificial Sequence
  Description of Artificial Sequence: Synthetic oligonucleotide
aggcgcuguccuuguauuc

SEQ ID NO: 2824134 - RNA, 19 nt, Artificial Sequence
  Description of Artificial Sequence: Synthetic oligonucleotide
acuugcccgucuucuuguc

SEQ ID NO: 2824135 - RNA, 19 nt, Artificial Sequence
  Description of Artificial Sequence: Synthetic oligonucleotide
gggcuugacaucuucaucu

SEQ ID NO: 2824136 - RNA, 19 nt, Artificial Sequence
  Description of Artificial Sequence: Synthetic oligonucleotide
cuuaguuaaaggguucaua

SEQ ID NO: 2824137 - RNA, 19 nt, Artificial Sequence
  Description of Artificial Sequence: Synthetic oligonucleotide
acuugauggagguguuuua

SEQ ID NO: 2824138 - RNA, 19 nt, Artificial Sequence
  Description of Artificial Sequence: Synthetic oligonucleotide
ugucaacagccagaacugu

SEQ ID NO: 2824139 - RNA, 19 nt, Artificial Sequence
  Description of Artificial Sequence: Synthetic oligonucleotide
acagaaucccuuggacuug

SEQ ID NO: 2824140 - RNA, 19 nt, Artificial Sequence
  Description of Artificial Sequence: Synthetic oligonucleotide
uccgccaccccgaguugag

SEQ ID NO: 2824141 - RNA, 19 nt, Artificial Sequence
  Description of Artificial Sequence: Synthetic oligonucleotide
uuagcaccacagcccuucu

SEQ ID NO: 2824142 - RNA, 19 nt, Artificial Sequence
  Description of Artificial Sequence: Synthetic oligonucleotide
cagaaucccuuggacuugc

SEQ ID NO: 2824143 - RNA, 19 nt, Artificial Sequence
  Description of Artificial Sequence: Synthetic oligonucleotide
cuuguauuccgagugccaa

SEQ ID NO: 2824144 - RNA, 19 nt, Artificial Sequence
  Description of Artificial Sequence: Synthetic oligonucleotide
uuugugcuuuauggugggc

SEQ ID NO: 2824145 - RNA, 19 nt, Artificial Sequence
  Description of Artificial Sequence: Synthetic oligonucleotide
uccacacggauaguucuuc

SEQ ID NO: 2824146 - RNA, 19 nt, Artificial Sequence
  Description of Artificial Sequence: Synthetic oligonucleotide
aggguucauauucgcgccu

SEQ ID NO: 2824147 - RNA, 19 nt, Artificial Sequence
  Description of Artificial Sequence: Synthetic oligonucleotide
ugucucucacaagauuaau

SEQ ID NO: 2824148 - RNA, 19 nt, Artificial Sequence
  Description of Artificial Sequence: Synthetic oligonucleotide
gacaaucuccccauauugu

SEQ ID NO: 2824149 - RNA, 19 nt, Artificial Sequence
  Description of Artificial Sequence: Synthetic oligonucleotide
guugacaaucuccccauau

SEQ ID NO: 2824150 - RNA, 19 nt, Artificial Sequence
  Description of Artificial Sequence: Synthetic oligonucleotide
ucucgcucauucaguucgu

SEQ ID NO: 2824151 - RNA, 19 nt, Artificial Sequence
  Description of Artificial Sequence: Synthetic oligonucleotide
uggugggcuugacaucuuc

SEQ ID NO: 2824152 - RNA, 19 nt, Artificial Sequence
  Description of Artificial Sequence: Synthetic oligonucleotide
cuccccauauugugagaac

SEQ ID NO: 2824153 - RNA, 19 nt, Artificial Sequence
  Description of Artificial Sequence: Synthetic oligonucleotide
uuuccgccaccccgaguug

SEQ ID NO: 2824154 - RNA, 19 nt, Artificial Sequence
  Description of Artificial Sequence: Synthetic oligonucleotide
guagaacuugauggaggug

SEQ ID NO: 2824155 - RNA, 19 nt, Artificial Sequence
  Description of Artificial Sequence: Synthetic oligonucleotide
uguugacaaucuccccaua

SEQ ID NO: 2824156 - RNA, 19 nt, Artificial Sequence
  Description of Artificial Sequence: Synthetic oligonucleotide
gcuguccuuguauuccgag

SEQ ID NO: 2824157 - RNA, 19 nt, Artificial Sequence
  Description of Artificial Sequence: Synthetic oligonucleotide
cuucauccaugucuucuga

SEQ ID NO: 2824158 - RNA, 19 nt, Artificial Sequence
  Description of Artificial Sequence: Synthetic oligonucleotide
caagaaagauccaggcgcu

SEQ ID NO: 2824159 - RNA, 19 nt, Artificial Sequence
  Description of Artificial Sequence: Synthetic oligonucleotide
guauuccgagugccaagac

SEQ ID NO: 2824160 - RNA, 19 nt, Artificial Sequence
  Description of Artificial Sequence: Synthetic oligonucleotide
ccaagacaccuuuuccgcc

SEQ ID NO: 2824161 - RNA, 19 nt, Artificial Sequence
  Description of Artificial Sequence: Synthetic oligonucleotide
cccgaguugagccucucgc

SEQ ID NO: 2824162 - RNA, 19 nt, Artificial Sequence
  Description of Artificial Sequence: Synthetic oligonucleotide
cucauucaguucguugauc

SEQ ID NO: 2824163 - RNA, 19 nt, Artificial Sequence
  Description of Artificial Sequence: Synthetic oligonucleotide
aguugagccucucgcucau

SEQ ID NO: 2824164 - RNA, 19 nt, Artificial Sequence
  Description of Artificial Sequence: Synthetic oligonucleotide
agcccgguaguuugacaca

SEQ ID NO: 2824165 - RNA, 19 nt, Artificial Sequence
  Description of Artificial Sequence: Synthetic oligonucleotide
aggagcccgguaguuugac

SEQ ID NO: 2824166 - RNA, 19 nt, Artificial Sequence
  Description of Artificial Sequence: Synthetic oligonucleotide
gaugucuccuucugucagu

SEQ ID NO: 2824167 - RNA, 19 nt, Artificial Sequence
  Description of Artificial Sequence: Synthetic oligonucleotide
cuucuccuggagcucucug

SEQ ID NO: 2824168 - RNA, 19 nt, Artificial Sequence
  Description of Artificial Sequence: Synthetic oligonucleotide
gacacaugguccacacgga

SEQ ID NO: 2824169 - RNA, 19 nt, Artificial Sequence
  Description of Artificial Sequence: Synthetic oligonucleotide
agaaucccuuggacuugcc

SEQ ID NO: 2824170 - RNA, 19 nt, Artificial Sequence
  Description of Artificial Sequence: Synthetic oligonucleotide
ggcgcuguccuuguauucc

SEQ ID NO: 2824171 - RNA, 19 nt, Artificial Sequence
  Description of Artificial Sequence: Synthetic oligonucleotide
cguagcacaggaaacagaa

SEQ ID NO: 2824172 - RNA, 19 nt, Artificial Sequence
  Description of Artificial Sequence: Synthetic oligonucleotide
auuccugaggagcccggua

SEQ ID NO: 2824173 - RNA, 19 nt, Artificial Sequence
  Description of Artificial Sequence: Synthetic oligonucleotide
guuugacacaugguccaca

SEQ ID NO: 2824174 - RNA, 19 nt, Artificial Sequence
  Description of Artificial Sequence: Synthetic oligonucleotide
augguccacacggauaguu

SEQ ID NO: 2824175 - RNA, 19 nt, Artificial Sequence
  Description of Artificial Sequence: Synthetic oligonucleotide
caccacagcccuucuccug

SEQ ID NO: 2824176 - RNA, 19 nt, Artificial Sequence
  Description of Artificial Sequence: Synthetic oligonucleotide
cccuccaagaaagauccag

SEQ ID NO: 2824177 - RNA, 19 nt, Artificial Sequence
  Description of Artificial Sequence: Synthetic oligonucleotide
uuuuagcaccacagcccuu

SEQ ID NO: 2824178 - RNA, 19 nt, Artificial Sequence
  Description of Artificial Sequence: Synthetic oligonucleotide
ccccauauugugagaacac

SEQ ID NO: 2824179 - RNA, 19 nt, Artificial Sequence
  Description of Artificial Sequence: Synthetic oligonucleotide
cagacaccucaguagaacu

SEQ ID NO: 2824180 - RNA, 19 nt, Artificial Sequence
  Description of Artificial Sequence: Synthetic oligonucleotide
gugcuuuauggugggcuug

SEQ ID NO: 2824181 - RNA, 19 nt, Artificial Sequence
  Description of Artificial Sequence: Synthetic oligonucleotide
ugcccgucuucuugucucu

SEQ ID NO: 2824182 - RNA, 19 nt, Artificial Sequence
  Description of Artificial Sequence: Synthetic oligonucleotide
uggucacuucauccauguc

SEQ ID NO: 2824183 - RNA, 19 nt, Artificial Sequence
  Description of Artificial Sequence: Synthetic oligonucleotide
aucuccccauauugugaga

SEQ ID NO: 2824184 - RNA, 19 nt, Artificial Sequence
  Description of Artificial Sequence: Synthetic oligonucleotide
cagaacugugcuccucuga

SEQ ID NO: 2824185 - RNA, 19 nt, Artificial Sequence
  Description of Artificial Sequence: Synthetic oligonucleotide
gcgcuguccuuguauuccg

SEQ ID NO: 2824186 - RNA, 19 nt, Artificial Sequence
  Description of Artificial Sequence: Synthetic oligonucleotide
accuuuuccgccaccccga

SEQ ID NO: 2824187 - RNA, 19 nt, Artificial Sequence
  Description of Artificial Sequence: Synthetic oligonucleotide
agccagaacugugcuccuc

SEQ ID NO: 2824188 - RNA, 19 nt, Artificial Sequence
  Description of Artificial Sequence: Synthetic oligonucleotide
cacaggaaacagaaucccu

SEQ ID NO: 2824189 - RNA, 19 nt, Artificial Sequence
  Description of Artificial Sequence: Synthetic oligonucleotide
gaagcccuccaagaaagau

SEQ ID NO: 2824190 - RNA, 19 nt, Artificial Sequence
  Description of Artificial Sequence: Synthetic oligonucleotide
uuccgccaccccgaguuga

SEQ ID NO: 2824191 - RNA, 19 nt, Artificial Sequence
  Description of Artificial Sequence: Synthetic oligonucleotide
uucuuccuuugaucuuaau

SEQ ID NO: 2824192 - RNA, 19 nt, Artificial Sequence
  Description of Artificial Sequence: Synthetic oligonucleotide
agacaccucaguagaacuu

SEQ ID NO: 2824193 - RNA, 19 nt, Artificial Sequence
  Description of Artificial Sequence: Synthetic oligonucleotide
caagauuaauguugacaau

SEQ ID NO: 2824194 - RNA, 19 nt, Artificial Sequence
  Description of Artificial Sequence: Synthetic oligonucleotide
ugucuccuucugucaguuc

SEQ ID NO: 2824195 - RNA, 19 nt, Artificial Sequence
  Description of Artificial Sequence: Synthetic oligonucleotide
gaucuucguagcacaggaa

SEQ ID NO: 2824196 - RNA, 19 nt, Artificial Sequence
  Description of Artificial Sequence: Synthetic oligonucleotide
acaccucaguagaacuuga

SEQ ID NO: 2824197 - RNA, 19 nt, Artificial Sequence
  Description of Artificial Sequence: Synthetic oligonucleotide
gguccacacggauaguucu

SEQ ID NO: 2824198 - RNA, 19 nt, Artificial Sequence
  Description of Artificial Sequence: Synthetic oligonucleotide
cgcucauucaguucguuga

SEQ ID NO: 2824199 - RNA, 19 nt, Artificial Sequence
  Description of Artificial Sequence: Synthetic oligonucleotide
augucuccuucugucaguu

SEQ ID NO: 2824200 - RNA, 19 nt, Artificial Sequence
  Description of Artificial Sequence: Synthetic oligonucleotide
agauccaggcgcuguccuu

SEQ ID NO: 2824201 - RNA, 19 nt, Artificial Sequence
  Description of Artificial Sequence: Synthetic oligonucleotide
cuuugaucuuaauuccauu

SEQ ID NO: 2824202 - RNA, 19 nt, Artificial Sequence
  Description of Artificial Sequence: Synthetic oligonucleotide
ucaguucguugaucagcuu

SEQ ID NO: 2824203 - RNA, 19 nt, Artificial Sequence
  Description of Artificial Sequence: Synthetic oligonucleotide
agaacuugauggagguguu

SEQ ID NO: 2824204 - RNA, 19 nt, Artificial Sequence
  Description of Artificial Sequence: Synthetic oligonucleotide
ggauaguucuuccuuugau

SEQ ID NO: 2824205 - RNA, 19 nt, Artificial Sequence
  Description of Artificial Sequence: Synthetic oligonucleotide
guucguugaucagcuucac

SEQ ID NO: 2824206 - RNA, 19 nt, Artificial Sequence
  Description of Artificial Sequence: Synthetic oligonucleotide
ccacacggauaguucuucc

SEQ ID NO: 2824207 - RNA, 19 nt, Artificial Sequence
  Description of Artificial Sequence: Synthetic oligonucleotide
gcuugacaucuucaucuuc

SEQ ID NO: 2824208 - RNA, 19 nt, Artificial Sequence
  Description of Artificial Sequence: Synthetic oligonucleotide
cacacggauaguucuuccu

SEQ ID NO: 2824209 - RNA, 19 nt, Artificial Sequence
  Description of Artificial Sequence: Synthetic oligonucleotide
cacagcccuucuccuggag

SEQ ID NO: 2824210 - RNA, 19 nt, Artificial Sequence
  Description of Artificial Sequence: Synthetic oligonucleotide
gugggcuugacaucuucau

SEQ ID NO: 2824211 - RNA, 19 nt, Artificial Sequence
  Description of Artificial Sequence: Synthetic oligonucleotide
uggagcucucuggucacuu

SEQ ID NO: 2824212 - RNA, 19 nt, Artificial Sequence
  Description of Artificial Sequence: Synthetic oligonucleotide
ccucugaucuucguagcac

SEQ ID NO: 2824213 - RNA, 19 nt, Artificial Sequence
  Description of Artificial Sequence: Synthetic oligonucleotide
auccaggcgcuguccuugu

SEQ ID NO: 2824214 - RNA, 19 nt, Artificial Sequence
  Description of Artificial Sequence: Synthetic oligonucleotide
cagcccuucuccuggagcu

SEQ ID NO: 2824215 - RNA, 19 nt, Artificial Sequence
  Description of Artificial Sequence: Synthetic oligonucleotide
cuguccuuguauuccgagu

SEQ ID NO: 2824216 - RNA, 19 nt, Artificial Sequence
  Description of Artificial Sequence: Synthetic oligonucleotide
acugugcuccucugaucuu

SEQ ID NO: 2824217 - RNA, 19 nt, Artificial Sequence
  Description of Artificial Sequence: Synthetic oligonucleotide
cucucacaagauuaauguu

SEQ ID NO: 2824218 - RNA, 19 nt, Artificial Sequence
  Description of Artificial Sequence: Synthetic oligonucleotide
gguucauauucgcgccuuc

SEQ ID NO: 2824219 - RNA, 19 nt, Artificial Sequence
  Description of Artificial Sequence: Synthetic oligonucleotide
agccucucgcucauucagu

SEQ ID NO: 2824220 - RNA, 19 nt, Artificial Sequence
  Description of Artificial Sequence: Synthetic oligonucleotide
ggugggcuugacaucuuca

SEQ ID NO: 2824221 - RNA, 19 nt, Artificial Sequence
  Description of Artificial Sequence: Synthetic oligonucleotide
caacagccagaacugugcu

SEQ ID NO: 2824222 - RNA, 19 nt, Artificial Sequence
  Description of Artificial Sequence: Synthetic oligonucleotide
ccuuguauuccgagugcca

SEQ ID NO: 2824223 - RNA, 19 nt, Artificial Sequence
  Description of Artificial Sequence: Synthetic oligonucleotide
caucuucagacaccucagu

SEQ ID NO: 2824224 - RNA, 19 nt, Artificial Sequence
  Description of Artificial Sequence: Synthetic oligonucleotide
ccgucuucuugucucucac

SEQ ID NO: 2824225 - RNA, 19 nt, Artificial Sequence
  Description of Artificial Sequence: Synthetic oligonucleotide
cacggauaguucuuccuuu

SEQ ID NO: 2824226 - RNA, 19 nt, Artificial Sequence
  Description of Artificial Sequence: Synthetic oligonucleotide
ggagcucucuggucacuuc

SEQ ID NO: 2824227 - RNA, 19 nt, Artificial Sequence
  Description of Artificial Sequence: Synthetic oligonucleotide
agcucucuggucacuucau

SEQ ID NO: 2824228 - RNA, 19 nt, Artificial Sequence
  Description of Artificial Sequence: Synthetic oligonucleotide
cccauauugugagaacaca

SEQ ID NO: 2824229 - RNA, 19 nt, Artificial Sequence
  Description of Artificial Sequence: Synthetic oligonucleotide
ccaugucuucugauuccug

SEQ ID NO: 2824230 - RNA, 19 nt, Artificial Sequence
  Description of Artificial Sequence: Synthetic oligonucleotide
ccagaacugugcuccucug

SEQ ID NO: 2824231 - RNA, 19 nt, Artificial Sequence
  Description of Artificial Sequence: Synthetic oligonucleotide
gaggagcccgguaguuuga

SEQ ID NO: 2824232 - RNA, 19 nt, Artificial Sequence
  Description of Artificial Sequence: Synthetic oligonucleotide
gcucucuggucacuucauc

SEQ ID NO: 2824233 - RNA, 19 nt, Artificial Sequence
  Description of Artificial Sequence: Synthetic oligonucleotide
guucuuccuuugaucuuaa

SEQ ID NO: 2824234 - RNA, 19 nt, Artificial Sequence
  Description of Artificial Sequence: Synthetic oligonucleotide
gauuccugaggagcccggu

SEQ ID NO: 2824235 - RNA, 19 nt, Artificial Sequence
  Description of Artificial Sequence: Synthetic oligonucleotide
ccuuugaucuuaauuccau

SEQ ID NO: 2824236 - RNA, 19 nt, Artificial Sequence
  Description of Artificial Sequence: Synthetic oligonucleotide
cgccaccccgaguugagcc

SEQ ID NO: 2824237 - RNA, 19 nt, Artificial Sequence
  Description of Artificial Sequence: Synthetic oligonucleotide
gccagaacugugcuccucu

SEQ ID NO: 2824238 - RNA, 19 nt, Artificial Sequence
  Description of Artificial Sequence: Synthetic oligonucleotide
uccaggcgcuguccuugua

SEQ ID NO: 2824239 - RNA, 19 nt, Artificial Sequence
  Description of Artificial Sequence: Synthetic oligonucleotide
cuugcccgucuucuugucu

SEQ ID NO: 2824240 - RNA, 19 nt, Artificial Sequence
  Description of Artificial Sequence: Synthetic oligonucleotide
ggagcccgguaguuugaca

SEQ ID NO: 2824241 - RNA, 19 nt, Artificial Sequence
  Description of Artificial Sequence: Synthetic oligonucleotide
gugagaacacacagaugau

SEQ ID NO: 2824242 - RNA, 19 nt, Artificial Sequence
  Description of Artificial Sequence: Synthetic oligonucleotide
ccucucgcucauucaguuc

SEQ ID NO: 2824243 - RNA, 19 nt, Artificial Sequence
  Description of Artificial Sequence: Synthetic oligonucleotide
ccuuuuccgccaccccgag

SEQ ID NO: 2824244 - RNA, 19 nt, Artificial Sequence
  Description of Artificial Sequence: Synthetic oligonucleotide
accccgaguugagccucuc

SEQ ID NO: 2824245 - RNA, 19 nt, Artificial Sequence
  Description of Artificial Sequence: Synthetic oligonucleotide
ccccgaguugagccucucg

SEQ ID NO: 2824246 - RNA, 19 nt, Artificial Sequence
  Description of Artificial Sequence: Synthetic oligonucleotide
guagcacaggaaacagaau

SEQ ID NO: 2824247 - RNA, 19 nt, Artificial Sequence
  Description of Artificial Sequence: Synthetic oligonucleotide
gcucauucaguucguugau

SEQ ID NO: 2824248 - RNA, 19 nt, Artificial Sequence
  Description of Artificial Sequence: Synthetic oligonucleotide
caccucaguagaacuugau

SEQ ID NO: 2824249 - RNA, 19 nt, Artificial Sequence
  Description of Artificial Sequence: Synthetic oligonucleotide
ggaagcccuccaagaaaga

SEQ ID NO: 2824250 - RNA, 19 nt, Artificial Sequence
  Description of Artificial Sequence: Synthetic oligonucleotide
cccgguaguuugacacaug

SEQ ID NO: 2824251 - RNA, 19 nt, Artificial Sequence
  Description of Artificial Sequence: Synthetic oligonucleotide
cagcuucaccuuaguuaaa

SEQ ID NO: 2824252 - RNA, 19 nt, Artificial Sequence
  Description of Artificial Sequence: Synthetic oligonucleotide
gcuuuauggugggcuugac

SEQ ID NO: 2824253 - RNA, 19 nt, Artificial Sequence
  Description of Artificial Sequence: Synthetic oligonucleotide
caggcgcuguccuuguauu

SEQ ID NO: 2824254 - RNA, 19 nt, Artificial Sequence
  Description of Artificial Sequence: Synthetic oligonucleotide
cccgucuucuugucucuca

SEQ ID NO: 2824255 - RNA, 19 nt, Artificial Sequence
  Description of Artificial Sequence: Synthetic oligonucleotide
cuccuucugucaguucaua

SEQ ID NO: 2824256 - RNA, 19 nt, Artificial Sequence
  Description of Artificial Sequence: Synthetic oligonucleotide
cggauaguucuuccuuuga

SEQ ID NO: 2824257 - RNA, 19 nt, Artificial Sequence
  Description of Artificial Sequence: Synthetic oligonucleotide
cuuuuccgccaccccgagu

SEQ ID NO: 2824258 - RNA, 19 nt, Artificial Sequence
  Description of Artificial Sequence: Synthetic oligonucleotide
gccucucgcucauucaguu

SEQ ID NO: 2824259 - RNA, 19 nt, Artificial Sequence
  Description of Artificial Sequence: Synthetic oligonucleotide
ccgaguugagccucucgcu

SEQ ID NO: 2824260 - RNA, 19 nt, Artificial Sequence
  Description of Artificial Sequence: Synthetic oligonucleotide
gcaccacagcccuucuccu

SEQ ID NO: 2824261 - RNA, 19 nt, Artificial Sequence
  Description of Artificial Sequence: Synthetic oligonucleotide
guccacacggauaguucuu

SEQ ID NO: 2824262 - RNA, 19 nt, Artificial Sequence
  Description of Artificial Sequence: Synthetic oligonucleotide
gugcuccucugaucuucgu

SEQ ID NO: 2824263 - RNA, 19 nt, Artificial Sequence
  Description of Artificial Sequence: Synthetic oligonucleotide
cugaggagcccgguaguuu

SEQ ID NO: 2824264 - RNA, 19 nt, Artificial Sequence
  Description of Artificial Sequence: Synthetic oligonucleotide
auggugggcuugacaucuu

SEQ ID NO: 2824265 - RNA, 19 nt, Artificial Sequence
  Description of Artificial Sequence: Synthetic oligonucleotide
gccaccccgaguugagccu

SEQ ID NO: 2824266 - RNA, 19 nt, Artificial Sequence
  Description of Artificial Sequence: Synthetic oligonucleotide
gagugccaagacaccuuuu

SEQ ID NO: 2824267 - RNA, 19 nt, Artificial Sequence
  Description of Artificial Sequence: Synthetic oligonucleotide
ccaccccgaguugagccuc

SEQ ID NO: 2824268 - RNA, 19 nt, Artificial Sequence
  Description of Artificial Sequence: Synthetic oligonucleotide
cagccagaacugugcuccu

SEQ ID NO: 2824269 - RNA, 19 nt, Artificial Sequence
  Description of Artificial Sequence: Synthetic oligonucleotide
cccuucuccuggagcucuc

SEQ ID NO: 2824270 - RNA, 19 nt, Artificial Sequence
  Description of Artificial Sequence: Synthetic oligonucleotide
ggguucauauucgcgccuu

SEQ ID NO: 2824271 - RNA, 19 nt, Artificial Sequence
  Description of Artificial Sequence: Synthetic oligonucleotide
caugguccacacggauagu

SEQ ID NO: 2824272 - RNA, 19 nt, Artificial Sequence
  Description of Artificial Sequence: Synthetic oligonucleotide
gcccgguaguuugacacau

SEQ ID NO: 2824273 - RNA, 19 nt, Artificial Sequence
  Description of Artificial Sequence: Synthetic oligonucleotide
ccaggcgcuguccuuguau

SEQ ID NO: 2824274 - RNA, 19 nt, Artificial Sequence
  Description of Artificial Sequence: Synthetic oligonucleotide
ccuuaguuaaaggguucau

SEQ ID NO: 2824275 - RNA, 19 nt, Artificial Sequence
  Description of Artificial Sequence: Synthetic oligonucleotide
caccccgaguugagccucu

SEQ ID NO: 2824276 - RNA, 19 nt, Artificial Sequence
  Description of Artificial Sequence: Synthetic oligonucleotide
cguugaucagcuucaccuu

SEQ ID NO: 2824277 - RNA, 19 nt, Artificial Sequence
  Description of Artificial Sequence: Synthetic oligonucleotide
cuggagcucucuggucacu

SEQ ID NO: 2824278 - RNA, 19 nt, Artificial Sequence
  Description of Artificial Sequence: Synthetic oligonucleotide
cgguaguuugacacauggu

SEQ ID NO: 2824279 - RNA, 19 nt, Artificial Sequence
  Description of Artificial Sequence: Synthetic oligonucleotide
gcccuucuccuggagcucu

SEQ ID NO: 2824280 - RNA, 19 nt, Artificial Sequence
  Description of Artificial Sequence: Synthetic oligonucleotide
gcccgucuucuugucucuc

SEQ ID NO: 2824281 - RNA, 19 nt, Artificial Sequence
  Description of Artificial Sequence: Synthetic oligonucleotide
cucgcucauucaguucguu

SEQ ID NO: 2824282 - RNA, 19 nt, Artificial Sequence
  Description of Artificial Sequence: Synthetic oligonucleotide
ccgccaccccgaguugagc

SEQ ID NO: 2824283 - RNA, 19 nt, Artificial Sequence
  Description of Artificial Sequence: Synthetic oligonucleotide
cgcuguccuuguauuccga

SEQ ID NO: 2824284 - RNA, 19 nt, Artificial Sequence
  Description of Artificial Sequence: Synthetic oligonucleotide
ccgagugccaagacaccuu

SEQ ID NO: 2824285 - RNA, 19 nt, Artificial Sequence
  Description of Artificial Sequence: Synthetic oligonucleotide
cgagugccaagacaccuuu

SEQ ID NO: 2824286 - RNA, 19 nt, Artificial Sequence
  Description of Artificial Sequence: Synthetic oligonucleotide
gcccuccaagaaagaucca

SEQ ID NO: 2824287 - RNA, 19 nt, Artificial Sequence
  Description of Artificial Sequence: Synthetic oligonucleotide
guugagccucucgcucauu

SEQ ID NO: 2824288 - RNA, 19 nt, Artificial Sequence
  Description of Artificial Sequence: Synthetic oligonucleotide
cccuuggacuugcccgucu

SEQ ID NO: 2824289 - RNA, 19 nt, Artificial Sequence
  Description of Artificial Sequence: Synthetic oligonucleotide
ccuucuccuggagcucucu

SEQ ID NO: 2824290 - RNA, 19 nt, Artificial Sequence
  Description of Artificial Sequence: Synthetic oligonucleotide
ccugaggagcccgguaguu

SEQ ID NO: 2824291 - RNA, 19 nt, Artificial Sequence
  Description of Artificial Sequence: Synthetic oligonucleotide
agagcucccacucagagcg

SEQ ID NO: 2824292 - RNA, 19 nt, Artificial Sequence
  Description of Artificial Sequence: Synthetic oligonucleotide
uguguuccaggucaggugg

SEQ ID NO: 2824293 - RNA, 19 nt, Artificial Sequence
  Description of Artificial Sequence: Synthetic oligonucleotide
uagcuuuggagacauaucc

SEQ ID NO: 2824294 - RNA, 19 nt, Artificial Sequence
  Description of Artificial Sequence: Synthetic oligonucleotide
ugcucacucucacagaggg

SEQ ID NO: 2824295 - RNA, 19 nt, Artificial Sequence
  Description of Artificial Sequence: Synthetic oligonucleotide
uguaggaugugccuggcgc

SEQ ID NO: 2824296 - RNA, 19 nt, Artificial Sequence
  Description of Artificial Sequence: Synthetic oligonucleotide
aaugccuuccucuguguuc

SEQ ID NO: 2824297 - RNA, 19 nt, Artificial Sequence
  Description of Artificial Sequence: Synthetic oligonucleotide
aguuagagcaggaaaugcc

SEQ ID NO: 2824298 - RNA, 19 nt, Artificial Sequence
  Description of Artificial Sequence: Synthetic oligonucleotide
uccaaguccaggucaaggg

SEQ ID NO: 2824299 - RNA, 19 nt, Artificial Sequence
  Description of Artificial Sequence: Synthetic oligonucleotide
ucagguggaagcuagucca

SEQ ID NO: 2824300 - RNA, 19 nt, Artificial Sequence
  Description of Artificial Sequence: Synthetic oligonucleotide
uugcuugucacucaucacu

SEQ ID NO: 2824301 - RNA, 19 nt, Artificial Sequence
  Description of Artificial Sequence: Synthetic oligonucleotide
guaguagugguguaggaug

SEQ ID NO: 2824302 - RNA, 19 nt, Artificial Sequence
  Description of Artificial Sequence: Synthetic oligonucleotide
uuuggagacauauccuggc

SEQ ID NO: 2824303 - RNA, 19 nt, Artificial Sequence
  Description of Artificial Sequence: Synthetic oligonucleotide
uggaagcuaguccaagucc

SEQ ID NO: 2824304 - RNA, 19 nt, Artificial Sequence
  Description of Artificial Sequence: Synthetic oligonucleotide
cuuuggagacauauccugg

SEQ ID NO: 2824305 - RNA, 19 nt, Artificial Sequence
  Description of Artificial Sequence: Synthetic oligonucleotide
gcaauaggcaguuagagca

SEQ ID NO: 2824306 - RNA, 19 nt, Artificial Sequence
  Description of Artificial Sequence: Synthetic oligonucleotide
ugucacucaucacuugucc

SEQ ID NO: 2824307 - RNA, 19 nt, Artificial Sequence
  Description of Artificial Sequence: Synthetic oligonucleotide
ugccucaagguccauacca

SEQ ID NO: 2824308 - RNA, 19 nt, Artificial Sequence
  Description of Artificial Sequence: Synthetic oligonucleotide
uucugugcagccuggaccc

SEQ ID NO: 2824309 - RNA, 19 nt, Artificial Sequence
  Description of Artificial Sequence: Synthetic oligonucleotide
ucuccugugguagagggag

SEQ ID NO: 2824310 - RNA, 19 nt, Artificial Sequence
  Description of Artificial Sequence: Synthetic oligonucleotide
cucaagguccauaccaggg

SEQ ID NO: 2824311 - RNA, 19 nt, Artificial Sequence
  Description of Artificial Sequence: Synthetic oligonucleotide
gaccagguuagccuguggg

SEQ ID NO: 2824312 - RNA, 19 nt, Artificial Sequence
  Description of Artificial Sequence: Synthetic oligonucleotide
aauaggcaguuagagcagg

SEQ ID NO: 2824313 - RNA, 19 nt, Artificial Sequence
  Description of Artificial Sequence: Synthetic oligonucleotide
accagguuagccugugggc

SEQ ID NO: 2824314 - RNA, 19 nt, Artificial Sequence
  Description of Artificial Sequence: Synthetic oligonucleotide
ggagguuccagucugcagg

SEQ ID NO: 2824315 - RNA, 19 nt, Artificial Sequence
  Description of Artificial Sequence: Synthetic oligonucleotide
acagagggaucgcugggcc

SEQ ID NO: 2824316 - RNA, 19 nt, Artificial Sequence
  Description of Artificial Sequence: Synthetic oligonucleotide
ucaucacuuguccuucucc

SEQ ID NO: 2824317 - RNA, 19 nt, Artificial Sequence
  Description of Artificial Sequence: Synthetic oligonucleotide
cuucugugcagccuggacc

SEQ ID NO: 2824318 - RNA, 19 nt, Artificial Sequence
  Description of Artificial Sequence: Synthetic oligonucleotide
ugccugcucacucucacag

SEQ ID NO: 2824319 - RNA, 19 nt, Artificial Sequence
  Description of Artificial Sequence: Synthetic oligonucleotide
cuucuccugugguagaggg

SEQ ID NO: 2824320 - RNA, 19 nt, Artificial Sequence
  Description of Artificial Sequence: Synthetic oligonucleotide
acugccugcaguccggccg

SEQ ID NO: 2824321 - RNA, 19 nt, Artificial Sequence
  Description of Artificial Sequence: Synthetic oligonucleotide
ugugguagagggagguucc

SEQ ID NO: 2824322 - RNA, 19 nt, Artificial Sequence
  Description of Artificial Sequence: Synthetic oligonucleotide
ucugccucaagguccauac

SEQ ID NO: 2824323 - RNA, 19 nt, Artificial Sequence
  Description of Artificial Sequence: Synthetic oligonucleotide
ucccauucgcggcagcugg

SEQ ID NO: 2824324 - RNA, 19 nt, Artificial Sequence
  Description of Artificial Sequence: Synthetic oligonucleotide
cucacagagggaucgcugg

SEQ ID NO: 2824325 - RNA, 19 nt, Artificial Sequence
  Description of Artificial Sequence: Synthetic oligonucleotide
augccuuccucuguguucc

SEQ ID NO: 2824326 - RNA, 19 nt, Artificial Sequence
  Description of Artificial Sequence: Synthetic oligonucleotide
agagcgguagaccucgcag

SEQ ID NO: 2824327 - RNA, 19 nt, Artificial Sequence
  Description of Artificial Sequence: Synthetic oligonucleotide
ucaagguccauaccagggu

SEQ ID NO: 2824328 - RNA, 19 nt, Artificial Sequence
  Description of Artificial Sequence: Synthetic oligonucleotide
uuccaggucagguggaagc

SEQ ID NO: 2824329 - RNA, 19 nt, Artificial Sequence
  Description of Artificial Sequence: Synthetic oligonucleotide
ucacuuguccuucuccugu

SEQ ID NO: 2824330 - RNA, 19 nt, Artificial Sequence
  Description of Artificial Sequence: Synthetic oligonucleotide
uguccuucuccugugguag

SEQ ID NO: 2824331 - RNA, 19 nt, Artificial Sequence
  Description of Artificial Sequence: Synthetic oligonucleotide
gugggcaauaggcaguuag

SEQ ID NO: 2824332 - RNA, 19 nt, Artificial Sequence
  Description of Artificial Sequence: Synthetic oligonucleotide
gacguaguagugguguagg

SEQ ID NO: 2824333 - RNA, 19 nt, Artificial Sequence
  Description of Artificial Sequence: Synthetic oligonucleotide
uggagacauauccuggcac

SEQ ID NO: 2824334 - RNA, 19 nt, Artificial Sequence
  Description of Artificial Sequence: Synthetic oligonucleotide
gacauauccuggcacucgc

SEQ ID NO: 2824335 - RNA, 19 nt, Artificial Sequence
  Description of Artificial Sequence: Synthetic oligonucleotide
uagugguguaggaugugcc

SEQ ID NO: 2824336 - RNA, 19 nt, Artificial Sequence
  Description of Artificial Sequence: Synthetic oligonucleotide
gagcgguagaccucgcagg

SEQ ID NO: 2824337 - RNA, 19 nt, Artificial Sequence
  Description of Artificial Sequence: Synthetic oligonucleotide
uaguagugguguaggaugu

SEQ ID NO: 2824338 - RNA, 19 nt, Artificial Sequence
  Description of Artificial Sequence: Synthetic oligonucleotide
agagggagguuccagucug

SEQ ID NO: 2824339 - RNA, 19 nt, Artificial Sequence
  Description of Artificial Sequence: Synthetic oligonucleotide
agcaggaaaugccuuccuc

SEQ ID NO: 2824340 - RNA, 19 nt, Artificial Sequence
  Description of Artificial Sequence: Synthetic oligonucleotide
agcgguagaccucgcaggg

SEQ ID NO: 2824341 - RNA, 19 nt, Artificial Sequence
  Description of Artificial Sequence: Synthetic oligonucleotide
ucacagagggaucgcuggg

SEQ ID NO: 2824342 - RNA, 19 nt, Artificial Sequence
  Description of Artificial Sequence: Synthetic oligonucleotide
uuggagacauauccuggca

SEQ ID NO: 2824343 - RNA, 19 nt, Artificial Sequence
  Description of Artificial Sequence: Synthetic oligonucleotide
ucucacagagggaucgcug

SEQ ID NO: 2824344 - RNA, 19 nt, Artificial Sequence
  Description of Artificial Sequence: Synthetic oligonucleotide
gucagguggaagcuagucc

SEQ ID NO: 2824345 - RNA, 19 nt, Artificial Sequence
  Description of Artificial Sequence: Synthetic oligonucleotide
agcuaguccaaguccaggu

SEQ ID NO: 2824346 - RNA, 19 nt, Artificial Sequence
  Description of Artificial Sequence: Synthetic oligonucleotide
ugggcaauaggcaguuaga

SEQ ID NO: 2824347 - RNA, 19 nt, Artificial Sequence
  Description of Artificial Sequence: Synthetic oligonucleotide
aagcuaguccaaguccagg

SEQ ID NO: 2824348 - RNA, 19 nt, Artificial Sequence
  Description of Artificial Sequence: Synthetic oligonucleotide
agugguguaggaugugccu

SEQ ID NO: 2824349 - RNA, 19 nt, Artificial Sequence
  Description of Artificial Sequence: Synthetic oligonucleotide
caauaggcaguuagagcag

SEQ ID NO: 2824350 - RNA, 19 nt, Artificial Sequence
  Description of Artificial Sequence: Synthetic oligonucleotide
cucagagcgguagaccucg

SEQ ID NO: 2824351 - RNA, 19 nt, Artificial Sequence
  Description of Artificial Sequence: Synthetic oligonucleotide
aggucgcgcagccacugcc

SEQ ID NO: 2824352 - RNA, 19 nt, Artificial Sequence
  Description of Artificial Sequence: Synthetic oligonucleotide
ucaagggcaggguugcggu

SEQ ID NO: 2824353 - RNA, 19 nt, Artificial Sequence
  Description of Artificial Sequence: Synthetic oligonucleotide
gcuuuggagacauauccug

SEQ ID NO: 2824354 - RNA, 19 nt, Artificial Sequence
  Description of Artificial Sequence: Synthetic oligonucleotide
augugccuggcgcugcggc

SEQ ID NO: 2824355 - RNA, 19 nt, Artificial Sequence
  Description of Artificial Sequence: Synthetic oligonucleotide
ucuguguuccaggucaggu

SEQ ID NO: 2824356 - RNA, 19 nt, Artificial Sequence
  Description of Artificial Sequence: Synthetic oligonucleotide
cacucucacagagggaucg

SEQ ID NO: 2824357 - RNA, 19 nt, Artificial Sequence
  Description of Artificial Sequence: Synthetic oligonucleotide
aggucaagggcaggguugc

SEQ ID NO: 2824358 - RNA, 19 nt, Artificial Sequence
  Description of Artificial Sequence: Synthetic oligonucleotide
ucacucaucacuuguccuu

SEQ ID NO: 2824359 - RNA, 19 nt, Artificial Sequence
  Description of Artificial Sequence: Synthetic oligonucleotide
caggaaaugccuuccucug

SEQ ID NO: 2824360 - RNA, 19 nt, Artificial Sequence
  Description of Artificial Sequence: Synthetic oligonucleotide
agacauauccuggcacucg

SEQ ID NO: 2824361 - RNA, 19 nt, Artificial Sequence
  Description of Artificial Sequence: Synthetic oligonucleotide
uagagggagguuccagucu

SEQ ID NO: 2824362 - RNA, 19 nt, Artificial Sequence
  Description of Artificial Sequence: Synthetic oligonucleotide
uguguagcuuuggagacau

SEQ ID NO: 2824363 - RNA, 19 nt, Artificial Sequence
  Description of Artificial Sequence: Synthetic oligonucleotide
uagagcaggaaaugccuuc

SEQ ID NO: 2824364 - RNA, 19 nt, Artificial Sequence
  Description of Artificial Sequence: Synthetic oligonucleotide
caagguccauaccagggug

SEQ ID NO: 2824365 - RNA, 19 nt, Artificial Sequence
  Description of Artificial Sequence: Synthetic oligonucleotide
gaucgcugggccucggggc

SEQ ID NO: 2824366 - RNA, 19 nt, Artificial Sequence
  Description of Artificial Sequence: Synthetic oligonucleotide
uuagagcaggaaaugccuu

SEQ ID NO: 2824367 - RNA, 19 nt, Artificial Sequence
  Description of Artificial Sequence: Synthetic oligonucleotide
caguuagagcaggaaaugc

SEQ ID NO: 2824368 - RNA, 19 nt, Artificial Sequence
  Description of Artificial Sequence: Synthetic oligonucleotide
uugucacucaucacuuguc

SEQ ID NO: 2824369 - RNA, 19 nt, Artificial Sequence
  Description of Artificial Sequence: Synthetic oligonucleotide
gguugcuugucacucauca

SEQ ID NO: 2824370 - RNA, 19 nt, Artificial Sequence
  Description of Artificial Sequence: Synthetic oligonucleotide
ggcaauaggcaguuagagc

SEQ ID NO: 2824371 - RNA, 19 nt, Artificial Sequence
  Description of Artificial Sequence: Synthetic oligonucleotide
aucacuuguccuucuccug

SEQ ID NO: 2824372 - RNA, 19 nt, Artificial Sequence
  Description of Artificial Sequence: Synthetic oligonucleotide
cuaguccaaguccagguca

SEQ ID NO: 2824373 - RNA, 19 nt, Artificial Sequence
  Description of Artificial Sequence: Synthetic oligonucleotide
agagggaucgcugggccuc

SEQ ID NO: 2824374 - RNA, 19 nt, Artificial Sequence
  Description of Artificial Sequence: Synthetic oligonucleotide
aggcaguuagagcaggaaa

SEQ ID NO: 2824375 - RNA, 19 nt, Artificial Sequence
  Description of Artificial Sequence: Synthetic oligonucleotide
ucgccguggacguaguagu

SEQ ID NO: 2824376 - RNA, 19 nt, Artificial Sequence
  Description of Artificial Sequence: Synthetic oligonucleotide
cuguguuccaggucaggug

SEQ ID NO: 2824377 - RNA, 19 nt, Artificial Sequence
  Description of Artificial Sequence: Synthetic oligonucleotide
ucuccucccauucgcggca

SEQ ID NO: 2824378 - RNA, 19 nt, Artificial Sequence
  Description of Artificial Sequence: Synthetic oligonucleotide
guggaagcuaguccaaguc

SEQ ID NO: 2824379 - RNA, 19 nt, Artificial Sequence
  Description of Artificial Sequence: Synthetic oligonucleotide
aaguccaggucaagggcag

SEQ ID NO: 2824380 - RNA, 19 nt, Artificial Sequence
  Description of Artificial Sequence: Synthetic oligonucleotide
guagugguguaggaugugc

SEQ ID NO: 2824381 - RNA, 19 nt, Artificial Sequence
  Description of Artificial Sequence: Synthetic oligonucleotide
guagagggagguuccaguc

SEQ ID NO: 2824382 - RNA, 19 nt, Artificial Sequence
  Description of Artificial Sequence: Synthetic oligonucleotide
auucgcggcagcuggccag

SEQ ID NO: 2824383 - RNA, 19 nt, Artificial Sequence
  Description of Artificial Sequence: Synthetic oligonucleotide
gaagcuaguccaaguccag

SEQ ID NO: 2824384 - RNA, 19 nt, Artificial Sequence
  Description of Artificial Sequence: Synthetic oligonucleotide
guccaaguccaggucaagg

SEQ ID NO: 2824385 - RNA, 19 nt, Artificial Sequence
  Description of Artificial Sequence: Synthetic oligonucleotide
uaguccaaguccaggucaa

SEQ ID NO: 2824386 - RNA, 19 nt, Artificial Sequence
  Description of Artificial Sequence: Synthetic oligonucleotide
cucuccucccauucgcggc

SEQ ID NO: 2824387 - RNA, 19 nt, Artificial Sequence
  Description of Artificial Sequence: Synthetic oligonucleotide
aggaaaugccuuccucugu

SEQ ID NO: 2824388 - RNA, 19 nt, Artificial Sequence
  Description of Artificial Sequence: Synthetic oligonucleotide
ugcggcagagcucccacuc

SEQ ID NO: 2824389 - RNA, 19 nt, Artificial Sequence
  Description of Artificial Sequence: Synthetic oligonucleotide
ugcagccuggacccgugcc

SEQ ID NO: 2824390 - RNA, 19 nt, Artificial Sequence
  Description of Artificial Sequence: Synthetic oligonucleotide
gucaagggcaggguugcgg

SEQ ID NO: 2824391 - RNA, 19 nt, Artificial Sequence
  Description of Artificial Sequence: Synthetic oligonucleotide
agacagguuucucugugua

SEQ ID NO: 2824392 - RNA, 19 nt, Artificial Sequence
  Description of Artificial Sequence: Synthetic oligonucleotide
guugcuugucacucaucac

SEQ ID NO: 2824393 - RNA, 19 nt, Artificial Sequence
  Description of Artificial Sequence: Synthetic oligonucleotide
uucuccugugguagaggga

SEQ ID NO: 2824394 - RNA, 19 nt, Artificial Sequence
  Description of Artificial Sequence: Synthetic oligonucleotide
cagagcucccacucagagc

SEQ ID NO: 2824395 - RNA, 19 nt, Artificial Sequence
  Description of Artificial Sequence: Synthetic oligonucleotide
cucgccguggacguaguag

SEQ ID NO: 2824396 - RNA, 19 nt, Artificial Sequence
  Description of Artificial Sequence: Synthetic oligonucleotide
cugugguagagggagguuc

SEQ ID NO: 2824397 - RNA, 19 nt, Artificial Sequence
  Description of Artificial Sequence: Synthetic oligonucleotide
uccuucuccugugguagag

SEQ ID NO: 2824398 - RNA, 19 nt, Artificial Sequence
  Description of Artificial Sequence: Synthetic oligonucleotide
gcggcagcuggccaggucg

SEQ ID NO: 2824399 - RNA, 19 nt, Artificial Sequence
  Description of Artificial Sequence: Synthetic oligonucleotide
ccugcucacucucacagag

SEQ ID NO: 2824400 - RNA, 19 nt, Artificial Sequence
  Description of Artificial Sequence: Synthetic oligonucleotide
ugguagagggagguuccag

SEQ ID NO: 2824401 - RNA, 19 nt, Artificial Sequence
  Description of Artificial Sequence: Synthetic oligonucleotide
ugugcagccuggacccgug

SEQ ID NO: 2824402 - RNA, 19 nt, Artificial Sequence
  Description of Artificial Sequence: Synthetic oligonucleotide
cugcucacucucacagagg

SEQ ID NO: 2824403 - RNA, 19 nt, Artificial Sequence
  Description of Artificial Sequence: Synthetic oligonucleotide
guuagagcaggaaaugccu

SEQ ID NO: 2824404 - RNA, 19 nt, Artificial Sequence
  Description of Artificial Sequence: Synthetic oligonucleotide
aagguccauaccagggugu

SEQ ID NO: 2824405 - RNA, 19 nt, Artificial Sequence
  Description of Artificial Sequence: Synthetic oligonucleotide
gggcaauaggcaguuagag

SEQ ID NO: 2824406 - RNA, 19 nt, Artificial Sequence
  Description of Artificial Sequence: Synthetic oligonucleotide
agaccagguuagccugugg

SEQ ID NO: 2824407 - RNA, 19 nt, Artificial Sequence
  Description of Artificial Sequence: Synthetic oligonucleotide
uuguccuucuccuguggua

SEQ ID NO: 2824408 - RNA, 19 nt, Artificial Sequence
  Description of Artificial Sequence: Synthetic oligonucleotide
guguaggaugugccuggcg

SEQ ID NO: 2824409 - RNA, 19 nt, Artificial Sequence
  Description of Artificial Sequence: Synthetic oligonucleotide
acucucacagagggaucgc

SEQ ID NO: 2824410 - RNA, 19 nt, Artificial Sequence
  Description of Artificial Sequence: Synthetic oligonucleotide
uccugugguagagggaggu

SEQ ID NO: 2824411 - RNA, 19 nt, Artificial Sequence
  Description of Artificial Sequence: Synthetic oligonucleotide
guccaggucaagggcaggg

SEQ ID NO: 2824412 - RNA, 19 nt, Artificial Sequence
  Description of Artificial Sequence: Synthetic oligonucleotide
gcagagcucccacucagag

SEQ ID NO: 2824413 - RNA, 19 nt, Artificial Sequence
  Description of Artificial Sequence: Synthetic oligonucleotide
uccaggucagguggaagcu

SEQ ID NO: 2824414 - RNA, 19 nt, Artificial Sequence
  Description of Artificial Sequence: Synthetic oligonucleotide
ugcggcucuccucccauuc

SEQ ID NO: 2824415 - RNA, 19 nt, Artificial Sequence
  Description of Artificial Sequence: Synthetic oligonucleotide
guagcuuuggagacauauc

SEQ ID NO: 2824416 - RNA, 19 nt, Artificial Sequence
  Description of Artificial Sequence: Synthetic oligonucleotide
agcuuuggagacauauccu

SEQ ID NO: 2824417 - RNA, 19 nt, Artificial Sequence
  Description of Artificial Sequence: Synthetic oligonucleotide
uaggaugugccuggcgcug

SEQ ID NO: 2824418 - RNA, 19 nt, Artificial Sequence
  Description of Artificial Sequence: Synthetic oligonucleotide
acguaguagugguguagga

SEQ ID NO: 2824419 - RNA, 19 nt, Artificial Sequence
  Description of Artificial Sequence: Synthetic oligonucleotide
ggaagcuaguccaagucca

SEQ ID NO: 2824420 - RNA, 19 nt, Artificial Sequence
  Description of Artificial Sequence: Synthetic oligonucleotide
gagacauauccuggcacuc

SEQ ID NO: 2824421 - RNA, 19 nt, Artificial Sequence
  Description of Artificial Sequence: Synthetic oligonucleotide
ugcgguugcuugucacuca

SEQ ID NO: 2824422 - RNA, 19 nt, Artificial Sequence
  Description of Artificial Sequence: Synthetic oligonucleotide
aggaugugccuggcgcugc

SEQ ID NO: 2824423 - RNA, 19 nt, Artificial Sequence
  Description of Artificial Sequence: Synthetic oligonucleotide
ggaucgcugggccucgggg

SEQ ID NO: 2824424 - RNA, 19 nt, Artificial Sequence
  Description of Artificial Sequence: Synthetic oligonucleotide
agggugugcuucugugcag

SEQ ID NO: 2824425 - RNA, 19 nt, Artificial Sequence
  Description of Artificial Sequence: Synthetic oligonucleotide
cuugucacucaucacuugu

SEQ ID NO: 2824426 - RNA, 19 nt, Artificial Sequence
  Description of Artificial Sequence: Synthetic oligonucleotide
uaggcaguuagagcaggaa

SEQ ID NO: 2824427 - RNA, 19 nt, Artificial Sequence
  Description of Artificial Sequence: Synthetic oligonucleotide
uugcgguugcuugucacuc

SEQ ID NO: 2824428 - RNA, 19 nt, Artificial Sequence
  Description of Artificial Sequence: Synthetic oligonucleotide
ugugccuggcgcugcggca

SEQ ID NO: 2824429 - RNA, 19 nt, Artificial Sequence
  Description of Artificial Sequence: Synthetic oligonucleotide
cacuuguccuucuccugug

SEQ ID NO: 2824430 - RNA, 19 nt, Artificial Sequence
  Description of Artificial Sequence: Synthetic oligonucleotide
ucacucucacagagggauc

SEQ ID NO: 2824431 - RNA, 19 nt, Artificial Sequence
  Description of Artificial Sequence: Synthetic oligonucleotide
guagaccucgcagggccgg

SEQ ID NO: 2824432 - RNA, 19 nt, Artificial Sequence
  Description of Artificial Sequence: Synthetic oligonucleotide
aucgcugggccucggggcu

SEQ ID NO: 2824433 - RNA, 19 nt, Artificial Sequence
  Description of Artificial Sequence: Synthetic oligonucleotide
guuagccugugggcaauag

SEQ ID NO: 2824434 - RNA, 19 nt, Artificial Sequence
  Description of Artificial Sequence: Synthetic oligonucleotide
ggggcugcggcucuccucc

SEQ ID NO: 2824435 - RNA, 19 nt, Artificial Sequence
  Description of Artificial Sequence: Synthetic oligonucleotide
aggguugcgguugcuuguc

SEQ ID NO: 2824436 - RNA, 19 nt, Artificial Sequence
  Description of Artificial Sequence: Synthetic oligonucleotide
ucccacucagagcgguaga

SEQ ID NO: 2824437 - RNA, 19 nt, Artificial Sequence
  Description of Artificial Sequence: Synthetic oligonucleotide
uaccagggugugcuucugu

SEQ ID NO: 2824438 - RNA, 19 nt, Artificial Sequence
  Description of Artificial Sequence: Synthetic oligonucleotide
acucaucacuuguccuucu

SEQ ID NO: 2824439 - RNA, 19 nt, Artificial Sequence
  Description of Artificial Sequence: Synthetic oligonucleotide
agccuggacccgugccugc

SEQ ID NO: 2824440 - RNA, 19 nt, Artificial Sequence
  Description of Artificial Sequence: Synthetic oligonucleotide
uucgcggcagcuggccagg

SEQ ID NO: 2824441 - RNA, 19 nt, Artificial Sequence
  Description of Artificial Sequence: Synthetic oligonucleotide
agguggaagcuaguccaag

SEQ ID NO: 2824442 - RNA, 19 nt, Artificial Sequence
  Description of Artificial Sequence: Synthetic oligonucleotide
acucagagcgguagaccuc

SEQ ID NO: 2824443 - RNA, 19 nt, Artificial Sequence
  Description of Artificial Sequence: Synthetic oligonucleotide
ccuuccucuguguuccagg

SEQ ID NO: 2824444 - RNA, 19 nt, Artificial Sequence
  Description of Artificial Sequence: Synthetic oligonucleotide
uuccucuguguuccagguc

SEQ ID NO: 2824445 - RNA, 19 nt, Artificial Sequence
  Description of Artificial Sequence: Synthetic oligonucleotide
ccucaagguccauaccagg

SEQ ID NO: 2824446 - RNA, 19 nt, Artificial Sequence
  Description of Artificial Sequence: Synthetic oligonucleotide
cucccacucagagcgguag

SEQ ID NO: 2824447 - RNA, 19 nt, Artificial Sequence
  Description of Artificial Sequence: Synthetic oligonucleotide
cacucagagcgguagaccu

SEQ ID NO: 2824448 - RNA, 19 nt, Artificial Sequence
  Description of Artificial Sequence: Synthetic oligonucleotide
cacucaucacuuguccuuc

SEQ ID NO: 2824449 - RNA, 19 nt, Artificial Sequence
  Description of Artificial Sequence: Synthetic oligonucleotide
cuccugugguagagggagg

SEQ ID NO: 2824450 - RNA, 19 nt, Artificial Sequence
  Description of Artificial Sequence: Synthetic oligonucleotide
gcaggguugcgguugcuug

SEQ ID NO: 2824451 - RNA, 19 nt, Artificial Sequence
  Description of Artificial Sequence: Synthetic oligonucleotide
caucacuuguccuucuccu

SEQ ID NO: 2824452 - RNA, 19 nt, Artificial Sequence
  Description of Artificial Sequence: Synthetic oligonucleotide
ggcgcugcggcagagcucc

SEQ ID NO: 2824453 - RNA, 19 nt, Artificial Sequence
  Description of Artificial Sequence: Synthetic oligonucleotide
cuggccaggucgcgcagcc

SEQ ID NO: 2824454 - RNA, 19 nt, Artificial Sequence
  Description of Artificial Sequence: Synthetic oligonucleotide
agguccauaccagggugug

SEQ ID NO: 2824455 - RNA, 19 nt, Artificial Sequence
  Description of Artificial Sequence: Synthetic oligonucleotide
guuccaggucagguggaag

SEQ ID NO: 2824456 - RNA, 19 nt, Artificial Sequence
  Description of Artificial Sequence: Synthetic oligonucleotide
uggacguaguaguggugua

SEQ ID NO: 2824457 - RNA, 19 nt, Artificial Sequence
  Description of Artificial Sequence: Synthetic oligonucleotide
gaugugccuggcgcugcgg

SEQ ID NO: 2824458 - RNA, 19 nt, Artificial Sequence
  Description of Artificial Sequence: Synthetic oligonucleotide
ggaggcugccagcugccgg

SEQ ID NO: 2824459 - RNA, 19 nt, Artificial Sequence
  Description of Artificial Sequence: Synthetic oligonucleotide
cugccugcaguccggccgc

SEQ ID NO: 2824460 - RNA, 19 nt, Artificial Sequence
  Description of Artificial Sequence: Synthetic oligonucleotide
gcucuccucccauucgcgg

SEQ ID NO: 2824461 - RNA, 19 nt, Artificial Sequence
  Description of Artificial Sequence: Synthetic oligonucleotide
cucacucucacagagggau

SEQ ID NO: 2824462 - RNA, 19 nt, Artificial Sequence
  Description of Artificial Sequence: Synthetic oligonucleotide
uguuccaggucagguggaa

SEQ ID NO: 2824463 - RNA, 19 nt, Artificial Sequence
  Description of Artificial Sequence: Synthetic oligonucleotide
guuuugagacagguuucuc

SEQ ID NO: 2824464 - RNA, 19 nt, Artificial Sequence
  Description of Artificial Sequence: Synthetic oligonucleotide
ucugugcagccuggacccg

SEQ ID NO: 2824465 - RNA, 19 nt, Artificial Sequence
  Description of Artificial Sequence: Synthetic oligonucleotide
uccaggucaagggcagggu

SEQ ID NO: 2824466 - RNA, 19 nt, Artificial Sequence
  Description of Artificial Sequence: Synthetic oligonucleotide
gagacagguuucucugugu

SEQ ID NO: 2824467 - RNA, 19 nt, Artificial Sequence
  Description of Artificial Sequence: Synthetic oligonucleotide
cucuguguuccaggucagg

SEQ ID NO: 2824468 - RNA, 19 nt, Artificial Sequence
  Description of Artificial Sequence: Synthetic oligonucleotide
gucacucaucacuuguccu

SEQ ID NO: 2824469 - RNA, 19 nt, Artificial Sequence
  Description of Artificial Sequence: Synthetic oligonucleotide
gacccgugccugcucacuc

SEQ ID NO: 2824470 - RNA, 19 nt, Artificial Sequence
  Description of Artificial Sequence: Synthetic oligonucleotide
aguccggccgcucgccgug

SEQ ID NO: 2824471 - RNA, 19 nt, Artificial Sequence
  Description of Artificial Sequence: Synthetic oligonucleotide
ugccagcugccggcgaccg

SEQ ID NO: 2824472 - RNA, 19 nt, Artificial Sequence
  Description of Artificial Sequence: Synthetic oligonucleotide
gcagccacugccugcaguc

SEQ ID NO: 2824473 - RNA, 19 nt, Artificial Sequence
  Description of Artificial Sequence: Synthetic oligonucleotide
cugccucaagguccauacc

SEQ ID NO: 2824474 - RNA, 19 nt, Artificial Sequence
  Description of Artificial Sequence: Synthetic oligonucleotide
ucagagcgguagaccucgc

SEQ ID NO: 2824475 - RNA, 19 nt, Artificial Sequence
  Description of Artificial Sequence: Synthetic oligonucleotide
gguugcgguugcuugucac

SEQ ID NO: 2824476 - RNA, 19 nt, Artificial Sequence
  Description of Artificial Sequence: Synthetic oligonucleotide
guggacguaguaguggugu

SEQ ID NO: 2824477 - RNA, 19 nt, Artificial Sequence
  Description of Artificial Sequence: Synthetic oligonucleotide
guccauaccagggugugcu

SEQ ID NO: 2824478 - RNA, 19 nt, Artificial Sequence
  Description of Artificial Sequence: Synthetic oligonucleotide
gggagguuccagucugcag

SEQ ID NO: 2824479 - RNA, 19 nt, Artificial Sequence
  Description of Artificial Sequence: Synthetic oligonucleotide
uagaccucgcagggccggg

SEQ ID NO: 2824480 - RNA, 19 nt, Artificial Sequence
  Description of Artificial Sequence: Synthetic oligonucleotide
aguccaaguccaggucaag

SEQ ID NO: 2824481 - RNA, 19 nt, Artificial Sequence
  Description of Artificial Sequence: Synthetic oligonucleotide
guaggaugugccuggcgcu

SEQ ID NO: 2824482 - RNA, 19 nt, Artificial Sequence
  Description of Artificial Sequence: Synthetic oligonucleotide
guugcgguugcuugucacu

SEQ ID NO: 2824483 - RNA, 19 nt, Artificial Sequence
  Description of Artificial Sequence: Synthetic oligonucleotide
gccguggacguaguagugg

SEQ ID NO: 2824484 - RNA, 19 nt, Artificial Sequence
  Description of Artificial Sequence: Synthetic oligonucleotide
aguccaggucaagggcagg

SEQ ID NO: 2824485 - RNA, 19 nt, Artificial Sequence
  Description of Artificial Sequence: Synthetic oligonucleotide
gagggaucgcugggccucg

SEQ ID NO: 2824486 - RNA, 19 nt, Artificial Sequence
  Description of Artificial Sequence: Synthetic oligonucleotide
ccagggugugcuucugugc

SEQ ID NO: 2824487 - RNA, 19 nt, Artificial Sequence
  Description of Artificial Sequence: Synthetic oligonucleotide
ucgcgcagccacugccugc

SEQ ID NO: 2824488 - RNA, 19 nt, Artificial Sequence
  Description of Artificial Sequence: Synthetic oligonucleotide
gccucaagguccauaccag

SEQ ID NO: 2824489 - RNA, 19 nt, Artificial Sequence
  Description of Artificial Sequence: Synthetic oligonucleotide
ugcaguccggccgcucgcc

SEQ ID NO: 2824490 - RNA, 19 nt, Artificial Sequence
  Description of Artificial Sequence: Synthetic oligonucleotide
cauaccagggugugcuucu

SEQ ID NO: 2824491 - RNA, 19 nt, Artificial Sequence
  Description of Artificial Sequence: Synthetic oligonucleotide
ggugugcuucugugcagcc

SEQ ID NO: 2824492 - RNA, 19 nt, Artificial Sequence
  Description of Artificial Sequence: Synthetic oligonucleotide
acccgugccugcucacucu

SEQ ID NO: 2824493 - RNA, 19 nt, Artificial Sequence
  Description of Artificial Sequence: Synthetic oligonucleotide
gucgcgcagccacugccug

SEQ ID NO: 2824494 - RNA, 19 nt, Artificial Sequence
  Description of Artificial Sequence: Synthetic oligonucleotide
ccugcaguccggccgcucg

SEQ ID NO: 2824495 - RNA, 19 nt, Artificial Sequence
  Description of Artificial Sequence: Synthetic oligonucleotide
agggagguuccagucugca

SEQ ID NO: 2824496 - RNA, 19 nt, Artificial Sequence
  Description of Artificial Sequence: Synthetic oligonucleotide
gagggagguuccagucugc

SEQ ID NO: 2824497 - RNA, 19 nt, Artificial Sequence
  Description of Artificial Sequence: Synthetic oligonucleotide
cuuccucuguguuccaggu

SEQ ID NO: 2824498 - RNA, 19 nt, Artificial Sequence
  Description of Artificial Sequence: Synthetic oligonucleotide
ggaugugccuggcgcugcg

SEQ ID NO: 2824499 - RNA, 19 nt, Artificial Sequence
  Description of Artificial Sequence: Synthetic oligonucleotide
gguagagggagguuccagu

SEQ ID NO: 2824500 - RNA, 19 nt, Artificial Sequence
  Description of Artificial Sequence: Synthetic oligonucleotide
cgguagaccucgcagggcc

SEQ ID NO: 2824501 - RNA, 19 nt, Artificial Sequence
  Description of Artificial Sequence: Synthetic oligonucleotide
gugccuggcgcugcggcag

SEQ ID NO: 2824502 - RNA, 19 nt, Artificial Sequence
  Description of Artificial Sequence: Synthetic oligonucleotide
ggccaggucgcgcagccac

SEQ ID NO: 2824503 - RNA, 19 nt, Artificial Sequence
  Description of Artificial Sequence: Synthetic oligonucleotide
ugcuucugugcagccugga

SEQ ID NO: 2824504 - RNA, 19 nt, Artificial Sequence
  Description of Artificial Sequence: Synthetic oligonucleotide
agguuccagucugcagggg

SEQ ID NO: 2824505 - RNA, 19 nt, Artificial Sequence
  Description of Artificial Sequence: Synthetic oligonucleotide
gcuucugugcagccuggac

SEQ ID NO: 2824506 - RNA, 19 nt, Artificial Sequence
  Description of Artificial Sequence: Synthetic oligonucleotide
agaccucgcagggccgggg

SEQ ID NO: 2824507 - RNA, 19 nt, Artificial Sequence
  Description of Artificial Sequence: Synthetic oligonucleotide
cugcaguccggccgcucgc

SEQ ID NO: 2824508 - RNA, 19 nt, Artificial Sequence
  Description of Artificial Sequence: Synthetic oligonucleotide
ggcaguuagagcaggaaau

SEQ ID NO: 2824509 - RNA, 19 nt, Artificial Sequence
  Description of Artificial Sequence: Synthetic oligonucleotide
gguagaccucgcagggccg

SEQ ID NO: 2824510 - RNA, 19 nt, Artificial Sequence
  Description of Artificial Sequence: Synthetic oligonucleotide
cagguuagccugugggcaa

SEQ ID NO: 2824511 - RNA, 19 nt, Artificial Sequence
  Description of Artificial Sequence: Synthetic oligonucleotide
agcucccacucagagcggu

SEQ ID NO: 2824512 - RNA, 19 nt, Artificial Sequence
  Description of Artificial Sequence: Synthetic oligonucleotide
cucgcagggccggggaggc

SEQ ID NO: 2824513 - RNA, 19 nt, Artificial Sequence
  Description of Artificial Sequence: Synthetic oligonucleotide
cucccauucgcggcagcug

SEQ ID NO: 2824514 - RNA, 19 nt, Artificial Sequence
  Description of Artificial Sequence: Synthetic oligonucleotide
gggugugcuucugugcagc

SEQ ID NO: 2824515 - RNA, 19 nt, Artificial Sequence
  Description of Artificial Sequence: Synthetic oligonucleotide
gguggaagcuaguccaagu

SEQ ID NO: 2824516 - RNA, 19 nt, Artificial Sequence
  Description of Artificial Sequence: Synthetic oligonucleotide
ggucagguggaagcuaguc

SEQ ID NO: 2824517 - RNA, 19 nt, Artificial Sequence
  Description of Artificial Sequence: Synthetic oligonucleotide
cacugccugcaguccggcc

SEQ ID NO: 2824518 - RNA, 19 nt, Artificial Sequence
  Description of Artificial Sequence: Synthetic oligonucleotide
auaccagggugugcuucug

SEQ ID NO: 2824519 - RNA, 19 nt, Artificial Sequence
  Description of Artificial Sequence: Synthetic oligonucleotide
uccauaccagggugugcuu

SEQ ID NO: 2824520 - RNA, 19 nt, Artificial Sequence
  Description of Artificial Sequence: Synthetic oligonucleotide
gccggcgaccgccaugucc

SEQ ID NO: 2824521 - RNA, 19 nt, Artificial Sequence
  Description of Artificial Sequence: Synthetic oligonucleotide
uccucccauucgcggcagc

SEQ ID NO: 2824522 - RNA, 19 nt, Artificial Sequence
  Description of Artificial Sequence: Synthetic oligonucleotide
ccagcugccggcgaccgcc

SEQ ID NO: 2824523 - RNA, 19 nt, Artificial Sequence
  Description of Artificial Sequence: Synthetic oligonucleotide
gcggcucuccucccauucg

SEQ ID NO: 2824524 - RNA, 19 nt, Artificial Sequence
  Description of Artificial Sequence: Synthetic oligonucleotide
ggcucuccucccauucgcg

SEQ ID NO: 2824525 - RNA, 19 nt, Artificial Sequence
  Description of Artificial Sequence: Synthetic oligonucleotide
gaccucgcagggccgggga

SEQ ID NO: 2824526 - RNA, 19 nt, Artificial Sequence
  Description of Artificial Sequence: Synthetic oligonucleotide
cuuguccuucuccuguggu

SEQ ID NO: 2824527 - RNA, 19 nt, Artificial Sequence
  Description of Artificial Sequence: Synthetic oligonucleotide
gguuuugagacagguuucu

SEQ ID NO: 2824528 - RNA, 19 nt, Artificial Sequence
  Description of Artificial Sequence: Synthetic oligonucleotide
cuguguagcuuuggagaca

SEQ ID NO: 2824529 - RNA, 19 nt, Artificial Sequence
  Description of Artificial Sequence: Synthetic oligonucleotide
cuggacccgugccugcuca

SEQ ID NO: 2824530 - RNA, 19 nt, Artificial Sequence
  Description of Artificial Sequence: Synthetic oligonucleotide
gagcaggaaaugccuuccu

SEQ ID NO: 2824531 - RNA, 19 nt, Artificial Sequence
  Description of Artificial Sequence: Synthetic oligonucleotide
caggucgcgcagccacugc

SEQ ID NO: 2824532 - RNA, 19 nt, Artificial Sequence
  Description of Artificial Sequence: Synthetic oligonucleotide
cagccuggacccgugccug

SEQ ID NO: 2824533 - RNA, 19 nt, Artificial Sequence
  Description of Artificial Sequence: Synthetic oligonucleotide
gagcucccacucagagcgg

SEQ ID NO: 2824534 - RNA, 19 nt, Artificial Sequence
  Description of Artificial Sequence: Synthetic oligonucleotide
cagccacugccugcagucc

SEQ ID NO: 2824535 - RNA, 19 nt, Artificial Sequence
  Description of Artificial Sequence: Synthetic oligonucleotide
cauucgcggcagcuggcca

SEQ ID NO: 2824536 - RNA, 19 nt, Artificial Sequence
  Description of Artificial Sequence: Synthetic oligonucleotide
gugccugcucacucucaca

SEQ ID NO: 2824537 - RNA, 19 nt, Artificial Sequence
  Description of Artificial Sequence: Synthetic oligonucleotide
gguguaggaugugccuggc

SEQ ID NO: 2824538 - RNA, 19 nt, Artificial Sequence
  Description of Artificial Sequence: Synthetic oligonucleotide
cagcuggccaggucgcgca

SEQ ID NO: 2824539 - RNA, 19 nt, Artificial Sequence
  Description of Artificial Sequence: Synthetic oligonucleotide
ccacucagagcgguagacc

SEQ ID NO: 2824540 - RNA, 19 nt, Artificial Sequence
  Description of Artificial Sequence: Synthetic oligonucleotide
ccggcgaccgccaugucca

SEQ ID NO: 2824541 - RNA, 19 nt, Artificial Sequence
  Description of Artificial Sequence: Synthetic oligonucleotide
ccagguuagccugugggca

SEQ ID NO: 2824542 - RNA, 19 nt, Artificial Sequence
  Description of Artificial Sequence: Synthetic oligonucleotide
guccuucuccugugguaga

SEQ ID NO: 2824543 - RNA, 19 nt, Artificial Sequence
  Description of Artificial Sequence: Synthetic oligonucleotide
cagguggaagcuaguccaa

SEQ ID NO: 2824544 - RNA, 19 nt, Artificial Sequence
  Description of Artificial Sequence: Synthetic oligonucleotide
gggaucgcugggccucggg

SEQ ID NO: 2824545 - RNA, 19 nt, Artificial Sequence
  Description of Artificial Sequence: Synthetic oligonucleotide
uggcgcugcggcagagcuc

SEQ ID NO: 2824546 - RNA, 19 nt, Artificial Sequence
  Description of Artificial Sequence: Synthetic oligonucleotide
cagagcgguagaccucgca

SEQ ID NO: 2824547 - RNA, 19 nt, Artificial Sequence
  Description of Artificial Sequence: Synthetic oligonucleotide
ugccuggcgcugcggcaga

SEQ ID NO: 2824548 - RNA, 19 nt, Artificial Sequence
  Description of Artificial Sequence: Synthetic oligonucleotide
gggccucugccucaagguc

SEQ ID NO: 2824549 - RNA, 19 nt, Artificial Sequence
  Description of Artificial Sequence: Synthetic oligonucleotide
cugccagcugccggcgacc

SEQ ID NO: 2824550 - RNA, 19 nt, Artificial Sequence
  Description of Artificial Sequence: Synthetic oligonucleotide
agguuagccugugggcaau

SEQ ID NO: 2824551 - RNA, 19 nt, Artificial Sequence
  Description of Artificial Sequence: Synthetic oligonucleotide
gggccggggaggcugccag

SEQ ID NO: 2824552 - RNA, 19 nt, Artificial Sequence
  Description of Artificial Sequence: Synthetic oligonucleotide
gcugccagcugccggcgac

SEQ ID NO: 2824553 - RNA, 19 nt, Artificial Sequence
  Description of Artificial Sequence: Synthetic oligonucleotide
gguccauaccagggugugc

SEQ ID NO: 2824554 - RNA, 19 nt, Artificial Sequence
  Description of Artificial Sequence: Synthetic oligonucleotide
gugcagccuggacccgugc

SEQ ID NO: 2824555 - RNA, 19 nt, Artificial Sequence
  Description of Artificial Sequence: Synthetic oligonucleotide
ccucuguguuccaggucag

SEQ ID NO: 2824556 - RNA, 19 nt, Artificial Sequence
  Description of Artificial Sequence: Synthetic oligonucleotide
ugccuuccucuguguucca

SEQ ID NO: 2824557 - RNA, 19 nt, Artificial Sequence
  Description of Artificial Sequence: Synthetic oligonucleotide
cccacucagagcgguagac

SEQ ID NO: 2824558 - RNA, 19 nt, Artificial Sequence
  Description of Artificial Sequence: Synthetic oligonucleotide
gcaguccggccgcucgccg

SEQ ID NO: 2824559 - RNA, 19 nt, Artificial Sequence
  Description of Artificial Sequence: Synthetic oligonucleotide
caggguugcgguugcuugu

SEQ ID NO: 2824560 - RNA, 19 nt, Artificial Sequence
  Description of Artificial Sequence: Synthetic oligonucleotide
gugguagagggagguucca

SEQ ID NO: 2824561 - RNA, 19 nt, Artificial Sequence
  Description of Artificial Sequence: Synthetic oligonucleotide
cuggcgcugcggcagagcu

SEQ ID NO: 2824562 - RNA, 19 nt, Artificial Sequence
  Description of Artificial Sequence: Synthetic oligonucleotide
ccauaccagggugugcuuc

SEQ ID NO: 2824563 - RNA, 19 nt, Artificial Sequence
  Description of Artificial Sequence: Synthetic oligonucleotide
ccauucgcggcagcuggcc

SEQ ID NO: 2824564 - RNA, 19 nt, Artificial Sequence
  Description of Artificial Sequence: Synthetic oligonucleotide
guguuccaggucaggugga

SEQ ID NO: 2824565 - RNA, 19 nt, Artificial Sequence
  Description of Artificial Sequence: Synthetic oligonucleotide
uccggccgcucgccgugga

SEQ ID NO: 2824566 - RNA, 19 nt, Artificial Sequence
  Description of Artificial Sequence: Synthetic oligonucleotide
ugugggcaauaggcaguua

SEQ ID NO: 2824567 - RNA, 19 nt, Artificial Sequence
  Description of Artificial Sequence: Synthetic oligonucleotide
aggucagguggaagcuagu

SEQ ID NO: 2824568 - RNA, 19 nt, Artificial Sequence
  Description of Artificial Sequence: Synthetic oligonucleotide
ggggccucugccucaaggu

SEQ ID NO: 2824569 - RNA, 19 nt, Artificial Sequence
  Description of Artificial Sequence: Synthetic oligonucleotide
ggucaagggcaggguugcg

SEQ ID NO: 2824570 - RNA, 19 nt, Artificial Sequence
  Description of Artificial Sequence: Synthetic oligonucleotide
cuccucccauucgcggcag

SEQ ID NO: 2824571 - RNA, 19 nt, Artificial Sequence
  Description of Artificial Sequence: Synthetic oligonucleotide
gcagcuggccaggucgcgc

SEQ ID NO: 2824572 - RNA, 19 nt, Artificial Sequence
  Description of Artificial Sequence: Synthetic oligonucleotide
cgugccugcucacucucac

SEQ ID NO: 2824573 - RNA, 19 nt, Artificial Sequence
  Description of Artificial Sequence: Synthetic oligonucleotide
agggaucgcugggccucgg

SEQ ID NO: 2824574 - RNA, 19 nt, Artificial Sequence
  Description of Artificial Sequence: Synthetic oligonucleotide
ccucgcagggccggggagg

SEQ ID NO: 2824575 - RNA, 19 nt, Artificial Sequence
  Description of Artificial Sequence: Synthetic oligonucleotide
ucgcugggccucggggcug

SEQ ID NO: 2824576 - RNA, 19 nt, Artificial Sequence
  Description of Artificial Sequence: Synthetic oligonucleotide
gcugccggcgaccgccaug

SEQ ID NO: 2824577 - RNA, 19 nt, Artificial Sequence
  Description of Artificial Sequence: Synthetic oligonucleotide
ggcagcuggccaggucgcg

SEQ ID NO: 2824578 - RNA, 19 nt, Artificial Sequence
  Description of Artificial Sequence: Synthetic oligonucleotide
cggcagagcucccacucag

SEQ ID NO: 2824579 - RNA, 19 nt, Artificial Sequence
  Description of Artificial Sequence: Synthetic oligonucleotide
cucucacagagggaucgcu

SEQ ID NO: 2824580 - RNA, 19 nt, Artificial Sequence
  Description of Artificial Sequence: Synthetic oligonucleotide
gccuuccucuguguuccag

SEQ ID NO: 2824581 - RNA, 19 nt, Artificial Sequence
  Description of Artificial Sequence: Synthetic oligonucleotide
gggaggcugccagcugccg

SEQ ID NO: 2824582 - RNA, 19 nt, Artificial Sequence
  Description of Artificial Sequence: Synthetic oligonucleotide
cggcucuccucccauucgc

SEQ ID NO: 2824583 - RNA, 19 nt, Artificial Sequence
  Description of Artificial Sequence: Synthetic oligonucleotide
uggccaggucgcgcagcca

SEQ ID NO: 2824584 - RNA, 19 nt, Artificial Sequence
  Description of Artificial Sequence: Synthetic oligonucleotide
cguggacguaguaguggug

SEQ ID NO: 2824585 - RNA, 19 nt, Artificial Sequence
  Description of Artificial Sequence: Synthetic oligonucleotide
cagagggaucgcugggccu

SEQ ID NO: 2824586 - RNA, 19 nt, Artificial Sequence
  Description of Artificial Sequence: Synthetic oligonucleotide
gcagccuggacccgugccu

SEQ ID NO: 2824587 - RNA, 19 nt, Artificial Sequence
  Description of Artificial Sequence: Synthetic oligonucleotide
gccugcucacucucacaga

SEQ ID NO: 2824588 - RNA, 19 nt, Artificial Sequence
  Description of Artificial Sequence: Synthetic oligonucleotide
gcgguagaccucgcagggc

SEQ ID NO: 2824589 - RNA, 19 nt, Artificial Sequence
  Description of Artificial Sequence: Synthetic oligonucleotide
gcggcagagcucccacuca

SEQ ID NO: 2824590 - RNA, 19 nt, Artificial Sequence
  Description of Artificial Sequence: Synthetic oligonucleotide
gccucugccucaaggucca

SEQ ID NO: 2824591 - RNA, 19 nt, Artificial Sequence
  Description of Artificial Sequence: Synthetic oligonucleotide
cugccggcgaccgccaugu

SEQ ID NO: 2824592 - RNA, 19 nt, Artificial Sequence
  Description of Artificial Sequence: Synthetic oligonucleotide
ggguugcgguugcuuguca

SEQ ID NO: 2824593 - RNA, 19 nt, Artificial Sequence
  Description of Artificial Sequence: Synthetic oligonucleotide
ggcagagcucccacucaga

SEQ ID NO: 2824594 - RNA, 19 nt, Artificial Sequence
  Description of Artificial Sequence: Synthetic oligonucleotide
ccaggucgcgcagccacug

SEQ ID NO: 2824595 - RNA, 19 nt, Artificial Sequence
  Description of Artificial Sequence: Synthetic oligonucleotide
guccggccgcucgccgugg

SEQ ID NO: 2824596 - RNA, 19 nt, Artificial Sequence
  Description of Artificial Sequence: Synthetic oligonucleotide
agggccggggaggcugcca

SEQ ID NO: 2824597 - RNA, 19 nt, Artificial Sequence
  Description of Artificial Sequence: Synthetic oligonucleotide
ccguggacguaguaguggu

SEQ ID NO: 2824598 - RNA, 19 nt, Artificial Sequence
  Description of Artificial Sequence: Synthetic oligonucleotide
ccgcucgccguggacguag

SEQ ID NO: 2824599 - RNA, 19 nt, Artificial Sequence
  Description of Artificial Sequence: Synthetic oligonucleotide
cccgugccugcucacucuc

SEQ ID NO: 2824600 - RNA, 19 nt, Artificial Sequence
  Description of Artificial Sequence: Synthetic oligonucleotide
gcucacucucacagaggga

SEQ ID NO: 2824601 - RNA, 19 nt, Artificial Sequence
  Description of Artificial Sequence: Synthetic oligonucleotide
agcugccggcgaccgccau

SEQ ID NO: 2824602 - RNA, 19 nt, Artificial Sequence
  Description of Artificial Sequence: Synthetic oligonucleotide
ggccggggaggcugccagc

SEQ ID NO: 2824603 - RNA, 19 nt, Artificial Sequence
  Description of Artificial Sequence: Synthetic oligonucleotide
gcgguugcuugucacucau

SEQ ID NO: 2824604 - RNA, 19 nt, Artificial Sequence
  Description of Artificial Sequence: Synthetic oligonucleotide
cgccguggacguaguagug

SEQ ID NO: 2824605 - RNA, 19 nt, Artificial Sequence
  Description of Artificial Sequence: Synthetic oligonucleotide
ugccugcaguccggccgcu

SEQ ID NO: 2824606 - RNA, 19 nt, Artificial Sequence
  Description of Artificial Sequence: Synthetic oligonucleotide
ucgcggcagcuggccaggu

SEQ ID NO: 2824607 - RNA, 19 nt, Artificial Sequence
  Description of Artificial Sequence: Synthetic oligonucleotide
cagcugccggcgaccgcca

SEQ ID NO: 2824608 - RNA, 19 nt, Artificial Sequence
  Description of Artificial Sequence: Synthetic oligonucleotide
caguccggccgcucgccgu

SEQ ID NO: 2824609 - RNA, 19 nt, Artificial Sequence
  Description of Artificial Sequence: Synthetic oligonucleotide
ccuggcgcugcggcagagc

SEQ ID NO: 2824610 - RNA, 19 nt, Artificial Sequence
  Description of Artificial Sequence: Synthetic oligonucleotide
ccuggacccgugccugcuc

SEQ ID NO: 2824611 - RNA, 19 nt, Artificial Sequence
  Description of Artificial Sequence: Synthetic oligonucleotide
cugugcagccuggacccgu

SEQ ID NO: 2824612 - RNA, 19 nt, Artificial Sequence
  Description of Artificial Sequence: Synthetic oligonucleotide
cggcagcuggccaggucgc

SEQ ID NO: 2824613 - RNA, 19 nt, Artificial Sequence
  Description of Artificial Sequence: Synthetic oligonucleotide
ugccggcgaccgccauguc

SEQ ID NO: 2824614 - RNA, 19 nt, Artificial Sequence
  Description of Artificial Sequence: Synthetic oligonucleotide
cgcagggccggggaggcug

SEQ ID NO: 2824615 - RNA, 19 nt, Artificial Sequence
  Description of Artificial Sequence: Synthetic oligonucleotide
cguaguagugguguaggau

SEQ ID NO: 2824616 - RNA, 19 nt, Artificial Sequence
  Description of Artificial Sequence: Synthetic oligonucleotide
caagggcaggguugcgguu

SEQ ID NO: 2824617 - RNA, 19 nt, Artificial Sequence
  Description of Artificial Sequence: Synthetic oligonucleotide
gccagcugccggcgaccgc

SEQ ID NO: 2824618 - RNA, 19 nt, Artificial Sequence
  Description of Artificial Sequence: Synthetic oligonucleotide
cagggccggggaggcugcc

SEQ ID NO: 2824619 - RNA, 19 nt, Artificial Sequence
  Description of Artificial Sequence: Synthetic oligonucleotide
gcagggccggggaggcugc

SEQ ID NO: 2824620 - RNA, 19 nt, Artificial Sequence
  Description of Artificial Sequence: Synthetic oligonucleotide
gguuagccugugggcaaua

SEQ ID NO: 2824621 - RNA, 19 nt, Artificial Sequence
  Description of Artificial Sequence: Synthetic oligonucleotide
ggccucggggcugcggcuc

SEQ ID NO: 2824622 - RNA, 19 nt, Artificial Sequence
  Description of Artificial Sequence: Synthetic oligonucleotide
cgguugcuugucacucauc

SEQ ID NO: 2824623 - RNA, 19 nt, Artificial Sequence
  Description of Artificial Sequence: Synthetic oligonucleotide
gcugcggcucuccucccau

SEQ ID NO: 2824624 - RNA, 19 nt, Artificial Sequence
  Description of Artificial Sequence: Synthetic oligonucleotide
ccaggucaagggcaggguu

SEQ ID NO: 2824625 - RNA, 19 nt, Artificial Sequence
  Description of Artificial Sequence: Synthetic oligonucleotide
gcgcagccacugccugcag

SEQ ID NO: 2824626 - RNA, 19 nt, Artificial Sequence
  Description of Artificial Sequence: Synthetic oligonucleotide
ccggggaggcugccagcug

SEQ ID NO: 2824627 - RNA, 19 nt, Artificial Sequence
  Description of Artificial Sequence: Synthetic oligonucleotide
guguagcuuuggagacaua

SEQ ID NO: 2824628 - RNA, 19 nt, Artificial Sequence
  Description of Artificial Sequence: Synthetic oligonucleotide
ccgugccugcucacucuca

SEQ ID NO: 2824629 - RNA, 19 nt, Artificial Sequence
  Description of Artificial Sequence: Synthetic oligonucleotide
ccaggucagguggaagcua

SEQ ID NO: 2824630 - RNA, 19 nt, Artificial Sequence
  Description of Artificial Sequence: Synthetic oligonucleotide
gccggggaggcugccagcu

SEQ ID NO: 2824631 - RNA, 19 nt, Artificial Sequence
  Description of Artificial Sequence: Synthetic oligonucleotide
gccuggcgcugcggcagag

SEQ ID NO: 2824632 - RNA, 19 nt, Artificial Sequence
  Description of Artificial Sequence: Synthetic oligonucleotide
cgcgcagccacugccugca

SEQ ID NO: 2824633 - RNA, 19 nt, Artificial Sequence
  Description of Artificial Sequence: Synthetic oligonucleotide
ccucccauucgcggcagcu

SEQ ID NO: 2824634 - RNA, 19 nt, Artificial Sequence
  Description of Artificial Sequence: Synthetic oligonucleotide
gcucgccguggacguagua

SEQ ID NO: 2824635 - RNA, 19 nt, Artificial Sequence
  Description of Artificial Sequence: Synthetic oligonucleotide
gcucccacucagagcggua

SEQ ID NO: 2824636 - RNA, 19 nt, Artificial Sequence
  Description of Artificial Sequence: Synthetic oligonucleotide
gcugggccucggggcugcg

SEQ ID NO: 2824637 - RNA, 19 nt, Artificial Sequence
  Description of Artificial Sequence: Synthetic oligonucleotide
cugcggcucuccucccauu

SEQ ID NO: 2824638 - RNA, 19 nt, Artificial Sequence
  Description of Artificial Sequence: Synthetic oligonucleotide
cgcggcagcuggccagguc

SEQ ID NO: 2824639 - RNA, 19 nt, Artificial Sequence
  Description of Artificial Sequence: Synthetic oligonucleotide
gggccucggggcugcggcu

SEQ ID NO: 2824640 - RNA, 19 nt, Artificial Sequence
  Description of Artificial Sequence: Synthetic oligonucleotide
gccuggacccgugccugcu

SEQ ID NO: 2824641 - RNA, 19 nt, Artificial Sequence
  Description of Artificial Sequence: Synthetic oligonucleotide
cgcagccacugccugcagu

SEQ ID NO: 2824642 - RNA, 19 nt, Artificial Sequence
  Description of Artificial Sequence: Synthetic oligonucleotide
ccugugguagagggagguu

SEQ ID NO: 2824643 - RNA, 19 nt, Artificial Sequence
  Description of Artificial Sequence: Synthetic oligonucleotide
gggcaggguugcgguugcu

SEQ ID NO: 2824644 - RNA, 19 nt, Artificial Sequence
  Description of Artificial Sequence: Synthetic oligonucleotide
gccgcucgccguggacgua

SEQ ID NO: 2824645 - RNA, 19 nt, Artificial Sequence
  Description of Artificial Sequence: Synthetic oligonucleotide
cgcucgccguggacguagu

SEQ ID NO: 2824646 - RNA, 19 nt, Artificial Sequence
  Description of Artificial Sequence: Synthetic oligonucleotide
ccucugccucaagguccau

SEQ ID NO: 2824647 - RNA, 19 nt, Artificial Sequence
  Description of Artificial Sequence: Synthetic oligonucleotide
uuuugcuggaucuagaagg

SEQ ID NO: 2824648 - RNA, 19 nt, Artificial Sequence
  Description of Artificial Sequence: Synthetic oligonucleotide
guaggaaagagucaaacag

SEQ ID NO: 2824649 - RNA, 19 nt, Artificial Sequence
  Description of Artificial Sequence: Synthetic oligonucleotide
uagaaccucacuuagguag

SEQ ID NO: 2824650 - RNA, 19 nt, Artificial Sequence
  Description of Artificial Sequence: Synthetic oligonucleotide
caggaugucaucuucaucc

SEQ ID NO: 2824651 - RNA, 19 nt, Artificial Sequence
  Description of Artificial Sequence: Synthetic oligonucleotide
cuugguacgaccuuuccgg

SEQ ID NO: 2824652 - RNA, 19 nt, Artificial Sequence
  Description of Artificial Sequence: Synthetic oligonucleotide
uaggaaagagucaaacagg

SEQ ID NO: 2824653 - RNA, 19 nt, Artificial Sequence
  Description of Artificial Sequence: Synthetic oligonucleotide
ucuagaaccucacuuaggu

SEQ ID NO: 2824654 - RNA, 19 nt, Artificial Sequence
  Description of Artificial Sequence: Synthetic oligonucleotide
auaaggaugggccaggcug

SEQ ID NO: 2824655 - RNA, 19 nt, Artificial Sequence
  Description of Artificial Sequence: Synthetic oligonucleotide
cugauuguugcuccgaucg

SEQ ID NO: 2824656 - RNA, 19 nt, Artificial Sequence
  Description of Artificial Sequence: Synthetic oligonucleotide
gacgauauaaggaugggcc

SEQ ID NO: 2824657 - RNA, 19 nt, Artificial Sequence
  Description of Artificial Sequence: Synthetic oligonucleotide
uuuccuuucagaguucugg

SEQ ID NO: 2824658 - RNA, 19 nt, Artificial Sequence
  Description of Artificial Sequence: Synthetic oligonucleotide
uuugcuggaucuagaaggg

SEQ ID NO: 2824659 - RNA, 19 nt, Artificial Sequence
  Description of Artificial Sequence: Synthetic oligonucleotide
gaaagagucaaacaggucu

SEQ ID NO: 2824660 - RNA, 19 nt, Artificial Sequence
  Description of Artificial Sequence: Synthetic oligonucleotide
ucagaguucuggaacuugg

SEQ ID NO: 2824661 - RNA, 19 nt, Artificial Sequence
  Description of Artificial Sequence: Synthetic oligonucleotide
acuuagguaggaaagaguc

SEQ ID NO: 2824662 - RNA, 19 nt, Artificial Sequence
  Description of Artificial Sequence: Synthetic oligonucleotide
ucuugguacgaccuuuccg

SEQ ID NO: 2824663 - RNA, 19 nt, Artificial Sequence
  Description of Artificial Sequence: Synthetic oligonucleotide
gaucgugcccuuuugcugg

SEQ ID NO: 2824664 - RNA, 19 nt, Artificial Sequence
  Description of Artificial Sequence: Synthetic oligonucleotide
ucuccuaaucucuccaagg

SEQ ID NO: 2824665 - RNA, 19 nt, Artificial Sequence
  Description of Artificial Sequence: Synthetic oligonucleotide
ucugccuucuccaaagucu

SEQ ID NO: 2824666 - RNA, 19 nt, Artificial Sequence
  Description of Artificial Sequence: Synthetic oligonucleotide
ucauccucuggguuuaggg

SEQ ID NO: 2824667 - RNA, 19 nt, Artificial Sequence
  Description of Artificial Sequence: Synthetic oligonucleotide
aaagagucaaacaggucuc

SEQ ID NO: 2824668 - RNA, 19 nt, Artificial Sequence
  Description of Artificial Sequence: Synthetic oligonucleotide
agucaaacaggucucuguc

SEQ ID NO: 2824669 - RNA, 19 nt, Artificial Sequence
  Description of Artificial Sequence: Synthetic oligonucleotide
uggguuuagggguugcugg

SEQ ID NO: 2824670 - RNA, 19 nt, Artificial Sequence
  Description of Artificial Sequence: Synthetic oligonucleotide
ucucuagaaccucacuuag

SEQ ID NO: 2824671 - RNA, 19 nt, Artificial Sequence
  Description of Artificial Sequence: Synthetic oligonucleotide
cucuccaagguccuaaucc

SEQ ID NO: 2824672 - RNA, 19 nt, Artificial Sequence
  Description of Artificial Sequence: Synthetic oligonucleotide
gucauacucauccaggaug

SEQ ID NO: 2824673 - RNA, 19 nt, Artificial Sequence
  Description of Artificial Sequence: Synthetic oligonucleotide
uuuggugucccuucucuag

SEQ ID NO: 2824674 - RNA, 19 nt, Artificial Sequence
  Description of Artificial Sequence: Synthetic oligonucleotide
aacuuggucagcagcuucc

SEQ ID NO: 2824675 - RNA, 19 nt, Artificial Sequence
  Description of Artificial Sequence: Synthetic oligonucleotide
ucugucuuugccuguaucu

SEQ ID NO: 2824676 - RNA, 19 nt, Artificial Sequence
  Description of Artificial Sequence: Synthetic oligonucleotide
gaguucuggaacuugguca

SEQ ID NO: 2824677 - RNA, 19 nt, Artificial Sequence
  Description of Artificial Sequence: Synthetic oligonucleotide
agaguucuggaacuugguc

SEQ ID NO: 2824678 - RNA, 19 nt, Artificial Sequence
  Description of Artificial Sequence: Synthetic oligonucleotide
aagguccuaauccauugcu

SEQ ID NO: 2824679 - RNA, 19 nt, Artificial Sequence
  Description of Artificial Sequence: Synthetic oligonucleotide
aacaggucucugucuuugc

SEQ ID NO: 2824680 - RNA, 19 nt, Artificial Sequence
  Description of Artificial Sequence: Synthetic oligonucleotide
uguaucuccuaaucucucc

SEQ ID NO: 2824681 - RNA, 19 nt, Artificial Sequence
  Description of Artificial Sequence: Synthetic oligonucleotide
acaggucucugucuuugcc

SEQ ID NO: 2824682 - RNA, 19 nt, Artificial Sequence
  Description of Artificial Sequence: Synthetic oligonucleotide
uccuguauccauugcuggg

SEQ ID NO: 2824683 - RNA, 19 nt, Artificial Sequence
  Description of Artificial Sequence: Synthetic oligonucleotide
uggaacuuggucagcagcu

SEQ ID NO: 2824684 - RNA, 19 nt, Artificial Sequence
  Description of Artificial Sequence: Synthetic oligonucleotide
uguccuguuuccauugcug

SEQ ID NO: 2824685 - RNA, 19 nt, Artificial Sequence
  Description of Artificial Sequence: Synthetic oligonucleotide
guuguugguggcaagguag

SEQ ID NO: 2824686 - RNA, 19 nt, Artificial Sequence
  Description of Artificial Sequence: Synthetic oligonucleotide
gauauaaggaugggccagg

SEQ ID NO: 2824687 - RNA, 19 nt, Artificial Sequence
  Description of Artificial Sequence: Synthetic oligonucleotide
ugcuggaucuagaagggcu

SEQ ID NO: 2824688 - RNA, 19 nt, Artificial Sequence
  Description of Artificial Sequence: Synthetic oligonucleotide
ucacuuagguaggaaagag

SEQ ID NO: 2824689 - RNA, 19 nt, Artificial Sequence
  Description of Artificial Sequence: Synthetic oligonucleotide
uuggucagcagcuuccucu

SEQ ID NO: 2824690 - RNA, 19 nt, Artificial Sequence
  Description of Artificial Sequence: Synthetic oligonucleotide
ccuaaucucuccaaggucc

SEQ ID NO: 2824691 - RNA, 19 nt, Artificial Sequence
  Description of Artificial Sequence: Synthetic oligonucleotide
gguccuaauccauugcugg

SEQ ID NO: 2824692 - RNA, 19 nt, Artificial Sequence
  Description of Artificial Sequence: Synthetic oligonucleotide
ugucuuugccuguaucucc

SEQ ID NO: 2824693 - RNA, 19 nt, Artificial Sequence
  Description of Artificial Sequence: Synthetic oligonucleotide
ucuccaagguccuaaucca

SEQ ID NO: 2824694 - RNA, 19 nt, Artificial Sequence
  Description of Artificial Sequence: Synthetic oligonucleotide
ucaaacaggucucugucuu

SEQ ID NO: 2824695 - RNA, 19 nt, Artificial Sequence
  Description of Artificial Sequence: Synthetic oligonucleotide
cauccucuggguuuagggg

SEQ ID NO: 2824696 - RNA, 19 nt, Artificial Sequence
  Description of Artificial Sequence: Synthetic oligonucleotide
auuguugcuccgaucgugc

SEQ ID NO: 2824697 - RNA, 19 nt, Artificial Sequence
  Description of Artificial Sequence: Synthetic oligonucleotide
cugggugugaugucugugg

SEQ ID NO: 2824698 - RNA, 19 nt, Artificial Sequence
  Description of Artificial Sequence: Synthetic oligonucleotide
uucucucuugguacgaccu

SEQ ID NO: 2824699 - RNA, 19 nt, Artificial Sequence
  Description of Artificial Sequence: Synthetic oligonucleotide
uucucuagaaccucacuua

SEQ ID NO: 2824700 - RNA, 19 nt, Artificial Sequence
  Description of Artificial Sequence: Synthetic oligonucleotide
augucuguggucuggccuc

SEQ ID NO: 2824701 - RNA, 19 nt, Artificial Sequence
  Description of Artificial Sequence: Synthetic oligonucleotide
uccuguuuccauugcuggg

SEQ ID NO: 2824702 - RNA, 19 nt, Artificial Sequence
  Description of Artificial Sequence: Synthetic oligonucleotide
uacucauccaggaugucau

SEQ ID NO: 2824703 - RNA, 19 nt, Artificial Sequence
  Description of Artificial Sequence: Synthetic oligonucleotide
uuuagggguugcugggagg

SEQ ID NO: 2824704 - RNA, 19 nt, Artificial Sequence
  Description of Artificial Sequence: Synthetic oligonucleotide
guagccaucacccugcucu

SEQ ID NO: 2824705 - RNA, 19 nt, Artificial Sequence
  Description of Artificial Sequence: Synthetic oligonucleotide
aggagcugguuguuggugg

SEQ ID NO: 2824706 - RNA, 19 nt, Artificial Sequence
  Description of Artificial Sequence: Synthetic oligonucleotide
ugcucugccuucuccaaag

SEQ ID NO: 2824707 - RNA, 19 nt, Artificial Sequence
  Description of Artificial Sequence: Synthetic oligonucleotide
uccucucaugcccaccagg

SEQ ID NO: 2824708 - RNA, 19 nt, Artificial Sequence
  Description of Artificial Sequence: Synthetic oligonucleotide
ugugaugucuguggucugg

SEQ ID NO: 2824709 - RNA, 19 nt, Artificial Sequence
  Description of Artificial Sequence: Synthetic oligonucleotide
cuuuugcuggaucuagaag

SEQ ID NO: 2824710 - RNA, 19 nt, Artificial Sequence
  Description of Artificial Sequence: Synthetic oligonucleotide
uuguugguggcaagguagc

SEQ ID NO: 2824711 - RNA, 19 nt, Artificial Sequence
  Description of Artificial Sequence: Synthetic oligonucleotide
uaaggaugggccaggcugu

SEQ ID NO: 2824712 - RNA, 19 nt, Artificial Sequence
  Description of Artificial Sequence: Synthetic oligonucleotide
uaauccauugcugggugug

SEQ ID NO: 2824713 - RNA, 19 nt, Artificial Sequence
  Description of Artificial Sequence: Synthetic oligonucleotide
gugucccuucucuagaacc

SEQ ID NO: 2824714 - RNA, 19 nt, Artificial Sequence
  Description of Artificial Sequence: Synthetic oligonucleotide
uggcaagguagccaucacc

SEQ ID NO: 2824715 - RNA, 19 nt, Artificial Sequence
  Description of Artificial Sequence: Synthetic oligonucleotide
aauccauugcugggugugg

SEQ ID NO: 2824716 - RNA, 19 nt, Artificial Sequence
  Description of Artificial Sequence: Synthetic oligonucleotide
auauaaggaugggccaggc

SEQ ID NO: 2824717 - RNA, 19 nt, Artificial Sequence
  Description of Artificial Sequence: Synthetic oligonucleotide
uguugcuccgaucgugccc

SEQ ID NO: 2824718 - RNA, 19 nt, Artificial Sequence
  Description of Artificial Sequence: Synthetic oligonucleotide
aggaaagagucaaacaggu

SEQ ID NO: 2824719 - RNA, 19 nt, Artificial Sequence
  Description of Artificial Sequence: Synthetic oligonucleotide
gauuguugcuccgaucgug

SEQ ID NO: 2824720 - RNA, 19 nt, Artificial Sequence
  Description of Artificial Sequence: Synthetic oligonucleotide
cucuagaaccucacuuagg

SEQ ID NO: 2824721 - RNA, 19 nt, Artificial Sequence
  Description of Artificial Sequence: Synthetic oligonucleotide
acgauauaaggaugggcca

SEQ ID NO: 2824722 - RNA, 19 nt, Artificial Sequence
  Description of Artificial Sequence: Synthetic oligonucleotide
ucaucuccagcucugccuc

SEQ ID NO: 2824723 - RNA, 19 nt, Artificial Sequence
  Description of Artificial Sequence: Synthetic oligonucleotide
uccuaaucucuccaagguc

SEQ ID NO: 2824724 - RNA, 19 nt, Artificial Sequence
  Description of Artificial Sequence: Synthetic oligonucleotide
guccuguauccauugcugg

SEQ ID NO: 2824725 - RNA, 19 nt, Artificial Sequence
  Description of Artificial Sequence: Synthetic oligonucleotide
uuccuuucagaguucugga

SEQ ID NO: 2824726 - RNA, 19 nt, Artificial Sequence
  Description of Artificial Sequence: Synthetic oligonucleotide
guccuaauccauugcuggg

SEQ ID NO: 2824727 - RNA, 19 nt, Artificial Sequence
  Description of Artificial Sequence: Synthetic oligonucleotide
caagguagccaucacccug

SEQ ID NO: 2824728 - RNA, 19 nt, Artificial Sequence
  Description of Artificial Sequence: Synthetic oligonucleotide
cuggaacuuggucagcagc

SEQ ID NO: 2824729 - RNA, 19 nt, Artificial Sequence
  Description of Artificial Sequence: Synthetic oligonucleotide
ugccuguaucuccuaaucu

SEQ ID NO: 2824730 - RNA, 19 nt, Artificial Sequence
  Description of Artificial Sequence: Synthetic oligonucleotide
uugccuguaucuccuaauc

SEQ ID NO: 2824731 - RNA, 19 nt, Artificial Sequence
  Description of Artificial Sequence: Synthetic oligonucleotide
uauaaggaugggccaggcu

SEQ ID NO: 2824732 - RNA, 19 nt, Artificial Sequence
  Description of Artificial Sequence: Synthetic oligonucleotide
guuuagggguugcugggag

SEQ ID NO: 2824733 - RNA, 19 nt, Artificial Sequence
  Description of Artificial Sequence: Synthetic oligonucleotide
ucuggaacuuggucagcag

SEQ ID NO: 2824734 - RNA, 19 nt, Artificial Sequence
  Description of Artificial Sequence: Synthetic oligonucleotide
aggucucugucuuugccug

SEQ ID NO: 2824735 - RNA, 19 nt, Artificial Sequence
  Description of Artificial Sequence: Synthetic oligonucleotide
ugcugggaggagcugguug

SEQ ID NO: 2824736 - RNA, 19 nt, Artificial Sequence
  Description of Artificial Sequence: Synthetic oligonucleotide
ucuccaaagucuugccugu

SEQ ID NO: 2824737 - RNA, 19 nt, Artificial Sequence
  Description of Artificial Sequence: Synthetic oligonucleotide
cuucucucuugguacgacc

SEQ ID NO: 2824738 - RNA, 19 nt, Artificial Sequence
  Description of Artificial Sequence: Synthetic oligonucleotide
uuagggguugcugggagga

SEQ ID NO: 2824739 - RNA, 19 nt, Artificial Sequence
  Description of Artificial Sequence: Synthetic oligonucleotide
uugguggcaagguagccau

SEQ ID NO: 2824740 - RNA, 19 nt, Artificial Sequence
  Description of Artificial Sequence: Synthetic oligonucleotide
uuggugucccuucucuaga

SEQ ID NO: 2824741 - RNA, 19 nt, Artificial Sequence
  Description of Artificial Sequence: Synthetic oligonucleotide
uuuuccuuucagaguucug

SEQ ID NO: 2824742 - RNA, 19 nt, Artificial Sequence
  Description of Artificial Sequence: Synthetic oligonucleotide
agaaccucacuuagguagg

SEQ ID NO: 2824743 - RNA, 19 nt, Artificial Sequence
  Description of Artificial Sequence: Synthetic oligonucleotide
ugguauuggcggcagcuuc

SEQ ID NO: 2824744 - RNA, 19 nt, Artificial Sequence
  Description of Artificial Sequence: Synthetic oligonucleotide
ggcaagguagccaucaccc

SEQ ID NO: 2824745 - RNA, 19 nt, Artificial Sequence
  Description of Artificial Sequence: Synthetic oligonucleotide
uuugccuguaucuccuaau

SEQ ID NO: 2824746 - RNA, 19 nt, Artificial Sequence
  Description of Artificial Sequence: Synthetic oligonucleotide
uucuggaacuuggucagca

SEQ ID NO: 2824747 - RNA, 19 nt, Artificial Sequence
  Description of Artificial Sequence: Synthetic oligonucleotide
auugcugggugugaugucu

SEQ ID NO: 2824748 - RNA, 19 nt, Artificial Sequence
  Description of Artificial Sequence: Synthetic oligonucleotide
uccgaucgugcccuuuugc

SEQ ID NO: 2824749 - RNA, 19 nt, Artificial Sequence
  Description of Artificial Sequence: Synthetic oligonucleotide
uccuaauccauugcugggu

SEQ ID NO: 2824750 - RNA, 19 nt, Artificial Sequence
  Description of Artificial Sequence: Synthetic oligonucleotide
cuuagguaggaaagaguca

SEQ ID NO: 2824751 - RNA, 19 nt, Artificial Sequence
  Description of Artificial Sequence: Synthetic oligonucleotide
auacucauccaggauguca

SEQ ID NO: 2824752 - RNA, 19 nt, Artificial Sequence
  Description of Artificial Sequence: Synthetic oligonucleotide
uauccauugcugggugugg

SEQ ID NO: 2824753 - RNA, 19 nt, Artificial Sequence
  Description of Artificial Sequence: Synthetic oligonucleotide
gcagcuuccucucaugccc

SEQ ID NO: 2824754 - RNA, 19 nt, Artificial Sequence
  Description of Artificial Sequence: Synthetic oligonucleotide
uguacuggucauacucauc

SEQ ID NO: 2824755 - RNA, 19 nt, Artificial Sequence
  Description of Artificial Sequence: Synthetic oligonucleotide
uucagaguucuggaacuug

SEQ ID NO: 2824756 - RNA, 19 nt, Artificial Sequence
  Description of Artificial Sequence: Synthetic oligonucleotide
caagguccuaauccauugc

SEQ ID NO: 2824757 - RNA, 19 nt, Artificial Sequence
  Description of Artificial Sequence: Synthetic oligonucleotide
aucuucauccucuggguuu

SEQ ID NO: 2824758 - RNA, 19 nt, Artificial Sequence
  Description of Artificial Sequence: Synthetic oligonucleotide
accucacuuagguaggaaa

SEQ ID NO: 2824759 - RNA, 19 nt, Artificial Sequence
  Description of Artificial Sequence: Synthetic oligonucleotide
guaucuccuaaucucucca

SEQ ID NO: 2824760 - RNA, 19 nt, Artificial Sequence
  Description of Artificial Sequence: Synthetic oligonucleotide
gguaggaaagagucaaaca

SEQ ID NO: 2824761 - RNA, 19 nt, Artificial Sequence
  Description of Artificial Sequence: Synthetic oligonucleotide
agggguugcugggaggagc

SEQ ID NO: 2824762 - RNA, 19 nt, Artificial Sequence
  Description of Artificial Sequence: Synthetic oligonucleotide
guuuccauugcugggugug

SEQ ID NO: 2824763 - RNA, 19 nt, Artificial Sequence
  Description of Artificial Sequence: Synthetic oligonucleotide
ugauuguugcuccgaucgu

SEQ ID NO: 2824764 - RNA, 19 nt, Artificial Sequence
  Description of Artificial Sequence: Synthetic oligonucleotide
ugggugugaugucuguggu

SEQ ID NO: 2824765 - RNA, 19 nt, Artificial Sequence
  Description of Artificial Sequence: Synthetic oligonucleotide
aagagucaaacaggucucu

SEQ ID NO: 2824766 - RNA, 19 nt, Artificial Sequence
  Description of Artificial Sequence: Synthetic oligonucleotide
gaacuuggucagcagcuuc

SEQ ID NO: 2824767 - RNA, 19 nt, Artificial Sequence
  Description of Artificial Sequence: Synthetic oligonucleotide
cugguuguugguggcaagg

SEQ ID NO: 2824768 - RNA, 19 nt, Artificial Sequence
  Description of Artificial Sequence: Synthetic oligonucleotide
ggcuguacuggucauacuc

SEQ ID NO: 2824769 - RNA, 19 nt, Artificial Sequence
  Description of Artificial Sequence: Synthetic oligonucleotide
uccagcucugccucagcgc

SEQ ID NO: 2824770 - RNA, 19 nt, Artificial Sequence
  Description of Artificial Sequence: Synthetic oligonucleotide
guauccauugcugggugug

SEQ ID NO: 2824771 - RNA, 19 nt, Artificial Sequence
  Description of Artificial Sequence: Synthetic oligonucleotide
ccucacuuagguaggaaag

SEQ ID NO: 2824772 - RNA, 19 nt, Artificial Sequence
  Description of Artificial Sequence: Synthetic oligonucleotide
uccuuucagaguucuggaa

SEQ ID NO: 2824773 - RNA, 19 nt, Artificial Sequence
  Description of Artificial Sequence: Synthetic oligonucleotide
guggucuggccucaucucc

SEQ ID NO: 2824774 - RNA, 19 nt, Artificial Sequence
  Description of Artificial Sequence: Synthetic oligonucleotide
ucccuucucuagaaccuca

SEQ ID NO: 2824775 - RNA, 19 nt, Artificial Sequence
  Description of Artificial Sequence: Synthetic oligonucleotide
uguauccauugcugggugu

SEQ ID NO: 2824776 - RNA, 19 nt, Artificial Sequence
  Description of Artificial Sequence: Synthetic oligonucleotide
uaucuccuaaucucuccaa

SEQ ID NO: 2824777 - RNA, 19 nt, Artificial Sequence
  Description of Artificial Sequence: Synthetic oligonucleotide
ugguacgaccuuuccggcc

SEQ ID NO: 2824778 - RNA, 19 nt, Artificial Sequence
  Description of Artificial Sequence: Synthetic oligonucleotide
cccgacgauauaaggaugg

SEQ ID NO: 2824779 - RNA, 19 nt, Artificial Sequence
  Description of Artificial Sequence: Synthetic oligonucleotide
uugguacgaccuuuccggc

SEQ ID NO: 2824780 - RNA, 19 nt, Artificial Sequence
  Description of Artificial Sequence: Synthetic oligonucleotide
uccaagguccuaauccauu

SEQ ID NO: 2824781 - RNA, 19 nt, Artificial Sequence
  Description of Artificial Sequence: Synthetic oligonucleotide
ucucuugguacgaccuuuc

SEQ ID NO: 2824782 - RNA, 19 nt, Artificial Sequence
  Description of Artificial Sequence: Synthetic oligonucleotide
gaugggccaggcuguacug

SEQ ID NO: 2824783 - RNA, 19 nt, Artificial Sequence
  Description of Artificial Sequence: Synthetic oligonucleotide
aggaugucaucuucauccu

SEQ ID NO: 2824784 - RNA, 19 nt, Artificial Sequence
  Description of Artificial Sequence: Synthetic oligonucleotide
gaugucuguggucuggccu

SEQ ID NO: 2824785 - RNA, 19 nt, Artificial Sequence
  Description of Artificial Sequence: Synthetic oligonucleotide
acccugcucugccuucucc

SEQ ID NO: 2824786 - RNA, 19 nt, Artificial Sequence
  Description of Artificial Sequence: Synthetic oligonucleotide
ugugguuguccuguuucca

SEQ ID NO: 2824787 - RNA, 19 nt, Artificial Sequence
  Description of Artificial Sequence: Synthetic oligonucleotide
ccuuucagaguucuggaac

SEQ ID NO: 2824788 - RNA, 19 nt, Artificial Sequence
  Description of Artificial Sequence: Synthetic oligonucleotide
gggcgguugguauuggcgg

SEQ ID NO: 2824789 - RNA, 19 nt, Artificial Sequence
  Description of Artificial Sequence: Synthetic oligonucleotide
cagcuucucucuugguacg

SEQ ID NO: 2824790 - RNA, 19 nt, Artificial Sequence
  Description of Artificial Sequence: Synthetic oligonucleotide
uccauugcugggugugaug

SEQ ID NO: 2824791 - RNA, 19 nt, Artificial Sequence
  Description of Artificial Sequence: Synthetic oligonucleotide
uccaggaugucaucuucau

SEQ ID NO: 2824792 - RNA, 19 nt, Artificial Sequence
  Description of Artificial Sequence: Synthetic oligonucleotide
agggcgguugguauuggcg

SEQ ID NO: 2824793 - RNA, 19 nt, Artificial Sequence
  Description of Artificial Sequence: Synthetic oligonucleotide
uuggcggcagcuucucucu

SEQ ID NO: 2824794 - RNA, 19 nt, Artificial Sequence
  Description of Artificial Sequence: Synthetic oligonucleotide
uuuuggugucccuucucua

SEQ ID NO: 2824795 - RNA, 19 nt, Artificial Sequence
  Description of Artificial Sequence: Synthetic oligonucleotide
uucauccucuggguuuagg

SEQ ID NO: 2824796 - RNA, 19 nt, Artificial Sequence
  Description of Artificial Sequence: Synthetic oligonucleotide
gguuguccuguuuccauug

SEQ ID NO: 2824797 - RNA, 19 nt, Artificial Sequence
  Description of Artificial Sequence: Synthetic oligonucleotide
gugugguuguccuguuucc

SEQ ID NO: 2824798 - RNA, 19 nt, Artificial Sequence
  Description of Artificial Sequence: Synthetic oligonucleotide
uuguugcuccgaucgugcc

SEQ ID NO: 2824799 - RNA, 19 nt, Artificial Sequence
  Description of Artificial Sequence: Synthetic oligonucleotide
uacuggucauacucaucca

SEQ ID NO: 2824800 - RNA, 19 nt, Artificial Sequence
  Description of Artificial Sequence: Synthetic oligonucleotide
cuguaucuccuaaucucuc

SEQ ID NO: 2824801 - RNA, 19 nt, Artificial Sequence
  Description of Artificial Sequence: Synthetic oligonucleotide
uguggucuggccucaucuc

SEQ ID NO: 2824802 - RNA, 19 nt, Artificial Sequence
  Description of Artificial Sequence: Synthetic oligonucleotide
cuuucagaguucuggaacu

SEQ ID NO: 2824803 - RNA, 19 nt, Artificial Sequence
  Description of Artificial Sequence: Synthetic oligonucleotide
ggugugguuguccuguuuc

SEQ ID NO: 2824804 - RNA, 19 nt, Artificial Sequence
  Description of Artificial Sequence: Synthetic oligonucleotide
guuguccuguauccauugc

SEQ ID NO: 2824805 - RNA, 19 nt, Artificial Sequence
  Description of Artificial Sequence: Synthetic oligonucleotide
cauccaggaugucaucuuc

SEQ ID NO: 2824806 - RNA, 19 nt, Artificial Sequence
  Description of Artificial Sequence: Synthetic oligonucleotide
gagucaaacaggucucugu

SEQ ID NO: 2824807 - RNA, 19 nt, Artificial Sequence
  Description of Artificial Sequence: Synthetic oligonucleotide
augcccaccagggcuaggg

SEQ ID NO: 2824808 - RNA, 19 nt, Artificial Sequence
  Description of Artificial Sequence: Synthetic oligonucleotide
caggcuguacuggucauac

SEQ ID NO: 2824809 - RNA, 19 nt, Artificial Sequence
  Description of Artificial Sequence: Synthetic oligonucleotide
ucauccaggaugucaucuu

SEQ ID NO: 2824810 - RNA, 19 nt, Artificial Sequence
  Description of Artificial Sequence: Synthetic oligonucleotide
ggguuuagggguugcuggg

SEQ ID NO: 2824811 - RNA, 19 nt, Artificial Sequence
  Description of Artificial Sequence: Synthetic oligonucleotide
ucucuccaagguccuaauc

SEQ ID NO: 2824812 - RNA, 19 nt, Artificial Sequence
  Description of Artificial Sequence: Synthetic oligonucleotide
gccuguaucuccuaaucuc

SEQ ID NO: 2824813 - RNA, 19 nt, Artificial Sequence
  Description of Artificial Sequence: Synthetic oligonucleotide
uugcugggugugaugucug

SEQ ID NO: 2824814 - RNA, 19 nt, Artificial Sequence
  Description of Artificial Sequence: Synthetic oligonucleotide
cucuugguacgaccuuucc

SEQ ID NO: 2824815 - RNA, 19 nt, Artificial Sequence
  Description of Artificial Sequence: Synthetic oligonucleotide
uguugguggcaagguagcc

SEQ ID NO: 2824816 - RNA, 19 nt, Artificial Sequence
  Description of Artificial Sequence: Synthetic oligonucleotide
ugcugggugugguuguccu

SEQ ID NO: 2824817 - RNA, 19 nt, Artificial Sequence
  Description of Artificial Sequence: Synthetic oligonucleotide
uguuuccauugcugggugu

SEQ ID NO: 2824818 - RNA, 19 nt, Artificial Sequence
  Description of Artificial Sequence: Synthetic oligonucleotide
uagguaggaaagagucaaa

SEQ ID NO: 2824819 - RNA, 19 nt, Artificial Sequence
  Description of Artificial Sequence: Synthetic oligonucleotide
gguuguccuguauccauug

SEQ ID NO: 2824820 - RNA, 19 nt, Artificial Sequence
  Description of Artificial Sequence: Synthetic oligonucleotide
cuguauccauugcugggug

SEQ ID NO: 2824821 - RNA, 19 nt, Artificial Sequence
  Description of Artificial Sequence: Synthetic oligonucleotide
uggccucaucuccagcucu

SEQ ID NO: 2824822 - RNA, 19 nt, Artificial Sequence
  Description of Artificial Sequence: Synthetic oligonucleotide
ucuucauccucuggguuua

SEQ ID NO: 2824823 - RNA, 19 nt, Artificial Sequence
  Description of Artificial Sequence: Synthetic oligonucleotide
ggugugguuguccuguauc

SEQ ID NO: 2824824 - RNA, 19 nt, Artificial Sequence
  Description of Artificial Sequence: Synthetic oligonucleotide
agagucaaacaggucucug

SEQ ID NO: 2824825 - RNA, 19 nt, Artificial Sequence
  Description of Artificial Sequence: Synthetic oligonucleotide
cugucuuugccuguaucuc

SEQ ID NO: 2824826 - RNA, 19 nt, Artificial Sequence
  Description of Artificial Sequence: Synthetic oligonucleotide
uggucagcagcuuccucuc

SEQ ID NO: 2824827 - RNA, 19 nt, Artificial Sequence
  Description of Artificial Sequence: Synthetic oligonucleotide
gaggagcugguuguuggug

SEQ ID NO: 2824828 - RNA, 19 nt, Artificial Sequence
  Description of Artificial Sequence: Synthetic oligonucleotide
uuuccauugcuggguguga

SEQ ID NO: 2824829 - RNA, 19 nt, Artificial Sequence
  Description of Artificial Sequence: Synthetic oligonucleotide
gguugcugggaggagcugg

SEQ ID NO: 2824830 - RNA, 19 nt, Artificial Sequence
  Description of Artificial Sequence: Synthetic oligonucleotide
cuguuuccauugcugggug

SEQ ID NO: 2824831 - RNA, 19 nt, Artificial Sequence
  Description of Artificial Sequence: Synthetic oligonucleotide
cucucaugcccaccagggc

SEQ ID NO: 2824832 - RNA, 19 nt, Artificial Sequence
  Description of Artificial Sequence: Synthetic oligonucleotide
agcuuccucucaugcccac

SEQ ID NO: 2824833 - RNA, 19 nt, Artificial Sequence
  Description of Artificial Sequence: Synthetic oligonucleotide
ugguuguugguggcaaggu

SEQ ID NO: 2824834 - RNA, 19 nt, Artificial Sequence
  Description of Artificial Sequence: Synthetic oligonucleotide
cucacuuagguaggaaaga

SEQ ID NO: 2824835 - RNA, 19 nt, Artificial Sequence
  Description of Artificial Sequence: Synthetic oligonucleotide
ugguuguccuguauccauu

SEQ ID NO: 2824836 - RNA, 19 nt, Artificial Sequence
  Description of Artificial Sequence: Synthetic oligonucleotide
ccaagguccuaauccauug

SEQ ID NO: 2824837 - RNA, 19 nt, Artificial Sequence
  Description of Artificial Sequence: Synthetic oligonucleotide
agguccuaauccauugcug

SEQ ID NO: 2824838 - RNA, 19 nt, Artificial Sequence
  Description of Artificial Sequence: Synthetic oligonucleotide
guugguggcaagguagcca

SEQ ID NO: 2824839 - RNA, 19 nt, Artificial Sequence
  Description of Artificial Sequence: Synthetic oligonucleotide
cuggguuuagggguugcug

SEQ ID NO: 2824840 - RNA, 19 nt, Artificial Sequence
  Description of Artificial Sequence: Synthetic oligonucleotide
uggugucccuucucuagaa

SEQ ID NO: 2824841 - RNA, 19 nt, Artificial Sequence
  Description of Artificial Sequence: Synthetic oligonucleotide
ugguuguccuguuuccauu

SEQ ID NO: 2824842 - RNA, 19 nt, Artificial Sequence
  Description of Artificial Sequence: Synthetic oligonucleotide
uagccaucacccugcucug

SEQ ID NO: 2824843 - RNA, 19 nt, Artificial Sequence
  Description of Artificial Sequence: Synthetic oligonucleotide
uugcuggaucuagaagggc

SEQ ID NO: 2824844 - RNA, 19 nt, Artificial Sequence
  Description of Artificial Sequence: Synthetic oligonucleotide
uauuggcggcagcuucucu

SEQ ID NO: 2824845 - RNA, 19 nt, Artificial Sequence
  Description of Artificial Sequence: Synthetic oligonucleotide
uagggcgguugguauuggc

SEQ ID NO: 2824846 - RNA, 19 nt, Artificial Sequence
  Description of Artificial Sequence: Synthetic oligonucleotide
ucucucuugguacgaccuu

SEQ ID NO: 2824847 - RNA, 19 nt, Artificial Sequence
  Description of Artificial Sequence: Synthetic oligonucleotide
cuucucuagaaccucacuu

SEQ ID NO: 2824848 - RNA, 19 nt, Artificial Sequence
  Description of Artificial Sequence: Synthetic oligonucleotide
cucugucuuugccuguauc

SEQ ID NO: 2824849 - RNA, 19 nt, Artificial Sequence
  Description of Artificial Sequence: Synthetic oligonucleotide
ccagcucugccucagcgcc

SEQ ID NO: 2824850 - RNA, 19 nt, Artificial Sequence
  Description of Artificial Sequence: Synthetic oligonucleotide
ucuguggucuggccucauc

SEQ ID NO: 2824851 - RNA, 19 nt, Artificial Sequence
  Description of Artificial Sequence: Synthetic oligonucleotide
uuucagaguucuggaacuu

SEQ ID NO: 2824852 - RNA, 19 nt, Artificial Sequence
  Description of Artificial Sequence: Synthetic oligonucleotide
ucuggguuuagggguugcu

SEQ ID NO: 2824853 - RNA, 19 nt, Artificial Sequence
  Description of Artificial Sequence: Synthetic oligonucleotide
cucugccucagcgccaggc

SEQ ID NO: 2824854 - RNA, 19 nt, Artificial Sequence
  Description of Artificial Sequence: Synthetic oligonucleotide
guugguauuggcggcagcu

SEQ ID NO: 2824855 - RNA, 19 nt, Artificial Sequence
  Description of Artificial Sequence: Synthetic oligonucleotide
cuccuaaucucuccaaggu

SEQ ID NO: 2824856 - RNA, 19 nt, Artificial Sequence
  Description of Artificial Sequence: Synthetic oligonucleotide
ggugugaugucuguggucu

SEQ ID NO: 2824857 - RNA, 19 nt, Artificial Sequence
  Description of Artificial Sequence: Synthetic oligonucleotide
acgaccuuuccggccuccc

SEQ ID NO: 2824858 - RNA, 19 nt, Artificial Sequence
  Description of Artificial Sequence: Synthetic oligonucleotide
ugcccaccagggcuagggc

SEQ ID NO: 2824859 - RNA, 19 nt, Artificial Sequence
  Description of Artificial Sequence: Synthetic oligonucleotide
ccuaauccauugcugggug

SEQ ID NO: 2824860 - RNA, 19 nt, Artificial Sequence
  Description of Artificial Sequence: Synthetic oligonucleotide
ugcugggugugaugucugu

SEQ ID NO: 2824861 - RNA, 19 nt, Artificial Sequence
  Description of Artificial Sequence: Synthetic oligonucleotide
agccaucacccugcucugc

SEQ ID NO: 2824862 - RNA, 19 nt, Artificial Sequence
  Description of Artificial Sequence: Synthetic oligonucleotide
gugaugucuguggucuggc

SEQ ID NO: 2824863 - RNA, 19 nt, Artificial Sequence
  Description of Artificial Sequence: Synthetic oligonucleotide
ucucugucuuugccuguau

SEQ ID NO: 2824864 - RNA, 19 nt, Artificial Sequence
  Description of Artificial Sequence: Synthetic oligonucleotide
cccaccagggcuagggcgg

SEQ ID NO: 2824865 - RNA, 19 nt, Artificial Sequence
  Description of Artificial Sequence: Synthetic oligonucleotide
gcggcagcuucucucuugg

SEQ ID NO: 2824866 - RNA, 19 nt, Artificial Sequence
  Description of Artificial Sequence: Synthetic oligonucleotide
aaccucacuuagguaggaa

SEQ ID NO: 2824867 - RNA, 19 nt, Artificial Sequence
  Description of Artificial Sequence: Synthetic oligonucleotide
auccaggaugucaucuuca

SEQ ID NO: 2824868 - RNA, 19 nt, Artificial Sequence
  Description of Artificial Sequence: Synthetic oligonucleotide
aucucuccaagguccuaau

SEQ ID NO: 2824869 - RNA, 19 nt, Artificial Sequence
  Description of Artificial Sequence: Synthetic oligonucleotide
gcccaccagggcuagggcg

SEQ ID NO: 2824870 - RNA, 19 nt, Artificial Sequence
  Description of Artificial Sequence: Synthetic oligonucleotide
gucaaacaggucucugucu

SEQ ID NO: 2824871 - RNA, 19 nt, Artificial Sequence
  Description of Artificial Sequence: Synthetic oligonucleotide
ggagcugguuguugguggc

SEQ ID NO: 2824872 - RNA, 19 nt, Artificial Sequence
  Description of Artificial Sequence: Synthetic oligonucleotide
uccauugcugggugugguu

SEQ ID NO: 2824873 - RNA, 19 nt, Artificial Sequence
  Description of Artificial Sequence: Synthetic oligonucleotide
uuccauugcugggugugau

SEQ ID NO: 2824874 - RNA, 19 nt, Artificial Sequence
  Description of Artificial Sequence: Synthetic oligonucleotide
cuagaaccucacuuaggua

SEQ ID NO: 2824875 - RNA, 19 nt, Artificial Sequence
  Description of Artificial Sequence: Synthetic oligonucleotide
acuuggucagcagcuuccu

SEQ ID NO: 2824876 - RNA, 19 nt, Artificial Sequence
  Description of Artificial Sequence: Synthetic oligonucleotide
cacuuagguaggaaagagu

SEQ ID NO: 2824877 - RNA, 19 nt, Artificial Sequence
  Description of Artificial Sequence: Synthetic oligonucleotide
cuuugccuguaucuccuaa

SEQ ID NO: 2824878 - RNA, 19 nt, Artificial Sequence
  Description of Artificial Sequence: Synthetic oligonucleotide
uugguauuggcggcagcuu

SEQ ID NO: 2824879 - RNA, 19 nt, Artificial Sequence
  Description of Artificial Sequence: Synthetic oligonucleotide
gccaucacccugcucugcc

SEQ ID NO: 2824880 - RNA, 19 nt, Artificial Sequence
  Description of Artificial Sequence: Synthetic oligonucleotide
ggcgguugguauuggcggc

SEQ ID NO: 2824881 - RNA, 19 nt, Artificial Sequence
  Description of Artificial Sequence: Synthetic oligonucleotide
cuaaucucuccaagguccu

SEQ ID NO: 2824882 - RNA, 19 nt, Artificial Sequence
  Description of Artificial Sequence: Synthetic oligonucleotide
ucuuugccuguaucuccua

SEQ ID NO: 2824883 - RNA, 19 nt, Artificial Sequence
  Description of Artificial Sequence: Synthetic oligonucleotide
gguacgaccuuuccggccu

SEQ ID NO: 2824884 - RNA, 19 nt, Artificial Sequence
  Description of Artificial Sequence: Synthetic oligonucleotide
guugcuccgaucgugcccu

SEQ ID NO: 2824885 - RNA, 19 nt, Artificial Sequence
  Description of Artificial Sequence: Synthetic oligonucleotide
gaaccucacuuagguagga

SEQ ID NO: 2824886 - RNA, 19 nt, Artificial Sequence
  Description of Artificial Sequence: Synthetic oligonucleotide
aggaugggccaggcuguac

SEQ ID NO: 2824887 - RNA, 19 nt, Artificial Sequence
  Description of Artificial Sequence: Synthetic oligonucleotide
ucaugcccaccagggcuag

SEQ ID NO: 2824888 - RNA, 19 nt, Artificial Sequence
  Description of Artificial Sequence: Synthetic oligonucleotide
ugucuguggucuggccuca

SEQ ID NO: 2824889 - RNA, 19 nt, Artificial Sequence
  Description of Artificial Sequence: Synthetic oligonucleotide
gugugaugucuguggucug

SEQ ID NO: 2824890 - RNA, 19 nt, Artificial Sequence
  Description of Artificial Sequence: Synthetic oligonucleotide
uggaucuagaagggcuuuu

SEQ ID NO: 2824891 - RNA, 19 nt, Artificial Sequence
  Description of Artificial Sequence: Synthetic oligonucleotide
ugccucagcgccaggccuu

SEQ ID NO: 2824892 - RNA, 19 nt, Artificial Sequence
  Description of Artificial Sequence: Synthetic oligonucleotide
gcuagggcgguugguauug

SEQ ID NO: 2824893 - RNA, 19 nt, Artificial Sequence
  Description of Artificial Sequence: Synthetic oligonucleotide
cgauauaaggaugggccag

SEQ ID NO: 2824894 - RNA, 19 nt, Artificial Sequence
  Description of Artificial Sequence: Synthetic oligonucleotide
accagggcuagggcgguug

SEQ ID NO: 2824895 - RNA, 19 nt, Artificial Sequence
  Description of Artificial Sequence: Synthetic oligonucleotide
cuguggucuggccucaucu

SEQ ID NO: 2824896 - RNA, 19 nt, Artificial Sequence
  Description of Artificial Sequence: Synthetic oligonucleotide
cuccgaucgugcccuuuug

SEQ ID NO: 2824897 - RNA, 19 nt, Artificial Sequence
  Description of Artificial Sequence: Synthetic oligonucleotide
gugcccuuuugcuggaucu

SEQ ID NO: 2824898 - RNA, 19 nt, Artificial Sequence
  Description of Artificial Sequence: Synthetic oligonucleotide
uagggguugcugggaggag

SEQ ID NO: 2824899 - RNA, 19 nt, Artificial Sequence
  Description of Artificial Sequence: Synthetic oligonucleotide
gcuguacuggucauacuca

SEQ ID NO: 2824900 - RNA, 19 nt, Artificial Sequence
  Description of Artificial Sequence: Synthetic oligonucleotide
cuucuccaaagucuugccu

SEQ ID NO: 2824901 - RNA, 19 nt, Artificial Sequence
  Description of Artificial Sequence: Synthetic oligonucleotide
guggcaagguagccaucac

SEQ ID NO: 2824902 - RNA, 19 nt, Artificial Sequence
  Description of Artificial Sequence: Synthetic oligonucleotide
ggcagcuucucucuuggua

SEQ ID NO: 2824903 - RNA, 19 nt, Artificial Sequence
  Description of Artificial Sequence: Synthetic oligonucleotide
agcugguuguugguggcaa

SEQ ID NO: 2824904 - RNA, 19 nt, Artificial Sequence
  Description of Artificial Sequence: Synthetic oligonucleotide
ggugucccuucucuagaac

SEQ ID NO: 2824905 - RNA, 19 nt, Artificial Sequence
  Description of Artificial Sequence: Synthetic oligonucleotide
gugguuguccuguauccau

SEQ ID NO: 2824906 - RNA, 19 nt, Artificial Sequence
  Description of Artificial Sequence: Synthetic oligonucleotide
agcuucucucuugguacga

SEQ ID NO: 2824907 - RNA, 19 nt, Artificial Sequence
  Description of Artificial Sequence: Synthetic oligonucleotide
ggaaagagucaaacagguc

SEQ ID NO: 2824908 - RNA, 19 nt, Artificial Sequence
  Description of Artificial Sequence: Synthetic oligonucleotide
caggucucugucuuugccu

SEQ ID NO: 2824909 - RNA, 19 nt, Artificial Sequence
  Description of Artificial Sequence: Synthetic oligonucleotide
cuagggcgguugguauugg

SEQ ID NO: 2824910 - RNA, 19 nt, Artificial Sequence
  Description of Artificial Sequence: Synthetic oligonucleotide
cucaugcccaccagggcua

SEQ ID NO: 2824911 - RNA, 19 nt, Artificial Sequence
  Description of Artificial Sequence: Synthetic oligonucleotide
uacgaccuuuccggccucc

SEQ ID NO: 2824912 - RNA, 19 nt, Artificial Sequence
  Description of Artificial Sequence: Synthetic oligonucleotide
cucauccaggaugucaucu

SEQ ID NO: 2824913 - RNA, 19 nt, Artificial Sequence
  Description of Artificial Sequence: Synthetic oligonucleotide
ggccaggcuguacugguca

SEQ ID NO: 2824914 - RNA, 19 nt, Artificial Sequence
  Description of Artificial Sequence: Synthetic oligonucleotide
gcugguuguugguggcaag

SEQ ID NO: 2824915 - RNA, 19 nt, Artificial Sequence
  Description of Artificial Sequence: Synthetic oligonucleotide
aucgugcccuuuugcugga

SEQ ID NO: 2824916 - RNA, 19 nt, Artificial Sequence
  Description of Artificial Sequence: Synthetic oligonucleotide
aggcuguacuggucauacu

SEQ ID NO: 2824917 - RNA, 19 nt, Artificial Sequence
  Description of Artificial Sequence: Synthetic oligonucleotide
ccuuuugcuggaucuagaa

SEQ ID NO: 2824918 - RNA, 19 nt, Artificial Sequence
  Description of Artificial Sequence: Synthetic oligonucleotide
agggcuagggcgguuggua

SEQ ID NO: 2824919 - RNA, 19 nt, Artificial Sequence
  Description of Artificial Sequence: Synthetic oligonucleotide
gguuguugguggcaaggua

SEQ ID NO: 2824920 - RNA, 19 nt, Artificial Sequence
  Description of Artificial Sequence: Synthetic oligonucleotide
guauuggcggcagcuucuc

SEQ ID NO: 2824921 - RNA, 19 nt, Artificial Sequence
  Description of Artificial Sequence: Synthetic oligonucleotide
ugcccuuuugcuggaucua

SEQ ID NO: 2824922 - RNA, 19 nt, Artificial Sequence
  Description of Artificial Sequence: Synthetic oligonucleotide
ccauugcugggugugguug

SEQ ID NO: 2824923 - RNA, 19 nt, Artificial Sequence
  Description of Artificial Sequence: Synthetic oligonucleotide
cuaauccauugcugggugu

SEQ ID NO: 2824924 - RNA, 19 nt, Artificial Sequence
  Description of Artificial Sequence: Synthetic oligonucleotide
cuccaaagucuugccugug

SEQ ID NO: 2824925 - RNA, 19 nt, Artificial Sequence
  Description of Artificial Sequence: Synthetic oligonucleotide
agguagccaucacccugcu

SEQ ID NO: 2824926 - RNA, 19 nt, Artificial Sequence
  Description of Artificial Sequence: Synthetic oligonucleotide
gucuuugccuguaucuccu

SEQ ID NO: 2824927 - RNA, 19 nt, Artificial Sequence
  Description of Artificial Sequence: Synthetic oligonucleotide
cgaucgugcccuuuugcug

SEQ ID NO: 2824928 - RNA, 19 nt, Artificial Sequence
  Description of Artificial Sequence: Synthetic oligonucleotide
gugguuguccuguuuccau

SEQ ID NO: 2824929 - RNA, 19 nt, Artificial Sequence
  Description of Artificial Sequence: Synthetic oligonucleotide
cauacucauccaggauguc

SEQ ID NO: 2824930 - RNA, 19 nt, Artificial Sequence
  Description of Artificial Sequence: Synthetic oligonucleotide
ccuguaucuccuaaucucu

SEQ ID NO: 2824931 - RNA, 19 nt, Artificial Sequence
  Description of Artificial Sequence: Synthetic oligonucleotide
cuguacuggucauacucau

SEQ ID NO: 2824932 - RNA, 19 nt, Artificial Sequence
  Description of Artificial Sequence: Synthetic oligonucleotide
gguugguauuggcggcagc

SEQ ID NO: 2824933 - RNA, 19 nt, Artificial Sequence
  Description of Artificial Sequence: Synthetic oligonucleotide
gucccuucucuagaaccuc

SEQ ID NO: 2824934 - RNA, 19 nt, Artificial Sequence
  Description of Artificial Sequence: Synthetic oligonucleotide
cgacgauauaaggaugggc

SEQ ID NO: 2824935 - RNA, 19 nt, Artificial Sequence
  Description of Artificial Sequence: Synthetic oligonucleotide
ccucaucuccagcucugcc

SEQ ID NO: 2824936 - RNA, 19 nt, Artificial Sequence
  Description of Artificial Sequence: Synthetic oligonucleotide
cagcuuccucucaugccca

SEQ ID NO: 2824937 - RNA, 19 nt, Artificial Sequence
  Description of Artificial Sequence: Synthetic oligonucleotide
ugguggcaagguagccauc

SEQ ID NO: 2824938 - RNA, 19 nt, Artificial Sequence
  Description of Artificial Sequence: Synthetic oligonucleotide
cagaguucuggaacuuggu

SEQ ID NO: 2824939 - RNA, 19 nt, Artificial Sequence
  Description of Artificial Sequence: Synthetic oligonucleotide
aaggaugggccaggcugua

SEQ ID NO: 2824940 - RNA, 19 nt, Artificial Sequence
  Description of Artificial Sequence: Synthetic oligonucleotide
gggugugaugucugugguc

SEQ ID NO: 2824941 - RNA, 19 nt, Artificial Sequence
  Description of Artificial Sequence: Synthetic oligonucleotide
ggaugggccaggcuguacu

SEQ ID NO: 2824942 - RNA, 19 nt, Artificial Sequence
  Description of Artificial Sequence: Synthetic oligonucleotide
cauugcugggugugguugu

SEQ ID NO: 2824943 - RNA, 19 nt, Artificial Sequence
  Description of Artificial Sequence: Synthetic oligonucleotide
ccgacgauauaaggauggg

SEQ ID NO: 2824944 - RNA, 19 nt, Artificial Sequence
  Description of Artificial Sequence: Synthetic oligonucleotide
gagcugguuguugguggca

SEQ ID NO: 2824945 - RNA, 19 nt, Artificial Sequence
  Description of Artificial Sequence: Synthetic oligonucleotide
gguuuagggguugcuggga

SEQ ID NO: 2824946 - RNA, 19 nt, Artificial Sequence
  Description of Artificial Sequence: Synthetic oligonucleotide
cccuucucuagaaccucac

SEQ ID NO: 2824947 - RNA, 19 nt, Artificial Sequence
  Description of Artificial Sequence: Synthetic oligonucleotide
ugggugugguuguccugua

SEQ ID NO: 2824948 - RNA, 19 nt, Artificial Sequence
  Description of Artificial Sequence: Synthetic oligonucleotide
cugggugugguuguccugu

SEQ ID NO: 2824949 - RNA, 19 nt, Artificial Sequence
  Description of Artificial Sequence: Synthetic oligonucleotide
ccaggaugucaucuucauc

SEQ ID NO: 2824950 - RNA, 19 nt, Artificial Sequence
  Description of Artificial Sequence: Synthetic oligonucleotide
gcugggugugaugucugug

SEQ ID NO: 2824951 - RNA, 19 nt, Artificial Sequence
  Description of Artificial Sequence: Synthetic oligonucleotide
cuucauccucuggguuuag

SEQ ID NO: 2824952 - RNA, 19 nt, Artificial Sequence
  Description of Artificial Sequence: Synthetic oligonucleotide
cugccuucuccaaagucuu

SEQ ID NO: 2824953 - RNA, 19 nt, Artificial Sequence
  Description of Artificial Sequence: Synthetic oligonucleotide
gcugggugugguuguccug

SEQ ID NO: 2824954 - RNA, 19 nt, Artificial Sequence
  Description of Artificial Sequence: Synthetic oligonucleotide
ugggugugguuguccuguu

SEQ ID NO: 2824955 - RNA, 19 nt, Artificial Sequence
  Description of Artificial Sequence: Synthetic oligonucleotide
ccccgacgauauaaggaug

SEQ ID NO: 2824956 - RNA, 19 nt, Artificial Sequence
  Description of Artificial Sequence: Synthetic oligonucleotide
ggucauacucauccaggau

SEQ ID NO: 2824957 - RNA, 19 nt, Artificial Sequence
  Description of Artificial Sequence: Synthetic oligonucleotide
caucuccagcucugccuca

SEQ ID NO: 2824958 - RNA, 19 nt, Artificial Sequence
  Description of Artificial Sequence: Synthetic oligonucleotide
gcuucucucuugguacgac

SEQ ID NO: 2824959 - RNA, 19 nt, Artificial Sequence
  Description of Artificial Sequence: Synthetic oligonucleotide
gguauuggcggcagcuucu

SEQ ID NO: 2824960 - RNA, 19 nt, Artificial Sequence
  Description of Artificial Sequence: Synthetic oligonucleotide
cugcucugccuucuccaaa

SEQ ID NO: 2824961 - RNA, 19 nt, Artificial Sequence
  Description of Artificial Sequence: Synthetic oligonucleotide
caucuucauccucuggguu

SEQ ID NO: 2824962 - RNA, 19 nt, Artificial Sequence
  Description of Artificial Sequence: Synthetic oligonucleotide
guugcugggaggagcuggu

SEQ ID NO: 2824963 - RNA, 19 nt, Artificial Sequence
  Description of Artificial Sequence: Synthetic oligonucleotide
cuccaagguccuaauccau

SEQ ID NO: 2824964 - RNA, 19 nt, Artificial Sequence
  Description of Artificial Sequence: Synthetic oligonucleotide
guacgaccuuuccggccuc

SEQ ID NO: 2824965 - RNA, 19 nt, Artificial Sequence
  Description of Artificial Sequence: Synthetic oligonucleotide
ccagggcuagggcgguugg

SEQ ID NO: 2824966 - RNA, 19 nt, Artificial Sequence
  Description of Artificial Sequence: Synthetic oligonucleotide
gguagccaucacccugcuc

SEQ ID NO: 2824967 - RNA, 19 nt, Artificial Sequence
  Description of Artificial Sequence: Synthetic oligonucleotide
gcaagguagccaucacccu

SEQ ID NO: 2824968 - RNA, 19 nt, Artificial Sequence
  Description of Artificial Sequence: Synthetic oligonucleotide
cccuuuugcuggaucuaga

SEQ ID NO: 2824969 - RNA, 19 nt, Artificial Sequence
  Description of Artificial Sequence: Synthetic oligonucleotide
cccugcucugccuucucca

SEQ ID NO: 2824970 - RNA, 19 nt, Artificial Sequence
  Description of Artificial Sequence: Synthetic oligonucleotide
cugccucagcgccaggccu

SEQ ID NO: 2824971 - RNA, 19 nt, Artificial Sequence
  Description of Artificial Sequence: Synthetic oligonucleotide
cucucuugguacgaccuuu

SEQ ID NO: 2824972 - RNA, 19 nt, Artificial Sequence
  Description of Artificial Sequence: Synthetic oligonucleotide
ggaggagcugguuguuggu

SEQ ID NO: 2824973 - RNA, 19 nt, Artificial Sequence
  Description of Artificial Sequence: Synthetic oligonucleotide
gccucaucuccagcucugc

SEQ ID NO: 2824974 - RNA, 19 nt, Artificial Sequence
  Description of Artificial Sequence: Synthetic oligonucleotide
uugcugggaggagcugguu

SEQ ID NO: 2824975 - RNA, 19 nt, Artificial Sequence
  Description of Artificial Sequence: Synthetic oligonucleotide
ugcuccgaucgugcccuuu

SEQ ID NO: 2824976 - RNA, 19 nt, Artificial Sequence
  Description of Artificial Sequence: Synthetic oligonucleotide
ccuguauccauugcugggu

SEQ ID NO: 2824977 - RNA, 19 nt, Artificial Sequence
  Description of Artificial Sequence: Synthetic oligonucleotide
ccgaucgugcccuuuugcu

SEQ ID NO: 2824978 - RNA, 19 nt, Artificial Sequence
  Description of Artificial Sequence: Synthetic oligonucleotide
cgaccuuuccggccucccc

SEQ ID NO: 2824979 - RNA, 19 nt, Artificial Sequence
  Description of Artificial Sequence: Synthetic oligonucleotide
caucacccugcucugccuu

SEQ ID NO: 2824980 - RNA, 19 nt, Artificial Sequence
  Description of Artificial Sequence: Synthetic oligonucleotide
gcgguugguauuggcggca

SEQ ID NO: 2824981 - RNA, 19 nt, Artificial Sequence
  Description of Artificial Sequence: Synthetic oligonucleotide
ccugcucugccuucuccaa

SEQ ID NO: 2824982 - RNA, 19 nt, Artificial Sequence
  Description of Artificial Sequence: Synthetic oligonucleotide
ucgugcccuuuugcuggau

SEQ ID NO: 2824983 - RNA, 19 nt, Artificial Sequence
  Description of Artificial Sequence: Synthetic oligonucleotide
gcuggaucuagaagggcuu

SEQ ID NO: 2824984 - RNA, 19 nt, Artificial Sequence
  Description of Artificial Sequence: Synthetic oligonucleotide
cuggaucuagaagggcuuu

SEQ ID NO: 2824985 - RNA, 19 nt, Artificial Sequence
  Description of Artificial Sequence: Synthetic oligonucleotide
ggaacuuggucagcagcuu

SEQ ID NO: 2824986 - RNA, 19 nt, Artificial Sequence
  Description of Artificial Sequence: Synthetic oligonucleotide
ggguugcugggaggagcug

SEQ ID NO: 2824987 - RNA, 19 nt, Artificial Sequence
  Description of Artificial Sequence: Synthetic oligonucleotide
gggcuagggcgguugguau

SEQ ID NO: 2824988 - RNA, 19 nt, Artificial Sequence
  Description of Artificial Sequence: Synthetic oligonucleotide
uugcuccgaucgugcccuu

SEQ ID NO: 2824989 - RNA, 19 nt, Artificial Sequence
  Description of Artificial Sequence: Synthetic oligonucleotide
gcuccgaucgugcccuuuu

SEQ ID NO: 2824990 - RNA, 19 nt, Artificial Sequence
  Description of Artificial Sequence: Synthetic oligonucleotide
ggcuagggcgguugguauu

SEQ ID NO: 2824991 - RNA, 19 nt, Artificial Sequence
  Description of Artificial Sequence: Synthetic oligonucleotide
gcucugccuucuccaaagu

SEQ ID NO: 2824992 - RNA, 19 nt, Artificial Sequence
  Description of Artificial Sequence: Synthetic oligonucleotide
gggccaggcuguacugguc

SEQ ID NO: 2824993 - RNA, 19 nt, Artificial Sequence
  Description of Artificial Sequence: Synthetic oligonucleotide
cgguugguauuggcggcag

SEQ ID NO: 2824994 - RNA, 19 nt, Artificial Sequence
  Description of Artificial Sequence: Synthetic oligonucleotide
gggugugguuguccuguau

SEQ ID NO: 2824995 - RNA, 19 nt, Artificial Sequence
  Description of Artificial Sequence: Synthetic oligonucleotide
gggugugguuguccuguuu

SEQ ID NO: 2824996 - RNA, 19 nt, Artificial Sequence
  Description of Artificial Sequence: Synthetic oligonucleotide
ccaucacccugcucugccu

SEQ ID NO: 2824997 - RNA, 19 nt, Artificial Sequence
  Description of Artificial Sequence: Synthetic oligonucleotide
gccaggcuguacuggucau

SEQ ID NO: 2824998 - RNA, 19 nt, Artificial Sequence
  Description of Artificial Sequence: Synthetic oligonucleotide
cagggcuagggcgguuggu

SEQ ID NO: 2824999 - RNA, 19 nt, Artificial Sequence
  Description of Artificial Sequence: Synthetic oligonucleotide
ccaggcuguacuggucaua

SEQ ID NO: 2825000 - RNA, 19 nt, Artificial Sequence
  Description of Artificial Sequence: Synthetic oligonucleotide
gucuguggucuggccucau

SEQ ID NO: 2825001 - RNA, 19 nt, Artificial Sequence
  Description of Artificial Sequence: Synthetic oligonucleotide
gccucagcgccaggccuuu

SEQ ID NO: 2825002 - RNA, 19 nt, Artificial Sequence
  Description of Artificial Sequence: Synthetic oligonucleotide
ccucagcgccaggccuuuu

SEQ ID NO: 2825003 - RNA, 19 nt, Artificial Sequence
  Description of Artificial Sequence: Synthetic oligonucleotide
ugcuccagucgauggaagg

SEQ ID NO: 2825004 - RNA, 19 nt, Artificial Sequence
  Description of Artificial Sequence: Synthetic oligonucleotide
uugcugcuccagucgaugg

SEQ ID NO: 2825005 - RNA, 19 nt, Artificial Sequence
  Description of Artificial Sequence: Synthetic oligonucleotide
uuugcugcuccagucgaug

SEQ ID NO: 2825006 - RNA, 19 nt, Artificial Sequence
  Description of Artificial Sequence: Synthetic oligonucleotide
ucggccgccucguugaaga

SEQ ID NO: 2825007 - RNA, 19 nt, Artificial Sequence
  Description of Artificial Sequence: Synthetic oligonucleotide
uccagucgauggaagggga

SEQ ID NO: 2825008 - RNA, 19 nt, Artificial Sequence
  Description of Artificial Sequence: Synthetic oligonucleotide
cuccagucgauggaagggg

SEQ ID NO: 2825009 - RNA, 19 nt, Artificial Sequence
  Description of Artificial Sequence: Synthetic oligonucleotide
ugcugcuccagucgaugga

SEQ ID NO: 2825010 - RNA, 19 nt, Artificial Sequence
  Description of Artificial Sequence: Synthetic oligonucleotide
ccucguugaagagaaagag

SEQ ID NO: 2825011 - RNA, 19 nt, Artificial Sequence
  Description of Artificial Sequence: Synthetic oligonucleotide
uuuugcugcuccagucgau

SEQ ID NO: 2825012 - RNA, 19 nt, Artificial Sequence
  Description of Artificial Sequence: Synthetic oligonucleotide
cugcuccagucgauggaag

SEQ ID NO: 2825013 - RNA, 19 nt, Artificial Sequence
  Description of Artificial Sequence: Synthetic oligonucleotide
agucgauggaaggggacuu

SEQ ID NO: 2825014 - RNA, 19 nt, Artificial Sequence
  Description of Artificial Sequence: Synthetic oligonucleotide
ccagucgauggaaggggac

SEQ ID NO: 2825015 - RNA, 19 nt, Artificial Sequence
  Description of Artificial Sequence: Synthetic oligonucleotide
gccucguugaagagaaaga

SEQ ID NO: 2825016 - RNA, 19 nt, Artificial Sequence
  Description of Artificial Sequence: Synthetic oligonucleotide
cgccucguugaagagaaag

SEQ ID NO: 2825017 - RNA, 19 nt, Artificial Sequence
  Description of Artificial Sequence: Synthetic oligonucleotide
gccgccucguugaagagaa

SEQ ID NO: 2825018 - RNA, 19 nt, Artificial Sequence
  Description of Artificial Sequence: Synthetic oligonucleotide
cagucgauggaaggggacu

SEQ ID NO: 2825019 - RNA, 19 nt, Artificial Sequence
  Description of Artificial Sequence: Synthetic oligonucleotide
cucggccgccucguugaag

SEQ ID NO: 2825020 - RNA, 19 nt, Artificial Sequence
  Description of Artificial Sequence: Synthetic oligonucleotide
gcugcuccagucgauggaa

SEQ ID NO: 2825021 - RNA, 19 nt, Artificial Sequence
  Description of Artificial Sequence: Synthetic oligonucleotide
ggccgccucguugaagaga

SEQ ID NO: 2825022 - RNA, 19 nt, Artificial Sequence
  Description of Artificial Sequence: Synthetic oligonucleotide
cggccgccucguugaagag

SEQ ID NO: 2825023 - RNA, 19 nt, Artificial Sequence
  Description of Artificial Sequence: Synthetic oligonucleotide
ccgccucguugaagagaaa

SEQ ID NO: 2825024 - RNA, 19 nt, Artificial Sequence
  Description of Artificial Sequence: Synthetic oligonucleotide
uuuauuaacagugaaggcc

SEQ ID NO: 2825025 - RNA, 19 nt, Artificial Sequence
  Description of Artificial Sequence: Synthetic oligonucleotide
uuauuaacagugaaggccc

SEQ ID NO: 2825026 - RNA, 19 nt, Artificial Sequence
  Description of Artificial Sequence: Synthetic oligonucleotide
aaacuauuuauuaacagug

SEQ ID NO: 2825027 - RNA, 19 nt, Artificial Sequence
  Description of Artificial Sequence: Synthetic oligonucleotide
uauaaacuauuuauuaaca

SEQ ID NO: 2825028 - RNA, 19 nt, Artificial Sequence
  Description of Artificial Sequence: Synthetic oligonucleotide
uuucucaacaccacguggg

SEQ ID NO: 2825029 - RNA, 19 nt, Artificial Sequence
  Description of Artificial Sequence: Synthetic oligonucleotide
auaaacuauuuauuaacag

SEQ ID NO: 2825030 - RNA, 19 nt, Artificial Sequence
  Description of Artificial Sequence: Synthetic oligonucleotide
auaucuccggcccacaccc

SEQ ID NO: 2825031 - RNA, 19 nt, Artificial Sequence
  Description of Artificial Sequence: Synthetic oligonucleotide
ucaagaaccagucugggau

SEQ ID NO: 2825032 - RNA, 19 nt, Artificial Sequence
  Description of Artificial Sequence: Synthetic oligonucleotide
cuuggauacacccacagug

SEQ ID NO: 2825033 - RNA, 19 nt, Artificial Sequence
  Description of Artificial Sequence: Synthetic oligonucleotide
cuauuuauuaacagugaag

SEQ ID NO: 2825034 - RNA, 19 nt, Artificial Sequence
  Description of Artificial Sequence: Synthetic oligonucleotide
uuuucucaacaccacgugg

SEQ ID NO: 2825035 - RNA, 19 nt, Artificial Sequence
  Description of Artificial Sequence: Synthetic oligonucleotide
acagugaaggcccagcgac

SEQ ID NO: 2825036 - RNA, 19 nt, Artificial Sequence
  Description of Artificial Sequence: Synthetic oligonucleotide
uucugucuguucaagaacc

SEQ ID NO: 2825037 - RNA, 19 nt, Artificial Sequence
  Description of Artificial Sequence: Synthetic oligonucleotide
gacacgaagaccccaaaag

SEQ ID NO: 2825038 - RNA, 19 nt, Artificial Sequence
  Description of Artificial Sequence: Synthetic oligonucleotide
cagaccauuggccagaacc

SEQ ID NO: 2825039 - RNA, 19 nt, Artificial Sequence
  Description of Artificial Sequence: Synthetic oligonucleotide
cuuggugaggucaaugucc

SEQ ID NO: 2825040 - RNA, 19 nt, Artificial Sequence
  Description of Artificial Sequence: Synthetic oligonucleotide
ucaauguccgcuuuucuca

SEQ ID NO: 2825041 - RNA, 19 nt, Artificial Sequence
  Description of Artificial Sequence: Synthetic oligonucleotide
gauguugguguugaggacg

SEQ ID NO: 2825042 - RNA, 19 nt, Artificial Sequence
  Description of Artificial Sequence: Synthetic oligonucleotide
accacgugggcauaucucc

SEQ ID NO: 2825043 - RNA, 19 nt, Artificial Sequence
  Description of Artificial Sequence: Synthetic oligonucleotide
ucuucuuggauacacccac

SEQ ID NO: 2825044 - RNA, 19 nt, Artificial Sequence
  Description of Artificial Sequence: Synthetic oligonucleotide
ucgauguugguguugagga

SEQ ID NO: 2825045 - RNA, 19 nt, Artificial Sequence
  Description of Artificial Sequence: Synthetic oligonucleotide
ugugcuggaacuucucggg

SEQ ID NO: 2825046 - RNA, 19 nt, Artificial Sequence
  Description of Artificial Sequence: Synthetic oligonucleotide
uuggugaggucaauguccg

SEQ ID NO: 2825047 - RNA, 19 nt, Artificial Sequence
  Description of Artificial Sequence: Synthetic oligonucleotide
aagaccccaaaaguggcgc

SEQ ID NO: 2825048 - RNA, 19 nt, Artificial Sequence
  Description of Artificial Sequence: Synthetic oligonucleotide
ucugaucuucuucagucgc

SEQ ID NO: 2825049 - RNA, 19 nt, Artificial Sequence
  Description of Artificial Sequence: Synthetic oligonucleotide
uaacagugaaggcccagcg

SEQ ID NO: 2825050 - RNA, 19 nt, Artificial Sequence
  Description of Artificial Sequence: Synthetic oligonucleotide
cucauuucuucuuggauac

SEQ ID NO: 2825051 - RNA, 19 nt, Artificial Sequence
  Description of Artificial Sequence: Synthetic oligonucleotide
accucggacacgaagaccc

SEQ ID NO: 2825052 - RNA, 19 nt, Artificial Sequence
  Description of Artificial Sequence: Synthetic oligonucleotide
gaucaccagagacauggcg

SEQ ID NO: 2825053 - RNA, 19 nt, Artificial Sequence
  Description of Artificial Sequence: Synthetic oligonucleotide
uggauacacccacagugcg

SEQ ID NO: 2825054 - RNA, 19 nt, Artificial Sequence
  Description of Artificial Sequence: Synthetic oligonucleotide
acuauuuauuaacagugaa

SEQ ID NO: 2825055 - RNA, 19 nt, Artificial Sequence
  Description of Artificial Sequence: Synthetic oligonucleotide
gaugugcuggaacuucucg

SEQ ID NO: 2825056 - RNA, 19 nt, Artificial Sequence
  Description of Artificial Sequence: Synthetic oligonucleotide
gaugacgcgcuccaccucg

SEQ ID NO: 2825057 - RNA, 19 nt, Artificial Sequence
  Description of Artificial Sequence: Synthetic oligonucleotide
uuggauacacccacagugc

SEQ ID NO: 2825058 - RNA, 19 nt, Artificial Sequence
  Description of Artificial Sequence: Synthetic oligonucleotide
uuguuguccagaccauugg

SEQ ID NO: 2825059 - RNA, 19 nt, Artificial Sequence
  Description of Artificial Sequence: Synthetic oligonucleotide
uucuuggauacacccacag

SEQ ID NO: 2825060 - RNA, 19 nt, Artificial Sequence
  Description of Artificial Sequence: Synthetic oligonucleotide
cuguucaagaaccagucug

SEQ ID NO: 2825061 - RNA, 19 nt, Artificial Sequence
  Description of Artificial Sequence: Synthetic oligonucleotide
ugucuguucaagaaccagu

SEQ ID NO: 2825062 - RNA, 19 nt, Artificial Sequence
  Description of Artificial Sequence: Synthetic oligonucleotide
cuuuccguccuucacgucc

SEQ ID NO: 2825063 - RNA, 19 nt, Artificial Sequence
  Description of Artificial Sequence: Synthetic oligonucleotide
guacuuuccguccuucacg

SEQ ID NO: 2825064 - RNA, 19 nt, Artificial Sequence
  Description of Artificial Sequence: Synthetic oligonucleotide
uguuguccagaccauuggc

SEQ ID NO: 2825065 - RNA, 19 nt, Artificial Sequence
  Description of Artificial Sequence: Synthetic oligonucleotide
augugcuggaacuucucgg

SEQ ID NO: 2825066 - RNA, 19 nt, Artificial Sequence
  Description of Artificial Sequence: Synthetic oligonucleotide
uucucggggaucaccagag

SEQ ID NO: 2825067 - RNA, 19 nt, Artificial Sequence
  Description of Artificial Sequence: Synthetic oligonucleotide
cacgaagaccccaaaagug

SEQ ID NO: 2825068 - RNA, 19 nt, Artificial Sequence
  Description of Artificial Sequence: Synthetic oligonucleotide
uguacuuuccguccuucac

SEQ ID NO: 2825069 - RNA, 19 nt, Artificial Sequence
  Description of Artificial Sequence: Synthetic oligonucleotide
aucaccagagacauggcgg

SEQ ID NO: 2825070 - RNA, 19 nt, Artificial Sequence
  Description of Artificial Sequence: Synthetic oligonucleotide
gggaucaccagagacaugg

SEQ ID NO: 2825071 - RNA, 19 nt, Artificial Sequence
  Description of Artificial Sequence: Synthetic oligonucleotide
gauacacccacagugcggc

SEQ ID NO: 2825072 - RNA, 19 nt, Artificial Sequence
  Description of Artificial Sequence: Synthetic oligonucleotide
aaggcgaucuugcgccgcc

SEQ ID NO: 2825073 - RNA, 19 nt, Artificial Sequence
  Description of Artificial Sequence: Synthetic oligonucleotide
cuuguuguccagaccauug

SEQ ID NO: 2825074 - RNA, 19 nt, Artificial Sequence
  Description of Artificial Sequence: Synthetic oligonucleotide
acucauuucuucuuggaua

SEQ ID NO: 2825075 - RNA, 19 nt, Artificial Sequence
  Description of Artificial Sequence: Synthetic oligonucleotide
aacuauuuauuaacaguga

SEQ ID NO: 2825076 - RNA, 19 nt, Artificial Sequence
  Description of Artificial Sequence: Synthetic oligonucleotide
aauguccgcuuuucucaac

SEQ ID NO: 2825077 - RNA, 19 nt, Artificial Sequence
  Description of Artificial Sequence: Synthetic oligonucleotide
gaucuugcgccgcccaucg

SEQ ID NO: 2825078 - RNA, 19 nt, Artificial Sequence
  Description of Artificial Sequence: Synthetic oligonucleotide
acgaagaccccaaaagugg

SEQ ID NO: 2825079 - RNA, 19 nt, Artificial Sequence
  Description of Artificial Sequence: Synthetic oligonucleotide
ugggcucugaucuucuuca

SEQ ID NO: 2825080 - RNA, 19 nt, Artificial Sequence
  Description of Artificial Sequence: Synthetic oligonucleotide
aaccuggcuguacuuuccg

SEQ ID NO: 2825081 - RNA, 19 nt, Artificial Sequence
  Description of Artificial Sequence: Synthetic oligonucleotide
ucuuggugugcugaccucg

SEQ ID NO: 2825082 - RNA, 19 nt, Artificial Sequence
  Description of Artificial Sequence: Synthetic oligonucleotide
acacgaagaccccaaaagu

SEQ ID NO: 2825083 - RNA, 19 nt, Artificial Sequence
  Description of Artificial Sequence: Synthetic oligonucleotide
guugaggacgcgcaggaug

SEQ ID NO: 2825084 - RNA, 19 nt, Artificial Sequence
  Description of Artificial Sequence: Synthetic oligonucleotide
ucuccagcccucuugguga

SEQ ID NO: 2825085 - RNA, 19 nt, Artificial Sequence
  Description of Artificial Sequence: Synthetic oligonucleotide
aucgauguugguguugagg

SEQ ID NO: 2825086 - RNA, 19 nt, Artificial Sequence
  Description of Artificial Sequence: Synthetic oligonucleotide
auuggccagaaccuggcug

SEQ ID NO: 2825087 - RNA, 19 nt, Artificial Sequence
  Description of Artificial Sequence: Synthetic oligonucleotide
uugaggacgcgcaggaugu

SEQ ID NO: 2825088 - RNA, 19 nt, Artificial Sequence
  Description of Artificial Sequence: Synthetic oligonucleotide
uucuucuuggauacaccca

SEQ ID NO: 2825089 - RNA, 19 nt, Artificial Sequence
  Description of Artificial Sequence: Synthetic oligonucleotide
ucaccagagacauggcggc

SEQ ID NO: 2825090 - RNA, 19 nt, Artificial Sequence
  Description of Artificial Sequence: Synthetic oligonucleotide
aacagugaaggcccagcga

SEQ ID NO: 2825091 - RNA, 19 nt, Artificial Sequence
  Description of Artificial Sequence: Synthetic oligonucleotide
ucuucagucgcuccagguc

SEQ ID NO: 2825092 - RNA, 19 nt, Artificial Sequence
  Description of Artificial Sequence: Synthetic oligonucleotide
uuaacagugaaggcccagc

SEQ ID NO: 2825093 - RNA, 19 nt, Artificial Sequence
  Description of Artificial Sequence: Synthetic oligonucleotide
ucggggaucaccagagaca

SEQ ID NO: 2825094 - RNA, 19 nt, Artificial Sequence
  Description of Artificial Sequence: Synthetic oligonucleotide
ucugggaucuuguacuguc

SEQ ID NO: 2825095 - RNA, 19 nt, Artificial Sequence
  Description of Artificial Sequence: Synthetic oligonucleotide
uugguguugaggacgcgca

SEQ ID NO: 2825096 - RNA, 19 nt, Artificial Sequence
  Description of Artificial Sequence: Synthetic oligonucleotide
cauuucuucuuggauacac

SEQ ID NO: 2825097 - RNA, 19 nt, Artificial Sequence
  Description of Artificial Sequence: Synthetic oligonucleotide
uucucaacaccacgugggc

SEQ ID NO: 2825098 - RNA, 19 nt, Artificial Sequence
  Description of Artificial Sequence: Synthetic oligonucleotide
uacuuuccguccuucacgu

SEQ ID NO: 2825099 - RNA, 19 nt, Artificial Sequence
  Description of Artificial Sequence: Synthetic oligonucleotide
agagacauggcggcggcac

SEQ ID NO: 2825100 - RNA, 19 nt, Artificial Sequence
  Description of Artificial Sequence: Synthetic oligonucleotide
cuggcuguacuuuccgucc

SEQ ID NO: 2825101 - RNA, 19 nt, Artificial Sequence
  Description of Artificial Sequence: Synthetic oligonucleotide
uucaagaaccagucuggga

SEQ ID NO: 2825102 - RNA, 19 nt, Artificial Sequence
  Description of Artificial Sequence: Synthetic oligonucleotide
cuucugucuguucaagaac

SEQ ID NO: 2825103 - RNA, 19 nt, Artificial Sequence
  Description of Artificial Sequence: Synthetic oligonucleotide
auggcgaaggcgaucuugc

SEQ ID NO: 2825104 - RNA, 19 nt, Artificial Sequence
  Description of Artificial Sequence: Synthetic oligonucleotide
ucugucuguucaagaacca

SEQ ID NO: 2825105 - RNA, 19 nt, Artificial Sequence
  Description of Artificial Sequence: Synthetic oligonucleotide
caugauggugaugacgcgc

SEQ ID NO: 2825106 - RNA, 19 nt, Artificial Sequence
  Description of Artificial Sequence: Synthetic oligonucleotide
uccucucgcagcuuguugu

SEQ ID NO: 2825107 - RNA, 19 nt, Artificial Sequence
  Description of Artificial Sequence: Synthetic oligonucleotide
agcucuccagcccucuugg

SEQ ID NO: 2825108 - RNA, 19 nt, Artificial Sequence
  Description of Artificial Sequence: Synthetic oligonucleotide
ucuuggauacacccacagu

SEQ ID NO: 2825109 - RNA, 19 nt, Artificial Sequence
  Description of Artificial Sequence: Synthetic oligonucleotide
gaagaccccaaaaguggcg

SEQ ID NO: 2825110 - RNA, 19 nt, Artificial Sequence
  Description of Artificial Sequence: Synthetic oligonucleotide
ucacaggcauauaaacuau

SEQ ID NO: 2825111 - RNA, 19 nt, Artificial Sequence
  Description of Artificial Sequence: Synthetic oligonucleotide
gucaauguccgcuuuucuc

SEQ ID NO: 2825112 - RNA, 19 nt, Artificial Sequence
  Description of Artificial Sequence: Synthetic oligonucleotide
gcauauaaacuauuuauua

SEQ ID NO: 2825113 - RNA, 19 nt, Artificial Sequence
  Description of Artificial Sequence: Synthetic oligonucleotide
acguccuucugucuguuca

SEQ ID NO: 2825114 - RNA, 19 nt, Artificial Sequence
  Description of Artificial Sequence: Synthetic oligonucleotide
uauuaacagugaaggccca

SEQ ID NO: 2825115 - RNA, 19 nt, Artificial Sequence
  Description of Artificial Sequence: Synthetic oligonucleotide
agcgacucauuucuucuug

SEQ ID NO: 2825116 - RNA, 19 nt, Artificial Sequence
  Description of Artificial Sequence: Synthetic oligonucleotide
cuucacguccuucugucug

SEQ ID NO: 2825117 - RNA, 19 nt, Artificial Sequence
  Description of Artificial Sequence: Synthetic oligonucleotide
cauaucuccggcccacacc

SEQ ID NO: 2825118 - RNA, 19 nt, Artificial Sequence
  Description of Artificial Sequence: Synthetic oligonucleotide
ucuuguacugucguggguu

SEQ ID NO: 2825119 - RNA, 19 nt, Artificial Sequence
  Description of Artificial Sequence: Synthetic oligonucleotide
aacuucucggggaucacca

SEQ ID NO: 2825120 - RNA, 19 nt, Artificial Sequence
  Description of Artificial Sequence: Synthetic oligonucleotide
auggcggcggcacacucgg

SEQ ID NO: 2825121 - RNA, 19 nt, Artificial Sequence
  Description of Artificial Sequence: Synthetic oligonucleotide
cagcuuguuguccagacca

SEQ ID NO: 2825122 - RNA, 19 nt, Artificial Sequence
  Description of Artificial Sequence: Synthetic oligonucleotide
acacccacagugcggcccc

SEQ ID NO: 2825123 - RNA, 19 nt, Artificial Sequence
  Description of Artificial Sequence: Synthetic oligonucleotide
agugaaggcccagcgacuc

SEQ ID NO: 2825124 - RNA, 19 nt, Artificial Sequence
  Description of Artificial Sequence: Synthetic oligonucleotide
uggaacuucucggggauca

SEQ ID NO: 2825125 - RNA, 19 nt, Artificial Sequence
  Description of Artificial Sequence: Synthetic oligonucleotide
auguugguguugaggacgc

SEQ ID NO: 2825126 - RNA, 19 nt, Artificial Sequence
  Description of Artificial Sequence: Synthetic oligonucleotide
ccaaaaguggcgcagcccc

SEQ ID NO: 2825127 - RNA, 19 nt, Artificial Sequence
  Description of Artificial Sequence: Synthetic oligonucleotide
acgugggcauaucuccggc

SEQ ID NO: 2825128 - RNA, 19 nt, Artificial Sequence
  Description of Artificial Sequence: Synthetic oligonucleotide
cguggguucugcaugaugg

SEQ ID NO: 2825129 - RNA, 19 nt, Artificial Sequence
  Description of Artificial Sequence: Synthetic oligonucleotide
gauggcgaaggcgaucuug

SEQ ID NO: 2825130 - RNA, 19 nt, Artificial Sequence
  Description of Artificial Sequence: Synthetic oligonucleotide
aagaaccagucugggaucu

SEQ ID NO: 2825131 - RNA, 19 nt, Artificial Sequence
  Description of Artificial Sequence: Synthetic oligonucleotide
cugggaucuuguacugucg

SEQ ID NO: 2825132 - RNA, 19 nt, Artificial Sequence
  Description of Artificial Sequence: Synthetic oligonucleotide
uuuccguccuucacguccu

SEQ ID NO: 2825133 - RNA, 19 nt, Artificial Sequence
  Description of Artificial Sequence: Synthetic oligonucleotide
ucuugcgccgcccaucgau

SEQ ID NO: 2825134 - RNA, 19 nt, Artificial Sequence
  Description of Artificial Sequence: Synthetic oligonucleotide
cuuggugugcugaccucgg

SEQ ID NO: 2825135 - RNA, 19 nt, Artificial Sequence
  Description of Artificial Sequence: Synthetic oligonucleotide
cugcaugauggugaugacg

SEQ ID NO: 2825136 - RNA, 19 nt, Artificial Sequence
  Description of Artificial Sequence: Synthetic oligonucleotide
auguccgcuuuucucaaca

SEQ ID NO: 2825137 - RNA, 19 nt, Artificial Sequence
  Description of Artificial Sequence: Synthetic oligonucleotide
ugucguggguucugcauga

SEQ ID NO: 2825138 - RNA, 19 nt, Artificial Sequence
  Description of Artificial Sequence: Synthetic oligonucleotide
ucucgcagcuuguugucca

SEQ ID NO: 2825139 - RNA, 19 nt, Artificial Sequence
  Description of Artificial Sequence: Synthetic oligonucleotide
cucggggaucaccagagac

SEQ ID NO: 2825140 - RNA, 19 nt, Artificial Sequence
  Description of Artificial Sequence: Synthetic oligonucleotide
cacagugcggccccggcgg

SEQ ID NO: 2825141 - RNA, 19 nt, Artificial Sequence
  Description of Artificial Sequence: Synthetic oligonucleotide
gugggcauaucuccggccc

SEQ ID NO: 2825142 - RNA, 19 nt, Artificial Sequence
  Description of Artificial Sequence: Synthetic oligonucleotide
uggugugcugaccucggac

SEQ ID NO: 2825143 - RNA, 19 nt, Artificial Sequence
  Description of Artificial Sequence: Synthetic oligonucleotide
ugaccucggacacgaagac

SEQ ID NO: 2825144 - RNA, 19 nt, Artificial Sequence
  Description of Artificial Sequence: Synthetic oligonucleotide
uccuucacguccuucuguc

SEQ ID NO: 2825145 - RNA, 19 nt, Artificial Sequence
  Description of Artificial Sequence: Synthetic oligonucleotide
uucuucagucgcuccaggu

SEQ ID NO: 2825146 - RNA, 19 nt, Artificial Sequence
  Description of Artificial Sequence: Synthetic oligonucleotide
cugaccucggacacgaaga

SEQ ID NO: 2825147 - RNA, 19 nt, Artificial Sequence
  Description of Artificial Sequence: Synthetic oligonucleotide
gcgaaggcgaucuugcgcc

SEQ ID NO: 2825148 - RNA, 19 nt, Artificial Sequence
  Description of Artificial Sequence: Synthetic oligonucleotide
guugguguugaggacgcgc

SEQ ID NO: 2825149 - RNA, 19 nt, Artificial Sequence
  Description of Artificial Sequence: Synthetic oligonucleotide
uccgugagcucuccagccc

SEQ ID NO: 2825150 - RNA, 19 nt, Artificial Sequence
  Description of Artificial Sequence: Synthetic oligonucleotide
aggucaauguccgcuuuuc

SEQ ID NO: 2825151 - RNA, 19 nt, Artificial Sequence
  Description of Artificial Sequence: Synthetic oligonucleotide
agucugggaucuuguacug

SEQ ID NO: 2825152 - RNA, 19 nt, Artificial Sequence
  Description of Artificial Sequence: Synthetic oligonucleotide
auuaacagugaaggcccag

SEQ ID NO: 2825153 - RNA, 19 nt, Artificial Sequence
  Description of Artificial Sequence: Synthetic oligonucleotide
gcucugaucuucuucaguc

SEQ ID NO: 2825154 - RNA, 19 nt, Artificial Sequence
  Description of Artificial Sequence: Synthetic oligonucleotide
uucacguccuucugucugu

SEQ ID NO: 2825155 - RNA, 19 nt, Artificial Sequence
  Description of Artificial Sequence: Synthetic oligonucleotide
ugugcugaccucggacacg

SEQ ID NO: 2825156 - RNA, 19 nt, Artificial Sequence
  Description of Artificial Sequence: Synthetic oligonucleotide
accagagacauggcggcgg

SEQ ID NO: 2825157 - RNA, 19 nt, Artificial Sequence
  Description of Artificial Sequence: Synthetic oligonucleotide
ugguguugaggacgcgcag

SEQ ID NO: 2825158 - RNA, 19 nt, Artificial Sequence
  Description of Artificial Sequence: Synthetic oligonucleotide
ggugaugacgcgcuccacc

SEQ ID NO: 2825159 - RNA, 19 nt, Artificial Sequence
  Description of Artificial Sequence: Synthetic oligonucleotide
auggugaugacgcgcucca

SEQ ID NO: 2825160 - RNA, 19 nt, Artificial Sequence
  Description of Artificial Sequence: Synthetic oligonucleotide
cacgugggcauaucuccgg

SEQ ID NO: 2825161 - RNA, 19 nt, Artificial Sequence
  Description of Artificial Sequence: Synthetic oligonucleotide
gucuguucaagaaccaguc

SEQ ID NO: 2825162 - RNA, 19 nt, Artificial Sequence
  Description of Artificial Sequence: Synthetic oligonucleotide
cuccgugagcucuccagcc

SEQ ID NO: 2825163 - RNA, 19 nt, Artificial Sequence
  Description of Artificial Sequence: Synthetic oligonucleotide
agucgcuccagguccucuc

SEQ ID NO: 2825164 - RNA, 19 nt, Artificial Sequence
  Description of Artificial Sequence: Synthetic oligonucleotide
gacgcgcaggaugugcugg

SEQ ID NO: 2825165 - RNA, 19 nt, Artificial Sequence
  Description of Artificial Sequence: Synthetic oligonucleotide
gaaccagucugggaucuug

SEQ ID NO: 2825166 - RNA, 19 nt, Artificial Sequence
  Description of Artificial Sequence: Synthetic oligonucleotide
caagaaccagucugggauc

SEQ ID NO: 2825167 - RNA, 19 nt, Artificial Sequence
  Description of Artificial Sequence: Synthetic oligonucleotide
agaccauuggccagaaccu

SEQ ID NO: 2825168 - RNA, 19 nt, Artificial Sequence
  Description of Artificial Sequence: Synthetic oligonucleotide
cugucguggguucugcaug

SEQ ID NO: 2825169 - RNA, 19 nt, Artificial Sequence
  Description of Artificial Sequence: Synthetic oligonucleotide
aacaccacgugggcauauc

SEQ ID NO: 2825170 - RNA, 19 nt, Artificial Sequence
  Description of Artificial Sequence: Synthetic oligonucleotide
cuuguacugucguggguuc

SEQ ID NO: 2825171 - RNA, 19 nt, Artificial Sequence
  Description of Artificial Sequence: Synthetic oligonucleotide
ucguggguucugcaugaug

SEQ ID NO: 2825172 - RNA, 19 nt, Artificial Sequence
  Description of Artificial Sequence: Synthetic oligonucleotide
cauggcggcggcacacucg

SEQ ID NO: 2825173 - RNA, 19 nt, Artificial Sequence
  Description of Artificial Sequence: Synthetic oligonucleotide
aggcccagcgacucauuuc

SEQ ID NO: 2825174 - RNA, 19 nt, Artificial Sequence
  Description of Artificial Sequence: Synthetic oligonucleotide
cucuccagcccucuuggug

SEQ ID NO: 2825175 - RNA, 19 nt, Artificial Sequence
  Description of Artificial Sequence: Synthetic oligonucleotide
gaacuucucggggaucacc

SEQ ID NO: 2825176 - RNA, 19 nt, Artificial Sequence
  Description of Artificial Sequence: Synthetic oligonucleotide
acugucguggguucugcau

SEQ ID NO: 2825177 - RNA, 19 nt, Artificial Sequence
  Description of Artificial Sequence: Synthetic oligonucleotide
gacgcgcuccaccucgucc

SEQ ID NO: 2825178 - RNA, 19 nt, Artificial Sequence
  Description of Artificial Sequence: Synthetic oligonucleotide
cuucuucagucgcuccagg

SEQ ID NO: 2825179 - RNA, 19 nt, Artificial Sequence
  Description of Artificial Sequence: Synthetic oligonucleotide
uacacccacagugcggccc

SEQ ID NO: 2825180 - RNA, 19 nt, Artificial Sequence
  Description of Artificial Sequence: Synthetic oligonucleotide
ucucaacaccacgugggca

SEQ ID NO: 2825181 - RNA, 19 nt, Artificial Sequence
  Description of Artificial Sequence: Synthetic oligonucleotide
uggcgaaggcgaucuugcg

SEQ ID NO: 2825182 - RNA, 19 nt, Artificial Sequence
  Description of Artificial Sequence: Synthetic oligonucleotide
auacacccacagugcggcc

SEQ ID NO: 2825183 - RNA, 19 nt, Artificial Sequence
  Description of Artificial Sequence: Synthetic oligonucleotide
gauggcagugauggcgaag

SEQ ID NO: 2825184 - RNA, 19 nt, Artificial Sequence
  Description of Artificial Sequence: Synthetic oligonucleotide
accccaaaaguggcgcagc

SEQ ID NO: 2825185 - RNA, 19 nt, Artificial Sequence
  Description of Artificial Sequence: Synthetic oligonucleotide
ucggacacgaagaccccaa

SEQ ID NO: 2825186 - RNA, 19 nt, Artificial Sequence
  Description of Artificial Sequence: Synthetic oligonucleotide
cugucuguucaagaaccag

SEQ ID NO: 2825187 - RNA, 19 nt, Artificial Sequence
  Description of Artificial Sequence: Synthetic oligonucleotide
aguggucuuggugugcuga

SEQ ID NO: 2825188 - RNA, 19 nt, Artificial Sequence
  Description of Artificial Sequence: Synthetic oligonucleotide
accucguccuccgugagcu

SEQ ID NO: 2825189 - RNA, 19 nt, Artificial Sequence
  Description of Artificial Sequence: Synthetic oligonucleotide
gaaccuggcuguacuuucc

SEQ ID NO: 2825190 - RNA, 19 nt, Artificial Sequence
  Description of Artificial Sequence: Synthetic oligonucleotide
acaccacgugggcauaucu

SEQ ID NO: 2825191 - RNA, 19 nt, Artificial Sequence
  Description of Artificial Sequence: Synthetic oligonucleotide
augauggugaugacgcgcu

SEQ ID NO: 2825192 - RNA, 19 nt, Artificial Sequence
  Description of Artificial Sequence: Synthetic oligonucleotide
acaggcauauaaacuauuu

SEQ ID NO: 2825193 - RNA, 19 nt, Artificial Sequence
  Description of Artificial Sequence: Synthetic oligonucleotide
aaggcccagcgacucauuu

SEQ ID NO: 2825194 - RNA, 19 nt, Artificial Sequence
  Description of Artificial Sequence: Synthetic oligonucleotide
uguccgcuuuucucaacac

SEQ ID NO: 2825195 - RNA, 19 nt, Artificial Sequence
  Description of Artificial Sequence: Synthetic oligonucleotide
gaccccaaaaguggcgcag

SEQ ID NO: 2825196 - RNA, 19 nt, Artificial Sequence
  Description of Artificial Sequence: Synthetic oligonucleotide
gucgcuccagguccucucg

SEQ ID NO: 2825197 - RNA, 19 nt, Artificial Sequence
  Description of Artificial Sequence: Synthetic oligonucleotide
uucagucgcuccagguccu

SEQ ID NO: 2825198 - RNA, 19 nt, Artificial Sequence
  Description of Artificial Sequence: Synthetic oligonucleotide
ucugcaugauggugaugac

SEQ ID NO: 2825199 - RNA, 19 nt, Artificial Sequence
  Description of Artificial Sequence: Synthetic oligonucleotide
gguguugaggacgcgcagg

SEQ ID NO: 2825200 - RNA, 19 nt, Artificial Sequence
  Description of Artificial Sequence: Synthetic oligonucleotide
ugggcauaucuccggccca

SEQ ID NO: 2825201 - RNA, 19 nt, Artificial Sequence
  Description of Artificial Sequence: Synthetic oligonucleotide
gaccauuggccagaaccug

SEQ ID NO: 2825202 - RNA, 19 nt, Artificial Sequence
  Description of Artificial Sequence: Synthetic oligonucleotide
acauggcggcggcacacuc

SEQ ID NO: 2825203 - RNA, 19 nt, Artificial Sequence
  Description of Artificial Sequence: Synthetic oligonucleotide
aucuuguacugucgugggu

SEQ ID NO: 2825204 - RNA, 19 nt, Artificial Sequence
  Description of Artificial Sequence: Synthetic oligonucleotide
uggcuguacuuuccguccu

SEQ ID NO: 2825205 - RNA, 19 nt, Artificial Sequence
  Description of Artificial Sequence: Synthetic oligonucleotide
gcugaccucggacacgaag

SEQ ID NO: 2825206 - RNA, 19 nt, Artificial Sequence
  Description of Artificial Sequence: Synthetic oligonucleotide
cagucugggaucuuguacu

SEQ ID NO: 2825207 - RNA, 19 nt, Artificial Sequence
  Description of Artificial Sequence: Synthetic oligonucleotide
guguugaggacgcgcagga

SEQ ID NO: 2825208 - RNA, 19 nt, Artificial Sequence
  Description of Artificial Sequence: Synthetic oligonucleotide
ggcgaaggcgaucuugcgc

SEQ ID NO: 2825209 - RNA, 19 nt, Artificial Sequence
  Description of Artificial Sequence: Synthetic oligonucleotide
ucuccggcccacacccuug

SEQ ID NO: 2825210 - RNA, 19 nt, Artificial Sequence
  Description of Artificial Sequence: Synthetic oligonucleotide
cuugcgccgcccaucgaug

SEQ ID NO: 2825211 - RNA, 19 nt, Artificial Sequence
  Description of Artificial Sequence: Synthetic oligonucleotide
ggugugcugaccucggaca

SEQ ID NO: 2825212 - RNA, 19 nt, Artificial Sequence
  Description of Artificial Sequence: Synthetic oligonucleotide
caggcauauaaacuauuua

SEQ ID NO: 2825213 - RNA, 19 nt, Artificial Sequence
  Description of Artificial Sequence: Synthetic oligonucleotide
ggauacacccacagugcgg

SEQ ID NO: 2825214 - RNA, 19 nt, Artificial Sequence
  Description of Artificial Sequence: Synthetic oligonucleotide
acgcgcuccaccucguccu

SEQ ID NO: 2825215 - RNA, 19 nt, Artificial Sequence
  Description of Artificial Sequence: Synthetic oligonucleotide
ugaggucaauguccgcuuu

SEQ ID NO: 2825216 - RNA, 19 nt, Artificial Sequence
  Description of Artificial Sequence: Synthetic oligonucleotide
acuuuccguccuucacguc

SEQ ID NO: 2825217 - RNA, 19 nt, Artificial Sequence
  Description of Artificial Sequence: Synthetic oligonucleotide
caccacgugggcauaucuc

SEQ ID NO: 2825218 - RNA, 19 nt, Artificial Sequence
  Description of Artificial Sequence: Synthetic oligonucleotide
ggcggcggcacacucggcg

SEQ ID NO: 2825219 - RNA, 19 nt, Artificial Sequence
  Description of Artificial Sequence: Synthetic oligonucleotide
aaccagucugggaucuugu

SEQ ID NO: 2825220 - RNA, 19 nt, Artificial Sequence
  Description of Artificial Sequence: Synthetic oligonucleotide
ugaaggcccagcgacucau

SEQ ID NO: 2825221 - RNA, 19 nt, Artificial Sequence
  Description of Artificial Sequence: Synthetic oligonucleotide
gugugcugaccucggacac

SEQ ID NO: 2825222 - RNA, 19 nt, Artificial Sequence
  Description of Artificial Sequence: Synthetic oligonucleotide
cggcccacacccuugaugg

SEQ ID NO: 2825223 - RNA, 19 nt, Artificial Sequence
  Description of Artificial Sequence: Synthetic oligonucleotide
acagugcggccccggcggc

SEQ ID NO: 2825224 - RNA, 19 nt, Artificial Sequence
  Description of Artificial Sequence: Synthetic oligonucleotide
agcccucuuggugagguca

SEQ ID NO: 2825225 - RNA, 19 nt, Artificial Sequence
  Description of Artificial Sequence: Synthetic oligonucleotide
uuggugugcugaccucgga

SEQ ID NO: 2825226 - RNA, 19 nt, Artificial Sequence
  Description of Artificial Sequence: Synthetic oligonucleotide
uggucuuggugugcugacc

SEQ ID NO: 2825227 - RNA, 19 nt, Artificial Sequence
  Description of Artificial Sequence: Synthetic oligonucleotide
gugggcucugaucuucuuc

SEQ ID NO: 2825228 - RNA, 19 nt, Artificial Sequence
  Description of Artificial Sequence: Synthetic oligonucleotide
uacugucguggguucugca

SEQ ID NO: 2825229 - RNA, 19 nt, Artificial Sequence
  Description of Artificial Sequence: Synthetic oligonucleotide
cagguccucucgcagcuug

SEQ ID NO: 2825230 - RNA, 19 nt, Artificial Sequence
  Description of Artificial Sequence: Synthetic oligonucleotide
uguugguguugaggacgcg

SEQ ID NO: 2825231 - RNA, 19 nt, Artificial Sequence
  Description of Artificial Sequence: Synthetic oligonucleotide
ucucggggaucaccagaga

SEQ ID NO: 2825232 - RNA, 19 nt, Artificial Sequence
  Description of Artificial Sequence: Synthetic oligonucleotide
cuucucggggaucaccaga

SEQ ID NO: 2825233 - RNA, 19 nt, Artificial Sequence
  Description of Artificial Sequence: Synthetic oligonucleotide
agaccccaaaaguggcgca

SEQ ID NO: 2825234 - RNA, 19 nt, Artificial Sequence
  Description of Artificial Sequence: Synthetic oligonucleotide
gaccucggacacgaagacc

SEQ ID NO: 2825235 - RNA, 19 nt, Artificial Sequence
  Description of Artificial Sequence: Synthetic oligonucleotide
caggaugugcuggaacuuc

SEQ ID NO: 2825236 - RNA, 19 nt, Artificial Sequence
  Description of Artificial Sequence: Synthetic oligonucleotide
ccagucugggaucuuguac

SEQ ID NO: 2825237 - RNA, 19 nt, Artificial Sequence
  Description of Artificial Sequence: Synthetic oligonucleotide
acacccuugauggcaguga

SEQ ID NO: 2825238 - RNA, 19 nt, Artificial Sequence
  Description of Artificial Sequence: Synthetic oligonucleotide
ugaugacgcgcuccaccuc

SEQ ID NO: 2825239 - RNA, 19 nt, Artificial Sequence
  Description of Artificial Sequence: Synthetic oligonucleotide
cucgcagcuuguuguccag

SEQ ID NO: 2825240 - RNA, 19 nt, Artificial Sequence
  Description of Artificial Sequence: Synthetic oligonucleotide
guccucucgcagcuuguug

SEQ ID NO: 2825241 - RNA, 19 nt, Artificial Sequence
  Description of Artificial Sequence: Synthetic oligonucleotide
cuucuuggauacacccaca

SEQ ID NO: 2825242 - RNA, 19 nt, Artificial Sequence
  Description of Artificial Sequence: Synthetic oligonucleotide
gaaggcgaucuugcgccgc

SEQ ID NO: 2825243 - RNA, 19 nt, Artificial Sequence
  Description of Artificial Sequence: Synthetic oligonucleotide
gcaugauggugaugacgcg

SEQ ID NO: 2825244 - RNA, 19 nt, Artificial Sequence
  Description of Artificial Sequence: Synthetic oligonucleotide
cucaacaccacgugggcau

SEQ ID NO: 2825245 - RNA, 19 nt, Artificial Sequence
  Description of Artificial Sequence: Synthetic oligonucleotide
gugaugacgcgcuccaccu

SEQ ID NO: 2825246 - RNA, 19 nt, Artificial Sequence
  Description of Artificial Sequence: Synthetic oligonucleotide
guccuucugucuguucaag

SEQ ID NO: 2825247 - RNA, 19 nt, Artificial Sequence
  Description of Artificial Sequence: Synthetic oligonucleotide
accuggcuguacuuuccgu

SEQ ID NO: 2825248 - RNA, 19 nt, Artificial Sequence
  Description of Artificial Sequence: Synthetic oligonucleotide
cucucgcagcuuguugucc

SEQ ID NO: 2825249 - RNA, 19 nt, Artificial Sequence
  Description of Artificial Sequence: Synthetic oligonucleotide
ccauuggccagaaccuggc

SEQ ID NO: 2825250 - RNA, 19 nt, Artificial Sequence
  Description of Artificial Sequence: Synthetic oligonucleotide
cgaagaccccaaaaguggc

SEQ ID NO: 2825251 - RNA, 19 nt, Artificial Sequence
  Description of Artificial Sequence: Synthetic oligonucleotide
ccuggcuguacuuuccguc

SEQ ID NO: 2825252 - RNA, 19 nt, Artificial Sequence
  Description of Artificial Sequence: Synthetic oligonucleotide
uugcgccgcccaucgaugu

SEQ ID NO: 2825253 - RNA, 19 nt, Artificial Sequence
  Description of Artificial Sequence: Synthetic oligonucleotide
cuguacuuuccguccuuca

SEQ ID NO: 2825254 - RNA, 19 nt, Artificial Sequence
  Description of Artificial Sequence: Synthetic oligonucleotide
uuguacugucguggguucu

SEQ ID NO: 2825255 - RNA, 19 nt, Artificial Sequence
  Description of Artificial Sequence: Synthetic oligonucleotide
uggugaggucaauguccgc

SEQ ID NO: 2825256 - RNA, 19 nt, Artificial Sequence
  Description of Artificial Sequence: Synthetic oligonucleotide
ggguucugcaugaugguga

SEQ ID NO: 2825257 - RNA, 19 nt, Artificial Sequence
  Description of Artificial Sequence: Synthetic oligonucleotide
caauguccgcuuuucucaa

SEQ ID NO: 2825258 - RNA, 19 nt, Artificial Sequence
  Description of Artificial Sequence: Synthetic oligonucleotide
accagucugggaucuugua

SEQ ID NO: 2825259 - RNA, 19 nt, Artificial Sequence
  Description of Artificial Sequence: Synthetic oligonucleotide
guacugucguggguucugc

SEQ ID NO: 2825260 - RNA, 19 nt, Artificial Sequence
  Description of Artificial Sequence: Synthetic oligonucleotide
gcagcuuguuguccagacc

SEQ ID NO: 2825261 - RNA, 19 nt, Artificial Sequence
  Description of Artificial Sequence: Synthetic oligonucleotide
ccacgugggcauaucuccg

SEQ ID NO: 2825262 - RNA, 19 nt, Artificial Sequence
  Description of Artificial Sequence: Synthetic oligonucleotide
cuccagcccucuuggugag

SEQ ID NO: 2825263 - RNA, 19 nt, Artificial Sequence
  Description of Artificial Sequence: Synthetic oligonucleotide
gugauggcgaaggcgaucu

SEQ ID NO: 2825264 - RNA, 19 nt, Artificial Sequence
  Description of Artificial Sequence: Synthetic oligonucleotide
cacacccuugauggcagug

SEQ ID NO: 2825265 - RNA, 19 nt, Artificial Sequence
  Description of Artificial Sequence: Synthetic oligonucleotide
gugcugaccucggacacga

SEQ ID NO: 2825266 - RNA, 19 nt, Artificial Sequence
  Description of Artificial Sequence: Synthetic oligonucleotide
caccagagacauggcggcg

SEQ ID NO: 2825267 - RNA, 19 nt, Artificial Sequence
  Description of Artificial Sequence: Synthetic oligonucleotide
uaucuccggcccacacccu

SEQ ID NO: 2825268 - RNA, 19 nt, Artificial Sequence
  Description of Artificial Sequence: Synthetic oligonucleotide
aggcgaucuugcgccgccc

SEQ ID NO: 2825269 - RNA, 19 nt, Artificial Sequence
  Description of Artificial Sequence: Synthetic oligonucleotide
ucguccuccgugagcucuc

SEQ ID NO: 2825270 - RNA, 19 nt, Artificial Sequence
  Description of Artificial Sequence: Synthetic oligonucleotide
aucuccggcccacacccuu

SEQ ID NO: 2825271 - RNA, 19 nt, Artificial Sequence
  Description of Artificial Sequence: Synthetic oligonucleotide
ggugaggucaauguccgcu

SEQ ID NO: 2825272 - RNA, 19 nt, Artificial Sequence
  Description of Artificial Sequence: Synthetic oligonucleotide
ggucuuggugugcugaccu

SEQ ID NO: 2825273 - RNA, 19 nt, Artificial Sequence
  Description of Artificial Sequence: Synthetic oligonucleotide
gucuuggugugcugaccuc

SEQ ID NO: 2825274 - RNA, 19 nt, Artificial Sequence
  Description of Artificial Sequence: Synthetic oligonucleotide
ggacacgaagaccccaaaa

SEQ ID NO: 2825275 - RNA, 19 nt, Artificial Sequence
  Description of Artificial Sequence: Synthetic oligonucleotide
aggacgcgcaggaugugcu

SEQ ID NO: 2825276 - RNA, 19 nt, Artificial Sequence
  Description of Artificial Sequence: Synthetic oligonucleotide
ggcccagcgacucauuucu

SEQ ID NO: 2825277 - RNA, 19 nt, Artificial Sequence
  Description of Artificial Sequence: Synthetic oligonucleotide
cugaucuucuucagucgcu

SEQ ID NO: 2825278 - RNA, 19 nt, Artificial Sequence
  Description of Artificial Sequence: Synthetic oligonucleotide
ccuccgugagcucuccagc

SEQ ID NO: 2825279 - RNA, 19 nt, Artificial Sequence
  Description of Artificial Sequence: Synthetic oligonucleotide
ugugggcucugaucuucuu

SEQ ID NO: 2825280 - RNA, 19 nt, Artificial Sequence
  Description of Artificial Sequence: Synthetic oligonucleotide
uguugaggacgcgcaggau

SEQ ID NO: 2825281 - RNA, 19 nt, Artificial Sequence
  Description of Artificial Sequence: Synthetic oligonucleotide
acgcgcaggaugugcugga

SEQ ID NO: 2825282 - RNA, 19 nt, Artificial Sequence
  Description of Artificial Sequence: Synthetic oligonucleotide
gcggccaguggucuuggug

SEQ ID NO: 2825283 - RNA, 19 nt, Artificial Sequence
  Description of Artificial Sequence: Synthetic oligonucleotide
ugaggacgcgcaggaugug

SEQ ID NO: 2825284 - RNA, 19 nt, Artificial Sequence
  Description of Artificial Sequence: Synthetic oligonucleotide
gcauaucuccggcccacac

SEQ ID NO: 2825285 - RNA, 19 nt, Artificial Sequence
  Description of Artificial Sequence: Synthetic oligonucleotide
ucaacaccacgugggcaua

SEQ ID NO: 2825286 - RNA, 19 nt, Artificial Sequence
  Description of Artificial Sequence: Synthetic oligonucleotide
uccagcccucuuggugagg

SEQ ID NO: 2825287 - RNA, 19 nt, Artificial Sequence
  Description of Artificial Sequence: Synthetic oligonucleotide
cccagcgacucauuucuuc

SEQ ID NO: 2825288 - RNA, 19 nt, Artificial Sequence
  Description of Artificial Sequence: Synthetic oligonucleotide
gggcucugaucuucuucag

SEQ ID NO: 2825289 - RNA, 19 nt, Artificial Sequence
  Description of Artificial Sequence: Synthetic oligonucleotide
gcggcggcacacucggcgg

SEQ ID NO: 2825290 - RNA, 19 nt, Artificial Sequence
  Description of Artificial Sequence: Synthetic oligonucleotide
ugacgcgcuccaccucguc

SEQ ID NO: 2825291 - RNA, 19 nt, Artificial Sequence
  Description of Artificial Sequence: Synthetic oligonucleotide
gugaaggcccagcgacuca

SEQ ID NO: 2825292 - RNA, 19 nt, Artificial Sequence
  Description of Artificial Sequence: Synthetic oligonucleotide
ggccaguggucuuggugug

SEQ ID NO: 2825293 - RNA, 19 nt, Artificial Sequence
  Description of Artificial Sequence: Synthetic oligonucleotide
cacguccuucugucuguuc

SEQ ID NO: 2825294 - RNA, 19 nt, Artificial Sequence
  Description of Artificial Sequence: Synthetic oligonucleotide
guggguucugcaugauggu

SEQ ID NO: 2825295 - RNA, 19 nt, Artificial Sequence
  Description of Artificial Sequence: Synthetic oligonucleotide
caguggucuuggugugcug

SEQ ID NO: 2825296 - RNA, 19 nt, Artificial Sequence
  Description of Artificial Sequence: Synthetic oligonucleotide
ccagagacauggcggcggc

SEQ ID NO: 2825297 - RNA, 19 nt, Artificial Sequence
  Description of Artificial Sequence: Synthetic oligonucleotide
agcuuguuguccagaccau

SEQ ID NO: 2825298 - RNA, 19 nt, Artificial Sequence
  Description of Artificial Sequence: Synthetic oligonucleotide
guucugcaugauggugaug

SEQ ID NO: 2825299 - RNA, 19 nt, Artificial Sequence
  Description of Artificial Sequence: Synthetic oligonucleotide
ccgcuuuucucaacaccac

SEQ ID NO: 2825300 - RNA, 19 nt, Artificial Sequence
  Description of Artificial Sequence: Synthetic oligonucleotide
gaggucaauguccgcuuuu

SEQ ID NO: 2825301 - RNA, 19 nt, Artificial Sequence
  Description of Artificial Sequence: Synthetic oligonucleotide
ugauggcgaaggcgaucuu

SEQ ID NO: 2825302 - RNA, 19 nt, Artificial Sequence
  Description of Artificial Sequence: Synthetic oligonucleotide
ggacgcgcaggaugugcug

SEQ ID NO: 2825303 - RNA, 19 nt, Artificial Sequence
  Description of Artificial Sequence: Synthetic oligonucleotide
ugcgccgcccaucgauguu

SEQ ID NO: 2825304 - RNA, 19 nt, Artificial Sequence
  Description of Artificial Sequence: Synthetic oligonucleotide
cucggacacgaagacccca

SEQ ID NO: 2825305 - RNA, 19 nt, Artificial Sequence
  Description of Artificial Sequence: Synthetic oligonucleotide
cgcagcuuguuguccagac

SEQ ID NO: 2825306 - RNA, 19 nt, Artificial Sequence
  Description of Artificial Sequence: Synthetic oligonucleotide
ccacagugcggccccggcg

SEQ ID NO: 2825307 - RNA, 19 nt, Artificial Sequence
  Description of Artificial Sequence: Synthetic oligonucleotide
agugcggccccggcggcca

SEQ ID NO: 2825308 - RNA, 19 nt, Artificial Sequence
  Description of Artificial Sequence: Synthetic oligonucleotide
ggaucaccagagacauggc

SEQ ID NO: 2825309 - RNA, 19 nt, Artificial Sequence
  Description of Artificial Sequence: Synthetic oligonucleotide
gugaggucaauguccgcuu

SEQ ID NO: 2825310 - RNA, 19 nt, Artificial Sequence
  Description of Artificial Sequence: Synthetic oligonucleotide
acccacagugcggccccgg

SEQ ID NO: 2825311 - RNA, 19 nt, Artificial Sequence
  Description of Artificial Sequence: Synthetic oligonucleotide
cacaggcauauaaacuauu

SEQ ID NO: 2825312 - RNA, 19 nt, Artificial Sequence
  Description of Artificial Sequence: Synthetic oligonucleotide
ucacguccuucugucuguu

SEQ ID NO: 2825313 - RNA, 19 nt, Artificial Sequence
  Description of Artificial Sequence: Synthetic oligonucleotide
ccgcccaucgauguuggug

SEQ ID NO: 2825314 - RNA, 19 nt, Artificial Sequence
  Description of Artificial Sequence: Synthetic oligonucleotide
cgugggcauaucuccggcc

SEQ ID NO: 2825315 - RNA, 19 nt, Artificial Sequence
  Description of Artificial Sequence: Synthetic oligonucleotide
gcgcaggaugugcuggaac

SEQ ID NO: 2825316 - RNA, 19 nt, Artificial Sequence
  Description of Artificial Sequence: Synthetic oligonucleotide
gguucugcaugauggugau

SEQ ID NO: 2825317 - RNA, 19 nt, Artificial Sequence
  Description of Artificial Sequence: Synthetic oligonucleotide
ggucaauguccgcuuuucu

SEQ ID NO: 2825318 - RNA, 19 nt, Artificial Sequence
  Description of Artificial Sequence: Synthetic oligonucleotide
ccggcccacacccuugaug

SEQ ID NO: 2825319 - RNA, 19 nt, Artificial Sequence
  Description of Artificial Sequence: Synthetic oligonucleotide
gcuguacuuuccguccuuc

SEQ ID NO: 2825320 - RNA, 19 nt, Artificial Sequence
  Description of Artificial Sequence: Synthetic oligonucleotide
aucuugcgccgcccaucga

SEQ ID NO: 2825321 - RNA, 19 nt, Artificial Sequence
  Description of Artificial Sequence: Synthetic oligonucleotide
ccugugggcucugaucuuc

SEQ ID NO: 2825322 - RNA, 19 nt, Artificial Sequence
  Description of Artificial Sequence: Synthetic oligonucleotide
ccucggacacgaagacccc

SEQ ID NO: 2825323 - RNA, 19 nt, Artificial Sequence
  Description of Artificial Sequence: Synthetic oligonucleotide
ccucucgcagcuuguuguc

SEQ ID NO: 2825324 - RNA, 19 nt, Artificial Sequence
  Description of Artificial Sequence: Synthetic oligonucleotide
ggcucugaucuucuucagu

SEQ ID NO: 2825325 - RNA, 19 nt, Artificial Sequence
  Description of Artificial Sequence: Synthetic oligonucleotide
cagugaaggcccagcgacu

SEQ ID NO: 2825326 - RNA, 19 nt, Artificial Sequence
  Description of Artificial Sequence: Synthetic oligonucleotide
gggcauaucuccggcccac

SEQ ID NO: 2825327 - RNA, 19 nt, Artificial Sequence
  Description of Artificial Sequence: Synthetic oligonucleotide
gcccacacccuugauggca

SEQ ID NO: 2825328 - RNA, 19 nt, Artificial Sequence
  Description of Artificial Sequence: Synthetic oligonucleotide
ccagcgacucauuucuucu

SEQ ID NO: 2825329 - RNA, 19 nt, Artificial Sequence
  Description of Artificial Sequence: Synthetic oligonucleotide
ugcugaccucggacacgaa

SEQ ID NO: 2825330 - RNA, 19 nt, Artificial Sequence
  Description of Artificial Sequence: Synthetic oligonucleotide
uccggcccacacccuugau

SEQ ID NO: 2825331 - RNA, 19 nt, Artificial Sequence
  Description of Artificial Sequence: Synthetic oligonucleotide
ggcgaucuugcgccgccca

SEQ ID NO: 2825332 - RNA, 19 nt, Artificial Sequence
  Description of Artificial Sequence: Synthetic oligonucleotide
ggaacuucucggggaucac

SEQ ID NO: 2825333 - RNA, 19 nt, Artificial Sequence
  Description of Artificial Sequence: Synthetic oligonucleotide
agguccucucgcagcuugu

SEQ ID NO: 2825334 - RNA, 19 nt, Artificial Sequence
  Description of Artificial Sequence: Synthetic oligonucleotide
agaaccagucugggaucuu

SEQ ID NO: 2825335 - RNA, 19 nt, Artificial Sequence
  Description of Artificial Sequence: Synthetic oligonucleotide
cgaaggcgaucuugcgccg

SEQ ID NO: 2825336 - RNA, 19 nt, Artificial Sequence
  Description of Artificial Sequence: Synthetic oligonucleotide
uggcggcggcacacucggc

SEQ ID NO: 2825337 - RNA, 19 nt, Artificial Sequence
  Description of Artificial Sequence: Synthetic oligonucleotide
cucguccuccgugagcucu

SEQ ID NO: 2825338 - RNA, 19 nt, Artificial Sequence
  Description of Artificial Sequence: Synthetic oligonucleotide
cgcuccaccucguccuccg

SEQ ID NO: 2825339 - RNA, 19 nt, Artificial Sequence
  Description of Artificial Sequence: Synthetic oligonucleotide
cagcccucuuggugagguc

SEQ ID NO: 2825340 - RNA, 19 nt, Artificial Sequence
  Description of Artificial Sequence: Synthetic oligonucleotide
ggcccacacccuugauggc

SEQ ID NO: 2825341 - RNA, 19 nt, Artificial Sequence
  Description of Artificial Sequence: Synthetic oligonucleotide
uuccguccuucacguccuu

SEQ ID NO: 2825342 - RNA, 19 nt, Artificial Sequence
  Description of Artificial Sequence: Synthetic oligonucleotide
cacccuugauggcagugau

SEQ ID NO: 2825343 - RNA, 19 nt, Artificial Sequence
  Description of Artificial Sequence: Synthetic oligonucleotide
gcgccgcccaucgauguug

SEQ ID NO: 2825344 - RNA, 19 nt, Artificial Sequence
  Description of Artificial Sequence: Synthetic oligonucleotide
cuccggcccacacccuuga

SEQ ID NO: 2825345 - RNA, 19 nt, Artificial Sequence
  Description of Artificial Sequence: Synthetic oligonucleotide
uggccagaaccuggcugua

SEQ ID NO: 2825346 - RNA, 19 nt, Artificial Sequence
  Description of Artificial Sequence: Synthetic oligonucleotide
ccccugugggcucugaucu

SEQ ID NO: 2825347 - RNA, 19 nt, Artificial Sequence
  Description of Artificial Sequence: Synthetic oligonucleotide
gacauggcggcggcacacu

SEQ ID NO: 2825348 - RNA, 19 nt, Artificial Sequence
  Description of Artificial Sequence: Synthetic oligonucleotide
cugugggcucugaucuucu

SEQ ID NO: 2825349 - RNA, 19 nt, Artificial Sequence
  Description of Artificial Sequence: Synthetic oligonucleotide
augacgcgcuccaccucgu

SEQ ID NO: 2825350 - RNA, 19 nt, Artificial Sequence
  Description of Artificial Sequence: Synthetic oligonucleotide
cccaucgauguugguguug

SEQ ID NO: 2825351 - RNA, 19 nt, Artificial Sequence
  Description of Artificial Sequence: Synthetic oligonucleotide
gucugggaucuuguacugu

SEQ ID NO: 2825352 - RNA, 19 nt, Artificial Sequence
  Description of Artificial Sequence: Synthetic oligonucleotide
cccacagugcggccccggc

SEQ ID NO: 2825353 - RNA, 19 nt, Artificial Sequence
  Description of Artificial Sequence: Synthetic oligonucleotide
cagugcggccccggcggcc

SEQ ID NO: 2825354 - RNA, 19 nt, Artificial Sequence
  Description of Artificial Sequence: Synthetic oligonucleotide
cgcaggaugugcuggaacu

SEQ ID NO: 2825355 - RNA, 19 nt, Artificial Sequence
  Description of Artificial Sequence: Synthetic oligonucleotide
guccuccgugagcucucca

SEQ ID NO: 2825356 - RNA, 19 nt, Artificial Sequence
  Description of Artificial Sequence: Synthetic oligonucleotide
ggccagaaccuggcuguac

SEQ ID NO: 2825357 - RNA, 19 nt, Artificial Sequence
  Description of Artificial Sequence: Synthetic oligonucleotide
cacccacagugcggccccg

SEQ ID NO: 2825358 - RNA, 19 nt, Artificial Sequence
  Description of Artificial Sequence: Synthetic oligonucleotide
cgcccaucgauguuggugu

SEQ ID NO: 2825359 - RNA, 19 nt, Artificial Sequence
  Description of Artificial Sequence: Synthetic oligonucleotide
cagcgacucauuucuucuu

SEQ ID NO: 2825360 - RNA, 19 nt, Artificial Sequence
  Description of Artificial Sequence: Synthetic oligonucleotide
cagagacauggcggcggca

SEQ ID NO: 2825361 - RNA, 19 nt, Artificial Sequence
  Description of Artificial Sequence: Synthetic oligonucleotide
ggcauaucuccggcccaca

SEQ ID NO: 2825362 - RNA, 19 nt, Artificial Sequence
  Description of Artificial Sequence: Synthetic oligonucleotide
cggccaguggucuuggugu

SEQ ID NO: 2825363 - RNA, 19 nt, Artificial Sequence
  Description of Artificial Sequence: Synthetic oligonucleotide
ggggaucaccagagacaug

SEQ ID NO: 2825364 - RNA, 19 nt, Artificial Sequence
  Description of Artificial Sequence: Synthetic oligonucleotide
cgccgcccaucgauguugg

SEQ ID NO: 2825365 - RNA, 19 nt, Artificial Sequence
  Description of Artificial Sequence: Synthetic oligonucleotide
cgaucuugcgccgcccauc

SEQ ID NO: 2825366 - RNA, 19 nt, Artificial Sequence
  Description of Artificial Sequence: Synthetic oligonucleotide
ggccccggcggccaguggu

SEQ ID NO: 2825367 - RNA, 19 nt, Artificial Sequence
  Description of Artificial Sequence: Synthetic oligonucleotide
cgugagcucuccagcccuc

SEQ ID NO: 2825368 - RNA, 19 nt, Artificial Sequence
  Description of Artificial Sequence: Synthetic oligonucleotide
cguccuucugucuguucaa

SEQ ID NO: 2825369 - RNA, 19 nt, Artificial Sequence
  Description of Artificial Sequence: Synthetic oligonucleotide
ccggcggccaguggucuug

SEQ ID NO: 2825370 - RNA, 19 nt, Artificial Sequence
  Description of Artificial Sequence: Synthetic oligonucleotide
gcuuguuguccagaccauu

SEQ ID NO: 2825371 - RNA, 19 nt, Artificial Sequence
  Description of Artificial Sequence: Synthetic oligonucleotide
gugcggccccggcggccag

SEQ ID NO: 2825372 - RNA, 19 nt, Artificial Sequence
  Description of Artificial Sequence: Synthetic oligonucleotide
gaaggcccagcgacucauu

SEQ ID NO: 2825373 - RNA, 19 nt, Artificial Sequence
  Description of Artificial Sequence: Synthetic oligonucleotide
ccuucacguccuucugucu

SEQ ID NO: 2825374 - RNA, 19 nt, Artificial Sequence
  Description of Artificial Sequence: Synthetic oligonucleotide
caacaccacgugggcauau

SEQ ID NO: 2825375 - RNA, 19 nt, Artificial Sequence
  Description of Artificial Sequence: Synthetic oligonucleotide
gcaggaugugcuggaacuu

SEQ ID NO: 2825376 - RNA, 19 nt, Artificial Sequence
  Description of Artificial Sequence: Synthetic oligonucleotide
gcccucuuggugaggucaa

SEQ ID NO: 2825377 - RNA, 19 nt, Artificial Sequence
  Description of Artificial Sequence: Synthetic oligonucleotide
ccgugagcucuccagcccu

SEQ ID NO: 2825378 - RNA, 19 nt, Artificial Sequence
  Description of Artificial Sequence: Synthetic oligonucleotide
cggcggcacacucggcggc

SEQ ID NO: 2825379 - RNA, 19 nt, Artificial Sequence
  Description of Artificial Sequence: Synthetic oligonucleotide
ccagcccucuuggugaggu

SEQ ID NO: 2825380 - RNA, 19 nt, Artificial Sequence
  Description of Artificial Sequence: Synthetic oligonucleotide
cagucgcuccagguccucu

SEQ ID NO: 2825381 - RNA, 19 nt, Artificial Sequence
  Description of Artificial Sequence: Synthetic oligonucleotide
ccucguccuccgugagcuc

SEQ ID NO: 2825382 - RNA, 19 nt, Artificial Sequence
  Description of Artificial Sequence: Synthetic oligonucleotide
cguccuccgugagcucucc

SEQ ID NO: 2825383 - RNA, 19 nt, Artificial Sequence
  Description of Artificial Sequence: Synthetic oligonucleotide
cggggaucaccagagacau

SEQ ID NO: 2825384 - RNA, 19 nt, Artificial Sequence
  Description of Artificial Sequence: Synthetic oligonucleotide
gucguggguucugcaugau

SEQ ID NO: 2825385 - RNA, 19 nt, Artificial Sequence
  Description of Artificial Sequence: Synthetic oligonucleotide
gcgaucuugcgccgcccau

SEQ ID NO: 2825386 - RNA, 19 nt, Artificial Sequence
  Description of Artificial Sequence: Synthetic oligonucleotide
gcggccccggcggccagug

SEQ ID NO: 2825387 - RNA, 19 nt, Artificial Sequence
  Description of Artificial Sequence: Synthetic oligonucleotide
gccccggcggccagugguc

SEQ ID NO: 2825388 - RNA, 19 nt, Artificial Sequence
  Description of Artificial Sequence: Synthetic oligonucleotide
cgcgcuccaccucguccuc

SEQ ID NO: 2825389 - RNA, 19 nt, Artificial Sequence
  Description of Artificial Sequence: Synthetic oligonucleotide
cggcggccaguggucuugg

SEQ ID NO: 2825390 - RNA, 19 nt, Artificial Sequence
  Description of Artificial Sequence: Synthetic oligonucleotide
gcccaucgauguugguguu

SEQ ID NO: 2825391 - RNA, 19 nt, Artificial Sequence
  Description of Artificial Sequence: Synthetic oligonucleotide
ggcggccaguggucuuggu

SEQ ID NO: 2825392 - RNA, 19 nt, Artificial Sequence
  Description of Artificial Sequence: Synthetic oligonucleotide
gccgcccaucgauguuggu

SEQ ID NO: 2825393 - RNA, 19 nt, Artificial Sequence
  Description of Artificial Sequence: Synthetic oligonucleotide
cccugugggcucugaucuu

SEQ ID NO: 2825394 - RNA, 19 nt, Artificial Sequence
  Description of Artificial Sequence: Synthetic oligonucleotide
cgcgcaggaugugcuggaa

SEQ ID NO: 2825395 - RNA, 19 nt, Artificial Sequence
  Description of Artificial Sequence: Synthetic oligonucleotide
cggccccggcggccagugg

SEQ ID NO: 2825396 - RNA, 19 nt, Artificial Sequence
  Description of Artificial Sequence: Synthetic oligonucleotide
gcccagcgacucauuucuu

SEQ ID NO: 2825397 - RNA, 19 nt, Artificial Sequence
  Description of Artificial Sequence: Synthetic oligonucleotide
cccucuuggugaggucaau

SEQ ID NO: 2825398 - RNA, 19 nt, Artificial Sequence
  Description of Artificial Sequence: Synthetic oligonucleotide
ccccggcggccaguggucu

SEQ ID NO: 2825399 - RNA, 19 nt, Artificial Sequence
  Description of Artificial Sequence: Synthetic oligonucleotide
cccggcggccaguggucuu

SEQ ID NO: 2825400 - RNA, 19 nt, Artificial Sequence
  Description of Artificial Sequence: Synthetic oligonucleotide
ccagguccucucgcagcuu

SEQ ID NO: 2825401 - RNA, 19 nt, Artificial Sequence
  Description of Artificial Sequence: Synthetic oligonucleotide
auuuaaauguaguuuauac

SEQ ID NO: 2825402 - RNA, 19 nt, Artificial Sequence
  Description of Artificial Sequence: Synthetic oligonucleotide
uuaaauguaguuuauacac

SEQ ID NO: 2825403 - RNA, 19 nt, Artificial Sequence
  Description of Artificial Sequence: Synthetic oligonucleotide
acaaguuacacacucuucc

SEQ ID NO: 2825404 - RNA, 19 nt, Artificial Sequence
  Description of Artificial Sequence: Synthetic oligonucleotide
uuauacacaaguuacacac

SEQ ID NO: 2825405 - RNA, 19 nt, Artificial Sequence
  Description of Artificial Sequence: Synthetic oligonucleotide
uuuucuacuaguaacguga

SEQ ID NO: 2825406 - RNA, 19 nt, Artificial Sequence
  Description of Artificial Sequence: Synthetic oligonucleotide
uuuauuuaaauguaguuua

SEQ ID NO: 2825407 - RNA, 19 nt, Artificial Sequence
  Description of Artificial Sequence: Synthetic oligonucleotide
aaccuguuuauuuaaaugu

SEQ ID NO: 2825408 - RNA, 19 nt, Artificial Sequence
  Description of Artificial Sequence: Synthetic oligonucleotide
uuuaaauguaguuuauaca

SEQ ID NO: 2825409 - RNA, 19 nt, Artificial Sequence
  Description of Artificial Sequence: Synthetic oligonucleotide
aaaagcgagucugucagcc

SEQ ID NO: 2825410 - RNA, 19 nt, Artificial Sequence
  Description of Artificial Sequence: Synthetic oligonucleotide
uaguuuauacacaaguuac

SEQ ID NO: 2825411 - RNA, 19 nt, Artificial Sequence
  Description of Artificial Sequence: Synthetic oligonucleotide
aaacgucuccauuucuucc

SEQ ID NO: 2825412 - RNA, 19 nt, Artificial Sequence
  Description of Artificial Sequence: Synthetic oligonucleotide
aaaagggaggugcacacag

SEQ ID NO: 2825413 - RNA, 19 nt, Artificial Sequence
  Description of Artificial Sequence: Synthetic oligonucleotide
aaauguaguuuauacacaa

SEQ ID NO: 2825414 - RNA, 19 nt, Artificial Sequence
  Description of Artificial Sequence: Synthetic oligonucleotide
ucuacuaguaacgugaagu

SEQ ID NO: 2825415 - RNA, 19 nt, Artificial Sequence
  Description of Artificial Sequence: Synthetic oligonucleotide
acaaacaccuguuuacugg

SEQ ID NO: 2825416 - RNA, 19 nt, Artificial Sequence
  Description of Artificial Sequence: Synthetic oligonucleotide
acuaguaacgugaaguuac

SEQ ID NO: 2825417 - RNA, 19 nt, Artificial Sequence
  Description of Artificial Sequence: Synthetic oligonucleotide
auacacaaguuacacacuc

SEQ ID NO: 2825418 - RNA, 19 nt, Artificial Sequence
  Description of Artificial Sequence: Synthetic oligonucleotide
aagcgagucugucagccgc

SEQ ID NO: 2825419 - RNA, 19 nt, Artificial Sequence
  Description of Artificial Sequence: Synthetic oligonucleotide
aagggaggugcacacaggg

SEQ ID NO: 2825420 - RNA, 19 nt, Artificial Sequence
  Description of Artificial Sequence: Synthetic oligonucleotide
cuguuuucuacuaguaacg

SEQ ID NO: 2825421 - RNA, 19 nt, Artificial Sequence
  Description of Artificial Sequence: Synthetic oligonucleotide
auguaguuuauacacaagu

SEQ ID NO: 2825422 - RNA, 19 nt, Artificial Sequence
  Description of Artificial Sequence: Synthetic oligonucleotide
uguuuacuggucuuccugg

SEQ ID NO: 2825423 - RNA, 19 nt, Artificial Sequence
  Description of Artificial Sequence: Synthetic oligonucleotide
aguuacacacucuuccuuc

SEQ ID NO: 2825424 - RNA, 19 nt, Artificial Sequence
  Description of Artificial Sequence: Synthetic oligonucleotide
uaaauguaguuuauacaca

SEQ ID NO: 2825425 - RNA, 19 nt, Artificial Sequence
  Description of Artificial Sequence: Synthetic oligonucleotide
ugcgagguugcguagaugc

SEQ ID NO: 2825426 - RNA, 19 nt, Artificial Sequence
  Description of Artificial Sequence: Synthetic oligonucleotide
uuguagcugacaaacaccu

SEQ ID NO: 2825427 - RNA, 19 nt, Artificial Sequence
  Description of Artificial Sequence: Synthetic oligonucleotide
uuugaggacaaccuguuua

SEQ ID NO: 2825428 - RNA, 19 nt, Artificial Sequence
  Description of Artificial Sequence: Synthetic oligonucleotide
aguaacgugaaguuacugu

SEQ ID NO: 2825429 - RNA, 19 nt, Artificial Sequence
  Description of Artificial Sequence: Synthetic oligonucleotide
uuuauacacaaguuacaca

SEQ ID NO: 2825430 - RNA, 19 nt, Artificial Sequence
  Description of Artificial Sequence: Synthetic oligonucleotide
acagggaugggaucguagc

SEQ ID NO: 2825431 - RNA, 19 nt, Artificial Sequence
  Description of Artificial Sequence: Synthetic oligonucleotide
uggagguugugucagaagu

SEQ ID NO: 2825432 - RNA, 19 nt, Artificial Sequence
  Description of Artificial Sequence: Synthetic oligonucleotide
aacgugaaguuacugucug

SEQ ID NO: 2825433 - RNA, 19 nt, Artificial Sequence
  Description of Artificial Sequence: Synthetic oligonucleotide
gaaguugugaagcgacacg

SEQ ID NO: 2825434 - RNA, 19 nt, Artificial Sequence
  Description of Artificial Sequence: Synthetic oligonucleotide
uaaacgcugggcaaggcca

SEQ ID NO: 2825435 - RNA, 19 nt, Artificial Sequence
  Description of Artificial Sequence: Synthetic oligonucleotide
gaaguuacugucuguguug

SEQ ID NO: 2825436 - RNA, 19 nt, Artificial Sequence
  Description of Artificial Sequence: Synthetic oligonucleotide
uggucuuccuggcuaaacg

SEQ ID NO: 2825437 - RNA, 19 nt, Artificial Sequence
  Description of Artificial Sequence: Synthetic oligonucleotide
uguuuauuuaaauguaguu

SEQ ID NO: 2825438 - RNA, 19 nt, Artificial Sequence
  Description of Artificial Sequence: Synthetic oligonucleotide
uugugaagcgacacguccg

SEQ ID NO: 2825439 - RNA, 19 nt, Artificial Sequence
  Description of Artificial Sequence: Synthetic oligonucleotide
uguaguuuauacacaaguu

SEQ ID NO: 2825440 - RNA, 19 nt, Artificial Sequence
  Description of Artificial Sequence: Synthetic oligonucleotide
ucugucagccgcaugacgu

SEQ ID NO: 2825441 - RNA, 19 nt, Artificial Sequence
  Description of Artificial Sequence: Synthetic oligonucleotide
aacaccuguuuacuggucu

SEQ ID NO: 2825442 - RNA, 19 nt, Artificial Sequence
  Description of Artificial Sequence: Synthetic oligonucleotide
cugacaaacaccuguuuac

SEQ ID NO: 2825443 - RNA, 19 nt, Artificial Sequence
  Description of Artificial Sequence: Synthetic oligonucleotide
acggaaaccaggauggcgc

SEQ ID NO: 2825444 - RNA, 19 nt, Artificial Sequence
  Description of Artificial Sequence: Synthetic oligonucleotide
ggaaaagcgagucugucag

SEQ ID NO: 2825445 - RNA, 19 nt, Artificial Sequence
  Description of Artificial Sequence: Synthetic oligonucleotide
ugcuccaacagccucgcgc

SEQ ID NO: 2825446 - RNA, 19 nt, Artificial Sequence
  Description of Artificial Sequence: Synthetic oligonucleotide
gagguuguagcugacaaac

SEQ ID NO: 2825447 - RNA, 19 nt, Artificial Sequence
  Description of Artificial Sequence: Synthetic oligonucleotide
aacgucuccauuucuuccu

SEQ ID NO: 2825448 - RNA, 19 nt, Artificial Sequence
  Description of Artificial Sequence: Synthetic oligonucleotide
guuuauacacaaguuacac

SEQ ID NO: 2825449 - RNA, 19 nt, Artificial Sequence
  Description of Artificial Sequence: Synthetic oligonucleotide
acacacucuuccuucugcc

SEQ ID NO: 2825450 - RNA, 19 nt, Artificial Sequence
  Description of Artificial Sequence: Synthetic oligonucleotide
uuauuuaaauguaguuuau

SEQ ID NO: 2825451 - RNA, 19 nt, Artificial Sequence
  Description of Artificial Sequence: Synthetic oligonucleotide
guaacgugaaguuacuguc

SEQ ID NO: 2825452 - RNA, 19 nt, Artificial Sequence
  Description of Artificial Sequence: Synthetic oligonucleotide
aacagccucgcgcugaagu

SEQ ID NO: 2825453 - RNA, 19 nt, Artificial Sequence
  Description of Artificial Sequence: Synthetic oligonucleotide
guugugaagcgacacgucc

SEQ ID NO: 2825454 - RNA, 19 nt, Artificial Sequence
  Description of Artificial Sequence: Synthetic oligonucleotide
aaguugugaagcgacacgu

SEQ ID NO: 2825455 - RNA, 19 nt, Artificial Sequence
  Description of Artificial Sequence: Synthetic oligonucleotide
aaagcgagucugucagccg

SEQ ID NO: 2825456 - RNA, 19 nt, Artificial Sequence
  Description of Artificial Sequence: Synthetic oligonucleotide
ugaaguuacugucuguguu

SEQ ID NO: 2825457 - RNA, 19 nt, Artificial Sequence
  Description of Artificial Sequence: Synthetic oligonucleotide
agcacggaaaccaggaugg

SEQ ID NO: 2825458 - RNA, 19 nt, Artificial Sequence
  Description of Artificial Sequence: Synthetic oligonucleotide
gaaguggacgagcugcucc

SEQ ID NO: 2825459 - RNA, 19 nt, Artificial Sequence
  Description of Artificial Sequence: Synthetic oligonucleotide
ucuggaaacgucuccauuu

SEQ ID NO: 2825460 - RNA, 19 nt, Artificial Sequence
  Description of Artificial Sequence: Synthetic oligonucleotide
guaguuuauacacaaguua

SEQ ID NO: 2825461 - RNA, 19 nt, Artificial Sequence
  Description of Artificial Sequence: Synthetic oligonucleotide
caugacguggaaguggacg

SEQ ID NO: 2825462 - RNA, 19 nt, Artificial Sequence
  Description of Artificial Sequence: Synthetic oligonucleotide
ugcacauggccacugcgag

SEQ ID NO: 2825463 - RNA, 19 nt, Artificial Sequence
  Description of Artificial Sequence: Synthetic oligonucleotide
guagaugcggcguugcccc

SEQ ID NO: 2825464 - RNA, 19 nt, Artificial Sequence
  Description of Artificial Sequence: Synthetic oligonucleotide
guuacugucuguguuggag

SEQ ID NO: 2825465 - RNA, 19 nt, Artificial Sequence
  Description of Artificial Sequence: Synthetic oligonucleotide
aauguaguuuauacacaag

SEQ ID NO: 2825466 - RNA, 19 nt, Artificial Sequence
  Description of Artificial Sequence: Synthetic oligonucleotide
ugugaagcgacacguccgc

SEQ ID NO: 2825467 - RNA, 19 nt, Artificial Sequence
  Description of Artificial Sequence: Synthetic oligonucleotide
gacaaacaccuguuuacug

SEQ ID NO: 2825468 - RNA, 19 nt, Artificial Sequence
  Description of Artificial Sequence: Synthetic oligonucleotide
uguuggagagguuguagcu

SEQ ID NO: 2825469 - RNA, 19 nt, Artificial Sequence
  Description of Artificial Sequence: Synthetic oligonucleotide
uaacgugaaguuacugucu

SEQ ID NO: 2825470 - RNA, 19 nt, Artificial Sequence
  Description of Artificial Sequence: Synthetic oligonucleotide
uuggagagguuguagcuga

SEQ ID NO: 2825471 - RNA, 19 nt, Artificial Sequence
  Description of Artificial Sequence: Synthetic oligonucleotide
acgagcugcuccaacagcc

SEQ ID NO: 2825472 - RNA, 19 nt, Artificial Sequence
  Description of Artificial Sequence: Synthetic oligonucleotide
uauacacaaguuacacacu

SEQ ID NO: 2825473 - RNA, 19 nt, Artificial Sequence
  Description of Artificial Sequence: Synthetic oligonucleotide
gaaaccaggauggcgcggg

SEQ ID NO: 2825474 - RNA, 19 nt, Artificial Sequence
  Description of Artificial Sequence: Synthetic oligonucleotide
guuuucuacuaguaacgug

SEQ ID NO: 2825475 - RNA, 19 nt, Artificial Sequence
  Description of Artificial Sequence: Synthetic oligonucleotide
uuacugucuguguuggaga

SEQ ID NO: 2825476 - RNA, 19 nt, Artificial Sequence
  Description of Artificial Sequence: Synthetic oligonucleotide
gaaacgucuccauuucuuc

SEQ ID NO: 2825477 - RNA, 19 nt, Artificial Sequence
  Description of Artificial Sequence: Synthetic oligonucleotide
gagucugucagccgcauga

SEQ ID NO: 2825478 - RNA, 19 nt, Artificial Sequence
  Description of Artificial Sequence: Synthetic oligonucleotide
cuaaacgcugggcaaggcc

SEQ ID NO: 2825479 - RNA, 19 nt, Artificial Sequence
  Description of Artificial Sequence: Synthetic oligonucleotide
ugugucagaagugucucca

SEQ ID NO: 2825480 - RNA, 19 nt, Artificial Sequence
  Description of Artificial Sequence: Synthetic oligonucleotide
uuuacuggucuuccuggcu

SEQ ID NO: 2825481 - RNA, 19 nt, Artificial Sequence
  Description of Artificial Sequence: Synthetic oligonucleotide
ucugccacucagaacuucu

SEQ ID NO: 2825482 - RNA, 19 nt, Artificial Sequence
  Description of Artificial Sequence: Synthetic oligonucleotide
ccuguuuucuacuaguaac

SEQ ID NO: 2825483 - RNA, 19 nt, Artificial Sequence
  Description of Artificial Sequence: Synthetic oligonucleotide
ugaaguugugaagcgacac

SEQ ID NO: 2825484 - RNA, 19 nt, Artificial Sequence
  Description of Artificial Sequence: Synthetic oligonucleotide
acaaccuguuuauuuaaau

SEQ ID NO: 2825485 - RNA, 19 nt, Artificial Sequence
  Description of Artificial Sequence: Synthetic oligonucleotide
ugaagcgacacguccgcgc

SEQ ID NO: 2825486 - RNA, 19 nt, Artificial Sequence
  Description of Artificial Sequence: Synthetic oligonucleotide
ucagaacuucucuggaaac

SEQ ID NO: 2825487 - RNA, 19 nt, Artificial Sequence
  Description of Artificial Sequence: Synthetic oligonucleotide
guuguagcugacaaacacc

SEQ ID NO: 2825488 - RNA, 19 nt, Artificial Sequence
  Description of Artificial Sequence: Synthetic oligonucleotide
uucuacuaguaacgugaag

SEQ ID NO: 2825489 - RNA, 19 nt, Artificial Sequence
  Description of Artificial Sequence: Synthetic oligonucleotide
uacacaaguuacacacucu

SEQ ID NO: 2825490 - RNA, 19 nt, Artificial Sequence
  Description of Artificial Sequence: Synthetic oligonucleotide
uccuguuuucuacuaguaa

SEQ ID NO: 2825491 - RNA, 19 nt, Artificial Sequence
  Description of Artificial Sequence: Synthetic oligonucleotide
aaguuacacacucuuccuu

SEQ ID NO: 2825492 - RNA, 19 nt, Artificial Sequence
  Description of Artificial Sequence: Synthetic oligonucleotide
cacaggaaaagcgagucug

SEQ ID NO: 2825493 - RNA, 19 nt, Artificial Sequence
  Description of Artificial Sequence: Synthetic oligonucleotide
augacguggaaguggacga

SEQ ID NO: 2825494 - RNA, 19 nt, Artificial Sequence
  Description of Artificial Sequence: Synthetic oligonucleotide
aaguggacgagcugcucca

SEQ ID NO: 2825495 - RNA, 19 nt, Artificial Sequence
  Description of Artificial Sequence: Synthetic oligonucleotide
uguuuucuacuaguaacgu

SEQ ID NO: 2825496 - RNA, 19 nt, Artificial Sequence
  Description of Artificial Sequence: Synthetic oligonucleotide
aggaaaagcgagucuguca

SEQ ID NO: 2825497 - RNA, 19 nt, Artificial Sequence
  Description of Artificial Sequence: Synthetic oligonucleotide
uauuuaaauguaguuuaua

SEQ ID NO: 2825498 - RNA, 19 nt, Artificial Sequence
  Description of Artificial Sequence: Synthetic oligonucleotide
gguuguagcugacaaacac

SEQ ID NO: 2825499 - RNA, 19 nt, Artificial Sequence
  Description of Artificial Sequence: Synthetic oligonucleotide
aaaccaggauggcgcgggc

SEQ ID NO: 2825500 - RNA, 19 nt, Artificial Sequence
  Description of Artificial Sequence: Synthetic oligonucleotide
cagaacuucucuggaaacg

SEQ ID NO: 2825501 - RNA, 19 nt, Artificial Sequence
  Description of Artificial Sequence: Synthetic oligonucleotide
cuuccuggcuaaacgcugg

SEQ ID NO: 2825502 - RNA, 19 nt, Artificial Sequence
  Description of Artificial Sequence: Synthetic oligonucleotide
guggaaguggacgagcugc

SEQ ID NO: 2825503 - RNA, 19 nt, Artificial Sequence
  Description of Artificial Sequence: Synthetic oligonucleotide
accuguuuacuggucuucc

SEQ ID NO: 2825504 - RNA, 19 nt, Artificial Sequence
  Description of Artificial Sequence: Synthetic oligonucleotide
gaagcgacacguccgcgcc

SEQ ID NO: 2825505 - RNA, 19 nt, Artificial Sequence
  Description of Artificial Sequence: Synthetic oligonucleotide
ccuguuuauuuaaauguag

SEQ ID NO: 2825506 - RNA, 19 nt, Artificial Sequence
  Description of Artificial Sequence: Synthetic oligonucleotide
uuacuggucuuccuggcua

SEQ ID NO: 2825507 - RNA, 19 nt, Artificial Sequence
  Description of Artificial Sequence: Synthetic oligonucleotide
ugggcaaggccaguggagg

SEQ ID NO: 2825508 - RNA, 19 nt, Artificial Sequence
  Description of Artificial Sequence: Synthetic oligonucleotide
guguuggagagguuguagc

SEQ ID NO: 2825509 - RNA, 19 nt, Artificial Sequence
  Description of Artificial Sequence: Synthetic oligonucleotide
gaugggaucguagcggcug

SEQ ID NO: 2825510 - RNA, 19 nt, Artificial Sequence
  Description of Artificial Sequence: Synthetic oligonucleotide
acacaaguuacacacucuu

SEQ ID NO: 2825511 - RNA, 19 nt, Artificial Sequence
  Description of Artificial Sequence: Synthetic oligonucleotide
uuucuacuaguaacgugaa

SEQ ID NO: 2825512 - RNA, 19 nt, Artificial Sequence
  Description of Artificial Sequence: Synthetic oligonucleotide
ugucagaagugucuccaaa

SEQ ID NO: 2825513 - RNA, 19 nt, Artificial Sequence
  Description of Artificial Sequence: Synthetic oligonucleotide
cuguuuacuggucuuccug

SEQ ID NO: 2825514 - RNA, 19 nt, Artificial Sequence
  Description of Artificial Sequence: Synthetic oligonucleotide
agaacuucucuggaaacgu

SEQ ID NO: 2825515 - RNA, 19 nt, Artificial Sequence
  Description of Artificial Sequence: Synthetic oligonucleotide
guagcggcugcacauggcc

SEQ ID NO: 2825516 - RNA, 19 nt, Artificial Sequence
  Description of Artificial Sequence: Synthetic oligonucleotide
agggaugggaucguagcgg

SEQ ID NO: 2825517 - RNA, 19 nt, Artificial Sequence
  Description of Artificial Sequence: Synthetic oligonucleotide
aggacaaccuguuuauuua

SEQ ID NO: 2825518 - RNA, 19 nt, Artificial Sequence
  Description of Artificial Sequence: Synthetic oligonucleotide
gaggugcacacagggaugg

SEQ ID NO: 2825519 - RNA, 19 nt, Artificial Sequence
  Description of Artificial Sequence: Synthetic oligonucleotide
ucguagcggcugcacaugg

SEQ ID NO: 2825520 - RNA, 19 nt, Artificial Sequence
  Description of Artificial Sequence: Synthetic oligonucleotide
agccgcaugacguggaagu

SEQ ID NO: 2825521 - RNA, 19 nt, Artificial Sequence
  Description of Artificial Sequence: Synthetic oligonucleotide
gagagguuguagcugacaa

SEQ ID NO: 2825522 - RNA, 19 nt, Artificial Sequence
  Description of Artificial Sequence: Synthetic oligonucleotide
ugacaaacaccuguuuacu

SEQ ID NO: 2825523 - RNA, 19 nt, Artificial Sequence
  Description of Artificial Sequence: Synthetic oligonucleotide
uggacgagcugcuccaaca

SEQ ID NO: 2825524 - RNA, 19 nt, Artificial Sequence
  Description of Artificial Sequence: Synthetic oligonucleotide
aguuuauacacaaguuaca

SEQ ID NO: 2825525 - RNA, 19 nt, Artificial Sequence
  Description of Artificial Sequence: Synthetic oligonucleotide
guagcugacaaacaccugu

SEQ ID NO: 2825526 - RNA, 19 nt, Artificial Sequence
  Description of Artificial Sequence: Synthetic oligonucleotide
uucucuggaaacgucucca

SEQ ID NO: 2825527 - RNA, 19 nt, Artificial Sequence
  Description of Artificial Sequence: Synthetic oligonucleotide
agcggcugcacauggccac

SEQ ID NO: 2825528 - RNA, 19 nt, Artificial Sequence
  Description of Artificial Sequence: Synthetic oligonucleotide
uuacacacucuuccuucug

SEQ ID NO: 2825529 - RNA, 19 nt, Artificial Sequence
  Description of Artificial Sequence: Synthetic oligonucleotide
augggaucguagcggcugc

SEQ ID NO: 2825530 - RNA, 19 nt, Artificial Sequence
  Description of Artificial Sequence: Synthetic oligonucleotide
uguagcugacaaacaccug

SEQ ID NO: 2825531 - RNA, 19 nt, Artificial Sequence
  Description of Artificial Sequence: Synthetic oligonucleotide
ugccacucagaacuucucu

SEQ ID NO: 2825532 - RNA, 19 nt, Artificial Sequence
  Description of Artificial Sequence: Synthetic oligonucleotide
guuuacuggucuuccuggc

SEQ ID NO: 2825533 - RNA, 19 nt, Artificial Sequence
  Description of Artificial Sequence: Synthetic oligonucleotide
gucuguguuggagagguug

SEQ ID NO: 2825534 - RNA, 19 nt, Artificial Sequence
  Description of Artificial Sequence: Synthetic oligonucleotide
aaagggaggugcacacagg

SEQ ID NO: 2825535 - RNA, 19 nt, Artificial Sequence
  Description of Artificial Sequence: Synthetic oligonucleotide
aagcgacacguccgcgccc

SEQ ID NO: 2825536 - RNA, 19 nt, Artificial Sequence
  Description of Artificial Sequence: Synthetic oligonucleotide
cagggaugggaucguagcg

SEQ ID NO: 2825537 - RNA, 19 nt, Artificial Sequence
  Description of Artificial Sequence: Synthetic oligonucleotide
ggcaucccagcccagagag

SEQ ID NO: 2825538 - RNA, 19 nt, Artificial Sequence
  Description of Artificial Sequence: Synthetic oligonucleotide
cuucucuggaaacgucucc

SEQ ID NO: 2825539 - RNA, 19 nt, Artificial Sequence
  Description of Artificial Sequence: Synthetic oligonucleotide
cagcacggaaaccaggaug

SEQ ID NO: 2825540 - RNA, 19 nt, Artificial Sequence
  Description of Artificial Sequence: Synthetic oligonucleotide
gaaaagcgagucugucagc

SEQ ID NO: 2825541 - RNA, 19 nt, Artificial Sequence
  Description of Artificial Sequence: Synthetic oligonucleotide
uuccuggcuaaacgcuggg

SEQ ID NO: 2825542 - RNA, 19 nt, Artificial Sequence
  Description of Artificial Sequence: Synthetic oligonucleotide
aaacaccuguuuacugguc

SEQ ID NO: 2825543 - RNA, 19 nt, Artificial Sequence
  Description of Artificial Sequence: Synthetic oligonucleotide
uggaaacgucuccauuucu

SEQ ID NO: 2825544 - RNA, 19 nt, Artificial Sequence
  Description of Artificial Sequence: Synthetic oligonucleotide
cacaaguuacacacucuuc

SEQ ID NO: 2825545 - RNA, 19 nt, Artificial Sequence
  Description of Artificial Sequence: Synthetic oligonucleotide
uugugucagaagugucucc

SEQ ID NO: 2825546 - RNA, 19 nt, Artificial Sequence
  Description of Artificial Sequence: Synthetic oligonucleotide
guuggagagguuguagcug

SEQ ID NO: 2825547 - RNA, 19 nt, Artificial Sequence
  Description of Artificial Sequence: Synthetic oligonucleotide
ggucuuccuggcuaaacgc

SEQ ID NO: 2825548 - RNA, 19 nt, Artificial Sequence
  Description of Artificial Sequence: Synthetic oligonucleotide
acuucucuggaaacgucuc

SEQ ID NO: 2825549 - RNA, 19 nt, Artificial Sequence
  Description of Artificial Sequence: Synthetic oligonucleotide
cacggaaaccaggauggcg

SEQ ID NO: 2825550 - RNA, 19 nt, Artificial Sequence
  Description of Artificial Sequence: Synthetic oligonucleotide
ugucagccgcaugacgugg

SEQ ID NO: 2825551 - RNA, 19 nt, Artificial Sequence
  Description of Artificial Sequence: Synthetic oligonucleotide
cuguuuauuuaaauguagu

SEQ ID NO: 2825552 - RNA, 19 nt, Artificial Sequence
  Description of Artificial Sequence: Synthetic oligonucleotide
cucagaacuucucuggaaa

SEQ ID NO: 2825553 - RNA, 19 nt, Artificial Sequence
  Description of Artificial Sequence: Synthetic oligonucleotide
gacgagcugcuccaacagc

SEQ ID NO: 2825554 - RNA, 19 nt, Artificial Sequence
  Description of Artificial Sequence: Synthetic oligonucleotide
uaguaacgugaaguuacug

SEQ ID NO: 2825555 - RNA, 19 nt, Artificial Sequence
  Description of Artificial Sequence: Synthetic oligonucleotide
cacccacaggaaaagcgag

SEQ ID NO: 2825556 - RNA, 19 nt, Artificial Sequence
  Description of Artificial Sequence: Synthetic oligonucleotide
gucagaagugucuccaaaa

SEQ ID NO: 2825557 - RNA, 19 nt, Artificial Sequence
  Description of Artificial Sequence: Synthetic oligonucleotide
uggaaguggacgagcugcu

SEQ ID NO: 2825558 - RNA, 19 nt, Artificial Sequence
  Description of Artificial Sequence: Synthetic oligonucleotide
uugauccuguuuucuacua

SEQ ID NO: 2825559 - RNA, 19 nt, Artificial Sequence
  Description of Artificial Sequence: Synthetic oligonucleotide
uggcuaaacgcugggcaag

SEQ ID NO: 2825560 - RNA, 19 nt, Artificial Sequence
  Description of Artificial Sequence: Synthetic oligonucleotide
gagguugcguagaugcggc

SEQ ID NO: 2825561 - RNA, 19 nt, Artificial Sequence
  Description of Artificial Sequence: Synthetic oligonucleotide
cacagggaugggaucguag

SEQ ID NO: 2825562 - RNA, 19 nt, Artificial Sequence
  Description of Artificial Sequence: Synthetic oligonucleotide
ugcggcuccuccaucccgc

SEQ ID NO: 2825563 - RNA, 19 nt, Artificial Sequence
  Description of Artificial Sequence: Synthetic oligonucleotide
gucugucagccgcaugacg

SEQ ID NO: 2825564 - RNA, 19 nt, Artificial Sequence
  Description of Artificial Sequence: Synthetic oligonucleotide
acucagaacuucucuggaa

SEQ ID NO: 2825565 - RNA, 19 nt, Artificial Sequence
  Description of Artificial Sequence: Synthetic oligonucleotide
uacuaguaacgugaaguua

SEQ ID NO: 2825566 - RNA, 19 nt, Artificial Sequence
  Description of Artificial Sequence: Synthetic oligonucleotide
cuggaaacgucuccauuuc

SEQ ID NO: 2825567 - RNA, 19 nt, Artificial Sequence
  Description of Artificial Sequence: Synthetic oligonucleotide
auggccacugcgagguugc

SEQ ID NO: 2825568 - RNA, 19 nt, Artificial Sequence
  Description of Artificial Sequence: Synthetic oligonucleotide
gauggcgcgggcaucccag

SEQ ID NO: 2825569 - RNA, 19 nt, Artificial Sequence
  Description of Artificial Sequence: Synthetic oligonucleotide
ccacucagaacuucucugg

SEQ ID NO: 2825570 - RNA, 19 nt, Artificial Sequence
  Description of Artificial Sequence: Synthetic oligonucleotide
cacagcacggaaaccagga

SEQ ID NO: 2825571 - RNA, 19 nt, Artificial Sequence
  Description of Artificial Sequence: Synthetic oligonucleotide
ucuccauuucuuccuugau

SEQ ID NO: 2825572 - RNA, 19 nt, Artificial Sequence
  Description of Artificial Sequence: Synthetic oligonucleotide
cugggcaaggccaguggag

SEQ ID NO: 2825573 - RNA, 19 nt, Artificial Sequence
  Description of Artificial Sequence: Synthetic oligonucleotide
guugugucagaagugucuc

SEQ ID NO: 2825574 - RNA, 19 nt, Artificial Sequence
  Description of Artificial Sequence: Synthetic oligonucleotide
cuuccuugauccuguuuuc

SEQ ID NO: 2825575 - RNA, 19 nt, Artificial Sequence
  Description of Artificial Sequence: Synthetic oligonucleotide
agagguuguagcugacaaa

SEQ ID NO: 2825576 - RNA, 19 nt, Artificial Sequence
  Description of Artificial Sequence: Synthetic oligonucleotide
ucgcgcugaaguugugaag

SEQ ID NO: 2825577 - RNA, 19 nt, Artificial Sequence
  Description of Artificial Sequence: Synthetic oligonucleotide
aguugugaagcgacacguc

SEQ ID NO: 2825578 - RNA, 19 nt, Artificial Sequence
  Description of Artificial Sequence: Synthetic oligonucleotide
uagcugacaaacaccuguu

SEQ ID NO: 2825579 - RNA, 19 nt, Artificial Sequence
  Description of Artificial Sequence: Synthetic oligonucleotide
cccacccacaggaaaagcg

SEQ ID NO: 2825580 - RNA, 19 nt, Artificial Sequence
  Description of Artificial Sequence: Synthetic oligonucleotide
aaacgcugggcaaggccag

SEQ ID NO: 2825581 - RNA, 19 nt, Artificial Sequence
  Description of Artificial Sequence: Synthetic oligonucleotide
gacguggaaguggacgagc

SEQ ID NO: 2825582 - RNA, 19 nt, Artificial Sequence
  Description of Artificial Sequence: Synthetic oligonucleotide
ccuucugccacucagaacu

SEQ ID NO: 2825583 - RNA, 19 nt, Artificial Sequence
  Description of Artificial Sequence: Synthetic oligonucleotide
agucugucagccgcaugac

SEQ ID NO: 2825584 - RNA, 19 nt, Artificial Sequence
  Description of Artificial Sequence: Synthetic oligonucleotide
agcugcuccaacagccucg

SEQ ID NO: 2825585 - RNA, 19 nt, Artificial Sequence
  Description of Artificial Sequence: Synthetic oligonucleotide
guggagguugugucagaag

SEQ ID NO: 2825586 - RNA, 19 nt, Artificial Sequence
  Description of Artificial Sequence: Synthetic oligonucleotide
uuccuugauccuguuuucu

SEQ ID NO: 2825587 - RNA, 19 nt, Artificial Sequence
  Description of Artificial Sequence: Synthetic oligonucleotide
gcacacagggaugggaucg

SEQ ID NO: 2825588 - RNA, 19 nt, Artificial Sequence
  Description of Artificial Sequence: Synthetic oligonucleotide
gaggacaaccuguuuauuu

SEQ ID NO: 2825589 - RNA, 19 nt, Artificial Sequence
  Description of Artificial Sequence: Synthetic oligonucleotide
uccaacagccucgcgcuga

SEQ ID NO: 2825590 - RNA, 19 nt, Artificial Sequence
  Description of Artificial Sequence: Synthetic oligonucleotide
ccuugauccuguuuucuac

SEQ ID NO: 2825591 - RNA, 19 nt, Artificial Sequence
  Description of Artificial Sequence: Synthetic oligonucleotide
ugacguggaaguggacgag

SEQ ID NO: 2825592 - RNA, 19 nt, Artificial Sequence
  Description of Artificial Sequence: Synthetic oligonucleotide
ucucuggaaacgucuccau

SEQ ID NO: 2825593 - RNA, 19 nt, Artificial Sequence
  Description of Artificial Sequence: Synthetic oligonucleotide
gccacucagaacuucucug

SEQ ID NO: 2825594 - RNA, 19 nt, Artificial Sequence
  Description of Artificial Sequence: Synthetic oligonucleotide
accuguuuauuuaaaugua

SEQ ID NO: 2825595 - RNA, 19 nt, Artificial Sequence
  Description of Artificial Sequence: Synthetic oligonucleotide
ugcacacagggaugggauc

SEQ ID NO: 2825596 - RNA, 19 nt, Artificial Sequence
  Description of Artificial Sequence: Synthetic oligonucleotide
gcugaaguugugaagcgac

SEQ ID NO: 2825597 - RNA, 19 nt, Artificial Sequence
  Description of Artificial Sequence: Synthetic oligonucleotide
uccuucugccacucagaac

SEQ ID NO: 2825598 - RNA, 19 nt, Artificial Sequence
  Description of Artificial Sequence: Synthetic oligonucleotide
agcgacacguccgcgcccg

SEQ ID NO: 2825599 - RNA, 19 nt, Artificial Sequence
  Description of Artificial Sequence: Synthetic oligonucleotide
agguugcguagaugcggcg

SEQ ID NO: 2825600 - RNA, 19 nt, Artificial Sequence
  Description of Artificial Sequence: Synthetic oligonucleotide
uacuggucuuccuggcuaa

SEQ ID NO: 2825601 - RNA, 19 nt, Artificial Sequence
  Description of Artificial Sequence: Synthetic oligonucleotide
gagguugugucagaagugu

SEQ ID NO: 2825602 - RNA, 19 nt, Artificial Sequence
  Description of Artificial Sequence: Synthetic oligonucleotide
gcugcacauggccacugcg

SEQ ID NO: 2825603 - RNA, 19 nt, Artificial Sequence
  Description of Artificial Sequence: Synthetic oligonucleotide
cugucagccgcaugacgug

SEQ ID NO: 2825604 - RNA, 19 nt, Artificial Sequence
  Description of Artificial Sequence: Synthetic oligonucleotide
cugaaguugugaagcgaca

SEQ ID NO: 2825605 - RNA, 19 nt, Artificial Sequence
  Description of Artificial Sequence: Synthetic oligonucleotide
auggcgcgggcaucccagc

SEQ ID NO: 2825606 - RNA, 19 nt, Artificial Sequence
  Description of Artificial Sequence: Synthetic oligonucleotide
agguugugucagaaguguc

SEQ ID NO: 2825607 - RNA, 19 nt, Artificial Sequence
  Description of Artificial Sequence: Synthetic oligonucleotide
gaucguagcggcugcacau

SEQ ID NO: 2825608 - RNA, 19 nt, Artificial Sequence
  Description of Artificial Sequence: Synthetic oligonucleotide
ggacgagcugcuccaacag

SEQ ID NO: 2825609 - RNA, 19 nt, Artificial Sequence
  Description of Artificial Sequence: Synthetic oligonucleotide
accaggauggcgcgggcau

SEQ ID NO: 2825610 - RNA, 19 nt, Artificial Sequence
  Description of Artificial Sequence: Synthetic oligonucleotide
ugcguagaugcggcguugc

SEQ ID NO: 2825611 - RNA, 19 nt, Artificial Sequence
  Description of Artificial Sequence: Synthetic oligonucleotide
gggaugggaucguagcggc

SEQ ID NO: 2825612 - RNA, 19 nt, Artificial Sequence
  Description of Artificial Sequence: Synthetic oligonucleotide
acgugaaguuacugucugu

SEQ ID NO: 2825613 - RNA, 19 nt, Artificial Sequence
  Description of Artificial Sequence: Synthetic oligonucleotide
cuugauccuguuuucuacu

SEQ ID NO: 2825614 - RNA, 19 nt, Artificial Sequence
  Description of Artificial Sequence: Synthetic oligonucleotide
acaggaaaagcgagucugu

SEQ ID NO: 2825615 - RNA, 19 nt, Artificial Sequence
  Description of Artificial Sequence: Synthetic oligonucleotide
acugcgagguugcguagau

SEQ ID NO: 2825616 - RNA, 19 nt, Artificial Sequence
  Description of Artificial Sequence: Synthetic oligonucleotide
cugcacauggccacugcga

SEQ ID NO: 2825617 - RNA, 19 nt, Artificial Sequence
  Description of Artificial Sequence: Synthetic oligonucleotide
caaguuacacacucuuccu

SEQ ID NO: 2825618 - RNA, 19 nt, Artificial Sequence
  Description of Artificial Sequence: Synthetic oligonucleotide
gacaaccuguuuauuuaaa

SEQ ID NO: 2825619 - RNA, 19 nt, Artificial Sequence
  Description of Artificial Sequence: Synthetic oligonucleotide
cauggccacugcgagguug

SEQ ID NO: 2825620 - RNA, 19 nt, Artificial Sequence
  Description of Artificial Sequence: Synthetic oligonucleotide
aguggagguugugucagaa

SEQ ID NO: 2825621 - RNA, 19 nt, Artificial Sequence
  Description of Artificial Sequence: Synthetic oligonucleotide
aguuacugucuguguugga

SEQ ID NO: 2825622 - RNA, 19 nt, Artificial Sequence
  Description of Artificial Sequence: Synthetic oligonucleotide
gcugacaaacaccuguuua

SEQ ID NO: 2825623 - RNA, 19 nt, Artificial Sequence
  Description of Artificial Sequence: Synthetic oligonucleotide
guuacacacucuuccuucu

SEQ ID NO: 2825624 - RNA, 19 nt, Artificial Sequence
  Description of Artificial Sequence: Synthetic oligonucleotide
acagcacggaaaccaggau

SEQ ID NO: 2825625 - RNA, 19 nt, Artificial Sequence
  Description of Artificial Sequence: Synthetic oligonucleotide
caggauggcgcgggcaucc

SEQ ID NO: 2825626 - RNA, 19 nt, Artificial Sequence
  Description of Artificial Sequence: Synthetic oligonucleotide
agcugacaaacaccuguuu

SEQ ID NO: 2825627 - RNA, 19 nt, Artificial Sequence
  Description of Artificial Sequence: Synthetic oligonucleotide
uccuggcuaaacgcugggc

SEQ ID NO: 2825628 - RNA, 19 nt, Artificial Sequence
  Description of Artificial Sequence: Synthetic oligonucleotide
caggaaaagcgagucuguc

SEQ ID NO: 2825629 - RNA, 19 nt, Artificial Sequence
  Description of Artificial Sequence: Synthetic oligonucleotide
cuggcuaaacgcugggcaa

SEQ ID NO: 2825630 - RNA, 19 nt, Artificial Sequence
  Description of Artificial Sequence: Synthetic oligonucleotide
acagccucgcgcugaaguu

SEQ ID NO: 2825631 - RNA, 19 nt, Artificial Sequence
  Description of Artificial Sequence: Synthetic oligonucleotide
uggagagguuguagcugac

SEQ ID NO: 2825632 - RNA, 19 nt, Artificial Sequence
  Description of Artificial Sequence: Synthetic oligonucleotide
ucagccgcaugacguggaa

SEQ ID NO: 2825633 - RNA, 19 nt, Artificial Sequence
  Description of Artificial Sequence: Synthetic oligonucleotide
ggagguugugucagaagug

SEQ ID NO: 2825634 - RNA, 19 nt, Artificial Sequence
  Description of Artificial Sequence: Synthetic oligonucleotide
aaccaggauggcgcgggca

SEQ ID NO: 2825635 - RNA, 19 nt, Artificial Sequence
  Description of Artificial Sequence: Synthetic oligonucleotide
cacucagaacuucucugga

SEQ ID NO: 2825636 - RNA, 19 nt, Artificial Sequence
  Description of Artificial Sequence: Synthetic oligonucleotide
cuacuaguaacgugaaguu

SEQ ID NO: 2825637 - RNA, 19 nt, Artificial Sequence
  Description of Artificial Sequence: Synthetic oligonucleotide
acacguccgcgcccgcgac

SEQ ID NO: 2825638 - RNA, 19 nt, Artificial Sequence
  Description of Artificial Sequence: Synthetic oligonucleotide
cucgcgcugaaguugugaa

SEQ ID NO: 2825639 - RNA, 19 nt, Artificial Sequence
  Description of Artificial Sequence: Synthetic oligonucleotide
aucguagcggcugcacaug

SEQ ID NO: 2825640 - RNA, 19 nt, Artificial Sequence
  Description of Artificial Sequence: Synthetic oligonucleotide
acguccgcgcccgcgacgg

SEQ ID NO: 2825641 - RNA, 19 nt, Artificial Sequence
  Description of Artificial Sequence: Synthetic oligonucleotide
cacacucuuccuucugcca

SEQ ID NO: 2825642 - RNA, 19 nt, Artificial Sequence
  Description of Artificial Sequence: Synthetic oligonucleotide
gugaaguuacugucugugu

SEQ ID NO: 2825643 - RNA, 19 nt, Artificial Sequence
  Description of Artificial Sequence: Synthetic oligonucleotide
uggcgcgggcaucccagcc

SEQ ID NO: 2825644 - RNA, 19 nt, Artificial Sequence
  Description of Artificial Sequence: Synthetic oligonucleotide
uugcguagaugcggcguug

SEQ ID NO: 2825645 - RNA, 19 nt, Artificial Sequence
  Description of Artificial Sequence: Synthetic oligonucleotide
ggcuaaacgcugggcaagg

SEQ ID NO: 2825646 - RNA, 19 nt, Artificial Sequence
  Description of Artificial Sequence: Synthetic oligonucleotide
gcgcugaaguugugaagcg

SEQ ID NO: 2825647 - RNA, 19 nt, Artificial Sequence
  Description of Artificial Sequence: Synthetic oligonucleotide
cuggucuuccuggcuaaac

SEQ ID NO: 2825648 - RNA, 19 nt, Artificial Sequence
  Description of Artificial Sequence: Synthetic oligonucleotide
cugccacucagaacuucuc

SEQ ID NO: 2825649 - RNA, 19 nt, Artificial Sequence
  Description of Artificial Sequence: Synthetic oligonucleotide
cgcgcugaaguugugaagc

SEQ ID NO: 2825650 - RNA, 19 nt, Artificial Sequence
  Description of Artificial Sequence: Synthetic oligonucleotide
cuaguaacgugaaguuacu

SEQ ID NO: 2825651 - RNA, 19 nt, Artificial Sequence
  Description of Artificial Sequence: Synthetic oligonucleotide
cgugaaguuacugucugug

SEQ ID NO: 2825652 - RNA, 19 nt, Artificial Sequence
  Description of Artificial Sequence: Synthetic oligonucleotide
cugucuguguuggagaggu

SEQ ID NO: 2825653 - RNA, 19 nt, Artificial Sequence
  Description of Artificial Sequence: Synthetic oligonucleotide
ggacaaccuguuuauuuaa

SEQ ID NO: 2825654 - RNA, 19 nt, Artificial Sequence
  Description of Artificial Sequence: Synthetic oligonucleotide
gcacauggccacugcgagg

SEQ ID NO: 2825655 - RNA, 19 nt, Artificial Sequence
  Description of Artificial Sequence: Synthetic oligonucleotide
acguggaaguggacgagcu

SEQ ID NO: 2825656 - RNA, 19 nt, Artificial Sequence
  Description of Artificial Sequence: Synthetic oligonucleotide
gugaagcgacacguccgcg

SEQ ID NO: 2825657 - RNA, 19 nt, Artificial Sequence
  Description of Artificial Sequence: Synthetic oligonucleotide
ccuggcuaaacgcugggca

SEQ ID NO: 2825658 - RNA, 19 nt, Artificial Sequence
  Description of Artificial Sequence: Synthetic oligonucleotide
aggccaguggagguugugu

SEQ ID NO: 2825659 - RNA, 19 nt, Artificial Sequence
  Description of Artificial Sequence: Synthetic oligonucleotide
uucugccacucagaacuuc

SEQ ID NO: 2825660 - RNA, 19 nt, Artificial Sequence
  Description of Artificial Sequence: Synthetic oligonucleotide
aucccagcccagagagagc

SEQ ID NO: 2825661 - RNA, 19 nt, Artificial Sequence
  Description of Artificial Sequence: Synthetic oligonucleotide
ccagccgggccacagcacg

SEQ ID NO: 2825662 - RNA, 19 nt, Artificial Sequence
  Description of Artificial Sequence: Synthetic oligonucleotide
gacggccugcggcuccucc

SEQ ID NO: 2825663 - RNA, 19 nt, Artificial Sequence
  Description of Artificial Sequence: Synthetic oligonucleotide
agguuguagcugacaaaca

SEQ ID NO: 2825664 - RNA, 19 nt, Artificial Sequence
  Description of Artificial Sequence: Synthetic oligonucleotide
cagccgggccacagcacgg

SEQ ID NO: 2825665 - RNA, 19 nt, Artificial Sequence
  Description of Artificial Sequence: Synthetic oligonucleotide
cacauggccacugcgaggu

SEQ ID NO: 2825666 - RNA, 19 nt, Artificial Sequence
  Description of Artificial Sequence: Synthetic oligonucleotide
caccuguuuacuggucuuc

SEQ ID NO: 2825667 - RNA, 19 nt, Artificial Sequence
  Description of Artificial Sequence: Synthetic oligonucleotide
guggacgagcugcuccaac

SEQ ID NO: 2825668 - RNA, 19 nt, Artificial Sequence
  Description of Artificial Sequence: Synthetic oligonucleotide
auccuguuuucuacuagua

SEQ ID NO: 2825669 - RNA, 19 nt, Artificial Sequence
  Description of Artificial Sequence: Synthetic oligonucleotide
ggaaaccaggauggcgcgg

SEQ ID NO: 2825670 - RNA, 19 nt, Artificial Sequence
  Description of Artificial Sequence: Synthetic oligonucleotide
cgagguugcguagaugcgg

SEQ ID NO: 2825671 - RNA, 19 nt, Artificial Sequence
  Description of Artificial Sequence: Synthetic oligonucleotide
cagccucgcgcugaaguug

SEQ ID NO: 2825672 - RNA, 19 nt, Artificial Sequence
  Description of Artificial Sequence: Synthetic oligonucleotide
ccaguggagguugugucag

SEQ ID NO: 2825673 - RNA, 19 nt, Artificial Sequence
  Description of Artificial Sequence: Synthetic oligonucleotide
gguugugucagaagugucu

SEQ ID NO: 2825674 - RNA, 19 nt, Artificial Sequence
  Description of Artificial Sequence: Synthetic oligonucleotide
acccacaggaaaagcgagu

SEQ ID NO: 2825675 - RNA, 19 nt, Artificial Sequence
  Description of Artificial Sequence: Synthetic oligonucleotide
ggccaguggagguuguguc

SEQ ID NO: 2825676 - RNA, 19 nt, Artificial Sequence
  Description of Artificial Sequence: Synthetic oligonucleotide
aggauggcgcgggcauccc

SEQ ID NO: 2825677 - RNA, 19 nt, Artificial Sequence
  Description of Artificial Sequence: Synthetic oligonucleotide
ggaucguagcggcugcaca

SEQ ID NO: 2825678 - RNA, 19 nt, Artificial Sequence
  Description of Artificial Sequence: Synthetic oligonucleotide
ggaggugcacacagggaug

SEQ ID NO: 2825679 - RNA, 19 nt, Artificial Sequence
  Description of Artificial Sequence: Synthetic oligonucleotide
gggaggugcacacagggau

SEQ ID NO: 2825680 - RNA, 19 nt, Artificial Sequence
  Description of Artificial Sequence: Synthetic oligonucleotide
acgucuccauuucuuccuu

SEQ ID NO: 2825681 - RNA, 19 nt, Artificial Sequence
  Description of Artificial Sequence: Synthetic oligonucleotide
cccacaggaaaagcgaguc

SEQ ID NO: 2825682 - RNA, 19 nt, Artificial Sequence
  Description of Artificial Sequence: Synthetic oligonucleotide
aacgcugggcaaggccagu

SEQ ID NO: 2825683 - RNA, 19 nt, Artificial Sequence
  Description of Artificial Sequence: Synthetic oligonucleotide
gugucagaagugucuccaa

SEQ ID NO: 2825684 - RNA, 19 nt, Artificial Sequence
  Description of Artificial Sequence: Synthetic oligonucleotide
ccacccacaggaaaagcga

SEQ ID NO: 2825685 - RNA, 19 nt, Artificial Sequence
  Description of Artificial Sequence: Synthetic oligonucleotide
cuccaucccgcccgccagc

SEQ ID NO: 2825686 - RNA, 19 nt, Artificial Sequence
  Description of Artificial Sequence: Synthetic oligonucleotide
gccugcggcuccuccaucc

SEQ ID NO: 2825687 - RNA, 19 nt, Artificial Sequence
  Description of Artificial Sequence: Synthetic oligonucleotide
uccgcgcccgcgacggccu

SEQ ID NO: 2825688 - RNA, 19 nt, Artificial Sequence
  Description of Artificial Sequence: Synthetic oligonucleotide
gcaaggccaguggagguug

SEQ ID NO: 2825689 - RNA, 19 nt, Artificial Sequence
  Description of Artificial Sequence: Synthetic oligonucleotide
aggugcacacagggauggg

SEQ ID NO: 2825690 - RNA, 19 nt, Artificial Sequence
  Description of Artificial Sequence: Synthetic oligonucleotide
cguagaugcggcguugccc

SEQ ID NO: 2825691 - RNA, 19 nt, Artificial Sequence
  Description of Artificial Sequence: Synthetic oligonucleotide
gccaguggagguuguguca

SEQ ID NO: 2825692 - RNA, 19 nt, Artificial Sequence
  Description of Artificial Sequence: Synthetic oligonucleotide
ggugcacacagggauggga

SEQ ID NO: 2825693 - RNA, 19 nt, Artificial Sequence
  Description of Artificial Sequence: Synthetic oligonucleotide
agccucgcgcugaaguugu

SEQ ID NO: 2825694 - RNA, 19 nt, Artificial Sequence
  Description of Artificial Sequence: Synthetic oligonucleotide
agggaggugcacacaggga

SEQ ID NO: 2825695 - RNA, 19 nt, Artificial Sequence
  Description of Artificial Sequence: Synthetic oligonucleotide
gucuuccuggcuaaacgcu

SEQ ID NO: 2825696 - RNA, 19 nt, Artificial Sequence
  Description of Artificial Sequence: Synthetic oligonucleotide
cacguccgcgcccgcgacg

SEQ ID NO: 2825697 - RNA, 19 nt, Artificial Sequence
  Description of Artificial Sequence: Synthetic oligonucleotide
ugggaucguagcggcugca

SEQ ID NO: 2825698 - RNA, 19 nt, Artificial Sequence
  Description of Artificial Sequence: Synthetic oligonucleotide
ggcgcgggcaucccagccc

SEQ ID NO: 2825699 - RNA, 19 nt, Artificial Sequence
  Description of Artificial Sequence: Synthetic oligonucleotide
gcuccaacagccucgcgcu

SEQ ID NO: 2825700 - RNA, 19 nt, Artificial Sequence
  Description of Artificial Sequence: Synthetic oligonucleotide
cagccgcaugacguggaag

SEQ ID NO: 2825701 - RNA, 19 nt, Artificial Sequence
  Description of Artificial Sequence: Synthetic oligonucleotide
gcugggcaaggccagugga

SEQ ID NO: 2825702 - RNA, 19 nt, Artificial Sequence
  Description of Artificial Sequence: Synthetic oligonucleotide
gcgagguugcguagaugcg

SEQ ID NO: 2825703 - RNA, 19 nt, Artificial Sequence
  Description of Artificial Sequence: Synthetic oligonucleotide
ugucuguguuggagagguu

SEQ ID NO: 2825704 - RNA, 19 nt, Artificial Sequence
  Description of Artificial Sequence: Synthetic oligonucleotide
acgcugggcaaggccagug

SEQ ID NO: 2825705 - RNA, 19 nt, Artificial Sequence
  Description of Artificial Sequence: Synthetic oligonucleotide
guugcguagaugcggcguu

SEQ ID NO: 2825706 - RNA, 19 nt, Artificial Sequence
  Description of Artificial Sequence: Synthetic oligonucleotide
agcgagucugucagccgca

SEQ ID NO: 2825707 - RNA, 19 nt, Artificial Sequence
  Description of Artificial Sequence: Synthetic oligonucleotide
uggccacugcgagguugcg

SEQ ID NO: 2825708 - RNA, 19 nt, Artificial Sequence
  Description of Artificial Sequence: Synthetic oligonucleotide
cggaaaccaggauggcgcg

SEQ ID NO: 2825709 - RNA, 19 nt, Artificial Sequence
  Description of Artificial Sequence: Synthetic oligonucleotide
ggagagguuguagcugaca

SEQ ID NO: 2825710 - RNA, 19 nt, Artificial Sequence
  Description of Artificial Sequence: Synthetic oligonucleotide
cuccaacagccucgcgcug

SEQ ID NO: 2825711 - RNA, 19 nt, Artificial Sequence
  Description of Artificial Sequence: Synthetic oligonucleotide
cgggccacagcacggaaac

SEQ ID NO: 2825712 - RNA, 19 nt, Artificial Sequence
  Description of Artificial Sequence: Synthetic oligonucleotide
gcuaaacgcugggcaaggc

SEQ ID NO: 2825713 - RNA, 19 nt, Artificial Sequence
  Description of Artificial Sequence: Synthetic oligonucleotide
gcguagaugcggcguugcc

SEQ ID NO: 2825714 - RNA, 19 nt, Artificial Sequence
  Description of Artificial Sequence: Synthetic oligonucleotide
cugcgagguugcguagaug

SEQ ID NO: 2825715 - RNA, 19 nt, Artificial Sequence
  Description of Artificial Sequence: Synthetic oligonucleotide
cugcuccaacagccucgcg

SEQ ID NO: 2825716 - RNA, 19 nt, Artificial Sequence
  Description of Artificial Sequence: Synthetic oligonucleotide
ggaaacgucuccauuucuu

SEQ ID NO: 2825717 - RNA, 19 nt, Artificial Sequence
  Description of Artificial Sequence: Synthetic oligonucleotide
gugcacacagggaugggau

SEQ ID NO: 2825718 - RNA, 19 nt, Artificial Sequence
  Description of Artificial Sequence: Synthetic oligonucleotide
gucagccgcaugacgugga

SEQ ID NO: 2825719 - RNA, 19 nt, Artificial Sequence
  Description of Artificial Sequence: Synthetic oligonucleotide
cacugcgagguugcguaga

SEQ ID NO: 2825720 - RNA, 19 nt, Artificial Sequence
  Description of Artificial Sequence: Synthetic oligonucleotide
ccuccaucccgcccgccag

SEQ ID NO: 2825721 - RNA, 19 nt, Artificial Sequence
  Description of Artificial Sequence: Synthetic oligonucleotide
aguggacgagcugcuccaa

SEQ ID NO: 2825722 - RNA, 19 nt, Artificial Sequence
  Description of Artificial Sequence: Synthetic oligonucleotide
acuggucuuccuggcuaaa

SEQ ID NO: 2825723 - RNA, 19 nt, Artificial Sequence
  Description of Artificial Sequence: Synthetic oligonucleotide
caguggagguugugucaga

SEQ ID NO: 2825724 - RNA, 19 nt, Artificial Sequence
  Description of Artificial Sequence: Synthetic oligonucleotide
gcccgcgacggccugcggc

SEQ ID NO: 2825725 - RNA, 19 nt, Artificial Sequence
  Description of Artificial Sequence: Synthetic oligonucleotide
gggaucguagcggcugcac

SEQ ID NO: 2825726 - RNA, 19 nt, Artificial Sequence
  Description of Artificial Sequence: Synthetic oligonucleotide
agccgggccacagcacgga

SEQ ID NO: 2825727 - RNA, 19 nt, Artificial Sequence
  Description of Artificial Sequence: Synthetic oligonucleotide
gguugcguagaugcggcgu

SEQ ID NO: 2825728 - RNA, 19 nt, Artificial Sequence
  Description of Artificial Sequence: Synthetic oligonucleotide
ccugcggcuccuccauccc

SEQ ID NO: 2825729 - RNA, 19 nt, Artificial Sequence
  Description of Artificial Sequence: Synthetic oligonucleotide
gggcaucccagcccagaga

SEQ ID NO: 2825730 - RNA, 19 nt, Artificial Sequence
  Description of Artificial Sequence: Synthetic oligonucleotide
cguagcggcugcacauggc

SEQ ID NO: 2825731 - RNA, 19 nt, Artificial Sequence
  Description of Artificial Sequence: Synthetic oligonucleotide
ggaaguggacgagcugcuc

SEQ ID NO: 2825732 - RNA, 19 nt, Artificial Sequence
  Description of Artificial Sequence: Synthetic oligonucleotide
gccgcaugacguggaagug

SEQ ID NO: 2825733 - RNA, 19 nt, Artificial Sequence
  Description of Artificial Sequence: Synthetic oligonucleotide
cucuggaaacgucuccauu

SEQ ID NO: 2825734 - RNA, 19 nt, Artificial Sequence
  Description of Artificial Sequence: Synthetic oligonucleotide
acacagggaugggaucgua

SEQ ID NO: 2825735 - RNA, 19 nt, Artificial Sequence
  Description of Artificial Sequence: Synthetic oligonucleotide
aucccgcccgccagccggg

SEQ ID NO: 2825736 - RNA, 19 nt, Artificial Sequence
  Description of Artificial Sequence: Synthetic oligonucleotide
caacagccucgcgcugaag

SEQ ID NO: 2825737 - RNA, 19 nt, Artificial Sequence
  Description of Artificial Sequence: Synthetic oligonucleotide
ccacugcgagguugcguag

SEQ ID NO: 2825738 - RNA, 19 nt, Artificial Sequence
  Description of Artificial Sequence: Synthetic oligonucleotide
cgcugggcaaggccagugg

SEQ ID NO: 2825739 - RNA, 19 nt, Artificial Sequence
  Description of Artificial Sequence: Synthetic oligonucleotide
ggauggcgcgggcauccca

SEQ ID NO: 2825740 - RNA, 19 nt, Artificial Sequence
  Description of Artificial Sequence: Synthetic oligonucleotide
gcacggaaaccaggauggc

SEQ ID NO: 2825741 - RNA, 19 nt, Artificial Sequence
  Description of Artificial Sequence: Synthetic oligonucleotide
cgucuccauuucuuccuug

SEQ ID NO: 2825742 - RNA, 19 nt, Artificial Sequence
  Description of Artificial Sequence: Synthetic oligonucleotide
acauggccacugcgagguu

SEQ ID NO: 2825743 - RNA, 19 nt, Artificial Sequence
  Description of Artificial Sequence: Synthetic oligonucleotide
cgggcaucccagcccagag

SEQ ID NO: 2825744 - RNA, 19 nt, Artificial Sequence
  Description of Artificial Sequence: Synthetic oligonucleotide
gcgcgggcaucccagccca

SEQ ID NO: 2825745 - RNA, 19 nt, Artificial Sequence
  Description of Artificial Sequence: Synthetic oligonucleotide
ccuguuuacuggucuuccu

SEQ ID NO: 2825746 - RNA, 19 nt, Artificial Sequence
  Description of Artificial Sequence: Synthetic oligonucleotide
gggcaaggccaguggaggu

SEQ ID NO: 2825747 - RNA, 19 nt, Artificial Sequence
  Description of Artificial Sequence: Synthetic oligonucleotide
ccccacccacaggaaaagc

SEQ ID NO: 2825748 - RNA, 19 nt, Artificial Sequence
  Description of Artificial Sequence: Synthetic oligonucleotide
cuucugccacucagaacuu

SEQ ID NO: 2825749 - RNA, 19 nt, Artificial Sequence
  Description of Artificial Sequence: Synthetic oligonucleotide
caaggccaguggagguugu

SEQ ID NO: 2825750 - RNA, 19 nt, Artificial Sequence
  Description of Artificial Sequence: Synthetic oligonucleotide
cacacagggaugggaucgu

SEQ ID NO: 2825751 - RNA, 19 nt, Artificial Sequence
  Description of Artificial Sequence: Synthetic oligonucleotide
gcaugacguggaaguggac

SEQ ID NO: 2825752 - RNA, 19 nt, Artificial Sequence
  Description of Artificial Sequence: Synthetic oligonucleotide
ccaucccgcccgccagccg

SEQ ID NO: 2825753 - RNA, 19 nt, Artificial Sequence
  Description of Artificial Sequence: Synthetic oligonucleotide
ccucgcgcugaaguuguga

SEQ ID NO: 2825754 - RNA, 19 nt, Artificial Sequence
  Description of Artificial Sequence: Synthetic oligonucleotide
gcgcccgcgacggccugcg

SEQ ID NO: 2825755 - RNA, 19 nt, Artificial Sequence
  Description of Artificial Sequence: Synthetic oligonucleotide
cgagucugucagccgcaug

SEQ ID NO: 2825756 - RNA, 19 nt, Artificial Sequence
  Description of Artificial Sequence: Synthetic oligonucleotide
ccacaggaaaagcgagucu

SEQ ID NO: 2825757 - RNA, 19 nt, Artificial Sequence
  Description of Artificial Sequence: Synthetic oligonucleotide
ccaacagccucgcgcugaa

SEQ ID NO: 2825758 - RNA, 19 nt, Artificial Sequence
  Description of Artificial Sequence: Synthetic oligonucleotide
cgcugaaguugugaagcga

SEQ ID NO: 2825759 - RNA, 19 nt, Artificial Sequence
  Description of Artificial Sequence: Synthetic oligonucleotide
gcgggcaucccagcccaga

SEQ ID NO: 2825760 - RNA, 19 nt, Artificial Sequence
  Description of Artificial Sequence: Synthetic oligonucleotide
gcaucccagcccagagaga

SEQ ID NO: 2825761 - RNA, 19 nt, Artificial Sequence
  Description of Artificial Sequence: Synthetic oligonucleotide
ccgggccacagcacggaaa

SEQ ID NO: 2825762 - RNA, 19 nt, Artificial Sequence
  Description of Artificial Sequence: Synthetic oligonucleotide
ggcaaggccaguggagguu

SEQ ID NO: 2825763 - RNA, 19 nt, Artificial Sequence
  Description of Artificial Sequence: Synthetic oligonucleotide
ccgccagccgggccacagc

SEQ ID NO: 2825764 - RNA, 19 nt, Artificial Sequence
  Description of Artificial Sequence: Synthetic oligonucleotide
ggaugggaucguagcggcu

SEQ ID NO: 2825765 - RNA, 19 nt, Artificial Sequence
  Description of Artificial Sequence: Synthetic oligonucleotide
gccagccgggccacagcac

SEQ ID NO: 2825766 - RNA, 19 nt, Artificial Sequence
  Description of Artificial Sequence: Synthetic oligonucleotide
ggccugcggcuccuccauc

SEQ ID NO: 2825767 - RNA, 19 nt, Artificial Sequence
  Description of Artificial Sequence: Synthetic oligonucleotide
cgccagccgggccacagca

SEQ ID NO: 2825768 - RNA, 19 nt, Artificial Sequence
  Description of Artificial Sequence: Synthetic oligonucleotide
cgcgacggccugcggcucc

SEQ ID NO: 2825769 - RNA, 19 nt, Artificial Sequence
  Description of Artificial Sequence: Synthetic oligonucleotide
cccgcgacggccugcggcu

SEQ ID NO: 2825770 - RNA, 19 nt, Artificial Sequence
  Description of Artificial Sequence: Synthetic oligonucleotide
ggccacugcgagguugcgu

SEQ ID NO: 2825771 - RNA, 19 nt, Artificial Sequence
  Description of Artificial Sequence: Synthetic oligonucleotide
ccgcccgccagccgggcca

SEQ ID NO: 2825772 - RNA, 19 nt, Artificial Sequence
  Description of Artificial Sequence: Synthetic oligonucleotide
gcgacacguccgcgcccgc

SEQ ID NO: 2825773 - RNA, 19 nt, Artificial Sequence
  Description of Artificial Sequence: Synthetic oligonucleotide
cggcuccuccaucccgccc

SEQ ID NO: 2825774 - RNA, 19 nt, Artificial Sequence
  Description of Artificial Sequence: Synthetic oligonucleotide
cccgcccgccagccgggcc

SEQ ID NO: 2825775 - RNA, 19 nt, Artificial Sequence
  Description of Artificial Sequence: Synthetic oligonucleotide
gccucgcgcugaaguugug

SEQ ID NO: 2825776 - RNA, 19 nt, Artificial Sequence
  Description of Artificial Sequence: Synthetic oligonucleotide
gcggcugcacauggccacu

SEQ ID NO: 2825777 - RNA, 19 nt, Artificial Sequence
  Description of Artificial Sequence: Synthetic oligonucleotide
gcgagucugucagccgcau

SEQ ID NO: 2825778 - RNA, 19 nt, Artificial Sequence
  Description of Artificial Sequence: Synthetic oligonucleotide
cgcgggcaucccagcccag

SEQ ID NO: 2825779 - RNA, 19 nt, Artificial Sequence
  Description of Artificial Sequence: Synthetic oligonucleotide
gcgacggccugcggcuccu

SEQ ID NO: 2825780 - RNA, 19 nt, Artificial Sequence
  Description of Artificial Sequence: Synthetic oligonucleotide
cguccgcgcccgcgacggc

SEQ ID NO: 2825781 - RNA, 19 nt, Artificial Sequence
  Description of Artificial Sequence: Synthetic oligonucleotide
ccgcgacggccugcggcuc

SEQ ID NO: 2825782 - RNA, 19 nt, Artificial Sequence
  Description of Artificial Sequence: Synthetic oligonucleotide
cgcgcccgcgacggccugc

SEQ ID NO: 2825783 - RNA, 19 nt, Artificial Sequence
  Description of Artificial Sequence: Synthetic oligonucleotide
ccgcgcccgcgacggccug

SEQ ID NO: 2825784 - RNA, 19 nt, Artificial Sequence
  Description of Artificial Sequence: Synthetic oligonucleotide
cgcccgcgacggccugcgg

SEQ ID NO: 2825785 - RNA, 19 nt, Artificial Sequence
  Description of Artificial Sequence: Synthetic oligonucleotide
cgcccgccagccgggccac

SEQ ID NO: 2825786 - RNA, 19 nt, Artificial Sequence
  Description of Artificial Sequence: Synthetic oligonucleotide
cggccugcggcuccuccau

SEQ ID NO: 2825787 - RNA, 19 nt, Artificial Sequence
  Description of Artificial Sequence: Synthetic oligonucleotide
cgacggccugcggcuccuc

SEQ ID NO: 2825788 - RNA, 19 nt, Artificial Sequence
  Description of Artificial Sequence: Synthetic oligonucleotide
gcccgccagccgggccaca

SEQ ID NO: 2825789 - RNA, 19 nt, Artificial Sequence
  Description of Artificial Sequence: Synthetic oligonucleotide
  modified_base (5)..(5): a, c, u, g, unknown or other
aauanaaauaaauaaauaa

SEQ ID NO: 2825790 - RNA, 19 nt, Artificial Sequence
  Description of Artificial Sequence: Synthetic oligonucleotide
  modified_base (9)..(9): a, c, u, g, unknown or other
aauaaauanaaauaaauaa

SEQ ID NO: 2825791 - RNA, 19 nt, Artificial Sequence
  Description of Artificial Sequence: Synthetic oligonucleotide
aauaggaucacuucaaaag

SEQ ID NO: 2825792 - RNA, 19 nt, Artificial Sequence
  Description of Artificial Sequence: Synthetic oligonucleotide
  modified_base (7)..(7): a, c, u, g, unknown or other
uaaauanaaauaaauaaau

SEQ ID NO: 2825793 - RNA, 19 nt, Artificial Sequence
  Description of Artificial Sequence: Synthetic oligonucleotide
  modified_base (3)..(3): a, c, u, g, unknown or other
uanaaauaaauaaauaaau

SEQ ID NO: 2825794 - RNA, 19 nt, Artificial Sequence
  Description of Artificial Sequence: Synthetic oligonucleotide
aaauaaauaaauaggauca

SEQ ID NO: 2825795 - RNA, 19 nt, Artificial Sequence
  Description of Artificial Sequence: Synthetic oligonucleotide
aauaaauaggaucacuuca

SEQ ID NO: 2825796 - RNA, 19 nt, Artificial Sequence
  Description of Artificial Sequence: Synthetic oligonucleotide
uaaauaaauaaauaggauc

SEQ ID NO: 2825797 - RNA, 19 nt, Artificial Sequence
  Description of Artificial Sequence: Synthetic oligonucleotide
gaauuaugcaucuucuugg

SEQ ID NO: 2825798 - RNA, 19 nt, Artificial Sequence
  Description of Artificial Sequence: Synthetic oligonucleotide
uuuugugacgccuuggucc

SEQ ID NO: 2825799 - RNA, 19 nt, Artificial Sequence
  Description of Artificial Sequence: Synthetic oligonucleotide
aauaaauaaauaggaucac

SEQ ID NO: 2825800 - RNA, 19 nt, Artificial Sequence
  Description of Artificial Sequence: Synthetic oligonucleotide
auaggaucacuucaaaagg

SEQ ID NO: 2825801 - RNA, 19 nt, Artificial Sequence
  Description of Artificial Sequence: Synthetic oligonucleotide
aaagcagcccgaauuaugc

SEQ ID NO: 2825802 - RNA, 19 nt, Artificial Sequence
  Description of Artificial Sequence: Synthetic oligonucleotide
ucuucuuggaguuucgaag

SEQ ID NO: 2825803 - RNA, 19 nt, Artificial Sequence
  Description of Artificial Sequence: Synthetic oligonucleotide
  modified_base (4)..(4): a, c, u, g, unknown or other
auanaaauaaauaaauaaa

SEQ ID NO: 2825804 - RNA, 19 nt, Artificial Sequence
  Description of Artificial Sequence: Synthetic oligonucleotide
  modified_base (2)..(2): a, c, u, g, unknown or other
anaaauaaauaaauaaaua

SEQ ID NO: 2825805 - RNA, 19 nt, Artificial Sequence
  Description of Artificial Sequence: Synthetic oligonucleotide
uaaauaaauaggaucacuu

SEQ ID NO: 2825806 - RNA, 19 nt, Artificial Sequence
  Description of Artificial Sequence: Synthetic oligonucleotide
  modified_base (8)..(8): a, c, u, g, unknown or other
auaaauanaaauaaauaaa

SEQ ID NO: 2825807 - RNA, 19 nt, Artificial Sequence
  Description of Artificial Sequence: Synthetic oligonucleotide
uaggaucacuucaaaaggg

SEQ ID NO: 2825808 - RNA, 19 nt, Artificial Sequence
  Description of Artificial Sequence: Synthetic oligonucleotide
agauccaugucguagaagu

SEQ ID NO: 2825809 - RNA, 19 nt, Artificial Sequence
  Description of Artificial Sequence: Synthetic oligonucleotide
aacagaaccauccgggaca

SEQ ID NO: 2825810 - RNA, 19 nt, Artificial Sequence
  Description of Artificial Sequence: Synthetic oligonucleotide
uuaugcaucuucuuggagu

SEQ ID NO: 2825811 - RNA, 19 nt, Artificial Sequence
  Description of Artificial Sequence: Synthetic oligonucleotide
ugccuuuucccucagcagg

SEQ ID NO: 2825812 - RNA, 19 nt, Artificial Sequence
  Description of Artificial Sequence: Synthetic oligonucleotide
aaccauccgggacagcacc

SEQ ID NO: 2825813 - RNA, 19 nt, Artificial Sequence
  Description of Artificial Sequence: Synthetic oligonucleotide
  modified_base (6)..(6): a, c, u, g, unknown or other
aaauanaaauaaauaaaua

SEQ ID NO: 2825814 - RNA, 19 nt, Artificial Sequence
  Description of Artificial Sequence: Synthetic oligonucleotide
caugucguagaagugaugg

SEQ ID NO: 2825815 - RNA, 19 nt, Artificial Sequence
  Description of Artificial Sequence: Synthetic oligonucleotide
aauuaugcaucuucuugga

SEQ ID NO: 2825816 - RNA, 19 nt, Artificial Sequence
  Description of Artificial Sequence: Synthetic oligonucleotide
ugucuugagacccaagggu

SEQ ID NO: 2825817 - RNA, 19 nt, Artificial Sequence
  Description of Artificial Sequence: Synthetic oligonucleotide
cuucuggagauccaugucg

SEQ ID NO: 2825818 - RNA, 19 nt, Artificial Sequence
  Description of Artificial Sequence: Synthetic oligonucleotide
aaauaggaucacuucaaaa

SEQ ID NO: 2825819 - RNA, 19 nt, Artificial Sequence
  Description of Artificial Sequence: Synthetic oligonucleotide
ucugccuuuucccucagca

SEQ ID NO: 2825820 - RNA, 19 nt, Artificial Sequence
  Description of Artificial Sequence: Synthetic oligonucleotide
aaaagcaggaacagaacca

SEQ ID NO: 2825821 - RNA, 19 nt, Artificial Sequence
  Description of Artificial Sequence: Synthetic oligonucleotide
ucgaaguuucuguaggacc

SEQ ID NO: 2825822 - RNA, 19 nt, Artificial Sequence
  Description of Artificial Sequence: Synthetic oligonucleotide
uccuaauaccgcuucagca

SEQ ID NO: 2825823 - RNA, 19 nt, Artificial Sequence
  Description of Artificial Sequence: Synthetic oligonucleotide
auccuaauaccgcuucagc

SEQ ID NO: 2825824 - RNA, 19 nt, Artificial Sequence
  Description of Artificial Sequence: Synthetic oligonucleotide
cuaauaccgcuucagcacg

SEQ ID NO: 2825825 - RNA, 19 nt, Artificial Sequence
  Description of Artificial Sequence: Synthetic oligonucleotide
ucuuggauugcuccggaga

SEQ ID NO: 2825826 - RNA, 19 nt, Artificial Sequence
  Description of Artificial Sequence: Synthetic oligonucleotide
cuugguggagucaggagcc

SEQ ID NO: 2825827 - RNA, 19 nt, Artificial Sequence
  Description of Artificial Sequence: Synthetic oligonucleotide
aguuucgaaguuucuguag

SEQ ID NO: 2825828 - RNA, 19 nt, Artificial Sequence
  Description of Artificial Sequence: Synthetic oligonucleotide
ugggagcucauccuaauac

SEQ ID NO: 2825829 - RNA, 19 nt, Artificial Sequence
  Description of Artificial Sequence: Synthetic oligonucleotide
uauccucugcccaaagcag

SEQ ID NO: 2825830 - RNA, 19 nt, Artificial Sequence
  Description of Artificial Sequence: Synthetic oligonucleotide
ugcaucuuggauugcuccg

SEQ ID NO: 2825831 - RNA, 19 nt, Artificial Sequence
  Description of Artificial Sequence: Synthetic oligonucleotide
agcggugacagauaaagaa

SEQ ID NO: 2825832 - RNA, 19 nt, Artificial Sequence
  Description of Artificial Sequence: Synthetic oligonucleotide
uagaagugauggaaccagg

SEQ ID NO: 2825833 - RNA, 19 nt, Artificial Sequence
  Description of Artificial Sequence: Synthetic oligonucleotide
agaagugauggaaccaggc

SEQ ID NO: 2825834 - RNA, 19 nt, Artificial Sequence
  Description of Artificial Sequence: Synthetic oligonucleotide
auaaauaaauaggaucacu

SEQ ID NO: 2825835 - RNA, 19 nt, Artificial Sequence
  Description of Artificial Sequence: Synthetic oligonucleotide
ucguagaagugauggaacc

SEQ ID NO: 2825836 - RNA, 19 nt, Artificial Sequence
  Description of Artificial Sequence: Synthetic oligonucleotide
uuuucccucagcagguuca

SEQ ID NO: 2825837 - RNA, 19 nt, Artificial Sequence
  Description of Artificial Sequence: Synthetic oligonucleotide
gacgccuugguccuucagg

SEQ ID NO: 2825838 - RNA, 19 nt, Artificial Sequence
  Description of Artificial Sequence: Synthetic oligonucleotide
uaaauaggaucacuucaaa

SEQ ID NO: 2825839 - RNA, 19 nt, Artificial Sequence
  Description of Artificial Sequence: Synthetic oligonucleotide
aggaacagaaccauccggg

SEQ ID NO: 2825840 - RNA, 19 nt, Artificial Sequence
  Description of Artificial Sequence: Synthetic oligonucleotide
ucuugagacccaagggugc

SEQ ID NO: 2825841 - RNA, 19 nt, Artificial Sequence
  Description of Artificial Sequence: Synthetic oligonucleotide
auccggucuauccucugcc

SEQ ID NO: 2825842 - RNA, 19 nt, Artificial Sequence
  Description of Artificial Sequence: Synthetic oligonucleotide
agugucugcaucuuggauu

SEQ ID NO: 2825843 - RNA, 19 nt, Artificial Sequence
  Description of Artificial Sequence: Synthetic oligonucleotide
guagaagugauggaaccag

SEQ ID NO: 2825844 - RNA, 19 nt, Artificial Sequence
  Description of Artificial Sequence: Synthetic oligonucleotide
guuucuguaggaccuggag

SEQ ID NO: 2825845 - RNA, 19 nt, Artificial Sequence
  Description of Artificial Sequence: Synthetic oligonucleotide
accgccucugccuuuuccc

SEQ ID NO: 2825846 - RNA, 19 nt, Artificial Sequence
  Description of Artificial Sequence: Synthetic oligonucleotide
uucagcacguugcagccca

SEQ ID NO: 2825847 - RNA, 19 nt, Artificial Sequence
  Description of Artificial Sequence: Synthetic oligonucleotide
cuuggaguuucgaaguuuc

SEQ ID NO: 2825848 - RNA, 19 nt, Artificial Sequence
  Description of Artificial Sequence: Synthetic oligonucleotide
uaccgcuucagcacguugc

SEQ ID NO: 2825849 - RNA, 19 nt, Artificial Sequence
  Description of Artificial Sequence: Synthetic oligonucleotide
uguaggaccuggagggugc

SEQ ID NO: 2825850 - RNA, 19 nt, Artificial Sequence
  Description of Artificial Sequence: Synthetic oligonucleotide
cugucuugagacccaaggg

SEQ ID NO: 2825851 - RNA, 19 nt, Artificial Sequence
  Description of Artificial Sequence: Synthetic oligonucleotide
cuuggauugcuccggagac

SEQ ID NO: 2825852 - RNA, 19 nt, Artificial Sequence
  Description of Artificial Sequence: Synthetic oligonucleotide
ugggagugacuucccagcg

SEQ ID NO: 2825853 - RNA, 19 nt, Artificial Sequence
  Description of Artificial Sequence: Synthetic oligonucleotide
aaagcaggaacagaaccau

SEQ ID NO: 2825854 - RNA, 19 nt, Artificial Sequence
  Description of Artificial Sequence: Synthetic oligonucleotide
auuaugcaucuucuuggag

SEQ ID NO: 2825855 - RNA, 19 nt, Artificial Sequence
  Description of Artificial Sequence: Synthetic oligonucleotide
uaugcaucuucuuggaguu

SEQ ID NO: 2825856 - RNA, 19 nt, Artificial Sequence
  Description of Artificial Sequence: Synthetic oligonucleotide
gugucugcaucuuggauug

SEQ ID NO: 2825857 - RNA, 19 nt, Artificial Sequence
  Description of Artificial Sequence: Synthetic oligonucleotide
uuugugacgccuugguccu

SEQ ID NO: 2825858 - RNA, 19 nt, Artificial Sequence
  Description of Artificial Sequence: Synthetic oligonucleotide
ugucguagaagugauggaa

SEQ ID NO: 2825859 - RNA, 19 nt, Artificial Sequence
  Description of Artificial Sequence: Synthetic oligonucleotide
uuucgaaguuucuguagga

SEQ ID NO: 2825860 - RNA, 19 nt, Artificial Sequence
  Description of Artificial Sequence: Synthetic oligonucleotide
aaguuucuguaggaccugg

SEQ ID NO: 2825861 - RNA, 19 nt, Artificial Sequence
  Description of Artificial Sequence: Synthetic oligonucleotide
uggagauccaugucguaga

SEQ ID NO: 2825862 - RNA, 19 nt, Artificial Sequence
  Description of Artificial Sequence: Synthetic oligonucleotide
ucccucagcagguucagca

SEQ ID NO: 2825863 - RNA, 19 nt, Artificial Sequence
  Description of Artificial Sequence: Synthetic oligonucleotide
aggaucacuucaaaagggg

SEQ ID NO: 2825864 - RNA, 19 nt, Artificial Sequence
  Description of Artificial Sequence: Synthetic oligonucleotide
uucuggagauccaugucgu

SEQ ID NO: 2825865 - RNA, 19 nt, Artificial Sequence
  Description of Artificial Sequence: Synthetic oligonucleotide
gcugucuugagacccaagg

SEQ ID NO: 2825866 - RNA, 19 nt, Artificial Sequence
  Description of Artificial Sequence: Synthetic oligonucleotide
uggaguuucgaaguuucug

SEQ ID NO: 2825867 - RNA, 19 nt, Artificial Sequence
  Description of Artificial Sequence: Synthetic oligonucleotide
caggaacagaaccauccgg

SEQ ID NO: 2825868 - RNA, 19 nt, Artificial Sequence
  Description of Artificial Sequence: Synthetic oligonucleotide
agcacguugcagcccagac

SEQ ID NO: 2825869 - RNA, 19 nt, Artificial Sequence
  Description of Artificial Sequence: Synthetic oligonucleotide
auaaauaggaucacuucaa

SEQ ID NO: 2825870 - RNA, 19 nt, Artificial Sequence
  Description of Artificial Sequence: Synthetic oligonucleotide
cuauccucugcccaaagca

SEQ ID NO: 2825871 - RNA, 19 nt, Artificial Sequence
  Description of Artificial Sequence: Synthetic oligonucleotide
agaaccauccgggacagca

SEQ ID NO: 2825872 - RNA, 19 nt, Artificial Sequence
  Description of Artificial Sequence: Synthetic oligonucleotide
gaacagaaccauccgggac

SEQ ID NO: 2825873 - RNA, 19 nt, Artificial Sequence
  Description of Artificial Sequence: Synthetic oligonucleotide
uggauugcuccggagacug

SEQ ID NO: 2825874 - RNA, 19 nt, Artificial Sequence
  Description of Artificial Sequence: Synthetic oligonucleotide
cugcaucuuggauugcucc

SEQ ID NO: 2825875 - RNA, 19 nt, Artificial Sequence
  Description of Artificial Sequence: Synthetic oligonucleotide
agcucauccuaauaccgcu

SEQ ID NO: 2825876 - RNA, 19 nt, Artificial Sequence
  Description of Artificial Sequence: Synthetic oligonucleotide
acugacugagccgauccgg

SEQ ID NO: 2825877 - RNA, 19 nt, Artificial Sequence
  Description of Artificial Sequence: Synthetic oligonucleotide
gggaaggagcccuuggugg

SEQ ID NO: 2825878 - RNA, 19 nt, Artificial Sequence
  Description of Artificial Sequence: Synthetic oligonucleotide
uuuggggaggugcuuuugu

SEQ ID NO: 2825879 - RNA, 19 nt, Artificial Sequence
  Description of Artificial Sequence: Synthetic oligonucleotide
agcagugucugcaucuugg

SEQ ID NO: 2825880 - RNA, 19 nt, Artificial Sequence
  Description of Artificial Sequence: Synthetic oligonucleotide
cacguugcagcccagacga

SEQ ID NO: 2825881 - RNA, 19 nt, Artificial Sequence
  Description of Artificial Sequence: Synthetic oligonucleotide
caaagcagcccgaauuaug

SEQ ID NO: 2825882 - RNA, 19 nt, Artificial Sequence
  Description of Artificial Sequence: Synthetic oligonucleotide
gacccaagggugcuuuggg

SEQ ID NO: 2825883 - RNA, 19 nt, Artificial Sequence
  Description of Artificial Sequence: Synthetic oligonucleotide
accuucuggagauccaugu

SEQ ID NO: 2825884 - RNA, 19 nt, Artificial Sequence
  Description of Artificial Sequence: Synthetic oligonucleotide
cagacgacugacugagccg

SEQ ID NO: 2825885 - RNA, 19 nt, Artificial Sequence
  Description of Artificial Sequence: Synthetic oligonucleotide
uccaugucguagaagugau

SEQ ID NO: 2825886 - RNA, 19 nt, Artificial Sequence
  Description of Artificial Sequence: Synthetic oligonucleotide
ccuaauaccgcuucagcac

SEQ ID NO: 2825887 - RNA, 19 nt, Artificial Sequence
  Description of Artificial Sequence: Synthetic oligonucleotide
ucauccuaauaccgcuuca

SEQ ID NO: 2825888 - RNA, 19 nt, Artificial Sequence
  Description of Artificial Sequence: Synthetic oligonucleotide
uggagucaggagccgggcg

SEQ ID NO: 2825889 - RNA, 19 nt, Artificial Sequence
  Description of Artificial Sequence: Synthetic oligonucleotide
cuggagauccaugucguag

SEQ ID NO: 2825890 - RNA, 19 nt, Artificial Sequence
  Description of Artificial Sequence: Synthetic oligonucleotide
gauugcuccggagacuggc

SEQ ID NO: 2825891 - RNA, 19 nt, Artificial Sequence
  Description of Artificial Sequence: Synthetic oligonucleotide
gagccgauccggucuaucc

SEQ ID NO: 2825892 - RNA, 19 nt, Artificial Sequence
  Description of Artificial Sequence: Synthetic oligonucleotide
uucgaaguuucuguaggac

SEQ ID NO: 2825893 - RNA, 19 nt, Artificial Sequence
  Description of Artificial Sequence: Synthetic oligonucleotide
gugggagugacuucccagc

SEQ ID NO: 2825894 - RNA, 19 nt, Artificial Sequence
  Description of Artificial Sequence: Synthetic oligonucleotide
uggggaggugcuuuuguga

SEQ ID NO: 2825895 - RNA, 19 nt, Artificial Sequence
  Description of Artificial Sequence: Synthetic oligonucleotide
ugcuccggagacuggcugg

SEQ ID NO: 2825896 - RNA, 19 nt, Artificial Sequence
  Description of Artificial Sequence: Synthetic oligonucleotide
gacugacugagccgauccg

SEQ ID NO: 2825897 - RNA, 19 nt, Artificial Sequence
  Description of Artificial Sequence: Synthetic oligonucleotide
gucuugagacccaagggug

SEQ ID NO: 2825898 - RNA, 19 nt, Artificial Sequence
  Description of Artificial Sequence: Synthetic oligonucleotide
auccucugcccaaagcagc

SEQ ID NO: 2825899 - RNA, 19 nt, Artificial Sequence
  Description of Artificial Sequence: Synthetic oligonucleotide
ggagcucauccuaauaccg

SEQ ID NO: 2825900 - RNA, 19 nt, Artificial Sequence
  Description of Artificial Sequence: Synthetic oligonucleotide
gauccggucuauccucugc

SEQ ID NO: 2825901 - RNA, 19 nt, Artificial Sequence
  Description of Artificial Sequence: Synthetic oligonucleotide
ucugcaucuuggauugcuc

SEQ ID NO: 2825902 - RNA, 19 nt, Artificial Sequence
  Description of Artificial Sequence: Synthetic oligonucleotide
ugcaucuucuuggaguuuc

SEQ ID NO: 2825903 - RNA, 19 nt, Artificial Sequence
  Description of Artificial Sequence: Synthetic oligonucleotide
cauccuaauaccgcuucag

SEQ ID NO: 2825904 - RNA, 19 nt, Artificial Sequence
  Description of Artificial Sequence: Synthetic oligonucleotide
uuggggaggugcuuuugug

SEQ ID NO: 2825905 - RNA, 19 nt, Artificial Sequence
  Description of Artificial Sequence: Synthetic oligonucleotide
aucuucuuggaguuucgaa

SEQ ID NO: 2825906 - RNA, 19 nt, Artificial Sequence
  Description of Artificial Sequence: Synthetic oligonucleotide
acccaagggugcuuugggg

SEQ ID NO: 2825907 - RNA, 19 nt, Artificial Sequence
  Description of Artificial Sequence: Synthetic oligonucleotide
aagcagcccgaauuaugca

SEQ ID NO: 2825908 - RNA, 19 nt, Artificial Sequence
  Description of Artificial Sequence: Synthetic oligonucleotide
ugcuuuugugacgccuugg

SEQ ID NO: 2825909 - RNA, 19 nt, Artificial Sequence
  Description of Artificial Sequence: Synthetic oligonucleotide
acgccuugguccuucagga

SEQ ID NO: 2825910 - RNA, 19 nt, Artificial Sequence
  Description of Artificial Sequence: Synthetic oligonucleotide
cucugcccaaagcagcccg

SEQ ID NO: 2825911 - RNA, 19 nt, Artificial Sequence
  Description of Artificial Sequence: Synthetic oligonucleotide
agcagcccgaauuaugcau

SEQ ID NO: 2825912 - RNA, 19 nt, Artificial Sequence
  Description of Artificial Sequence: Synthetic oligonucleotide
ggagucaggagccgggcgg

SEQ ID NO: 2825913 - RNA, 19 nt, Artificial Sequence
  Description of Artificial Sequence: Synthetic oligonucleotide
cucauccuaauaccgcuuc

SEQ ID NO: 2825914 - RNA, 19 nt, Artificial Sequence
  Description of Artificial Sequence: Synthetic oligonucleotide
cucagcagguucagcagug

SEQ ID NO: 2825915 - RNA, 19 nt, Artificial Sequence
  Description of Artificial Sequence: Synthetic oligonucleotide
ccuugguggagucaggagc

SEQ ID NO: 2825916 - RNA, 19 nt, Artificial Sequence
  Description of Artificial Sequence: Synthetic oligonucleotide
cgaauuaugcaucuucuug

SEQ ID NO: 2825917 - RNA, 19 nt, Artificial Sequence
  Description of Artificial Sequence: Synthetic oligonucleotide
gagcucauccuaauaccgc

SEQ ID NO: 2825918 - RNA, 19 nt, Artificial Sequence
  Description of Artificial Sequence: Synthetic oligonucleotide
uggggaaggagcccuuggu

SEQ ID NO: 2825919 - RNA, 19 nt, Artificial Sequence
  Description of Artificial Sequence: Synthetic oligonucleotide
uuggaguuucgaaguuucu

SEQ ID NO: 2825920 - RNA, 19 nt, Artificial Sequence
  Description of Artificial Sequence: Synthetic oligonucleotide
cuuuugugacgccuugguc

SEQ ID NO: 2825921 - RNA, 19 nt, Artificial Sequence
  Description of Artificial Sequence: Synthetic oligonucleotide
uaauaccgcuucagcacgu

SEQ ID NO: 2825922 - RNA, 19 nt, Artificial Sequence
  Description of Artificial Sequence: Synthetic oligonucleotide
ccagcggugacagauaaag

SEQ ID NO: 2825923 - RNA, 19 nt, Artificial Sequence
  Description of Artificial Sequence: Synthetic oligonucleotide
agugacuucccagcgguga

SEQ ID NO: 2825924 - RNA, 19 nt, Artificial Sequence
  Description of Artificial Sequence: Synthetic oligonucleotide
aagcaggaacagaaccauc

SEQ ID NO: 2825925 - RNA, 19 nt, Artificial Sequence
  Description of Artificial Sequence: Synthetic oligonucleotide
uugcuccggagacuggcug

SEQ ID NO: 2825926 - RNA, 19 nt, Artificial Sequence
  Description of Artificial Sequence: Synthetic oligonucleotide
gggagcucauccuaauacc

SEQ ID NO: 2825927 - RNA, 19 nt, Artificial Sequence
  Description of Artificial Sequence: Synthetic oligonucleotide
agacgacugacugagccga

SEQ ID NO: 2825928 - RNA, 19 nt, Artificial Sequence
  Description of Artificial Sequence: Synthetic oligonucleotide
gacuucccagcggugacag

SEQ ID NO: 2825929 - RNA, 19 nt, Artificial Sequence
  Description of Artificial Sequence: Synthetic oligonucleotide
gcaggaacagaaccauccg

SEQ ID NO: 2825930 - RNA, 19 nt, Artificial Sequence
  Description of Artificial Sequence: Synthetic oligonucleotide
ccagacgacugacugagcc

SEQ ID NO: 2825931 - RNA, 19 nt, Artificial Sequence
  Description of Artificial Sequence: Synthetic oligonucleotide
gucguagaagugauggaac

SEQ ID NO: 2825932 - RNA, 19 nt, Artificial Sequence
  Description of Artificial Sequence: Synthetic oligonucleotide
uccggagacuggcugggac

SEQ ID NO: 2825933 - RNA, 19 nt, Artificial Sequence
  Description of Artificial Sequence: Synthetic oligonucleotide
gauccaugucguagaagug

SEQ ID NO: 2825934 - RNA, 19 nt, Artificial Sequence
  Description of Artificial Sequence: Synthetic oligonucleotide
gagcccuugguggagucag

SEQ ID NO: 2825935 - RNA, 19 nt, Artificial Sequence
  Description of Artificial Sequence: Synthetic oligonucleotide
aucuuggauugcuccggag

SEQ ID NO: 2825936 - RNA, 19 nt, Artificial Sequence
  Description of Artificial Sequence: Synthetic oligonucleotide
uccggucuauccucugccc

SEQ ID NO: 2825937 - RNA, 19 nt, Artificial Sequence
  Description of Artificial Sequence: Synthetic oligonucleotide
ggugggagugacuucccag

SEQ ID NO: 2825938 - RNA, 19 nt, Artificial Sequence
  Description of Artificial Sequence: Synthetic oligonucleotide
cuucuuggaguuucgaagu

SEQ ID NO: 2825939 - RNA, 19 nt, Artificial Sequence
  Description of Artificial Sequence: Synthetic oligonucleotide
guugcagcccagacgacug

SEQ ID NO: 2825940 - RNA, 19 nt, Artificial Sequence
  Description of Artificial Sequence: Synthetic oligonucleotide
ggaggugcuuuugugacgc

SEQ ID NO: 2825941 - RNA, 19 nt, Artificial Sequence
  Description of Artificial Sequence: Synthetic oligonucleotide
uucuuggaguuucgaaguu

SEQ ID NO: 2825942 - RNA, 19 nt, Artificial Sequence
  Description of Artificial Sequence: Synthetic oligonucleotide
gagauccaugucguagaag

SEQ ID NO: 2825943 - RNA, 19 nt, Artificial Sequence
  Description of Artificial Sequence: Synthetic oligonucleotide
gaguuucgaaguuucugua

SEQ ID NO: 2825944 - RNA, 19 nt, Artificial Sequence
  Description of Artificial Sequence: Synthetic oligonucleotide
agguucagcagugucugca

SEQ ID NO: 2825945 - RNA, 19 nt, Artificial Sequence
  Description of Artificial Sequence: Synthetic oligonucleotide
agcagguucagcagugucu

SEQ ID NO: 2825946 - RNA, 19 nt, Artificial Sequence
  Description of Artificial Sequence: Synthetic oligonucleotide
ucccagcggugacagauaa

SEQ ID NO: 2825947 - RNA, 19 nt, Artificial Sequence
  Description of Artificial Sequence: Synthetic oligonucleotide
acagaaccauccgggacag

SEQ ID NO: 2825948 - RNA, 19 nt, Artificial Sequence
  Description of Artificial Sequence: Synthetic oligonucleotide
ccaggguuggggaaggagc

SEQ ID NO: 2825949 - RNA, 19 nt, Artificial Sequence
  Description of Artificial Sequence: Synthetic oligonucleotide
cagcccagacgacugacug

SEQ ID NO: 2825950 - RNA, 19 nt, Artificial Sequence
  Description of Artificial Sequence: Synthetic oligonucleotide
uuucccucagcagguucag

SEQ ID NO: 2825951 - RNA, 19 nt, Artificial Sequence
  Description of Artificial Sequence: Synthetic oligonucleotide
uggagggugcugucuugag

SEQ ID NO: 2825952 - RNA, 19 nt, Artificial Sequence
  Description of Artificial Sequence: Synthetic oligonucleotide
ucuuggaguuucgaaguuu

SEQ ID NO: 2825953 - RNA, 19 nt, Artificial Sequence
  Description of Artificial Sequence: Synthetic oligonucleotide
cuuuucccucagcagguuc

SEQ ID NO: 2825954 - RNA, 19 nt, Artificial Sequence
  Description of Artificial Sequence: Synthetic oligonucleotide
ugguggagucaggagccgg

SEQ ID NO: 2825955 - RNA, 19 nt, Artificial Sequence
  Description of Artificial Sequence: Synthetic oligonucleotide
auaccgcuucagcacguug

SEQ ID NO: 2825956 - RNA, 19 nt, Artificial Sequence
  Description of Artificial Sequence: Synthetic oligonucleotide
ucugcaacugggagcucau

SEQ ID NO: 2825957 - RNA, 19 nt, Artificial Sequence
  Description of Artificial Sequence: Synthetic oligonucleotide
ugcugucuugagacccaag

SEQ ID NO: 2825958 - RNA, 19 nt, Artificial Sequence
  Description of Artificial Sequence: Synthetic oligonucleotide
ggaguuucgaaguuucugu

SEQ ID NO: 2825959 - RNA, 19 nt, Artificial Sequence
  Description of Artificial Sequence: Synthetic oligonucleotide
agccgauccggucuauccu

SEQ ID NO: 2825960 - RNA, 19 nt, Artificial Sequence
  Description of Artificial Sequence: Synthetic oligonucleotide
gagacuggcugggacugcc

SEQ ID NO: 2825961 - RNA, 19 nt, Artificial Sequence
  Description of Artificial Sequence: Synthetic oligonucleotide
gcuucagcacguugcagcc

SEQ ID NO: 2825962 - RNA, 19 nt, Artificial Sequence
  Description of Artificial Sequence: Synthetic oligonucleotide
accgcuucagcacguugca

SEQ ID NO: 2825963 - RNA, 19 nt, Artificial Sequence
  Description of Artificial Sequence: Synthetic oligonucleotide
gaaggagcccuugguggag

SEQ ID NO: 2825964 - RNA, 19 nt, Artificial Sequence
  Description of Artificial Sequence: Synthetic oligonucleotide
gcacguugcagcccagacg

SEQ ID NO: 2825965 - RNA, 19 nt, Artificial Sequence
  Description of Artificial Sequence: Synthetic oligonucleotide
uugguggagucaggagccg

SEQ ID NO: 2825966 - RNA, 19 nt, Artificial Sequence
  Description of Artificial Sequence: Synthetic oligonucleotide
ggggaggugcuuuugugac

SEQ ID NO: 2825967 - RNA, 19 nt, Artificial Sequence
  Description of Artificial Sequence: Synthetic oligonucleotide
ggcggugucugcaacuggg

SEQ ID NO: 2825968 - RNA, 19 nt, Artificial Sequence
  Description of Artificial Sequence: Synthetic oligonucleotide
gcaucuuggauugcuccgg

SEQ ID NO: 2825969 - RNA, 19 nt, Artificial Sequence
  Description of Artificial Sequence: Synthetic oligonucleotide
gacugagccgauccggucu

SEQ ID NO: 2825970 - RNA, 19 nt, Artificial Sequence
  Description of Artificial Sequence: Synthetic oligonucleotide
aagggugcuuuggggaggu

SEQ ID NO: 2825971 - RNA, 19 nt, Artificial Sequence
  Description of Artificial Sequence: Synthetic oligonucleotide
gggagugacuucccagcgg

SEQ ID NO: 2825972 - RNA, 19 nt, Artificial Sequence
  Description of Artificial Sequence: Synthetic oligonucleotide
aggaccuggagggugcugu

SEQ ID NO: 2825973 - RNA, 19 nt, Artificial Sequence
  Description of Artificial Sequence: Synthetic oligonucleotide
caagggugcuuuggggagg

SEQ ID NO: 2825974 - RNA, 19 nt, Artificial Sequence
  Description of Artificial Sequence: Synthetic oligonucleotide
uuggauugcuccggagacu

SEQ ID NO: 2825975 - RNA, 19 nt, Artificial Sequence
  Description of Artificial Sequence: Synthetic oligonucleotide
acugggagcucauccuaau

SEQ ID NO: 2825976 - RNA, 19 nt, Artificial Sequence
  Description of Artificial Sequence: Synthetic oligonucleotide
ugacgccuugguccuucag

SEQ ID NO: 2825977 - RNA, 19 nt, Artificial Sequence
  Description of Artificial Sequence: Synthetic oligonucleotide
cagcaccuucuggagaucc

SEQ ID NO: 2825978 - RNA, 19 nt, Artificial Sequence
  Description of Artificial Sequence: Synthetic oligonucleotide
gugacuucccagcggugac

SEQ ID NO: 2825979 - RNA, 19 nt, Artificial Sequence
  Description of Artificial Sequence: Synthetic oligonucleotide
ggggaaggagcccuuggug

SEQ ID NO: 2825980 - RNA, 19 nt, Artificial Sequence
  Description of Artificial Sequence: Synthetic oligonucleotide
gugcuuuugugacgccuug

SEQ ID NO: 2825981 - RNA, 19 nt, Artificial Sequence
  Description of Artificial Sequence: Synthetic oligonucleotide
aacugggagcucauccuaa

SEQ ID NO: 2825982 - RNA, 19 nt, Artificial Sequence
  Description of Artificial Sequence: Synthetic oligonucleotide
gggaggugcuuuugugacg

SEQ ID NO: 2825983 - RNA, 19 nt, Artificial Sequence
  Description of Artificial Sequence: Synthetic oligonucleotide
gacuggcugggacugccca

SEQ ID NO: 2825984 - RNA, 19 nt, Artificial Sequence
  Description of Artificial Sequence: Synthetic oligonucleotide
acgacugacugagccgauc

SEQ ID NO: 2825985 - RNA, 19 nt, Artificial Sequence
  Description of Artificial Sequence: Synthetic oligonucleotide
ugacugagccgauccgguc

SEQ ID NO: 2825986 - RNA, 19 nt, Artificial Sequence
  Description of Artificial Sequence: Synthetic oligonucleotide
ggaacagaaccauccggga

SEQ ID NO: 2825987 - RNA, 19 nt, Artificial Sequence
  Description of Artificial Sequence: Synthetic oligonucleotide
gcagguucagcagugucug

SEQ ID NO: 2825988 - RNA, 19 nt, Artificial Sequence
  Description of Artificial Sequence: Synthetic oligonucleotide
aggagcccuugguggaguc

SEQ ID NO: 2825989 - RNA, 19 nt, Artificial Sequence
  Description of Artificial Sequence: Synthetic oligonucleotide
cuguaggaccuggagggug

SEQ ID NO: 2825990 - RNA, 19 nt, Artificial Sequence
  Description of Artificial Sequence: Synthetic oligonucleotide
ucaggagccgggcgguguc

SEQ ID NO: 2825991 - RNA, 19 nt, Artificial Sequence
  Description of Artificial Sequence: Synthetic oligonucleotide
agcccagacgacugacuga

SEQ ID NO: 2825992 - RNA, 19 nt, Artificial Sequence
  Description of Artificial Sequence: Synthetic oligonucleotide
gaaccauccgggacagcac

SEQ ID NO: 2825993 - RNA, 19 nt, Artificial Sequence
  Description of Artificial Sequence: Synthetic oligonucleotide
gugucugcaacugggagcu

SEQ ID NO: 2825994 - RNA, 19 nt, Artificial Sequence
  Description of Artificial Sequence: Synthetic oligonucleotide
ucuguaggaccuggagggu

SEQ ID NO: 2825995 - RNA, 19 nt, Artificial Sequence
  Description of Artificial Sequence: Synthetic oligonucleotide
ccaagggugcuuuggggag

SEQ ID NO: 2825996 - RNA, 19 nt, Artificial Sequence
  Description of Artificial Sequence: Synthetic oligonucleotide
ucuggagauccaugucgua

SEQ ID NO: 2825997 - RNA, 19 nt, Artificial Sequence
  Description of Artificial Sequence: Synthetic oligonucleotide
ugacuucccagcggugaca

SEQ ID NO: 2825998 - RNA, 19 nt, Artificial Sequence
  Description of Artificial Sequence: Synthetic oligonucleotide
aggugcuuuugugacgccu

SEQ ID NO: 2825999 - RNA, 19 nt, Artificial Sequence
  Description of Artificial Sequence: Synthetic oligonucleotide
gcccgaauuaugcaucuuc

SEQ ID NO: 2826000 - RNA, 19 nt, Artificial Sequence
  Description of Artificial Sequence: Synthetic oligonucleotide
gcccagacgacugacugag

SEQ ID NO: 2826001 - RNA, 19 nt, Artificial Sequence
  Description of Artificial Sequence: Synthetic oligonucleotide
uugcagcccagacgacuga

SEQ ID NO: 2826002 - RNA, 19 nt, Artificial Sequence
  Description of Artificial Sequence: Synthetic oligonucleotide
aauaccgcuucagcacguu

SEQ ID NO: 2826003 - RNA, 19 nt, Artificial Sequence
  Description of Artificial Sequence: Synthetic oligonucleotide
ugugacgccuugguccuuc

SEQ ID NO: 2826004 - RNA, 19 nt, Artificial Sequence
  Description of Artificial Sequence: Synthetic oligonucleotide
ugagacccaagggugcuuu

SEQ ID NO: 2826005 - RNA, 19 nt, Artificial Sequence
  Description of Artificial Sequence: Synthetic oligonucleotide
aaggagcccuugguggagu

SEQ ID NO: 2826006 - RNA, 19 nt, Artificial Sequence
  Description of Artificial Sequence: Synthetic oligonucleotide
ucagcacguugcagcccag

SEQ ID NO: 2826007 - RNA, 19 nt, Artificial Sequence
  Description of Artificial Sequence: Synthetic oligonucleotide
ucagcagguucagcagugu

SEQ ID NO: 2826008 - RNA, 19 nt, Artificial Sequence
  Description of Artificial Sequence: Synthetic oligonucleotide
agacuggcugggacugccc

SEQ ID NO: 2826009 - RNA, 19 nt, Artificial Sequence
  Description of Artificial Sequence: Synthetic oligonucleotide
ggaaggagcccuuggugga

SEQ ID NO: 2826010 - RNA, 19 nt, Artificial Sequence
  Description of Artificial Sequence: Synthetic oligonucleotide
gucugcaacugggagcuca

SEQ ID NO: 2826011 - RNA, 19 nt, Artificial Sequence
  Description of Artificial Sequence: Synthetic oligonucleotide
ugcuuuggggaggugcuuu

SEQ ID NO: 2826012 - RNA, 19 nt, Artificial Sequence
  Description of Artificial Sequence: Synthetic oligonucleotide
ugcagcccagacgacugac

SEQ ID NO: 2826013 - RNA, 19 nt, Artificial Sequence
  Description of Artificial Sequence: Synthetic oligonucleotide
acugagccgauccggucua

SEQ ID NO: 2826014 - RNA, 19 nt, Artificial Sequence
  Description of Artificial Sequence: Synthetic oligonucleotide
cagcagguucagcaguguc

SEQ ID NO: 2826015 - RNA, 19 nt, Artificial Sequence
  Description of Artificial Sequence: Synthetic oligonucleotide
cuucagcacguugcagccc

SEQ ID NO: 2826016 - RNA, 19 nt, Artificial Sequence
  Description of Artificial Sequence: Synthetic oligonucleotide
cuuuggggaggugcuuuug

SEQ ID NO: 2826017 - RNA, 19 nt, Artificial Sequence
  Description of Artificial Sequence: Synthetic oligonucleotide
accuggagggugcugucuu

SEQ ID NO: 2826018 - RNA, 19 nt, Artificial Sequence
  Description of Artificial Sequence: Synthetic oligonucleotide
ugcccaaagcagcccgaau

SEQ ID NO: 2826019 - RNA, 19 nt, Artificial Sequence
  Description of Artificial Sequence: Synthetic oligonucleotide
uucccagcggugacagaua

SEQ ID NO: 2826020 - RNA, 19 nt, Artificial Sequence
  Description of Artificial Sequence: Synthetic oligonucleotide
gggugcuuuggggaggugc

SEQ ID NO: 2826021 - RNA, 19 nt, Artificial Sequence
  Description of Artificial Sequence: Synthetic oligonucleotide
ggagugacuucccagcggu

SEQ ID NO: 2826022 - RNA, 19 nt, Artificial Sequence
  Description of Artificial Sequence: Synthetic oligonucleotide
caccgccucugccuuuucc

SEQ ID NO: 2826023 - RNA, 19 nt, Artificial Sequence
  Description of Artificial Sequence: Synthetic oligonucleotide
guuggggaaggagcccuug

SEQ ID NO: 2826024 - RNA, 19 nt, Artificial Sequence
  Description of Artificial Sequence: Synthetic oligonucleotide
gaggugcuuuugugacgcc

SEQ ID NO: 2826025 - RNA, 19 nt, Artificial Sequence
  Description of Artificial Sequence: Synthetic oligonucleotide
auugcuccggagacuggcu

SEQ ID NO: 2826026 - RNA, 19 nt, Artificial Sequence
  Description of Artificial Sequence: Synthetic oligonucleotide
cauccgggacagcaccuuc

SEQ ID NO: 2826027 - RNA, 19 nt, Artificial Sequence
  Description of Artificial Sequence: Synthetic oligonucleotide
caucuuggauugcuccgga

SEQ ID NO: 2826028 - RNA, 19 nt, Artificial Sequence
  Description of Artificial Sequence: Synthetic oligonucleotide
cagcagugucugcaucuug

SEQ ID NO: 2826029 - RNA, 19 nt, Artificial Sequence
  Description of Artificial Sequence: Synthetic oligonucleotide
cgacugacugagccgaucc

SEQ ID NO: 2826030 - RNA, 19 nt, Artificial Sequence
  Description of Artificial Sequence: Synthetic oligonucleotide
gcaucuucuuggaguuucg

SEQ ID NO: 2826031 - RNA, 19 nt, Artificial Sequence
  Description of Artificial Sequence: Synthetic oligonucleotide
guggagucaggagccgggc

SEQ ID NO: 2826032 - RNA, 19 nt, Artificial Sequence
  Description of Artificial Sequence: Synthetic oligonucleotide
ggagggugcugucuugaga

SEQ ID NO: 2826033 - RNA, 19 nt, Artificial Sequence
  Description of Artificial Sequence: Synthetic oligonucleotide
cagcggugacagauaaaga

SEQ ID NO: 2826034 - RNA, 19 nt, Artificial Sequence
  Description of Artificial Sequence: Synthetic oligonucleotide
caacugggagcucauccua

SEQ ID NO: 2826035 - RNA, 19 nt, Artificial Sequence
  Description of Artificial Sequence: Synthetic oligonucleotide
gagugacuucccagcggug

SEQ ID NO: 2826036 - RNA, 19 nt, Artificial Sequence
  Description of Artificial Sequence: Synthetic oligonucleotide
cuucccagcggugacagau

SEQ ID NO: 2826037 - RNA, 19 nt, Artificial Sequence
  Description of Artificial Sequence: Synthetic oligonucleotide
ugagccgauccggucuauc

SEQ ID NO: 2826038 - RNA, 19 nt, Artificial Sequence
  Description of Artificial Sequence: Synthetic oligonucleotide
gcggugacagauaaagaaa

SEQ ID NO: 2826039 - RNA, 19 nt, Artificial Sequence
  Description of Artificial Sequence: Synthetic oligonucleotide
cccaagggugcuuugggga

SEQ ID NO: 2826040 - RNA, 19 nt, Artificial Sequence
  Description of Artificial Sequence: Synthetic oligonucleotide
gcuuuugugacgccuuggu

SEQ ID NO: 2826041 - RNA, 19 nt, Artificial Sequence
  Description of Artificial Sequence: Synthetic oligonucleotide
caucuucuuggaguuucga

SEQ ID NO: 2826042 - RNA, 19 nt, Artificial Sequence
  Description of Artificial Sequence: Synthetic oligonucleotide
ggagauccaugucguagaa

SEQ ID NO: 2826043 - RNA, 19 nt, Artificial Sequence
  Description of Artificial Sequence: Synthetic oligonucleotide
gccgauccggucuauccuc

SEQ ID NO: 2826044 - RNA, 19 nt, Artificial Sequence
  Description of Artificial Sequence: Synthetic oligonucleotide
cugacugagccgauccggu

SEQ ID NO: 2826045 - RNA, 19 nt, Artificial Sequence
  Description of Artificial Sequence: Synthetic oligonucleotide
gcaacugggagcucauccu

SEQ ID NO: 2826046 - RNA, 19 nt, Artificial Sequence
  Description of Artificial Sequence: Synthetic oligonucleotide
gcagugucugcaucuugga

SEQ ID NO: 2826047 - RNA, 19 nt, Artificial Sequence
  Description of Artificial Sequence: Synthetic oligonucleotide
ugucugcaucuuggauugc

SEQ ID NO: 2826048 - RNA, 19 nt, Artificial Sequence
  Description of Artificial Sequence: Synthetic oligonucleotide
cggugacagauaaagaaaa

SEQ ID NO: 2826049 - RNA, 19 nt, Artificial Sequence
  Description of Artificial Sequence: Synthetic oligonucleotide
cgaaguuucuguaggaccu

SEQ ID NO: 2826050 - RNA, 19 nt, Artificial Sequence
  Description of Artificial Sequence: Synthetic oligonucleotide
agcaccuucuggagaucca

SEQ ID NO: 2826051 - RNA, 19 nt, Artificial Sequence
  Description of Artificial Sequence: Synthetic oligonucleotide
gcagcccgaauuaugcauc

SEQ ID NO: 2826052 - RNA, 19 nt, Artificial Sequence
  Description of Artificial Sequence: Synthetic oligonucleotide
cccuugguggagucaggag

SEQ ID NO: 2826053 - RNA, 19 nt, Artificial Sequence
  Description of Artificial Sequence: Synthetic oligonucleotide
cuggagggugcugucuuga

SEQ ID NO: 2826054 - RNA, 19 nt, Artificial Sequence
  Description of Artificial Sequence: Synthetic oligonucleotide
gcuccggagacuggcuggg

SEQ ID NO: 2826055 - RNA, 19 nt, Artificial Sequence
  Description of Artificial Sequence: Synthetic oligonucleotide
accauccgggacagcaccu

SEQ ID NO: 2826056 - RNA, 19 nt, Artificial Sequence
  Description of Artificial Sequence: Synthetic oligonucleotide
gggcggugucugcaacugg

SEQ ID NO: 2826057 - RNA, 19 nt, Artificial Sequence
  Description of Artificial Sequence: Synthetic oligonucleotide
uugagacccaagggugcuu

SEQ ID NO: 2826058 - RNA, 19 nt, Artificial Sequence
  Description of Artificial Sequence: Synthetic oligonucleotide
acuucccagcggugacaga

SEQ ID NO: 2826059 - RNA, 19 nt, Artificial Sequence
  Description of Artificial Sequence: Synthetic oligonucleotide
cuugagacccaagggugcu

SEQ ID NO: 2826060 - RNA, 19 nt, Artificial Sequence
  Description of Artificial Sequence: Synthetic oligonucleotide
cugggagcucauccuaaua

SEQ ID NO: 2826061 - RNA, 19 nt, Artificial Sequence
  Description of Artificial Sequence: Synthetic oligonucleotide
ccaugucguagaagugaug

SEQ ID NO: 2826062 - RNA, 19 nt, Artificial Sequence
  Description of Artificial Sequence: Synthetic oligonucleotide
agcccuugguggagucagg

SEQ ID NO: 2826063 - RNA, 19 nt, Artificial Sequence
  Description of Artificial Sequence: Synthetic oligonucleotide
acguugcagcccagacgac

SEQ ID NO: 2826064 - RNA, 19 nt, Artificial Sequence
  Description of Artificial Sequence: Synthetic oligonucleotide
cccgaauuaugcaucuucu

SEQ ID NO: 2826065 - RNA, 19 nt, Artificial Sequence
  Description of Artificial Sequence: Synthetic oligonucleotide
ggauugcuccggagacugg

SEQ ID NO: 2826066 - RNA, 19 nt, Artificial Sequence
  Description of Artificial Sequence: Synthetic oligonucleotide
aggagccgggcggugucug

SEQ ID NO: 2826067 - RNA, 19 nt, Artificial Sequence
  Description of Artificial Sequence: Synthetic oligonucleotide
gagccgggcggugucugca

SEQ ID NO: 2826068 - RNA, 19 nt, Artificial Sequence
  Description of Artificial Sequence: Synthetic oligonucleotide
ggugcugucuugagaccca

SEQ ID NO: 2826069 - RNA, 19 nt, Artificial Sequence
  Description of Artificial Sequence: Synthetic oligonucleotide
cccaaagcagcccgaauua

SEQ ID NO: 2826070 - RNA, 19 nt, Artificial Sequence
  Description of Artificial Sequence: Synthetic oligonucleotide
cagcccgaauuaugcaucu

SEQ ID NO: 2826071 - RNA, 19 nt, Artificial Sequence
  Description of Artificial Sequence: Synthetic oligonucleotide
cggugucugcaacugggag

SEQ ID NO: 2826072 - RNA, 19 nt, Artificial Sequence
  Description of Artificial Sequence: Synthetic oligonucleotide
agucaggagccgggcggug

SEQ ID NO: 2826073 - RNA, 19 nt, Artificial Sequence
  Description of Artificial Sequence: Synthetic oligonucleotide
ggugcuuuggggaggugcu

SEQ ID NO: 2826074 - RNA, 19 nt, Artificial Sequence
  Description of Artificial Sequence: Synthetic oligonucleotide
gcccaaagcagcccgaauu

SEQ ID NO: 2826075 - RNA, 19 nt, Artificial Sequence
  Description of Artificial Sequence: Synthetic oligonucleotide
ccuggagggugcugucuug

SEQ ID NO: 2826076 - RNA, 19 nt, Artificial Sequence
  Description of Artificial Sequence: Synthetic oligonucleotide
cccaggguuggggaaggag

SEQ ID NO: 2826077 - RNA, 19 nt, Artificial Sequence
  Description of Artificial Sequence: Synthetic oligonucleotide
cguagaagugauggaacca

SEQ ID NO: 2826078 - RNA, 19 nt, Artificial Sequence
  Description of Artificial Sequence: Synthetic oligonucleotide
agccgggcggugucugcaa

SEQ ID NO: 2826079 - RNA, 19 nt, Artificial Sequence
  Description of Artificial Sequence: Synthetic oligonucleotide
cagugucugcaucuuggau

SEQ ID NO: 2826080 - RNA, 19 nt, Artificial Sequence
  Description of Artificial Sequence: Synthetic oligonucleotide
gagucaggagccgggcggu

SEQ ID NO: 2826081 - RNA, 19 nt, Artificial Sequence
  Description of Artificial Sequence: Synthetic oligonucleotide
gggugggagugacuuccca

SEQ ID NO: 2826082 - RNA, 19 nt, Artificial Sequence
  Description of Artificial Sequence: Synthetic oligonucleotide
gugacgccuugguccuuca

SEQ ID NO: 2826083 - RNA, 19 nt, Artificial Sequence
  Description of Artificial Sequence: Synthetic oligonucleotide
ggagccgggcggugucugc

SEQ ID NO: 2826084 - RNA, 19 nt, Artificial Sequence
  Description of Artificial Sequence: Synthetic oligonucleotide
gaccuggagggugcugucu

SEQ ID NO: 2826085 - RNA, 19 nt, Artificial Sequence
  Description of Artificial Sequence: Synthetic oligonucleotide
augcaucuucuuggaguuu

SEQ ID NO: 2826086 - RNA, 19 nt, Artificial Sequence
  Description of Artificial Sequence: Synthetic oligonucleotide
ggaccuggagggugcuguc

SEQ ID NO: 2826087 - RNA, 19 nt, Artificial Sequence
  Description of Artificial Sequence: Synthetic oligonucleotide
ccggucuauccucugccca

SEQ ID NO: 2826088 - RNA, 19 nt, Artificial Sequence
  Description of Artificial Sequence: Synthetic oligonucleotide
ggagacuggcugggacugc

SEQ ID NO: 2826089 - RNA, 19 nt, Artificial Sequence
  Description of Artificial Sequence: Synthetic oligonucleotide
cagaaccauccgggacagc

SEQ ID NO: 2826090 - RNA, 19 nt, Artificial Sequence
  Description of Artificial Sequence: Synthetic oligonucleotide
gcccuugguggagucagga

SEQ ID NO: 2826091 - RNA, 19 nt, Artificial Sequence
  Description of Artificial Sequence: Synthetic oligonucleotide
ggucuauccucugcccaaa

SEQ ID NO: 2826092 - RNA, 19 nt, Artificial Sequence
  Description of Artificial Sequence: Synthetic oligonucleotide
agcccgaauuaugcaucuu

SEQ ID NO: 2826093 - RNA, 19 nt, Artificial Sequence
  Description of Artificial Sequence: Synthetic oligonucleotide
gugcugucuugagacccaa

SEQ ID NO: 2826094 - RNA, 19 nt, Artificial Sequence
  Description of Artificial Sequence: Synthetic oligonucleotide
cugcccaaagcagcccgaa

SEQ ID NO: 2826095 - RNA, 19 nt, Artificial Sequence
  Description of Artificial Sequence: Synthetic oligonucleotide
ggugcuuuugugacgccuu

SEQ ID NO: 2826096 - RNA, 19 nt, Artificial Sequence
  Description of Artificial Sequence: Synthetic oligonucleotide
cggagacuggcugggacug

SEQ ID NO: 2826097 - RNA, 19 nt, Artificial Sequence
  Description of Artificial Sequence: Synthetic oligonucleotide
gagccaccgccucugccuu

SEQ ID NO: 2826098 - RNA, 19 nt, Artificial Sequence
  Description of Artificial Sequence: Synthetic oligonucleotide
ugucugcaacugggagcuc

SEQ ID NO: 2826099 - RNA, 19 nt, Artificial Sequence
  Description of Artificial Sequence: Synthetic oligonucleotide
ggggugggagugacuuccc

SEQ ID NO: 2826100 - RNA, 19 nt, Artificial Sequence
  Description of Artificial Sequence: Synthetic oligonucleotide
cccagacgacugacugagc

SEQ ID NO: 2826101 - RNA, 19 nt, Artificial Sequence
  Description of Artificial Sequence: Synthetic oligonucleotide
ccgagccaccgccucugcc

SEQ ID NO: 2826102 - RNA, 19 nt, Artificial Sequence
  Description of Artificial Sequence: Synthetic oligonucleotide
gccuuuucccucagcaggu

SEQ ID NO: 2826103 - RNA, 19 nt, Artificial Sequence
  Description of Artificial Sequence: Synthetic oligonucleotide
cagcacguugcagcccaga

SEQ ID NO: 2826104 - RNA, 19 nt, Artificial Sequence
  Description of Artificial Sequence: Synthetic oligonucleotide
ggagcccuugguggaguca

SEQ ID NO: 2826105 - RNA, 19 nt, Artificial Sequence
  Description of Artificial Sequence: Synthetic oligonucleotide
cgccuugguccuucaggag

SEQ ID NO: 2826106 - RNA, 19 nt, Artificial Sequence
  Description of Artificial Sequence: Synthetic oligonucleotide
gucaggagccgggcggugu

SEQ ID NO: 2826107 - RNA, 19 nt, Artificial Sequence
  Description of Artificial Sequence: Synthetic oligonucleotide
gcggugucugcaacuggga

SEQ ID NO: 2826108 - RNA, 19 nt, Artificial Sequence
  Description of Artificial Sequence: Synthetic oligonucleotide
agccaccgccucugccuuu

SEQ ID NO: 2826109 - RNA, 19 nt, Artificial Sequence
  Description of Artificial Sequence: Synthetic oligonucleotide
uugugacgccuugguccuu

SEQ ID NO: 2826110 - RNA, 19 nt, Artificial Sequence
  Description of Artificial Sequence: Synthetic oligonucleotide
ccgaauuaugcaucuucuu

SEQ ID NO: 2826111 - RNA, 19 nt, Artificial Sequence
  Description of Artificial Sequence: Synthetic oligonucleotide
guaggaccuggagggugcu

SEQ ID NO: 2826112 - RNA, 19 nt, Artificial Sequence
  Description of Artificial Sequence: Synthetic oligonucleotide
gccgggcggugucugcaac

SEQ ID NO: 2826113 - RNA, 19 nt, Artificial Sequence
  Description of Artificial Sequence: Synthetic oligonucleotide
cgauccggucuauccucug

SEQ ID NO: 2826114 - RNA, 19 nt, Artificial Sequence
  Description of Artificial Sequence: Synthetic oligonucleotide
cggucuauccucugcccaa

SEQ ID NO: 2826115 - RNA, 19 nt, Artificial Sequence
  Description of Artificial Sequence: Synthetic oligonucleotide
ccgcuucagcacguugcag

SEQ ID NO: 2826116 - RNA, 19 nt, Artificial Sequence
  Description of Artificial Sequence: Synthetic oligonucleotide
ccggagacuggcugggacu

SEQ ID NO: 2826117 - RNA, 19 nt, Artificial Sequence
  Description of Artificial Sequence: Synthetic oligonucleotide
cgagccaccgccucugccu

SEQ ID NO: 2826118 - RNA, 19 nt, Artificial Sequence
  Description of Artificial Sequence: Synthetic oligonucleotide
gacgacugacugagccgau

SEQ ID NO: 2826119 - RNA, 19 nt, Artificial Sequence
  Description of Artificial Sequence: Synthetic oligonucleotide
cgggcggugucugcaacug

SEQ ID NO: 2826120 - RNA, 19 nt, Artificial Sequence
  Description of Artificial Sequence: Synthetic oligonucleotide
cuccggagacuggcuggga

SEQ ID NO: 2826121 - RNA, 19 nt, Artificial Sequence
  Description of Artificial Sequence: Synthetic oligonucleotide
ccccgagccaccgccucug

SEQ ID NO: 2826122 - RNA, 19 nt, Artificial Sequence
  Description of Artificial Sequence: Synthetic oligonucleotide
cccgagccaccgccucugc

SEQ ID NO: 2826123 - RNA, 19 nt, Artificial Sequence
  Description of Artificial Sequence: Synthetic oligonucleotide
gcucauccuaauaccgcuu

SEQ ID NO: 2826124 - RNA, 19 nt, Artificial Sequence
  Description of Artificial Sequence: Synthetic oligonucleotide
gcagcccagacgacugacu

SEQ ID NO: 2826125 - RNA, 19 nt, Artificial Sequence
  Description of Artificial Sequence: Synthetic oligonucleotide
ccgauccggucuauccucu

SEQ ID NO: 2826126 - RNA, 19 nt, Artificial Sequence
  Description of Artificial Sequence: Synthetic oligonucleotide
ccaaagcagcccgaauuau

SEQ ID NO: 2826127 - RNA, 19 nt, Artificial Sequence
  Description of Artificial Sequence: Synthetic oligonucleotide
cguugcagcccagacgacu

SEQ ID NO: 2826128 - RNA, 19 nt, Artificial Sequence
  Description of Artificial Sequence: Synthetic oligonucleotide
caggagccgggcggugucu

SEQ ID NO: 2826129 - RNA, 19 nt, Artificial Sequence
  Description of Artificial Sequence: Synthetic oligonucleotide
ccgggcggugucugcaacu

SEQ ID NO: 2826130 - RNA, 19 nt, Artificial Sequence
  Description of Artificial Sequence: Synthetic oligonucleotide
gguuggggaaggagcccuu

SEQ ID NO: 2826131 - RNA, 19 nt, Artificial Sequence
  Description of Artificial Sequence: Synthetic oligonucleotide
ccaccgccucugccuuuuc

SEQ ID NO: 2826132 - RNA, 19 nt, Artificial Sequence
  Description of Artificial Sequence: Synthetic oligonucleotide
cugagccgauccggucuau

SEQ ID NO: 2826133 - RNA, 19 nt, Artificial Sequence
  Description of Artificial Sequence: Synthetic oligonucleotide
ccuuuucccucagcagguu

SEQ ID NO: 2826134 - RNA, 19 nt, Artificial Sequence
  Description of Artificial Sequence: Synthetic oligonucleotide
ccauccgggacagcaccuu

SEQ ID NO: 2826135 - RNA, 19 nt, Artificial Sequence
  Description of Artificial Sequence: Synthetic oligonucleotide
aaauccucgaucugcaggc

SEQ ID NO: 2826136 - RNA, 19 nt, Artificial Sequence
  Description of Artificial Sequence: Synthetic oligonucleotide
uuuauuguggauaucgcug

SEQ ID NO: 2826137 - RNA, 19 nt, Artificial Sequence
  Description of Artificial Sequence: Synthetic oligonucleotide
acagcaaacaugcuguagc

SEQ ID NO: 2826138 - RNA, 19 nt, Artificial Sequence
  Description of Artificial Sequence: Synthetic oligonucleotide
acaucuuucaugaugaugg

SEQ ID NO: 2826139 - RNA, 19 nt, Artificial Sequence
  Description of Artificial Sequence: Synthetic oligonucleotide
uucuuuauuguggauaucg

SEQ ID NO: 2826140 - RNA, 19 nt, Artificial Sequence
  Description of Artificial Sequence: Synthetic oligonucleotide
uggaagagcggcaugaggg

SEQ ID NO: 2826141 - RNA, 19 nt, Artificial Sequence
  Description of Artificial Sequence: Synthetic oligonucleotide
aaaacaaggucccgaugcc

SEQ ID NO: 2826142 - RNA, 19 nt, Artificial Sequence
  Description of Artificial Sequence: Synthetic oligonucleotide
ucuuucaugaugauggccu

SEQ ID NO: 2826143 - RNA, 19 nt, Artificial Sequence
  Description of Artificial Sequence: Synthetic oligonucleotide
uucucugccuggaagagcg

SEQ ID NO: 2826144 - RNA, 19 nt, Artificial Sequence
  Description of Artificial Sequence: Synthetic oligonucleotide
uuauuguggauaucgcugg

SEQ ID NO: 2826145 - RNA, 19 nt, Artificial Sequence
  Description of Artificial Sequence: Synthetic oligonucleotide
uacaacucggaguugagag

SEQ ID NO: 2826146 - RNA, 19 nt, Artificial Sequence
  Description of Artificial Sequence: Synthetic oligonucleotide
acguauaccaggugaagcc

SEQ ID NO: 2826147 - RNA, 19 nt, Artificial Sequence
  Description of Artificial Sequence: Synthetic oligonucleotide
auuggcguuguccaacucc

SEQ ID NO: 2826148 - RNA, 19 nt, Artificial Sequence
  Description of Artificial Sequence: Synthetic oligonucleotide
uguacuguucuuuauugug

SEQ ID NO: 2826149 - RNA, 19 nt, Artificial Sequence
  Description of Artificial Sequence: Synthetic oligonucleotide
ucaucauucuccaguagcc

SEQ ID NO: 2826150 - RNA, 19 nt, Artificial Sequence
  Description of Artificial Sequence: Synthetic oligonucleotide
agaauuugcaggguucucc

SEQ ID NO: 2826151 - RNA, 19 nt, Artificial Sequence
  Description of Artificial Sequence: Synthetic oligonucleotide
ucaggcacaucuuucauga

SEQ ID NO: 2826152 - RNA, 19 nt, Artificial Sequence
  Description of Artificial Sequence: Synthetic oligonucleotide
gaauuugcaggguucuccg

SEQ ID NO: 2826153 - RNA, 19 nt, Artificial Sequence
  Description of Artificial Sequence: Synthetic oligonucleotide
augcccacagcaaacaugc

SEQ ID NO: 2826154 - RNA, 19 nt, Artificial Sequence
  Description of Artificial Sequence: Synthetic oligonucleotide
ucccgaagaauuugcaggg

SEQ ID NO: 2826155 - RNA, 19 nt, Artificial Sequence
  Description of Artificial Sequence: Synthetic oligonucleotide
ucuuuauuguggauaucgc

SEQ ID NO: 2826156 - RNA, 19 nt, Artificial Sequence
  Description of Artificial Sequence: Synthetic oligonucleotide
uguucuuuauuguggauau

SEQ ID NO: 2826157 - RNA, 19 nt, Artificial Sequence
  Description of Artificial Sequence: Synthetic oligonucleotide
cauacuugcgcccucaguc

SEQ ID NO: 2826158 - RNA, 19 nt, Artificial Sequence
  Description of Artificial Sequence: Synthetic oligonucleotide
ugagaggcggcacccagcg

SEQ ID NO: 2826159 - RNA, 19 nt, Artificial Sequence
  Description of Artificial Sequence: Synthetic oligonucleotide
agaggcggcacccagcgcg

SEQ ID NO: 2826160 - RNA, 19 nt, Artificial Sequence
  Description of Artificial Sequence: Synthetic oligonucleotide
guggaagacagacucaccc

SEQ ID NO: 2826161 - RNA, 19 nt, Artificial Sequence
  Description of Artificial Sequence: Synthetic oligonucleotide
caugagggcgauucgagcc

SEQ ID NO: 2826162 - RNA, 19 nt, Artificial Sequence
  Description of Artificial Sequence: Synthetic oligonucleotide
ucacccaccuuccagucag

SEQ ID NO: 2826163 - RNA, 19 nt, Artificial Sequence
  Description of Artificial Sequence: Synthetic oligonucleotide
caaauccucgaucugcagg

SEQ ID NO: 2826164 - RNA, 19 nt, Artificial Sequence
  Description of Artificial Sequence: Synthetic oligonucleotide
ucacgguuccacuucauca

SEQ ID NO: 2826165 - RNA, 19 nt, Artificial Sequence
  Description of Artificial Sequence: Synthetic oligonucleotide
uuguggauaucgcuggggc

SEQ ID NO: 2826166 - RNA, 19 nt, Artificial Sequence
  Description of Artificial Sequence: Synthetic oligonucleotide
aauuugcaggguucuccgg

SEQ ID NO: 2826167 - RNA, 19 nt, Artificial Sequence
  Description of Artificial Sequence: Synthetic oligonucleotide
gcaaacaugcuguagcccg

SEQ ID NO: 2826168 - RNA, 19 nt, Artificial Sequence
  Description of Artificial Sequence: Synthetic oligonucleotide
aagacagacucacccaccu

SEQ ID NO: 2826169 - RNA, 19 nt, Artificial Sequence
  Description of Artificial Sequence: Synthetic oligonucleotide
gaugauggccuccuccucc

SEQ ID NO: 2826170 - RNA, 19 nt, Artificial Sequence
  Description of Artificial Sequence: Synthetic oligonucleotide
uuccgcuuguagucgaugg

SEQ ID NO: 2826171 - RNA, 19 nt, Artificial Sequence
  Description of Artificial Sequence: Synthetic oligonucleotide
guacuguucuuuauugugg

SEQ ID NO: 2826172 - RNA, 19 nt, Artificial Sequence
  Description of Artificial Sequence: Synthetic oligonucleotide
uauuguggauaucgcuggg

SEQ ID NO: 2826173 - RNA, 19 nt, Artificial Sequence
  Description of Artificial Sequence: Synthetic oligonucleotide
aucuuucaugaugauggcc

SEQ ID NO: 2826174 - RNA, 19 nt, Artificial Sequence
  Description of Artificial Sequence: Synthetic oligonucleotide
ucucccgaagaauuugcag

SEQ ID NO: 2826175 - RNA, 19 nt, Artificial Sequence
  Description of Artificial Sequence: Synthetic oligonucleotide
agucgauggggccguagcc

SEQ ID NO: 2826176 - RNA, 19 nt, Artificial Sequence
  Description of Artificial Sequence: Synthetic oligonucleotide
acaacucggaguugagagg

SEQ ID NO: 2826177 - RNA, 19 nt, Artificial Sequence
  Description of Artificial Sequence: Synthetic oligonucleotide
uacuguucuuuauugugga

SEQ ID NO: 2826178 - RNA, 19 nt, Artificial Sequence
  Description of Artificial Sequence: Synthetic oligonucleotide
acaugcuguagcccgacag

SEQ ID NO: 2826179 - RNA, 19 nt, Artificial Sequence
  Description of Artificial Sequence: Synthetic oligonucleotide
uucgacgccgccauacuug

SEQ ID NO: 2826180 - RNA, 19 nt, Artificial Sequence
  Description of Artificial Sequence: Synthetic oligonucleotide
gacagacucacccaccuuc

SEQ ID NO: 2826181 - RNA, 19 nt, Artificial Sequence
  Description of Artificial Sequence: Synthetic oligonucleotide
uuguccaacuccuccuggg

SEQ ID NO: 2826182 - RNA, 19 nt, Artificial Sequence
  Description of Artificial Sequence: Synthetic oligonucleotide
uacguauaccaggugaagc

SEQ ID NO: 2826183 - RNA, 19 nt, Artificial Sequence
  Description of Artificial Sequence: Synthetic oligonucleotide
cuuguagucgauggggccg

SEQ ID NO: 2826184 - RNA, 19 nt, Artificial Sequence
  Description of Artificial Sequence: Synthetic oligonucleotide
uccaacuccuccugggugc

SEQ ID NO: 2826185 - RNA, 19 nt, Artificial Sequence
  Description of Artificial Sequence: Synthetic oligonucleotide
agccgaauuggcguugucc

SEQ ID NO: 2826186 - RNA, 19 nt, Artificial Sequence
  Description of Artificial Sequence: Synthetic oligonucleotide
uuggcguuguccaacuccu

SEQ ID NO: 2826187 - RNA, 19 nt, Artificial Sequence
  Description of Artificial Sequence: Synthetic oligonucleotide
uccgcuuguagucgauggg

SEQ ID NO: 2826188 - RNA, 19 nt, Artificial Sequence
  Description of Artificial Sequence: Synthetic oligonucleotide
ugcuucaccuucgacgccg

SEQ ID NO: 2826189 - RNA, 19 nt, Artificial Sequence
  Description of Artificial Sequence: Synthetic oligonucleotide
agcaaacaugcuguagccc

SEQ ID NO: 2826190 - RNA, 19 nt, Artificial Sequence
  Description of Artificial Sequence: Synthetic oligonucleotide
caugcuguagcccgacagg

SEQ ID NO: 2826191 - RNA, 19 nt, Artificial Sequence
  Description of Artificial Sequence: Synthetic oligonucleotide
auuugcaggguucuccggu

SEQ ID NO: 2826192 - RNA, 19 nt, Artificial Sequence
  Description of Artificial Sequence: Synthetic oligonucleotide
augcuguagcccgacaggc

SEQ ID NO: 2826193 - RNA, 19 nt, Artificial Sequence
  Description of Artificial Sequence: Synthetic oligonucleotide
ucgagccuccaaauccucg

SEQ ID NO: 2826194 - RNA, 19 nt, Artificial Sequence
  Description of Artificial Sequence: Synthetic oligonucleotide
uggaagacagacucaccca

SEQ ID NO: 2826195 - RNA, 19 nt, Artificial Sequence
  Description of Artificial Sequence: Synthetic oligonucleotide
aaacaugcuguagcccgac

SEQ ID NO: 2826196 - RNA, 19 nt, Artificial Sequence
  Description of Artificial Sequence: Synthetic oligonucleotide
caacucggaguugagaggc

SEQ ID NO: 2826197 - RNA, 19 nt, Artificial Sequence
  Description of Artificial Sequence: Synthetic oligonucleotide
aauuggcguuguccaacuc

SEQ ID NO: 2826198 - RNA, 19 nt, Artificial Sequence
  Description of Artificial Sequence: Synthetic oligonucleotide
uguggauaucgcuggggcc

SEQ ID NO: 2826199 - RNA, 19 nt, Artificial Sequence
  Description of Artificial Sequence: Synthetic oligonucleotide
gacgccgccauacuugcgc

SEQ ID NO: 2826200 - RNA, 19 nt, Artificial Sequence
  Description of Artificial Sequence: Synthetic oligonucleotide
aagaauuugcaggguucuc

SEQ ID NO: 2826201 - RNA, 19 nt, Artificial Sequence
  Description of Artificial Sequence: Synthetic oligonucleotide
uuguacuguucuuuauugu

SEQ ID NO: 2826202 - RNA, 19 nt, Artificial Sequence
  Description of Artificial Sequence: Synthetic oligonucleotide
cagcaaacaugcuguagcc

SEQ ID NO: 2826203 - RNA, 19 nt, Artificial Sequence
  Description of Artificial Sequence: Synthetic oligonucleotide
ugcgcccucagucaccuca

SEQ ID NO: 2826204 - RNA, 19 nt, Artificial Sequence
  Description of Artificial Sequence: Synthetic oligonucleotide
ucuccgguccuucucugcc

SEQ ID NO: 2826205 - RNA, 19 nt, Artificial Sequence
  Description of Artificial Sequence: Synthetic oligonucleotide
agcggcaugagggcgauuc

SEQ ID NO: 2826206 - RNA, 19 nt, Artificial Sequence
  Description of Artificial Sequence: Synthetic oligonucleotide
auccucgaucugcaggcgc

SEQ ID NO: 2826207 - RNA, 19 nt, Artificial Sequence
  Description of Artificial Sequence: Synthetic oligonucleotide
auuguggauaucgcugggg

SEQ ID NO: 2826208 - RNA, 19 nt, Artificial Sequence
  Description of Artificial Sequence: Synthetic oligonucleotide
agcccauacaacucggagu

SEQ ID NO: 2826209 - RNA, 19 nt, Artificial Sequence
  Description of Artificial Sequence: Synthetic oligonucleotide
accaggugaagccgaauug

SEQ ID NO: 2826210 - RNA, 19 nt, Artificial Sequence
  Description of Artificial Sequence: Synthetic oligonucleotide
uagucgauggggccguagc

SEQ ID NO: 2826211 - RNA, 19 nt, Artificial Sequence
  Description of Artificial Sequence: Synthetic oligonucleotide
aaggucccgaugcccacag

SEQ ID NO: 2826212 - RNA, 19 nt, Artificial Sequence
  Description of Artificial Sequence: Synthetic oligonucleotide
uguggaagacagacucacc

SEQ ID NO: 2826213 - RNA, 19 nt, Artificial Sequence
  Description of Artificial Sequence: Synthetic oligonucleotide
uccucgaucugcaggcgcc

SEQ ID NO: 2826214 - RNA, 19 nt, Artificial Sequence
  Description of Artificial Sequence: Synthetic oligonucleotide
gaagagcggcaugagggcg

SEQ ID NO: 2826215 - RNA, 19 nt, Artificial Sequence
  Description of Artificial Sequence: Synthetic oligonucleotide
agacucacccaccuuccag

SEQ ID NO: 2826216 - RNA, 19 nt, Artificial Sequence
  Description of Artificial Sequence: Synthetic oligonucleotide
guggauaucgcuggggccc

SEQ ID NO: 2826217 - RNA, 19 nt, Artificial Sequence
  Description of Artificial Sequence: Synthetic oligonucleotide
aacaaggucccgaugccca

SEQ ID NO: 2826218 - RNA, 19 nt, Artificial Sequence
  Description of Artificial Sequence: Synthetic oligonucleotide
acuucaucauucuccagua

SEQ ID NO: 2826219 - RNA, 19 nt, Artificial Sequence
  Description of Artificial Sequence: Synthetic oligonucleotide
gauggccuccuccuccagg

SEQ ID NO: 2826220 - RNA, 19 nt, Artificial Sequence
  Description of Artificial Sequence: Synthetic oligonucleotide
acagacucacccaccuucc

SEQ ID NO: 2826221 - RNA, 19 nt, Artificial Sequence
  Description of Artificial Sequence: Synthetic oligonucleotide
aucauucuccaguagccaa

SEQ ID NO: 2826222 - RNA, 19 nt, Artificial Sequence
  Description of Artificial Sequence: Synthetic oligonucleotide
caggugaagccgaauuggc

SEQ ID NO: 2826223 - RNA, 19 nt, Artificial Sequence
  Description of Artificial Sequence: Synthetic oligonucleotide
uccagguucucccgaagaa

SEQ ID NO: 2826224 - RNA, 19 nt, Artificial Sequence
  Description of Artificial Sequence: Synthetic oligonucleotide
uucucccgaagaauuugca

SEQ ID NO: 2826225 - RNA, 19 nt, Artificial Sequence
  Description of Artificial Sequence: Synthetic oligonucleotide
caucuuucaugaugauggc

SEQ ID NO: 2826226 - RNA, 19 nt, Artificial Sequence
  Description of Artificial Sequence: Synthetic oligonucleotide
uuucaugaugauggccucc

SEQ ID NO: 2826227 - RNA, 19 nt, Artificial Sequence
  Description of Artificial Sequence: Synthetic oligonucleotide
auacuugcgcccucaguca

SEQ ID NO: 2826228 - RNA, 19 nt, Artificial Sequence
  Description of Artificial Sequence: Synthetic oligonucleotide
ccugcuucaccuucgacgc

SEQ ID NO: 2826229 - RNA, 19 nt, Artificial Sequence
  Description of Artificial Sequence: Synthetic oligonucleotide
uucaugaugauggccuccu

SEQ ID NO: 2826230 - RNA, 19 nt, Artificial Sequence
  Description of Artificial Sequence: Synthetic oligonucleotide
cuggaagagcggcaugagg

SEQ ID NO: 2826231 - RNA, 19 nt, Artificial Sequence
  Description of Artificial Sequence: Synthetic oligonucleotide
ucugccuggaagagcggca

SEQ ID NO: 2826232 - RNA, 19 nt, Artificial Sequence
  Description of Artificial Sequence: Synthetic oligonucleotide
cauacaacucggaguugag

SEQ ID NO: 2826233 - RNA, 19 nt, Artificial Sequence
  Description of Artificial Sequence: Synthetic oligonucleotide
uaccaggugaagccgaauu

SEQ ID NO: 2826234 - RNA, 19 nt, Artificial Sequence
  Description of Artificial Sequence: Synthetic oligonucleotide
gucaggcacaucuuucaug

SEQ ID NO: 2826235 - RNA, 19 nt, Artificial Sequence
  Description of Artificial Sequence: Synthetic oligonucleotide
cuuccagucaggcacaucu

SEQ ID NO: 2826236 - RNA, 19 nt, Artificial Sequence
  Description of Artificial Sequence: Synthetic oligonucleotide
ccucagucaccucaaaagg

SEQ ID NO: 2826237 - RNA, 19 nt, Artificial Sequence
  Description of Artificial Sequence: Synthetic oligonucleotide
uggggcccuacguauacca

SEQ ID NO: 2826238 - RNA, 19 nt, Artificial Sequence
  Description of Artificial Sequence: Synthetic oligonucleotide
acaaggucccgaugcccac

SEQ ID NO: 2826239 - RNA, 19 nt, Artificial Sequence
  Description of Artificial Sequence: Synthetic oligonucleotide
uauaccaggugaagccgaa

SEQ ID NO: 2826240 - RNA, 19 nt, Artificial Sequence
  Description of Artificial Sequence: Synthetic oligonucleotide
ucgauggggccguagcccc

SEQ ID NO: 2826241 - RNA, 19 nt, Artificial Sequence
  Description of Artificial Sequence: Synthetic oligonucleotide
guugagaggcggcacccag

SEQ ID NO: 2826242 - RNA, 19 nt, Artificial Sequence
  Description of Artificial Sequence: Synthetic oligonucleotide
aauccucgaucugcaggcg

SEQ ID NO: 2826243 - RNA, 19 nt, Artificial Sequence
  Description of Artificial Sequence: Synthetic oligonucleotide
agccuccaaauccucgauc

SEQ ID NO: 2826244 - RNA, 19 nt, Artificial Sequence
  Description of Artificial Sequence: Synthetic oligonucleotide
acucacccaccuuccaguc

SEQ ID NO: 2826245 - RNA, 19 nt, Artificial Sequence
  Description of Artificial Sequence: Synthetic oligonucleotide
cccucagucaccucaaaag

SEQ ID NO: 2826246 - RNA, 19 nt, Artificial Sequence
  Description of Artificial Sequence: Synthetic oligonucleotide
cuuuauuguggauaucgcu

SEQ ID NO: 2826247 - RNA, 19 nt, Artificial Sequence
  Description of Artificial Sequence: Synthetic oligonucleotide
uugagaggcggcacccagc

SEQ ID NO: 2826248 - RNA, 19 nt, Artificial Sequence
  Description of Artificial Sequence: Synthetic oligonucleotide
ugcuguagcccgacaggcc

SEQ ID NO: 2826249 - RNA, 19 nt, Artificial Sequence
  Description of Artificial Sequence: Synthetic oligonucleotide
accuucgacgccgccauac

SEQ ID NO: 2826250 - RNA, 19 nt, Artificial Sequence
  Description of Artificial Sequence: Synthetic oligonucleotide
ucaccuucgacgccgccau

SEQ ID NO: 2826251 - RNA, 19 nt, Artificial Sequence
  Description of Artificial Sequence: Synthetic oligonucleotide
aggugaagccgaauuggcg

SEQ ID NO: 2826252 - RNA, 19 nt, Artificial Sequence
  Description of Artificial Sequence: Synthetic oligonucleotide
uaucgcuggggcccuacgu

SEQ ID NO: 2826253 - RNA, 19 nt, Artificial Sequence
  Description of Artificial Sequence: Synthetic oligonucleotide
cagucaccucaaaaggcag

SEQ ID NO: 2826254 - RNA, 19 nt, Artificial Sequence
  Description of Artificial Sequence: Synthetic oligonucleotide
uuugcaggguucuccgguc

SEQ ID NO: 2826255 - RNA, 19 nt, Artificial Sequence
  Description of Artificial Sequence: Synthetic oligonucleotide
uucaccuucgacgccgcca

SEQ ID NO: 2826256 - RNA, 19 nt, Artificial Sequence
  Description of Artificial Sequence: Synthetic oligonucleotide
ucgacgccgccauacuugc

SEQ ID NO: 2826257 - RNA, 19 nt, Artificial Sequence
  Description of Artificial Sequence: Synthetic oligonucleotide
ccaccuuccagucaggcac

SEQ ID NO: 2826258 - RNA, 19 nt, Artificial Sequence
  Description of Artificial Sequence: Synthetic oligonucleotide
ugcgcagcccauacaacuc

SEQ ID NO: 2826259 - RNA, 19 nt, Artificial Sequence
  Description of Artificial Sequence: Synthetic oligonucleotide
cagcccauacaacucggag

SEQ ID NO: 2826260 - RNA, 19 nt, Artificial Sequence
  Description of Artificial Sequence: Synthetic oligonucleotide
cuucaucauucuccaguag

SEQ ID NO: 2826261 - RNA, 19 nt, Artificial Sequence
  Description of Artificial Sequence: Synthetic oligonucleotide
ucgaucugcaggcgccugc

SEQ ID NO: 2826262 - RNA, 19 nt, Artificial Sequence
  Description of Artificial Sequence: Synthetic oligonucleotide
uugcaggguucuccggucc

SEQ ID NO: 2826263 - RNA, 19 nt, Artificial Sequence
  Description of Artificial Sequence: Synthetic oligonucleotide
acgccgccauacuugcgcc

SEQ ID NO: 2826264 - RNA, 19 nt, Artificial Sequence
  Description of Artificial Sequence: Synthetic oligonucleotide
guguggaagacagacucac

SEQ ID NO: 2826265 - RNA, 19 nt, Artificial Sequence
  Description of Artificial Sequence: Synthetic oligonucleotide
acucggaguugagaggcgg

SEQ ID NO: 2826266 - RNA, 19 nt, Artificial Sequence
  Description of Artificial Sequence: Synthetic oligonucleotide
uacuugcgcccucagucac

SEQ ID NO: 2826267 - RNA, 19 nt, Artificial Sequence
  Description of Artificial Sequence: Synthetic oligonucleotide
augagggcgauucgagccu

SEQ ID NO: 2826268 - RNA, 19 nt, Artificial Sequence
  Description of Artificial Sequence: Synthetic oligonucleotide
cuacguauaccaggugaag

SEQ ID NO: 2826269 - RNA, 19 nt, Artificial Sequence
  Description of Artificial Sequence: Synthetic oligonucleotide
ggcacaucuuucaugauga

SEQ ID NO: 2826270 - RNA, 19 nt, Artificial Sequence
  Description of Artificial Sequence: Synthetic oligonucleotide
aacaugcuguagcccgaca

SEQ ID NO: 2826271 - RNA, 19 nt, Artificial Sequence
  Description of Artificial Sequence: Synthetic oligonucleotide
auaucgcuggggcccuacg

SEQ ID NO: 2826272 - RNA, 19 nt, Artificial Sequence
  Description of Artificial Sequence: Synthetic oligonucleotide
gcuguagcccgacaggccc

SEQ ID NO: 2826273 - RNA, 19 nt, Artificial Sequence
  Description of Artificial Sequence: Synthetic oligonucleotide
cauguccugcuucaccuuc

SEQ ID NO: 2826274 - RNA, 19 nt, Artificial Sequence
  Description of Artificial Sequence: Synthetic oligonucleotide
gaagaauuugcaggguucu

SEQ ID NO: 2826275 - RNA, 19 nt, Artificial Sequence
  Description of Artificial Sequence: Synthetic oligonucleotide
aucugcaggcgccugcgcu

SEQ ID NO: 2826276 - RNA, 19 nt, Artificial Sequence
  Description of Artificial Sequence: Synthetic oligonucleotide
guucucccgaagaauuugc

SEQ ID NO: 2826277 - RNA, 19 nt, Artificial Sequence
  Description of Artificial Sequence: Synthetic oligonucleotide
uccuccugggugcgcagcc

SEQ ID NO: 2826278 - RNA, 19 nt, Artificial Sequence
  Description of Artificial Sequence: Synthetic oligonucleotide
ucccgaugcccacagcaaa

SEQ ID NO: 2826279 - RNA, 19 nt, Artificial Sequence
  Description of Artificial Sequence: Synthetic oligonucleotide
gaguugagaggcggcaccc

SEQ ID NO: 2826280 - RNA, 19 nt, Artificial Sequence
  Description of Artificial Sequence: Synthetic oligonucleotide
ggcguuguccaacuccucc

SEQ ID NO: 2826281 - RNA, 19 nt, Artificial Sequence
  Description of Artificial Sequence: Synthetic oligonucleotide
aagccgaauuggcguuguc

SEQ ID NO: 2826282 - RNA, 19 nt, Artificial Sequence
  Description of Artificial Sequence: Synthetic oligonucleotide
guccaacuccuccugggug

SEQ ID NO: 2826283 - RNA, 19 nt, Artificial Sequence
  Description of Artificial Sequence: Synthetic oligonucleotide
uguccugcuucaccuucga

SEQ ID NO: 2826284 - RNA, 19 nt, Artificial Sequence
  Description of Artificial Sequence: Synthetic oligonucleotide
cacagcaaacaugcuguag

SEQ ID NO: 2826285 - RNA, 19 nt, Artificial Sequence
  Description of Artificial Sequence: Synthetic oligonucleotide
ggaagagcggcaugagggc

SEQ ID NO: 2826286 - RNA, 19 nt, Artificial Sequence
  Description of Artificial Sequence: Synthetic oligonucleotide
cacuucaucauucuccagu

SEQ ID NO: 2826287 - RNA, 19 nt, Artificial Sequence
  Description of Artificial Sequence: Synthetic oligonucleotide
gggcccuacguauaccagg

SEQ ID NO: 2826288 - RNA, 19 nt, Artificial Sequence
  Description of Artificial Sequence: Synthetic oligonucleotide
ugaugauggccuccuccuc

SEQ ID NO: 2826289 - RNA, 19 nt, Artificial Sequence
  Description of Artificial Sequence: Synthetic oligonucleotide
aacucggaguugagaggcg

SEQ ID NO: 2826290 - RNA, 19 nt, Artificial Sequence
  Description of Artificial Sequence: Synthetic oligonucleotide
uguagcccgacaggccccg

SEQ ID NO: 2826291 - RNA, 19 nt, Artificial Sequence
  Description of Artificial Sequence: Synthetic oligonucleotide
cucggaguugagaggcggc

SEQ ID NO: 2826292 - RNA, 19 nt, Artificial Sequence
  Description of Artificial Sequence: Synthetic oligonucleotide
agcccgacaggccccggcg

SEQ ID NO: 2826293 - RNA, 19 nt, Artificial Sequence
  Description of Artificial Sequence: Synthetic oligonucleotide
acuguucuuuauuguggau

SEQ ID NO: 2826294 - RNA, 19 nt, Artificial Sequence
  Description of Artificial Sequence: Synthetic oligonucleotide
ggaguugagaggcggcacc

SEQ ID NO: 2826295 - RNA, 19 nt, Artificial Sequence
  Description of Artificial Sequence: Synthetic oligonucleotide
uucuccgguccuucucugc

SEQ ID NO: 2826296 - RNA, 19 nt, Artificial Sequence
  Description of Artificial Sequence: Synthetic oligonucleotide
auacaacucggaguugaga

SEQ ID NO: 2826297 - RNA, 19 nt, Artificial Sequence
  Description of Artificial Sequence: Synthetic oligonucleotide
augauggccuccuccucca

SEQ ID NO: 2826298 - RNA, 19 nt, Artificial Sequence
  Description of Artificial Sequence: Synthetic oligonucleotide
ugaagccgaauuggcguug

SEQ ID NO: 2826299 - RNA, 19 nt, Artificial Sequence
  Description of Artificial Sequence: Synthetic oligonucleotide
aacuccuccugggugcgca

SEQ ID NO: 2826300 - RNA, 19 nt, Artificial Sequence
  Description of Artificial Sequence: Synthetic oligonucleotide
gucgauggggccguagccc

SEQ ID NO: 2826301 - RNA, 19 nt, Artificial Sequence
  Description of Artificial Sequence: Synthetic oligonucleotide
ucggaguugagaggcggca

SEQ ID NO: 2826302 - RNA, 19 nt, Artificial Sequence
  Description of Artificial Sequence: Synthetic oligonucleotide
ucucugccuggaagagcgg

SEQ ID NO: 2826303 - RNA, 19 nt, Artificial Sequence
  Description of Artificial Sequence: Synthetic oligonucleotide
cagucaggcacaucuuuca

SEQ ID NO: 2826304 - RNA, 19 nt, Artificial Sequence
  Description of Artificial Sequence: Synthetic oligonucleotide
gcagguuccgcuuguaguc

SEQ ID NO: 2826305 - RNA, 19 nt, Artificial Sequence
  Description of Artificial Sequence: Synthetic oligonucleotide
ccaggugaagccgaauugg

SEQ ID NO: 2826306 - RNA, 19 nt, Artificial Sequence
  Description of Artificial Sequence: Synthetic oligonucleotide
ggugaagccgaauuggcgu

SEQ ID NO: 2826307 - RNA, 19 nt, Artificial Sequence
  Description of Artificial Sequence: Synthetic oligonucleotide
cucacgguuccacuucauc

SEQ ID NO: 2826308 - RNA, 19 nt, Artificial Sequence
  Description of Artificial Sequence: Synthetic oligonucleotide
cagguuccgcuuguagucg

SEQ ID NO: 2826309 - RNA, 19 nt, Artificial Sequence
  Description of Artificial Sequence: Synthetic oligonucleotide
aagagcggcaugagggcga

SEQ ID NO: 2826310 - RNA, 19 nt, Artificial Sequence
  Description of Artificial Sequence: Synthetic oligonucleotide
ugcaggguucuccgguccu

SEQ ID NO: 2826311 - RNA, 19 nt, Artificial Sequence
  Description of Artificial Sequence: Synthetic oligonucleotide
gccgaauuggcguugucca

SEQ ID NO: 2826312 - RNA, 19 nt, Artificial Sequence
  Description of Artificial Sequence: Synthetic oligonucleotide
gacucacccaccuuccagu

SEQ ID NO: 2826313 - RNA, 19 nt, Artificial Sequence
  Description of Artificial Sequence: Synthetic oligonucleotide
gaauuggcguuguccaacu

SEQ ID NO: 2826314 - RNA, 19 nt, Artificial Sequence
  Description of Artificial Sequence: Synthetic oligonucleotide
gcuuguagucgauggggcc

SEQ ID NO: 2826315 - RNA, 19 nt, Artificial Sequence
  Description of Artificial Sequence: Synthetic oligonucleotide
cucugccuggaagagcggc

SEQ ID NO: 2826316 - RNA, 19 nt, Artificial Sequence
  Description of Artificial Sequence: Synthetic oligonucleotide
uucgagccuccaaauccuc

SEQ ID NO: 2826317 - RNA, 19 nt, Artificial Sequence
  Description of Artificial Sequence: Synthetic oligonucleotide
acuugcgcccucagucacc

SEQ ID NO: 2826318 - RNA, 19 nt, Artificial Sequence
  Description of Artificial Sequence: Synthetic oligonucleotide
cuucucugccuggaagagc

SEQ ID NO: 2826319 - RNA, 19 nt, Artificial Sequence
  Description of Artificial Sequence: Synthetic oligonucleotide
ggucccgaugcccacagca

SEQ ID NO: 2826320 - RNA, 19 nt, Artificial Sequence
  Description of Artificial Sequence: Synthetic oligonucleotide
uuguagucgauggggccgu

SEQ ID NO: 2826321 - RNA, 19 nt, Artificial Sequence
  Description of Artificial Sequence: Synthetic oligonucleotide
aucgcuggggcccuacgua

SEQ ID NO: 2826322 - RNA, 19 nt, Artificial Sequence
  Description of Artificial Sequence: Synthetic oligonucleotide
caaacaugcuguagcccga

SEQ ID NO: 2826323 - RNA, 19 nt, Artificial Sequence
  Description of Artificial Sequence: Synthetic oligonucleotide
gguucucccgaagaauuug

SEQ ID NO: 2826324 - RNA, 19 nt, Artificial Sequence
  Description of Artificial Sequence: Synthetic oligonucleotide
ugcgcucacgguuccacuu

SEQ ID NO: 2826325 - RNA, 19 nt, Artificial Sequence
  Description of Artificial Sequence: Synthetic oligonucleotide
cuguagcccgacaggcccc

SEQ ID NO: 2826326 - RNA, 19 nt, Artificial Sequence
  Description of Artificial Sequence: Synthetic oligonucleotide
guauaccaggugaagccga

SEQ ID NO: 2826327 - RNA, 19 nt, Artificial Sequence
  Description of Artificial Sequence: Synthetic oligonucleotide
ucaugaugauggccuccuc

SEQ ID NO: 2826328 - RNA, 19 nt, Artificial Sequence
  Description of Artificial Sequence: Synthetic oligonucleotide
agcgcgugguguggaagac

SEQ ID NO: 2826329 - RNA, 19 nt, Artificial Sequence
  Description of Artificial Sequence: Synthetic oligonucleotide
cugggugcgcagcccauac

SEQ ID NO: 2826330 - RNA, 19 nt, Artificial Sequence
  Description of Artificial Sequence: Synthetic oligonucleotide
gcgcagcccauacaacucg

SEQ ID NO: 2826331 - RNA, 19 nt, Artificial Sequence
  Description of Artificial Sequence: Synthetic oligonucleotide
ugccuggaagagcggcaug

SEQ ID NO: 2826332 - RNA, 19 nt, Artificial Sequence
  Description of Artificial Sequence: Synthetic oligonucleotide
ggcgauucgagccuccaaa

SEQ ID NO: 2826333 - RNA, 19 nt, Artificial Sequence
  Description of Artificial Sequence: Synthetic oligonucleotide
uagcccgacaggccccggc

SEQ ID NO: 2826334 - RNA, 19 nt, Artificial Sequence
  Description of Artificial Sequence: Synthetic oligonucleotide
ggcaugagggcgauucgag

SEQ ID NO: 2826335 - RNA, 19 nt, Artificial Sequence
  Description of Artificial Sequence: Synthetic oligonucleotide
caggcgccugcgcucacgg

SEQ ID NO: 2826336 - RNA, 19 nt, Artificial Sequence
  Description of Artificial Sequence: Synthetic oligonucleotide
cgugguguggaagacagac

SEQ ID NO: 2826337 - RNA, 19 nt, Artificial Sequence
  Description of Artificial Sequence: Synthetic oligonucleotide
cgaagaauuugcaggguuc

SEQ ID NO: 2826338 - RNA, 19 nt, Artificial Sequence
  Description of Artificial Sequence: Synthetic oligonucleotide
guucuccgguccuucucug

SEQ ID NO: 2826339 - RNA, 19 nt, Artificial Sequence
  Description of Artificial Sequence: Synthetic oligonucleotide
ucgcuggggcccuacguau

SEQ ID NO: 2826340 - RNA, 19 nt, Artificial Sequence
  Description of Artificial Sequence: Synthetic oligonucleotide
gaucugcaggcgccugcgc

SEQ ID NO: 2826341 - RNA, 19 nt, Artificial Sequence
  Description of Artificial Sequence: Synthetic oligonucleotide
gauaucgcuggggcccuac

SEQ ID NO: 2826342 - RNA, 19 nt, Artificial Sequence
  Description of Artificial Sequence: Synthetic oligonucleotide
agguuccgcuuguagucga

SEQ ID NO: 2826343 - RNA, 19 nt, Artificial Sequence
  Description of Artificial Sequence: Synthetic oligonucleotide
gcaugagggcgauucgagc

SEQ ID NO: 2826344 - RNA, 19 nt, Artificial Sequence
  Description of Artificial Sequence: Synthetic oligonucleotide
gugcgcagcccauacaacu

SEQ ID NO: 2826345 - RNA, 19 nt, Artificial Sequence
  Description of Artificial Sequence: Synthetic oligonucleotide
ugggugcgcagcccauaca

SEQ ID NO: 2826346 - RNA, 19 nt, Artificial Sequence
  Description of Artificial Sequence: Synthetic oligonucleotide
cuccagguucucccgaaga

SEQ ID NO: 2826347 - RNA, 19 nt, Artificial Sequence
  Description of Artificial Sequence: Synthetic oligonucleotide
ccgcuuguagucgaugggg

SEQ ID NO: 2826348 - RNA, 19 nt, Artificial Sequence
  Description of Artificial Sequence: Synthetic oligonucleotide
aggucccgaugcccacagc

SEQ ID NO: 2826349 - RNA, 19 nt, Artificial Sequence
  Description of Artificial Sequence: Synthetic oligonucleotide
cguauaccaggugaagccg

SEQ ID NO: 2826350 - RNA, 19 nt, Artificial Sequence
  Description of Artificial Sequence: Synthetic oligonucleotide
acgguuccacuucaucauu

SEQ ID NO: 2826351 - RNA, 19 nt, Artificial Sequence
  Description of Artificial Sequence: Synthetic oligonucleotide
guagucgauggggccguag

SEQ ID NO: 2826352 - RNA, 19 nt, Artificial Sequence
  Description of Artificial Sequence: Synthetic oligonucleotide
gggcauguccugcuucacc

SEQ ID NO: 2826353 - RNA, 19 nt, Artificial Sequence
  Description of Artificial Sequence: Synthetic oligonucleotide
cgcgugguguggaagacag

SEQ ID NO: 2826354 - RNA, 19 nt, Artificial Sequence
  Description of Artificial Sequence: Synthetic oligonucleotide
guuccgcuuguagucgaug

SEQ ID NO: 2826355 - RNA, 19 nt, Artificial Sequence
  Description of Artificial Sequence: Synthetic oligonucleotide
gccuccaaauccucgaucu

SEQ ID NO: 2826356 - RNA, 19 nt, Artificial Sequence
  Description of Artificial Sequence: Synthetic oligonucleotide
aggguucuccgguccuucu

SEQ ID NO: 2826357 - RNA, 19 nt, Artificial Sequence
  Description of Artificial Sequence: Synthetic oligonucleotide
uggauaucgcuggggcccu

SEQ ID NO: 2826358 - RNA, 19 nt, Artificial Sequence
  Description of Artificial Sequence: Synthetic oligonucleotide
cccuacguauaccagguga

SEQ ID NO: 2826359 - RNA, 19 nt, Artificial Sequence
  Description of Artificial Sequence: Synthetic oligonucleotide
gggugcgcagcccauacaa

SEQ ID NO: 2826360 - RNA, 19 nt, Artificial Sequence
  Description of Artificial Sequence: Synthetic oligonucleotide
aguugagaggcggcaccca

SEQ ID NO: 2826361 - RNA, 19 nt, Artificial Sequence
  Description of Artificial Sequence: Synthetic oligonucleotide
ccuacguauaccaggugaa

SEQ ID NO: 2826362 - RNA, 19 nt, Artificial Sequence
  Description of Artificial Sequence: Synthetic oligonucleotide
agacagacucacccaccuu

SEQ ID NO: 2826363 - RNA, 19 nt, Artificial Sequence
  Description of Artificial Sequence: Synthetic oligonucleotide
ugagggcgauucgagccuc

SEQ ID NO: 2826364 - RNA, 19 nt, Artificial Sequence
  Description of Artificial Sequence: Synthetic oligonucleotide
cagguucucccgaagaauu

SEQ ID NO: 2826365 - RNA, 19 nt, Artificial Sequence
  Description of Artificial Sequence: Synthetic oligonucleotide
cacgguuccacuucaucau

SEQ ID NO: 2826366 - RNA, 19 nt, Artificial Sequence
  Description of Artificial Sequence: Synthetic oligonucleotide
guucuuuauuguggauauc

SEQ ID NO: 2826367 - RNA, 19 nt, Artificial Sequence
  Description of Artificial Sequence: Synthetic oligonucleotide
gggcagguuccgcuuguag

SEQ ID NO: 2826368 - RNA, 19 nt, Artificial Sequence
  Description of Artificial Sequence: Synthetic oligonucleotide
ccaaauccucgaucugcag

SEQ ID NO: 2826369 - RNA, 19 nt, Artificial Sequence
  Description of Artificial Sequence: Synthetic oligonucleotide
cauucuccaguagccaaaa

SEQ ID NO: 2826370 - RNA, 19 nt, Artificial Sequence
  Description of Artificial Sequence: Synthetic oligonucleotide
cagcgcgugguguggaaga

SEQ ID NO: 2826371 - RNA, 19 nt, Artificial Sequence
  Description of Artificial Sequence: Synthetic oligonucleotide
cugcuucaccuucgacgcc

SEQ ID NO: 2826372 - RNA, 19 nt, Artificial Sequence
  Description of Artificial Sequence: Synthetic oligonucleotide
cuucaccuucgacgccgcc

SEQ ID NO: 2826373 - RNA, 19 nt, Artificial Sequence
  Description of Artificial Sequence: Synthetic oligonucleotide
cgcuuguagucgauggggc

SEQ ID NO: 2826374 - RNA, 19 nt, Artificial Sequence
  Description of Artificial Sequence: Synthetic oligonucleotide
ggcagguuccgcuuguagu

SEQ ID NO: 2826375 - RNA, 19 nt, Artificial Sequence
  Description of Artificial Sequence: Synthetic oligonucleotide
ccauacaacucggaguuga

SEQ ID NO: 2826376 - RNA, 19 nt, Artificial Sequence
  Description of Artificial Sequence: Synthetic oligonucleotide
uggcguuguccaacuccuc

SEQ ID NO: 2826377 - RNA, 19 nt, Artificial Sequence
  Description of Artificial Sequence: Synthetic oligonucleotide
cccgaugcccacagcaaac

SEQ ID NO: 2826378 - RNA, 19 nt, Artificial Sequence
  Description of Artificial Sequence: Synthetic oligonucleotide
gagaggcggcacccagcgc

SEQ ID NO: 2826379 - RNA, 19 nt, Artificial Sequence
  Description of Artificial Sequence: Synthetic oligonucleotide
gcccauacaacucggaguu

SEQ ID NO: 2826380 - RNA, 19 nt, Artificial Sequence
  Description of Artificial Sequence: Synthetic oligonucleotide
gguuccacuucaucauucu

SEQ ID NO: 2826381 - RNA, 19 nt, Artificial Sequence
  Description of Artificial Sequence: Synthetic oligonucleotide
cacccaccuuccagucagg

SEQ ID NO: 2826382 - RNA, 19 nt, Artificial Sequence
  Description of Artificial Sequence: Synthetic oligonucleotide
gcuggggcccuacguauac

SEQ ID NO: 2826383 - RNA, 19 nt, Artificial Sequence
  Description of Artificial Sequence: Synthetic oligonucleotide
cucacccaccuuccaguca

SEQ ID NO: 2826384 - RNA, 19 nt, Artificial Sequence
  Description of Artificial Sequence: Synthetic oligonucleotide
gguucuccgguccuucucu

SEQ ID NO: 2826385 - RNA, 19 nt, Artificial Sequence
  Description of Artificial Sequence: Synthetic oligonucleotide
guccugcuucaccuucgac

SEQ ID NO: 2826386 - RNA, 19 nt, Artificial Sequence
  Description of Artificial Sequence: Synthetic oligonucleotide
gcggcaugagggcgauucg

SEQ ID NO: 2826387 - RNA, 19 nt, Artificial Sequence
  Description of Artificial Sequence: Synthetic oligonucleotide
caccuuccagucaggcaca

SEQ ID NO: 2826388 - RNA, 19 nt, Artificial Sequence
  Description of Artificial Sequence: Synthetic oligonucleotide
cgaauuggcguuguccaac

SEQ ID NO: 2826389 - RNA, 19 nt, Artificial Sequence
  Description of Artificial Sequence: Synthetic oligonucleotide
uccugggugcgcagcccau

SEQ ID NO: 2826390 - RNA, 19 nt, Artificial Sequence
  Description of Artificial Sequence: Synthetic oligonucleotide
agguucucccgaagaauuu

SEQ ID NO: 2826391 - RNA, 19 nt, Artificial Sequence
  Description of Artificial Sequence: Synthetic oligonucleotide
cacccagcgcguggugugg

SEQ ID NO: 2826392 - RNA, 19 nt, Artificial Sequence
  Description of Artificial Sequence: Synthetic oligonucleotide
auaccaggugaagccgaau

SEQ ID NO: 2826393 - RNA, 19 nt, Artificial Sequence
  Description of Artificial Sequence: Synthetic oligonucleotide
ggcggcacccagcgcgugg

SEQ ID NO: 2826394 - RNA, 19 nt, Artificial Sequence
  Description of Artificial Sequence: Synthetic oligonucleotide
gcacccagcgcguggugug

SEQ ID NO: 2826395 - RNA, 19 nt, Artificial Sequence
  Description of Artificial Sequence: Synthetic oligonucleotide
gagggcgauucgagccucc

SEQ ID NO: 2826396 - RNA, 19 nt, Artificial Sequence
  Description of Artificial Sequence: Synthetic oligonucleotide
cuggggcccuacguauacc

SEQ ID NO: 2826397 - RNA, 19 nt, Artificial Sequence
  Description of Artificial Sequence: Synthetic oligonucleotide
cagacucacccaccuucca

SEQ ID NO: 2826398 - RNA, 19 nt, Artificial Sequence
  Description of Artificial Sequence: Synthetic oligonucleotide
cuccugggugcgcagccca

SEQ ID NO: 2826399 - RNA, 19 nt, Artificial Sequence
  Description of Artificial Sequence: Synthetic oligonucleotide
cucgaucugcaggcgccug

SEQ ID NO: 2826400 - RNA, 19 nt, Artificial Sequence
  Description of Artificial Sequence: Synthetic oligonucleotide
gaagccgaauuggcguugu

SEQ ID NO: 2826401 - RNA, 19 nt, Artificial Sequence
  Description of Artificial Sequence: Synthetic oligonucleotide
cuccuccugggugcgcagc

SEQ ID NO: 2826402 - RNA, 19 nt, Artificial Sequence
  Description of Artificial Sequence: Synthetic oligonucleotide
gccauacuugcgcccucag

SEQ ID NO: 2826403 - RNA, 19 nt, Artificial Sequence
  Description of Artificial Sequence: Synthetic oligonucleotide
gugaagccgaauuggcguu

SEQ ID NO: 2826404 - RNA, 19 nt, Artificial Sequence
  Description of Artificial Sequence: Synthetic oligonucleotide
agggcgauucgagccucca

SEQ ID NO: 2826405 - RNA, 19 nt, Artificial Sequence
  Description of Artificial Sequence: Synthetic oligonucleotide
ccuccaaauccucgaucug

SEQ ID NO: 2826406 - RNA, 19 nt, Artificial Sequence
  Description of Artificial Sequence: Synthetic oligonucleotide
gagccuccaaauccucgau

SEQ ID NO: 2826407 - RNA, 19 nt, Artificial Sequence
  Description of Artificial Sequence: Synthetic oligonucleotide
ggguucuccgguccuucuc

SEQ ID NO: 2826408 - RNA, 19 nt, Artificial Sequence
  Description of Artificial Sequence: Synthetic oligonucleotide
cgauucgagccuccaaauc

SEQ ID NO: 2826409 - RNA, 19 nt, Artificial Sequence
  Description of Artificial Sequence: Synthetic oligonucleotide
cgcagcccauacaacucgg

SEQ ID NO: 2826410 - RNA, 19 nt, Artificial Sequence
  Description of Artificial Sequence: Synthetic oligonucleotide
ccaacuccuccugggugcg

SEQ ID NO: 2826411 - RNA, 19 nt, Artificial Sequence
  Description of Artificial Sequence: Synthetic oligonucleotide
gucccgaugcccacagcaa

SEQ ID NO: 2826412 - RNA, 19 nt, Artificial Sequence
  Description of Artificial Sequence: Synthetic oligonucleotide
agagcggcaugagggcgau

SEQ ID NO: 2826413 - RNA, 19 nt, Artificial Sequence
  Description of Artificial Sequence: Synthetic oligonucleotide
ggugcgcagcccauacaac

SEQ ID NO: 2826414 - RNA, 19 nt, Artificial Sequence
  Description of Artificial Sequence: Synthetic oligonucleotide
cgguuccacuucaucauuc

SEQ ID NO: 2826415 - RNA, 19 nt, Artificial Sequence
  Description of Artificial Sequence: Synthetic oligonucleotide
caaggucccgaugcccaca

SEQ ID NO: 2826416 - RNA, 19 nt, Artificial Sequence
  Description of Artificial Sequence: Synthetic oligonucleotide
ggggcccuacguauaccag

SEQ ID NO: 2826417 - RNA, 19 nt, Artificial Sequence
  Description of Artificial Sequence: Synthetic oligonucleotide
cccgacaggccccggcggg

SEQ ID NO: 2826418 - RNA, 19 nt, Artificial Sequence
  Description of Artificial Sequence: Synthetic oligonucleotide
gcccucagucaccucaaaa

SEQ ID NO: 2826419 - RNA, 19 nt, Artificial Sequence
  Description of Artificial Sequence: Synthetic oligonucleotide
cuugcgcccucagucaccu

SEQ ID NO: 2826420 - RNA, 19 nt, Artificial Sequence
  Description of Artificial Sequence: Synthetic oligonucleotide
gugguguggaagacagacu

SEQ ID NO: 2826421 - RNA, 19 nt, Artificial Sequence
  Description of Artificial Sequence: Synthetic oligonucleotide
gcccgacaggccccggcgg

SEQ ID NO: 2826422 - RNA, 19 nt, Artificial Sequence
  Description of Artificial Sequence: Synthetic oligonucleotide
gcguuguccaacuccuccu

SEQ ID NO: 2826423 - RNA, 19 nt, Artificial Sequence
  Description of Artificial Sequence: Synthetic oligonucleotide
cgaucugcaggcgccugcg

SEQ ID NO: 2826424 - RNA, 19 nt, Artificial Sequence
  Description of Artificial Sequence: Synthetic oligonucleotide
gcgcucacgguuccacuuc

SEQ ID NO: 2826425 - RNA, 19 nt, Artificial Sequence
  Description of Artificial Sequence: Synthetic oligonucleotide
ggcccuacguauaccaggu

SEQ ID NO: 2826426 - RNA, 19 nt, Artificial Sequence
  Description of Artificial Sequence: Synthetic oligonucleotide
caacuccuccugggugcgc

SEQ ID NO: 2826427 - RNA, 19 nt, Artificial Sequence
  Description of Artificial Sequence: Synthetic oligonucleotide
ccugcgcucacgguuccac

SEQ ID NO: 2826428 - RNA, 19 nt, Artificial Sequence
  Description of Artificial Sequence: Synthetic oligonucleotide
gcccuacguauaccaggug

SEQ ID NO: 2826429 - RNA, 19 nt, Artificial Sequence
  Description of Artificial Sequence: Synthetic oligonucleotide
uguagucgauggggccgua

SEQ ID NO: 2826430 - RNA, 19 nt, Artificial Sequence
  Description of Artificial Sequence: Synthetic oligonucleotide
ugcaggcgccugcgcucac

SEQ ID NO: 2826431 - RNA, 19 nt, Artificial Sequence
  Description of Artificial Sequence: Synthetic oligonucleotide
gguccuucucugccuggaa

SEQ ID NO: 2826432 - RNA, 19 nt, Artificial Sequence
  Description of Artificial Sequence: Synthetic oligonucleotide
guagcccgacaggccccgg

SEQ ID NO: 2826433 - RNA, 19 nt, Artificial Sequence
  Description of Artificial Sequence: Synthetic oligonucleotide
aggcgccugcgcucacggu

SEQ ID NO: 2826434 - RNA, 19 nt, Artificial Sequence
  Description of Artificial Sequence: Synthetic oligonucleotide
cuucgacgccgccauacuu

SEQ ID NO: 2826435 - RNA, 19 nt, Artificial Sequence
  Description of Artificial Sequence: Synthetic oligonucleotide
gccccggcggggcagguuc

SEQ ID NO: 2826436 - RNA, 19 nt, Artificial Sequence
  Description of Artificial Sequence: Synthetic oligonucleotide
gcgauucgagccuccaaau

SEQ ID NO: 2826437 - RNA, 19 nt, Artificial Sequence
  Description of Artificial Sequence: Synthetic oligonucleotide
gcaggcgccugcgcucacg

SEQ ID NO: 2826438 - RNA, 19 nt, Artificial Sequence
  Description of Artificial Sequence: Synthetic oligonucleotide
gcggggcagguuccgcuug

SEQ ID NO: 2826439 - RNA, 19 nt, Artificial Sequence
  Description of Artificial Sequence: Synthetic oligonucleotide
ccagcgcgugguguggaag

SEQ ID NO: 2826440 - RNA, 19 nt, Artificial Sequence
  Description of Artificial Sequence: Synthetic oligonucleotide
cugcaggcgccugcgcuca

SEQ ID NO: 2826441 - RNA, 19 nt, Artificial Sequence
  Description of Artificial Sequence: Synthetic oligonucleotide
acccagcgcguggugugga

SEQ ID NO: 2826442 - RNA, 19 nt, Artificial Sequence
  Description of Artificial Sequence: Synthetic oligonucleotide
gcuucaccuucgacgccgc

SEQ ID NO: 2826443 - RNA, 19 nt, Artificial Sequence
  Description of Artificial Sequence: Synthetic oligonucleotide
cuccgguccuucucugccu

SEQ ID NO: 2826444 - RNA, 19 nt, Artificial Sequence
  Description of Artificial Sequence: Synthetic oligonucleotide
caggccccggcggggcagg

SEQ ID NO: 2826445 - RNA, 19 nt, Artificial Sequence
  Description of Artificial Sequence: Synthetic oligonucleotide
gcagcccauacaacucgga

SEQ ID NO: 2826446 - RNA, 19 nt, Artificial Sequence
  Description of Artificial Sequence: Synthetic oligonucleotide
ggcgccugcgcucacgguu

SEQ ID NO: 2826447 - RNA, 19 nt, Artificial Sequence
  Description of Artificial Sequence: Synthetic oligonucleotide
gggcgauucgagccuccaa

SEQ ID NO: 2826448 - RNA, 19 nt, Artificial Sequence
  Description of Artificial Sequence: Synthetic oligonucleotide
ccgaauuggcguuguccaa

SEQ ID NO: 2826449 - RNA, 19 nt, Artificial Sequence
  Description of Artificial Sequence: Synthetic oligonucleotide
ccgaugcccacagcaaaca

SEQ ID NO: 2826450 - RNA, 19 nt, Artificial Sequence
  Description of Artificial Sequence: Synthetic oligonucleotide
cugcgcucacgguuccacu

SEQ ID NO: 2826451 - RNA, 19 nt, Artificial Sequence
  Description of Artificial Sequence: Synthetic oligonucleotide
ccgaagaauuugcaggguu

SEQ ID NO: 2826452 - RNA, 19 nt, Artificial Sequence
  Description of Artificial Sequence: Synthetic oligonucleotide
ggggcauguccugcuucac

SEQ ID NO: 2826453 - RNA, 19 nt, Artificial Sequence
  Description of Artificial Sequence: Synthetic oligonucleotide
cccauacaacucggaguug

SEQ ID NO: 2826454 - RNA, 19 nt, Artificial Sequence
  Description of Artificial Sequence: Synthetic oligonucleotide
uugcgcccucagucaccuc

SEQ ID NO: 2826455 - RNA, 19 nt, Artificial Sequence
  Description of Artificial Sequence: Synthetic oligonucleotide
ccuccugggugcgcagccc

SEQ ID NO: 2826456 - RNA, 19 nt, Artificial Sequence
  Description of Artificial Sequence: Synthetic oligonucleotide
gaggcggcacccagcgcgu

SEQ ID NO: 2826457 - RNA, 19 nt, Artificial Sequence
  Description of Artificial Sequence: Synthetic oligonucleotide
gcgccugcgcucacgguuc

SEQ ID NO: 2826458 - RNA, 19 nt, Artificial Sequence
  Description of Artificial Sequence: Synthetic oligonucleotide
cggaguugagaggcggcac

SEQ ID NO: 2826459 - RNA, 19 nt, Artificial Sequence
  Description of Artificial Sequence: Synthetic oligonucleotide
ccgacaggccccggcgggg

SEQ ID NO: 2826460 - RNA, 19 nt, Artificial Sequence
  Description of Artificial Sequence: Synthetic oligonucleotide
cugccuggaagagcggcau

SEQ ID NO: 2826461 - RNA, 19 nt, Artificial Sequence
  Description of Artificial Sequence: Synthetic oligonucleotide
aggcggcacccagcgcgug

SEQ ID NO: 2826462 - RNA, 19 nt, Artificial Sequence
  Description of Artificial Sequence: Synthetic oligonucleotide
caggcacaucuuucaugau

SEQ ID NO: 2826463 - RNA, 19 nt, Artificial Sequence
  Description of Artificial Sequence: Synthetic oligonucleotide
ccacagcaaacaugcugua

SEQ ID NO: 2826464 - RNA, 19 nt, Artificial Sequence
  Description of Artificial Sequence: Synthetic oligonucleotide
cgccgccauacuugcgccc

SEQ ID NO: 2826465 - RNA, 19 nt, Artificial Sequence
  Description of Artificial Sequence: Synthetic oligonucleotide
ccauacuugcgcccucagu

SEQ ID NO: 2826466 - RNA, 19 nt, Artificial Sequence
  Description of Artificial Sequence: Synthetic oligonucleotide
gccgccauacuugcgcccu

SEQ ID NO: 2826467 - RNA, 19 nt, Artificial Sequence
  Description of Artificial Sequence: Synthetic oligonucleotide
cgacgccgccauacuugcg

SEQ ID NO: 2826468 - RNA, 19 nt, Artificial Sequence
  Description of Artificial Sequence: Synthetic oligonucleotide
gcgcgugguguggaagaca

SEQ ID NO: 2826469 - RNA, 19 nt, Artificial Sequence
  Description of Artificial Sequence: Synthetic oligonucleotide
ggcacccagcgcguggugu

SEQ ID NO: 2826470 - RNA, 19 nt, Artificial Sequence
  Description of Artificial Sequence: Synthetic oligonucleotide
ccagguucucccgaagaau

SEQ ID NO: 2826471 - RNA, 19 nt, Artificial Sequence
  Description of Artificial Sequence: Synthetic oligonucleotide
cgcucacgguuccacuuca

SEQ ID NO: 2826472 - RNA, 19 nt, Artificial Sequence
  Description of Artificial Sequence: Synthetic oligonucleotide
ccuuccagucaggcacauc

SEQ ID NO: 2826473 - RNA, 19 nt, Artificial Sequence
  Description of Artificial Sequence: Synthetic oligonucleotide
gcauguccugcuucaccuu

SEQ ID NO: 2826474 - RNA, 19 nt, Artificial Sequence
  Description of Artificial Sequence: Synthetic oligonucleotide
ccccggcggggcagguucc

SEQ ID NO: 2826475 - RNA, 19 nt, Artificial Sequence
  Description of Artificial Sequence: Synthetic oligonucleotide
cggcaugagggcgauucga

SEQ ID NO: 2826476 - RNA, 19 nt, Artificial Sequence
  Description of Artificial Sequence: Synthetic oligonucleotide
cccggcggggcagguuccg

SEQ ID NO: 2826477 - RNA, 19 nt, Artificial Sequence
  Description of Artificial Sequence: Synthetic oligonucleotide
ccuucgacgccgccauacu

SEQ ID NO: 2826478 - RNA, 19 nt, Artificial Sequence
  Description of Artificial Sequence: Synthetic oligonucleotide
ccgccauacuugcgcccuc

SEQ ID NO: 2826479 - RNA, 19 nt, Artificial Sequence
  Description of Artificial Sequence: Synthetic oligonucleotide
cgacaggccccggcggggc

SEQ ID NO: 2826480 - RNA, 19 nt, Artificial Sequence
  Description of Artificial Sequence: Synthetic oligonucleotide
gcgugguguggaagacaga

SEQ ID NO: 2826481 - RNA, 19 nt, Artificial Sequence
  Description of Artificial Sequence: Synthetic oligonucleotide
ggcggggcagguuccgcuu

SEQ ID NO: 2826482 - RNA, 19 nt, Artificial Sequence
  Description of Artificial Sequence: Synthetic oligonucleotide
gguuccgcuuguagucgau

SEQ ID NO: 2826483 - RNA, 19 nt, Artificial Sequence
  Description of Artificial Sequence: Synthetic oligonucleotide
gcgcccucagucaccucaa

SEQ ID NO: 2826484 - RNA, 19 nt, Artificial Sequence
  Description of Artificial Sequence: Synthetic oligonucleotide
caccuucgacgccgccaua

SEQ ID NO: 2826485 - RNA, 19 nt, Artificial Sequence
  Description of Artificial Sequence: Synthetic oligonucleotide
ccggcggggcagguuccgc

SEQ ID NO: 2826486 - RNA, 19 nt, Artificial Sequence
  Description of Artificial Sequence: Synthetic oligonucleotide
cccgaagaauuugcagggu

SEQ ID NO: 2826487 - RNA, 19 nt, Artificial Sequence
  Description of Artificial Sequence: Synthetic oligonucleotide
cccagcgcgugguguggaa

SEQ ID NO: 2826488 - RNA, 19 nt, Artificial Sequence
  Description of Artificial Sequence: Synthetic oligonucleotide
cgguccuucucugccugga

SEQ ID NO: 2826489 - RNA, 19 nt, Artificial Sequence
  Description of Artificial Sequence: Synthetic oligonucleotide
cgccauacuugcgcccuca

SEQ ID NO: 2826490 - RNA, 19 nt, Artificial Sequence
  Description of Artificial Sequence: Synthetic oligonucleotide
gcggcacccagcgcguggu

SEQ ID NO: 2826491 - RNA, 19 nt, Artificial Sequence
  Description of Artificial Sequence: Synthetic oligonucleotide
aggccccggcggggcaggu

SEQ ID NO: 2826492 - RNA, 19 nt, Artificial Sequence
  Description of Artificial Sequence: Synthetic oligonucleotide
cgaugcccacagcaaacau

SEQ ID NO: 2826493 - RNA, 19 nt, Artificial Sequence
  Description of Artificial Sequence: Synthetic oligonucleotide
ggauaucgcuggggcccua

SEQ ID NO: 2826494 - RNA, 19 nt, Artificial Sequence
  Description of Artificial Sequence: Synthetic oligonucleotide
ccugggugcgcagcccaua

SEQ ID NO: 2826495 - RNA, 19 nt, Artificial Sequence
  Description of Artificial Sequence: Synthetic oligonucleotide
gcaggguucuccgguccuu

SEQ ID NO: 2826496 - RNA, 19 nt, Artificial Sequence
  Description of Artificial Sequence: Synthetic oligonucleotide
gcucacgguuccacuucau

SEQ ID NO: 2826497 - RNA, 19 nt, Artificial Sequence
  Description of Artificial Sequence: Synthetic oligonucleotide
cgcuggggcccuacguaua

SEQ ID NO: 2826498 - RNA, 19 nt, Artificial Sequence
  Description of Artificial Sequence: Synthetic oligonucleotide
ccucgaucugcaggcgccu

SEQ ID NO: 2826499 - RNA, 19 nt, Artificial Sequence
  Description of Artificial Sequence: Synthetic oligonucleotide
cggcacccagcgcguggug

SEQ ID NO: 2826500 - RNA, 19 nt, Artificial Sequence
  Description of Artificial Sequence: Synthetic oligonucleotide
cggcggggcagguuccgcu

SEQ ID NO: 2826501 - RNA, 19 nt, Artificial Sequence
  Description of Artificial Sequence: Synthetic oligonucleotide
gagcggcaugagggcgauu

SEQ ID NO: 2826502 - RNA, 19 nt, Artificial Sequence
  Description of Artificial Sequence: Synthetic oligonucleotide
cgcccucagucaccucaaa

SEQ ID NO: 2826503 - RNA, 19 nt, Artificial Sequence
  Description of Artificial Sequence: Synthetic oligonucleotide
ggccccggcggggcagguu

SEQ ID NO: 2826504 - RNA, 19 nt, Artificial Sequence
  Description of Artificial Sequence: Synthetic oligonucleotide
ucaguuuagggcaugaugg

SEQ ID NO: 2826505 - RNA, 19 nt, Artificial Sequence
  Description of Artificial Sequence: Synthetic oligonucleotide
uguuuauucacaaagcuca

SEQ ID NO: 2826506 - RNA, 19 nt, Artificial Sequence
  Description of Artificial Sequence: Synthetic oligonucleotide
uuuaaggacacccagaaau

SEQ ID NO: 2826507 - RNA, 19 nt, Artificial Sequence
  Description of Artificial Sequence: Synthetic oligonucleotide
uuauugaugccuucgaggg

SEQ ID NO: 2826508 - RNA, 19 nt, Artificial Sequence
  Description of Artificial Sequence: Synthetic oligonucleotide
ucuaugaccuucucgaugg

SEQ ID NO: 2826509 - RNA, 19 nt, Artificial Sequence
  Description of Artificial Sequence: Synthetic oligonucleotide
auaaauggcuuguugaccg

SEQ ID NO: 2826510 - RNA, 19 nt, Artificial Sequence
  Description of Artificial Sequence: Synthetic oligonucleotide
uucguguuuauucacaaag

SEQ ID NO: 2826511 - RNA, 19 nt, Artificial Sequence
  Description of Artificial Sequence: Synthetic oligonucleotide
auuauugaugccuucgagg

SEQ ID NO: 2826512 - RNA, 19 nt, Artificial Sequence
  Description of Artificial Sequence: Synthetic oligonucleotide
aaagcagucccuuuaagga

SEQ ID NO: 2826513 - RNA, 19 nt, Artificial Sequence
  Description of Artificial Sequence: Synthetic oligonucleotide
aguguguucguguuuauuc

SEQ ID NO: 2826514 - RNA, 19 nt, Artificial Sequence
  Description of Artificial Sequence: Synthetic oligonucleotide
uucacaaagcucaaagcag

SEQ ID NO: 2826515 - RNA, 19 nt, Artificial Sequence
  Description of Artificial Sequence: Synthetic oligonucleotide
auucacaaagcucaaagca

SEQ ID NO: 2826516 - RNA, 19 nt, Artificial Sequence
  Description of Artificial Sequence: Synthetic oligonucleotide
uuuucuguguguccgacgc

SEQ ID NO: 2826517 - RNA, 19 nt, Artificial Sequence
  Description of Artificial Sequence: Synthetic oligonucleotide
uugauaaauggcuuguuga

SEQ ID NO: 2826518 - RNA, 19 nt, Artificial Sequence
  Description of Artificial Sequence: Synthetic oligonucleotide
gauacuacuguagugguug

SEQ ID NO: 2826519 - RNA, 19 nt, Artificial Sequence
  Description of Artificial Sequence: Synthetic oligonucleotide
aagcagucccuuuaaggac

SEQ ID NO: 2826520 - RNA, 19 nt, Artificial Sequence
  Description of Artificial Sequence: Synthetic oligonucleotide
uguguacccgccuugauga

SEQ ID NO: 2826521 - RNA, 19 nt, Artificial Sequence
  Description of Artificial Sequence: Synthetic oligonucleotide
caaagcagucccuuuaagg

SEQ ID NO: 2826522 - RNA, 19 nt, Artificial Sequence
  Description of Artificial Sequence: Synthetic oligonucleotide
gaaguugauaaauggcuug

SEQ ID NO: 2826523 - RNA, 19 nt, Artificial Sequence
  Description of Artificial Sequence: Synthetic oligonucleotide
uauucacaaagcucaaagc

SEQ ID NO: 2826524 - RNA, 19 nt, Artificial Sequence
  Description of Artificial Sequence: Synthetic oligonucleotide
agcagaaggcagcaggacc

SEQ ID NO: 2826525 - RNA, 19 nt, Artificial Sequence
  Description of Artificial Sequence: Synthetic oligonucleotide
cucgauggggucaucaugg

SEQ ID NO: 2826526 - RNA, 19 nt, Artificial Sequence
  Description of Artificial Sequence: Synthetic oligonucleotide
agucccuuuaaggacaccc

SEQ ID NO: 2826527 - RNA, 19 nt, Artificial Sequence
  Description of Artificial Sequence: Synthetic oligonucleotide
cugggaaguugauaaaugg

SEQ ID NO: 2826528 - RNA, 19 nt, Artificial Sequence
  Description of Artificial Sequence: Synthetic oligonucleotide
ugauaaauggcuuguugac

SEQ ID NO: 2826529 - RNA, 19 nt, Artificial Sequence
  Description of Artificial Sequence: Synthetic oligonucleotide
caaagcucaaagcaguccc

SEQ ID NO: 2826530 - RNA, 19 nt, Artificial Sequence
  Description of Artificial Sequence: Synthetic oligonucleotide
ugggaaguugauaaauggc

SEQ ID NO: 2826531 - RNA, 19 nt, Artificial Sequence
  Description of Artificial Sequence: Synthetic oligonucleotide
agagcugggaaguugauaa

SEQ ID NO: 2826532 - RNA, 19 nt, Artificial Sequence
  Description of Artificial Sequence: Synthetic oligonucleotide
uccauuauugaugccuucg

SEQ ID NO: 2826533 - RNA, 19 nt, Artificial Sequence
  Description of Artificial Sequence: Synthetic oligonucleotide
gugauuccauuauugaugc

SEQ ID NO: 2826534 - RNA, 19 nt, Artificial Sequence
  Description of Artificial Sequence: Synthetic oligonucleotide
ucacaaagcucaaagcagu

SEQ ID NO: 2826535 - RNA, 19 nt, Artificial Sequence
  Description of Artificial Sequence: Synthetic oligonucleotide
cucugcauugcucagcccg

SEQ ID NO: 2826536 - RNA, 19 nt, Artificial Sequence
  Description of Artificial Sequence: Synthetic oligonucleotide
agcagcagaaggcagcagg

SEQ ID NO: 2826537 - RNA, 19 nt, Artificial Sequence
  Description of Artificial Sequence: Synthetic oligonucleotide
uugaugagcgcccugucca

SEQ ID NO: 2826538 - RNA, 19 nt, Artificial Sequence
  Description of Artificial Sequence: Synthetic oligonucleotide
aucaguuuagggcaugaug

SEQ ID NO: 2826539 - RNA, 19 nt, Artificial Sequence
  Description of Artificial Sequence: Synthetic oligonucleotide
cagggcaucaguuuagggc

SEQ ID NO: 2826540 - RNA, 19 nt, Artificial Sequence
  Description of Artificial Sequence: Synthetic oligonucleotide
aaggcagcaggaccugagc

SEQ ID NO: 2826541 - RNA, 19 nt, Artificial Sequence
  Description of Artificial Sequence: Synthetic oligonucleotide
guugauaaauggcuuguug

SEQ ID NO: 2826542 - RNA, 19 nt, Artificial Sequence
  Description of Artificial Sequence: Synthetic oligonucleotide
ugaccgaggccccagauac

SEQ ID NO: 2826543 - RNA, 19 nt, Artificial Sequence
  Description of Artificial Sequence: Synthetic oligonucleotide
ucguguuuauucacaaagc

SEQ ID NO: 2826544 - RNA, 19 nt, Artificial Sequence
  Description of Artificial Sequence: Synthetic oligonucleotide
auggcggcgauacuccucc

SEQ ID NO: 2826545 - RNA, 19 nt, Artificial Sequence
  Description of Artificial Sequence: Synthetic oligonucleotide
uucuaugaccuucucgaug

SEQ ID NO: 2826546 - RNA, 19 nt, Artificial Sequence
  Description of Artificial Sequence: Synthetic oligonucleotide
gauaaauggcuuguugacc

SEQ ID NO: 2826547 - RNA, 19 nt, Artificial Sequence
  Description of Artificial Sequence: Synthetic oligonucleotide
agggcaucaguuuagggca

SEQ ID NO: 2826548 - RNA, 19 nt, Artificial Sequence
  Description of Artificial Sequence: Synthetic oligonucleotide
auggcuuguugaccgaggc

SEQ ID NO: 2826549 - RNA, 19 nt, Artificial Sequence
  Description of Artificial Sequence: Synthetic oligonucleotide
ucaugggcugcccaugcgg

SEQ ID NO: 2826550 - RNA, 19 nt, Artificial Sequence
  Description of Artificial Sequence: Synthetic oligonucleotide
acuguagugguugcggccc

SEQ ID NO: 2826551 - RNA, 19 nt, Artificial Sequence
  Description of Artificial Sequence: Synthetic oligonucleotide
uuccuuuucuguguguccg

SEQ ID NO: 2826552 - RNA, 19 nt, Artificial Sequence
  Description of Artificial Sequence: Synthetic oligonucleotide
acuacuguagugguugcgg

SEQ ID NO: 2826553 - RNA, 19 nt, Artificial Sequence
  Description of Artificial Sequence: Synthetic oligonucleotide
guuuagggcaugauggcgg

SEQ ID NO: 2826554 - RNA, 19 nt, Artificial Sequence
  Description of Artificial Sequence: Synthetic oligonucleotide
uucucuguuuccuuuucug

SEQ ID NO: 2826555 - RNA, 19 nt, Artificial Sequence
  Description of Artificial Sequence: Synthetic oligonucleotide
uucccuuccggcuugggug

SEQ ID NO: 2826556 - RNA, 19 nt, Artificial Sequence
  Description of Artificial Sequence: Synthetic oligonucleotide
ucucucucugcauugcuca

SEQ ID NO: 2826557 - RNA, 19 nt, Artificial Sequence
  Description of Artificial Sequence: Synthetic oligonucleotide
aaaacccucuccacuuccc

SEQ ID NO: 2826558 - RNA, 19 nt, Artificial Sequence
  Description of Artificial Sequence: Synthetic oligonucleotide
ucccuuuaaggacacccag

SEQ ID NO: 2826559 - RNA, 19 nt, Artificial Sequence
  Description of Artificial Sequence: Synthetic oligonucleotide
uguugcuaaguccaucaaa

SEQ ID NO: 2826560 - RNA, 19 nt, Artificial Sequence
  Description of Artificial Sequence: Synthetic oligonucleotide
aggacacccagaaaucucc

SEQ ID NO: 2826561 - RNA, 19 nt, Artificial Sequence
  Description of Artificial Sequence: Synthetic oligonucleotide
ucaaagcagucccuuuaag

SEQ ID NO: 2826562 - RNA, 19 nt, Artificial Sequence
  Description of Artificial Sequence: Synthetic oligonucleotide
cauuauugaugccuucgag

SEQ ID NO: 2826563 - RNA, 19 nt, Artificial Sequence
  Description of Artificial Sequence: Synthetic oligonucleotide
aaguugauaaauggcuugu

SEQ ID NO: 2826564 - RNA, 19 nt, Artificial Sequence
  Description of Artificial Sequence: Synthetic oligonucleotide
ugcccaugcgggcagagcc

SEQ ID NO: 2826565 - RNA, 19 nt, Artificial Sequence
  Description of Artificial Sequence: Synthetic oligonucleotide
agugguugcggccccugcc

SEQ ID NO: 2826566 - RNA, 19 nt, Artificial Sequence
  Description of Artificial Sequence: Synthetic oligonucleotide
auuaacuucucuguuuccu

SEQ ID NO: 2826567 - RNA, 19 nt, Artificial Sequence
  Description of Artificial Sequence: Synthetic oligonucleotide
auacuacuguagugguugc

SEQ ID NO: 2826568 - RNA, 19 nt, Artificial Sequence
  Description of Artificial Sequence: Synthetic oligonucleotide
uguccgacgccacuguuga

SEQ ID NO: 2826569 - RNA, 19 nt, Artificial Sequence
  Description of Artificial Sequence: Synthetic oligonucleotide
aguuuagggcaugauggcg

SEQ ID NO: 2826570 - RNA, 19 nt, Artificial Sequence
  Description of Artificial Sequence: Synthetic oligonucleotide
ucucgauggggucaucaug

SEQ ID NO: 2826571 - RNA, 19 nt, Artificial Sequence
  Description of Artificial Sequence: Synthetic oligonucleotide
gauuaacuucucuguuucc

SEQ ID NO: 2826572 - RNA, 19 nt, Artificial Sequence
  Description of Artificial Sequence: Synthetic oligonucleotide
gauuccauuauugaugccu

SEQ ID NO: 2826573 - RNA, 19 nt, Artificial Sequence
  Description of Artificial Sequence: Synthetic oligonucleotide
uguucguguuuauucacaa

SEQ ID NO: 2826574 - RNA, 19 nt, Artificial Sequence
  Description of Artificial Sequence: Synthetic oligonucleotide
ugacccguggauuaacuuc

SEQ ID NO: 2826575 - RNA, 19 nt, Artificial Sequence
  Description of Artificial Sequence: Synthetic oligonucleotide
aaggacacccagaaaucuc

SEQ ID NO: 2826576 - RNA, 19 nt, Artificial Sequence
  Description of Artificial Sequence: Synthetic oligonucleotide
uauugaugccuucgagggc

SEQ ID NO: 2826577 - RNA, 19 nt, Artificial Sequence
  Description of Artificial Sequence: Synthetic oligonucleotide
uaugaccuucucgaugggg

SEQ ID NO: 2826578 - RNA, 19 nt, Artificial Sequence
  Description of Artificial Sequence: Synthetic oligonucleotide
uguguucguguuuauucac

SEQ ID NO: 2826579 - RNA, 19 nt, Artificial Sequence
  Description of Artificial Sequence: Synthetic oligonucleotide
cauguugcuaaguccauca

SEQ ID NO: 2826580 - RNA, 19 nt, Artificial Sequence
  Description of Artificial Sequence: Synthetic oligonucleotide
gauacuccuccacagagcu

SEQ ID NO: 2826581 - RNA, 19 nt, Artificial Sequence
  Description of Artificial Sequence: Synthetic oligonucleotide
ccagauacuacuguagugg

SEQ ID NO: 2826582 - RNA, 19 nt, Artificial Sequence
  Description of Artificial Sequence: Synthetic oligonucleotide
guugcuaaguccaucaaaa

SEQ ID NO: 2826583 - RNA, 19 nt, Artificial Sequence
  Description of Artificial Sequence: Synthetic oligonucleotide
aaauggcuuguugaccgag

SEQ ID NO: 2826584 - RNA, 19 nt, Artificial Sequence
  Description of Artificial Sequence: Synthetic oligonucleotide
aggcagcaggaccugagcg

SEQ ID NO: 2826585 - RNA, 19 nt, Artificial Sequence
  Description of Artificial Sequence: Synthetic oligonucleotide
aauggcuuguugaccgagg

SEQ ID NO: 2826586 - RNA, 19 nt, Artificial Sequence
  Description of Artificial Sequence: Synthetic oligonucleotide
gaucuugccggccuggcuc

SEQ ID NO: 2826587 - RNA, 19 nt, Artificial Sequence
  Description of Artificial Sequence: Synthetic oligonucleotide
uuuagggcaugauggcggc

SEQ ID NO: 2826588 - RNA, 19 nt, Artificial Sequence
  Description of Artificial Sequence: Synthetic oligonucleotide
cuugaugagcgcccugucc

SEQ ID NO: 2826589 - RNA, 19 nt, Artificial Sequence
  Description of Artificial Sequence: Synthetic oligonucleotide
cucucugcauugcucagcc

SEQ ID NO: 2826590 - RNA, 19 nt, Artificial Sequence
  Description of Artificial Sequence: Synthetic oligonucleotide
ucugcauugcucagcccgc

SEQ ID NO: 2826591 - RNA, 19 nt, Artificial Sequence
  Description of Artificial Sequence: Synthetic oligonucleotide
uggauuaacuucucuguuu

SEQ ID NO: 2826592 - RNA, 19 nt, Artificial Sequence
  Description of Artificial Sequence: Synthetic oligonucleotide
uaaggacacccagaaaucu

SEQ ID NO: 2826593 - RNA, 19 nt, Artificial Sequence
  Description of Artificial Sequence: Synthetic oligonucleotide
augauggcggcgauacucc

SEQ ID NO: 2826594 - RNA, 19 nt, Artificial Sequence
  Description of Artificial Sequence: Synthetic oligonucleotide
uacuguagugguugcggcc

SEQ ID NO: 2826595 - RNA, 19 nt, Artificial Sequence
  Description of Artificial Sequence: Synthetic oligonucleotide
acacccagaaaucucccca

SEQ ID NO: 2826596 - RNA, 19 nt, Artificial Sequence
  Description of Artificial Sequence: Synthetic oligonucleotide
cuuuucuguguguccgacg

SEQ ID NO: 2826597 - RNA, 19 nt, Artificial Sequence
  Description of Artificial Sequence: Synthetic oligonucleotide
aucuugccggccuggcucc

SEQ ID NO: 2826598 - RNA, 19 nt, Artificial Sequence
  Description of Artificial Sequence: Synthetic oligonucleotide
ccacuguugaucuugccgg

SEQ ID NO: 2826599 - RNA, 19 nt, Artificial Sequence
  Description of Artificial Sequence: Synthetic oligonucleotide
uccccauguugcuaagucc

SEQ ID NO: 2826600 - RNA, 19 nt, Artificial Sequence
  Description of Artificial Sequence: Synthetic oligonucleotide
uccuccacagagcugggaa

SEQ ID NO: 2826601 - RNA, 19 nt, Artificial Sequence
  Description of Artificial Sequence: Synthetic oligonucleotide
caugauggcggcgauacuc

SEQ ID NO: 2826602 - RNA, 19 nt, Artificial Sequence
  Description of Artificial Sequence: Synthetic oligonucleotide
aaacccucuccacuucccu

SEQ ID NO: 2826603 - RNA, 19 nt, Artificial Sequence
  Description of Artificial Sequence: Synthetic oligonucleotide
caguuuagggcaugauggc

SEQ ID NO: 2826604 - RNA, 19 nt, Artificial Sequence
  Description of Artificial Sequence: Synthetic oligonucleotide
ggauuaacuucucuguuuc

SEQ ID NO: 2826605 - RNA, 19 nt, Artificial Sequence
  Description of Artificial Sequence: Synthetic oligonucleotide
uuaacuucucuguuuccuu

SEQ ID NO: 2826606 - RNA, 19 nt, Artificial Sequence
  Description of Artificial Sequence: Synthetic oligonucleotide
agcaggaccugagcgaaac

SEQ ID NO: 2826607 - RNA, 19 nt, Artificial Sequence
  Description of Artificial Sequence: Synthetic oligonucleotide
acuguugaucuugccggcc

SEQ ID NO: 2826608 - RNA, 19 nt, Artificial Sequence
  Description of Artificial Sequence: Synthetic oligonucleotide
cuacuguagugguugcggc

SEQ ID NO: 2826609 - RNA, 19 nt, Artificial Sequence
  Description of Artificial Sequence: Synthetic oligonucleotide
aggagcagcagaaggcagc

SEQ ID NO: 2826610 - RNA, 19 nt, Artificial Sequence
  Description of Artificial Sequence: Synthetic oligonucleotide
guacccgccuugaugagcg

SEQ ID NO: 2826611 - RNA, 19 nt, Artificial Sequence
  Description of Artificial Sequence: Synthetic oligonucleotide
gauggggucaucaugggcu

SEQ ID NO: 2826612 - RNA, 19 nt, Artificial Sequence
  Description of Artificial Sequence: Synthetic oligonucleotide
uuuauucacaaagcucaaa

SEQ ID NO: 2826613 - RNA, 19 nt, Artificial Sequence
  Description of Artificial Sequence: Synthetic oligonucleotide
caugggcugcccaugcggg

SEQ ID NO: 2826614 - RNA, 19 nt, Artificial Sequence
  Description of Artificial Sequence: Synthetic oligonucleotide
augagcgcccuguccagcg

SEQ ID NO: 2826615 - RNA, 19 nt, Artificial Sequence
  Description of Artificial Sequence: Synthetic oligonucleotide
gacacccagaaaucucccc

SEQ ID NO: 2826616 - RNA, 19 nt, Artificial Sequence
  Description of Artificial Sequence: Synthetic oligonucleotide
cagaaaucuccccagggca

SEQ ID NO: 2826617 - RNA, 19 nt, Artificial Sequence
  Description of Artificial Sequence: Synthetic oligonucleotide
ccuucuaugaccuucucga

SEQ ID NO: 2826618 - RNA, 19 nt, Artificial Sequence
  Description of Artificial Sequence: Synthetic oligonucleotide
gacgccacuguugaucuug

SEQ ID NO: 2826619 - RNA, 19 nt, Artificial Sequence
  Description of Artificial Sequence: Synthetic oligonucleotide
uguguguccgacgccacug

SEQ ID NO: 2826620 - RNA, 19 nt, Artificial Sequence
  Description of Artificial Sequence: Synthetic oligonucleotide
uguugaucuugccggccug

SEQ ID NO: 2826621 - RNA, 19 nt, Artificial Sequence
  Description of Artificial Sequence: Synthetic oligonucleotide
ugcauugcucagcccgcgg

SEQ ID NO: 2826622 - RNA, 19 nt, Artificial Sequence
  Description of Artificial Sequence: Synthetic oligonucleotide
uacuacuguagugguugcg

SEQ ID NO: 2826623 - RNA, 19 nt, Artificial Sequence
  Description of Artificial Sequence: Synthetic oligonucleotide
ggcuuguugaccgaggccc

SEQ ID NO: 2826624 - RNA, 19 nt, Artificial Sequence
  Description of Artificial Sequence: Synthetic oligonucleotide
ucgauggggucaucauggg

SEQ ID NO: 2826625 - RNA, 19 nt, Artificial Sequence
  Description of Artificial Sequence: Synthetic oligonucleotide
cuguguacccgccuugaug

SEQ ID NO: 2826626 - RNA, 19 nt, Artificial Sequence
  Description of Artificial Sequence: Synthetic oligonucleotide
guguguucguguuuauuca

SEQ ID NO: 2826627 - RNA, 19 nt, Artificial Sequence
  Description of Artificial Sequence: Synthetic oligonucleotide
uaaauggcuuguugaccga

SEQ ID NO: 2826628 - RNA, 19 nt, Artificial Sequence
  Description of Artificial Sequence: Synthetic oligonucleotide
aaagcucaaagcagucccu

SEQ ID NO: 2826629 - RNA, 19 nt, Artificial Sequence
  Description of Artificial Sequence: Synthetic oligonucleotide
uuucuguguguccgacgcc

SEQ ID NO: 2826630 - RNA, 19 nt, Artificial Sequence
  Description of Artificial Sequence: Synthetic oligonucleotide
uggcuuguugaccgaggcc

SEQ ID NO: 2826631 - RNA, 19 nt, Artificial Sequence
  Description of Artificial Sequence: Synthetic oligonucleotide
acccagaaaucuccccagg

SEQ ID NO: 2826632 - RNA, 19 nt, Artificial Sequence
  Description of Artificial Sequence: Synthetic oligonucleotide
ugaugagcgcccuguccag

SEQ ID NO: 2826633 - RNA, 19 nt, Artificial Sequence
  Description of Artificial Sequence: Synthetic oligonucleotide
ucuccacuucccuuccggc

SEQ ID NO: 2826634 - RNA, 19 nt, Artificial Sequence
  Description of Artificial Sequence: Synthetic oligonucleotide
gaacccuucuaugaccuuc

SEQ ID NO: 2826635 - RNA, 19 nt, Artificial Sequence
  Description of Artificial Sequence: Synthetic oligonucleotide
aucaugggcugcccaugcg

SEQ ID NO: 2826636 - RNA, 19 nt, Artificial Sequence
  Description of Artificial Sequence: Synthetic oligonucleotide
uccacuucccuuccggcuu

SEQ ID NO: 2826637 - RNA, 19 nt, Artificial Sequence
  Description of Artificial Sequence: Synthetic oligonucleotide
cacaaagcucaaagcaguc

SEQ ID NO: 2826638 - RNA, 19 nt, Artificial Sequence
  Description of Artificial Sequence: Synthetic oligonucleotide
caucaugggcugcccaugc

SEQ ID NO: 2826639 - RNA, 19 nt, Artificial Sequence
  Description of Artificial Sequence: Synthetic oligonucleotide
augaccuucucgauggggu

SEQ ID NO: 2826640 - RNA, 19 nt, Artificial Sequence
  Description of Artificial Sequence: Synthetic oligonucleotide
gcgauacuccuccacagag

SEQ ID NO: 2826641 - RNA, 19 nt, Artificial Sequence
  Description of Artificial Sequence: Synthetic oligonucleotide
uguccagcggcgugguuga

SEQ ID NO: 2826642 - RNA, 19 nt, Artificial Sequence
  Description of Artificial Sequence: Synthetic oligonucleotide
cacccagaaaucuccccag

SEQ ID NO: 2826643 - RNA, 19 nt, Artificial Sequence
  Description of Artificial Sequence: Synthetic oligonucleotide
caggaccugagcgaaacug

SEQ ID NO: 2826644 - RNA, 19 nt, Artificial Sequence
  Description of Artificial Sequence: Synthetic oligonucleotide
uagggcaugauggcggcga

SEQ ID NO: 2826645 - RNA, 19 nt, Artificial Sequence
  Description of Artificial Sequence: Synthetic oligonucleotide
uguacccgccuugaugagc

SEQ ID NO: 2826646 - RNA, 19 nt, Artificial Sequence
  Description of Artificial Sequence: Synthetic oligonucleotide
gcugaacccuucuaugacc

SEQ ID NO: 2826647 - RNA, 19 nt, Artificial Sequence
  Description of Artificial Sequence: Synthetic oligonucleotide
uguuuccuuuucugugugu

SEQ ID NO: 2826648 - RNA, 19 nt, Artificial Sequence
  Description of Artificial Sequence: Synthetic oligonucleotide
augccuucgagggccuugc

SEQ ID NO: 2826649 - RNA, 19 nt, Artificial Sequence
  Description of Artificial Sequence: Synthetic oligonucleotide
ugauuccauuauugaugcc

SEQ ID NO: 2826650 - RNA, 19 nt, Artificial Sequence
  Description of Artificial Sequence: Synthetic oligonucleotide
uccggcuugggugauucca

SEQ ID NO: 2826651 - RNA, 19 nt, Artificial Sequence
  Description of Artificial Sequence: Synthetic oligonucleotide
uccgacgccacuguugauc

SEQ ID NO: 2826652 - RNA, 19 nt, Artificial Sequence
  Description of Artificial Sequence: Synthetic oligonucleotide
guugaucuugccggccugg

SEQ ID NO: 2826653 - RNA, 19 nt, Artificial Sequence
  Description of Artificial Sequence: Synthetic oligonucleotide
ugaucuugccggccuggcu

SEQ ID NO: 2826654 - RNA, 19 nt, Artificial Sequence
  Description of Artificial Sequence: Synthetic oligonucleotide
aacccuucuaugaccuucu

SEQ ID NO: 2826655 - RNA, 19 nt, Artificial Sequence
  Description of Artificial Sequence: Synthetic oligonucleotide
cacuguugaucuugccggc

SEQ ID NO: 2826656 - RNA, 19 nt, Artificial Sequence
  Description of Artificial Sequence: Synthetic oligonucleotide
cacagagcugggaaguuga

SEQ ID NO: 2826657 - RNA, 19 nt, Artificial Sequence
  Description of Artificial Sequence: Synthetic oligonucleotide
ucaucaugggcugcccaug

SEQ ID NO: 2826658 - RNA, 19 nt, Artificial Sequence
  Description of Artificial Sequence: Synthetic oligonucleotide
accucucucucugcauugc

SEQ ID NO: 2826659 - RNA, 19 nt, Artificial Sequence
  Description of Artificial Sequence: Synthetic oligonucleotide
ccagaaaucuccccagggc

SEQ ID NO: 2826660 - RNA, 19 nt, Artificial Sequence
  Description of Artificial Sequence: Synthetic oligonucleotide
agcagucccuuuaaggaca

SEQ ID NO: 2826661 - RNA, 19 nt, Artificial Sequence
  Description of Artificial Sequence: Synthetic oligonucleotide
aaaucuccccagggcauca

SEQ ID NO: 2826662 - RNA, 19 nt, Artificial Sequence
  Description of Artificial Sequence: Synthetic oligonucleotide
auggggucaucaugggcug

SEQ ID NO: 2826663 - RNA, 19 nt, Artificial Sequence
  Description of Artificial Sequence: Synthetic oligonucleotide
cucucucucugcauugcuc

SEQ ID NO: 2826664 - RNA, 19 nt, Artificial Sequence
  Description of Artificial Sequence: Synthetic oligonucleotide
ugagcgcccuguccagcgg

SEQ ID NO: 2826665 - RNA, 19 nt, Artificial Sequence
  Description of Artificial Sequence: Synthetic oligonucleotide
cuguuuccuuuucugugug

SEQ ID NO: 2826666 - RNA, 19 nt, Artificial Sequence
  Description of Artificial Sequence: Synthetic oligonucleotide
cuguccagcggcgugguug

SEQ ID NO: 2826667 - RNA, 19 nt, Artificial Sequence
  Description of Artificial Sequence: Synthetic oligonucleotide
agcugggaaguugauaaau

SEQ ID NO: 2826668 - RNA, 19 nt, Artificial Sequence
  Description of Artificial Sequence: Synthetic oligonucleotide
uugaccgaggccccagaua

SEQ ID NO: 2826669 - RNA, 19 nt, Artificial Sequence
  Description of Artificial Sequence: Synthetic oligonucleotide
uccccagggcaucaguuua

SEQ ID NO: 2826670 - RNA, 19 nt, Artificial Sequence
  Description of Artificial Sequence: Synthetic oligonucleotide
ucagcccgcggcugaaccc

SEQ ID NO: 2826671 - RNA, 19 nt, Artificial Sequence
  Description of Artificial Sequence: Synthetic oligonucleotide
uccuuuucuguguguccga

SEQ ID NO: 2826672 - RNA, 19 nt, Artificial Sequence
  Description of Artificial Sequence: Synthetic oligonucleotide
ugccccuccgugcuggccu

SEQ ID NO: 2826673 - RNA, 19 nt, Artificial Sequence
  Description of Artificial Sequence: Synthetic oligonucleotide
ugaccuucucgaugggguc

SEQ ID NO: 2826674 - RNA, 19 nt, Artificial Sequence
  Description of Artificial Sequence: Synthetic oligonucleotide
ucccuuccggcuuggguga

SEQ ID NO: 2826675 - RNA, 19 nt, Artificial Sequence
  Description of Artificial Sequence: Synthetic oligonucleotide
uuccauuauugaugccuuc

SEQ ID NO: 2826676 - RNA, 19 nt, Artificial Sequence
  Description of Artificial Sequence: Synthetic oligonucleotide
aacccucuccacuucccuu

SEQ ID NO: 2826677 - RNA, 19 nt, Artificial Sequence
  Description of Artificial Sequence: Synthetic oligonucleotide
gugguugcggccccugccc

SEQ ID NO: 2826678 - RNA, 19 nt, Artificial Sequence
  Description of Artificial Sequence: Synthetic oligonucleotide
ucuccccagggcaucaguu

SEQ ID NO: 2826679 - RNA, 19 nt, Artificial Sequence
  Description of Artificial Sequence: Synthetic oligonucleotide
caggagcagcagaaggcag

SEQ ID NO: 2826680 - RNA, 19 nt, Artificial Sequence
  Description of Artificial Sequence: Synthetic oligonucleotide
acccgccuugaugagcgcc

SEQ ID NO: 2826681 - RNA, 19 nt, Artificial Sequence
  Description of Artificial Sequence: Synthetic oligonucleotide
cucagcccgcggcugaacc

SEQ ID NO: 2826682 - RNA, 19 nt, Artificial Sequence
  Description of Artificial Sequence: Synthetic oligonucleotide
uguugaccgaggccccaga

SEQ ID NO: 2826683 - RNA, 19 nt, Artificial Sequence
  Description of Artificial Sequence: Synthetic oligonucleotide
ucuguguguccgacgccac

SEQ ID NO: 2826684 - RNA, 19 nt, Artificial Sequence
  Description of Artificial Sequence: Synthetic oligonucleotide
ggcaugauggcggcgauac

SEQ ID NO: 2826685 - RNA, 19 nt, Artificial Sequence
  Description of Artificial Sequence: Synthetic oligonucleotide
uugacccguggauuaacuu

SEQ ID NO: 2826686 - RNA, 19 nt, Artificial Sequence
  Description of Artificial Sequence: Synthetic oligonucleotide
uuagggcaugauggcggcg

SEQ ID NO: 2826687 - RNA, 19 nt, Artificial Sequence
  Description of Artificial Sequence: Synthetic oligonucleotide
cucucucugcauugcucag

SEQ ID NO: 2826688 - RNA, 19 nt, Artificial Sequence
  Description of Artificial Sequence: Synthetic oligonucleotide
gaaaucuccccagggcauc

SEQ ID NO: 2826689 - RNA, 19 nt, Artificial Sequence
  Description of Artificial Sequence: Synthetic oligonucleotide
cuaugaccuucucgauggg

SEQ ID NO: 2826690 - RNA, 19 nt, Artificial Sequence
  Description of Artificial Sequence: Synthetic oligonucleotide
auuccauuauugaugccuu

SEQ ID NO: 2826691 - RNA, 19 nt, Artificial Sequence
  Description of Artificial Sequence: Synthetic oligonucleotide
ccguggauuaacuucucug

SEQ ID NO: 2826692 - RNA, 19 nt, Artificial Sequence
  Description of Artificial Sequence: Synthetic oligonucleotide
aagcucaaagcagucccuu

SEQ ID NO: 2826693 - RNA, 19 nt, Artificial Sequence
  Description of Artificial Sequence: Synthetic oligonucleotide
uagugguugcggccccugc

SEQ ID NO: 2826694 - RNA, 19 nt, Artificial Sequence
  Description of Artificial Sequence: Synthetic oligonucleotide
uuguugaccgaggccccag

SEQ ID NO: 2826695 - RNA, 19 nt, Artificial Sequence
  Description of Artificial Sequence: Synthetic oligonucleotide
gcugggaaguugauaaaug

SEQ ID NO: 2826696 - RNA, 19 nt, Artificial Sequence
  Description of Artificial Sequence: Synthetic oligonucleotide
uggcuccccauguugcuaa

SEQ ID NO: 2826697 - RNA, 19 nt, Artificial Sequence
  Description of Artificial Sequence: Synthetic oligonucleotide
agaaaucuccccagggcau

SEQ ID NO: 2826698 - RNA, 19 nt, Artificial Sequence
  Description of Artificial Sequence: Synthetic oligonucleotide
uccgugcuggccuguguac

SEQ ID NO: 2826699 - RNA, 19 nt, Artificial Sequence
  Description of Artificial Sequence: Synthetic oligonucleotide
ggcugaacccuucuaugac

SEQ ID NO: 2826700 - RNA, 19 nt, Artificial Sequence
  Description of Artificial Sequence: Synthetic oligonucleotide
caccucucucucugcauug

SEQ ID NO: 2826701 - RNA, 19 nt, Artificial Sequence
  Description of Artificial Sequence: Synthetic oligonucleotide
auguugcuaaguccaucaa

SEQ ID NO: 2826702 - RNA, 19 nt, Artificial Sequence
  Description of Artificial Sequence: Synthetic oligonucleotide
ucgagggccuugcccaccu

SEQ ID NO: 2826703 - RNA, 19 nt, Artificial Sequence
  Description of Artificial Sequence: Synthetic oligonucleotide
cccuucuaugaccuucucg

SEQ ID NO: 2826704 - RNA, 19 nt, Artificial Sequence
  Description of Artificial Sequence: Synthetic oligonucleotide
ugguugcggccccugcccc

SEQ ID NO: 2826705 - RNA, 19 nt, Artificial Sequence
  Description of Artificial Sequence: Synthetic oligonucleotide
cucaaagcagucccuuuaa

SEQ ID NO: 2826706 - RNA, 19 nt, Artificial Sequence
  Description of Artificial Sequence: Synthetic oligonucleotide
aaucuccccagggcaucag

SEQ ID NO: 2826707 - RNA, 19 nt, Artificial Sequence
  Description of Artificial Sequence: Synthetic oligonucleotide
ugauggcggcgauacuccu

SEQ ID NO: 2826708 - RNA, 19 nt, Artificial Sequence
  Description of Artificial Sequence: Synthetic oligonucleotide
gaggccccagauacuacug

SEQ ID NO: 2826709 - RNA, 19 nt, Artificial Sequence
  Description of Artificial Sequence: Synthetic oligonucleotide
ccagcggcgugguugaccc

SEQ ID NO: 2826710 - RNA, 19 nt, Artificial Sequence
  Description of Artificial Sequence: Synthetic oligonucleotide
cugaacccuucuaugaccu

SEQ ID NO: 2826711 - RNA, 19 nt, Artificial Sequence
  Description of Artificial Sequence: Synthetic oligonucleotide
gaugagcgcccuguccagc

SEQ ID NO: 2826712 - RNA, 19 nt, Artificial Sequence
  Description of Artificial Sequence: Synthetic oligonucleotide
gugguugacccguggauua

SEQ ID NO: 2826713 - RNA, 19 nt, Artificial Sequence
  Description of Artificial Sequence: Synthetic oligonucleotide
cccagauacuacuguagug

SEQ ID NO: 2826714 - RNA, 19 nt, Artificial Sequence
  Description of Artificial Sequence: Synthetic oligonucleotide
uccagcggcgugguugacc

SEQ ID NO: 2826715 - RNA, 19 nt, Artificial Sequence
  Description of Artificial Sequence: Synthetic oligonucleotide
guguucguguuuauucaca

SEQ ID NO: 2826716 - RNA, 19 nt, Artificial Sequence
  Description of Artificial Sequence: Synthetic oligonucleotide
guucguguuuauucacaaa

SEQ ID NO: 2826717 - RNA, 19 nt, Artificial Sequence
  Description of Artificial Sequence: Synthetic oligonucleotide
gacccguggauuaacuucu

SEQ ID NO: 2826718 - RNA, 19 nt, Artificial Sequence
  Description of Artificial Sequence: Synthetic oligonucleotide
ucucugcauugcucagccc

SEQ ID NO: 2826719 - RNA, 19 nt, Artificial Sequence
  Description of Artificial Sequence: Synthetic oligonucleotide
aguugauaaauggcuuguu

SEQ ID NO: 2826720 - RNA, 19 nt, Artificial Sequence
  Description of Artificial Sequence: Synthetic oligonucleotide
auugcucagcccgcggcug

SEQ ID NO: 2826721 - RNA, 19 nt, Artificial Sequence
  Description of Artificial Sequence: Synthetic oligonucleotide
aggccccagauacuacugu

SEQ ID NO: 2826722 - RNA, 19 nt, Artificial Sequence
  Description of Artificial Sequence: Synthetic oligonucleotide
acccuucuaugaccuucuc

SEQ ID NO: 2826723 - RNA, 19 nt, Artificial Sequence
  Description of Artificial Sequence: Synthetic oligonucleotide
ccuuuaaggacacccagaa

SEQ ID NO: 2826724 - RNA, 19 nt, Artificial Sequence
  Description of Artificial Sequence: Synthetic oligonucleotide
acgccacuguugaucuugc

SEQ ID NO: 2826725 - RNA, 19 nt, Artificial Sequence
  Description of Artificial Sequence: Synthetic oligonucleotide
ugggcugcccaugcgggca

SEQ ID NO: 2826726 - RNA, 19 nt, Artificial Sequence
  Description of Artificial Sequence: Synthetic oligonucleotide
guuuauucacaaagcucaa

SEQ ID NO: 2826727 - RNA, 19 nt, Artificial Sequence
  Description of Artificial Sequence: Synthetic oligonucleotide
gagcgcccuguccagcggc

SEQ ID NO: 2826728 - RNA, 19 nt, Artificial Sequence
  Description of Artificial Sequence: Synthetic oligonucleotide
agcucaaagcagucccuuu

SEQ ID NO: 2826729 - RNA, 19 nt, Artificial Sequence
  Description of Artificial Sequence: Synthetic oligonucleotide
uugaugccuucgagggccu

SEQ ID NO: 2826730 - RNA, 19 nt, Artificial Sequence
  Description of Artificial Sequence: Synthetic oligonucleotide
cuuccggcuugggugauuc

SEQ ID NO: 2826731 - RNA, 19 nt, Artificial Sequence
  Description of Artificial Sequence: Synthetic oligonucleotide
cuuuaaggacacccagaaa

SEQ ID NO: 2826732 - RNA, 19 nt, Artificial Sequence
  Description of Artificial Sequence: Synthetic oligonucleotide
guguccgacgccacuguug

SEQ ID NO: 2826733 - RNA, 19 nt, Artificial Sequence
  Description of Artificial Sequence: Synthetic oligonucleotide
gaccuucucgaugggguca

SEQ ID NO: 2826734 - RNA, 19 nt, Artificial Sequence
  Description of Artificial Sequence: Synthetic oligonucleotide
uguguccgacgccacuguu

SEQ ID NO: 2826735 - RNA, 19 nt, Artificial Sequence
  Description of Artificial Sequence: Synthetic oligonucleotide
cagauacuacuguaguggu

SEQ ID NO: 2826736 - RNA, 19 nt, Artificial Sequence
  Description of Artificial Sequence: Synthetic oligonucleotide
cuucucgauggggucauca

SEQ ID NO: 2826737 - RNA, 19 nt, Artificial Sequence
  Description of Artificial Sequence: Synthetic oligonucleotide
cuguagugguugcggcccc

SEQ ID NO: 2826738 - RNA, 19 nt, Artificial Sequence
  Description of Artificial Sequence: Synthetic oligonucleotide
ccccauguugcuaagucca

SEQ ID NO: 2826739 - RNA, 19 nt, Artificial Sequence
  Description of Artificial Sequence: Synthetic oligonucleotide
gcggcugaacccuucuaug

SEQ ID NO: 2826740 - RNA, 19 nt, Artificial Sequence
  Description of Artificial Sequence: Synthetic oligonucleotide
cugcauugcucagcccgcg

SEQ ID NO: 2826741 - RNA, 19 nt, Artificial Sequence
  Description of Artificial Sequence: Synthetic oligonucleotide
ccuucgagggccuugccca

SEQ ID NO: 2826742 - RNA, 19 nt, Artificial Sequence
  Description of Artificial Sequence: Synthetic oligonucleotide
agcggcgugguugacccgu

SEQ ID NO: 2826743 - RNA, 19 nt, Artificial Sequence
  Description of Artificial Sequence: Synthetic oligonucleotide
gauggcggcgauacuccuc

SEQ ID NO: 2826744 - RNA, 19 nt, Artificial Sequence
  Description of Artificial Sequence: Synthetic oligonucleotide
cuucgagggccuugcccac

SEQ ID NO: 2826745 - RNA, 19 nt, Artificial Sequence
  Description of Artificial Sequence: Synthetic oligonucleotide
uggccuguguacccgccuu

SEQ ID NO: 2826746 - RNA, 19 nt, Artificial Sequence
  Description of Artificial Sequence: Synthetic oligonucleotide
ggcagcaggaccugagcga

SEQ ID NO: 2826747 - RNA, 19 nt, Artificial Sequence
  Description of Artificial Sequence: Synthetic oligonucleotide
gucccuuuaaggacaccca

SEQ ID NO: 2826748 - RNA, 19 nt, Artificial Sequence
  Description of Artificial Sequence: Synthetic oligonucleotide
guguacccgccuugaugag

SEQ ID NO: 2826749 - RNA, 19 nt, Artificial Sequence
  Description of Artificial Sequence: Synthetic oligonucleotide
gagcugggaaguugauaaa

SEQ ID NO: 2826750 - RNA, 19 nt, Artificial Sequence
  Description of Artificial Sequence: Synthetic oligonucleotide
agauacuacuguagugguu

SEQ ID NO: 2826751 - RNA, 19 nt, Artificial Sequence
  Description of Artificial Sequence: Synthetic oligonucleotide
uucgagggccuugcccacc

SEQ ID NO: 2826752 - RNA, 19 nt, Artificial Sequence
  Description of Artificial Sequence: Synthetic oligonucleotide
cagcagaaggcagcaggac

SEQ ID NO: 2826753 - RNA, 19 nt, Artificial Sequence
  Description of Artificial Sequence: Synthetic oligonucleotide
gccuucgagggccuugccc

SEQ ID NO: 2826754 - RNA, 19 nt, Artificial Sequence
  Description of Artificial Sequence: Synthetic oligonucleotide
uguagugguugcggccccu

SEQ ID NO: 2826755 - RNA, 19 nt, Artificial Sequence
  Description of Artificial Sequence: Synthetic oligonucleotide
accgaggccccagauacua

SEQ ID NO: 2826756 - RNA, 19 nt, Artificial Sequence
  Description of Artificial Sequence: Synthetic oligonucleotide
guggauuaacuucucuguu

SEQ ID NO: 2826757 - RNA, 19 nt, Artificial Sequence
  Description of Artificial Sequence: Synthetic oligonucleotide
ccagggcaucaguuuaggg

SEQ ID NO: 2826758 - RNA, 19 nt, Artificial Sequence
  Description of Artificial Sequence: Synthetic oligonucleotide
ugaacccuucuaugaccuu

SEQ ID NO: 2826759 - RNA, 19 nt, Artificial Sequence
  Description of Artificial Sequence: Synthetic oligonucleotide
uugccggccuggcucccca

SEQ ID NO: 2826760 - RNA, 19 nt, Artificial Sequence
  Description of Artificial Sequence: Synthetic oligonucleotide
ccuccacagagcugggaag

SEQ ID NO: 2826761 - RNA, 19 nt, Artificial Sequence
  Description of Artificial Sequence: Synthetic oligonucleotide
gugcuggccuguguacccg

SEQ ID NO: 2826762 - RNA, 19 nt, Artificial Sequence
  Description of Artificial Sequence: Synthetic oligonucleotide
ugcggccccugccccuccg

SEQ ID NO: 2826763 - RNA, 19 nt, Artificial Sequence
  Description of Artificial Sequence: Synthetic oligonucleotide
gcucaaagcagucccuuua

SEQ ID NO: 2826764 - RNA, 19 nt, Artificial Sequence
  Description of Artificial Sequence: Synthetic oligonucleotide
ugccuucgagggccuugcc

SEQ ID NO: 2826765 - RNA, 19 nt, Artificial Sequence
  Description of Artificial Sequence: Synthetic oligonucleotide
ugguugacccguggauuaa

SEQ ID NO: 2826766 - RNA, 19 nt, Artificial Sequence
  Description of Artificial Sequence: Synthetic oligonucleotide
gucaucaugggcugcccau

SEQ ID NO: 2826767 - RNA, 19 nt, Artificial Sequence
  Description of Artificial Sequence: Synthetic oligonucleotide
uuccggcuugggugauucc

SEQ ID NO: 2826768 - RNA, 19 nt, Artificial Sequence
  Description of Artificial Sequence: Synthetic oligonucleotide
gggugauuccauuauugau

SEQ ID NO: 2826769 - RNA, 19 nt, Artificial Sequence
  Description of Artificial Sequence: Synthetic oligonucleotide
ccauuauugaugccuucga

SEQ ID NO: 2826770 - RNA, 19 nt, Artificial Sequence
  Description of Artificial Sequence: Synthetic oligonucleotide
ggcgauacuccuccacaga

SEQ ID NO: 2826771 - RNA, 19 nt, Artificial Sequence
  Description of Artificial Sequence: Synthetic oligonucleotide
guagugguugcggccccug

SEQ ID NO: 2826772 - RNA, 19 nt, Artificial Sequence
  Description of Artificial Sequence: Synthetic oligonucleotide
uggggucaucaugggcugc

SEQ ID NO: 2826773 - RNA, 19 nt, Artificial Sequence
  Description of Artificial Sequence: Synthetic oligonucleotide
cccgccuugaugagcgccc

SEQ ID NO: 2826774 - RNA, 19 nt, Artificial Sequence
  Description of Artificial Sequence: Synthetic oligonucleotide
ggggucaucaugggcugcc

SEQ ID NO: 2826775 - RNA, 19 nt, Artificial Sequence
  Description of Artificial Sequence: Synthetic oligonucleotide
ggagcagcagaaggcagca

SEQ ID NO: 2826776 - RNA, 19 nt, Artificial Sequence
  Description of Artificial Sequence: Synthetic oligonucleotide
acuucccuuccggcuuggg

SEQ ID NO: 2826777 - RNA, 19 nt, Artificial Sequence
  Description of Artificial Sequence: Synthetic oligonucleotide
ggacacccagaaaucuccc

SEQ ID NO: 2826778 - RNA, 19 nt, Artificial Sequence
  Description of Artificial Sequence: Synthetic oligonucleotide
cuguugaucuugccggccu

SEQ ID NO: 2826779 - RNA, 19 nt, Artificial Sequence
  Description of Artificial Sequence: Synthetic oligonucleotide
ggucaucaugggcugccca

SEQ ID NO: 2826780 - RNA, 19 nt, Artificial Sequence
  Description of Artificial Sequence: Synthetic oligonucleotide
cccuuuaaggacacccaga

SEQ ID NO: 2826781 - RNA, 19 nt, Artificial Sequence
  Description of Artificial Sequence: Synthetic oligonucleotide
ggaaguugauaaauggcuu

SEQ ID NO: 2826782 - RNA, 19 nt, Artificial Sequence
  Description of Artificial Sequence: Synthetic oligonucleotide
gcagaaggcagcaggaccu

SEQ ID NO: 2826783 - RNA, 19 nt, Artificial Sequence
  Description of Artificial Sequence: Synthetic oligonucleotide
agcgcccuguccagcggcg

SEQ ID NO: 2826784 - RNA, 19 nt, Artificial Sequence
  Description of Artificial Sequence: Synthetic oligonucleotide
acccguggauuaacuucuc

SEQ ID NO: 2826785 - RNA, 19 nt, Artificial Sequence
  Description of Artificial Sequence: Synthetic oligonucleotide
guugacccguggauuaacu

SEQ ID NO: 2826786 - RNA, 19 nt, Artificial Sequence
  Description of Artificial Sequence: Synthetic oligonucleotide
accuucucgauggggucau

SEQ ID NO: 2826787 - RNA, 19 nt, Artificial Sequence
  Description of Artificial Sequence: Synthetic oligonucleotide
agggcaugauggcggcgau

SEQ ID NO: 2826788 - RNA, 19 nt, Artificial Sequence
  Description of Artificial Sequence: Synthetic oligonucleotide
cuucuaugaccuucucgau

SEQ ID NO: 2826789 - RNA, 19 nt, Artificial Sequence
  Description of Artificial Sequence: Synthetic oligonucleotide
cguggauuaacuucucugu

SEQ ID NO: 2826790 - RNA, 19 nt, Artificial Sequence
  Description of Artificial Sequence: Synthetic oligonucleotide
cgugcuggccuguguaccc

SEQ ID NO: 2826791 - RNA, 19 nt, Artificial Sequence
  Description of Artificial Sequence: Synthetic oligonucleotide
gguugacccguggauuaac

SEQ ID NO: 2826792 - RNA, 19 nt, Artificial Sequence
  Description of Artificial Sequence: Synthetic oligonucleotide
ggcuugggugauuccauua

SEQ ID NO: 2826793 - RNA, 19 nt, Artificial Sequence
  Description of Artificial Sequence: Synthetic oligonucleotide
cuuguugaccgaggcccca

SEQ ID NO: 2826794 - RNA, 19 nt, Artificial Sequence
  Description of Artificial Sequence: Synthetic oligonucleotide
ggcgugguugacccgugga

SEQ ID NO: 2826795 - RNA, 19 nt, Artificial Sequence
  Description of Artificial Sequence: Synthetic oligonucleotide
cuugggugauuccauuauu

SEQ ID NO: 2826796 - RNA, 19 nt, Artificial Sequence
  Description of Artificial Sequence: Synthetic oligonucleotide
cauugcucagcccgcggcu

SEQ ID NO: 2826797 - RNA, 19 nt, Artificial Sequence
  Description of Artificial Sequence: Synthetic oligonucleotide
uacccgccuugaugagcgc

SEQ ID NO: 2826798 - RNA, 19 nt, Artificial Sequence
  Description of Artificial Sequence: Synthetic oligonucleotide
gcuuguugaccgaggcccc

SEQ ID NO: 2826799 - RNA, 19 nt, Artificial Sequence
  Description of Artificial Sequence: Synthetic oligonucleotide
ccuuuucuguguguccgac

SEQ ID NO: 2826800 - RNA, 19 nt, Artificial Sequence
  Description of Artificial Sequence: Synthetic oligonucleotide
cuucccuuccggcuugggu

SEQ ID NO: 2826801 - RNA, 19 nt, Artificial Sequence
  Description of Artificial Sequence: Synthetic oligonucleotide
cugcccaugcgggcagagc

SEQ ID NO: 2826802 - RNA, 19 nt, Artificial Sequence
  Description of Artificial Sequence: Synthetic oligonucleotide
cuccgugcuggccugugua

SEQ ID NO: 2826803 - RNA, 19 nt, Artificial Sequence
  Description of Artificial Sequence: Synthetic oligonucleotide
ggccuguguacccgccuug

SEQ ID NO: 2826804 - RNA, 19 nt, Artificial Sequence
  Description of Artificial Sequence: Synthetic oligonucleotide
cgauggggucaucaugggc

SEQ ID NO: 2826805 - RNA, 19 nt, Artificial Sequence
  Description of Artificial Sequence: Synthetic oligonucleotide
ggcaucaguuuagggcaug

SEQ ID NO: 2826806 - RNA, 19 nt, Artificial Sequence
  Description of Artificial Sequence: Synthetic oligonucleotide
ccccagggcaucaguuuag

SEQ ID NO: 2826807 - RNA, 19 nt, Artificial Sequence
  Description of Artificial Sequence: Synthetic oligonucleotide
gcuugggugauuccauuau

SEQ ID NO: 2826808 - RNA, 19 nt, Artificial Sequence
  Description of Artificial Sequence: Synthetic oligonucleotide
cuugccggccuggcucccc

SEQ ID NO: 2826809 - RNA, 19 nt, Artificial Sequence
  Description of Artificial Sequence: Synthetic oligonucleotide
cccagggcaucaguuuagg

SEQ ID NO: 2826810 - RNA, 19 nt, Artificial Sequence
  Description of Artificial Sequence: Synthetic oligonucleotide
acagagcugggaaguugau

SEQ ID NO: 2826811 - RNA, 19 nt, Artificial Sequence
  Description of Artificial Sequence: Synthetic oligonucleotide
guugaccgaggccccagau

SEQ ID NO: 2826812 - RNA, 19 nt, Artificial Sequence
  Description of Artificial Sequence: Synthetic oligonucleotide
cggcgauacuccuccacag

SEQ ID NO: 2826813 - RNA, 19 nt, Artificial Sequence
  Description of Artificial Sequence: Synthetic oligonucleotide
gcaucaguuuagggcauga

SEQ ID NO: 2826814 - RNA, 19 nt, Artificial Sequence
  Description of Artificial Sequence: Synthetic oligonucleotide
ucuugccggccuggcuccc

SEQ ID NO: 2826815 - RNA, 19 nt, Artificial Sequence
  Description of Artificial Sequence: Synthetic oligonucleotide
cagagcugggaaguugaua

SEQ ID NO: 2826816 - RNA, 19 nt, Artificial Sequence
  Description of Artificial Sequence: Synthetic oligonucleotide
gcagcaggaccugagcgaa

SEQ ID NO: 2826817 - RNA, 19 nt, Artificial Sequence
  Description of Artificial Sequence: Synthetic oligonucleotide
ccauguugcuaaguccauc

SEQ ID NO: 2826818 - RNA, 19 nt, Artificial Sequence
  Description of Artificial Sequence: Synthetic oligonucleotide
cacuucccuuccggcuugg

SEQ ID NO: 2826819 - RNA, 19 nt, Artificial Sequence
  Description of Artificial Sequence: Synthetic oligonucleotide
gcccuguccagcggcgugg

SEQ ID NO: 2826820 - RNA, 19 nt, Artificial Sequence
  Description of Artificial Sequence: Synthetic oligonucleotide
cuugcccaccucucucucu

SEQ ID NO: 2826821 - RNA, 19 nt, Artificial Sequence
  Description of Artificial Sequence: Synthetic oligonucleotide
ugcucagcccgcggcugaa

SEQ ID NO: 2826822 - RNA, 19 nt, Artificial Sequence
  Description of Artificial Sequence: Synthetic oligonucleotide
cagucccuuuaaggacacc

SEQ ID NO: 2826823 - RNA, 19 nt, Artificial Sequence
  Description of Artificial Sequence: Synthetic oligonucleotide
guugcggccccugccccuc

SEQ ID NO: 2826824 - RNA, 19 nt, Artificial Sequence
  Description of Artificial Sequence: Synthetic oligonucleotide
ccuugaugagcgcccuguc

SEQ ID NO: 2826825 - RNA, 19 nt, Artificial Sequence
  Description of Artificial Sequence: Synthetic oligonucleotide
cagcggcgugguugacccg

SEQ ID NO: 2826826 - RNA, 19 nt, Artificial Sequence
  Description of Artificial Sequence: Synthetic oligonucleotide
uggcggcgauacuccucca

SEQ ID NO: 2826827 - RNA, 19 nt, Artificial Sequence
  Description of Artificial Sequence: Synthetic oligonucleotide
gcagucccuuuaaggacac

SEQ ID NO: 2826828 - RNA, 19 nt, Artificial Sequence
  Description of Artificial Sequence: Synthetic oligonucleotide
guguguccgacgccacugu

SEQ ID NO: 2826829 - RNA, 19 nt, Artificial Sequence
  Description of Artificial Sequence: Synthetic oligonucleotide
cccucuccacuucccuucc

SEQ ID NO: 2826830 - RNA, 19 nt, Artificial Sequence
  Description of Artificial Sequence: Synthetic oligonucleotide
ccgugcuggccuguguacc

SEQ ID NO: 2826831 - RNA, 19 nt, Artificial Sequence
  Description of Artificial Sequence: Synthetic oligonucleotide
gggucaucaugggcugccc

SEQ ID NO: 2826832 - RNA, 19 nt, Artificial Sequence
  Description of Artificial Sequence: Synthetic oligonucleotide
cggcugaacccuucuauga

SEQ ID NO: 2826833 - RNA, 19 nt, Artificial Sequence
  Description of Artificial Sequence: Synthetic oligonucleotide
ccucuccacuucccuuccg

SEQ ID NO: 2826834 - RNA, 19 nt, Artificial Sequence
  Description of Artificial Sequence: Synthetic oligonucleotide
cugccccuccgugcuggcc

SEQ ID NO: 2826835 - RNA, 19 nt, Artificial Sequence
  Description of Artificial Sequence: Synthetic oligonucleotide
ccacuucccuuccggcuug

SEQ ID NO: 2826836 - RNA, 19 nt, Artificial Sequence
  Description of Artificial Sequence: Synthetic oligonucleotide
gcccaugcgggcagagccc

SEQ ID NO: 2826837 - RNA, 19 nt, Artificial Sequence
  Description of Artificial Sequence: Synthetic oligonucleotide
cuccccagggcaucaguuu

SEQ ID NO: 2826838 - RNA, 19 nt, Artificial Sequence
  Description of Artificial Sequence: Synthetic oligonucleotide
gcccaccucucucucugca

SEQ ID NO: 2826839 - RNA, 19 nt, Artificial Sequence
  Description of Artificial Sequence: Synthetic oligonucleotide
cuguguguccgacgccacu

SEQ ID NO: 2826840 - RNA, 19 nt, Artificial Sequence
  Description of Artificial Sequence: Synthetic oligonucleotide
caucaguuuagggcaugau

SEQ ID NO: 2826841 - RNA, 19 nt, Artificial Sequence
  Description of Artificial Sequence: Synthetic oligonucleotide
gcuggccuguguacccgcc

SEQ ID NO: 2826842 - RNA, 19 nt, Artificial Sequence
  Description of Artificial Sequence: Synthetic oligonucleotide
gcugcccaugcgggcagag

SEQ ID NO: 2826843 - RNA, 19 nt, Artificial Sequence
  Description of Artificial Sequence: Synthetic oligonucleotide
gccuugaugagcgcccugu

SEQ ID NO: 2826844 - RNA, 19 nt, Artificial Sequence
  Description of Artificial Sequence: Synthetic oligonucleotide
cuggcuccccauguugcua

SEQ ID NO: 2826845 - RNA, 19 nt, Artificial Sequence
  Description of Artificial Sequence: Synthetic oligonucleotide
cccugccccuccgugcugg

SEQ ID NO: 2826846 - RNA, 19 nt, Artificial Sequence
  Description of Artificial Sequence: Synthetic oligonucleotide
ccgaggccccagauacuac

SEQ ID NO: 2826847 - RNA, 19 nt, Artificial Sequence
  Description of Artificial Sequence: Synthetic oligonucleotide
gccuguguacccgccuuga

SEQ ID NO: 2826848 - RNA, 19 nt, Artificial Sequence
  Description of Artificial Sequence: Synthetic oligonucleotide
cuggccuguguacccgccu

SEQ ID NO: 2826849 - RNA, 19 nt, Artificial Sequence
  Description of Artificial Sequence: Synthetic oligonucleotide
ccgacgccacuguugaucu

SEQ ID NO: 2826850 - RNA, 19 nt, Artificial Sequence
  Description of Artificial Sequence: Synthetic oligonucleotide
gccggccuggcuccccaug

SEQ ID NO: 2826851 - RNA, 19 nt, Artificial Sequence
  Description of Artificial Sequence: Synthetic oligonucleotide
gccuugcccaccucucucu

SEQ ID NO: 2826852 - RNA, 19 nt, Artificial Sequence
  Description of Artificial Sequence: Synthetic oligonucleotide
gcgugguugacccguggau

SEQ ID NO: 2826853 - RNA, 19 nt, Artificial Sequence
  Description of Artificial Sequence: Synthetic oligonucleotide
cagcaggaccugagcgaaa

SEQ ID NO: 2826854 - RNA, 19 nt, Artificial Sequence
  Description of Artificial Sequence: Synthetic oligonucleotide
ugccggccuggcuccccau

SEQ ID NO: 2826855 - RNA, 19 nt, Artificial Sequence
  Description of Artificial Sequence: Synthetic oligonucleotide
gaccgaggccccagauacu

SEQ ID NO: 2826856 - RNA, 19 nt, Artificial Sequence
  Description of Artificial Sequence: Synthetic oligonucleotide
gccccuccgugcuggccug

SEQ ID NO: 2826857 - RNA, 19 nt, Artificial Sequence
  Description of Artificial Sequence: Synthetic oligonucleotide
cagcccgcggcugaacccu

SEQ ID NO: 2826858 - RNA, 19 nt, Artificial Sequence
  Description of Artificial Sequence: Synthetic oligonucleotide
gcaggaccugagcgaaacu

SEQ ID NO: 2826859 - RNA, 19 nt, Artificial Sequence
  Description of Artificial Sequence: Synthetic oligonucleotide
gggccuugcccaccucucu

SEQ ID NO: 2826860 - RNA, 19 nt, Artificial Sequence
  Description of Artificial Sequence: Synthetic oligonucleotide
gguugcggccccugccccu

SEQ ID NO: 2826861 - RNA, 19 nt, Artificial Sequence
  Description of Artificial Sequence: Synthetic oligonucleotide
cgaggccccagauacuacu

SEQ ID NO: 2826862 - RNA, 19 nt, Artificial Sequence
  Description of Artificial Sequence: Synthetic oligonucleotide
ccugccccuccgugcuggc

SEQ ID NO: 2826863 - RNA, 19 nt, Artificial Sequence
  Description of Artificial Sequence: Synthetic oligonucleotide
cggcgugguugacccgugg

SEQ ID NO: 2826864 - RNA, 19 nt, Artificial Sequence
  Description of Artificial Sequence: Synthetic oligonucleotide
gccccugccccuccgugcu

SEQ ID NO: 2826865 - RNA, 19 nt, Artificial Sequence
  Description of Artificial Sequence: Synthetic oligonucleotide
cccguggauuaacuucucu

SEQ ID NO: 2826866 - RNA, 19 nt, Artificial Sequence
  Description of Artificial Sequence: Synthetic oligonucleotide
gcaugauggcggcgauacu

SEQ ID NO: 2826867 - RNA, 19 nt, Artificial Sequence
  Description of Artificial Sequence: Synthetic oligonucleotide
ccaccucucucucugcauu

SEQ ID NO: 2826868 - RNA, 19 nt, Artificial Sequence
  Description of Artificial Sequence: Synthetic oligonucleotide
gcucagcccgcggcugaac

SEQ ID NO: 2826869 - RNA, 19 nt, Artificial Sequence
  Description of Artificial Sequence: Synthetic oligonucleotide
gcggcgugguugacccgug

SEQ ID NO: 2826870 - RNA, 19 nt, Artificial Sequence
  Description of Artificial Sequence: Synthetic oligonucleotide
cgcccuguccagcggcgug

SEQ ID NO: 2826871 - RNA, 19 nt, Artificial Sequence
  Description of Artificial Sequence: Synthetic oligonucleotide
guccagcggcgugguugac

SEQ ID NO: 2826872 - RNA, 19 nt, Artificial Sequence
  Description of Artificial Sequence: Synthetic oligonucleotide
cccauguugcuaaguccau

SEQ ID NO: 2826873 - RNA, 19 nt, Artificial Sequence
  Description of Artificial Sequence: Synthetic oligonucleotide
ccggcuugggugauuccau

SEQ ID NO: 2826874 - RNA, 19 nt, Artificial Sequence
  Description of Artificial Sequence: Synthetic oligonucleotide
gcuccccauguugcuaagu

SEQ ID NO: 2826875 - RNA, 19 nt, Artificial Sequence
  Description of Artificial Sequence: Synthetic oligonucleotide
gggcaugauggcggcgaua

SEQ ID NO: 2826876 - RNA, 19 nt, Artificial Sequence
  Description of Artificial Sequence: Synthetic oligonucleotide
cgcggcugaacccuucuau

SEQ ID NO: 2826877 - RNA, 19 nt, Artificial Sequence
  Description of Artificial Sequence: Synthetic oligonucleotide
guccgacgccacuguugau

SEQ ID NO: 2826878 - RNA, 19 nt, Artificial Sequence
  Description of Artificial Sequence: Synthetic oligonucleotide
cgccuugaugagcgcccug

SEQ ID NO: 2826879 - RNA, 19 nt, Artificial Sequence
  Description of Artificial Sequence: Synthetic oligonucleotide
gggcaucaguuuagggcau

SEQ ID NO: 2826880 - RNA, 19 nt, Artificial Sequence
  Description of Artificial Sequence: Synthetic oligonucleotide
cccuccgugcuggccugug

SEQ ID NO: 2826881 - RNA, 19 nt, Artificial Sequence
  Description of Artificial Sequence: Synthetic oligonucleotide
agcccgcggcugaacccuu

SEQ ID NO: 2826882 - RNA, 19 nt, Artificial Sequence
  Description of Artificial Sequence: Synthetic oligonucleotide
ccggccuggcuccccaugu

SEQ ID NO: 2826883 - RNA, 19 nt, Artificial Sequence
  Description of Artificial Sequence: Synthetic oligonucleotide
cgugguugacccguggauu

SEQ ID NO: 2826884 - RNA, 19 nt, Artificial Sequence
  Description of Artificial Sequence: Synthetic oligonucleotide
ccuucucgauggggucauc

SEQ ID NO: 2826885 - RNA, 19 nt, Artificial Sequence
  Description of Artificial Sequence: Synthetic oligonucleotide
ccuguguacccgccuugau

SEQ ID NO: 2826886 - RNA, 19 nt, Artificial Sequence
  Description of Artificial Sequence: Synthetic oligonucleotide
ggcugcccaugcgggcaga
